United States Patent Application Publication US 2014/0004565 A1 - sequence listing, part 83

SEQ ID NO: 2040805 - RNA, 19 nt, Artificial Sequence
  Description of Artificial Sequence: Synthetic oligonucleotide
cucggcgacguggugaugg

SEQ ID NO: 2040806 - RNA, 19 nt, Artificial Sequence
  Description of Artificial Sequence: Synthetic oligonucleotide
aacuugugugugugugugu

SEQ ID NO: 2040807 - RNA, 19 nt, Artificial Sequence
  Description of Artificial Sequence: Synthetic oligonucleotide
uaguugccuuaucuuaagu

SEQ ID NO: 2040808 - RNA, 19 nt, Artificial Sequence
  Description of Artificial Sequence: Synthetic oligonucleotide
aggcacauaaguggauaac

SEQ ID NO: 2040809 - RNA, 19 nt, Artificial Sequence
  Description of Artificial Sequence: Synthetic oligonucleotide
uaguaccacauuagcugca

SEQ ID NO: 2040810 - RNA, 19 nt, Artificial Sequence
  Description of Artificial Sequence: Synthetic oligonucleotide
guuagcauuuauacaugac

SEQ ID NO: 2040811 - RNA, 19 nt, Artificial Sequence
  Description of Artificial Sequence: Synthetic oligonucleotide
gagggaguggugugaauga

SEQ ID NO: 2040812 - RNA, 19 nt, Artificial Sequence
  Description of Artificial Sequence: Synthetic oligonucleotide
uggguucggaaucggauuu

SEQ ID NO: 2040813 - RNA, 19 nt, Artificial Sequence
  Description of Artificial Sequence: Synthetic oligonucleotide
cuaucuagccuuucaguaa

SEQ ID NO: 2040814 - RNA, 19 nt, Artificial Sequence
  Description of Artificial Sequence: Synthetic oligonucleotide
guaagugaugaggugugac

SEQ ID NO: 2040815 - RNA, 19 nt, Artificial Sequence
  Description of Artificial Sequence: Synthetic oligonucleotide
ggaguuaaguagcuuaaaa

SEQ ID NO: 2040816 - RNA, 19 nt, Artificial Sequence
  Description of Artificial Sequence: Synthetic oligonucleotide
uuaccagucucuuguuaau

SEQ ID NO: 2040817 - RNA, 19 nt, Artificial Sequence
  Description of Artificial Sequence: Synthetic oligonucleotide
caacuugugugugugugug

SEQ ID NO: 2040818 - RNA, 19 nt, Artificial Sequence
  Description of Artificial Sequence: Synthetic oligonucleotide
ggcuuuaaccguccacugg

SEQ ID NO: 2040819 - RNA, 19 nt, Artificial Sequence
  Description of Artificial Sequence: Synthetic oligonucleotide
uuacuguacaaaguacauu

SEQ ID NO: 2040820 - RNA, 19 nt, Artificial Sequence
  Description of Artificial Sequence: Synthetic oligonucleotide
cucuugauuuggaaauuga

SEQ ID NO: 2040821 - RNA, 19 nt, Artificial Sequence
  Description of Artificial Sequence: Synthetic oligonucleotide
cuacucuugauuuggaaau

SEQ ID NO: 2040822 - RNA, 19 nt, Artificial Sequence
  Description of Artificial Sequence: Synthetic oligonucleotide
uccuugaaugagggagugg

SEQ ID NO: 2040823 - RNA, 19 nt, Artificial Sequence
  Description of Artificial Sequence: Synthetic oligonucleotide
ugaauauaguuagcauuua

SEQ ID NO: 2040824 - RNA, 19 nt, Artificial Sequence
  Description of Artificial Sequence: Synthetic oligonucleotide
uguaagugaugagguguga

SEQ ID NO: 2040825 - RNA, 19 nt, Artificial Sequence
  Description of Artificial Sequence: Synthetic oligonucleotide
cacuacugggagauauaac

SEQ ID NO: 2040826 - RNA, 19 nt, Artificial Sequence
  Description of Artificial Sequence: Synthetic oligonucleotide
cuuucaguaacuaccccgu

SEQ ID NO: 2040827 - RNA, 19 nt, Artificial Sequence
  Description of Artificial Sequence: Synthetic oligonucleotide
guguguguguguguagugc

SEQ ID NO: 2040828 - RNA, 19 nt, Artificial Sequence
  Description of Artificial Sequence: Synthetic oligonucleotide
agaauggaguuaaguagcu

SEQ ID NO: 2040829 - RNA, 19 nt, Artificial Sequence
  Description of Artificial Sequence: Synthetic oligonucleotide
ugugugugugugugugugu

SEQ ID NO: 2040830 - RNA, 19 nt, Artificial Sequence
  Description of Artificial Sequence: Synthetic oligonucleotide
auguuaccuuuacuguaca

SEQ ID NO: 2040831 - RNA, 19 nt, Artificial Sequence
  Description of Artificial Sequence: Synthetic oligonucleotide
uugcgaccugaaucuuugg

SEQ ID NO: 2040832 - RNA, 19 nt, Artificial Sequence
  Description of Artificial Sequence: Synthetic oligonucleotide
ugaggugugacgggagcac

SEQ ID NO: 2040833 - RNA, 19 nt, Artificial Sequence
  Description of Artificial Sequence: Synthetic oligonucleotide
ccggaugggaauuguaagc

SEQ ID NO: 2040834 - RNA, 19 nt, Artificial Sequence
  Description of Artificial Sequence: Synthetic oligonucleotide
uggugugaaugaucugggu

SEQ ID NO: 2040835 - RNA, 19 nt, Artificial Sequence
  Description of Artificial Sequence: Synthetic oligonucleotide
gugugugugugugugugug

SEQ ID NO: 2040836 - RNA, 19 nt, Artificial Sequence
  Description of Artificial Sequence: Synthetic oligonucleotide
cuuaccgauaauguaugaa

SEQ ID NO: 2040837 - RNA, 19 nt, Artificial Sequence
  Description of Artificial Sequence: Synthetic oligonucleotide
ggcacgagaaguggguugg

SEQ ID NO: 2040838 - RNA, 19 nt, Artificial Sequence
  Description of Artificial Sequence: Synthetic oligonucleotide
acuaccccguagcucuuug

SEQ ID NO: 2040839 - RNA, 19 nt, Artificial Sequence
  Description of Artificial Sequence: Synthetic oligonucleotide
ucuagccuuucaguaacua

SEQ ID NO: 2040840 - RNA, 19 nt, Artificial Sequence
  Description of Artificial Sequence: Synthetic oligonucleotide
gaaugagggagugguguga

SEQ ID NO: 2040841 - RNA, 19 nt, Artificial Sequence
  Description of Artificial Sequence: Synthetic oligonucleotide
acugacauucauaguuaca

SEQ ID NO: 2040842 - RNA, 19 nt, Artificial Sequence
  Description of Artificial Sequence: Synthetic oligonucleotide
guacauuaugacaaauagu

SEQ ID NO: 2040843 - RNA, 19 nt, Artificial Sequence
  Description of Artificial Sequence: Synthetic oligonucleotide
agaaccauauuaaguugau

SEQ ID NO: 2040844 - RNA, 19 nt, Artificial Sequence
  Description of Artificial Sequence: Synthetic oligonucleotide
auguugccaggaagcauac

SEQ ID NO: 2040845 - RNA, 19 nt, Artificial Sequence
  Description of Artificial Sequence: Synthetic oligonucleotide
gcucuuugaguguauacaa

SEQ ID NO: 2040846 - RNA, 19 nt, Artificial Sequence
  Description of Artificial Sequence: Synthetic oligonucleotide
cuucugcgcccugugagag

SEQ ID NO: 2040847 - RNA, 19 nt, Artificial Sequence
  Description of Artificial Sequence: Synthetic oligonucleotide
caauauuucaggugugaau

SEQ ID NO: 2040848 - RNA, 19 nt, Artificial Sequence
  Description of Artificial Sequence: Synthetic oligonucleotide
ggaaucggauuuuguugag

SEQ ID NO: 2040849 - RNA, 19 nt, Artificial Sequence
  Description of Artificial Sequence: Synthetic oligonucleotide
auccuugaaugagggagug

SEQ ID NO: 2040850 - RNA, 19 nt, Artificial Sequence
  Description of Artificial Sequence: Synthetic oligonucleotide
aucuuaaguggaauuuaaa

SEQ ID NO: 2040851 - RNA, 19 nt, Artificial Sequence
  Description of Artificial Sequence: Synthetic oligonucleotide
ugacgggagcaccuuugaa

SEQ ID NO: 2040852 - RNA, 19 nt, Artificial Sequence
  Description of Artificial Sequence: Synthetic oligonucleotide
aucuacuucuuaaauccua

SEQ ID NO: 2040853 - RNA, 19 nt, Artificial Sequence
  Description of Artificial Sequence: Synthetic oligonucleotide
cuuaucuuaaguggaauuu

SEQ ID NO: 2040854 - RNA, 19 nt, Artificial Sequence
  Description of Artificial Sequence: Synthetic oligonucleotide
uccagcgucuguucagcau

SEQ ID NO: 2040855 - RNA, 19 nt, Artificial Sequence
  Description of Artificial Sequence: Synthetic oligonucleotide
gcacugaauauaguuagca

SEQ ID NO: 2040856 - RNA, 19 nt, Artificial Sequence
  Description of Artificial Sequence: Synthetic oligonucleotide
ggaagcauacagacuauga

SEQ ID NO: 2040857 - RNA, 19 nt, Artificial Sequence
  Description of Artificial Sequence: Synthetic oligonucleotide
accccguagcucuuugagu

SEQ ID NO: 2040858 - RNA, 19 nt, Artificial Sequence
  Description of Artificial Sequence: Synthetic oligonucleotide
ucugcgcccugugagaguu

SEQ ID NO: 2040859 - RNA, 19 nt, Artificial Sequence
  Description of Artificial Sequence: Synthetic oligonucleotide
aagucccggaugggaauug

SEQ ID NO: 2040860 - RNA, 19 nt, Artificial Sequence
  Description of Artificial Sequence: Synthetic oligonucleotide
cauacagacuaugaaugua

SEQ ID NO: 2040861 - RNA, 19 nt, Artificial Sequence
  Description of Artificial Sequence: Synthetic oligonucleotide
cucuuauaugagaaccaua

SEQ ID NO: 2040862 - RNA, 19 nt, Artificial Sequence
  Description of Artificial Sequence: Synthetic oligonucleotide
augaggugugacgggagca

SEQ ID NO: 2040863 - RNA, 19 nt, Artificial Sequence
  Description of Artificial Sequence: Synthetic oligonucleotide
accacauuagcugcauuuu

SEQ ID NO: 2040864 - RNA, 19 nt, Artificial Sequence
  Description of Artificial Sequence: Synthetic oligonucleotide
uugggagccuugcccauuu

SEQ ID NO: 2040865 - RNA, 19 nt, Artificial Sequence
  Description of Artificial Sequence: Synthetic oligonucleotide
guggcuuuaaccguccacu

SEQ ID NO: 2040866 - RNA, 19 nt, Artificial Sequence
  Description of Artificial Sequence: Synthetic oligonucleotide
uacucuugauuuggaaauu

SEQ ID NO: 2040867 - RNA, 19 nt, Artificial Sequence
  Description of Artificial Sequence: Synthetic oligonucleotide
guguguguguguagugcag

SEQ ID NO: 2040868 - RNA, 19 nt, Artificial Sequence
  Description of Artificial Sequence: Synthetic oligonucleotide
uaccagucucuuguuaaua

SEQ ID NO: 2040869 - RNA, 19 nt, Artificial Sequence
  Description of Artificial Sequence: Synthetic oligonucleotide
cacauuagcugcauuuuau

SEQ ID NO: 2040870 - RNA, 19 nt, Artificial Sequence
  Description of Artificial Sequence: Synthetic oligonucleotide
cuccgguccaucccucggc

SEQ ID NO: 2040871 - RNA, 19 nt, Artificial Sequence
  Description of Artificial Sequence: Synthetic oligonucleotide
cccggaugggaauuguaag

SEQ ID NO: 2040872 - RNA, 19 nt, Artificial Sequence
  Description of Artificial Sequence: Synthetic oligonucleotide
agucucuuguuaauauuua

SEQ ID NO: 2040873 - RNA, 19 nt, Artificial Sequence
  Description of Artificial Sequence: Synthetic oligonucleotide
gugcuuaccgauaauguau

SEQ ID NO: 2040874 - RNA, 19 nt, Artificial Sequence
  Description of Artificial Sequence: Synthetic oligonucleotide
ggauaacaacuugugugug

SEQ ID NO: 2040875 - RNA, 19 nt, Artificial Sequence
  Description of Artificial Sequence: Synthetic oligonucleotide
ggauuuuguugagccgugg

SEQ ID NO: 2040876 - RNA, 19 nt, Artificial Sequence
  Description of Artificial Sequence: Synthetic oligonucleotide
caggugugaauaaacuagu

SEQ ID NO: 2040877 - RNA, 19 nt, Artificial Sequence
  Description of Artificial Sequence: Synthetic oligonucleotide
guagugcagugcaggcacg

SEQ ID NO: 2040878 - RNA, 19 nt, Artificial Sequence
  Description of Artificial Sequence: Synthetic oligonucleotide
gcaccuuugaaaguuucca

SEQ ID NO: 2040879 - RNA, 19 nt, Artificial Sequence
  Description of Artificial Sequence: Synthetic oligonucleotide
ggaguggugugaaugaucu

SEQ ID NO: 2040880 - RNA, 19 nt, Artificial Sequence
  Description of Artificial Sequence: Synthetic oligonucleotide
augggaauuguaagcuuau

SEQ ID NO: 2040881 - RNA, 19 nt, Artificial Sequence
  Description of Artificial Sequence: Synthetic oligonucleotide
uguugagccguggcuuuaa

SEQ ID NO: 2040882 - RNA, 19 nt, Artificial Sequence
  Description of Artificial Sequence: Synthetic oligonucleotide
augacacauuuggauuucu

SEQ ID NO: 2040883 - RNA, 19 nt, Artificial Sequence
  Description of Artificial Sequence: Synthetic oligonucleotide
gugaaugaucuggguucgg

SEQ ID NO: 2040884 - RNA, 19 nt, Artificial Sequence
  Description of Artificial Sequence: Synthetic oligonucleotide
caaguguaccuggaagaca

SEQ ID NO: 2040885 - RNA, 19 nt, Artificial Sequence
  Description of Artificial Sequence: Synthetic oligonucleotide
cauccuugaaugagggagu

SEQ ID NO: 2040886 - RNA, 19 nt, Artificial Sequence
  Description of Artificial Sequence: Synthetic oligonucleotide
cacugaauauaguuagcau

SEQ ID NO: 2040887 - RNA, 19 nt, Artificial Sequence
  Description of Artificial Sequence: Synthetic oligonucleotide
ccagcgucuguucagcauc

SEQ ID NO: 2040888 - RNA, 19 nt, Artificial Sequence
  Description of Artificial Sequence: Synthetic oligonucleotide
gguucggaaucggauuuug

SEQ ID NO: 2040889 - RNA, 19 nt, Artificial Sequence
  Description of Artificial Sequence: Synthetic oligonucleotide
ggugugaaugaucuggguu

SEQ ID NO: 2040890 - RNA, 19 nt, Artificial Sequence
  Description of Artificial Sequence: Synthetic oligonucleotide
guugagccguggcuuuaac

SEQ ID NO: 2040891 - RNA, 19 nt, Artificial Sequence
  Description of Artificial Sequence: Synthetic oligonucleotide
gugacgggagcaccuuuga

SEQ ID NO: 2040892 - RNA, 19 nt, Artificial Sequence
  Description of Artificial Sequence: Synthetic oligonucleotide
ugggaauuguaagcuuauu

SEQ ID NO: 2040893 - RNA, 19 nt, Artificial Sequence
  Description of Artificial Sequence: Synthetic oligonucleotide
cuacugggagauauaacuu

SEQ ID NO: 2040894 - RNA, 19 nt, Artificial Sequence
  Description of Artificial Sequence: Synthetic oligonucleotide
aggugugaauaaacuagua

SEQ ID NO: 2040895 - RNA, 19 nt, Artificial Sequence
  Description of Artificial Sequence: Synthetic oligonucleotide
gggcaaacuaucuagccuu

SEQ ID NO: 2040896 - RNA, 19 nt, Artificial Sequence
  Description of Artificial Sequence: Synthetic oligonucleotide
uucugcgcccugugagagu

SEQ ID NO: 2040897 - RNA, 19 nt, Artificial Sequence
  Description of Artificial Sequence: Synthetic oligonucleotide
ggugaugcucagcuccauc

SEQ ID NO: 2040898 - RNA, 19 nt, Artificial Sequence
  Description of Artificial Sequence: Synthetic oligonucleotide
cuuauaugagaaccauauu

SEQ ID NO: 2040899 - RNA, 19 nt, Artificial Sequence
  Description of Artificial Sequence: Synthetic oligonucleotide
ggcgacguggugaugguga

SEQ ID NO: 2040900 - RNA, 19 nt, Artificial Sequence
  Description of Artificial Sequence: Synthetic oligonucleotide
ucggcgacguggugauggu

SEQ ID NO: 2040901 - RNA, 19 nt, Artificial Sequence
  Description of Artificial Sequence: Synthetic oligonucleotide
auucugcacugaauauagu

SEQ ID NO: 2040902 - RNA, 19 nt, Artificial Sequence
  Description of Artificial Sequence: Synthetic oligonucleotide
gugugugugugugugugua

SEQ ID NO: 2040903 - RNA, 19 nt, Artificial Sequence
  Description of Artificial Sequence: Synthetic oligonucleotide
ccaucccucggcgacgugg

SEQ ID NO: 2040904 - RNA, 19 nt, Artificial Sequence
  Description of Artificial Sequence: Synthetic oligonucleotide
agggaguggugugaaugau

SEQ ID NO: 2040905 - RNA, 19 nt, Artificial Sequence
  Description of Artificial Sequence: Synthetic oligonucleotide
agaaguggguugggagccu

SEQ ID NO: 2040906 - RNA, 19 nt, Artificial Sequence
  Description of Artificial Sequence: Synthetic oligonucleotide
aucuggguucggaaucgga

SEQ ID NO: 2040907 - RNA, 19 nt, Artificial Sequence
  Description of Artificial Sequence: Synthetic oligonucleotide
gcuuaccgauaauguauga

SEQ ID NO: 2040908 - RNA, 19 nt, Artificial Sequence
  Description of Artificial Sequence: Synthetic oligonucleotide
aucuagccuuucaguaacu

SEQ ID NO: 2040909 - RNA, 19 nt, Artificial Sequence
  Description of Artificial Sequence: Synthetic oligonucleotide
guguguguguguguguagu

SEQ ID NO: 2040910 - RNA, 19 nt, Artificial Sequence
  Description of Artificial Sequence: Synthetic oligonucleotide
uaacuaccccguagcucuu

SEQ ID NO: 2040911 - RNA, 19 nt, Artificial Sequence
  Description of Artificial Sequence: Synthetic oligonucleotide
guagcucuuugaguguaua

SEQ ID NO: 2040912 - RNA, 19 nt, Artificial Sequence
  Description of Artificial Sequence: Synthetic oligonucleotide
agucccggaugggaauugu

SEQ ID NO: 2040913 - RNA, 19 nt, Artificial Sequence
  Description of Artificial Sequence: Synthetic oligonucleotide
aacuaccccguagcucuuu

SEQ ID NO: 2040914 - RNA, 19 nt, Artificial Sequence
  Description of Artificial Sequence: Synthetic oligonucleotide
cagugcaggcacgagaagu

SEQ ID NO: 2040915 - RNA, 19 nt, Artificial Sequence
  Description of Artificial Sequence: Synthetic oligonucleotide
cuaccccguagcucuuuga

SEQ ID NO: 2040916 - RNA, 19 nt, Artificial Sequence
  Description of Artificial Sequence: Synthetic oligonucleotide
cacgagaaguggguuggga

SEQ ID NO: 2040917 - RNA, 19 nt, Artificial Sequence
  Description of Artificial Sequence: Synthetic oligonucleotide
gaaccauauuaaguugauu

SEQ ID NO: 2040918 - RNA, 19 nt, Artificial Sequence
  Description of Artificial Sequence: Synthetic oligonucleotide
cuugugugugugugugugu

SEQ ID NO: 2040919 - RNA, 19 nt, Artificial Sequence
  Description of Artificial Sequence: Synthetic oligonucleotide
ccuugaaugagggaguggu

SEQ ID NO: 2040920 - RNA, 19 nt, Artificial Sequence
  Description of Artificial Sequence: Synthetic oligonucleotide
cuuugcgaccugaaucuuu

SEQ ID NO: 2040921 - RNA, 19 nt, Artificial Sequence
  Description of Artificial Sequence: Synthetic oligonucleotide
cuggguucggaaucggauu

SEQ ID NO: 2040922 - RNA, 19 nt, Artificial Sequence
  Description of Artificial Sequence: Synthetic oligonucleotide
gaauggaguuaaguagcuu

SEQ ID NO: 2040923 - RNA, 19 nt, Artificial Sequence
  Description of Artificial Sequence: Synthetic oligonucleotide
caguaacuaccccguagcu

SEQ ID NO: 2040924 - RNA, 19 nt, Artificial Sequence
  Description of Artificial Sequence: Synthetic oligonucleotide
gucacuacugggagauaua

SEQ ID NO: 2040925 - RNA, 19 nt, Artificial Sequence
  Description of Artificial Sequence: Synthetic oligonucleotide
gcaaacugacauucauagu

SEQ ID NO: 2040926 - RNA, 19 nt, Artificial Sequence
  Description of Artificial Sequence: Synthetic oligonucleotide
uccaucccucggcgacgug

SEQ ID NO: 2040927 - RNA, 19 nt, Artificial Sequence
  Description of Artificial Sequence: Synthetic oligonucleotide
cguggcuuuaaccguccac

SEQ ID NO: 2040928 - RNA, 19 nt, Artificial Sequence
  Description of Artificial Sequence: Synthetic oligonucleotide
ccaauauuucaggugugaa

SEQ ID NO: 2040929 - RNA, 19 nt, Artificial Sequence
  Description of Artificial Sequence: Synthetic oligonucleotide
aucccucggcgacguggug

SEQ ID NO: 2040930 - RNA, 19 nt, Artificial Sequence
  Description of Artificial Sequence: Synthetic oligonucleotide
accguccacuggagcugcc

SEQ ID NO: 2040931 - RNA, 19 nt, Artificial Sequence
  Description of Artificial Sequence: Synthetic oligonucleotide
guucggaaucggauuuugu

SEQ ID NO: 2040932 - RNA, 19 nt, Artificial Sequence
  Description of Artificial Sequence: Synthetic oligonucleotide
caucccucggcgacguggu

SEQ ID NO: 2040933 - RNA, 19 nt, Artificial Sequence
  Description of Artificial Sequence: Synthetic oligonucleotide
cggauuuuguugagccgug

SEQ ID NO: 2040934 - RNA, 19 nt, Artificial Sequence
  Description of Artificial Sequence: Synthetic oligonucleotide
gggagcaccuuugaaaguu

SEQ ID NO: 2040935 - RNA, 19 nt, Artificial Sequence
  Description of Artificial Sequence: Synthetic oligonucleotide
ccuuaucuuaaguggaauu

SEQ ID NO: 2040936 - RNA, 19 nt, Artificial Sequence
  Description of Artificial Sequence: Synthetic oligonucleotide
cuacuucacagauccucuu

SEQ ID NO: 2040937 - RNA, 19 nt, Artificial Sequence
  Description of Artificial Sequence: Synthetic oligonucleotide
uugucacuacugggagaua

SEQ ID NO: 2040938 - RNA, 19 nt, Artificial Sequence
  Description of Artificial Sequence: Synthetic oligonucleotide
gcccugugagaguuuguaa

SEQ ID NO: 2040939 - RNA, 19 nt, Artificial Sequence
  Description of Artificial Sequence: Synthetic oligonucleotide
ggaugggaauuguaagcuu

SEQ ID NO: 2040940 - RNA, 19 nt, Artificial Sequence
  Description of Artificial Sequence: Synthetic oligonucleotide
gcacgagaaguggguuggg

SEQ ID NO: 2040941 - RNA, 19 nt, Artificial Sequence
  Description of Artificial Sequence: Synthetic oligonucleotide
gccguggcuuuaaccgucc

SEQ ID NO: 2040942 - RNA, 19 nt, Artificial Sequence
  Description of Artificial Sequence: Synthetic oligonucleotide
cgguccaucccucggcgac

SEQ ID NO: 2040943 - RNA, 19 nt, Artificial Sequence
  Description of Artificial Sequence: Synthetic oligonucleotide
gaaguggguugggagccuu

SEQ ID NO: 2040944 - RNA, 19 nt, Artificial Sequence
  Description of Artificial Sequence: Synthetic oligonucleotide
gcaggcacgagaagugggu

SEQ ID NO: 2040945 - RNA, 19 nt, Artificial Sequence
  Description of Artificial Sequence: Synthetic oligonucleotide
ccguccacuggagcugccc

SEQ ID NO: 2040946 - RNA, 19 nt, Artificial Sequence
  Description of Artificial Sequence: Synthetic oligonucleotide
cggaugggaauuguaagcu

SEQ ID NO: 2040947 - RNA, 19 nt, Artificial Sequence
  Description of Artificial Sequence: Synthetic oligonucleotide
gguugggagccuugcccau

SEQ ID NO: 2040948 - RNA, 19 nt, Artificial Sequence
  Description of Artificial Sequence: Synthetic oligonucleotide
cguccacuggagcugccca

SEQ ID NO: 2040949 - RNA, 19 nt, Artificial Sequence
  Description of Artificial Sequence: Synthetic oligonucleotide
guugggagccuugcccauu

SEQ ID NO: 2040950 - RNA, 19 nt, Artificial Sequence
  Description of Artificial Sequence: Synthetic oligonucleotide
ggagcaccuuugaaaguuu

SEQ ID NO: 2040951 - RNA, 19 nt, Artificial Sequence
  Description of Artificial Sequence: Synthetic oligonucleotide
caggcacgagaaguggguu

SEQ ID NO: 2040952 - RNA, 19 nt, Artificial Sequence
  Description of Artificial Sequence: Synthetic oligonucleotide
ccguagcucuuugagugua

SEQ ID NO: 2040953 - RNA, 19 nt, Artificial Sequence
  Description of Artificial Sequence: Synthetic oligonucleotide
gcgacguggugauggugau

SEQ ID NO: 2040954 - RNA, 19 nt, Artificial Sequence
  Description of Artificial Sequence: Synthetic oligonucleotide
cccguagcucuuugagugu

SEQ ID NO: 2040955 - RNA, 19 nt, Artificial Sequence
  Description of Artificial Sequence: Synthetic oligonucleotide
gcuuugccuccgguccauc

SEQ ID NO: 2040956 - RNA, 19 nt, Artificial Sequence
  Description of Artificial Sequence: Synthetic oligonucleotide
ccgguccaucccucggcga

SEQ ID NO: 2040957 - RNA, 19 nt, Artificial Sequence
  Description of Artificial Sequence: Synthetic oligonucleotide
cgcccugugagaguuugua

SEQ ID NO: 2040958 - RNA, 19 nt, Artificial Sequence
  Description of Artificial Sequence: Synthetic oligonucleotide
ccguggcuuuaaccgucca

SEQ ID NO: 2040959 - RNA, 19 nt, Artificial Sequence
  Description of Artificial Sequence: Synthetic oligonucleotide
ggguucggaaucggauuuu

SEQ ID NO: 2040960 - RNA, 19 nt, Artificial Sequence
  Description of Artificial Sequence: Synthetic oligonucleotide
gcuuugcgaccugaaucuu

SEQ ID NO: 2040961 - RNA, 19 nt, Artificial Sequence
  Description of Artificial Sequence: Synthetic oligonucleotide
ggcuuugccuccgguccau

SEQ ID NO: 2040962 - RNA, 19 nt, Artificial Sequence
  Description of Artificial Sequence: Synthetic oligonucleotide
ccucggcgacguggugaug

SEQ ID NO: 2040963 - RNA, 19 nt, Artificial Sequence
  Description of Artificial Sequence: Synthetic oligonucleotide
cugcgcccugugagaguuu

SEQ ID NO: 2040964 - RNA, 19 nt, Artificial Sequence
  Description of Artificial Sequence: Synthetic oligonucleotide
auuaucacgccucaaaacc

SEQ ID NO: 2040965 - RNA, 19 nt, Artificial Sequence
  Description of Artificial Sequence: Synthetic oligonucleotide
auuauuuacaguccuacac

SEQ ID NO: 2040966 - RNA, 19 nt, Artificial Sequence
  Description of Artificial Sequence: Synthetic oligonucleotide
aaauaaccuuuccauaugc

SEQ ID NO: 2040967 - RNA, 19 nt, Artificial Sequence
  Description of Artificial Sequence: Synthetic oligonucleotide
ucuacuuugaacaucagaa

SEQ ID NO: 2040968 - RNA, 19 nt, Artificial Sequence
  Description of Artificial Sequence: Synthetic oligonucleotide
aacagcacagcuaauaggc

SEQ ID NO: 2040969 - RNA, 19 nt, Artificial Sequence
  Description of Artificial Sequence: Synthetic oligonucleotide
acuuuaaguuuguagaggc

SEQ ID NO: 2040970 - RNA, 19 nt, Artificial Sequence
  Description of Artificial Sequence: Synthetic oligonucleotide
ucaacguuccuauugacag

SEQ ID NO: 2040971 - RNA, 19 nt, Artificial Sequence
  Description of Artificial Sequence: Synthetic oligonucleotide
aaucuugaaacuauucugg

SEQ ID NO: 2040972 - RNA, 19 nt, Artificial Sequence
  Description of Artificial Sequence: Synthetic oligonucleotide
aacaacuuaccaugcaagg

SEQ ID NO: 2040973 - RNA, 19 nt, Artificial Sequence
  Description of Artificial Sequence: Synthetic oligonucleotide
gaggcgauaaauacgaucg

SEQ ID NO: 2040974 - RNA, 19 nt, Artificial Sequence
  Description of Artificial Sequence: Synthetic oligonucleotide
uacuuugaacaucagaagc

SEQ ID NO: 2040975 - RNA, 19 nt, Artificial Sequence
  Description of Artificial Sequence: Synthetic oligonucleotide
uguagaggcgauaaauacg

SEQ ID NO: 2040976 - RNA, 19 nt, Artificial Sequence
  Description of Artificial Sequence: Synthetic oligonucleotide
agcucuaaggcuuagucgg

SEQ ID NO: 2040977 - RNA, 19 nt, Artificial Sequence
  Description of Artificial Sequence: Synthetic oligonucleotide
auaaccuuuccauaugcac

SEQ ID NO: 2040978 - RNA, 19 nt, Artificial Sequence
  Description of Artificial Sequence: Synthetic oligonucleotide
auacuugaacagcauagcc

SEQ ID NO: 2040979 - RNA, 19 nt, Artificial Sequence
  Description of Artificial Sequence: Synthetic oligonucleotide
ucugguaacgaccuccagg

SEQ ID NO: 2040980 - RNA, 19 nt, Artificial Sequence
  Description of Artificial Sequence: Synthetic oligonucleotide
ugaucuacuuugaacauca

SEQ ID NO: 2040981 - RNA, 19 nt, Artificial Sequence
  Description of Artificial Sequence: Synthetic oligonucleotide
uacgauauuguucaauaca

SEQ ID NO: 2040982 - RNA, 19 nt, Artificial Sequence
  Description of Artificial Sequence: Synthetic oligonucleotide
acaacuucggaucacaaca

SEQ ID NO: 2040983 - RNA, 19 nt, Artificial Sequence
  Description of Artificial Sequence: Synthetic oligonucleotide
acuauucuggucuucacag

SEQ ID NO: 2040984 - RNA, 19 nt, Artificial Sequence
  Description of Artificial Sequence: Synthetic oligonucleotide
ugauaaggaaugccaaggg

SEQ ID NO: 2040985 - RNA, 19 nt, Artificial Sequence
  Description of Artificial Sequence: Synthetic oligonucleotide
uauacagggauucugcuuc

SEQ ID NO: 2040986 - RNA, 19 nt, Artificial Sequence
  Description of Artificial Sequence: Synthetic oligonucleotide
caugccugaauuuuagugg

SEQ ID NO: 2040987 - RNA, 19 nt, Artificial Sequence
  Description of Artificial Sequence: Synthetic oligonucleotide
cagaauggcagacaaaugc

SEQ ID NO: 2040988 - RNA, 19 nt, Artificial Sequence
  Description of Artificial Sequence: Synthetic oligonucleotide
aacagcauagccaacaacu

SEQ ID NO: 2040989 - RNA, 19 nt, Artificial Sequence
  Description of Artificial Sequence: Synthetic oligonucleotide
caaaguggagauaaucugg

SEQ ID NO: 2040990 - RNA, 19 nt, Artificial Sequence
  Description of Artificial Sequence: Synthetic oligonucleotide
uucagcaauacuugaacag

SEQ ID NO: 2040991 - RNA, 19 nt, Artificial Sequence
  Description of Artificial Sequence: Synthetic oligonucleotide
aaagccuauacagggauuc

SEQ ID NO: 2040992 - RNA, 19 nt, Artificial Sequence
  Description of Artificial Sequence: Synthetic oligonucleotide
ucaaauaaccuuuccauau

SEQ ID NO: 2040993 - RNA, 19 nt, Artificial Sequence
  Description of Artificial Sequence: Synthetic oligonucleotide
uucaauacaccucuuuugu

SEQ ID NO: 2040994 - RNA, 19 nt, Artificial Sequence
  Description of Artificial Sequence: Synthetic oligonucleotide
uuauuugcugauaaggaau

SEQ ID NO: 2040995 - RNA, 19 nt, Artificial Sequence
  Description of Artificial Sequence: Synthetic oligonucleotide
uuacauugacaguaaaagc

SEQ ID NO: 2040996 - RNA, 19 nt, Artificial Sequence
  Description of Artificial Sequence: Synthetic oligonucleotide
aagaauagccucuccacca

SEQ ID NO: 2040997 - RNA, 19 nt, Artificial Sequence
  Description of Artificial Sequence: Synthetic oligonucleotide
acagcuaauaggcagcaag

SEQ ID NO: 2040998 - RNA, 19 nt, Artificial Sequence
  Description of Artificial Sequence: Synthetic oligonucleotide
augccugaauuuuaguggc

SEQ ID NO: 2040999 - RNA, 19 nt, Artificial Sequence
  Description of Artificial Sequence: Synthetic oligonucleotide
uuuaaguuuguagaggcga

SEQ ID NO: 2041000 - RNA, 19 nt, Artificial Sequence
  Description of Artificial Sequence: Synthetic oligonucleotide
aaaagcugcucuaaguauc

SEQ ID NO: 2041001 - RNA, 19 nt, Artificial Sequence
  Description of Artificial Sequence: Synthetic oligonucleotide
ggcauaauuauuuacaguc

SEQ ID NO: 2041002 - RNA, 19 nt, Artificial Sequence
  Description of Artificial Sequence: Synthetic oligonucleotide
uuuauuugcugauaaggaa

SEQ ID NO: 2041003 - RNA, 19 nt, Artificial Sequence
  Description of Artificial Sequence: Synthetic oligonucleotide
uaugcuugggaacuuuaag

SEQ ID NO: 2041004 - RNA, 19 nt, Artificial Sequence
  Description of Artificial Sequence: Synthetic oligonucleotide
ucgcacuuuucucagaaag

SEQ ID NO: 2041005 - RNA, 19 nt, Artificial Sequence
  Description of Artificial Sequence: Synthetic oligonucleotide
uuuuaugaucuuacgauau

SEQ ID NO: 2041006 - RNA, 19 nt, Artificial Sequence
  Description of Artificial Sequence: Synthetic oligonucleotide
caaagauuguagaaauugc

SEQ ID NO: 2041007 - RNA, 19 nt, Artificial Sequence
  Description of Artificial Sequence: Synthetic oligonucleotide
ucgauuacaacuucggauc

SEQ ID NO: 2041008 - RNA, 19 nt, Artificial Sequence
  Description of Artificial Sequence: Synthetic oligonucleotide
aaaugcucgcacuuuucuc

SEQ ID NO: 2041009 - RNA, 19 nt, Artificial Sequence
  Description of Artificial Sequence: Synthetic oligonucleotide
aaagcugcucuaaguaucc

SEQ ID NO: 2041010 - RNA, 19 nt, Artificial Sequence
  Description of Artificial Sequence: Synthetic oligonucleotide
aauacgaucgauaacuuuu

SEQ ID NO: 2041011 - RNA, 19 nt, Artificial Sequence
  Description of Artificial Sequence: Synthetic oligonucleotide
acgauauuguucaauacac

SEQ ID NO: 2041012 - RNA, 19 nt, Artificial Sequence
  Description of Artificial Sequence: Synthetic oligonucleotide
uucgauuacaacuucggau

SEQ ID NO: 2041013 - RNA, 19 nt, Artificial Sequence
  Description of Artificial Sequence: Synthetic oligonucleotide
uccauaugcacuuuaugcu

SEQ ID NO: 2041014 - RNA, 19 nt, Artificial Sequence
  Description of Artificial Sequence: Synthetic oligonucleotide
ugagguagucuucucauac

SEQ ID NO: 2041015 - RNA, 19 nt, Artificial Sequence
  Description of Artificial Sequence: Synthetic oligonucleotide
acuuugaacaucagaagcg

SEQ ID NO: 2041016 - RNA, 19 nt, Artificial Sequence
  Description of Artificial Sequence: Synthetic oligonucleotide
agaggcgauaaauacgauc

SEQ ID NO: 2041017 - RNA, 19 nt, Artificial Sequence
  Description of Artificial Sequence: Synthetic oligonucleotide
auuuuauacaaagucauau

SEQ ID NO: 2041018 - RNA, 19 nt, Artificial Sequence
  Description of Artificial Sequence: Synthetic oligonucleotide
uaugaucuuacgauauugu

SEQ ID NO: 2041019 - RNA, 19 nt, Artificial Sequence
  Description of Artificial Sequence: Synthetic oligonucleotide
aaugccaaggguauccauc

SEQ ID NO: 2041020 - RNA, 19 nt, Artificial Sequence
  Description of Artificial Sequence: Synthetic oligonucleotide
uccaugauuggcauaauua

SEQ ID NO: 2041021 - RNA, 19 nt, Artificial Sequence
  Description of Artificial Sequence: Synthetic oligonucleotide
ggaacuuuaaguuuguaga

SEQ ID NO: 2041022 - RNA, 19 nt, Artificial Sequence
  Description of Artificial Sequence: Synthetic oligonucleotide
uuaugaucuuacgauauug

SEQ ID NO: 2041023 - RNA, 19 nt, Artificial Sequence
  Description of Artificial Sequence: Synthetic oligonucleotide
uuaucacgccucaaaaccc

SEQ ID NO: 2041024 - RNA, 19 nt, Artificial Sequence
  Description of Artificial Sequence: Synthetic oligonucleotide
uccauuuauuugcugauaa

SEQ ID NO: 2041025 - RNA, 19 nt, Artificial Sequence
  Description of Artificial Sequence: Synthetic oligonucleotide
aacuauucuggucuucaca

SEQ ID NO: 2041026 - RNA, 19 nt, Artificial Sequence
  Description of Artificial Sequence: Synthetic oligonucleotide
aauagcuugcaaugaauuu

SEQ ID NO: 2041027 - RNA, 19 nt, Artificial Sequence
  Description of Artificial Sequence: Synthetic oligonucleotide
ucaucaacguuccuauuga

SEQ ID NO: 2041028 - RNA, 19 nt, Artificial Sequence
  Description of Artificial Sequence: Synthetic oligonucleotide
aguucuucuauagagcuug

SEQ ID NO: 2041029 - RNA, 19 nt, Artificial Sequence
  Description of Artificial Sequence: Synthetic oligonucleotide
uugcugauaaggaaugcca

SEQ ID NO: 2041030 - RNA, 19 nt, Artificial Sequence
  Description of Artificial Sequence: Synthetic oligonucleotide
uucucagaaagccugucac

SEQ ID NO: 2041031 - RNA, 19 nt, Artificial Sequence
  Description of Artificial Sequence: Synthetic oligonucleotide
ucuaaguauccaugauugg

SEQ ID NO: 2041032 - RNA, 19 nt, Artificial Sequence
  Description of Artificial Sequence: Synthetic oligonucleotide
uacaguccuacacugaaaa

SEQ ID NO: 2041033 - RNA, 19 nt, Artificial Sequence
  Description of Artificial Sequence: Synthetic oligonucleotide
ugacaguaaaagcugcucu

SEQ ID NO: 2041034 - RNA, 19 nt, Artificial Sequence
  Description of Artificial Sequence: Synthetic oligonucleotide
auagcuugcaaugaauuug

SEQ ID NO: 2041035 - RNA, 19 nt, Artificial Sequence
  Description of Artificial Sequence: Synthetic oligonucleotide
gaacacuucgauuacaacu

SEQ ID NO: 2041036 - RNA, 19 nt, Artificial Sequence
  Description of Artificial Sequence: Synthetic oligonucleotide
cugauaaggaaugccaagg

SEQ ID NO: 2041037 - RNA, 19 nt, Artificial Sequence
  Description of Artificial Sequence: Synthetic oligonucleotide
aguggagauaaucugguaa

SEQ ID NO: 2041038 - RNA, 19 nt, Artificial Sequence
  Description of Artificial Sequence: Synthetic oligonucleotide
auagccaacaacuuaccau

SEQ ID NO: 2041039 - RNA, 19 nt, Artificial Sequence
  Description of Artificial Sequence: Synthetic oligonucleotide
gauuggcauaauuauuuac

SEQ ID NO: 2041040 - RNA, 19 nt, Artificial Sequence
  Description of Artificial Sequence: Synthetic oligonucleotide
cuuuaaguuuguagaggcg

SEQ ID NO: 2041041 - RNA, 19 nt, Artificial Sequence
  Description of Artificial Sequence: Synthetic oligonucleotide
ucuucugcgcaggagaaag

SEQ ID NO: 2041042 - RNA, 19 nt, Artificial Sequence
  Description of Artificial Sequence: Synthetic oligonucleotide
uguucaauacaccucuuuu

SEQ ID NO: 2041043 - RNA, 19 nt, Artificial Sequence
  Description of Artificial Sequence: Synthetic oligonucleotide
ucuuccauauuaucacgcc

SEQ ID NO: 2041044 - RNA, 19 nt, Artificial Sequence
  Description of Artificial Sequence: Synthetic oligonucleotide
ccuauugacagcucuaagg

SEQ ID NO: 2041045 - RNA, 19 nt, Artificial Sequence
  Description of Artificial Sequence: Synthetic oligonucleotide
gaucgauaacuuuugaucu

SEQ ID NO: 2041046 - RNA, 19 nt, Artificial Sequence
  Description of Artificial Sequence: Synthetic oligonucleotide
cuugugaaaaugcucgcac

SEQ ID NO: 2041047 - RNA, 19 nt, Artificial Sequence
  Description of Artificial Sequence: Synthetic oligonucleotide
cucaucaacguuccuauug

SEQ ID NO: 2041048 - RNA, 19 nt, Artificial Sequence
  Description of Artificial Sequence: Synthetic oligonucleotide
acagggauucugcuucugc

SEQ ID NO: 2041049 - RNA, 19 nt, Artificial Sequence
  Description of Artificial Sequence: Synthetic oligonucleotide
aacuuaccaugcaaggaac

SEQ ID NO: 2041050 - RNA, 19 nt, Artificial Sequence
  Description of Artificial Sequence: Synthetic oligonucleotide
cucaguucuucuauagagc

SEQ ID NO: 2041051 - RNA, 19 nt, Artificial Sequence
  Description of Artificial Sequence: Synthetic oligonucleotide
uugccgacauucuugaacu

SEQ ID NO: 2041052 - RNA, 19 nt, Artificial Sequence
  Description of Artificial Sequence: Synthetic oligonucleotide
ucugcgcaggagaaagugg

SEQ ID NO: 2041053 - RNA, 19 nt, Artificial Sequence
  Description of Artificial Sequence: Synthetic oligonucleotide
augcuugggaacuuuaagu

SEQ ID NO: 2041054 - RNA, 19 nt, Artificial Sequence
  Description of Artificial Sequence: Synthetic oligonucleotide
uccagaauggcagacaaau

SEQ ID NO: 2041055 - RNA, 19 nt, Artificial Sequence
  Description of Artificial Sequence: Synthetic oligonucleotide
ucacaacaaagauuguaga

SEQ ID NO: 2041056 - RNA, 19 nt, Artificial Sequence
  Description of Artificial Sequence: Synthetic oligonucleotide
uugaauagcuugcaaugaa

SEQ ID NO: 2041057 - RNA, 19 nt, Artificial Sequence
  Description of Artificial Sequence: Synthetic oligonucleotide
cuaaggcuuagucggauag

SEQ ID NO: 2041058 - RNA, 19 nt, Artificial Sequence
  Description of Artificial Sequence: Synthetic oligonucleotide
auauuaucacgccucaaaa

SEQ ID NO: 2041059 - RNA, 19 nt, Artificial Sequence
  Description of Artificial Sequence: Synthetic oligonucleotide
uuugcuacguucagcaaua

SEQ ID NO: 2041060 - RNA, 19 nt, Artificial Sequence
  Description of Artificial Sequence: Synthetic oligonucleotide
auauuguucaauacaccuc

SEQ ID NO: 2041061 - RNA, 19 nt, Artificial Sequence
  Description of Artificial Sequence: Synthetic oligonucleotide
ucuauagagcuuguucucc

SEQ ID NO: 2041062 - RNA, 19 nt, Artificial Sequence
  Description of Artificial Sequence: Synthetic oligonucleotide
agaagcgcaaugcucuguc

SEQ ID NO: 2041063 - RNA, 19 nt, Artificial Sequence
  Description of Artificial Sequence: Synthetic oligonucleotide
uacacuugcaaaagcucca

SEQ ID NO: 2041064 - RNA, 19 nt, Artificial Sequence
  Description of Artificial Sequence: Synthetic oligonucleotide
caagaauagccucuccacc

SEQ ID NO: 2041065 - RNA, 19 nt, Artificial Sequence
  Description of Artificial Sequence: Synthetic oligonucleotide
ugugaaaaugcucgcacuu

SEQ ID NO: 2041066 - RNA, 19 nt, Artificial Sequence
  Description of Artificial Sequence: Synthetic oligonucleotide
uucggaucacaacaaagau

SEQ ID NO: 2041067 - RNA, 19 nt, Artificial Sequence
  Description of Artificial Sequence: Synthetic oligonucleotide
ugaauagcuugcaaugaau

SEQ ID NO: 2041068 - RNA, 19 nt, Artificial Sequence
  Description of Artificial Sequence: Synthetic oligonucleotide
aaaguggagauaaucuggu

SEQ ID NO: 2041069 - RNA, 19 nt, Artificial Sequence
  Description of Artificial Sequence: Synthetic oligonucleotide
aacacuucgauuacaacuu

SEQ ID NO: 2041070 - RNA, 19 nt, Artificial Sequence
  Description of Artificial Sequence: Synthetic oligonucleotide
cuuugaacaucagaagcgc

SEQ ID NO: 2041071 - RNA, 19 nt, Artificial Sequence
  Description of Artificial Sequence: Synthetic oligonucleotide
cuugcaaugaauuugugau

SEQ ID NO: 2041072 - RNA, 19 nt, Artificial Sequence
  Description of Artificial Sequence: Synthetic oligonucleotide
uuguaugucagcaggugau

SEQ ID NO: 2041073 - RNA, 19 nt, Artificial Sequence
  Description of Artificial Sequence: Synthetic oligonucleotide
aguucuugugaaaaugcuc

SEQ ID NO: 2041074 - RNA, 19 nt, Artificial Sequence
  Description of Artificial Sequence: Synthetic oligonucleotide
uuugaacaucagaagcgca

SEQ ID NO: 2041075 - RNA, 19 nt, Artificial Sequence
  Description of Artificial Sequence: Synthetic oligonucleotide
aaauacgaucgauaacuuu

SEQ ID NO: 2041076 - RNA, 19 nt, Artificial Sequence
  Description of Artificial Sequence: Synthetic oligonucleotide
uuacgauauuguucaauac

SEQ ID NO: 2041077 - RNA, 19 nt, Artificial Sequence
  Description of Artificial Sequence: Synthetic oligonucleotide
caacagcacagcuaauagg

SEQ ID NO: 2041078 - RNA, 19 nt, Artificial Sequence
  Description of Artificial Sequence: Synthetic oligonucleotide
uggagauaaucugguaacg

SEQ ID NO: 2041079 - RNA, 19 nt, Artificial Sequence
  Description of Artificial Sequence: Synthetic oligonucleotide
aaggcuuagucggauagcu

SEQ ID NO: 2041080 - RNA, 19 nt, Artificial Sequence
  Description of Artificial Sequence: Synthetic oligonucleotide
acaaagucauauucaaaau

SEQ ID NO: 2041081 - RNA, 19 nt, Artificial Sequence
  Description of Artificial Sequence: Synthetic oligonucleotide
guugccgacauucuugaac

SEQ ID NO: 2041082 - RNA, 19 nt, Artificial Sequence
  Description of Artificial Sequence: Synthetic oligonucleotide
cuacguucagcaauacuug

SEQ ID NO: 2041083 - RNA, 19 nt, Artificial Sequence
  Description of Artificial Sequence: Synthetic oligonucleotide
acuucgauuacaacuucgg

SEQ ID NO: 2041084 - RNA, 19 nt, Artificial Sequence
  Description of Artificial Sequence: Synthetic oligonucleotide
ucuugaaacuauucugguc

SEQ ID NO: 2041085 - RNA, 19 nt, Artificial Sequence
  Description of Artificial Sequence: Synthetic oligonucleotide
gcucaguucuucuauagag

SEQ ID NO: 2041086 - RNA, 19 nt, Artificial Sequence
  Description of Artificial Sequence: Synthetic oligonucleotide
cuaauaggcagcaaguucu

SEQ ID NO: 2041087 - RNA, 19 nt, Artificial Sequence
  Description of Artificial Sequence: Synthetic oligonucleotide
agacaaaugcuuguauguc

SEQ ID NO: 2041088 - RNA, 19 nt, Artificial Sequence
  Description of Artificial Sequence: Synthetic oligonucleotide
auuugcugauaaggaaugc

SEQ ID NO: 2041089 - RNA, 19 nt, Artificial Sequence
  Description of Artificial Sequence: Synthetic oligonucleotide
aucuacuuugaacaucaga

SEQ ID NO: 2041090 - RNA, 19 nt, Artificial Sequence
  Description of Artificial Sequence: Synthetic oligonucleotide
cauaugcacuuuaugcuug

SEQ ID NO: 2041091 - RNA, 19 nt, Artificial Sequence
  Description of Artificial Sequence: Synthetic oligonucleotide
cuucggaucacaacaaaga

SEQ ID NO: 2041092 - RNA, 19 nt, Artificial Sequence
  Description of Artificial Sequence: Synthetic oligonucleotide
uaucacgccucaaaaccca

SEQ ID NO: 2041093 - RNA, 19 nt, Artificial Sequence
  Description of Artificial Sequence: Synthetic oligonucleotide
guacacuugcaaaagcucc

SEQ ID NO: 2041094 - RNA, 19 nt, Artificial Sequence
  Description of Artificial Sequence: Synthetic oligonucleotide
gguaacgaccuccaggugc

SEQ ID NO: 2041095 - RNA, 19 nt, Artificial Sequence
  Description of Artificial Sequence: Synthetic oligonucleotide
guagaggcgauaaauacga

SEQ ID NO: 2041096 - RNA, 19 nt, Artificial Sequence
  Description of Artificial Sequence: Synthetic oligonucleotide
uccauauuaucacgccuca

SEQ ID NO: 2041097 - RNA, 19 nt, Artificial Sequence
  Description of Artificial Sequence: Synthetic oligonucleotide
guaaaagcugcucuaagua

SEQ ID NO: 2041098 - RNA, 19 nt, Artificial Sequence
  Description of Artificial Sequence: Synthetic oligonucleotide
uuugaucuacuuugaacau

SEQ ID NO: 2041099 - RNA, 19 nt, Artificial Sequence
  Description of Artificial Sequence: Synthetic oligonucleotide
cuucucucgguacacuugc

SEQ ID NO: 2041100 - RNA, 19 nt, Artificial Sequence
  Description of Artificial Sequence: Synthetic oligonucleotide
ugaaaaugcucgcacuuuu

SEQ ID NO: 2041101 - RNA, 19 nt, Artificial Sequence
  Description of Artificial Sequence: Synthetic oligonucleotide
cacuucgauuacaacuucg

SEQ ID NO: 2041102 - RNA, 19 nt, Artificial Sequence
  Description of Artificial Sequence: Synthetic oligonucleotide
ugcuugggaacuuuaaguu

SEQ ID NO: 2041103 - RNA, 19 nt, Artificial Sequence
  Description of Artificial Sequence: Synthetic oligonucleotide
cagcucuaaggcuuagucg

SEQ ID NO: 2041104 - RNA, 19 nt, Artificial Sequence
  Description of Artificial Sequence: Synthetic oligonucleotide
cuuacgauauuguucaaua

SEQ ID NO: 2041105 - RNA, 19 nt, Artificial Sequence
  Description of Artificial Sequence: Synthetic oligonucleotide
uacaacuucggaucacaac

SEQ ID NO: 2041106 - RNA, 19 nt, Artificial Sequence
  Description of Artificial Sequence: Synthetic oligonucleotide
ucucgguacacuugcaaaa

SEQ ID NO: 2041107 - RNA, 19 nt, Artificial Sequence
  Description of Artificial Sequence: Synthetic oligonucleotide
uuuaugaucuuacgauauu

SEQ ID NO: 2041108 - RNA, 19 nt, Artificial Sequence
  Description of Artificial Sequence: Synthetic oligonucleotide
ugcugauaaggaaugccaa

SEQ ID NO: 2041109 - RNA, 19 nt, Artificial Sequence
  Description of Artificial Sequence: Synthetic oligonucleotide
cugcgcaggagaaaguggc

SEQ ID NO: 2041110 - RNA, 19 nt, Artificial Sequence
  Description of Artificial Sequence: Synthetic oligonucleotide
aucaaauaaccuuuccaua

SEQ ID NO: 2041111 - RNA, 19 nt, Artificial Sequence
  Description of Artificial Sequence: Synthetic oligonucleotide
uuaugcuugggaacuuuaa

SEQ ID NO: 2041112 - RNA, 19 nt, Artificial Sequence
  Description of Artificial Sequence: Synthetic oligonucleotide
aaacugcugagguagucuu

SEQ ID NO: 2041113 - RNA, 19 nt, Artificial Sequence
  Description of Artificial Sequence: Synthetic oligonucleotide
agcgcaaugcucugucuuc

SEQ ID NO: 2041114 - RNA, 19 nt, Artificial Sequence
  Description of Artificial Sequence: Synthetic oligonucleotide
ucgauaacuuuugaucuac

SEQ ID NO: 2041115 - RNA, 19 nt, Artificial Sequence
  Description of Artificial Sequence: Synthetic oligonucleotide
augauuggcauaauuauuu

SEQ ID NO: 2041116 - RNA, 19 nt, Artificial Sequence
  Description of Artificial Sequence: Synthetic oligonucleotide
aucuugaaacuauucuggu

SEQ ID NO: 2041117 - RNA, 19 nt, Artificial Sequence
  Description of Artificial Sequence: Synthetic oligonucleotide
aucagaagcgcaaugcucu

SEQ ID NO: 2041118 - RNA, 19 nt, Artificial Sequence
  Description of Artificial Sequence: Synthetic oligonucleotide
uaaacugcugagguagucu

SEQ ID NO: 2041119 - RNA, 19 nt, Artificial Sequence
  Description of Artificial Sequence: Synthetic oligonucleotide
uucuugugaaaaugcucgc

SEQ ID NO: 2041120 - RNA, 19 nt, Artificial Sequence
  Description of Artificial Sequence: Synthetic oligonucleotide
aaguucuugugaaaaugcu

SEQ ID NO: 2041121 - RNA, 19 nt, Artificial Sequence
  Description of Artificial Sequence: Synthetic oligonucleotide
ucgguacacuugcaaaagc

SEQ ID NO: 2041122 - RNA, 19 nt, Artificial Sequence
  Description of Artificial Sequence: Synthetic oligonucleotide
auaaggaaugccaagggua

SEQ ID NO: 2041123 - RNA, 19 nt, Artificial Sequence
  Description of Artificial Sequence: Synthetic oligonucleotide
agcguguccacacaguuuu

SEQ ID NO: 2041124 - RNA, 19 nt, Artificial Sequence
  Description of Artificial Sequence: Synthetic oligonucleotide
uagucggauagcuuuaauu

SEQ ID NO: 2041125 - RNA, 19 nt, Artificial Sequence
  Description of Artificial Sequence: Synthetic oligonucleotide
cuucuauagagcuuguucu

SEQ ID NO: 2041126 - RNA, 19 nt, Artificial Sequence
  Description of Artificial Sequence: Synthetic oligonucleotide
uucaacagcacagcuaaua

SEQ ID NO: 2041127 - RNA, 19 nt, Artificial Sequence
  Description of Artificial Sequence: Synthetic oligonucleotide
uuuaugcuugggaacuuua

SEQ ID NO: 2041128 - RNA, 19 nt, Artificial Sequence
  Description of Artificial Sequence: Synthetic oligonucleotide
gcaaaguggagauaaucug

SEQ ID NO: 2041129 - RNA, 19 nt, Artificial Sequence
  Description of Artificial Sequence: Synthetic oligonucleotide
gaacaucagaagcgcaaug

SEQ ID NO: 2041130 - RNA, 19 nt, Artificial Sequence
  Description of Artificial Sequence: Synthetic oligonucleotide
caccaguugaauagcuugc

SEQ ID NO: 2041131 - RNA, 19 nt, Artificial Sequence
  Description of Artificial Sequence: Synthetic oligonucleotide
augccaaggguauccauca

SEQ ID NO: 2041132 - RNA, 19 nt, Artificial Sequence
  Description of Artificial Sequence: Synthetic oligonucleotide
uaaauacgaucgauaacuu

SEQ ID NO: 2041133 - RNA, 19 nt, Artificial Sequence
  Description of Artificial Sequence: Synthetic oligonucleotide
gauaaucugguaacgaccu

SEQ ID NO: 2041134 - RNA, 19 nt, Artificial Sequence
  Description of Artificial Sequence: Synthetic oligonucleotide
uacguucagcaauacuuga

SEQ ID NO: 2041135 - RNA, 19 nt, Artificial Sequence
  Description of Artificial Sequence: Synthetic oligonucleotide
ugcgcaggagaaaguggcg

SEQ ID NO: 2041136 - RNA, 19 nt, Artificial Sequence
  Description of Artificial Sequence: Synthetic oligonucleotide
auuacaacuucggaucaca

SEQ ID NO: 2041137 - RNA, 19 nt, Artificial Sequence
  Description of Artificial Sequence: Synthetic oligonucleotide
agaaagccugucaccaggc

SEQ ID NO: 2041138 - RNA, 19 nt, Artificial Sequence
  Description of Artificial Sequence: Synthetic oligonucleotide
acuucggaucacaacaaag

SEQ ID NO: 2041139 - RNA, 19 nt, Artificial Sequence
  Description of Artificial Sequence: Synthetic oligonucleotide
auaaucugguaacgaccuc

SEQ ID NO: 2041140 - RNA, 19 nt, Artificial Sequence
  Description of Artificial Sequence: Synthetic oligonucleotide
auaaacugcugagguaguc

SEQ ID NO: 2041141 - RNA, 19 nt, Artificial Sequence
  Description of Artificial Sequence: Synthetic oligonucleotide
caucagaagcgcaaugcuc

SEQ ID NO: 2041142 - RNA, 19 nt, Artificial Sequence
  Description of Artificial Sequence: Synthetic oligonucleotide
gcaaggaacacuucgauua

SEQ ID NO: 2041143 - RNA, 19 nt, Artificial Sequence
  Description of Artificial Sequence: Synthetic oligonucleotide
cuuaccaugcaaggaacac

SEQ ID NO: 2041144 - RNA, 19 nt, Artificial Sequence
  Description of Artificial Sequence: Synthetic oligonucleotide
cauaauuauuuacaguccu

SEQ ID NO: 2041145 - RNA, 19 nt, Artificial Sequence
  Description of Artificial Sequence: Synthetic oligonucleotide
augaucuuacgauauuguu

SEQ ID NO: 2041146 - RNA, 19 nt, Artificial Sequence
  Description of Artificial Sequence: Synthetic oligonucleotide
acaacuuaccaugcaagga

SEQ ID NO: 2041147 - RNA, 19 nt, Artificial Sequence
  Description of Artificial Sequence: Synthetic oligonucleotide
gauaaggaaugccaagggu

SEQ ID NO: 2041148 - RNA, 19 nt, Artificial Sequence
  Description of Artificial Sequence: Synthetic oligonucleotide
uuaccaugcaaggaacacu

SEQ ID NO: 2041149 - RNA, 19 nt, Artificial Sequence
  Description of Artificial Sequence: Synthetic oligonucleotide
cacaacaaagauuguagaa

SEQ ID NO: 2041150 - RNA, 19 nt, Artificial Sequence
  Description of Artificial Sequence: Synthetic oligonucleotide
acacuucgauuacaacuuc

SEQ ID NO: 2041151 - RNA, 19 nt, Artificial Sequence
  Description of Artificial Sequence: Synthetic oligonucleotide
aacuucggaucacaacaaa

SEQ ID NO: 2041152 - RNA, 19 nt, Artificial Sequence
  Description of Artificial Sequence: Synthetic oligonucleotide
acgaucgauaacuuuugau

SEQ ID NO: 2041153 - RNA, 19 nt, Artificial Sequence
  Description of Artificial Sequence: Synthetic oligonucleotide
guucucacagcaaagugga

SEQ ID NO: 2041154 - RNA, 19 nt, Artificial Sequence
  Description of Artificial Sequence: Synthetic oligonucleotide
ugauuggcauaauuauuua

SEQ ID NO: 2041155 - RNA, 19 nt, Artificial Sequence
  Description of Artificial Sequence: Synthetic oligonucleotide
caacuuaccaugcaaggaa

SEQ ID NO: 2041156 - RNA, 19 nt, Artificial Sequence
  Description of Artificial Sequence: Synthetic oligonucleotide
guauccaugauuggcauaa

SEQ ID NO: 2041157 - RNA, 19 nt, Artificial Sequence
  Description of Artificial Sequence: Synthetic oligonucleotide
uacgaucgauaacuuuuga

SEQ ID NO: 2041158 - RNA, 19 nt, Artificial Sequence
  Description of Artificial Sequence: Synthetic oligonucleotide
uaugucagcaggugaugaa

SEQ ID NO: 2041159 - RNA, 19 nt, Artificial Sequence
  Description of Artificial Sequence: Synthetic oligonucleotide
uguaugucagcaggugaug

SEQ ID NO: 2041160 - RNA, 19 nt, Artificial Sequence
  Description of Artificial Sequence: Synthetic oligonucleotide
uuacaacuucggaucacaa

SEQ ID NO: 2041161 - RNA, 19 nt, Artificial Sequence
  Description of Artificial Sequence: Synthetic oligonucleotide
acgcucaguucuucuauag

SEQ ID NO: 2041162 - RNA, 19 nt, Artificial Sequence
  Description of Artificial Sequence: Synthetic oligonucleotide
aagcgcaaugcucugucuu

SEQ ID NO: 2041163 - RNA, 19 nt, Artificial Sequence
  Description of Artificial Sequence: Synthetic oligonucleotide
ucucucgguacacuugcaa

SEQ ID NO: 2041164 - RNA, 19 nt, Artificial Sequence
  Description of Artificial Sequence: Synthetic oligonucleotide
ucuuacgauauuguucaau

SEQ ID NO: 2041165 - RNA, 19 nt, Artificial Sequence
  Description of Artificial Sequence: Synthetic oligonucleotide
caugcaaggaacacuucga

SEQ ID NO: 2041166 - RNA, 19 nt, Artificial Sequence
  Description of Artificial Sequence: Synthetic oligonucleotide
gcacuuuucucagaaagcc

SEQ ID NO: 2041167 - RNA, 19 nt, Artificial Sequence
  Description of Artificial Sequence: Synthetic oligonucleotide
aauuuuaguggcacugcua

SEQ ID NO: 2041168 - RNA, 19 nt, Artificial Sequence
  Description of Artificial Sequence: Synthetic oligonucleotide
caccaugccugaauuuuag

SEQ ID NO: 2041169 - RNA, 19 nt, Artificial Sequence
  Description of Artificial Sequence: Synthetic oligonucleotide
aacccacuguggcugaaau

SEQ ID NO: 2041170 - RNA, 19 nt, Artificial Sequence
  Description of Artificial Sequence: Synthetic oligonucleotide
agaaauugcuccacuuuca

SEQ ID NO: 2041171 - RNA, 19 nt, Artificial Sequence
  Description of Artificial Sequence: Synthetic oligonucleotide
uuacaguccuacacugaaa

SEQ ID NO: 2041172 - RNA, 19 nt, Artificial Sequence
  Description of Artificial Sequence: Synthetic oligonucleotide
uugaucuacuuugaacauc

SEQ ID NO: 2041173 - RNA, 19 nt, Artificial Sequence
  Description of Artificial Sequence: Synthetic oligonucleotide
ugcucuaaguauccaugau

SEQ ID NO: 2041174 - RNA, 19 nt, Artificial Sequence
  Description of Artificial Sequence: Synthetic oligonucleotide
cuuguaugucagcagguga

SEQ ID NO: 2041175 - RNA, 19 nt, Artificial Sequence
  Description of Artificial Sequence: Synthetic oligonucleotide
aaucugguaacgaccucca

SEQ ID NO: 2041176 - RNA, 19 nt, Artificial Sequence
  Description of Artificial Sequence: Synthetic oligonucleotide
cgaucgauaacuuuugauc

SEQ ID NO: 2041177 - RNA, 19 nt, Artificial Sequence
  Description of Artificial Sequence: Synthetic oligonucleotide
accaggcuucucucgguac

SEQ ID NO: 2041178 - RNA, 19 nt, Artificial Sequence
  Description of Artificial Sequence: Synthetic oligonucleotide
cacgccucaaaacccacug

SEQ ID NO: 2041179 - RNA, 19 nt, Artificial Sequence
  Description of Artificial Sequence: Synthetic oligonucleotide
aucauaaacugcugaggua

SEQ ID NO: 2041180 - RNA, 19 nt, Artificial Sequence
  Description of Artificial Sequence: Synthetic oligonucleotide
ugcuacguucagcaauacu

SEQ ID NO: 2041181 - RNA, 19 nt, Artificial Sequence
  Description of Artificial Sequence: Synthetic oligonucleotide
ugaacaucagaagcgcaau

SEQ ID NO: 2041182 - RNA, 19 nt, Artificial Sequence
  Description of Artificial Sequence: Synthetic oligonucleotide
ucaauacaccucuuuuguu

SEQ ID NO: 2041183 - RNA, 19 nt, Artificial Sequence
  Description of Artificial Sequence: Synthetic oligonucleotide
gcuaauaggcagcaaguuc

SEQ ID NO: 2041184 - RNA, 19 nt, Artificial Sequence
  Description of Artificial Sequence: Synthetic oligonucleotide
ucagaagcgcaaugcucug

SEQ ID NO: 2041185 - RNA, 19 nt, Artificial Sequence
  Description of Artificial Sequence: Synthetic oligonucleotide
cagcaauacuugaacagca

SEQ ID NO: 2041186 - RNA, 19 nt, Artificial Sequence
  Description of Artificial Sequence: Synthetic oligonucleotide
caucauaaacugcugaggu

SEQ ID NO: 2041187 - RNA, 19 nt, Artificial Sequence
  Description of Artificial Sequence: Synthetic oligonucleotide
auacgaucgauaacuuuug

SEQ ID NO: 2041188 - RNA, 19 nt, Artificial Sequence
  Description of Artificial Sequence: Synthetic oligonucleotide
cucgguacacuugcaaaag

SEQ ID NO: 2041189 - RNA, 19 nt, Artificial Sequence
  Description of Artificial Sequence: Synthetic oligonucleotide
ccaugccugaauuuuagug

SEQ ID NO: 2041190 - RNA, 19 nt, Artificial Sequence
  Description of Artificial Sequence: Synthetic oligonucleotide
aucaacguuccuauugaca

SEQ ID NO: 2041191 - RNA, 19 nt, Artificial Sequence
  Description of Artificial Sequence: Synthetic oligonucleotide
uaaggcuuagucggauagc

SEQ ID NO: 2041192 - RNA, 19 nt, Artificial Sequence
  Description of Artificial Sequence: Synthetic oligonucleotide
aguggcacugcuauugagu

SEQ ID NO: 2041193 - RNA, 19 nt, Artificial Sequence
  Description of Artificial Sequence: Synthetic oligonucleotide
aucgauaacuuuugaucua

SEQ ID NO: 2041194 - RNA, 19 nt, Artificial Sequence
  Description of Artificial Sequence: Synthetic oligonucleotide
uccaccaugccugaauuuu

SEQ ID NO: 2041195 - RNA, 19 nt, Artificial Sequence
  Description of Artificial Sequence: Synthetic oligonucleotide
augcaaggaacacuucgau

SEQ ID NO: 2041196 - RNA, 19 nt, Artificial Sequence
  Description of Artificial Sequence: Synthetic oligonucleotide
caacaaagauuguagaaau

SEQ ID NO: 2041197 - RNA, 19 nt, Artificial Sequence
  Description of Artificial Sequence: Synthetic oligonucleotide
gaaaaugcucgcacuuuuc

SEQ ID NO: 2041198 - RNA, 19 nt, Artificial Sequence
  Description of Artificial Sequence: Synthetic oligonucleotide
uuccuauugacagcucuaa

SEQ ID NO: 2041199 - RNA, 19 nt, Artificial Sequence
  Description of Artificial Sequence: Synthetic oligonucleotide
uucucacagcaaaguggag

SEQ ID NO: 2041200 - RNA, 19 nt, Artificial Sequence
  Description of Artificial Sequence: Synthetic oligonucleotide
uguaaagggaaagccuaua

SEQ ID NO: 2041201 - RNA, 19 nt, Artificial Sequence
  Description of Artificial Sequence: Synthetic oligonucleotide
aaguggagauaaucuggua

SEQ ID NO: 2041202 - RNA, 19 nt, Artificial Sequence
  Description of Artificial Sequence: Synthetic oligonucleotide
gauuacaacuucggaucac

SEQ ID NO: 2041203 - RNA, 19 nt, Artificial Sequence
  Description of Artificial Sequence: Synthetic oligonucleotide
gaagcgcacgcucaguucu

SEQ ID NO: 2041204 - RNA, 19 nt, Artificial Sequence
  Description of Artificial Sequence: Synthetic oligonucleotide
agaauagccucuccaccau

SEQ ID NO: 2041205 - RNA, 19 nt, Artificial Sequence
  Description of Artificial Sequence: Synthetic oligonucleotide
ccucaaaacccacuguggc

SEQ ID NO: 2041206 - RNA, 19 nt, Artificial Sequence
  Description of Artificial Sequence: Synthetic oligonucleotide
caucaacguuccuauugac

SEQ ID NO: 2041207 - RNA, 19 nt, Artificial Sequence
  Description of Artificial Sequence: Synthetic oligonucleotide
ucuaaggcuuagucggaua

SEQ ID NO: 2041208 - RNA, 19 nt, Artificial Sequence
  Description of Artificial Sequence: Synthetic oligonucleotide
uuagucggauagcuuuaau

SEQ ID NO: 2041209 - RNA, 19 nt, Artificial Sequence
  Description of Artificial Sequence: Synthetic oligonucleotide
ugccugaauuuuaguggca

SEQ ID NO: 2041210 - RNA, 19 nt, Artificial Sequence
  Description of Artificial Sequence: Synthetic oligonucleotide
guuuguagaggcgauaaau

SEQ ID NO: 2041211 - RNA, 19 nt, Artificial Sequence
  Description of Artificial Sequence: Synthetic oligonucleotide
cuucgauuacaacuucgga

SEQ ID NO: 2041212 - RNA, 19 nt, Artificial Sequence
  Description of Artificial Sequence: Synthetic oligonucleotide
auccaugauuggcauaauu

SEQ ID NO: 2041213 - RNA, 19 nt, Artificial Sequence
  Description of Artificial Sequence: Synthetic oligonucleotide
cauagccaacaacuuacca

SEQ ID NO: 2041214 - RNA, 19 nt, Artificial Sequence
  Description of Artificial Sequence: Synthetic oligonucleotide
auccaucaccaguugaaua

SEQ ID NO: 2041215 - RNA, 19 nt, Artificial Sequence
  Description of Artificial Sequence: Synthetic oligonucleotide
uggcguacugccuucugua

SEQ ID NO: 2041216 - RNA, 19 nt, Artificial Sequence
  Description of Artificial Sequence: Synthetic oligonucleotide
cugcuuaucaaauaaccuu

SEQ ID NO: 2041217 - RNA, 19 nt, Artificial Sequence
  Description of Artificial Sequence: Synthetic oligonucleotide
aguuuguagaggcgauaaa

SEQ ID NO: 2041218 - RNA, 19 nt, Artificial Sequence
  Description of Artificial Sequence: Synthetic oligonucleotide
agccuauacagggauucug

SEQ ID NO: 2041219 - RNA, 19 nt, Artificial Sequence
  Description of Artificial Sequence: Synthetic oligonucleotide
ucacgccucaaaacccacu

SEQ ID NO: 2041220 - RNA, 19 nt, Artificial Sequence
  Description of Artificial Sequence: Synthetic oligonucleotide
cugcucuaaguauccauga

SEQ ID NO: 2041221 - RNA, 19 nt, Artificial Sequence
  Description of Artificial Sequence: Synthetic oligonucleotide
caaggguauccaucaccag

SEQ ID NO: 2041222 - RNA, 19 nt, Artificial Sequence
  Description of Artificial Sequence: Synthetic oligonucleotide
guaucacugaggcagcccu

SEQ ID NO: 2041223 - RNA, 19 nt, Artificial Sequence
  Description of Artificial Sequence: Synthetic oligonucleotide
aagccuauacagggauucu

SEQ ID NO: 2041224 - RNA, 19 nt, Artificial Sequence
  Description of Artificial Sequence: Synthetic oligonucleotide
gaaaguggcguacugccuu

SEQ ID NO: 2041225 - RNA, 19 nt, Artificial Sequence
  Description of Artificial Sequence: Synthetic oligonucleotide
uaaguuuguagaggcgaua

SEQ ID NO: 2041226 - RNA, 19 nt, Artificial Sequence
  Description of Artificial Sequence: Synthetic oligonucleotide
uugcugguguaaagggaaa

SEQ ID NO: 2041227 - RNA, 19 nt, Artificial Sequence
  Description of Artificial Sequence: Synthetic oligonucleotide
uuuuaguggcacugcuauu

SEQ ID NO: 2041228 - RNA, 19 nt, Artificial Sequence
  Description of Artificial Sequence: Synthetic oligonucleotide
auacagggauucugcuucu

SEQ ID NO: 2041229 - RNA, 19 nt, Artificial Sequence
  Description of Artificial Sequence: Synthetic oligonucleotide
acuuaccaugcaaggaaca

SEQ ID NO: 2041230 - RNA, 19 nt, Artificial Sequence
  Description of Artificial Sequence: Synthetic oligonucleotide
guagaaauugcuccacuuu

SEQ ID NO: 2041231 - RNA, 19 nt, Artificial Sequence
  Description of Artificial Sequence: Synthetic oligonucleotide
aggcgauaaauacgaucga

SEQ ID NO: 2041232 - RNA, 19 nt, Artificial Sequence
  Description of Artificial Sequence: Synthetic oligonucleotide
aucugguaacgaccuccag

SEQ ID NO: 2041233 - RNA, 19 nt, Artificial Sequence
  Description of Artificial Sequence: Synthetic oligonucleotide
uacucugcuguugccgaca

SEQ ID NO: 2041234 - RNA, 19 nt, Artificial Sequence
  Description of Artificial Sequence: Synthetic oligonucleotide
guaugucagcaggugauga

SEQ ID NO: 2041235 - RNA, 19 nt, Artificial Sequence
  Description of Artificial Sequence: Synthetic oligonucleotide
aguauccaugauuggcaua

SEQ ID NO: 2041236 - RNA, 19 nt, Artificial Sequence
  Description of Artificial Sequence: Synthetic oligonucleotide
ugguaacgaccuccaggug

SEQ ID NO: 2041237 - RNA, 19 nt, Artificial Sequence
  Description of Artificial Sequence: Synthetic oligonucleotide
gcugcucuaaguauccaug

SEQ ID NO: 2041238 - RNA, 19 nt, Artificial Sequence
  Description of Artificial Sequence: Synthetic oligonucleotide
cuguugccgacauucuuga

SEQ ID NO: 2041239 - RNA, 19 nt, Artificial Sequence
  Description of Artificial Sequence: Synthetic oligonucleotide
cuuugcuacguucagcaau

SEQ ID NO: 2041240 - RNA, 19 nt, Artificial Sequence
  Description of Artificial Sequence: Synthetic oligonucleotide
gguacacuugcaaaagcuc

SEQ ID NO: 2041241 - RNA, 19 nt, Artificial Sequence
  Description of Artificial Sequence: Synthetic oligonucleotide
cagccauguucucacagca

SEQ ID NO: 2041242 - RNA, 19 nt, Artificial Sequence
  Description of Artificial Sequence: Synthetic oligonucleotide
ggagauaaucugguaacga

SEQ ID NO: 2041243 - RNA, 19 nt, Artificial Sequence
  Description of Artificial Sequence: Synthetic oligonucleotide
gcugguguaaagggaaagc

SEQ ID NO: 2041244 - RNA, 19 nt, Artificial Sequence
  Description of Artificial Sequence: Synthetic oligonucleotide
cucucgguacacuugcaaa

SEQ ID NO: 2041245 - RNA, 19 nt, Artificial Sequence
  Description of Artificial Sequence: Synthetic oligonucleotide
cgauauuguucaauacacc

SEQ ID NO: 2041246 - RNA, 19 nt, Artificial Sequence
  Description of Artificial Sequence: Synthetic oligonucleotide
cuauucuggucuucacaga

SEQ ID NO: 2041247 - RNA, 19 nt, Artificial Sequence
  Description of Artificial Sequence: Synthetic oligonucleotide
agcuaauaggcagcaaguu

SEQ ID NO: 2041248 - RNA, 19 nt, Artificial Sequence
  Description of Artificial Sequence: Synthetic oligonucleotide
ggaacacuucgauuacaac

SEQ ID NO: 2041249 - RNA, 19 nt, Artificial Sequence
  Description of Artificial Sequence: Synthetic oligonucleotide
caaugaauuugugauuucu

SEQ ID NO: 2041250 - RNA, 19 nt, Artificial Sequence
  Description of Artificial Sequence: Synthetic oligonucleotide
gccuauacagggauucugc

SEQ ID NO: 2041251 - RNA, 19 nt, Artificial Sequence
  Description of Artificial Sequence: Synthetic oligonucleotide
gccucaaaacccacugugg

SEQ ID NO: 2041252 - RNA, 19 nt, Artificial Sequence
  Description of Artificial Sequence: Synthetic oligonucleotide
uacugccuucuguaucacu

SEQ ID NO: 2041253 - RNA, 19 nt, Artificial Sequence
  Description of Artificial Sequence: Synthetic oligonucleotide
caacuucggaucacaacaa

SEQ ID NO: 2041254 - RNA, 19 nt, Artificial Sequence
  Description of Artificial Sequence: Synthetic oligonucleotide
aguggcguacugccuucug

SEQ ID NO: 2041255 - RNA, 19 nt, Artificial Sequence
  Description of Artificial Sequence: Synthetic oligonucleotide
cuuccauauuaucacgccu

SEQ ID NO: 2041256 - RNA, 19 nt, Artificial Sequence
  Description of Artificial Sequence: Synthetic oligonucleotide
gagguagucuucucauacu

SEQ ID NO: 2041257 - RNA, 19 nt, Artificial Sequence
  Description of Artificial Sequence: Synthetic oligonucleotide
caugauuggcauaauuauu

SEQ ID NO: 2041258 - RNA, 19 nt, Artificial Sequence
  Description of Artificial Sequence: Synthetic oligonucleotide
cucaaaacccacuguggcu

SEQ ID NO: 2041259 - RNA, 19 nt, Artificial Sequence
  Description of Artificial Sequence: Synthetic oligonucleotide
gugaugaagcgcacgcuca

SEQ ID NO: 2041260 - RNA, 19 nt, Artificial Sequence
  Description of Artificial Sequence: Synthetic oligonucleotide
gcuacguucagcaauacuu

SEQ ID NO: 2041261 - RNA, 19 nt, Artificial Sequence
  Description of Artificial Sequence: Synthetic oligonucleotide
uagaggcgauaaauacgau

SEQ ID NO: 2041262 - RNA, 19 nt, Artificial Sequence
  Description of Artificial Sequence: Synthetic oligonucleotide
cuacucugcuguugccgac

SEQ ID NO: 2041263 - RNA, 19 nt, Artificial Sequence
  Description of Artificial Sequence: Synthetic oligonucleotide
acgccucaaaacccacugu

SEQ ID NO: 2041264 - RNA, 19 nt, Artificial Sequence
  Description of Artificial Sequence: Synthetic oligonucleotide
aaacccacuguggcugaaa

SEQ ID NO: 2041265 - RNA, 19 nt, Artificial Sequence
  Description of Artificial Sequence: Synthetic oligonucleotide
cauguucucacagcaaagu

SEQ ID NO: 2041266 - RNA, 19 nt, Artificial Sequence
  Description of Artificial Sequence: Synthetic oligonucleotide
cagcuaauaggcagcaagu

SEQ ID NO: 2041267 - RNA, 19 nt, Artificial Sequence
  Description of Artificial Sequence: Synthetic oligonucleotide
uggcagacaaaugcuugua

SEQ ID NO: 2041268 - RNA, 19 nt, Artificial Sequence
  Description of Artificial Sequence: Synthetic oligonucleotide
acguucagcaauacuugaa

SEQ ID NO: 2041269 - RNA, 19 nt, Artificial Sequence
  Description of Artificial Sequence: Synthetic oligonucleotide
ugacagcucuaaggcuuag

SEQ ID NO: 2041270 - RNA, 19 nt, Artificial Sequence
  Description of Artificial Sequence: Synthetic oligonucleotide
gucggauagcuuuaauuuu

SEQ ID NO: 2041271 - RNA, 19 nt, Artificial Sequence
  Description of Artificial Sequence: Synthetic oligonucleotide
ccgacauucuugaacuuca

SEQ ID NO: 2041272 - RNA, 19 nt, Artificial Sequence
  Description of Artificial Sequence: Synthetic oligonucleotide
guaacgaccuccaggugcu

SEQ ID NO: 2041273 - RNA, 19 nt, Artificial Sequence
  Description of Artificial Sequence: Synthetic oligonucleotide
gcaaugcucugucuucaac

SEQ ID NO: 2041274 - RNA, 19 nt, Artificial Sequence
  Description of Artificial Sequence: Synthetic oligonucleotide
aaguggcguacugccuucu

SEQ ID NO: 2041275 - RNA, 19 nt, Artificial Sequence
  Description of Artificial Sequence: Synthetic oligonucleotide
uguugccgacauucuugaa

SEQ ID NO: 2041276 - RNA, 19 nt, Artificial Sequence
  Description of Artificial Sequence: Synthetic oligonucleotide
aggugaugaagcgcacgcu

SEQ ID NO: 2041277 - RNA, 19 nt, Artificial Sequence
  Description of Artificial Sequence: Synthetic oligonucleotide
agcgcacgcucaguucuuc

SEQ ID NO: 2041278 - RNA, 19 nt, Artificial Sequence
  Description of Artificial Sequence: Synthetic oligonucleotide
gaauggcagacaaaugcuu

SEQ ID NO: 2041279 - RNA, 19 nt, Artificial Sequence
  Description of Artificial Sequence: Synthetic oligonucleotide
ggcuuagucggauagcuuu

SEQ ID NO: 2041280 - RNA, 19 nt, Artificial Sequence
  Description of Artificial Sequence: Synthetic oligonucleotide
aucaccaguugaauagcuu

SEQ ID NO: 2041281 - RNA, 19 nt, Artificial Sequence
  Description of Artificial Sequence: Synthetic oligonucleotide
cuauacagggauucugcuu

SEQ ID NO: 2041282 - RNA, 19 nt, Artificial Sequence
  Description of Artificial Sequence: Synthetic oligonucleotide
cagggauucugcuucugcu

SEQ ID NO: 2041283 - RNA, 19 nt, Artificial Sequence
  Description of Artificial Sequence: Synthetic oligonucleotide
caucaccaguugaauagcu

SEQ ID NO: 2041284 - RNA, 19 nt, Artificial Sequence
  Description of Artificial Sequence: Synthetic oligonucleotide
cguacugccuucuguauca

SEQ ID NO: 2041285 - RNA, 19 nt, Artificial Sequence
  Description of Artificial Sequence: Synthetic oligonucleotide
gcgauaaauacgaucgaua

SEQ ID NO: 2041286 - RNA, 19 nt, Artificial Sequence
  Description of Artificial Sequence: Synthetic oligonucleotide
cuuagucggauagcuuuaa

SEQ ID NO: 2041287 - RNA, 19 nt, Artificial Sequence
  Description of Artificial Sequence: Synthetic oligonucleotide
cccuacucugcuguugccg

SEQ ID NO: 2041288 - RNA, 19 nt, Artificial Sequence
  Description of Artificial Sequence: Synthetic oligonucleotide
gcucgcacuuuucucagaa

SEQ ID NO: 2041289 - RNA, 19 nt, Artificial Sequence
  Description of Artificial Sequence: Synthetic oligonucleotide
gcauagccaacaacuuacc

SEQ ID NO: 2041290 - RNA, 19 nt, Artificial Sequence
  Description of Artificial Sequence: Synthetic oligonucleotide
acuuuaugcuugggaacuu

SEQ ID NO: 2041291 - RNA, 19 nt, Artificial Sequence
  Description of Artificial Sequence: Synthetic oligonucleotide
cgccucaaaacccacugug

SEQ ID NO: 2041292 - RNA, 19 nt, Artificial Sequence
  Description of Artificial Sequence: Synthetic oligonucleotide
ccaugauuggcauaauuau

SEQ ID NO: 2041293 - RNA, 19 nt, Artificial Sequence
  Description of Artificial Sequence: Synthetic oligonucleotide
gcugaaaucuugaaacuau

SEQ ID NO: 2041294 - RNA, 19 nt, Artificial Sequence
  Description of Artificial Sequence: Synthetic oligonucleotide
cauaaacugcugagguagu

SEQ ID NO: 2041295 - RNA, 19 nt, Artificial Sequence
  Description of Artificial Sequence: Synthetic oligonucleotide
gcucuaaguauccaugauu

SEQ ID NO: 2041296 - RNA, 19 nt, Artificial Sequence
  Description of Artificial Sequence: Synthetic oligonucleotide
uauccaugauuggcauaau

SEQ ID NO: 2041297 - RNA, 19 nt, Artificial Sequence
  Description of Artificial Sequence: Synthetic oligonucleotide
cugagguagucuucucaua

SEQ ID NO: 2041298 - RNA, 19 nt, Artificial Sequence
  Description of Artificial Sequence: Synthetic oligonucleotide
gccgacauucuugaacuuc

SEQ ID NO: 2041299 - RNA, 19 nt, Artificial Sequence
  Description of Artificial Sequence: Synthetic oligonucleotide
agcagcguguccacacagu

SEQ ID NO: 2041300 - RNA, 19 nt, Artificial Sequence
  Description of Artificial Sequence: Synthetic oligonucleotide
gcaggagaaaguggcguac

SEQ ID NO: 2041301 - RNA, 19 nt, Artificial Sequence
  Description of Artificial Sequence: Synthetic oligonucleotide
gcguacugccuucuguauc

SEQ ID NO: 2041302 - RNA, 19 nt, Artificial Sequence
  Description of Artificial Sequence: Synthetic oligonucleotide
ggcacugcuauugaguuuu

SEQ ID NO: 2041303 - RNA, 19 nt, Artificial Sequence
  Description of Artificial Sequence: Synthetic oligonucleotide
guggcguacugccuucugu

SEQ ID NO: 2041304 - RNA, 19 nt, Artificial Sequence
  Description of Artificial Sequence: Synthetic oligonucleotide
gaugaagcgcacgcucagu

SEQ ID NO: 2041305 - RNA, 19 nt, Artificial Sequence
  Description of Artificial Sequence: Synthetic oligonucleotide
cagcccuacucugcuguug

SEQ ID NO: 2041306 - RNA, 19 nt, Artificial Sequence
  Description of Artificial Sequence: Synthetic oligonucleotide
acguuccuauugacagcuc

SEQ ID NO: 2041307 - RNA, 19 nt, Artificial Sequence
  Description of Artificial Sequence: Synthetic oligonucleotide
cacgcucaguucuucuaua

SEQ ID NO: 2041308 - RNA, 19 nt, Artificial Sequence
  Description of Artificial Sequence: Synthetic oligonucleotide
cucgcacuuuucucagaaa

SEQ ID NO: 2041309 - RNA, 19 nt, Artificial Sequence
  Description of Artificial Sequence: Synthetic oligonucleotide
agccauguucucacagcaa

SEQ ID NO: 2041310 - RNA, 19 nt, Artificial Sequence
  Description of Artificial Sequence: Synthetic oligonucleotide
gugaaaaugcucgcacuuu

SEQ ID NO: 2041311 - RNA, 19 nt, Artificial Sequence
  Description of Artificial Sequence: Synthetic oligonucleotide
gcuugggaacuuuaaguuu

SEQ ID NO: 2041312 - RNA, 19 nt, Artificial Sequence
  Description of Artificial Sequence: Synthetic oligonucleotide
guacugccuucuguaucac

SEQ ID NO: 2041313 - RNA, 19 nt, Artificial Sequence
  Description of Artificial Sequence: Synthetic oligonucleotide
ccugucuucugcgcaggag

SEQ ID NO: 2041314 - RNA, 19 nt, Artificial Sequence
  Description of Artificial Sequence: Synthetic oligonucleotide
gaaagccuauacagggauu

SEQ ID NO: 2041315 - RNA, 19 nt, Artificial Sequence
  Description of Artificial Sequence: Synthetic oligonucleotide
ggcgauaaauacgaucgau

SEQ ID NO: 2041316 - RNA, 19 nt, Artificial Sequence
  Description of Artificial Sequence: Synthetic oligonucleotide
gacagcucuaaggcuuagu

SEQ ID NO: 2041317 - RNA, 19 nt, Artificial Sequence
  Description of Artificial Sequence: Synthetic oligonucleotide
ccauaugcacuuuaugcuu

SEQ ID NO: 2041318 - RNA, 19 nt, Artificial Sequence
  Description of Artificial Sequence: Synthetic oligonucleotide
aagcgcacgcucaguucuu

SEQ ID NO: 2041319 - RNA, 19 nt, Artificial Sequence
  Description of Artificial Sequence: Synthetic oligonucleotide
ccaguugaauagcuugcaa

SEQ ID NO: 2041320 - RNA, 19 nt, Artificial Sequence
  Description of Artificial Sequence: Synthetic oligonucleotide
ccuauacagggauucugcu

SEQ ID NO: 2041321 - RNA, 19 nt, Artificial Sequence
  Description of Artificial Sequence: Synthetic oligonucleotide
cuucugcgcaggagaaagu

SEQ ID NO: 2041322 - RNA, 19 nt, Artificial Sequence
  Description of Artificial Sequence: Synthetic oligonucleotide
aggcuuagucggauagcuu

SEQ ID NO: 2041323 - RNA, 19 nt, Artificial Sequence
  Description of Artificial Sequence: Synthetic oligonucleotide
gucuucugcgcaggagaaa

SEQ ID NO: 2041324 - RNA, 19 nt, Artificial Sequence
  Description of Artificial Sequence: Synthetic oligonucleotide
caccaggcuucucucggua

SEQ ID NO: 2041325 - RNA, 19 nt, Artificial Sequence
  Description of Artificial Sequence: Synthetic oligonucleotide
gcuuagucggauagcuuua

SEQ ID NO: 2041326 - RNA, 19 nt, Artificial Sequence
  Description of Artificial Sequence: Synthetic oligonucleotide
gcgcaaugcucugucuuca

SEQ ID NO: 2041327 - RNA, 19 nt, Artificial Sequence
  Description of Artificial Sequence: Synthetic oligonucleotide
gcucuaaggcuuagucgga

SEQ ID NO: 2041328 - RNA, 19 nt, Artificial Sequence
  Description of Artificial Sequence: Synthetic oligonucleotide
cucuaaggcuuagucggau

SEQ ID NO: 2041329 - RNA, 19 nt, Artificial Sequence
  Description of Artificial Sequence: Synthetic oligonucleotide
ccuuuccauaugcacuuua

SEQ ID NO: 2041330 - RNA, 19 nt, Artificial Sequence
  Description of Artificial Sequence: Synthetic oligonucleotide
cacagcuaauaggcagcaa

SEQ ID NO: 2041331 - RNA, 19 nt, Artificial Sequence
  Description of Artificial Sequence: Synthetic oligonucleotide
ccaccaugccugaauuuua

SEQ ID NO: 2041332 - RNA, 19 nt, Artificial Sequence
  Description of Artificial Sequence: Synthetic oligonucleotide
cuucaacagcacagcuaau

SEQ ID NO: 2041333 - RNA, 19 nt, Artificial Sequence
  Description of Artificial Sequence: Synthetic oligonucleotide
cagcguguccacacaguuu

SEQ ID NO: 2041334 - RNA, 19 nt, Artificial Sequence
  Description of Artificial Sequence: Synthetic oligonucleotide
ggcguacugccuucuguau

SEQ ID NO: 2041335 - RNA, 19 nt, Artificial Sequence
  Description of Artificial Sequence: Synthetic oligonucleotide
cagaagcgcaaugcucugu

SEQ ID NO: 2041336 - RNA, 19 nt, Artificial Sequence
  Description of Artificial Sequence: Synthetic oligonucleotide
uaacgaccuccaggugcuu

SEQ ID NO: 2041337 - RNA, 19 nt, Artificial Sequence
  Description of Artificial Sequence: Synthetic oligonucleotide
ccauauuaucacgccucaa

SEQ ID NO: 2041338 - RNA, 19 nt, Artificial Sequence
  Description of Artificial Sequence: Synthetic oligonucleotide
ggaucacaacaaagauugu

SEQ ID NO: 2041339 - RNA, 19 nt, Artificial Sequence
  Description of Artificial Sequence: Synthetic oligonucleotide
gcuccacuuucagccaugu

SEQ ID NO: 2041340 - RNA, 19 nt, Artificial Sequence
  Description of Artificial Sequence: Synthetic oligonucleotide
cgauaacuuuugaucuacu

SEQ ID NO: 2041341 - RNA, 19 nt, Artificial Sequence
  Description of Artificial Sequence: Synthetic oligonucleotide
cgcacgcucaguucuucua

SEQ ID NO: 2041342 - RNA, 19 nt, Artificial Sequence
  Description of Artificial Sequence: Synthetic oligonucleotide
gcgcacgcucaguucuucu

SEQ ID NO: 2041343 - RNA, 19 nt, Artificial Sequence
  Description of Artificial Sequence: Synthetic oligonucleotide
cgcaaugcucugucuucaa

SEQ ID NO: 2041344 - RNA, 19 nt, Artificial Sequence
  Description of Artificial Sequence: Synthetic oligonucleotide
gcagcccuacucugcuguu

SEQ ID NO: 2041345 - RNA, 19 nt, Artificial Sequence
  Description of Artificial Sequence: Synthetic oligonucleotide
ccacuguggcugaaaucuu

SEQ ID NO: 2041346 - RNA, 19 nt, Artificial Sequence
  Description of Artificial Sequence: Synthetic oligonucleotide
auuaauuuuaauuaacucc

SEQ ID NO: 2041347 - RNA, 19 nt, Artificial Sequence
  Description of Artificial Sequence: Synthetic oligonucleotide
aauuaauuuuaauuaacuc

SEQ ID NO: 2041348 - RNA, 19 nt, Artificial Sequence
  Description of Artificial Sequence: Synthetic oligonucleotide
aaugcuaagagaaagaaag

SEQ ID NO: 2041349 - RNA, 19 nt, Artificial Sequence
  Description of Artificial Sequence: Synthetic oligonucleotide
aaugaacacauuuccaugc

SEQ ID NO: 2041350 - RNA, 19 nt, Artificial Sequence
  Description of Artificial Sequence: Synthetic oligonucleotide
aaaggcaaaauuaaaacac

SEQ ID NO: 2041351 - RNA, 19 nt, Artificial Sequence
  Description of Artificial Sequence: Synthetic oligonucleotide
agugaaaugaaguucaaag

SEQ ID NO: 2041352 - RNA, 19 nt, Artificial Sequence
  Description of Artificial Sequence: Synthetic oligonucleotide
aauacacaugaacaaaagg

SEQ ID NO: 2041353 - RNA, 19 nt, Artificial Sequence
  Description of Artificial Sequence: Synthetic oligonucleotide
auacacaugaacaaaaggc

SEQ ID NO: 2041354 - RNA, 19 nt, Artificial Sequence
  Description of Artificial Sequence: Synthetic oligonucleotide
uuuucuauaacgauugcca

SEQ ID NO: 2041355 - RNA, 19 nt, Artificial Sequence
  Description of Artificial Sequence: Synthetic oligonucleotide
agagaaagaaagcagcagc

SEQ ID NO: 2041356 - RNA, 19 nt, Artificial Sequence
  Description of Artificial Sequence: Synthetic oligonucleotide
uaccuaaaagaaaauacgg

SEQ ID NO: 2041357 - RNA, 19 nt, Artificial Sequence
  Description of Artificial Sequence: Synthetic oligonucleotide
agagaaagggauuucaagg

SEQ ID NO: 2041358 - RNA, 19 nt, Artificial Sequence
  Description of Artificial Sequence: Synthetic oligonucleotide
aaauuaauccuguagguau

SEQ ID NO: 2041359 - RNA, 19 nt, Artificial Sequence
  Description of Artificial Sequence: Synthetic oligonucleotide
uaauuauacauguacacac

SEQ ID NO: 2041360 - RNA, 19 nt, Artificial Sequence
  Description of Artificial Sequence: Synthetic oligonucleotide
ugcaccucgacuuaugucg

SEQ ID NO: 2041361 - RNA, 19 nt, Artificial Sequence
  Description of Artificial Sequence: Synthetic oligonucleotide
acgauugccaguuuuauuc

SEQ ID NO: 2041362 - RNA, 19 nt, Artificial Sequence
  Description of Artificial Sequence: Synthetic oligonucleotide
ucuaauauggaaugaacac

SEQ ID NO: 2041363 - RNA, 19 nt, Artificial Sequence
  Description of Artificial Sequence: Synthetic oligonucleotide
ugaaggauggccuucaucu

SEQ ID NO: 2041364 - RNA, 19 nt, Artificial Sequence
  Description of Artificial Sequence: Synthetic oligonucleotide
aauuuuccuauauauguga

SEQ ID NO: 2041365 - RNA, 19 nt, Artificial Sequence
  Description of Artificial Sequence: Synthetic oligonucleotide
acuaccuaaaagaaaauac

SEQ ID NO: 2041366 - RNA, 19 nt, Artificial Sequence
  Description of Artificial Sequence: Synthetic oligonucleotide
guaauuaaaagugaaauga

SEQ ID NO: 2041367 - RNA, 19 nt, Artificial Sequence
  Description of Artificial Sequence: Synthetic oligonucleotide
aaagauacaucagagaaau

SEQ ID NO: 2041368 - RNA, 19 nt, Artificial Sequence
  Description of Artificial Sequence: Synthetic oligonucleotide
uuaauuaacucccacuuau

SEQ ID NO: 2041369 - RNA, 19 nt, Artificial Sequence
  Description of Artificial Sequence: Synthetic oligonucleotide
aaaagugaaaugaaguuca

SEQ ID NO: 2041370 - RNA, 19 nt, Artificial Sequence
  Description of Artificial Sequence: Synthetic oligonucleotide
ucuuaucacuucuucaggg

SEQ ID NO: 2041371 - RNA, 19 nt, Artificial Sequence
  Description of Artificial Sequence: Synthetic oligonucleotide
uuaauugucuaauauggaa

SEQ ID NO: 2041372 - RNA, 19 nt, Artificial Sequence
  Description of Artificial Sequence: Synthetic oligonucleotide
uucaucaagaguuuagugu

SEQ ID NO: 2041373 - RNA, 19 nt, Artificial Sequence
  Description of Artificial Sequence: Synthetic oligonucleotide
uccuauauaugugagcugg

SEQ ID NO: 2041374 - RNA, 19 nt, Artificial Sequence
  Description of Artificial Sequence: Synthetic oligonucleotide
ugagaugcugguaacaaca

SEQ ID NO: 2041375 - RNA, 19 nt, Artificial Sequence
  Description of Artificial Sequence: Synthetic oligonucleotide
aaauguggaaaauggguca

SEQ ID NO: 2041376 - RNA, 19 nt, Artificial Sequence
  Description of Artificial Sequence: Synthetic oligonucleotide
cuuugugagacacauauuc

SEQ ID NO: 2041377 - RNA, 19 nt, Artificial Sequence
  Description of Artificial Sequence: Synthetic oligonucleotide
acauaauuaggaauuuucc

SEQ ID NO: 2041378 - RNA, 19 nt, Artificial Sequence
  Description of Artificial Sequence: Synthetic oligonucleotide
uuuauugccucuacaagcu

SEQ ID NO: 2041379 - RNA, 19 nt, Artificial Sequence
  Description of Artificial Sequence: Synthetic oligonucleotide
uuuccuauauaugugagcu

SEQ ID NO: 2041380 - RNA, 19 nt, Artificial Sequence
  Description of Artificial Sequence: Synthetic oligonucleotide
uaugucgcgcccaaaagag

SEQ ID NO: 2041381 - RNA, 19 nt, Artificial Sequence
  Description of Artificial Sequence: Synthetic oligonucleotide
uguuaaacuuuccaacuga

SEQ ID NO: 2041382 - RNA, 19 nt, Artificial Sequence
  Description of Artificial Sequence: Synthetic oligonucleotide
uauauaugugagcugguac

SEQ ID NO: 2041383 - RNA, 19 nt, Artificial Sequence
  Description of Artificial Sequence: Synthetic oligonucleotide
ugggucaaaauccaaaauc

SEQ ID NO: 2041384 - RNA, 19 nt, Artificial Sequence
  Description of Artificial Sequence: Synthetic oligonucleotide
aagacuuuugcauguugag

SEQ ID NO: 2041385 - RNA, 19 nt, Artificial Sequence
  Description of Artificial Sequence: Synthetic oligonucleotide
aauacggccagguaauuaa

SEQ ID NO: 2041386 - RNA, 19 nt, Artificial Sequence
  Description of Artificial Sequence: Synthetic oligonucleotide
auaauuaggaauuuuccua

SEQ ID NO: 2041387 - RNA, 19 nt, Artificial Sequence
  Description of Artificial Sequence: Synthetic oligonucleotide
uaauugucuaauauggaau

SEQ ID NO: 2041388 - RNA, 19 nt, Artificial Sequence
  Description of Artificial Sequence: Synthetic oligonucleotide
ugagcugguacuaaauaug

SEQ ID NO: 2041389 - RNA, 19 nt, Artificial Sequence
  Description of Artificial Sequence: Synthetic oligonucleotide
accuaaaagaaaauacggc

SEQ ID NO: 2041390 - RNA, 19 nt, Artificial Sequence
  Description of Artificial Sequence: Synthetic oligonucleotide
uuaacucccacuuauuaaa

SEQ ID NO: 2041391 - RNA, 19 nt, Artificial Sequence
  Description of Artificial Sequence: Synthetic oligonucleotide
aaugggucaaaauccaaaa

SEQ ID NO: 2041392 - RNA, 19 nt, Artificial Sequence
  Description of Artificial Sequence: Synthetic oligonucleotide
ccuaaaagaaaauacggcc

SEQ ID NO: 2041393 - RNA, 19 nt, Artificial Sequence
  Description of Artificial Sequence: Synthetic oligonucleotide
aauccaaugagaugcuggu

SEQ ID NO: 2041394 - RNA, 19 nt, Artificial Sequence
  Description of Artificial Sequence: Synthetic oligonucleotide
ucaucgacuccucuuauca

SEQ ID NO: 2041395 - RNA, 19 nt, Artificial Sequence
  Description of Artificial Sequence: Synthetic oligonucleotide
ugcguauaauuauacaugu

SEQ ID NO: 2041396 - RNA, 19 nt, Artificial Sequence
  Description of Artificial Sequence: Synthetic oligonucleotide
augcauagaaguguuaaac

SEQ ID NO: 2041397 - RNA, 19 nt, Artificial Sequence
  Description of Artificial Sequence: Synthetic oligonucleotide
aauuaacucccacuuauua

SEQ ID NO: 2041398 - RNA, 19 nt, Artificial Sequence
  Description of Artificial Sequence: Synthetic oligonucleotide
gaguuuaguguuuuauugc

SEQ ID NO: 2041399 - RNA, 19 nt, Artificial Sequence
  Description of Artificial Sequence: Synthetic oligonucleotide
auauaugugagcugguacu

SEQ ID NO: 2041400 - RNA, 19 nt, Artificial Sequence
  Description of Artificial Sequence: Synthetic oligonucleotide
uuucuauaacgauugccag

SEQ ID NO: 2041401 - RNA, 19 nt, Artificial Sequence
  Description of Artificial Sequence: Synthetic oligonucleotide
cuugcuuugaauaaauuaa

SEQ ID NO: 2041402 - RNA, 19 nt, Artificial Sequence
  Description of Artificial Sequence: Synthetic oligonucleotide
ucuugcuuugaauaaauua

SEQ ID NO: 2041403 - RNA, 19 nt, Artificial Sequence
  Description of Artificial Sequence: Synthetic oligonucleotide
uaaaagugaaaugaaguuc

SEQ ID NO: 2041404 - RNA, 19 nt, Artificial Sequence
  Description of Artificial Sequence: Synthetic oligonucleotide
cacauaauuaggaauuuuc

SEQ ID NO: 2041405 - RNA, 19 nt, Artificial Sequence
  Description of Artificial Sequence: Synthetic oligonucleotide
gaaugaacacauuuccaug

SEQ ID NO: 2041406 - RNA, 19 nt, Artificial Sequence
  Description of Artificial Sequence: Synthetic oligonucleotide
aaauacacaugaacaaaag

SEQ ID NO: 2041407 - RNA, 19 nt, Artificial Sequence
  Description of Artificial Sequence: Synthetic oligonucleotide
cugguacuaaauaugcugc

SEQ ID NO: 2041408 - RNA, 19 nt, Artificial Sequence
  Description of Artificial Sequence: Synthetic oligonucleotide
ugcucuaaggcuuccaucu

SEQ ID NO: 2041409 - RNA, 19 nt, Artificial Sequence
  Description of Artificial Sequence: Synthetic oligonucleotide
ugaaguucaaagauacauc

SEQ ID NO: 2041410 - RNA, 19 nt, Artificial Sequence
  Description of Artificial Sequence: Synthetic oligonucleotide
gguaauuccagguuuacac

SEQ ID NO: 2041411 - RNA, 19 nt, Artificial Sequence
  Description of Artificial Sequence: Synthetic oligonucleotide
cauguugaguauuucuugc

SEQ ID NO: 2041412 - RNA, 19 nt, Artificial Sequence
  Description of Artificial Sequence: Synthetic oligonucleotide
cuaaaagaaaauacggcca

SEQ ID NO: 2041413 - RNA, 19 nt, Artificial Sequence
  Description of Artificial Sequence: Synthetic oligonucleotide
ugucuaauauggaaugaac

SEQ ID NO: 2041414 - RNA, 19 nt, Artificial Sequence
  Description of Artificial Sequence: Synthetic oligonucleotide
uuaugucgcgcccaaaaga

SEQ ID NO: 2041415 - RNA, 19 nt, Artificial Sequence
  Description of Artificial Sequence: Synthetic oligonucleotide
gguaauuaaaagugaaaug

SEQ ID NO: 2041416 - RNA, 19 nt, Artificial Sequence
  Description of Artificial Sequence: Synthetic oligonucleotide
aaaagaguccuggaaggag

SEQ ID NO: 2041417 - RNA, 19 nt, Artificial Sequence
  Description of Artificial Sequence: Synthetic oligonucleotide
uuuuccuauauaugugagc

SEQ ID NO: 2041418 - RNA, 19 nt, Artificial Sequence
  Description of Artificial Sequence: Synthetic oligonucleotide
uccauaucagagaaaggga

SEQ ID NO: 2041419 - RNA, 19 nt, Artificial Sequence
  Description of Artificial Sequence: Synthetic oligonucleotide
aauuaauccuguagguauc

SEQ ID NO: 2041420 - RNA, 19 nt, Artificial Sequence
  Description of Artificial Sequence: Synthetic oligonucleotide
ucuucuugcaccucgacuu

SEQ ID NO: 2041421 - RNA, 19 nt, Artificial Sequence
  Description of Artificial Sequence: Synthetic oligonucleotide
agauuuuccucucuucuug

SEQ ID NO: 2041422 - RNA, 19 nt, Artificial Sequence
  Description of Artificial Sequence: Synthetic oligonucleotide
uuuugaugcguauaauuau

SEQ ID NO: 2041423 - RNA, 19 nt, Artificial Sequence
  Description of Artificial Sequence: Synthetic oligonucleotide
uucaaggccugaaacacac

SEQ ID NO: 2041424 - RNA, 19 nt, Artificial Sequence
  Description of Artificial Sequence: Synthetic oligonucleotide
aguguuuuauugccucuac

SEQ ID NO: 2041425 - RNA, 19 nt, Artificial Sequence
  Description of Artificial Sequence: Synthetic oligonucleotide
auagaaguguuaaacuuuc

SEQ ID NO: 2041426 - RNA, 19 nt, Artificial Sequence
  Description of Artificial Sequence: Synthetic oligonucleotide
uacacacauaauuaggaau

SEQ ID NO: 2041427 - RNA, 19 nt, Artificial Sequence
  Description of Artificial Sequence: Synthetic oligonucleotide
ugucccuucguucucguca

SEQ ID NO: 2041428 - RNA, 19 nt, Artificial Sequence
  Description of Artificial Sequence: Synthetic oligonucleotide
auauggaaugaacacauuu

SEQ ID NO: 2041429 - RNA, 19 nt, Artificial Sequence
  Description of Artificial Sequence: Synthetic oligonucleotide
uguagguaucugaagauuu

SEQ ID NO: 2041430 - RNA, 19 nt, Artificial Sequence
  Description of Artificial Sequence: Synthetic oligonucleotide
agguaauuaaaagugaaau

SEQ ID NO: 2041431 - RNA, 19 nt, Artificial Sequence
  Description of Artificial Sequence: Synthetic oligonucleotide
uugaguauuucuugcuuug

SEQ ID NO: 2041432 - RNA, 19 nt, Artificial Sequence
  Description of Artificial Sequence: Synthetic oligonucleotide
uugaugcguauaauuauac

SEQ ID NO: 2041433 - RNA, 19 nt, Artificial Sequence
  Description of Artificial Sequence: Synthetic oligonucleotide
gaauuuuccuauauaugug

SEQ ID NO: 2041434 - RNA, 19 nt, Artificial Sequence
  Description of Artificial Sequence: Synthetic oligonucleotide
uuuaauuaacucccacuua

SEQ ID NO: 2041435 - RNA, 19 nt, Artificial Sequence
  Description of Artificial Sequence: Synthetic oligonucleotide
uccucuggcuagcaaaucc

SEQ ID NO: 2041436 - RNA, 19 nt, Artificial Sequence
  Description of Artificial Sequence: Synthetic oligonucleotide
gaugcguauaauuauacau

SEQ ID NO: 2041437 - RNA, 19 nt, Artificial Sequence
  Description of Artificial Sequence: Synthetic oligonucleotide
uaauccuguagguaucuga

SEQ ID NO: 2041438 - RNA, 19 nt, Artificial Sequence
  Description of Artificial Sequence: Synthetic oligonucleotide
aaauccagagguaauucca

SEQ ID NO: 2041439 - RNA, 19 nt, Artificial Sequence
  Description of Artificial Sequence: Synthetic oligonucleotide
ucuauaacgauugccaguu

SEQ ID NO: 2041440 - RNA, 19 nt, Artificial Sequence
  Description of Artificial Sequence: Synthetic oligonucleotide
gucacaagacuuuugcaug

SEQ ID NO: 2041441 - RNA, 19 nt, Artificial Sequence
  Description of Artificial Sequence: Synthetic oligonucleotide
uauaacgauugccaguuuu

SEQ ID NO: 2041442 - RNA, 19 nt, Artificial Sequence
  Description of Artificial Sequence: Synthetic oligonucleotide
uuuucaucaagaguuuagu

SEQ ID NO: 2041443 - RNA, 19 nt, Artificial Sequence
  Description of Artificial Sequence: Synthetic oligonucleotide
cucgucacaagacuuuugc

SEQ ID NO: 2041444 - RNA, 19 nt, Artificial Sequence
  Description of Artificial Sequence: Synthetic oligonucleotide
uauuccucuggcuagcaaa

SEQ ID NO: 2041445 - RNA, 19 nt, Artificial Sequence
  Description of Artificial Sequence: Synthetic oligonucleotide
caaggccugaaacacacag

SEQ ID NO: 2041446 - RNA, 19 nt, Artificial Sequence
  Description of Artificial Sequence: Synthetic oligonucleotide
ucgggaaugucuuugcuuc

SEQ ID NO: 2041447 - RNA, 19 nt, Artificial Sequence
  Description of Artificial Sequence: Synthetic oligonucleotide
uucuauaacgauugccagu

SEQ ID NO: 2041448 - RNA, 19 nt, Artificial Sequence
  Description of Artificial Sequence: Synthetic oligonucleotide
acaucagagaaaugcuaag

SEQ ID NO: 2041449 - RNA, 19 nt, Artificial Sequence
  Description of Artificial Sequence: Synthetic oligonucleotide
uggcuagcaaauccagagg

SEQ ID NO: 2041450 - RNA, 19 nt, Artificial Sequence
  Description of Artificial Sequence: Synthetic oligonucleotide
uucccuaagccuuuccagc

SEQ ID NO: 2041451 - RNA, 19 nt, Artificial Sequence
  Description of Artificial Sequence: Synthetic oligonucleotide
guauaauuauacauguaca

SEQ ID NO: 2041452 - RNA, 19 nt, Artificial Sequence
  Description of Artificial Sequence: Synthetic oligonucleotide
cguauaauuauacauguac

SEQ ID NO: 2041453 - RNA, 19 nt, Artificial Sequence
  Description of Artificial Sequence: Synthetic oligonucleotide
uaaauuaauccuguaggua

SEQ ID NO: 2041454 - RNA, 19 nt, Artificial Sequence
  Description of Artificial Sequence: Synthetic oligonucleotide
aauccagagguaauuccag

SEQ ID NO: 2041455 - RNA, 19 nt, Artificial Sequence
  Description of Artificial Sequence: Synthetic oligonucleotide
ugaugcguauaauuauaca

SEQ ID NO: 2041456 - RNA, 19 nt, Artificial Sequence
  Description of Artificial Sequence: Synthetic oligonucleotide
uugcauguugaguauuucu

SEQ ID NO: 2041457 - RNA, 19 nt, Artificial Sequence
  Description of Artificial Sequence: Synthetic oligonucleotide
acggccagguaauuaaaag

SEQ ID NO: 2041458 - RNA, 19 nt, Artificial Sequence
  Description of Artificial Sequence: Synthetic oligonucleotide
gaaaugcuaagagaaagaa

SEQ ID NO: 2041459 - RNA, 19 nt, Artificial Sequence
  Description of Artificial Sequence: Synthetic oligonucleotide
uucucuugcaggacugagc

SEQ ID NO: 2041460 - RNA, 19 nt, Artificial Sequence
  Description of Artificial Sequence: Synthetic oligonucleotide
aacuaccuaaaagaaaaua

SEQ ID NO: 2041461 - RNA, 19 nt, Artificial Sequence
  Description of Artificial Sequence: Synthetic oligonucleotide
cucuuaucacuucuucagg

SEQ ID NO: 2041462 - RNA, 19 nt, Artificial Sequence
  Description of Artificial Sequence: Synthetic oligonucleotide
aaagaaagcagcagccaga

SEQ ID NO: 2041463 - RNA, 19 nt, Artificial Sequence
  Description of Artificial Sequence: Synthetic oligonucleotide
uaauuccagguuuacacuu

SEQ ID NO: 2041464 - RNA, 19 nt, Artificial Sequence
  Description of Artificial Sequence: Synthetic oligonucleotide
ucaggguucagaugccuug

SEQ ID NO: 2041465 - RNA, 19 nt, Artificial Sequence
  Description of Artificial Sequence: Synthetic oligonucleotide
aaaugggucaaaauccaaa

SEQ ID NO: 2041466 - RNA, 19 nt, Artificial Sequence
  Description of Artificial Sequence: Synthetic oligonucleotide
aaguucaaagauacaucag

SEQ ID NO: 2041467 - RNA, 19 nt, Artificial Sequence
  Description of Artificial Sequence: Synthetic oligonucleotide
augcguauaauuauacaug

SEQ ID NO: 2041468 - RNA, 19 nt, Artificial Sequence
  Description of Artificial Sequence: Synthetic oligonucleotide
ucugcuucgggaaugucuu

SEQ ID NO: 2041469 - RNA, 19 nt, Artificial Sequence
  Description of Artificial Sequence: Synthetic oligonucleotide
gggucaaaauccaaaaucc

SEQ ID NO: 2041470 - RNA, 19 nt, Artificial Sequence
  Description of Artificial Sequence: Synthetic oligonucleotide
uccucuuaucacuucuuca

SEQ ID NO: 2041471 - RNA, 19 nt, Artificial Sequence
  Description of Artificial Sequence: Synthetic oligonucleotide
ugugagcugguacuaaaua

SEQ ID NO: 2041472 - RNA, 19 nt, Artificial Sequence
  Description of Artificial Sequence: Synthetic oligonucleotide
ugucgcgcccaaaagaguc

SEQ ID NO: 2041473 - RNA, 19 nt, Artificial Sequence
  Description of Artificial Sequence: Synthetic oligonucleotide
cuuaugucgcgcccaaaag

SEQ ID NO: 2041474 - RNA, 19 nt, Artificial Sequence
  Description of Artificial Sequence: Synthetic oligonucleotide
uuaucacuucuucaggguu

SEQ ID NO: 2041475 - RNA, 19 nt, Artificial Sequence
  Description of Artificial Sequence: Synthetic oligonucleotide
cuaauauggaaugaacaca

SEQ ID NO: 2041476 - RNA, 19 nt, Artificial Sequence
  Description of Artificial Sequence: Synthetic oligonucleotide
aucgacuccucuuaucacu

SEQ ID NO: 2041477 - RNA, 19 nt, Artificial Sequence
  Description of Artificial Sequence: Synthetic oligonucleotide
uguugaguauuucuugcuu

SEQ ID NO: 2041478 - RNA, 19 nt, Artificial Sequence
  Description of Artificial Sequence: Synthetic oligonucleotide
agaagccugaagauucccc

SEQ ID NO: 2041479 - RNA, 19 nt, Artificial Sequence
  Description of Artificial Sequence: Synthetic oligonucleotide
gaagauuuuccucucuucu

SEQ ID NO: 2041480 - RNA, 19 nt, Artificial Sequence
  Description of Artificial Sequence: Synthetic oligonucleotide
ugguaacaacaaaacuacc

SEQ ID NO: 2041481 - RNA, 19 nt, Artificial Sequence
  Description of Artificial Sequence: Synthetic oligonucleotide
caggguaaggucugcuucg

SEQ ID NO: 2041482 - RNA, 19 nt, Artificial Sequence
  Description of Artificial Sequence: Synthetic oligonucleotide
gucuaauauggaaugaaca

SEQ ID NO: 2041483 - RNA, 19 nt, Artificial Sequence
  Description of Artificial Sequence: Synthetic oligonucleotide
uuaguguuuuauugccucu

SEQ ID NO: 2041484 - RNA, 19 nt, Artificial Sequence
  Description of Artificial Sequence: Synthetic oligonucleotide
ugggguguaucuucugaag

SEQ ID NO: 2041485 - RNA, 19 nt, Artificial Sequence
  Description of Artificial Sequence: Synthetic oligonucleotide
acuuaugucgcgcccaaaa

SEQ ID NO: 2041486 - RNA, 19 nt, Artificial Sequence
  Description of Artificial Sequence: Synthetic oligonucleotide
aauuaggaauuuuccuaua

SEQ ID NO: 2041487 - RNA, 19 nt, Artificial Sequence
  Description of Artificial Sequence: Synthetic oligonucleotide
aagaaaauacggccaggua

SEQ ID NO: 2041488 - RNA, 19 nt, Artificial Sequence
  Description of Artificial Sequence: Synthetic oligonucleotide
cauaauuaggaauuuuccu

SEQ ID NO: 2041489 - RNA, 19 nt, Artificial Sequence
  Description of Artificial Sequence: Synthetic oligonucleotide
acaagcugguuacaaauua

SEQ ID NO: 2041490 - RNA, 19 nt, Artificial Sequence
  Description of Artificial Sequence: Synthetic oligonucleotide
uuuuauuccucuggcuagc

SEQ ID NO: 2041491 - RNA, 19 nt, Artificial Sequence
  Description of Artificial Sequence: Synthetic oligonucleotide
uugucuaauauggaaugaa

SEQ ID NO: 2041492 - RNA, 19 nt, Artificial Sequence
  Description of Artificial Sequence: Synthetic oligonucleotide
gcuaagagaaagaaagcag

SEQ ID NO: 2041493 - RNA, 19 nt, Artificial Sequence
  Description of Artificial Sequence: Synthetic oligonucleotide
ucuuacucuucugaucucu

SEQ ID NO: 2041494 - RNA, 19 nt, Artificial Sequence
  Description of Artificial Sequence: Synthetic oligonucleotide
uaugugagcugguacuaaa

SEQ ID NO: 2041495 - RNA, 19 nt, Artificial Sequence
  Description of Artificial Sequence: Synthetic oligonucleotide
ucuggcuagcaaauccaga

SEQ ID NO: 2041496 - RNA, 19 nt, Artificial Sequence
  Description of Artificial Sequence: Synthetic oligonucleotide
agcuacucuucucuugcag

SEQ ID NO: 2041497 - RNA, 19 nt, Artificial Sequence
  Description of Artificial Sequence: Synthetic oligonucleotide
ucguucucgucacaagacu

SEQ ID NO: 2041498 - RNA, 19 nt, Artificial Sequence
  Description of Artificial Sequence: Synthetic oligonucleotide
uuauugccucuacaagcug

SEQ ID NO: 2041499 - RNA, 19 nt, Artificial Sequence
  Description of Artificial Sequence: Synthetic oligonucleotide
ugaacacauuuccaugcau

SEQ ID NO: 2041500 - RNA, 19 nt, Artificial Sequence
  Description of Artificial Sequence: Synthetic oligonucleotide
acacacauaauuaggaauu

SEQ ID NO: 2041501 - RNA, 19 nt, Artificial Sequence
  Description of Artificial Sequence: Synthetic oligonucleotide
ggauuucaaggccugaaac

SEQ ID NO: 2041502 - RNA, 19 nt, Artificial Sequence
  Description of Artificial Sequence: Synthetic oligonucleotide
uuugcuuccaaugcaucau

SEQ ID NO: 2041503 - RNA, 19 nt, Artificial Sequence
  Description of Artificial Sequence: Synthetic oligonucleotide
aacgauugccaguuuuauu

SEQ ID NO: 2041504 - RNA, 19 nt, Artificial Sequence
  Description of Artificial Sequence: Synthetic oligonucleotide
ugccucuacaagcugguua

SEQ ID NO: 2041505 - RNA, 19 nt, Artificial Sequence
  Description of Artificial Sequence: Synthetic oligonucleotide
uuccuauauaugugagcug

SEQ ID NO: 2041506 - RNA, 19 nt, Artificial Sequence
  Description of Artificial Sequence: Synthetic oligonucleotide
auugccaguuuuauuccuc

SEQ ID NO: 2041507 - RNA, 19 nt, Artificial Sequence
  Description of Artificial Sequence: Synthetic oligonucleotide
aucagagaaagggauuuca

SEQ ID NO: 2041508 - RNA, 19 nt, Artificial Sequence
  Description of Artificial Sequence: Synthetic oligonucleotide
uaacucccacuuauuaaaa

SEQ ID NO: 2041509 - RNA, 19 nt, Artificial Sequence
  Description of Artificial Sequence: Synthetic oligonucleotide
gauacaucagagaaaugcu

SEQ ID NO: 2041510 - RNA, 19 nt, Artificial Sequence
  Description of Artificial Sequence: Synthetic oligonucleotide
uacuaaauaugcugcuuuu

SEQ ID NO: 2041511 - RNA, 19 nt, Artificial Sequence
  Description of Artificial Sequence: Synthetic oligonucleotide
ggccagguaauuaaaagug

SEQ ID NO: 2041512 - RNA, 19 nt, Artificial Sequence
  Description of Artificial Sequence: Synthetic oligonucleotide
uacaagcugguuacaaauu

SEQ ID NO: 2041513 - RNA, 19 nt, Artificial Sequence
  Description of Artificial Sequence: Synthetic oligonucleotide
gucaaaauccaaaauccaa

SEQ ID NO: 2041514 - RNA, 19 nt, Artificial Sequence
  Description of Artificial Sequence: Synthetic oligonucleotide
auugucuaauauggaauga

SEQ ID NO: 2041515 - RNA, 19 nt, Artificial Sequence
  Description of Artificial Sequence: Synthetic oligonucleotide
auuaauccuguagguaucu

SEQ ID NO: 2041516 - RNA, 19 nt, Artificial Sequence
  Description of Artificial Sequence: Synthetic oligonucleotide
ucccuaagccuuuccagcu

SEQ ID NO: 2041517 - RNA, 19 nt, Artificial Sequence
  Description of Artificial Sequence: Synthetic oligonucleotide
aagugaaaugaaguucaaa

SEQ ID NO: 2041518 - RNA, 19 nt, Artificial Sequence
  Description of Artificial Sequence: Synthetic oligonucleotide
ucgucacaagacuuuugca

SEQ ID NO: 2041519 - RNA, 19 nt, Artificial Sequence
  Description of Artificial Sequence: Synthetic oligonucleotide
ugugggaguguccucuuua

SEQ ID NO: 2041520 - RNA, 19 nt, Artificial Sequence
  Description of Artificial Sequence: Synthetic oligonucleotide
ucucgucacaagacuuuug

SEQ ID NO: 2041521 - RNA, 19 nt, Artificial Sequence
  Description of Artificial Sequence: Synthetic oligonucleotide
ucuuuagguuccgggcugg

SEQ ID NO: 2041522 - RNA, 19 nt, Artificial Sequence
  Description of Artificial Sequence: Synthetic oligonucleotide
cccaaaagaguccuggaag

SEQ ID NO: 2041523 - RNA, 19 nt, Artificial Sequence
  Description of Artificial Sequence: Synthetic oligonucleotide
accucgacuuaugucgcgc

SEQ ID NO: 2041524 - RNA, 19 nt, Artificial Sequence
  Description of Artificial Sequence: Synthetic oligonucleotide
uuccaugcauagaaguguu

SEQ ID NO: 2041525 - RNA, 19 nt, Artificial Sequence
  Description of Artificial Sequence: Synthetic oligonucleotide
uuacucuucugaucucuuc

SEQ ID NO: 2041526 - RNA, 19 nt, Artificial Sequence
  Description of Artificial Sequence: Synthetic oligonucleotide
uacggccagguaauuaaaa

SEQ ID NO: 2041527 - RNA, 19 nt, Artificial Sequence
  Description of Artificial Sequence: Synthetic oligonucleotide
uccaaugcaucaucacaaa

SEQ ID NO: 2041528 - RNA, 19 nt, Artificial Sequence
  Description of Artificial Sequence: Synthetic oligonucleotide
uagguaucugaagauuuuc

SEQ ID NO: 2041529 - RNA, 19 nt, Artificial Sequence
  Description of Artificial Sequence: Synthetic oligonucleotide
uucgggaaugucuuugcuu

SEQ ID NO: 2041530 - RNA, 19 nt, Artificial Sequence
  Description of Artificial Sequence: Synthetic oligonucleotide
cuucguucucgucacaaga

SEQ ID NO: 2041531 - RNA, 19 nt, Artificial Sequence
  Description of Artificial Sequence: Synthetic oligonucleotide
agcagccagauuuccauau

SEQ ID NO: 2041532 - RNA, 19 nt, Artificial Sequence
  Description of Artificial Sequence: Synthetic oligonucleotide
aaauacggccagguaauua

SEQ ID NO: 2041533 - RNA, 19 nt, Artificial Sequence
  Description of Artificial Sequence: Synthetic oligonucleotide
cacaugaacaaaaggcaaa

SEQ ID NO: 2041534 - RNA, 19 nt, Artificial Sequence
  Description of Artificial Sequence: Synthetic oligonucleotide
gaaaauacggccagguaau

SEQ ID NO: 2041535 - RNA, 19 nt, Artificial Sequence
  Description of Artificial Sequence: Synthetic oligonucleotide
cuagcaaauccagagguaa

SEQ ID NO: 2041536 - RNA, 19 nt, Artificial Sequence
  Description of Artificial Sequence: Synthetic oligonucleotide
guaaggucugcuucgggaa

SEQ ID NO: 2041537 - RNA, 19 nt, Artificial Sequence
  Description of Artificial Sequence: Synthetic oligonucleotide
uagguuccgggcuggguug

SEQ ID NO: 2041538 - RNA, 19 nt, Artificial Sequence
  Description of Artificial Sequence: Synthetic oligonucleotide
aaggagcggagcuacucuu

SEQ ID NO: 2041539 - RNA, 19 nt, Artificial Sequence
  Description of Artificial Sequence: Synthetic oligonucleotide
ccaguuuuauuccucuggc

SEQ ID NO: 2041540 - RNA, 19 nt, Artificial Sequence
  Description of Artificial Sequence: Synthetic oligonucleotide
guucagaugccuuguggga

SEQ ID NO: 2041541 - RNA, 19 nt, Artificial Sequence
  Description of Artificial Sequence: Synthetic oligonucleotide
uuauuccucuggcuagcaa

SEQ ID NO: 2041542 - RNA, 19 nt, Artificial Sequence
  Description of Artificial Sequence: Synthetic oligonucleotide
gguaaggucugcuucggga

SEQ ID NO: 2041543 - RNA, 19 nt, Artificial Sequence
  Description of Artificial Sequence: Synthetic oligonucleotide
gaugccuugugggaguguc

SEQ ID NO: 2041544 - RNA, 19 nt, Artificial Sequence
  Description of Artificial Sequence: Synthetic oligonucleotide
gaacacauuuccaugcaua

SEQ ID NO: 2041545 - RNA, 19 nt, Artificial Sequence
  Description of Artificial Sequence: Synthetic oligonucleotide
ggguucagaugccuugugg

SEQ ID NO: 2041546 - RNA, 19 nt, Artificial Sequence
  Description of Artificial Sequence: Synthetic oligonucleotide
gguaacaacaaaacuaccu

SEQ ID NO: 2041547 - RNA, 19 nt, Artificial Sequence
  Description of Artificial Sequence: Synthetic oligonucleotide
uuugcauguugaguauuuc

SEQ ID NO: 2041548 - RNA, 19 nt, Artificial Sequence
  Description of Artificial Sequence: Synthetic oligonucleotide
uuaauccuguagguaucug

SEQ ID NO: 2041549 - RNA, 19 nt, Artificial Sequence
  Description of Artificial Sequence: Synthetic oligonucleotide
uaacgauugccaguuuuau

SEQ ID NO: 2041550 - RNA, 19 nt, Artificial Sequence
  Description of Artificial Sequence: Synthetic oligonucleotide
ucgacuuaugucgcgccca

SEQ ID NO: 2041551 - RNA, 19 nt, Artificial Sequence
  Description of Artificial Sequence: Synthetic oligonucleotide
ucgacuccucuuaucacuu

SEQ ID NO: 2041552 - RNA, 19 nt, Artificial Sequence
  Description of Artificial Sequence: Synthetic oligonucleotide
caucagagaaaugcuaaga

SEQ ID NO: 2041553 - RNA, 19 nt, Artificial Sequence
  Description of Artificial Sequence: Synthetic oligonucleotide
gccucuacaagcugguuac

SEQ ID NO: 2041554 - RNA, 19 nt, Artificial Sequence
  Description of Artificial Sequence: Synthetic oligonucleotide
guaauuccagguuuacacu

SEQ ID NO: 2041555 - RNA, 19 nt, Artificial Sequence
  Description of Artificial Sequence: Synthetic oligonucleotide
cucgacuuaugucgcgccc

SEQ ID NO: 2041556 - RNA, 19 nt, Artificial Sequence
  Description of Artificial Sequence: Synthetic oligonucleotide
gccuucaucugccuuuggg

SEQ ID NO: 2041557 - RNA, 19 nt, Artificial Sequence
  Description of Artificial Sequence: Synthetic oligonucleotide
agcucaucgacuccucuua

SEQ ID NO: 2041558 - RNA, 19 nt, Artificial Sequence
  Description of Artificial Sequence: Synthetic oligonucleotide
guuaaacuuuccaacugaa

SEQ ID NO: 2041559 - RNA, 19 nt, Artificial Sequence
  Description of Artificial Sequence: Synthetic oligonucleotide
aaagugaaaugaaguucaa

SEQ ID NO: 2041560 - RNA, 19 nt, Artificial Sequence
  Description of Artificial Sequence: Synthetic oligonucleotide
caaacuuguuucuuacucu

SEQ ID NO: 2041561 - RNA, 19 nt, Artificial Sequence
  Description of Artificial Sequence: Synthetic oligonucleotide
agcaaauccagagguaauu

SEQ ID NO: 2041562 - RNA, 19 nt, Artificial Sequence
  Description of Artificial Sequence: Synthetic oligonucleotide
caucgacuccucuuaucac

SEQ ID NO: 2041563 - RNA, 19 nt, Artificial Sequence
  Description of Artificial Sequence: Synthetic oligonucleotide
agccagauuuccauaucag

SEQ ID NO: 2041564 - RNA, 19 nt, Artificial Sequence
  Description of Artificial Sequence: Synthetic oligonucleotide
cuccucuuaucacuucuuc

SEQ ID NO: 2041565 - RNA, 19 nt, Artificial Sequence
  Description of Artificial Sequence: Synthetic oligonucleotide
caagcugguuacaaauuaa

SEQ ID NO: 2041566 - RNA, 19 nt, Artificial Sequence
  Description of Artificial Sequence: Synthetic oligonucleotide
guguaucuucugaaggaug

SEQ ID NO: 2041567 - RNA, 19 nt, Artificial Sequence
  Description of Artificial Sequence: Synthetic oligonucleotide
auaacgauugccaguuuua

SEQ ID NO: 2041568 - RNA, 19 nt, Artificial Sequence
  Description of Artificial Sequence: Synthetic oligonucleotide
cuucugaucucuucccuaa

SEQ ID NO: 2041569 - RNA, 19 nt, Artificial Sequence
  Description of Artificial Sequence: Synthetic oligonucleotide
cuacaagcugguuacaaau

SEQ ID NO: 2041570 - RNA, 19 nt, Artificial Sequence
  Description of Artificial Sequence: Synthetic oligonucleotide
uugcaccucgacuuauguc

SEQ ID NO: 2041571 - RNA, 19 nt, Artificial Sequence
  Description of Artificial Sequence: Synthetic oligonucleotide
auacaucagagaaaugcua

SEQ ID NO: 2041572 - RNA, 19 nt, Artificial Sequence
  Description of Artificial Sequence: Synthetic oligonucleotide
aauauggaaugaacacauu

SEQ ID NO: 2041573 - RNA, 19 nt, Artificial Sequence
  Description of Artificial Sequence: Synthetic oligonucleotide
cuggaaggagcggagcuac

SEQ ID NO: 2041574 - RNA, 19 nt, Artificial Sequence
  Description of Artificial Sequence: Synthetic oligonucleotide
cugaaggauggccuucauc

SEQ ID NO: 2041575 - RNA, 19 nt, Artificial Sequence
  Description of Artificial Sequence: Synthetic oligonucleotide
guaucuucugaaggauggc

SEQ ID NO: 2041576 - RNA, 19 nt, Artificial Sequence
  Description of Artificial Sequence: Synthetic oligonucleotide
uaucagagaaagggauuuc

SEQ ID NO: 2041577 - RNA, 19 nt, Artificial Sequence
  Description of Artificial Sequence: Synthetic oligonucleotide
uguccucuuuagguuccgg

SEQ ID NO: 2041578 - RNA, 19 nt, Artificial Sequence
  Description of Artificial Sequence: Synthetic oligonucleotide
cucaucgacuccucuuauc

SEQ ID NO: 2041579 - RNA, 19 nt, Artificial Sequence
  Description of Artificial Sequence: Synthetic oligonucleotide
gagguaauuccagguuuac

SEQ ID NO: 2041580 - RNA, 19 nt, Artificial Sequence
  Description of Artificial Sequence: Synthetic oligonucleotide
gugagcugguacuaaauau

SEQ ID NO: 2041581 - RNA, 19 nt, Artificial Sequence
  Description of Artificial Sequence: Synthetic oligonucleotide
aggguaaggucugcuucgg

SEQ ID NO: 2041582 - RNA, 19 nt, Artificial Sequence
  Description of Artificial Sequence: Synthetic oligonucleotide
cuucaucugccuuuggggu

SEQ ID NO: 2041583 - RNA, 19 nt, Artificial Sequence
  Description of Artificial Sequence: Synthetic oligonucleotide
gauugccaguuuuauuccu

SEQ ID NO: 2041584 - RNA, 19 nt, Artificial Sequence
  Description of Artificial Sequence: Synthetic oligonucleotide
gaguccuggaaggagcgga

SEQ ID NO: 2041585 - RNA, 19 nt, Artificial Sequence
  Description of Artificial Sequence: Synthetic oligonucleotide
gacuccucuuaucacuucu

SEQ ID NO: 2041586 - RNA, 19 nt, Artificial Sequence
  Description of Artificial Sequence: Synthetic oligonucleotide
auugccucuacaagcuggu

SEQ ID NO: 2041587 - RNA, 19 nt, Artificial Sequence
  Description of Artificial Sequence: Synthetic oligonucleotide
aaaauacggccagguaauu

SEQ ID NO: 2041588 - RNA, 19 nt, Artificial Sequence
  Description of Artificial Sequence: Synthetic oligonucleotide
uucuuacucuucugaucuc

SEQ ID NO: 2041589 - RNA, 19 nt, Artificial Sequence
  Description of Artificial Sequence: Synthetic oligonucleotide
gaaggagcggagcuacucu

SEQ ID NO: 2041590 - RNA, 19 nt, Artificial Sequence
  Description of Artificial Sequence: Synthetic oligonucleotide
uccaugcauagaaguguua

SEQ ID NO: 2041591 - RNA, 19 nt, Artificial Sequence
  Description of Artificial Sequence: Synthetic oligonucleotide
ggucaaaauccaaaaucca

SEQ ID NO: 2041592 - RNA, 19 nt, Artificial Sequence
  Description of Artificial Sequence: Synthetic oligonucleotide
gucccuucguucucgucac

SEQ ID NO: 2041593 - RNA, 19 nt, Artificial Sequence
  Description of Artificial Sequence: Synthetic oligonucleotide
aggguucagaugccuugug

SEQ ID NO: 2041594 - RNA, 19 nt, Artificial Sequence
  Description of Artificial Sequence: Synthetic oligonucleotide
uacucuucucuugcaggac

SEQ ID NO: 2041595 - RNA, 19 nt, Artificial Sequence
  Description of Artificial Sequence: Synthetic oligonucleotide
gccagauuuccauaucaga

SEQ ID NO: 2041596 - RNA, 19 nt, Artificial Sequence
  Description of Artificial Sequence: Synthetic oligonucleotide
augccuugugggagugucc

SEQ ID NO: 2041597 - RNA, 19 nt, Artificial Sequence
  Description of Artificial Sequence: Synthetic oligonucleotide
gggaguguccucuuuaggu

SEQ ID NO: 2041598 - RNA, 19 nt, Artificial Sequence
  Description of Artificial Sequence: Synthetic oligonucleotide
cagaagccugaagauuccc

SEQ ID NO: 2041599 - RNA, 19 nt, Artificial Sequence
  Description of Artificial Sequence: Synthetic oligonucleotide
agagguaauuccagguuua

SEQ ID NO: 2041600 - RNA, 19 nt, Artificial Sequence
  Description of Artificial Sequence: Synthetic oligonucleotide
uucucgucacaagacuuuu

SEQ ID NO: 2041601 - RNA, 19 nt, Artificial Sequence
  Description of Artificial Sequence: Synthetic oligonucleotide
caccucgacuuaugucgcg

SEQ ID NO: 2041602 - RNA, 19 nt, Artificial Sequence
  Description of Artificial Sequence: Synthetic oligonucleotide
ccaaugcaucaucacaaac

SEQ ID NO: 2041603 - RNA, 19 nt, Artificial Sequence
  Description of Artificial Sequence: Synthetic oligonucleotide
cuggggugucccuucguuc

SEQ ID NO: 2041604 - RNA, 19 nt, Artificial Sequence
  Description of Artificial Sequence: Synthetic oligonucleotide
agggauuucaaggccugaa

SEQ ID NO: 2041605 - RNA, 19 nt, Artificial Sequence
  Description of Artificial Sequence: Synthetic oligonucleotide
caaugagaugcugguaaca

SEQ ID NO: 2041606 - RNA, 19 nt, Artificial Sequence
  Description of Artificial Sequence: Synthetic oligonucleotide
auaugugagcugguacuaa

SEQ ID NO: 2041607 - RNA, 19 nt, Artificial Sequence
  Description of Artificial Sequence: Synthetic oligonucleotide
gcauagaaguguuaaacuu

SEQ ID NO: 2041608 - RNA, 19 nt, Artificial Sequence
  Description of Artificial Sequence: Synthetic oligonucleotide
gcuucgggaaugucuuugc

SEQ ID NO: 2041609 - RNA, 19 nt, Artificial Sequence
  Description of Artificial Sequence: Synthetic oligonucleotide
gcaaauccagagguaauuc

SEQ ID NO: 2041610 - RNA, 19 nt, Artificial Sequence
  Description of Artificial Sequence: Synthetic oligonucleotide
agcugguacuaaauaugcu

SEQ ID NO: 2041611 - RNA, 19 nt, Artificial Sequence
  Description of Artificial Sequence: Synthetic oligonucleotide
gagcaggcucugcucuaag

SEQ ID NO: 2041612 - RNA, 19 nt, Artificial Sequence
  Description of Artificial Sequence: Synthetic oligonucleotide
cugggguguaucuucugaa

SEQ ID NO: 2041613 - RNA, 19 nt, Artificial Sequence
  Description of Artificial Sequence: Synthetic oligonucleotide
cgauugccaguuuuauucc

SEQ ID NO: 2041614 - RNA, 19 nt, Artificial Sequence
  Description of Artificial Sequence: Synthetic oligonucleotide
augugagcugguacuaaau

SEQ ID NO: 2041615 - RNA, 19 nt, Artificial Sequence
  Description of Artificial Sequence: Synthetic oligonucleotide
ucgcgcccaaaagaguccu

SEQ ID NO: 2041616 - RNA, 19 nt, Artificial Sequence
  Description of Artificial Sequence: Synthetic oligonucleotide
uucuugcaccucgacuuau

SEQ ID NO: 2041617 - RNA, 19 nt, Artificial Sequence
  Description of Artificial Sequence: Synthetic oligonucleotide
ggguaaggucugcuucggg

SEQ ID NO: 2041618 - RNA, 19 nt, Artificial Sequence
  Description of Artificial Sequence: Synthetic oligonucleotide
gucgcgcccaaaagagucc

SEQ ID NO: 2041619 - RNA, 19 nt, Artificial Sequence
  Description of Artificial Sequence: Synthetic oligonucleotide
gggauuucaaggccugaaa

SEQ ID NO: 2041620 - RNA, 19 nt, Artificial Sequence
  Description of Artificial Sequence: Synthetic oligonucleotide
gcugggguguaucuucuga

SEQ ID NO: 2041621 - RNA, 19 nt, Artificial Sequence
  Description of Artificial Sequence: Synthetic oligonucleotide
uugugggaguguccucuuu

SEQ ID NO: 2041622 - RNA, 19 nt, Artificial Sequence
  Description of Artificial Sequence: Synthetic oligonucleotide
ccugaaacacacaggguaa

SEQ ID NO: 2041623 - RNA, 19 nt, Artificial Sequence
  Description of Artificial Sequence: Synthetic oligonucleotide
ccuucguucucgucacaag

SEQ ID NO: 2041624 - RNA, 19 nt, Artificial Sequence
  Description of Artificial Sequence: Synthetic oligonucleotide
acacaggguaaggucugcu

SEQ ID NO: 2041625 - RNA, 19 nt, Artificial Sequence
  Description of Artificial Sequence: Synthetic oligonucleotide
gagcggagcuacucuucuc

SEQ ID NO: 2041626 - RNA, 19 nt, Artificial Sequence
  Description of Artificial Sequence: Synthetic oligonucleotide
caguuuuauuccucuggcu

SEQ ID NO: 2041627 - RNA, 19 nt, Artificial Sequence
  Description of Artificial Sequence: Synthetic oligonucleotide
cagagguaauuccagguuu

SEQ ID NO: 2041628 - RNA, 19 nt, Artificial Sequence
  Description of Artificial Sequence: Synthetic oligonucleotide
ggcuggguugagcaggcuc

SEQ ID NO: 2041629 - RNA, 19 nt, Artificial Sequence
  Description of Artificial Sequence: Synthetic oligonucleotide
gcucuaaggcuuccaucug

SEQ ID NO: 2041630 - RNA, 19 nt, Artificial Sequence
  Description of Artificial Sequence: Synthetic oligonucleotide
uuccucuggcuagcaaauc

SEQ ID NO: 2041631 - RNA, 19 nt, Artificial Sequence
  Description of Artificial Sequence: Synthetic oligonucleotide
ccucgacuuaugucgcgcc

SEQ ID NO: 2041632 - RNA, 19 nt, Artificial Sequence
  Description of Artificial Sequence: Synthetic oligonucleotide
aggucugcuucgggaaugu

SEQ ID NO: 2041633 - RNA, 19 nt, Artificial Sequence
  Description of Artificial Sequence: Synthetic oligonucleotide
gcccaaaagaguccuggaa

SEQ ID NO: 2041634 - RNA, 19 nt, Artificial Sequence
  Description of Artificial Sequence: Synthetic oligonucleotide
auacggccagguaauuaaa

SEQ ID NO: 2041635 - RNA, 19 nt, Artificial Sequence
  Description of Artificial Sequence: Synthetic oligonucleotide
ggaaugucuuugcuuccaa

SEQ ID NO: 2041636 - RNA, 19 nt, Artificial Sequence
  Description of Artificial Sequence: Synthetic oligonucleotide
ccaugcauagaaguguuaa

SEQ ID NO: 2041637 - RNA, 19 nt, Artificial Sequence
  Description of Artificial Sequence: Synthetic oligonucleotide
ucccuucguucucgucaca

SEQ ID NO: 2041638 - RNA, 19 nt, Artificial Sequence
  Description of Artificial Sequence: Synthetic oligonucleotide
gggugucccuucguucucg

SEQ ID NO: 2041639 - RNA, 19 nt, Artificial Sequence
  Description of Artificial Sequence: Synthetic oligonucleotide
cagaugccuugugggagug

SEQ ID NO: 2041640 - RNA, 19 nt, Artificial Sequence
  Description of Artificial Sequence: Synthetic oligonucleotide
ccucuggcuagcaaaucca

SEQ ID NO: 2041641 - RNA, 19 nt, Artificial Sequence
  Description of Artificial Sequence: Synthetic oligonucleotide
cuucuugcaccucgacuua

SEQ ID NO: 2041642 - RNA, 19 nt, Artificial Sequence
  Description of Artificial Sequence: Synthetic oligonucleotide
ccuaagccuuuccagcuca

SEQ ID NO: 2041643 - RNA, 19 nt, Artificial Sequence
  Description of Artificial Sequence: Synthetic oligonucleotide
cuggguugagcaggcucug

SEQ ID NO: 2041644 - RNA, 19 nt, Artificial Sequence
  Description of Artificial Sequence: Synthetic oligonucleotide
augucgcgcccaaaagagu

SEQ ID NO: 2041645 - RNA, 19 nt, Artificial Sequence
  Description of Artificial Sequence: Synthetic oligonucleotide
gcagccagauuuccauauc

SEQ ID NO: 2041646 - RNA, 19 nt, Artificial Sequence
  Description of Artificial Sequence: Synthetic oligonucleotide
cuucgggaaugucuuugcu

SEQ ID NO: 2041647 - RNA, 19 nt, Artificial Sequence
  Description of Artificial Sequence: Synthetic oligonucleotide
caucaagaguuuaguguuu

SEQ ID NO: 2041648 - RNA, 19 nt, Artificial Sequence
  Description of Artificial Sequence: Synthetic oligonucleotide
gcaccucgacuuaugucgc

SEQ ID NO: 2041649 - RNA, 19 nt, Artificial Sequence
  Description of Artificial Sequence: Synthetic oligonucleotide
cccacacuuucuccagaag

SEQ ID NO: 2041650 - RNA, 19 nt, Artificial Sequence
  Description of Artificial Sequence: Synthetic oligonucleotide
gguacuaaauaugcugcuu

SEQ ID NO: 2041651 - RNA, 19 nt, Artificial Sequence
  Description of Artificial Sequence: Synthetic oligonucleotide
guucucgucacaagacuuu

SEQ ID NO: 2041652 - RNA, 19 nt, Artificial Sequence
  Description of Artificial Sequence: Synthetic oligonucleotide
ugggguguucugggguguc

SEQ ID NO: 2041653 - RNA, 19 nt, Artificial Sequence
  Description of Artificial Sequence: Synthetic oligonucleotide
agaugccuugugggagugu

SEQ ID NO: 2041654 - RNA, 19 nt, Artificial Sequence
  Description of Artificial Sequence: Synthetic oligonucleotide
cgucacaagacuuuugcau

SEQ ID NO: 2041655 - RNA, 19 nt, Artificial Sequence
  Description of Artificial Sequence: Synthetic oligonucleotide
gugucccuucguucucguc

SEQ ID NO: 2041656 - RNA, 19 nt, Artificial Sequence
  Description of Artificial Sequence: Synthetic oligonucleotide
ggagcggagcuacucuucu

SEQ ID NO: 2041657 - RNA, 19 nt, Artificial Sequence
  Description of Artificial Sequence: Synthetic oligonucleotide
cuguagguaucugaagauu

SEQ ID NO: 2041658 - RNA, 19 nt, Artificial Sequence
  Description of Artificial Sequence: Synthetic oligonucleotide
cacacauaauuaggaauuu

SEQ ID NO: 2041659 - RNA, 19 nt, Artificial Sequence
  Description of Artificial Sequence: Synthetic oligonucleotide
cggagcuacucuucucuug

SEQ ID NO: 2041660 - RNA, 19 nt, Artificial Sequence
  Description of Artificial Sequence: Synthetic oligonucleotide
cgggaaugucuuugcuucc

SEQ ID NO: 2041661 - RNA, 19 nt, Artificial Sequence
  Description of Artificial Sequence: Synthetic oligonucleotide
gcuagcaaauccagaggua

SEQ ID NO: 2041662 - RNA, 19 nt, Artificial Sequence
  Description of Artificial Sequence: Synthetic oligonucleotide
uugccucuacaagcugguu

SEQ ID NO: 2041663 - RNA, 19 nt, Artificial Sequence
  Description of Artificial Sequence: Synthetic oligonucleotide
gacuuaugucgcgcccaaa

SEQ ID NO: 2041664 - RNA, 19 nt, Artificial Sequence
  Description of Artificial Sequence: Synthetic oligonucleotide
uugcaggacugagcugcua

SEQ ID NO: 2041665 - RNA, 19 nt, Artificial Sequence
  Description of Artificial Sequence: Synthetic oligonucleotide
cccuaagccuuuccagcuc

SEQ ID NO: 2041666 - RNA, 19 nt, Artificial Sequence
  Description of Artificial Sequence: Synthetic oligonucleotide
ccucuuuagguuccgggcu

SEQ ID NO: 2041667 - RNA, 19 nt, Artificial Sequence
  Description of Artificial Sequence: Synthetic oligonucleotide
cuucaggguucagaugccu

SEQ ID NO: 2041668 - RNA, 19 nt, Artificial Sequence
  Description of Artificial Sequence: Synthetic oligonucleotide
gcguauaauuauacaugua

SEQ ID NO: 2041669 - RNA, 19 nt, Artificial Sequence
  Description of Artificial Sequence: Synthetic oligonucleotide
cagcucaucgacuccucuu

SEQ ID NO: 2041670 - RNA, 19 nt, Artificial Sequence
  Description of Artificial Sequence: Synthetic oligonucleotide
caggguucagaugccuugu

SEQ ID NO: 2041671 - RNA, 19 nt, Artificial Sequence
  Description of Artificial Sequence: Synthetic oligonucleotide
ccagagguaauuccagguu

SEQ ID NO: 2041672 - RNA, 19 nt, Artificial Sequence
  Description of Artificial Sequence: Synthetic oligonucleotide
cuauaacgauugccaguuu

SEQ ID NO: 2041673 - RNA, 19 nt, Artificial Sequence
  Description of Artificial Sequence: Synthetic oligonucleotide
cacaagacuuuugcauguu

SEQ ID NO: 2041674 - RNA, 19 nt, Artificial Sequence
  Description of Artificial Sequence: Synthetic oligonucleotide
ggugucccuucguucucgu

SEQ ID NO: 2041675 - RNA, 19 nt, Artificial Sequence
  Description of Artificial Sequence: Synthetic oligonucleotide
gcucaucgacuccucuuau

SEQ ID NO: 2041676 - RNA, 19 nt, Artificial Sequence
  Description of Artificial Sequence: Synthetic oligonucleotide
cguucucgucacaagacuu

SEQ ID NO: 2041677 - RNA, 19 nt, Artificial Sequence
  Description of Artificial Sequence: Synthetic oligonucleotide
ggccugaaacacacagggu

SEQ ID NO: 2041678 - RNA, 19 nt, Artificial Sequence
  Description of Artificial Sequence: Synthetic oligonucleotide
ccuggaaggagcggagcua

SEQ ID NO: 2041679 - RNA, 19 nt, Artificial Sequence
  Description of Artificial Sequence: Synthetic oligonucleotide
cgacuuaugucgcgcccaa

SEQ ID NO: 2041680 - RNA, 19 nt, Artificial Sequence
  Description of Artificial Sequence: Synthetic oligonucleotide
cgcgcccaaaagaguccug

SEQ ID NO: 2041681 - RNA, 19 nt, Artificial Sequence
  Description of Artificial Sequence: Synthetic oligonucleotide
ccagcucaucgacuccucu

SEQ ID NO: 2041682 - RNA, 19 nt, Artificial Sequence
  Description of Artificial Sequence: Synthetic oligonucleotide
gcggagcuacucuucucuu

SEQ ID NO: 2041683 - RNA, 19 nt, Artificial Sequence
  Description of Artificial Sequence: Synthetic oligonucleotide
cccugccugcuggggugua

SEQ ID NO: 2041684 - RNA, 19 nt, Artificial Sequence
  Description of Artificial Sequence: Synthetic oligonucleotide
aagucuaucaaaucaaucc

SEQ ID NO: 2041685 - RNA, 19 nt, Artificial Sequence
  Description of Artificial Sequence: Synthetic oligonucleotide
aauuauuugaaauuccuuc

SEQ ID NO: 2041686 - RNA, 19 nt, Artificial Sequence
  Description of Artificial Sequence: Synthetic oligonucleotide
uuaaauaauauauacagca

SEQ ID NO: 2041687 - RNA, 19 nt, Artificial Sequence
  Description of Artificial Sequence: Synthetic oligonucleotide
aaaugcaauacuuuaauag

SEQ ID NO: 2041688 - RNA, 19 nt, Artificial Sequence
  Description of Artificial Sequence: Synthetic oligonucleotide
uucauuuaaauaaaagugg

SEQ ID NO: 2041689 - RNA, 19 nt, Artificial Sequence
  Description of Artificial Sequence: Synthetic oligonucleotide
aaugcaauacuuuaauagg

SEQ ID NO: 2041690 - RNA, 19 nt, Artificial Sequence
  Description of Artificial Sequence: Synthetic oligonucleotide
aaaguaguaauucaacaag

SEQ ID NO: 2041691 - RNA, 19 nt, Artificial Sequence
  Description of Artificial Sequence: Synthetic oligonucleotide
aguaauaggauuuaguacu

SEQ ID NO: 2041692 - RNA, 19 nt, Artificial Sequence
  Description of Artificial Sequence: Synthetic oligonucleotide
ucuagcuguauuuaaaggg

SEQ ID NO: 2041693 - RNA, 19 nt, Artificial Sequence
  Description of Artificial Sequence: Synthetic oligonucleotide
auuacauauuuacaguccc

SEQ ID NO: 2041694 - RNA, 19 nt, Artificial Sequence
  Description of Artificial Sequence: Synthetic oligonucleotide
uuugaaauuaccuacuuaa

SEQ ID NO: 2041695 - RNA, 19 nt, Artificial Sequence
  Description of Artificial Sequence: Synthetic oligonucleotide
uuuauauuacuaaaugucu

SEQ ID NO: 2041696 - RNA, 19 nt, Artificial Sequence
  Description of Artificial Sequence: Synthetic oligonucleotide
auuacuaaaugucugagga

SEQ ID NO: 2041697 - RNA, 19 nt, Artificial Sequence
  Description of Artificial Sequence: Synthetic oligonucleotide
gaaauuaccuacuuaauca

SEQ ID NO: 2041698 - RNA, 19 nt, Artificial Sequence
  Description of Artificial Sequence: Synthetic oligonucleotide
cuuuauauuacuaaauguc

SEQ ID NO: 2041699 - RNA, 19 nt, Artificial Sequence
  Description of Artificial Sequence: Synthetic oligonucleotide
uaauauaucaaaauguguu

SEQ ID NO: 2041700 - RNA, 19 nt, Artificial Sequence
  Description of Artificial Sequence: Synthetic oligonucleotide
uauauguuaacaauuucca

SEQ ID NO: 2041701 - RNA, 19 nt, Artificial Sequence
  Description of Artificial Sequence: Synthetic oligonucleotide
uaaaugauauuauaguugu

SEQ ID NO: 2041702 - RNA, 19 nt, Artificial Sequence
  Description of Artificial Sequence: Synthetic oligonucleotide
aaaacaacccuucaugacu

SEQ ID NO: 2041703 - RNA, 19 nt, Artificial Sequence
  Description of Artificial Sequence: Synthetic oligonucleotide
uuaacaauuuccaaugacu

SEQ ID NO: 2041704 - RNA, 19 nt, Artificial Sequence
  Description of Artificial Sequence: Synthetic oligonucleotide
uggugugaaauuuaaaugc

SEQ ID NO: 2041705 - RNA, 19 nt, Artificial Sequence
  Description of Artificial Sequence: Synthetic oligonucleotide
acuuuaauagguuacauau

SEQ ID NO: 2041706 - RNA, 19 nt, Artificial Sequence
  Description of Artificial Sequence: Synthetic oligonucleotide
aaggacugcauucugaaug

SEQ ID NO: 2041707 - RNA, 19 nt, Artificial Sequence
  Description of Artificial Sequence: Synthetic oligonucleotide
uacacaaaguuaaauauac

SEQ ID NO: 2041708 - RNA, 19 nt, Artificial Sequence
  Description of Artificial Sequence: Synthetic oligonucleotide
aauuggaaaucuuugcucu

SEQ ID NO: 2041709 - RNA, 19 nt, Artificial Sequence
  Description of Artificial Sequence: Synthetic oligonucleotide
uuugguaguaaccuauucc

SEQ ID NO: 2041710 - RNA, 19 nt, Artificial Sequence
  Description of Artificial Sequence: Synthetic oligonucleotide
aauuguauauguuaacaau

SEQ ID NO: 2041711 - RNA, 19 nt, Artificial Sequence
  Description of Artificial Sequence: Synthetic oligonucleotide
uuugucauauguaggaagc

SEQ ID NO: 2041712 - RNA, 19 nt, Artificial Sequence
  Description of Artificial Sequence: Synthetic oligonucleotide
uuaaagaugggcauaccug

SEQ ID NO: 2041713 - RNA, 19 nt, Artificial Sequence
  Description of Artificial Sequence: Synthetic oligonucleotide
auauaucaaaauguguugc

SEQ ID NO: 2041714 - RNA, 19 nt, Artificial Sequence
  Description of Artificial Sequence: Synthetic oligonucleotide
uguguugcaaggcaugccg

SEQ ID NO: 2041715 - RNA, 19 nt, Artificial Sequence
  Description of Artificial Sequence: Synthetic oligonucleotide
uauguuaacaauuuccaau

SEQ ID NO: 2041716 - RNA, 19 nt, Artificial Sequence
  Description of Artificial Sequence: Synthetic oligonucleotide
gauuuaguacuacugcagg

SEQ ID NO: 2041717 - RNA, 19 nt, Artificial Sequence
  Description of Artificial Sequence: Synthetic oligonucleotide
auuuuacucccuuuucugc

SEQ ID NO: 2041718 - RNA, 19 nt, Artificial Sequence
  Description of Artificial Sequence: Synthetic oligonucleotide
uaauucaacaagucuauca

SEQ ID NO: 2041719 - RNA, 19 nt, Artificial Sequence
  Description of Artificial Sequence: Synthetic oligonucleotide
ugaauuauuugaaauuccu

SEQ ID NO: 2041720 - RNA, 19 nt, Artificial Sequence
  Description of Artificial Sequence: Synthetic oligonucleotide
uguuaauaaaccuguauaa

SEQ ID NO: 2041721 - RNA, 19 nt, Artificial Sequence
  Description of Artificial Sequence: Synthetic oligonucleotide
uauguaggaagcuggaaag

SEQ ID NO: 2041722 - RNA, 19 nt, Artificial Sequence
  Description of Artificial Sequence: Synthetic oligonucleotide
uacuacugcagguaaauag

SEQ ID NO: 2041723 - RNA, 19 nt, Artificial Sequence
  Description of Artificial Sequence: Synthetic oligonucleotide
acaagguagguacaugggc

SEQ ID NO: 2041724 - RNA, 19 nt, Artificial Sequence
  Description of Artificial Sequence: Synthetic oligonucleotide
ugaaauuaccuacuuaauc

SEQ ID NO: 2041725 - RNA, 19 nt, Artificial Sequence
  Description of Artificial Sequence: Synthetic oligonucleotide
uauuacuaaaugucugagg

SEQ ID NO: 2041726 - RNA, 19 nt, Artificial Sequence
  Description of Artificial Sequence: Synthetic oligonucleotide
aauagguacuuuauauuac

SEQ ID NO: 2041727 - RNA, 19 nt, Artificial Sequence
  Description of Artificial Sequence: Synthetic oligonucleotide
aauaggauuuaguacuacu

SEQ ID NO: 2041728 - RNA, 19 nt, Artificial Sequence
  Description of Artificial Sequence: Synthetic oligonucleotide
aaaggaguaauuggaaauc

SEQ ID NO: 2041729 - RNA, 19 nt, Artificial Sequence
  Description of Artificial Sequence: Synthetic oligonucleotide
acugcagguaaauagaacu

SEQ ID NO: 2041730 - RNA, 19 nt, Artificial Sequence
  Description of Artificial Sequence: Synthetic oligonucleotide
gaucuuauuaaagaugggc

SEQ ID NO: 2041731 - RNA, 19 nt, Artificial Sequence
  Description of Artificial Sequence: Synthetic oligonucleotide
auuauuugaaauuccuuca

SEQ ID NO: 2041732 - RNA, 19 nt, Artificial Sequence
  Description of Artificial Sequence: Synthetic oligonucleotide
uagcauuaaaugcaaaugu

SEQ ID NO: 2041733 - RNA, 19 nt, Artificial Sequence
  Description of Artificial Sequence: Synthetic oligonucleotide
uuuugucauauguaggaag

SEQ ID NO: 2041734 - RNA, 19 nt, Artificial Sequence
  Description of Artificial Sequence: Synthetic oligonucleotide
uuuucccaaucccagagag

SEQ ID NO: 2041735 - RNA, 19 nt, Artificial Sequence
  Description of Artificial Sequence: Synthetic oligonucleotide
uggcuaauauaucaaaaug

SEQ ID NO: 2041736 - RNA, 19 nt, Artificial Sequence
  Description of Artificial Sequence: Synthetic oligonucleotide
auguuaacaauuuccaaug

SEQ ID NO: 2041737 - RNA, 19 nt, Artificial Sequence
  Description of Artificial Sequence: Synthetic oligonucleotide
aggagauuuaaacacaacu

SEQ ID NO: 2041738 - RNA, 19 nt, Artificial Sequence
  Description of Artificial Sequence: Synthetic oligonucleotide
aaagaucuuauuaaagaug

SEQ ID NO: 2041739 - RNA, 19 nt, Artificial Sequence
  Description of Artificial Sequence: Synthetic oligonucleotide
uaaaccuguauaaacauuu

SEQ ID NO: 2041740 - RNA, 19 nt, Artificial Sequence
  Description of Artificial Sequence: Synthetic oligonucleotide
uaggauuuaguacuacugc

SEQ ID NO: 2041741 - RNA, 19 nt, Artificial Sequence
  Description of Artificial Sequence: Synthetic oligonucleotide
uuggugugaaauuuaaaug

SEQ ID NO: 2041742 - RNA, 19 nt, Artificial Sequence
  Description of Artificial Sequence: Synthetic oligonucleotide
uugguaguaaccuauucca

SEQ ID NO: 2041743 - RNA, 19 nt, Artificial Sequence
  Description of Artificial Sequence: Synthetic oligonucleotide
aauguguugcaaggcaugc

SEQ ID NO: 2041744 - RNA, 19 nt, Artificial Sequence
  Description of Artificial Sequence: Synthetic oligonucleotide
uaucaaaauguguugcaag

SEQ ID NO: 2041745 - RNA, 19 nt, Artificial Sequence
  Description of Artificial Sequence: Synthetic oligonucleotide
uauacagcaaaguaguaau

SEQ ID NO: 2041746 - RNA, 19 nt, Artificial Sequence
  Description of Artificial Sequence: Synthetic oligonucleotide
uuugggaagauacucugug

SEQ ID NO: 2041747 - RNA, 19 nt, Artificial Sequence
  Description of Artificial Sequence: Synthetic oligonucleotide
uguauaaacauuucagcau

SEQ ID NO: 2041748 - RNA, 19 nt, Artificial Sequence
  Description of Artificial Sequence: Synthetic oligonucleotide
uuauuuuacucccuuuucu

SEQ ID NO: 2041749 - RNA, 19 nt, Artificial Sequence
  Description of Artificial Sequence: Synthetic oligonucleotide
cuugcuguuaauaaaccug

SEQ ID NO: 2041750 - RNA, 19 nt, Artificial Sequence
  Description of Artificial Sequence: Synthetic oligonucleotide
aaaauagguacuuuauauu

SEQ ID NO: 2041751 - RNA, 19 nt, Artificial Sequence
  Description of Artificial Sequence: Synthetic oligonucleotide
uaggaagcuggaaagaucu

SEQ ID NO: 2041752 - RNA, 19 nt, Artificial Sequence
  Description of Artificial Sequence: Synthetic oligonucleotide
aagcauggcuaauauauca

SEQ ID NO: 2041753 - RNA, 19 nt, Artificial Sequence
  Description of Artificial Sequence: Synthetic oligonucleotide
agaacaauuguauauguua

SEQ ID NO: 2041754 - RNA, 19 nt, Artificial Sequence
  Description of Artificial Sequence: Synthetic oligonucleotide
auauuuacagucccacuuc

SEQ ID NO: 2041755 - RNA, 19 nt, Artificial Sequence
  Description of Artificial Sequence: Synthetic oligonucleotide
auuaaagaugggcauaccu

SEQ ID NO: 2041756 - RNA, 19 nt, Artificial Sequence
  Description of Artificial Sequence: Synthetic oligonucleotide
caugccgccaguuaguugc

SEQ ID NO: 2041757 - RNA, 19 nt, Artificial Sequence
  Description of Artificial Sequence: Synthetic oligonucleotide
uuuaccuggaagcauggcu

SEQ ID NO: 2041758 - RNA, 19 nt, Artificial Sequence
  Description of Artificial Sequence: Synthetic oligonucleotide
aauacuuuaauagguuaca

SEQ ID NO: 2041759 - RNA, 19 nt, Artificial Sequence
  Description of Artificial Sequence: Synthetic oligonucleotide
uaaccuauuccaguaauag

SEQ ID NO: 2041760 - RNA, 19 nt, Artificial Sequence
  Description of Artificial Sequence: Synthetic oligonucleotide
auuaaaugcaaauguggcu

SEQ ID NO: 2041761 - RNA, 19 nt, Artificial Sequence
  Description of Artificial Sequence: Synthetic oligonucleotide
uacuaaaugucugaggaca

SEQ ID NO: 2041762 - RNA, 19 nt, Artificial Sequence
  Description of Artificial Sequence: Synthetic oligonucleotide
aaauuaccuacuuaaucaa

SEQ ID NO: 2041763 - RNA, 19 nt, Artificial Sequence
  Description of Artificial Sequence: Synthetic oligonucleotide
aaaucaauccacugcaaua

SEQ ID NO: 2041764 - RNA, 19 nt, Artificial Sequence
  Description of Artificial Sequence: Synthetic oligonucleotide
aggugaguaguuuggagcg

SEQ ID NO: 2041765 - RNA, 19 nt, Artificial Sequence
  Description of Artificial Sequence: Synthetic oligonucleotide
ucuaucaaaucaauccacu

SEQ ID NO: 2041766 - RNA, 19 nt, Artificial Sequence
  Description of Artificial Sequence: Synthetic oligonucleotide
ugggaagauacucugugug

SEQ ID NO: 2041767 - RNA, 19 nt, Artificial Sequence
  Description of Artificial Sequence: Synthetic oligonucleotide
uuaaagggguguuugaaau

SEQ ID NO: 2041768 - RNA, 19 nt, Artificial Sequence
  Description of Artificial Sequence: Synthetic oligonucleotide
aaggcaugccgccaguuag

SEQ ID NO: 2041769 - RNA, 19 nt, Artificial Sequence
  Description of Artificial Sequence: Synthetic oligonucleotide
aaaagcaccccugaggaga

SEQ ID NO: 2041770 - RNA, 19 nt, Artificial Sequence
  Description of Artificial Sequence: Synthetic oligonucleotide
gauuugggaagauacucug

SEQ ID NO: 2041771 - RNA, 19 nt, Artificial Sequence
  Description of Artificial Sequence: Synthetic oligonucleotide
aaccuguauaaacauuuca

SEQ ID NO: 2041772 - RNA, 19 nt, Artificial Sequence
  Description of Artificial Sequence: Synthetic oligonucleotide
agucuaucaaaucaaucca

SEQ ID NO: 2041773 - RNA, 19 nt, Artificial Sequence
  Description of Artificial Sequence: Synthetic oligonucleotide
caauacuuuaauagguuac

SEQ ID NO: 2041774 - RNA, 19 nt, Artificial Sequence
  Description of Artificial Sequence: Synthetic oligonucleotide
gauuuaaacacaacugcac

SEQ ID NO: 2041775 - RNA, 19 nt, Artificial Sequence
  Description of Artificial Sequence: Synthetic oligonucleotide
ucuuauuaaagaugggcau

SEQ ID NO: 2041776 - RNA, 19 nt, Artificial Sequence
  Description of Artificial Sequence: Synthetic oligonucleotide
uuugugcuaaaauucugca

SEQ ID NO: 2041777 - RNA, 19 nt, Artificial Sequence
  Description of Artificial Sequence: Synthetic oligonucleotide
aaacacaacugcacuauuc

SEQ ID NO: 2041778 - RNA, 19 nt, Artificial Sequence
  Description of Artificial Sequence: Synthetic oligonucleotide
aaucaauccacugcaauaa

SEQ ID NO: 2041779 - RNA, 19 nt, Artificial Sequence
  Description of Artificial Sequence: Synthetic oligonucleotide
uugcuguuaauaaaccugu

SEQ ID NO: 2041780 - RNA, 19 nt, Artificial Sequence
  Description of Artificial Sequence: Synthetic oligonucleotide
auagguuacauauuuucau

SEQ ID NO: 2041781 - RNA, 19 nt, Artificial Sequence
  Description of Artificial Sequence: Synthetic oligonucleotide
uaguacaugcgcuuggugu

SEQ ID NO: 2041782 - RNA, 19 nt, Artificial Sequence
  Description of Artificial Sequence: Synthetic oligonucleotide
auagguacuuuauauuacu

SEQ ID NO: 2041783 - RNA, 19 nt, Artificial Sequence
  Description of Artificial Sequence: Synthetic oligonucleotide
cauaccuggauuugggaag

SEQ ID NO: 2041784 - RNA, 19 nt, Artificial Sequence
  Description of Artificial Sequence: Synthetic oligonucleotide
ugugaggcuagcauuaaau

SEQ ID NO: 2041785 - RNA, 19 nt, Artificial Sequence
  Description of Artificial Sequence: Synthetic oligonucleotide
caguaauaggauuuaguac

SEQ ID NO: 2041786 - RNA, 19 nt, Artificial Sequence
  Description of Artificial Sequence: Synthetic oligonucleotide
cacgcaauucugaauaaag

SEQ ID NO: 2041787 - RNA, 19 nt, Artificial Sequence
  Description of Artificial Sequence: Synthetic oligonucleotide
acaauuguauauguuaaca

SEQ ID NO: 2041788 - RNA, 19 nt, Artificial Sequence
  Description of Artificial Sequence: Synthetic oligonucleotide
uuuaaacacaacugcacua

SEQ ID NO: 2041789 - RNA, 19 nt, Artificial Sequence
  Description of Artificial Sequence: Synthetic oligonucleotide
aguaguaauucaacaaguc

SEQ ID NO: 2041790 - RNA, 19 nt, Artificial Sequence
  Description of Artificial Sequence: Synthetic oligonucleotide
guuaacaauuuccaaugac

SEQ ID NO: 2041791 - RNA, 19 nt, Artificial Sequence
  Description of Artificial Sequence: Synthetic oligonucleotide
aacugcacuauucaugguu

SEQ ID NO: 2041792 - RNA, 19 nt, Artificial Sequence
  Description of Artificial Sequence: Synthetic oligonucleotide
cuagcauuaaaugcaaaug

SEQ ID NO: 2041793 - RNA, 19 nt, Artificial Sequence
  Description of Artificial Sequence: Synthetic oligonucleotide
gguguuugaaauuaccuac

SEQ ID NO: 2041794 - RNA, 19 nt, Artificial Sequence
  Description of Artificial Sequence: Synthetic oligonucleotide
gucauauguaggaagcugg

SEQ ID NO: 2041795 - RNA, 19 nt, Artificial Sequence
  Description of Artificial Sequence: Synthetic oligonucleotide
uuuuacucccuuuucugcu

SEQ ID NO: 2041796 - RNA, 19 nt, Artificial Sequence
  Description of Artificial Sequence: Synthetic oligonucleotide
auaauauauacagcaaagu

SEQ ID NO: 2041797 - RNA, 19 nt, Artificial Sequence
  Description of Artificial Sequence: Synthetic oligonucleotide
accuauuccaguaauagga

SEQ ID NO: 2041798 - RNA, 19 nt, Artificial Sequence
  Description of Artificial Sequence: Synthetic oligonucleotide
uccaguaauaggauuuagu

SEQ ID NO: 2041799 - RNA, 19 nt, Artificial Sequence
  Description of Artificial Sequence: Synthetic oligonucleotide
uuuaaagggguguuugaaa

SEQ ID NO: 2041800 - RNA, 19 nt, Artificial Sequence
  Description of Artificial Sequence: Synthetic oligonucleotide
aaguaguaauucaacaagu

SEQ ID NO: 2041801 - RNA, 19 nt, Artificial Sequence
  Description of Artificial Sequence: Synthetic oligonucleotide
gauauuauaguugucuucu

SEQ ID NO: 2041802 - RNA, 19 nt, Artificial Sequence
  Description of Artificial Sequence: Synthetic oligonucleotide
ugauauuauaguugucuuc

SEQ ID NO: 2041803 - RNA, 19 nt, Artificial Sequence
  Description of Artificial Sequence: Synthetic oligonucleotide
guuggcaucuaggagagag

SEQ ID NO: 2041804 - RNA, 19 nt, Artificial Sequence
  Description of Artificial Sequence: Synthetic oligonucleotide
uguuaacaauuuccaauga

SEQ ID NO: 2041805 - RNA, 19 nt, Artificial Sequence
  Description of Artificial Sequence: Synthetic oligonucleotide
aggauuuaguacuacugca

SEQ ID NO: 2041806 - RNA, 19 nt, Artificial Sequence
  Description of Artificial Sequence: Synthetic oligonucleotide
uuugaaauuccuucauuua

SEQ ID NO: 2041807 - RNA, 19 nt, Artificial Sequence
  Description of Artificial Sequence: Synthetic oligonucleotide
ucccaaagaacaauuguau

SEQ ID NO: 2041808 - RNA, 19 nt, Artificial Sequence
  Description of Artificial Sequence: Synthetic oligonucleotide
agcaaaguaguaauucaac

SEQ ID NO: 2041809 - RNA, 19 nt, Artificial Sequence
  Description of Artificial Sequence: Synthetic oligonucleotide
aguacaugcgcuuggugug

SEQ ID NO: 2041810 - RNA, 19 nt, Artificial Sequence
  Description of Artificial Sequence: Synthetic oligonucleotide
uucccaaucccagagagac

SEQ ID NO: 2041811 - RNA, 19 nt, Artificial Sequence
  Description of Artificial Sequence: Synthetic oligonucleotide
augcaaauguggcuuuuac

SEQ ID NO: 2041812 - RNA, 19 nt, Artificial Sequence
  Description of Artificial Sequence: Synthetic oligonucleotide
accuguauaaacauuucag

SEQ ID NO: 2041813 - RNA, 19 nt, Artificial Sequence
  Description of Artificial Sequence: Synthetic oligonucleotide
ugaggagauuuaaacacaa

SEQ ID NO: 2041814 - RNA, 19 nt, Artificial Sequence
  Description of Artificial Sequence: Synthetic oligonucleotide
aaauucugcaggugaauua

SEQ ID NO: 2041815 - RNA, 19 nt, Artificial Sequence
  Description of Artificial Sequence: Synthetic oligonucleotide
cuaucaaaucaauccacug

SEQ ID NO: 2041816 - RNA, 19 nt, Artificial Sequence
  Description of Artificial Sequence: Synthetic oligonucleotide
auauuacuaaaugucugag

SEQ ID NO: 2041817 - RNA, 19 nt, Artificial Sequence
  Description of Artificial Sequence: Synthetic oligonucleotide
aauucugcaggugaauuau

SEQ ID NO: 2041818 - RNA, 19 nt, Artificial Sequence
  Description of Artificial Sequence: Synthetic oligonucleotide
uauuuaaagggguguuuga

SEQ ID NO: 2041819 - RNA, 19 nt, Artificial Sequence
  Description of Artificial Sequence: Synthetic oligonucleotide
aucuuauuaaagaugggca

SEQ ID NO: 2041820 - RNA, 19 nt, Artificial Sequence
  Description of Artificial Sequence: Synthetic oligonucleotide
auuuaguacuacugcaggu

SEQ ID NO: 2041821 - RNA, 19 nt, Artificial Sequence
  Description of Artificial Sequence: Synthetic oligonucleotide
ugguuuuauuuucuagcug

SEQ ID NO: 2041822 - RNA, 19 nt, Artificial Sequence
  Description of Artificial Sequence: Synthetic oligonucleotide
auaggauuuaguacuacug

SEQ ID NO: 2041823 - RNA, 19 nt, Artificial Sequence
  Description of Artificial Sequence: Synthetic oligonucleotide
uuaaacacaacugcacuau

SEQ ID NO: 2041824 - RNA, 19 nt, Artificial Sequence
  Description of Artificial Sequence: Synthetic oligonucleotide
caaaguaguaauucaacaa

SEQ ID NO: 2041825 - RNA, 19 nt, Artificial Sequence
  Description of Artificial Sequence: Synthetic oligonucleotide
ggagauuuaaacacaacug

SEQ ID NO: 2041826 - RNA, 19 nt, Artificial Sequence
  Description of Artificial Sequence: Synthetic oligonucleotide
gcuaauauaucaaaaugug

SEQ ID NO: 2041827 - RNA, 19 nt, Artificial Sequence
  Description of Artificial Sequence: Synthetic oligonucleotide
uuuggagcgugccuuuacc

SEQ ID NO: 2041828 - RNA, 19 nt, Artificial Sequence
  Description of Artificial Sequence: Synthetic oligonucleotide
ucaacaagucuaucaaauc

SEQ ID NO: 2041829 - RNA, 19 nt, Artificial Sequence
  Description of Artificial Sequence: Synthetic oligonucleotide
ugucauauguaggaagcug

SEQ ID NO: 2041830 - RNA, 19 nt, Artificial Sequence
  Description of Artificial Sequence: Synthetic oligonucleotide
aaggaguaauuggaaaucu

SEQ ID NO: 2041831 - RNA, 19 nt, Artificial Sequence
  Description of Artificial Sequence: Synthetic oligonucleotide
auauuauaguugucuucuc

SEQ ID NO: 2041832 - RNA, 19 nt, Artificial Sequence
  Description of Artificial Sequence: Synthetic oligonucleotide
gaggcuagcauuaaaugca

SEQ ID NO: 2041833 - RNA, 19 nt, Artificial Sequence
  Description of Artificial Sequence: Synthetic oligonucleotide
aacaagucuaucaaaucaa

SEQ ID NO: 2041834 - RNA, 19 nt, Artificial Sequence
  Description of Artificial Sequence: Synthetic oligonucleotide
ugcaauacuuuaauagguu

SEQ ID NO: 2041835 - RNA, 19 nt, Artificial Sequence
  Description of Artificial Sequence: Synthetic oligonucleotide
ugccacgcaauucugaaua

SEQ ID NO: 2041836 - RNA, 19 nt, Artificial Sequence
  Description of Artificial Sequence: Synthetic oligonucleotide
uuacuaaaugucugaggac

SEQ ID NO: 2041837 - RNA, 19 nt, Artificial Sequence
  Description of Artificial Sequence: Synthetic oligonucleotide
gacugcaaaaggugaguag

SEQ ID NO: 2041838 - RNA, 19 nt, Artificial Sequence
  Description of Artificial Sequence: Synthetic oligonucleotide
aaagggguguuugaaauua

SEQ ID NO: 2041839 - RNA, 19 nt, Artificial Sequence
  Description of Artificial Sequence: Synthetic oligonucleotide
ugcaggugaauuauuugaa

SEQ ID NO: 2041840 - RNA, 19 nt, Artificial Sequence
  Description of Artificial Sequence: Synthetic oligonucleotide
auuguauauguuaacaauu

SEQ ID NO: 2041841 - RNA, 19 nt, Artificial Sequence
  Description of Artificial Sequence: Synthetic oligonucleotide
agguacuuuauauuacuaa

SEQ ID NO: 2041842 - RNA, 19 nt, Artificial Sequence
  Description of Artificial Sequence: Synthetic oligonucleotide
ccugaggagauuuaaacac

SEQ ID NO: 2041843 - RNA, 19 nt, Artificial Sequence
  Description of Artificial Sequence: Synthetic oligonucleotide
ccuguauaaacauuucagc

SEQ ID NO: 2041844 - RNA, 19 nt, Artificial Sequence
  Description of Artificial Sequence: Synthetic oligonucleotide
caauccacugcaauaaaga

SEQ ID NO: 2041845 - RNA, 19 nt, Artificial Sequence
  Description of Artificial Sequence: Synthetic oligonucleotide
aaaugauauuauaguuguc

SEQ ID NO: 2041846 - RNA, 19 nt, Artificial Sequence
  Description of Artificial Sequence: Synthetic oligonucleotide
auauguuaacaauuuccaa

SEQ ID NO: 2041847 - RNA, 19 nt, Artificial Sequence
  Description of Artificial Sequence: Synthetic oligonucleotide
aucugugucugcauaguac

SEQ ID NO: 2041848 - RNA, 19 nt, Artificial Sequence
  Description of Artificial Sequence: Synthetic oligonucleotide
uggauuugggaagauacuc

SEQ ID NO: 2041849 - RNA, 19 nt, Artificial Sequence
  Description of Artificial Sequence: Synthetic oligonucleotide
caagucuaucaaaucaauc

SEQ ID NO: 2041850 - RNA, 19 nt, Artificial Sequence
  Description of Artificial Sequence: Synthetic oligonucleotide
acaauuuccaaugacuauu

SEQ ID NO: 2041851 - RNA, 19 nt, Artificial Sequence
  Description of Artificial Sequence: Synthetic oligonucleotide
gaacaauuguauauguuaa

SEQ ID NO: 2041852 - RNA, 19 nt, Artificial Sequence
  Description of Artificial Sequence: Synthetic oligonucleotide
aguaaccuauuccaguaau

SEQ ID NO: 2041853 - RNA, 19 nt, Artificial Sequence
  Description of Artificial Sequence: Synthetic oligonucleotide
uguuugaaauuaccuacuu

SEQ ID NO: 2041854 - RNA, 19 nt, Artificial Sequence
  Description of Artificial Sequence: Synthetic oligonucleotide
ggugaauuauuugaaauuc

SEQ ID NO: 2041855 - RNA, 19 nt, Artificial Sequence
  Description of Artificial Sequence: Synthetic oligonucleotide
cuuggugugaaauuuaaau

SEQ ID NO: 2041856 - RNA, 19 nt, Artificial Sequence
  Description of Artificial Sequence: Synthetic oligonucleotide
cuguuaauaaaccuguaua

SEQ ID NO: 2041857 - RNA, 19 nt, Artificial Sequence
  Description of Artificial Sequence: Synthetic oligonucleotide
gugaauuauuugaaauucc

SEQ ID NO: 2041858 - RNA, 19 nt, Artificial Sequence
  Description of Artificial Sequence: Synthetic oligonucleotide
uguugcaaggcaugccgcc

SEQ ID NO: 2041859 - RNA, 19 nt, Artificial Sequence
  Description of Artificial Sequence: Synthetic oligonucleotide
auuuucuagcuguauuuaa

SEQ ID NO: 2041860 - RNA, 19 nt, Artificial Sequence
  Description of Artificial Sequence: Synthetic oligonucleotide
aaaauauaaugaacagaaa

SEQ ID NO: 2041861 - RNA, 19 nt, Artificial Sequence
  Description of Artificial Sequence: Synthetic oligonucleotide
gcuaaaauucugcagguga

SEQ ID NO: 2041862 - RNA, 19 nt, Artificial Sequence
  Description of Artificial Sequence: Synthetic oligonucleotide
guaauuggaaaucuuugcu

SEQ ID NO: 2041863 - RNA, 19 nt, Artificial Sequence
  Description of Artificial Sequence: Synthetic oligonucleotide
ugugucugcauaguacaug

SEQ ID NO: 2041864 - RNA, 19 nt, Artificial Sequence
  Description of Artificial Sequence: Synthetic oligonucleotide
uagguuacauauuuucauu

SEQ ID NO: 2041865 - RNA, 19 nt, Artificial Sequence
  Description of Artificial Sequence: Synthetic oligonucleotide
uuauaguugucuucucuuu

SEQ ID NO: 2041866 - RNA, 19 nt, Artificial Sequence
  Description of Artificial Sequence: Synthetic oligonucleotide
uagcuguauuuaaaggggu

SEQ ID NO: 2041867 - RNA, 19 nt, Artificial Sequence
  Description of Artificial Sequence: Synthetic oligonucleotide
caauuguauauguuaacaa

SEQ ID NO: 2041868 - RNA, 19 nt, Artificial Sequence
  Description of Artificial Sequence: Synthetic oligonucleotide
aaacuguaaaugauauuau

SEQ ID NO: 2041869 - RNA, 19 nt, Artificial Sequence
  Description of Artificial Sequence: Synthetic oligonucleotide
aguaguuuggagcgugccu

SEQ ID NO: 2041870 - RNA, 19 nt, Artificial Sequence
  Description of Artificial Sequence: Synthetic oligonucleotide
cuguaaaugauauuauagu

SEQ ID NO: 2041871 - RNA, 19 nt, Artificial Sequence
  Description of Artificial Sequence: Synthetic oligonucleotide
uucaugacuuccuuauuuu

SEQ ID NO: 2041872 - RNA, 19 nt, Artificial Sequence
  Description of Artificial Sequence: Synthetic oligonucleotide
auucaugguuggcaucuag

SEQ ID NO: 2041873 - RNA, 19 nt, Artificial Sequence
  Description of Artificial Sequence: Synthetic oligonucleotide
aaaucugugucugcauagu

SEQ ID NO: 2041874 - RNA, 19 nt, Artificial Sequence
  Description of Artificial Sequence: Synthetic oligonucleotide
aacaacccuucaugacuuc

SEQ ID NO: 2041875 - RNA, 19 nt, Artificial Sequence
  Description of Artificial Sequence: Synthetic oligonucleotide
acauauuuacagucccacu

SEQ ID NO: 2041876 - RNA, 19 nt, Artificial Sequence
  Description of Artificial Sequence: Synthetic oligonucleotide
uguaggaagcuggaaagau

SEQ ID NO: 2041877 - RNA, 19 nt, Artificial Sequence
  Description of Artificial Sequence: Synthetic oligonucleotide
agggguguuugaaauuacc

SEQ ID NO: 2041878 - RNA, 19 nt, Artificial Sequence
  Description of Artificial Sequence: Synthetic oligonucleotide
cugcaggugaauuauuuga

SEQ ID NO: 2041879 - RNA, 19 nt, Artificial Sequence
  Description of Artificial Sequence: Synthetic oligonucleotide
cuaauauaucaaaaugugu

SEQ ID NO: 2041880 - RNA, 19 nt, Artificial Sequence
  Description of Artificial Sequence: Synthetic oligonucleotide
aauuaccuacuuaaucaaa

SEQ ID NO: 2041881 - RNA, 19 nt, Artificial Sequence
  Description of Artificial Sequence: Synthetic oligonucleotide
guaguaaccuauuccagua

SEQ ID NO: 2041882 - RNA, 19 nt, Artificial Sequence
  Description of Artificial Sequence: Synthetic oligonucleotide
uuucuauacaagguaggua

SEQ ID NO: 2041883 - RNA, 19 nt, Artificial Sequence
  Description of Artificial Sequence: Synthetic oligonucleotide
aagguagguacaugggcua

SEQ ID NO: 2041884 - RNA, 19 nt, Artificial Sequence
  Description of Artificial Sequence: Synthetic oligonucleotide
uuuacucccuuuucugcuc

SEQ ID NO: 2041885 - RNA, 19 nt, Artificial Sequence
  Description of Artificial Sequence: Synthetic oligonucleotide
ugaguaguuuggagcgugc

SEQ ID NO: 2041886 - RNA, 19 nt, Artificial Sequence
  Description of Artificial Sequence: Synthetic oligonucleotide
uuggcaucuaggagagagc

SEQ ID NO: 2041887 - RNA, 19 nt, Artificial Sequence
  Description of Artificial Sequence: Synthetic oligonucleotide
uggagcgugccuuuaccug

SEQ ID NO: 2041888 - RNA, 19 nt, Artificial Sequence
  Description of Artificial Sequence: Synthetic oligonucleotide
auuuaaagggguguuugaa

SEQ ID NO: 2041889 - RNA, 19 nt, Artificial Sequence
  Description of Artificial Sequence: Synthetic oligonucleotide
ugggcauaccuggauuugg

SEQ ID NO: 2041890 - RNA, 19 nt, Artificial Sequence
  Description of Artificial Sequence: Synthetic oligonucleotide
gcaucuaggagagagcaag

SEQ ID NO: 2041891 - RNA, 19 nt, Artificial Sequence
  Description of Artificial Sequence: Synthetic oligonucleotide
ugcgcuugcuguuaauaaa

SEQ ID NO: 2041892 - RNA, 19 nt, Artificial Sequence
  Description of Artificial Sequence: Synthetic oligonucleotide
aguacuacugcagguaaau

SEQ ID NO: 2041893 - RNA, 19 nt, Artificial Sequence
  Description of Artificial Sequence: Synthetic oligonucleotide
auaucaaaauguguugcaa

SEQ ID NO: 2041894 - RNA, 19 nt, Artificial Sequence
  Description of Artificial Sequence: Synthetic oligonucleotide
aagggguguuugaaauuac

SEQ ID NO: 2041895 - RNA, 19 nt, Artificial Sequence
  Description of Artificial Sequence: Synthetic oligonucleotide
ggagcgugccuuuaccugg

SEQ ID NO: 2041896 - RNA, 19 nt, Artificial Sequence
  Description of Artificial Sequence: Synthetic oligonucleotide
ucaugacuuccuuauuuua

SEQ ID NO: 2041897 - RNA, 19 nt, Artificial Sequence
  Description of Artificial Sequence: Synthetic oligonucleotide
acugcacuauucaugguug

SEQ ID NO: 2041898 - RNA, 19 nt, Artificial Sequence
  Description of Artificial Sequence: Synthetic oligonucleotide
auguguugcaaggcaugcc

SEQ ID NO: 2041899 - RNA, 19 nt, Artificial Sequence
  Description of Artificial Sequence: Synthetic oligonucleotide
uuacucccuuuucugcuca

SEQ ID NO: 2041900 - RNA, 19 nt, Artificial Sequence
  Description of Artificial Sequence: Synthetic oligonucleotide
gacugcauucugaaugggc

SEQ ID NO: 2041901 - RNA, 19 nt, Artificial Sequence
  Description of Artificial Sequence: Synthetic oligonucleotide
uauuaaagaugggcauacc

SEQ ID NO: 2041902 - RNA, 19 nt, Artificial Sequence
  Description of Artificial Sequence: Synthetic oligonucleotide
cuacacaaaguuaaauaua

SEQ ID NO: 2041903 - RNA, 19 nt, Artificial Sequence
  Description of Artificial Sequence: Synthetic oligonucleotide
gucuaucaaaucaauccac

SEQ ID NO: 2041904 - RNA, 19 nt, Artificial Sequence
  Description of Artificial Sequence: Synthetic oligonucleotide
uaguaaccuauuccaguaa

SEQ ID NO: 2041905 - RNA, 19 nt, Artificial Sequence
  Description of Artificial Sequence: Synthetic oligonucleotide
uguauuuaaagggguguuu

SEQ ID NO: 2041906 - RNA, 19 nt, Artificial Sequence
  Description of Artificial Sequence: Synthetic oligonucleotide
aaacaacccuucaugacuu

SEQ ID NO: 2041907 - RNA, 19 nt, Artificial Sequence
  Description of Artificial Sequence: Synthetic oligonucleotide
uugcgcuugcuguuaauaa

SEQ ID NO: 2041908 - RNA, 19 nt, Artificial Sequence
  Description of Artificial Sequence: Synthetic oligonucleotide
ugcacuauucaugguuggc

SEQ ID NO: 2041909 - RNA, 19 nt, Artificial Sequence
  Description of Artificial Sequence: Synthetic oligonucleotide
aagaacaauuguauauguu

SEQ ID NO: 2041910 - RNA, 19 nt, Artificial Sequence
  Description of Artificial Sequence: Synthetic oligonucleotide
uuggagcgugccuuuaccu

SEQ ID NO: 2041911 - RNA, 19 nt, Artificial Sequence
  Description of Artificial Sequence: Synthetic oligonucleotide
ugcuaaaauucugcaggug

SEQ ID NO: 2041912 - RNA, 19 nt, Artificial Sequence
  Description of Artificial Sequence: Synthetic oligonucleotide
cugcacuauucaugguugg

SEQ ID NO: 2041913 - RNA, 19 nt, Artificial Sequence
  Description of Artificial Sequence: Synthetic oligonucleotide
uaaagggguguuugaaauu

SEQ ID NO: 2041914 - RNA, 19 nt, Artificial Sequence
  Description of Artificial Sequence: Synthetic oligonucleotide
cugaggagauuuaaacaca

SEQ ID NO: 2041915 - RNA, 19 nt, Artificial Sequence
  Description of Artificial Sequence: Synthetic oligonucleotide
uugucauauguaggaagcu

SEQ ID NO: 2041916 - RNA, 19 nt, Artificial Sequence
  Description of Artificial Sequence: Synthetic oligonucleotide
gauacucugugugaggcua

SEQ ID NO: 2041917 - RNA, 19 nt, Artificial Sequence
  Description of Artificial Sequence: Synthetic oligonucleotide
auacuuuaauagguuacau

SEQ ID NO: 2041918 - RNA, 19 nt, Artificial Sequence
  Description of Artificial Sequence: Synthetic oligonucleotide
caaaggaguaauuggaaau

SEQ ID NO: 2041919 - RNA, 19 nt, Artificial Sequence
  Description of Artificial Sequence: Synthetic oligonucleotide
uaguacuacugcagguaaa

SEQ ID NO: 2041920 - RNA, 19 nt, Artificial Sequence
  Description of Artificial Sequence: Synthetic oligonucleotide
gaagcauggcuaauauauc

SEQ ID NO: 2041921 - RNA, 19 nt, Artificial Sequence
  Description of Artificial Sequence: Synthetic oligonucleotide
acgcaauucugaauaaagu

SEQ ID NO: 2041922 - RNA, 19 nt, Artificial Sequence
  Description of Artificial Sequence: Synthetic oligonucleotide
aacccuucaugacuuccuu

SEQ ID NO: 2041923 - RNA, 19 nt, Artificial Sequence
  Description of Artificial Sequence: Synthetic oligonucleotide
caguuaguugcgcuugcug

SEQ ID NO: 2041924 - RNA, 19 nt, Artificial Sequence
  Description of Artificial Sequence: Synthetic oligonucleotide
gaguaguuuggagcgugcc

SEQ ID NO: 2041925 - RNA, 19 nt, Artificial Sequence
  Description of Artificial Sequence: Synthetic oligonucleotide
ggcuaauauaucaaaaugu

SEQ ID NO: 2041926 - RNA, 19 nt, Artificial Sequence
  Description of Artificial Sequence: Synthetic oligonucleotide
ggcuacacaaaguuaaaua

SEQ ID NO: 2041927 - RNA, 19 nt, Artificial Sequence
  Description of Artificial Sequence: Synthetic oligonucleotide
ugcgcuuggugugaaauuu

SEQ ID NO: 2041928 - RNA, 19 nt, Artificial Sequence
  Description of Artificial Sequence: Synthetic oligonucleotide
caagguagguacaugggcu

SEQ ID NO: 2041929 - RNA, 19 nt, Artificial Sequence
  Description of Artificial Sequence: Synthetic oligonucleotide
aaaugcacauaugcauuua

SEQ ID NO: 2041930 - RNA, 19 nt, Artificial Sequence
  Description of Artificial Sequence: Synthetic oligonucleotide
agcuguauuuaaaggggug

SEQ ID NO: 2041931 - RNA, 19 nt, Artificial Sequence
  Description of Artificial Sequence: Synthetic oligonucleotide
acacaacugcacuauucau

SEQ ID NO: 2041932 - RNA, 19 nt, Artificial Sequence
  Description of Artificial Sequence: Synthetic oligonucleotide
ggacaaaggaguaauugga

SEQ ID NO: 2041933 - RNA, 19 nt, Artificial Sequence
  Description of Artificial Sequence: Synthetic oligonucleotide
ccaguaauaggauuuagua

SEQ ID NO: 2041934 - RNA, 19 nt, Artificial Sequence
  Description of Artificial Sequence: Synthetic oligonucleotide
ugaggacaaaggaguaauu

SEQ ID NO: 2041935 - RNA, 19 nt, Artificial Sequence
  Description of Artificial Sequence: Synthetic oligonucleotide
ggugugaaauuuaaaugca

SEQ ID NO: 2041936 - RNA, 19 nt, Artificial Sequence
  Description of Artificial Sequence: Synthetic oligonucleotide
uuggaaaucuuugcucuuu

SEQ ID NO: 2041937 - RNA, 19 nt, Artificial Sequence
  Description of Artificial Sequence: Synthetic oligonucleotide
gugaguaguuuggagcgug

SEQ ID NO: 2041938 - RNA, 19 nt, Artificial Sequence
  Description of Artificial Sequence: Synthetic oligonucleotide
aucaauccacugcaauaaa

SEQ ID NO: 2041939 - RNA, 19 nt, Artificial Sequence
  Description of Artificial Sequence: Synthetic oligonucleotide
ugcuguuaauaaaccugua

SEQ ID NO: 2041940 - RNA, 19 nt, Artificial Sequence
  Description of Artificial Sequence: Synthetic oligonucleotide
acaagucuaucaaaucaau

SEQ ID NO: 2041941 - RNA, 19 nt, Artificial Sequence
  Description of Artificial Sequence: Synthetic oligonucleotide
guaggaagcuggaaagauc

SEQ ID NO: 2041942 - RNA, 19 nt, Artificial Sequence
  Description of Artificial Sequence: Synthetic oligonucleotide
uggaagcauggcuaauaua

SEQ ID NO: 2041943 - RNA, 19 nt, Artificial Sequence
  Description of Artificial Sequence: Synthetic oligonucleotide
guuuggagcgugccuuuac

SEQ ID NO: 2041944 - RNA, 19 nt, Artificial Sequence
  Description of Artificial Sequence: Synthetic oligonucleotide
uaccuggaagcauggcuaa

SEQ ID NO: 2041945 - RNA, 19 nt, Artificial Sequence
  Description of Artificial Sequence: Synthetic oligonucleotide
caggugaauuauuugaaau

SEQ ID NO: 2041946 - RNA, 19 nt, Artificial Sequence
  Description of Artificial Sequence: Synthetic oligonucleotide
uuaguugcgcuugcuguua

SEQ ID NO: 2041947 - RNA, 19 nt, Artificial Sequence
  Description of Artificial Sequence: Synthetic oligonucleotide
gcaauacuuuaauagguua

SEQ ID NO: 2041948 - RNA, 19 nt, Artificial Sequence
  Description of Artificial Sequence: Synthetic oligonucleotide
gaaaacuguaaaugauauu

SEQ ID NO: 2041949 - RNA, 19 nt, Artificial Sequence
  Description of Artificial Sequence: Synthetic oligonucleotide
acuaaaugucugaggacaa

SEQ ID NO: 2041950 - RNA, 19 nt, Artificial Sequence
  Description of Artificial Sequence: Synthetic oligonucleotide
agcauggcuaauauaucaa

SEQ ID NO: 2041951 - RNA, 19 nt, Artificial Sequence
  Description of Artificial Sequence: Synthetic oligonucleotide
agagagcaaggacugcauu

SEQ ID NO: 2041952 - RNA, 19 nt, Artificial Sequence
  Description of Artificial Sequence: Synthetic oligonucleotide
ggguguuugaaauuaccua

SEQ ID NO: 2041953 - RNA, 19 nt, Artificial Sequence
  Description of Artificial Sequence: Synthetic oligonucleotide
cccaaucccagagagacug

SEQ ID NO: 2041954 - RNA, 19 nt, Artificial Sequence
  Description of Artificial Sequence: Synthetic oligonucleotide
gggaagauacucuguguga

SEQ ID NO: 2041955 - RNA, 19 nt, Artificial Sequence
  Description of Artificial Sequence: Synthetic oligonucleotide
gugugaaauuuaaaugcaa

SEQ ID NO: 2041956 - RNA, 19 nt, Artificial Sequence
  Description of Artificial Sequence: Synthetic oligonucleotide
aaucccagagagacugcaa

SEQ ID NO: 2041957 - RNA, 19 nt, Artificial Sequence
  Description of Artificial Sequence: Synthetic oligonucleotide
cugugugaggcuagcauua

SEQ ID NO: 2041958 - RNA, 19 nt, Artificial Sequence
  Description of Artificial Sequence: Synthetic oligonucleotide
guaauaggauuuaguacua

SEQ ID NO: 2041959 - RNA, 19 nt, Artificial Sequence
  Description of Artificial Sequence: Synthetic oligonucleotide
ccuuuaccuggaagcaugg

SEQ ID NO: 2041960 - RNA, 19 nt, Artificial Sequence
  Description of Artificial Sequence: Synthetic oligonucleotide
ucccaaucccagagagacu

SEQ ID NO: 2041961 - RNA, 19 nt, Artificial Sequence
  Description of Artificial Sequence: Synthetic oligonucleotide
caaaucaauccacugcaau

SEQ ID NO: 2041962 - RNA, 19 nt, Artificial Sequence
  Description of Artificial Sequence: Synthetic oligonucleotide
ugcaaggcaugccgccagu

SEQ ID NO: 2041963 - RNA, 19 nt, Artificial Sequence
  Description of Artificial Sequence: Synthetic oligonucleotide
uaguugcgcuugcuguuaa

SEQ ID NO: 2041964 - RNA, 19 nt, Artificial Sequence
  Description of Artificial Sequence: Synthetic oligonucleotide
ugugugaggcuagcauuaa

SEQ ID NO: 2041965 - RNA, 19 nt, Artificial Sequence
  Description of Artificial Sequence: Synthetic oligonucleotide
gugcuaaaauucugcaggu

SEQ ID NO: 2041966 - RNA, 19 nt, Artificial Sequence
  Description of Artificial Sequence: Synthetic oligonucleotide
caugggcuacacaaaguua

SEQ ID NO: 2041967 - RNA, 19 nt, Artificial Sequence
  Description of Artificial Sequence: Synthetic oligonucleotide
guaaccuauuccaguaaua

SEQ ID NO: 2041968 - RNA, 19 nt, Artificial Sequence
  Description of Artificial Sequence: Synthetic oligonucleotide
guguugcaaggcaugccgc

SEQ ID NO: 2041969 - RNA, 19 nt, Artificial Sequence
  Description of Artificial Sequence: Synthetic oligonucleotide
gggcauaccuggauuuggg

SEQ ID NO: 2041970 - RNA, 19 nt, Artificial Sequence
  Description of Artificial Sequence: Synthetic oligonucleotide
auacucugugugaggcuag

SEQ ID NO: 2041971 - RNA, 19 nt, Artificial Sequence
  Description of Artificial Sequence: Synthetic oligonucleotide
gcauggcuaauauaucaaa

SEQ ID NO: 2041972 - RNA, 19 nt, Artificial Sequence
  Description of Artificial Sequence: Synthetic oligonucleotide
uaguuuggagcgugccuuu

SEQ ID NO: 2041973 - RNA, 19 nt, Artificial Sequence
  Description of Artificial Sequence: Synthetic oligonucleotide
gcuguuaauaaaccuguau

SEQ ID NO: 2041974 - RNA, 19 nt, Artificial Sequence
  Description of Artificial Sequence: Synthetic oligonucleotide
gcagguaaauagaacugca

SEQ ID NO: 2041975 - RNA, 19 nt, Artificial Sequence
  Description of Artificial Sequence: Synthetic oligonucleotide
ggcuuuuacaaaaugguuu

SEQ ID NO: 2041976 - RNA, 19 nt, Artificial Sequence
  Description of Artificial Sequence: Synthetic oligonucleotide
gcgcuugcuguuaauaaac

SEQ ID NO: 2041977 - RNA, 19 nt, Artificial Sequence
  Description of Artificial Sequence: Synthetic oligonucleotide
augcgcuuggugugaaauu

SEQ ID NO: 2041978 - RNA, 19 nt, Artificial Sequence
  Description of Artificial Sequence: Synthetic oligonucleotide
gcacuauucaugguuggca

SEQ ID NO: 2041979 - RNA, 19 nt, Artificial Sequence
  Description of Artificial Sequence: Synthetic oligonucleotide
guguuugaaauuaccuacu

SEQ ID NO: 2041980 - RNA, 19 nt, Artificial Sequence
  Description of Artificial Sequence: Synthetic oligonucleotide
gagacugcaaaaggugagu

SEQ ID NO: 2041981 - RNA, 19 nt, Artificial Sequence
  Description of Artificial Sequence: Synthetic oligonucleotide
aggaguaauuggaaaucuu

SEQ ID NO: 2041982 - RNA, 19 nt, Artificial Sequence
  Description of Artificial Sequence: Synthetic oligonucleotide
guugcaaggcaugccgcca

SEQ ID NO: 2041983 - RNA, 19 nt, Artificial Sequence
  Description of Artificial Sequence: Synthetic oligonucleotide
guugcgcuugcuguuaaua

SEQ ID NO: 2041984 - RNA, 19 nt, Artificial Sequence
  Description of Artificial Sequence: Synthetic oligonucleotide
guuaguugcgcuugcuguu

SEQ ID NO: 2041985 - RNA, 19 nt, Artificial Sequence
  Description of Artificial Sequence: Synthetic oligonucleotide
augcacauaugcauuuauu

SEQ ID NO: 2041986 - RNA, 19 nt, Artificial Sequence
  Description of Artificial Sequence: Synthetic oligonucleotide
cuggauuugggaagauacu

SEQ ID NO: 2041987 - RNA, 19 nt, Artificial Sequence
  Description of Artificial Sequence: Synthetic oligonucleotide
caaucccagagagacugca

SEQ ID NO: 2041988 - RNA, 19 nt, Artificial Sequence
  Description of Artificial Sequence: Synthetic oligonucleotide
acccuucaugacuuccuua

SEQ ID NO: 2041989 - RNA, 19 nt, Artificial Sequence
  Description of Artificial Sequence: Synthetic oligonucleotide
ggaagcuggaaagaucuua

SEQ ID NO: 2041990 - RNA, 19 nt, Artificial Sequence
  Description of Artificial Sequence: Synthetic oligonucleotide
guaguuuggagcgugccuu

SEQ ID NO: 2041991 - RNA, 19 nt, Artificial Sequence
  Description of Artificial Sequence: Synthetic oligonucleotide
ggcauaccuggauuuggga

SEQ ID NO: 2041992 - RNA, 19 nt, Artificial Sequence
  Description of Artificial Sequence: Synthetic oligonucleotide
aggcuagcauuaaaugcaa

SEQ ID NO: 2041993 - RNA, 19 nt, Artificial Sequence
  Description of Artificial Sequence: Synthetic oligonucleotide
aguugcgcuugcuguuaau

SEQ ID NO: 2041994 - RNA, 19 nt, Artificial Sequence
  Description of Artificial Sequence: Synthetic oligonucleotide
uauucaugguuggcaucua

SEQ ID NO: 2041995 - RNA, 19 nt, Artificial Sequence
  Description of Artificial Sequence: Synthetic oligonucleotide
acucugugugaggcuagca

SEQ ID NO: 2041996 - RNA, 19 nt, Artificial Sequence
  Description of Artificial Sequence: Synthetic oligonucleotide
cagucccacuucucaaaca

SEQ ID NO: 2041997 - RNA, 19 nt, Artificial Sequence
  Description of Artificial Sequence: Synthetic oligonucleotide
ggauuugggaagauacucu

SEQ ID NO: 2041998 - RNA, 19 nt, Artificial Sequence
  Description of Artificial Sequence: Synthetic oligonucleotide
guacaugcgcuugguguga

SEQ ID NO: 2041999 - RNA, 19 nt, Artificial Sequence
  Description of Artificial Sequence: Synthetic oligonucleotide
gcuguauuuaaaggggugu

SEQ ID NO: 2042000 - RNA, 19 nt, Artificial Sequence
  Description of Artificial Sequence: Synthetic oligonucleotide
uacaugcgcuuggugugaa

SEQ ID NO: 2042001 - RNA, 19 nt, Artificial Sequence
  Description of Artificial Sequence: Synthetic oligonucleotide
cuggaagcauggcuaauau

SEQ ID NO: 2042002 - RNA, 19 nt, Artificial Sequence
  Description of Artificial Sequence: Synthetic oligonucleotide
gggguguuugaaauuaccu

SEQ ID NO: 2042003 - RNA, 19 nt, Artificial Sequence
  Description of Artificial Sequence: Synthetic oligonucleotide
gcgugccuuuaccuggaag

SEQ ID NO: 2042004 - RNA, 19 nt, Artificial Sequence
  Description of Artificial Sequence: Synthetic oligonucleotide
accuggauuugggaagaua

SEQ ID NO: 2042005 - RNA, 19 nt, Artificial Sequence
  Description of Artificial Sequence: Synthetic oligonucleotide
aggcaugccgccaguuagu

SEQ ID NO: 2042006 - RNA, 19 nt, Artificial Sequence
  Description of Artificial Sequence: Synthetic oligonucleotide
acaugcgcuuggugugaaa

SEQ ID NO: 2042007 - RNA, 19 nt, Artificial Sequence
  Description of Artificial Sequence: Synthetic oligonucleotide
guacuacugcagguaaaua

SEQ ID NO: 2042008 - RNA, 19 nt, Artificial Sequence
  Description of Artificial Sequence: Synthetic oligonucleotide
gguagguacaugggcuaca

SEQ ID NO: 2042009 - RNA, 19 nt, Artificial Sequence
  Description of Artificial Sequence: Synthetic oligonucleotide
augccgccaguuaguugcg

SEQ ID NO: 2042010 - RNA, 19 nt, Artificial Sequence
  Description of Artificial Sequence: Synthetic oligonucleotide
gagcgugccuuuaccugga

SEQ ID NO: 2042011 - RNA, 19 nt, Artificial Sequence
  Description of Artificial Sequence: Synthetic oligonucleotide
gucugaggacaaaggagua

SEQ ID NO: 2042012 - RNA, 19 nt, Artificial Sequence
  Description of Artificial Sequence: Synthetic oligonucleotide
ccaaucccagagagacugc

SEQ ID NO: 2042013 - RNA, 19 nt, Artificial Sequence
  Description of Artificial Sequence: Synthetic oligonucleotide
caugcgcuuggugugaaau

SEQ ID NO: 2042014 - RNA, 19 nt, Artificial Sequence
  Description of Artificial Sequence: Synthetic oligonucleotide
aguuuggagcgugccuuua

SEQ ID NO: 2042015 - RNA, 19 nt, Artificial Sequence
  Description of Artificial Sequence: Synthetic oligonucleotide
ugccgccaguuaguugcgc

SEQ ID NO: 2042016 - RNA, 19 nt, Artificial Sequence
  Description of Artificial Sequence: Synthetic oligonucleotide
cgcaauucugaauaaaguu

SEQ ID NO: 2042017 - RNA, 19 nt, Artificial Sequence
  Description of Artificial Sequence: Synthetic oligonucleotide
cuguauuuaaagggguguu

SEQ ID NO: 2042018 - RNA, 19 nt, Artificial Sequence
  Description of Artificial Sequence: Synthetic oligonucleotide
gcaugccgccaguuaguug

SEQ ID NO: 2042019 - RNA, 19 nt, Artificial Sequence
  Description of Artificial Sequence: Synthetic oligonucleotide
caaggacugcauucugaau

SEQ ID NO: 2042020 - RNA, 19 nt, Artificial Sequence
  Description of Artificial Sequence: Synthetic oligonucleotide
cugugucugcauaguacau

SEQ ID NO: 2042021 - RNA, 19 nt, Artificial Sequence
  Description of Artificial Sequence: Synthetic oligonucleotide
ccuauuccaguaauaggau

SEQ ID NO: 2042022 - RNA, 19 nt, Artificial Sequence
  Description of Artificial Sequence: Synthetic oligonucleotide
gccacgcaauucugaauaa

SEQ ID NO: 2042023 - RNA, 19 nt, Artificial Sequence
  Description of Artificial Sequence: Synthetic oligonucleotide
agcgugccuuuaccuggaa

SEQ ID NO: 2042024 - RNA, 19 nt, Artificial Sequence
  Description of Artificial Sequence: Synthetic oligonucleotide
ccuggaagcauggcuaaua

SEQ ID NO: 2042025 - RNA, 19 nt, Artificial Sequence
  Description of Artificial Sequence: Synthetic oligonucleotide
caacugcacuauucauggu

SEQ ID NO: 2042026 - RNA, 19 nt, Artificial Sequence
  Description of Artificial Sequence: Synthetic oligonucleotide
ggcaucuaggagagagcaa

SEQ ID NO: 2042027 - RNA, 19 nt, Artificial Sequence
  Description of Artificial Sequence: Synthetic oligonucleotide
cgcuuggugugaaauuuaa

SEQ ID NO: 2042028 - RNA, 19 nt, Artificial Sequence
  Description of Artificial Sequence: Synthetic oligonucleotide
ggcuagcauuaaaugcaaa

SEQ ID NO: 2042029 - RNA, 19 nt, Artificial Sequence
  Description of Artificial Sequence: Synthetic oligonucleotide
cgccaguuaguugcgcuug

SEQ ID NO: 2042030 - RNA, 19 nt, Artificial Sequence
  Description of Artificial Sequence: Synthetic oligonucleotide
ggugaguaguuuggagcgu

SEQ ID NO: 2042031 - RNA, 19 nt, Artificial Sequence
  Description of Artificial Sequence: Synthetic oligonucleotide
aagcaccccugaggagauu

SEQ ID NO: 2042032 - RNA, 19 nt, Artificial Sequence
  Description of Artificial Sequence: Synthetic oligonucleotide
ccacgcaauucugaauaaa

SEQ ID NO: 2042033 - RNA, 19 nt, Artificial Sequence
  Description of Artificial Sequence: Synthetic oligonucleotide
gcgcuuggugugaaauuua

SEQ ID NO: 2042034 - RNA, 19 nt, Artificial Sequence
  Description of Artificial Sequence: Synthetic oligonucleotide
gguuggcaucuaggagaga

SEQ ID NO: 2042035 - RNA, 19 nt, Artificial Sequence
  Description of Artificial Sequence: Synthetic oligonucleotide
ggcaugccgccaguuaguu

SEQ ID NO: 2042036 - RNA, 19 nt, Artificial Sequence
  Description of Artificial Sequence: Synthetic oligonucleotide
gcaccccugaggagauuua

SEQ ID NO: 2042037 - RNA, 19 nt, Artificial Sequence
  Description of Artificial Sequence: Synthetic oligonucleotide
gcaaggcaugccgccaguu

SEQ ID NO: 2042038 - RNA, 19 nt, Artificial Sequence
  Description of Artificial Sequence: Synthetic oligonucleotide
ccgccaguuaguugcgcuu

SEQ ID NO: 2042039 - RNA, 19 nt, Artificial Sequence
  Description of Artificial Sequence: Synthetic oligonucleotide
agagguuucauuuguaggc

SEQ ID NO: 2042040 - RNA, 19 nt, Artificial Sequence
  Description of Artificial Sequence: Synthetic oligonucleotide
ucucuuaucuggcagaagg

SEQ ID NO: 2042041 - RNA, 19 nt, Artificial Sequence
  Description of Artificial Sequence: Synthetic oligonucleotide
uguaauauuggcugaaucc

SEQ ID NO: 2042042 - RNA, 19 nt, Artificial Sequence
  Description of Artificial Sequence: Synthetic oligonucleotide
acuauggucuauuaaaagg

SEQ ID NO: 2042043 - RNA, 19 nt, Artificial Sequence
  Description of Artificial Sequence: Synthetic oligonucleotide
uuaacuggcacuauggucu

SEQ ID NO: 2042044 - RNA, 19 nt, Artificial Sequence
  Description of Artificial Sequence: Synthetic oligonucleotide
ucauuuguaggcaagagcu

SEQ ID NO: 2042045 - RNA, 19 nt, Artificial Sequence
  Description of Artificial Sequence: Synthetic oligonucleotide
aaagaaugguuucugacug

SEQ ID NO: 2042046 - RNA, 19 nt, Artificial Sequence
  Description of Artificial Sequence: Synthetic oligonucleotide
ucuuagaagauucuguagc

SEQ ID NO: 2042047 - RNA, 19 nt, Artificial Sequence
  Description of Artificial Sequence: Synthetic oligonucleotide
uaaaauagcacagccacgg

SEQ ID NO: 2042048 - RNA, 19 nt, Artificial Sequence
  Description of Artificial Sequence: Synthetic oligonucleotide
aauccugugucuuucugac

SEQ ID NO: 2042049 - RNA, 19 nt, Artificial Sequence
  Description of Artificial Sequence: Synthetic oligonucleotide
auugucauaguggugaggc

SEQ ID NO: 2042050 - RNA, 19 nt, Artificial Sequence
  Description of Artificial Sequence: Synthetic oligonucleotide
agaacaauguguuuuaaca

SEQ ID NO: 2042051 - RNA, 19 nt, Artificial Sequence
  Description of Artificial Sequence: Synthetic oligonucleotide
agaauaaucacuuguguca

SEQ ID NO: 2042052 - RNA, 19 nt, Artificial Sequence
  Description of Artificial Sequence: Synthetic oligonucleotide
aauguugcaguuuccagug

SEQ ID NO: 2042053 - RNA, 19 nt, Artificial Sequence
  Description of Artificial Sequence: Synthetic oligonucleotide
  modified_base (8)..(8): a, c, u, g, unknown or other
uucaaggngaagcugagug

SEQ ID NO: 2042054 - RNA, 19 nt, Artificial Sequence
  Description of Artificial Sequence: Synthetic oligonucleotide
cuagacauugucauagugg

SEQ ID NO: 2042055 - RNA, 19 nt, Artificial Sequence
  Description of Artificial Sequence: Synthetic oligonucleotide
aacauuacaguucaguguu

SEQ ID NO: 2042056 - RNA, 19 nt, Artificial Sequence
  Description of Artificial Sequence: Synthetic oligonucleotide
uuaauaguuaauguugcag

SEQ ID NO: 2042057 - RNA, 19 nt, Artificial Sequence
  Description of Artificial Sequence: Synthetic oligonucleotide
  modified_base (14)..(14): a, c, u, g, unknown or other
uuguguuucaaggngaagc

SEQ ID NO: 2042058 - RNA, 19 nt, Artificial Sequence
  Description of Artificial Sequence: Synthetic oligonucleotide
uguacuguccacaacauua

SEQ ID NO: 2042059 - RNA, 19 nt, Artificial Sequence
  Description of Artificial Sequence: Synthetic oligonucleotide
aguguugcaggauuuuccc

SEQ ID NO: 2042060 - RNA, 19 nt, Artificial Sequence
  Description of Artificial Sequence: Synthetic oligonucleotide
ucauuauuguaauauuggc

SEQ ID NO: 2042061 - RNA, 19 nt, Artificial Sequence
  Description of Artificial Sequence: Synthetic oligonucleotide
uaauaguuaauguugcagu

SEQ ID NO: 2042062 - RNA, 19 nt, Artificial Sequence
  Description of Artificial Sequence: Synthetic oligonucleotide
  modified_base (11)..(11): a, c, u, g, unknown or other
uguuucaaggngaagcuga

SEQ ID NO: 2042063 - RNA, 19 nt, Artificial Sequence
  Description of Artificial Sequence: Synthetic oligonucleotide
uaucucauaagugaccagg

SEQ ID NO: 2042064 - RNA, 19 nt, Artificial Sequence
  Description of Artificial Sequence: Synthetic oligonucleotide
uuagguuucuagaauaauc

SEQ ID NO: 2042065 - RNA, 19 nt, Artificial Sequence
  Description of Artificial Sequence: Synthetic oligonucleotide
uuuuaucucauaagugacc

SEQ ID NO: 2042066 - RNA, 19 nt, Artificial Sequence
  Description of Artificial Sequence: Synthetic oligonucleotide
  modified_base (7)..(7): a, c, u, g, unknown or other
ucaaggngaagcugagugg

SEQ ID NO: 2042067 - RNA, 19 nt, Artificial Sequence
  Description of Artificial Sequence: Synthetic oligonucleotide
uuccuugccguuuagaugu

SEQ ID NO: 2042068 - RNA, 19 nt, Artificial Sequence
  Description of Artificial Sequence: Synthetic oligonucleotide
caacaaacgaaaauacuag

SEQ ID NO: 2042069 - RNA, 19 nt, Artificial Sequence
  Description of Artificial Sequence: Synthetic oligonucleotide
acaacauuacaguucagug

SEQ ID NO: 2042070 - RNA, 19 nt, Artificial Sequence
  Description of Artificial Sequence: Synthetic oligonucleotide
aaacgaaaauacuaguuua

SEQ ID NO: 2042071 - RNA, 19 nt, Artificial Sequence
  Description of Artificial Sequence: Synthetic oligonucleotide
agcucugugauuuugauuu

SEQ ID NO: 2042072 - RNA, 19 nt, Artificial Sequence
  Description of Artificial Sequence: Synthetic oligonucleotide
ugauuuugauuuuaucuca

SEQ ID NO: 2042073 - RNA, 19 nt, Artificial Sequence
  Description of Artificial Sequence: Synthetic oligonucleotide
uaagugaccaggcaggcac

SEQ ID NO: 2042074 - RNA, 19 nt, Artificial Sequence
  Description of Artificial Sequence: Synthetic oligonucleotide
agcguuuucauucaucaug

SEQ ID NO: 2042075 - RNA, 19 nt, Artificial Sequence
  Description of Artificial Sequence: Synthetic oligonucleotide
uucauuuguaggcaagagc

SEQ ID NO: 2042076 - RNA, 19 nt, Artificial Sequence
  Description of Artificial Sequence: Synthetic oligonucleotide
aacaaacgaaaauacuagu

SEQ ID NO: 2042077 - RNA, 19 nt, Artificial Sequence
  Description of Artificial Sequence: Synthetic oligonucleotide
aagcaacaaacgaaaauac

SEQ ID NO: 2042078 - RNA, 19 nt, Artificial Sequence
  Description of Artificial Sequence: Synthetic oligonucleotide
cuuucugacucuuagaaga

SEQ ID NO: 2042079 - RNA, 19 nt, Artificial Sequence
  Description of Artificial Sequence: Synthetic oligonucleotide
aauuccuugccguuuagau

SEQ ID NO: 2042080 - RNA, 19 nt, Artificial Sequence
  Description of Artificial Sequence: Synthetic oligonucleotide
uuuaucucauaagugacca

SEQ ID NO: 2042081 - RNA, 19 nt, Artificial Sequence
  Description of Artificial Sequence: Synthetic oligonucleotide
auacuaguuuaacuggcac

SEQ ID NO: 2042082 - RNA, 19 nt, Artificial Sequence
  Description of Artificial Sequence: Synthetic oligonucleotide
aauaguuaauguugcaguu

SEQ ID NO: 2042083 - RNA, 19 nt, Artificial Sequence
  Description of Artificial Sequence: Synthetic oligonucleotide
aaacuugaaauuucaccgu

SEQ ID NO: 2042084 - RNA, 19 nt, Artificial Sequence
  Description of Artificial Sequence: Synthetic oligonucleotide
  modified_base (13)..(13): a, c, u, g, unknown or other
uguguuucaaggngaagcu

SEQ ID NO: 2042085 - RNA, 19 nt, Artificial Sequence
  Description of Artificial Sequence: Synthetic oligonucleotide
cugcaauuguguuucaagg

SEQ ID NO: 2042086 - RNA, 19 nt, Artificial Sequence
  Description of Artificial Sequence: Synthetic oligonucleotide
ucugacucuuagaagauuc

SEQ ID NO: 2042087 - RNA, 19 nt, Artificial Sequence
  Description of Artificial Sequence: Synthetic oligonucleotide
cuugaaauuucaccguugc

SEQ ID NO: 2042088 - RNA, 19 nt, Artificial Sequence
  Description of Artificial Sequence: Synthetic oligonucleotide
uuccccuucucuuaucugg

SEQ ID NO: 2042089 - RNA, 19 nt, Artificial Sequence
  Description of Artificial Sequence: Synthetic oligonucleotide
uuagauguugugcacugcu

SEQ ID NO: 2042090 - RNA, 19 nt, Artificial Sequence
  Description of Artificial Sequence: Synthetic oligonucleotide
cucauaagugaccaggcag

SEQ ID NO: 2042091 - RNA, 19 nt, Artificial Sequence
  Description of Artificial Sequence: Synthetic oligonucleotide
uggucuauuaaaaggcaca

SEQ ID NO: 2042092 - RNA, 19 nt, Artificial Sequence
  Description of Artificial Sequence: Synthetic oligonucleotide
  modified_base (3)..(3): a, c, u, g, unknown or other
ganagggguugauugcugg

SEQ ID NO: 2042093 - RNA, 19 nt, Artificial Sequence
  Description of Artificial Sequence: Synthetic oligonucleotide
ugguagauuuuaaaacuug

SEQ ID NO: 2042094 - RNA, 19 nt, Artificial Sequence
  Description of Artificial Sequence: Synthetic oligonucleotide
auggcuuuaauaguuaaug

SEQ ID NO: 2042095 - RNA, 19 nt, Artificial Sequence
  Description of Artificial Sequence: Synthetic oligonucleotide
uuacaguucaguguugcag

SEQ ID NO: 2042096 - RNA, 19 nt, Artificial Sequence
  Description of Artificial Sequence: Synthetic oligonucleotide
aaaggcacaagaacaaugu

SEQ ID NO: 2042097 - RNA, 19 nt, Artificial Sequence
  Description of Artificial Sequence: Synthetic oligonucleotide
  modified_base (19)..(19): a, c, u, g, unknown or other
ugcaauuguguuucaaggn

SEQ ID NO: 2042098 - RNA, 19 nt, Artificial Sequence
  Description of Artificial Sequence: Synthetic oligonucleotide
uuuccuaauuccuugccgu

SEQ ID NO: 2042099 - RNA, 19 nt, Artificial Sequence
  Description of Artificial Sequence: Synthetic oligonucleotide
ccaaguuugggauuaaagg

SEQ ID NO: 2042100 - RNA, 19 nt, Artificial Sequence
  Description of Artificial Sequence: Synthetic oligonucleotide
gcuaaaauagcacagccac

SEQ ID NO: 2042101 - RNA, 19 nt, Artificial Sequence
  Description of Artificial Sequence: Synthetic oligonucleotide
uuuaacuggcacuaugguc

SEQ ID NO: 2042102 - RNA, 19 nt, Artificial Sequence
  Description of Artificial Sequence: Synthetic oligonucleotide
aguuuaacuggcacuaugg

SEQ ID NO: 2042103 - RNA, 19 nt, Artificial Sequence
  Description of Artificial Sequence: Synthetic oligonucleotide
ugcuaaaauagcacagcca

SEQ ID NO: 2042104 - RNA, 19 nt, Artificial Sequence
  Description of Artificial Sequence: Synthetic oligonucleotide
augaaguuggcauucaaua

SEQ ID NO: 2042105 - RNA, 19 nt, Artificial Sequence
  Description of Artificial Sequence: Synthetic oligonucleotide
ugucauaguggugaggccc

SEQ ID NO: 2042106 - RNA, 19 nt, Artificial Sequence
  Description of Artificial Sequence: Synthetic oligonucleotide
ucagggguaugucuguugc

SEQ ID NO: 2042107 - RNA, 19 nt, Artificial Sequence
  Description of Artificial Sequence: Synthetic oligonucleotide
auaaucacuugugucauug

SEQ ID NO: 2042108 - RNA, 19 nt, Artificial Sequence
  Description of Artificial Sequence: Synthetic oligonucleotide
cagguguucacacagagca

SEQ ID NO: 2042109 - RNA, 19 nt, Artificial Sequence
  Description of Artificial Sequence: Synthetic oligonucleotide
uaguuuaacuggcacuaug

SEQ ID NO: 2042110 - RNA, 19 nt, Artificial Sequence
  Description of Artificial Sequence: Synthetic oligonucleotide
acgaaaauacuaguuuaac

SEQ ID NO: 2042111 - RNA, 19 nt, Artificial Sequence
  Description of Artificial Sequence: Synthetic oligonucleotide
uaauauuggcugaaucccu

SEQ ID NO: 2042112 - RNA, 19 nt, Artificial Sequence
  Description of Artificial Sequence: Synthetic oligonucleotide
aaaaggggaaguccaagua

SEQ ID NO: 2042113 - RNA, 19 nt, Artificial Sequence
  Description of Artificial Sequence: Synthetic oligonucleotide
cagagguuucauuuguagg

SEQ ID NO: 2042114 - RNA, 19 nt, Artificial Sequence
  Description of Artificial Sequence: Synthetic oligonucleotide
auaguggugaggcccuggc

SEQ ID NO: 2042115 - RNA, 19 nt, Artificial Sequence
  Description of Artificial Sequence: Synthetic oligonucleotide
uccaccucuaguuacccug

SEQ ID NO: 2042116 - RNA, 19 nt, Artificial Sequence
  Description of Artificial Sequence: Synthetic oligonucleotide
ucccuaagggaaauaauuc

SEQ ID NO: 2042117 - RNA, 19 nt, Artificial Sequence
  Description of Artificial Sequence: Synthetic oligonucleotide
  modified_base (6)..(6): a, c, u, g, unknown or other
caaggngaagcugaguggg

SEQ ID NO: 2042118 - RNA, 19 nt, Artificial Sequence
  Description of Artificial Sequence: Synthetic oligonucleotide
cacucaacagcucuugagc

SEQ ID NO: 2042119 - RNA, 19 nt, Artificial Sequence
  Description of Artificial Sequence: Synthetic oligonucleotide
gauuuccuaauuccuugcc

SEQ ID NO: 2042120 - RNA, 19 nt, Artificial Sequence
  Description of Artificial Sequence: Synthetic oligonucleotide
aaauagcacagccacggua

SEQ ID NO: 2042121 - RNA, 19 nt, Artificial Sequence
  Description of Artificial Sequence: Synthetic oligonucleotide
acuagacauugucauagug

SEQ ID NO: 2042122 - RNA, 19 nt, Artificial Sequence
  Description of Artificial Sequence: Synthetic oligonucleotide
  modified_base (18)..(18): a, c, u, g, unknown or other
gcaauuguguuucaaggng

SEQ ID NO: 2042123 - RNA, 19 nt, Artificial Sequence
  Description of Artificial Sequence: Synthetic oligonucleotide
aaggaauccugugucuuuc

SEQ ID NO: 2042124 - RNA, 19 nt, Artificial Sequence
  Description of Artificial Sequence: Synthetic oligonucleotide
uacuaguuuaacuggcacu

SEQ ID NO: 2042125 - RNA, 19 nt, Artificial Sequence
  Description of Artificial Sequence: Synthetic oligonucleotide
uugaaauuucaccguugcc

SEQ ID NO: 2042126 - RNA, 19 nt, Artificial Sequence
  Description of Artificial Sequence: Synthetic oligonucleotide
aaugcagcugcaauugugu

SEQ ID NO: 2042127 - RNA, 19 nt, Artificial Sequence
  Description of Artificial Sequence: Synthetic oligonucleotide
aauacuaguuuaacuggca

SEQ ID NO: 2042128 - RNA, 19 nt, Artificial Sequence
  Description of Artificial Sequence: Synthetic oligonucleotide
ucuguaagcagggccaugc

SEQ ID NO: 2042129 - RNA, 19 nt, Artificial Sequence
  Description of Artificial Sequence: Synthetic oligonucleotide
aaggcacaagaacaaugug

SEQ ID NO: 2042130 - RNA, 19 nt, Artificial Sequence
  Description of Artificial Sequence: Synthetic oligonucleotide
aacuugaaauuucaccguu

SEQ ID NO: 2042131 - RNA, 19 nt, Artificial Sequence
  Description of Artificial Sequence: Synthetic oligonucleotide
ugcagugaguacaucccag

SEQ ID NO: 2042132 - RNA, 19 nt, Artificial Sequence
  Description of Artificial Sequence: Synthetic oligonucleotide
aacgccgaaauuagguuuc

SEQ ID NO: 2042133 - RNA, 19 nt, Artificial Sequence
  Description of Artificial Sequence: Synthetic oligonucleotide
cagugaugcagaaugcagc

SEQ ID NO: 2042134 - RNA, 19 nt, Artificial Sequence
  Description of Artificial Sequence: Synthetic oligonucleotide
ugugcagccucacuagaca

SEQ ID NO: 2042135 - RNA, 19 nt, Artificial Sequence
  Description of Artificial Sequence: Synthetic oligonucleotide
  modified_base (4)..(4): a, c, u, g, unknown or other
aggngaagcugaguggggc

SEQ ID NO: 2042136 - RNA, 19 nt, Artificial Sequence
  Description of Artificial Sequence: Synthetic oligonucleotide
guuuagauguugugcacug

SEQ ID NO: 2042137 - RNA, 19 nt, Artificial Sequence
  Description of Artificial Sequence: Synthetic oligonucleotide
uauuggcugaaucccuaag

SEQ ID NO: 2042138 - RNA, 19 nt, Artificial Sequence
  Description of Artificial Sequence: Synthetic oligonucleotide
cucuuagaagauucuguag

SEQ ID NO: 2042139 - RNA, 19 nt, Artificial Sequence
  Description of Artificial Sequence: Synthetic oligonucleotide
cacuauggucuauuaaaag

SEQ ID NO: 2042140 - RNA, 19 nt, Artificial Sequence
  Description of Artificial Sequence: Synthetic oligonucleotide
uaaucacuugugucauugg

SEQ ID NO: 2042141 - RNA, 19 nt, Artificial Sequence
  Description of Artificial Sequence: Synthetic oligonucleotide
agauguugugcacugcugu

SEQ ID NO: 2042142 - RNA, 19 nt, Artificial Sequence
  Description of Artificial Sequence: Synthetic oligonucleotide
uggcuuuaauaguuaaugu

SEQ ID NO: 2042143 - RNA, 19 nt, Artificial Sequence
  Description of Artificial Sequence: Synthetic oligonucleotide
aucucauaagugaccaggc

SEQ ID NO: 2042144 - RNA, 19 nt, Artificial Sequence
  Description of Artificial Sequence: Synthetic oligonucleotide
aguaggaacgccgaaauua

SEQ ID NO: 2042145 - RNA, 19 nt, Artificial Sequence
  Description of Artificial Sequence: Synthetic oligonucleotide
cuaguuacccuguacuguc

SEQ ID NO: 2042146 - RNA, 19 nt, Artificial Sequence
  Description of Artificial Sequence: Synthetic oligonucleotide
caugcuaaaauagcacagc

SEQ ID NO: 2042147 - RNA, 19 nt, Artificial Sequence
  Description of Artificial Sequence: Synthetic oligonucleotide
ucucauaagugaccaggca

SEQ ID NO: 2042148 - RNA, 19 nt, Artificial Sequence
  Description of Artificial Sequence: Synthetic oligonucleotide
auuccuugccguuuagaug

SEQ ID NO: 2042149 - RNA, 19 nt, Artificial Sequence
  Description of Artificial Sequence: Synthetic oligonucleotide
agccucacuagacauuguc

SEQ ID NO: 2042150 - RNA, 19 nt, Artificial Sequence
  Description of Artificial Sequence: Synthetic oligonucleotide
auguugugcacugcugucc

SEQ ID NO: 2042151 - RNA, 19 nt, Artificial Sequence
  Description of Artificial Sequence: Synthetic oligonucleotide
auuuguaggcaagagcucu

SEQ ID NO: 2042152 - RNA, 19 nt, Artificial Sequence
  Description of Artificial Sequence: Synthetic oligonucleotide
uuucuagaauaaucacuug

SEQ ID NO: 2042153 - RNA, 19 nt, Artificial Sequence
  Description of Artificial Sequence: Synthetic oligonucleotide
ucuaguuacccuguacugu

SEQ ID NO: 2042154 - RNA, 19 nt, Artificial Sequence
  Description of Artificial Sequence: Synthetic oligonucleotide
caguguugcaggauuuucc

SEQ ID NO: 2042155 - RNA, 19 nt, Artificial Sequence
  Description of Artificial Sequence: Synthetic oligonucleotide
  modified_base (2)..(2): a, c, u, g, unknown or other
anagggguugauugcugga

SEQ ID NO: 2042156 - RNA, 19 nt, Artificial Sequence
  Description of Artificial Sequence: Synthetic oligonucleotide
uaugucuguugccuggggu

SEQ ID NO: 2042157 - RNA, 19 nt, Artificial Sequence
  Description of Artificial Sequence: Synthetic oligonucleotide
ccuaagggaaauaauuccc

SEQ ID NO: 2042158 - RNA, 19 nt, Artificial Sequence
  Description of Artificial Sequence: Synthetic oligonucleotide
aacgaaaauacuaguuuaa

SEQ ID NO: 2042159 - RNA, 19 nt, Artificial Sequence
  Description of Artificial Sequence: Synthetic oligonucleotide
agggccaugcuaaaauagc

SEQ ID NO: 2042160 - RNA, 19 nt, Artificial Sequence
  Description of Artificial Sequence: Synthetic oligonucleotide
aaaauagcacagccacggu

SEQ ID NO: 2042161 - RNA, 19 nt, Artificial Sequence
  Description of Artificial Sequence: Synthetic oligonucleotide
auggucuauuaaaaggcac

SEQ ID NO: 2042162 - RNA, 19 nt, Artificial Sequence
  Description of Artificial Sequence: Synthetic oligonucleotide
acuugugucauuggucagg

SEQ ID NO: 2042163 - RNA, 19 nt, Artificial Sequence
  Description of Artificial Sequence: Synthetic oligonucleotide
agggaaauaauuccccaaa

SEQ ID NO: 2042164 - RNA, 19 nt, Artificial Sequence
  Description of Artificial Sequence: Synthetic oligonucleotide
uguugcaggauuuucccuu

SEQ ID NO: 2042165 - RNA, 19 nt, Artificial Sequence
  Description of Artificial Sequence: Synthetic oligonucleotide
uguugcaguuuccagugau

SEQ ID NO: 2042166 - RNA, 19 nt, Artificial Sequence
  Description of Artificial Sequence: Synthetic oligonucleotide
uagauguugugcacugcug

SEQ ID NO: 2042167 - RNA, 19 nt, Artificial Sequence
  Description of Artificial Sequence: Synthetic oligonucleotide
uuucugacugcagugagua

SEQ ID NO: 2042168 - RNA, 19 nt, Artificial Sequence
  Description of Artificial Sequence: Synthetic oligonucleotide
accucuaguuacccuguac

SEQ ID NO: 2042169 - RNA, 19 nt, Artificial Sequence
  Description of Artificial Sequence: Synthetic oligonucleotide
cauuacaguucaguguugc

SEQ ID NO: 2042170 - RNA, 19 nt, Artificial Sequence
  Description of Artificial Sequence: Synthetic oligonucleotide
uaggaacgccgaaauuagg

SEQ ID NO: 2042171 - RNA, 19 nt, Artificial Sequence
  Description of Artificial Sequence: Synthetic oligonucleotide
augucuguugccuggggug

SEQ ID NO: 2042172 - RNA, 19 nt, Artificial Sequence
  Description of Artificial Sequence: Synthetic oligonucleotide
acuaguuuaacuggcacua

SEQ ID NO: 2042173 - RNA, 19 nt, Artificial Sequence
  Description of Artificial Sequence: Synthetic oligonucleotide
ugccguuuagauguugugc

SEQ ID NO: 2042174 - RNA, 19 nt, Artificial Sequence
  Description of Artificial Sequence: Synthetic oligonucleotide
uuaucucauaagugaccag

SEQ ID NO: 2042175 - RNA, 19 nt, Artificial Sequence
  Description of Artificial Sequence: Synthetic oligonucleotide
ugacucuuagaagauucug

SEQ ID NO: 2042176 - RNA, 19 nt, Artificial Sequence
  Description of Artificial Sequence: Synthetic oligonucleotide
gaauccugugucuuucuga

SEQ ID NO: 2042177 - RNA, 19 nt, Artificial Sequence
  Description of Artificial Sequence: Synthetic oligonucleotide
gggaaguccaaguaggaac

SEQ ID NO: 2042178 - RNA, 19 nt, Artificial Sequence
  Description of Artificial Sequence: Synthetic oligonucleotide
guaggaacgccgaaauuag

SEQ ID NO: 2042179 - RNA, 19 nt, Artificial Sequence
  Description of Artificial Sequence: Synthetic oligonucleotide
cucuaguuacccuguacug

SEQ ID NO: 2042180 - RNA, 19 nt, Artificial Sequence
  Description of Artificial Sequence: Synthetic oligonucleotide
  modified_base (10)..(10): a, c, u, g, unknown or other
guuucaaggngaagcugag

SEQ ID NO: 2042181 - RNA, 19 nt, Artificial Sequence
  Description of Artificial Sequence: Synthetic oligonucleotide
gccgaaauuagguuucuag

SEQ ID NO: 2042182 - RNA, 19 nt, Artificial Sequence
  Description of Artificial Sequence: Synthetic oligonucleotide
uagaccgauggcuuuaaua

SEQ ID NO: 2042183 - RNA, 19 nt, Artificial Sequence
  Description of Artificial Sequence: Synthetic oligonucleotide
ugucuuucugacucuuaga

SEQ ID NO: 2042184 - RNA, 19 nt, Artificial Sequence
  Description of Artificial Sequence: Synthetic oligonucleotide
aguucaguguugcaggauu

SEQ ID NO: 2042185 - RNA, 19 nt, Artificial Sequence
  Description of Artificial Sequence: Synthetic oligonucleotide
gggugguagauuuuaaaac

SEQ ID NO: 2042186 - RNA, 19 nt, Artificial Sequence
  Description of Artificial Sequence: Synthetic oligonucleotide
guaggcaagagcucuguga

SEQ ID NO: 2042187 - RNA, 19 nt, Artificial Sequence
  Description of Artificial Sequence: Synthetic oligonucleotide
uuucugacucuuagaagau

SEQ ID NO: 2042188 - RNA, 19 nt, Artificial Sequence
  Description of Artificial Sequence: Synthetic oligonucleotide
ucaucaugaaguuggcauu

SEQ ID NO: 2042189 - RNA, 19 nt, Artificial Sequence
  Description of Artificial Sequence: Synthetic oligonucleotide
cauucaucaugaaguuggc

SEQ ID NO: 2042190 - RNA, 19 nt, Artificial Sequence
  Description of Artificial Sequence: Synthetic oligonucleotide
agauucuguagcuugccuu

SEQ ID NO: 2042191 - RNA, 19 nt, Artificial Sequence
  Description of Artificial Sequence: Synthetic oligonucleotide
uugucauuauuguaauauu

SEQ ID NO: 2042192 - RNA, 19 nt, Artificial Sequence
  Description of Artificial Sequence: Synthetic oligonucleotide
uguaagcagggccaugcua

SEQ ID NO: 2042193 - RNA, 19 nt, Artificial Sequence
  Description of Artificial Sequence: Synthetic oligonucleotide
gugaguacaucccaggugu

SEQ ID NO: 2042194 - RNA, 19 nt, Artificial Sequence
  Description of Artificial Sequence: Synthetic oligonucleotide
aggcacaagaacaaugugu

SEQ ID NO: 2042195 - RNA, 19 nt, Artificial Sequence
  Description of Artificial Sequence: Synthetic oligonucleotide
ggcacuauggucuauuaaa

SEQ ID NO: 2042196 - RNA, 19 nt, Artificial Sequence
  Description of Artificial Sequence: Synthetic oligonucleotide
acaaacgaaaauacuaguu

SEQ ID NO: 2042197 - RNA, 19 nt, Artificial Sequence
  Description of Artificial Sequence: Synthetic oligonucleotide
auuacaguucaguguugca

SEQ ID NO: 2042198 - RNA, 19 nt, Artificial Sequence
  Description of Artificial Sequence: Synthetic oligonucleotide
uguccacaacauuacaguu

SEQ ID NO: 2042199 - RNA, 19 nt, Artificial Sequence
  Description of Artificial Sequence: Synthetic oligonucleotide
acauugucauaguggugag

SEQ ID NO: 2042200 - RNA, 19 nt, Artificial Sequence
  Description of Artificial Sequence: Synthetic oligonucleotide
cccuaagggaaauaauucc

SEQ ID NO: 2042201 - RNA, 19 nt, Artificial Sequence
  Description of Artificial Sequence: Synthetic oligonucleotide
uguaggcaagagcucugug

SEQ ID NO: 2042202 - RNA, 19 nt, Artificial Sequence
  Description of Artificial Sequence: Synthetic oligonucleotide
ggugguagauuuuaaaacu

SEQ ID NO: 2042203 - RNA, 19 nt, Artificial Sequence
  Description of Artificial Sequence: Synthetic oligonucleotide
uccagugaugcagaaugca

SEQ ID NO: 2042204 - RNA, 19 nt, Artificial Sequence
  Description of Artificial Sequence: Synthetic oligonucleotide
aauuucaccguugccuuuu

SEQ ID NO: 2042205 - RNA, 19 nt, Artificial Sequence
  Description of Artificial Sequence: Synthetic oligonucleotide
uuuagauguugugcacugc

SEQ ID NO: 2042206 - RNA, 19 nt, Artificial Sequence
  Description of Artificial Sequence: Synthetic oligonucleotide
agaaugguuucugacugca

SEQ ID NO: 2042207 - RNA, 19 nt, Artificial Sequence
  Description of Artificial Sequence: Synthetic oligonucleotide
gaaucccuaagggaaauaa

SEQ ID NO: 2042208 - RNA, 19 nt, Artificial Sequence
  Description of Artificial Sequence: Synthetic oligonucleotide
  modified_base (5)..(5): a, c, u, g, unknown or other
aaggngaagcugagugggg

SEQ ID NO: 2042209 - RNA, 19 nt, Artificial Sequence
  Description of Artificial Sequence: Synthetic oligonucleotide
acuaggguuucucugugua

SEQ ID NO: 2042210 - RNA, 19 nt, Artificial Sequence
  Description of Artificial Sequence: Synthetic oligonucleotide
guuucuagaauaaucacuu

SEQ ID NO: 2042211 - RNA, 19 nt, Artificial Sequence
  Description of Artificial Sequence: Synthetic oligonucleotide
uucccuugucagaaacccc

SEQ ID NO: 2042212 - RNA, 19 nt, Artificial Sequence
  Description of Artificial Sequence: Synthetic oligonucleotide
guagauuuuaaaacuugaa

SEQ ID NO: 2042213 - RNA, 19 nt, Artificial Sequence
  Description of Artificial Sequence: Synthetic oligonucleotide
uaguuacccuguacugucc

SEQ ID NO: 2042214 - RNA, 19 nt, Artificial Sequence
  Description of Artificial Sequence: Synthetic oligonucleotide
ugcaguuuccagugaugca

SEQ ID NO: 2042215 - RNA, 19 nt, Artificial Sequence
  Description of Artificial Sequence: Synthetic oligonucleotide
aggaacgccgaaauuaggu

SEQ ID NO: 2042216 - RNA, 19 nt, Artificial Sequence
  Description of Artificial Sequence: Synthetic oligonucleotide
uuacccuguacuguccaca

SEQ ID NO: 2042217 - RNA, 19 nt, Artificial Sequence
  Description of Artificial Sequence: Synthetic oligonucleotide
aguuacccuguacugucca

SEQ ID NO: 2042218 - RNA, 19 nt, Artificial Sequence
  Description of Artificial Sequence: Synthetic oligonucleotide
cugugauuuugauuuuauc

SEQ ID NO: 2042219 - RNA, 19 nt, Artificial Sequence
  Description of Artificial Sequence: Synthetic oligonucleotide
agccuugucauuauuguaa

SEQ ID NO: 2042220 - RNA, 19 nt, Artificial Sequence
  Description of Artificial Sequence: Synthetic oligonucleotide
cauuuguaggcaagagcuc

SEQ ID NO: 2042221 - RNA, 19 nt, Artificial Sequence
  Description of Artificial Sequence: Synthetic oligonucleotide
cauaagugaccaggcaggc

SEQ ID NO: 2042222 - RNA, 19 nt, Artificial Sequence
  Description of Artificial Sequence: Synthetic oligonucleotide
uugccguuuagauguugug

SEQ ID NO: 2042223 - RNA, 19 nt, Artificial Sequence
  Description of Artificial Sequence: Synthetic oligonucleotide
gucuauuaaaaggcacaag

SEQ ID NO: 2042224 - RNA, 19 nt, Artificial Sequence
  Description of Artificial Sequence: Synthetic oligonucleotide
uugucauaguggugaggcc

SEQ ID NO: 2042225 - RNA, 19 nt, Artificial Sequence
  Description of Artificial Sequence: Synthetic oligonucleotide
ucgagacuaggguuucucu

SEQ ID NO: 2042226 - RNA, 19 nt, Artificial Sequence
  Description of Artificial Sequence: Synthetic oligonucleotide
aucccuaagggaaauaauu

SEQ ID NO: 2042227 - RNA, 19 nt, Artificial Sequence
  Description of Artificial Sequence: Synthetic oligonucleotide
aaauuucaccguugccuuu

SEQ ID NO: 2042228 - RNA, 19 nt, Artificial Sequence
  Description of Artificial Sequence: Synthetic oligonucleotide
ggcacuuggugucuguaag

SEQ ID NO: 2042229 - RNA, 19 nt, Artificial Sequence
  Description of Artificial Sequence: Synthetic oligonucleotide
gcaacaaacgaaaauacua

SEQ ID NO: 2042230 - RNA, 19 nt, Artificial Sequence
  Description of Artificial Sequence: Synthetic oligonucleotide
uggggugguagauuuuaaa

SEQ ID NO: 2042231 - RNA, 19 nt, Artificial Sequence
  Description of Artificial Sequence: Synthetic oligonucleotide
guaagcagggccaugcuaa

SEQ ID NO: 2042232 - RNA, 19 nt, Artificial Sequence
  Description of Artificial Sequence: Synthetic oligonucleotide
aaucccuaagggaaauaau

SEQ ID NO: 2042233 - RNA, 19 nt, Artificial Sequence
  Description of Artificial Sequence: Synthetic oligonucleotide
ggauuuccuaauuccuugc

SEQ ID NO: 2042234 - RNA, 19 nt, Artificial Sequence
  Description of Artificial Sequence: Synthetic oligonucleotide
gagacuaggguuucucugu

SEQ ID NO: 2042235 - RNA, 19 nt, Artificial Sequence
  Description of Artificial Sequence: Synthetic oligonucleotide
acuugaaauuucaccguug

SEQ ID NO: 2042236 - RNA, 19 nt, Artificial Sequence
  Description of Artificial Sequence: Synthetic oligonucleotide
caucaugaaguuggcauuc

SEQ ID NO: 2042237 - RNA, 19 nt, Artificial Sequence
  Description of Artificial Sequence: Synthetic oligonucleotide
gagguuucauuuguaggca

SEQ ID NO: 2042238 - RNA, 19 nt, Artificial Sequence
  Description of Artificial Sequence: Synthetic oligonucleotide
caaacgaaaauacuaguuu

SEQ ID NO: 2042239 - RNA, 19 nt, Artificial Sequence
  Description of Artificial Sequence: Synthetic oligonucleotide
auuagguuucuagaauaau

SEQ ID NO: 2042240 - RNA, 19 nt, Artificial Sequence
  Description of Artificial Sequence: Synthetic oligonucleotide
gguuucugacugcagugag

SEQ ID NO: 2042241 - RNA, 19 nt, Artificial Sequence
  Description of Artificial Sequence: Synthetic oligonucleotide
cccaaguuugggauuaaag

SEQ ID NO: 2042242 - RNA, 19 nt, Artificial Sequence
  Description of Artificial Sequence: Synthetic oligonucleotide
ugcagcugcaauuguguuu

SEQ ID NO: 2042243 - RNA, 19 nt, Artificial Sequence
  Description of Artificial Sequence: Synthetic oligonucleotide
uggcacuauggucuauuaa

SEQ ID NO: 2042244 - RNA, 19 nt, Artificial Sequence
  Description of Artificial Sequence: Synthetic oligonucleotide
agagcucugugauuuugau

SEQ ID NO: 2042245 - RNA, 19 nt, Artificial Sequence
  Description of Artificial Sequence: Synthetic oligonucleotide
guaugucuguugccugggg

SEQ ID NO: 2042246 - RNA, 19 nt, Artificial Sequence
  Description of Artificial Sequence: Synthetic oligonucleotide
ugcaggauuuucccuuguc

SEQ ID NO: 2042247 - RNA, 19 nt, Artificial Sequence
  Description of Artificial Sequence: Synthetic oligonucleotide
aaguaggaacgccgaaauu

SEQ ID NO: 2042248 - RNA, 19 nt, Artificial Sequence
  Description of Artificial Sequence: Synthetic oligonucleotide
ucaguguugcaggauuuuc

SEQ ID NO: 2042249 - RNA, 19 nt, Artificial Sequence
  Description of Artificial Sequence: Synthetic oligonucleotide
uaauuccccaaagcaacaa

SEQ ID NO: 2042250 - RNA, 19 nt, Artificial Sequence
  Description of Artificial Sequence: Synthetic oligonucleotide
  modified_base (2)..(2): a, c, u, g, unknown or other
gngaagcugaguggggcug

SEQ ID NO: 2042251 - RNA, 19 nt, Artificial Sequence
  Description of Artificial Sequence: Synthetic oligonucleotide
uguucacacagagcacuca

SEQ ID NO: 2042252 - RNA, 19 nt, Artificial Sequence
  Description of Artificial Sequence: Synthetic oligonucleotide
uccaaguaggaacgccgaa

SEQ ID NO: 2042253 - RNA, 19 nt, Artificial Sequence
  Description of Artificial Sequence: Synthetic oligonucleotide
gacucuuagaagauucugu

SEQ ID NO: 2042254 - RNA, 19 nt, Artificial Sequence
  Description of Artificial Sequence: Synthetic oligonucleotide
  modified_base (9)..(9): a, c, u, g, unknown or other
uuucaaggngaagcugagu

SEQ ID NO: 2042255 - RNA, 19 nt, Artificial Sequence
  Description of Artificial Sequence: Synthetic oligonucleotide
auuguaauauuggcugaau

SEQ ID NO: 2042256 - RNA, 19 nt, Artificial Sequence
  Description of Artificial Sequence: Synthetic oligonucleotide
acagccacgguagacuggu

SEQ ID NO: 2042257 - RNA, 19 nt, Artificial Sequence
  Description of Artificial Sequence: Synthetic oligonucleotide
gccguuuagauguugugca

SEQ ID NO: 2042258 - RNA, 19 nt, Artificial Sequence
  Description of Artificial Sequence: Synthetic oligonucleotide
gaaugguuucugacugcag

SEQ ID NO: 2042259 - RNA, 19 nt, Artificial Sequence
  Description of Artificial Sequence: Synthetic oligonucleotide
cauugucauaguggugagg

SEQ ID NO: 2042260 - RNA, 19 nt, Artificial Sequence
  Description of Artificial Sequence: Synthetic oligonucleotide
cuaauuccuugccguuuag

SEQ ID NO: 2042261 - RNA, 19 nt, Artificial Sequence
  Description of Artificial Sequence: Synthetic oligonucleotide
guacuguccacaacauuac

SEQ ID NO: 2042262 - RNA, 19 nt, Artificial Sequence
  Description of Artificial Sequence: Synthetic oligonucleotide
guccacaacauuacaguuc

SEQ ID NO: 2042263 - RNA, 19 nt, Artificial Sequence
  Description of Artificial Sequence: Synthetic oligonucleotide
uacccuguacuguccacaa

SEQ ID NO: 2042264 - RNA, 19 nt, Artificial Sequence
  Description of Artificial Sequence: Synthetic oligonucleotide
cucuuaucuggcagaagga

SEQ ID NO: 2042265 - RNA, 19 nt, Artificial Sequence
  Description of Artificial Sequence: Synthetic oligonucleotide
ugccucccaaguuugggau

SEQ ID NO: 2042266 - RNA, 19 nt, Artificial Sequence
  Description of Artificial Sequence: Synthetic oligonucleotide
uuuucgagacuaggguuuc

SEQ ID NO: 2042267 - RNA, 19 nt, Artificial Sequence
  Description of Artificial Sequence: Synthetic oligonucleotide
ugugcacugcuguccuuca

SEQ ID NO: 2042268 - RNA, 19 nt, Artificial Sequence
  Description of Artificial Sequence: Synthetic oligonucleotide
auucaucaugaaguuggca

SEQ ID NO: 2042269 - RNA, 19 nt, Artificial Sequence
  Description of Artificial Sequence: Synthetic oligonucleotide
ugugucuuucugacucuua

SEQ ID NO: 2042270 - RNA, 19 nt, Artificial Sequence
  Description of Artificial Sequence: Synthetic oligonucleotide
uucgagacuaggguuucuc

SEQ ID NO: 2042271 - RNA, 19 nt, Artificial Sequence
  Description of Artificial Sequence: Synthetic oligonucleotide
cucagggguaugucuguug

SEQ ID NO: 2042272 - RNA, 19 nt, Artificial Sequence
  Description of Artificial Sequence: Synthetic oligonucleotide
ggggugguagauuuuaaaa

SEQ ID NO: 2042273 - RNA, 19 nt, Artificial Sequence
  Description of Artificial Sequence: Synthetic oligonucleotide
guggugaggcccuggcucc

SEQ ID NO: 2042274 - RNA, 19 nt, Artificial Sequence
  Description of Artificial Sequence: Synthetic oligonucleotide
cuguccacaacauuacagu

SEQ ID NO: 2042275 - RNA, 19 nt, Artificial Sequence
  Description of Artificial Sequence: Synthetic oligonucleotide
uugugcacugcuguccuuc

SEQ ID NO: 2042276 - RNA, 19 nt, Artificial Sequence
  Description of Artificial Sequence: Synthetic oligonucleotide
uggcuccaccucuaguuac

SEQ ID NO: 2042277 - RNA, 19 nt, Artificial Sequence
  Description of Artificial Sequence: Synthetic oligonucleotide
uucucuuaucuggcagaag

SEQ ID NO: 2042278 - RNA, 19 nt, Artificial Sequence
  Description of Artificial Sequence: Synthetic oligonucleotide
gucauuggucaggauuucc

SEQ ID NO: 2042279 - RNA, 19 nt, Artificial Sequence
  Description of Artificial Sequence: Synthetic oligonucleotide
uggucaggauuuccuaauu

SEQ ID NO: 2042280 - RNA, 19 nt, Artificial Sequence
  Description of Artificial Sequence: Synthetic oligonucleotide
  modified_base (6)..(6): a, c, u, g, unknown or other
gggganagggguugauugc

SEQ ID NO: 2042281 - RNA, 19 nt, Artificial Sequence
  Description of Artificial Sequence: Synthetic oligonucleotide
acccuguacuguccacaac

SEQ ID NO: 2042282 - RNA, 19 nt, Artificial Sequence
  Description of Artificial Sequence: Synthetic oligonucleotide
  modified_base (12)..(12): a, c, u, g, unknown or other
guguuucaaggngaagcug

SEQ ID NO: 2042283 - RNA, 19 nt, Artificial Sequence
  Description of Artificial Sequence: Synthetic oligonucleotide
uaguggugaggcccuggcu

SEQ ID NO: 2042284 - RNA, 19 nt, Artificial Sequence
  Description of Artificial Sequence: Synthetic oligonucleotide
ggucaggauuuccuaauuc

SEQ ID NO: 2042285 - RNA, 19 nt, Artificial Sequence
  Description of Artificial Sequence: Synthetic oligonucleotide
cacuugugucauuggucag

SEQ ID NO: 2042286 - RNA, 19 nt, Artificial Sequence
  Description of Artificial Sequence: Synthetic oligonucleotide
agagcacucagggguaugu

SEQ ID NO: 2042287 - RNA, 19 nt, Artificial Sequence
  Description of Artificial Sequence: Synthetic oligonucleotide
gcaggauuuucccuuguca

SEQ ID NO: 2042288 - RNA, 19 nt, Artificial Sequence
  Description of Artificial Sequence: Synthetic oligonucleotide
aggaauccugugucuuucu

SEQ ID NO: 2042289 - RNA, 19 nt, Artificial Sequence
  Description of Artificial Sequence: Synthetic oligonucleotide
cauaguggugaggcccugg

SEQ ID NO: 2042290 - RNA, 19 nt, Artificial Sequence
  Description of Artificial Sequence: Synthetic oligonucleotide
uaagcagggccaugcuaaa

SEQ ID NO: 2042291 - RNA, 19 nt, Artificial Sequence
  Description of Artificial Sequence: Synthetic oligonucleotide
agguguucacacagagcac

SEQ ID NO: 2042292 - RNA, 19 nt, Artificial Sequence
  Description of Artificial Sequence: Synthetic oligonucleotide
uuccuaauuccuugccguu

SEQ ID NO: 2042293 - RNA, 19 nt, Artificial Sequence
  Description of Artificial Sequence: Synthetic oligonucleotide
gaacgccgaaauuagguuu

SEQ ID NO: 2042294 - RNA, 19 nt, Artificial Sequence
  Description of Artificial Sequence: Synthetic oligonucleotide
gguuucuagaauaaucacu

SEQ ID NO: 2042295 - RNA, 19 nt, Artificial Sequence
  Description of Artificial Sequence: Synthetic oligonucleotide
cagggguaugucuguugcc

SEQ ID NO: 2042296 - RNA, 19 nt, Artificial Sequence
  Description of Artificial Sequence: Synthetic oligonucleotide
gaguacaucccagguguuc

SEQ ID NO: 2042297 - RNA, 19 nt, Artificial Sequence
  Description of Artificial Sequence: Synthetic oligonucleotide
cacagccacgguagacugg

SEQ ID NO: 2042298 - RNA, 19 nt, Artificial Sequence
  Description of Artificial Sequence: Synthetic oligonucleotide
ggcugaaucccuaagggaa

SEQ ID NO: 2042299 - RNA, 19 nt, Artificial Sequence
  Description of Artificial Sequence: Synthetic oligonucleotide
guuacccuguacuguccac

SEQ ID NO: 2042300 - RNA, 19 nt, Artificial Sequence
  Description of Artificial Sequence: Synthetic oligonucleotide
cacuuggugucuguaagca

SEQ ID NO: 2042301 - RNA, 19 nt, Artificial Sequence
  Description of Artificial Sequence: Synthetic oligonucleotide
ccgaaauuagguuucuaga

SEQ ID NO: 2042302 - RNA, 19 nt, Artificial Sequence
  Description of Artificial Sequence: Synthetic oligonucleotide
ggaauccugugucuuucug

SEQ ID NO: 2042303 - RNA, 19 nt, Artificial Sequence
  Description of Artificial Sequence: Synthetic oligonucleotide
aguuggcauucaauaaaga

SEQ ID NO: 2042304 - RNA, 19 nt, Artificial Sequence
  Description of Artificial Sequence: Synthetic oligonucleotide
agccacgguagacugguuu

SEQ ID NO: 2042305 - RNA, 19 nt, Artificial Sequence
  Description of Artificial Sequence: Synthetic oligonucleotide
ggcuuuaauaguuaauguu

SEQ ID NO: 2042306 - RNA, 19 nt, Artificial Sequence
  Description of Artificial Sequence: Synthetic oligonucleotide
ugcagccucacuagacauu

SEQ ID NO: 2042307 - RNA, 19 nt, Artificial Sequence
  Description of Artificial Sequence: Synthetic oligonucleotide
uccuaauuccuugccguuu

SEQ ID NO: 2042308 - RNA, 19 nt, Artificial Sequence
  Description of Artificial Sequence: Synthetic oligonucleotide
cacaacauuacaguucagu

SEQ ID NO: 2042309 - RNA, 19 nt, Artificial Sequence
  Description of Artificial Sequence: Synthetic oligonucleotide
cgaaauuagguuucuagaa

SEQ ID NO: 2042310 - RNA, 19 nt, Artificial Sequence
  Description of Artificial Sequence: Synthetic oligonucleotide
cuucagagguuucauuugu

SEQ ID NO: 2042311 - RNA, 19 nt, Artificial Sequence
  Description of Artificial Sequence: Synthetic oligonucleotide
guagcuugccuuucauucu

SEQ ID NO: 2042312 - RNA, 19 nt, Artificial Sequence
  Description of Artificial Sequence: Synthetic oligonucleotide
caugaaguuggcauucaau

SEQ ID NO: 2042313 - RNA, 19 nt, Artificial Sequence
  Description of Artificial Sequence: Synthetic oligonucleotide
gcguuuucauucaucauga

SEQ ID NO: 2042314 - RNA, 19 nt, Artificial Sequence
  Description of Artificial Sequence: Synthetic oligonucleotide
aggcacuuggugucuguaa

SEQ ID NO: 2042315 - RNA, 19 nt, Artificial Sequence
  Description of Artificial Sequence: Synthetic oligonucleotide
cuugccguuuagauguugu

SEQ ID NO: 2042316 - RNA, 19 nt, Artificial Sequence
  Description of Artificial Sequence: Synthetic oligonucleotide
ggucuauuaaaaggcacaa

SEQ ID NO: 2042317 - RNA, 19 nt, Artificial Sequence
  Description of Artificial Sequence: Synthetic oligonucleotide
ugaguacaucccagguguu

SEQ ID NO: 2042318 - RNA, 19 nt, Artificial Sequence
  Description of Artificial Sequence: Synthetic oligonucleotide
auguugcaguuuccaguga

SEQ ID NO: 2042319 - RNA, 19 nt, Artificial Sequence
  Description of Artificial Sequence: Synthetic oligonucleotide
caaguaggaacgccgaaau

SEQ ID NO: 2042320 - RNA, 19 nt, Artificial Sequence
  Description of Artificial Sequence: Synthetic oligonucleotide
gaccgauggcuuuaauagu

SEQ ID NO: 2042321 - RNA, 19 nt, Artificial Sequence
  Description of Artificial Sequence: Synthetic oligonucleotide
cugcacucaacagcucuug

SEQ ID NO: 2042322 - RNA, 19 nt, Artificial Sequence
  Description of Artificial Sequence: Synthetic oligonucleotide
uggugccacuccugggccc

SEQ ID NO: 2042323 - RNA, 19 nt, Artificial Sequence
  Description of Artificial Sequence: Synthetic oligonucleotide
acauuacaguucaguguug

SEQ ID NO: 2042324 - RNA, 19 nt, Artificial Sequence
  Description of Artificial Sequence: Synthetic oligonucleotide
cucacuagacauugucaua

SEQ ID NO: 2042325 - RNA, 19 nt, Artificial Sequence
  Description of Artificial Sequence: Synthetic oligonucleotide
ugaaucccuaagggaaaua

SEQ ID NO: 2042326 - RNA, 19 nt, Artificial Sequence
  Description of Artificial Sequence: Synthetic oligonucleotide
uagcacagccacgguagac

SEQ ID NO: 2042327 - RNA, 19 nt, Artificial Sequence
  Description of Artificial Sequence: Synthetic oligonucleotide
caugugcagccucacuaga

SEQ ID NO: 2042328 - RNA, 19 nt, Artificial Sequence
  Description of Artificial Sequence: Synthetic oligonucleotide
ugucuguaagcagggccau

SEQ ID NO: 2042329 - RNA, 19 nt, Artificial Sequence
  Description of Artificial Sequence: Synthetic oligonucleotide
  modified_base (4)..(4): a, c, u, g, unknown or other
gganagggguugauugcug

SEQ ID NO: 2042330 - RNA, 19 nt, Artificial Sequence
  Description of Artificial Sequence: Synthetic oligonucleotide
uacugacucccaugguguu

SEQ ID NO: 2042331 - RNA, 19 nt, Artificial Sequence
  Description of Artificial Sequence: Synthetic oligonucleotide
uuucgagacuaggguuucu

SEQ ID NO: 2042332 - RNA, 19 nt, Artificial Sequence
  Description of Artificial Sequence: Synthetic oligonucleotide
ggguugauugcuggaauca

SEQ ID NO: 2042333 - RNA, 19 nt, Artificial Sequence
  Description of Artificial Sequence: Synthetic oligonucleotide
cgagacuaggguuucucug

SEQ ID NO: 2042334 - RNA, 19 nt, Artificial Sequence
  Description of Artificial Sequence: Synthetic oligonucleotide
gggguaugucuguugccug

SEQ ID NO: 2042335 - RNA, 19 nt, Artificial Sequence
  Description of Artificial Sequence: Synthetic oligonucleotide
ucauaguggugaggcccug

SEQ ID NO: 2042336 - RNA, 19 nt, Artificial Sequence
  Description of Artificial Sequence: Synthetic oligonucleotide
gguguucacacagagcacu

SEQ ID NO: 2042337 - RNA, 19 nt, Artificial Sequence
  Description of Artificial Sequence: Synthetic oligonucleotide
cugacucccaugguguuaa

SEQ ID NO: 2042338 - RNA, 19 nt, Artificial Sequence
  Description of Artificial Sequence: Synthetic oligonucleotide
ucccaaguuugggauuaaa

SEQ ID NO: 2042339 - RNA, 19 nt, Artificial Sequence
  Description of Artificial Sequence: Synthetic oligonucleotide
gggccaugcuaaaauagca

SEQ ID NO: 2042340 - RNA, 19 nt, Artificial Sequence
  Description of Artificial Sequence: Synthetic oligonucleotide
gacucccaugguguuaaaa

SEQ ID NO: 2042341 - RNA, 19 nt, Artificial Sequence
  Description of Artificial Sequence: Synthetic oligonucleotide
cagcuuggugccacuccug

SEQ ID NO: 2042342 - RNA, 19 nt, Artificial Sequence
  Description of Artificial Sequence: Synthetic oligonucleotide
ggcacaagaacaauguguu

SEQ ID NO: 2042343 - RNA, 19 nt, Artificial Sequence
  Description of Artificial Sequence: Synthetic oligonucleotide
guugauugcuggaaucaau

SEQ ID NO: 2042344 - RNA, 19 nt, Artificial Sequence
  Description of Artificial Sequence: Synthetic oligonucleotide
gcacuauggucuauuaaaa

SEQ ID NO: 2042345 - RNA, 19 nt, Artificial Sequence
  Description of Artificial Sequence: Synthetic oligonucleotide
gugguagauuuuaaaacuu

SEQ ID NO: 2042346 - RNA, 19 nt, Artificial Sequence
  Description of Artificial Sequence: Synthetic oligonucleotide
ccguuuagauguugugcac

SEQ ID NO: 2042347 - RNA, 19 nt, Artificial Sequence
  Description of Artificial Sequence: Synthetic oligonucleotide
cacagagcacucaggggua

SEQ ID NO: 2042348 - RNA, 19 nt, Artificial Sequence
  Description of Artificial Sequence: Synthetic oligonucleotide
cugacugcagugaguacau

SEQ ID NO: 2042349 - RNA, 19 nt, Artificial Sequence
  Description of Artificial Sequence: Synthetic oligonucleotide
guguugcaggauuuucccu

SEQ ID NO: 2042350 - RNA, 19 nt, Artificial Sequence
  Description of Artificial Sequence: Synthetic oligonucleotide
ggcaagagcucugugauuu

SEQ ID NO: 2042351 - RNA, 19 nt, Artificial Sequence
  Description of Artificial Sequence: Synthetic oligonucleotide
ggcuccaccucuaguuacc

SEQ ID NO: 2042352 - RNA, 19 nt, Artificial Sequence
  Description of Artificial Sequence: Synthetic oligonucleotide
gccucacuagacauuguca

SEQ ID NO: 2042353 - RNA, 19 nt, Artificial Sequence
  Description of Artificial Sequence: Synthetic oligonucleotide
ccucuaguuacccuguacu

SEQ ID NO: 2042354 - RNA, 19 nt, Artificial Sequence
  Description of Artificial Sequence: Synthetic oligonucleotide
ggcauucaauaaagaaaga

SEQ ID NO: 2042355 - RNA, 19 nt, Artificial Sequence
  Description of Artificial Sequence: Synthetic oligonucleotide
gguugauugcuggaaucaa

SEQ ID NO: 2042356 - RNA, 19 nt, Artificial Sequence
  Description of Artificial Sequence: Synthetic oligonucleotide
caauguguuuuaacauuuu

SEQ ID NO: 2042357 - RNA, 19 nt, Artificial Sequence
  Description of Artificial Sequence: Synthetic oligonucleotide
  modified_base (3)..(3): a, c, u, g, unknown or other
ggngaagcugaguggggcu

SEQ ID NO: 2042358 - RNA, 19 nt, Artificial Sequence
  Description of Artificial Sequence: Synthetic oligonucleotide
cuggggugguagauuuuaa

SEQ ID NO: 2042359 - RNA, 19 nt, Artificial Sequence
  Description of Artificial Sequence: Synthetic oligonucleotide
cuggcuccaccucuaguua

SEQ ID NO: 2042360 - RNA, 19 nt, Artificial Sequence
  Description of Artificial Sequence: Synthetic oligonucleotide
acagagcacucagggguau

SEQ ID NO: 2042361 - RNA, 19 nt, Artificial Sequence
  Description of Artificial Sequence: Synthetic oligonucleotide
agugaccaggcaggcacuu

SEQ ID NO: 2042362 - RNA, 19 nt, Artificial Sequence
  Description of Artificial Sequence: Synthetic oligonucleotide
ggaacgccgaaauuagguu

SEQ ID NO: 2042363 - RNA, 19 nt, Artificial Sequence
  Description of Artificial Sequence: Synthetic oligonucleotide
cccagcguuuucauucauc

SEQ ID NO: 2042364 - RNA, 19 nt, Artificial Sequence
  Description of Artificial Sequence: Synthetic oligonucleotide
ccucacuagacauugucau

SEQ ID NO: 2042365 - RNA, 19 nt, Artificial Sequence
  Description of Artificial Sequence: Synthetic oligonucleotide
aacuggcacuauggucuau

SEQ ID NO: 2042366 - RNA, 19 nt, Artificial Sequence
  Description of Artificial Sequence: Synthetic oligonucleotide
ugacugcagugaguacauc

SEQ ID NO: 2042367 - RNA, 19 nt, Artificial Sequence
  Description of Artificial Sequence: Synthetic oligonucleotide
  modified_base (5)..(5): a, c, u, g, unknown or other
ggganagggguugauugcu

SEQ ID NO: 2042368 - RNA, 19 nt, Artificial Sequence
  Description of Artificial Sequence: Synthetic oligonucleotide
cccaugugcagccucacua

SEQ ID NO: 2042369 - RNA, 19 nt, Artificial Sequence
  Description of Artificial Sequence: Synthetic oligonucleotide
acgccgaaauuagguuucu

SEQ ID NO: 2042370 - RNA, 19 nt, Artificial Sequence
  Description of Artificial Sequence: Synthetic oligonucleotide
cagagcacucagggguaug

SEQ ID NO: 2042371 - RNA, 19 nt, Artificial Sequence
  Description of Artificial Sequence: Synthetic oligonucleotide
cacuagacauugucauagu

SEQ ID NO: 2042372 - RNA, 19 nt, Artificial Sequence
  Description of Artificial Sequence: Synthetic oligonucleotide
ccuaauuccuugccguuua

SEQ ID NO: 2042373 - RNA, 19 nt, Artificial Sequence
  Description of Artificial Sequence: Synthetic oligonucleotide
uccuugccguuuagauguu

SEQ ID NO: 2042374 - RNA, 19 nt, Artificial Sequence
  Description of Artificial Sequence: Synthetic oligonucleotide
acucagggguaugucuguu

SEQ ID NO: 2042375 - RNA, 19 nt, Artificial Sequence
  Description of Artificial Sequence: Synthetic oligonucleotide
ggcuggccgucccugcagc

SEQ ID NO: 2042376 - RNA, 19 nt, Artificial Sequence
  Description of Artificial Sequence: Synthetic oligonucleotide
ccaaguaggaacgccgaaa

SEQ ID NO: 2042377 - RNA, 19 nt, Artificial Sequence
  Description of Artificial Sequence: Synthetic oligonucleotide
ugacucccaugguguuaaa

SEQ ID NO: 2042378 - RNA, 19 nt, Artificial Sequence
  Description of Artificial Sequence: Synthetic oligonucleotide
gccuugucauuauuguaau

SEQ ID NO: 2042379 - RNA, 19 nt, Artificial Sequence
  Description of Artificial Sequence: Synthetic oligonucleotide
cuguagcuugccuuucauu

SEQ ID NO: 2042380 - RNA, 19 nt, Artificial Sequence
  Description of Artificial Sequence: Synthetic oligonucleotide
cuguaagcagggccaugcu

SEQ ID NO: 2042381 - RNA, 19 nt, Artificial Sequence
  Description of Artificial Sequence: Synthetic oligonucleotide
cuaguuuaacuggcacuau

SEQ ID NO: 2042382 - RNA, 19 nt, Artificial Sequence
  Description of Artificial Sequence: Synthetic oligonucleotide
cuugagccuugucauuauu

SEQ ID NO: 2042383 - RNA, 19 nt, Artificial Sequence
  Description of Artificial Sequence: Synthetic oligonucleotide
cgauggcuuuaauaguuaa

SEQ ID NO: 2042384 - RNA, 19 nt, Artificial Sequence
  Description of Artificial Sequence: Synthetic oligonucleotide
cuguacuguccacaacauu

SEQ ID NO: 2042385 - RNA, 19 nt, Artificial Sequence
  Description of Artificial Sequence: Synthetic oligonucleotide
ccuugucauuauuguaaua

SEQ ID NO: 2042386 - RNA, 19 nt, Artificial Sequence
  Description of Artificial Sequence: Synthetic oligonucleotide
gccacgguagacugguuuu

SEQ ID NO: 2042387 - RNA, 19 nt, Artificial Sequence
  Description of Artificial Sequence: Synthetic oligonucleotide
gcugaguggggcuggccgu

SEQ ID NO: 2042388 - RNA, 19 nt, Artificial Sequence
  Description of Artificial Sequence: Synthetic oligonucleotide
ccuugccguuuagauguug

SEQ ID NO: 2042389 - RNA, 19 nt, Artificial Sequence
  Description of Artificial Sequence: Synthetic oligonucleotide
caccucuaguuacccugua

SEQ ID NO: 2042390 - RNA, 19 nt, Artificial Sequence
  Description of Artificial Sequence: Synthetic oligonucleotide
caggcacuuggugucugua

SEQ ID NO: 2042391 - RNA, 19 nt, Artificial Sequence
  Description of Artificial Sequence: Synthetic oligonucleotide
ccucccaaguuugggauua

SEQ ID NO: 2042392 - RNA, 19 nt, Artificial Sequence
  Description of Artificial Sequence: Synthetic oligonucleotide
gggcccaugugcagccuca

SEQ ID NO: 2042393 - RNA, 19 nt, Artificial Sequence
  Description of Artificial Sequence: Synthetic oligonucleotide
ccccuucucuuaucuggca

SEQ ID NO: 2042394 - RNA, 19 nt, Artificial Sequence
  Description of Artificial Sequence: Synthetic oligonucleotide
cguuuagauguugugcacu

SEQ ID NO: 2042395 - RNA, 19 nt, Artificial Sequence
  Description of Artificial Sequence: Synthetic oligonucleotide
ggugaggcccuggcuccac

SEQ ID NO: 2042396 - RNA, 19 nt, Artificial Sequence
  Description of Artificial Sequence: Synthetic oligonucleotide
ccgucccugcagcuuggug

SEQ ID NO: 2042397 - RNA, 19 nt, Artificial Sequence
  Description of Artificial Sequence: Synthetic oligonucleotide
caguucaguguugcaggau

SEQ ID NO: 2042398 - RNA, 19 nt, Artificial Sequence
  Description of Artificial Sequence: Synthetic oligonucleotide
ggcccaugugcagccucac

SEQ ID NO: 2042399 - RNA, 19 nt, Artificial Sequence
  Description of Artificial Sequence: Synthetic oligonucleotide
cucccaaguuugggauuaa

SEQ ID NO: 2042400 - RNA, 19 nt, Artificial Sequence
  Description of Artificial Sequence: Synthetic oligonucleotide
gcucugugauuuugauuuu

SEQ ID NO: 2042401 - RNA, 19 nt, Artificial Sequence
  Description of Artificial Sequence: Synthetic oligonucleotide
ccccugggcugcacucaac

SEQ ID NO: 2042402 - RNA, 19 nt, Artificial Sequence
  Description of Artificial Sequence: Synthetic oligonucleotide
gcccaugugcagccucacu

SEQ ID NO: 2042403 - RNA, 19 nt, Artificial Sequence
  Description of Artificial Sequence: Synthetic oligonucleotide
gcuggccgucccugcagcu

SEQ ID NO: 2042404 - RNA, 19 nt, Artificial Sequence
  Description of Artificial Sequence: Synthetic oligonucleotide
cuggccgucccugcagcuu

SEQ ID NO: 2042405 - RNA, 19 nt, Artificial Sequence
  Description of Artificial Sequence: Synthetic oligonucleotide
gcccagcguuuucauucau

SEQ ID NO: 2042406 - RNA, 19 nt, Artificial Sequence
  Description of Artificial Sequence: Synthetic oligonucleotide
cugggcccaugugcagccu

SEQ ID NO: 2042407 - RNA, 19 nt, Artificial Sequence
  Description of Artificial Sequence: Synthetic oligonucleotide
cgccgaaauuagguuucua

SEQ ID NO: 2042408 - RNA, 19 nt, Artificial Sequence
  Description of Artificial Sequence: Synthetic oligonucleotide
gccuggggugguagauuuu

SEQ ID NO: 2042409 - RNA, 19 nt, Artificial Sequence
  Description of Artificial Sequence: Synthetic oligonucleotide
gccgucccugcagcuuggu

SEQ ID NO: 2042410 - RNA, 19 nt, Artificial Sequence
  Description of Artificial Sequence: Synthetic oligonucleotide
  modified_base (1)..(1): a, c, u, g, unknown or other
nagggguugauugcuggaa

SEQ ID NO: 2042411 - RNA, 19 nt, Artificial Sequence
  Description of Artificial Sequence: Synthetic oligonucleotide
aaucacaccuguuagaguc

SEQ ID NO: 2042412 - RNA, 19 nt, Artificial Sequence
  Description of Artificial Sequence: Synthetic oligonucleotide
aaaagcacaaccuuggacu

SEQ ID NO: 2042413 - RNA, 19 nt, Artificial Sequence
  Description of Artificial Sequence: Synthetic oligonucleotide
acaugauacauucaagugg

SEQ ID NO: 2042414 - RNA, 19 nt, Artificial Sequence
  Description of Artificial Sequence: Synthetic oligonucleotide
caugauacauucaaguggg

SEQ ID NO: 2042415 - RNA, 19 nt, Artificial Sequence
  Description of Artificial Sequence: Synthetic oligonucleotide
gaugaauucugccaggaag

SEQ ID NO: 2042416 - RNA, 19 nt, Artificial Sequence
  Description of Artificial Sequence: Synthetic oligonucleotide
ugcuuaauguaauugauga

SEQ ID NO: 2042417 - RNA, 19 nt, Artificial Sequence
  Description of Artificial Sequence: Synthetic oligonucleotide
gaagcugugagacuguucc

SEQ ID NO: 2042418 - RNA, 19 nt, Artificial Sequence
  Description of Artificial Sequence: Synthetic oligonucleotide
aacgccgaugagcaaaacc

SEQ ID NO: 2042419 - RNA, 19 nt, Artificial Sequence
  Description of Artificial Sequence: Synthetic oligonucleotide
ucuuggaugcgguuuaugg

SEQ ID NO: 2042420 - RNA, 19 nt, Artificial Sequence
  Description of Artificial Sequence: Synthetic oligonucleotide
uucgcuaacaccuuccucu

SEQ ID NO: 2042421 - RNA, 19 nt, Artificial Sequence
  Description of Artificial Sequence: Synthetic oligonucleotide
uguagaugaauuugccccg

SEQ ID NO: 2042422 - RNA, 19 nt, Artificial Sequence
  Description of Artificial Sequence: Synthetic oligonucleotide
gaagauaacgccgaugagc

SEQ ID NO: 2042423 - RNA, 19 nt, Artificial Sequence
  Description of Artificial Sequence: Synthetic oligonucleotide
uuauguagaugaauuugcc

SEQ ID NO: 2042424 - RNA, 19 nt, Artificial Sequence
  Description of Artificial Sequence: Synthetic oligonucleotide
gaugaaauuggccacggca

SEQ ID NO: 2042425 - RNA, 19 nt, Artificial Sequence
  Description of Artificial Sequence: Synthetic oligonucleotide
ucaaucacaccuguuagag

SEQ ID NO: 2042426 - RNA, 19 nt, Artificial Sequence
  Description of Artificial Sequence: Synthetic oligonucleotide
caugacgacagacagcccg

SEQ ID NO: 2042427 - RNA, 19 nt, Artificial Sequence
  Description of Artificial Sequence: Synthetic oligonucleotide
aauucugccaggaagcugu

SEQ ID NO: 2042428 - RNA, 19 nt, Artificial Sequence
  Description of Artificial Sequence: Synthetic oligonucleotide
uuaauguaauugaugaauu

SEQ ID NO: 2042429 - RNA, 19 nt, Artificial Sequence
  Description of Artificial Sequence: Synthetic oligonucleotide
agguauguaggccacauga

SEQ ID NO: 2042430 - RNA, 19 nt, Artificial Sequence
  Description of Artificial Sequence: Synthetic oligonucleotide
aggaagucgagguauguag

SEQ ID NO: 2042431 - RNA, 19 nt, Artificial Sequence
  Description of Artificial Sequence: Synthetic oligonucleotide
uuggaugcgguuuauggug

SEQ ID NO: 2042432 - RNA, 19 nt, Artificial Sequence
  Description of Artificial Sequence: Synthetic oligonucleotide
cuuagacccaucuggaaag

SEQ ID NO: 2042433 - RNA, 19 nt, Artificial Sequence
  Description of Artificial Sequence: Synthetic oligonucleotide
aagauaacgccgaugagca

SEQ ID NO: 2042434 - RNA, 19 nt, Artificial Sequence
  Description of Artificial Sequence: Synthetic oligonucleotide
aaagcacaaccuuggacug

SEQ ID NO: 2042435 - RNA, 19 nt, Artificial Sequence
  Description of Artificial Sequence: Synthetic oligonucleotide
uuuaugguguccugagucc

SEQ ID NO: 2042436 - RNA, 19 nt, Artificial Sequence
  Description of Artificial Sequence: Synthetic oligonucleotide
guuauguagaugaauuugc

SEQ ID NO: 2042437 - RNA, 19 nt, Artificial Sequence
  Description of Artificial Sequence: Synthetic oligonucleotide
aauaacagcuucauccuca

SEQ ID NO: 2042438 - RNA, 19 nt, Artificial Sequence
  Description of Artificial Sequence: Synthetic oligonucleotide
aagucgagguauguaggcc

SEQ ID NO: 2042439 - RNA, 19 nt, Artificial Sequence
  Description of Artificial Sequence: Synthetic oligonucleotide
uguugggugaguuucugcu

SEQ ID NO: 2042440 - RNA, 19 nt, Artificial Sequence
  Description of Artificial Sequence: Synthetic oligonucleotide
ucugaugaaauuggccacg

SEQ ID NO: 2042441 - RNA, 19 nt, Artificial Sequence
  Description of Artificial Sequence: Synthetic oligonucleotide
guuuaugguguccugaguc

SEQ ID NO: 2042442 - RNA, 19 nt, Artificial Sequence
  Description of Artificial Sequence: Synthetic oligonucleotide
ucgacgaugggccuguaga

SEQ ID NO: 2042443 - RNA, 19 nt, Artificial Sequence
  Description of Artificial Sequence: Synthetic oligonucleotide
ucagucaugguuucgcuaa

SEQ ID NO: 2042444 - RNA, 19 nt, Artificial Sequence
  Description of Artificial Sequence: Synthetic oligonucleotide
ucuaguuuccguaguuucu

SEQ ID NO: 2042445 - RNA, 19 nt, Artificial Sequence
  Description of Artificial Sequence: Synthetic oligonucleotide
uuccucauugugcaguggc

SEQ ID NO: 2042446 - RNA, 19 nt, Artificial Sequence
  Description of Artificial Sequence: Synthetic oligonucleotide
gaagucgagguauguaggc

SEQ ID NO: 2042447 - RNA, 19 nt, Artificial Sequence
  Description of Artificial Sequence: Synthetic oligonucleotide
acgccgaugagcaaaaccg

SEQ ID NO: 2042448 - RNA, 19 nt, Artificial Sequence
  Description of Artificial Sequence: Synthetic oligonucleotide
aguuuccguaguuucuugg

SEQ ID NO: 2042449 - RNA, 19 nt, Artificial Sequence
  Description of Artificial Sequence: Synthetic oligonucleotide
ucacguugggacucgaggc

SEQ ID NO: 2042450 - RNA, 19 nt, Artificial Sequence
  Description of Artificial Sequence: Synthetic oligonucleotide
cuccaauuuucccuguugg

SEQ ID NO: 2042451 - RNA, 19 nt, Artificial Sequence
  Description of Artificial Sequence: Synthetic oligonucleotide
uaggccacaugauacauuc

SEQ ID NO: 2042452 - RNA, 19 nt, Artificial Sequence
  Description of Artificial Sequence: Synthetic oligonucleotide
ugaaauuggccacggcagc

SEQ ID NO: 2042453 - RNA, 19 nt, Artificial Sequence
  Description of Artificial Sequence: Synthetic oligonucleotide
acgaugggccuguagacgg

SEQ ID NO: 2042454 - RNA, 19 nt, Artificial Sequence
  Description of Artificial Sequence: Synthetic oligonucleotide
uuagaguccccucggugag

SEQ ID NO: 2042455 - RNA, 19 nt, Artificial Sequence
  Description of Artificial Sequence: Synthetic oligonucleotide
ucaugguuucgcuaacacc

SEQ ID NO: 2042456 - RNA, 19 nt, Artificial Sequence
  Description of Artificial Sequence: Synthetic oligonucleotide
gucaggaagaagauaacgc

SEQ ID NO: 2042457 - RNA, 19 nt, Artificial Sequence
  Description of Artificial Sequence: Synthetic oligonucleotide
ucgucaaucacaccuguua

SEQ ID NO: 2042458 - RNA, 19 nt, Artificial Sequence
  Description of Artificial Sequence: Synthetic oligonucleotide
caugguuucgcuaacaccu

SEQ ID NO: 2042459 - RNA, 19 nt, Artificial Sequence
  Description of Artificial Sequence: Synthetic oligonucleotide
augaaauuggccacggcag

SEQ ID NO: 2042460 - RNA, 19 nt, Artificial Sequence
  Description of Artificial Sequence: Synthetic oligonucleotide
agaugaauuugccccgguc

SEQ ID NO: 2042461 - RNA, 19 nt, Artificial Sequence
  Description of Artificial Sequence: Synthetic oligonucleotide
aaccgccgccgccagauac

SEQ ID NO: 2042462 - RNA, 19 nt, Artificial Sequence
  Description of Artificial Sequence: Synthetic oligonucleotide
caaaagcacaaccuuggac

SEQ ID NO: 2042463 - RNA, 19 nt, Artificial Sequence
  Description of Artificial Sequence: Synthetic oligonucleotide
ugaguccuuagacccaucu

SEQ ID NO: 2042464 - RNA, 19 nt, Artificial Sequence
  Description of Artificial Sequence: Synthetic oligonucleotide
cugcuuaauguaauugaug

SEQ ID NO: 2042465 - RNA, 19 nt, Artificial Sequence
  Description of Artificial Sequence: Synthetic oligonucleotide
ggugaguaggucuuggaug

SEQ ID NO: 2042466 - RNA, 19 nt, Artificial Sequence
  Description of Artificial Sequence: Synthetic oligonucleotide
cucacguucagcuuccuca

SEQ ID NO: 2042467 - RNA, 19 nt, Artificial Sequence
  Description of Artificial Sequence: Synthetic oligonucleotide
caguuucagguauuccucg

SEQ ID NO: 2042468 - RNA, 19 nt, Artificial Sequence
  Description of Artificial Sequence: Synthetic oligonucleotide
guuuccguaguuucuuggc

SEQ ID NO: 2042469 - RNA, 19 nt, Artificial Sequence
  Description of Artificial Sequence: Synthetic oligonucleotide
agucgagguauguaggcca

SEQ ID NO: 2042470 - RNA, 19 nt, Artificial Sequence
  Description of Artificial Sequence: Synthetic oligonucleotide
ugagcaaaaccgccgccgc

SEQ ID NO: 2042471 - RNA, 19 nt, Artificial Sequence
  Description of Artificial Sequence: Synthetic oligonucleotide
cucagugauggacacccgg

SEQ ID NO: 2042472 - RNA, 19 nt, Artificial Sequence
  Description of Artificial Sequence: Synthetic oligonucleotide
uccguaguuucuuggcucc

SEQ ID NO: 2042473 - RNA, 19 nt, Artificial Sequence
  Description of Artificial Sequence: Synthetic oligonucleotide
acgcugggcuuuucgagcc

SEQ ID NO: 2042474 - RNA, 19 nt, Artificial Sequence
  Description of Artificial Sequence: Synthetic oligonucleotide
uuccuucaagcgaagccgc

SEQ ID NO: 2042475 - RNA, 19 nt, Artificial Sequence
  Description of Artificial Sequence: Synthetic oligonucleotide
augaauuugccccggucgu

SEQ ID NO: 2042476 - RNA, 19 nt, Artificial Sequence
  Description of Artificial Sequence: Synthetic oligonucleotide
ugugagacuguuccucagu

SEQ ID NO: 2042477 - RNA, 19 nt, Artificial Sequence
  Description of Artificial Sequence: Synthetic oligonucleotide
aauuggccacggcagccag

SEQ ID NO: 2042478 - RNA, 19 nt, Artificial Sequence
  Description of Artificial Sequence: Synthetic oligonucleotide
gaagaagauaacgccgaug

SEQ ID NO: 2042479 - RNA, 19 nt, Artificial Sequence
  Description of Artificial Sequence: Synthetic oligonucleotide
ucacgcugggcuuuucgag

SEQ ID NO: 2042480 - RNA, 19 nt, Artificial Sequence
  Description of Artificial Sequence: Synthetic oligonucleotide
gauaacgccgaugagcaaa

SEQ ID NO: 2042481 - RNA, 19 nt, Artificial Sequence
  Description of Artificial Sequence: Synthetic oligonucleotide
guggcucuccacuagcugc

SEQ ID NO: 2042482 - RNA, 19 nt, Artificial Sequence
  Description of Artificial Sequence: Synthetic oligonucleotide
cagaucuuccaaaagcaca

SEQ ID NO: 2042483 - RNA, 19 nt, Artificial Sequence
  Description of Artificial Sequence: Synthetic oligonucleotide
gaaauuggccacggcagcc

SEQ ID NO: 2042484 - RNA, 19 nt, Artificial Sequence
  Description of Artificial Sequence: Synthetic oligonucleotide
uccagcgguucucugcucc

SEQ ID NO: 2042485 - RNA, 19 nt, Artificial Sequence
  Description of Artificial Sequence: Synthetic oligonucleotide
ggucaggaagaagauaacg

SEQ ID NO: 2042486 - RNA, 19 nt, Artificial Sequence
  Description of Artificial Sequence: Synthetic oligonucleotide
gacgaugggccuguagacg

SEQ ID NO: 2042487 - RNA, 19 nt, Artificial Sequence
  Description of Artificial Sequence: Synthetic oligonucleotide
ugcaguggcucuccacuag

SEQ ID NO: 2042488 - RNA, 19 nt, Artificial Sequence
  Description of Artificial Sequence: Synthetic oligonucleotide
guuuccguuccucacguuc

SEQ ID NO: 2042489 - RNA, 19 nt, Artificial Sequence
  Description of Artificial Sequence: Synthetic oligonucleotide
ugagacuguuccucaguca

SEQ ID NO: 2042490 - RNA, 19 nt, Artificial Sequence
  Description of Artificial Sequence: Synthetic oligonucleotide
gaugagcaaaaccgccgcc

SEQ ID NO: 2042491 - RNA, 19 nt, Artificial Sequence
  Description of Artificial Sequence: Synthetic oligonucleotide
uauuccucgugcucccgcc

SEQ ID NO: 2042492 - RNA, 19 nt, Artificial Sequence
  Description of Artificial Sequence: Synthetic oligonucleotide
acucgaggcguuuccguuc

SEQ ID NO: 2042493 - RNA, 19 nt, Artificial Sequence
  Description of Artificial Sequence: Synthetic oligonucleotide
uuggacugcuuaauguaau

SEQ ID NO: 2042494 - RNA, 19 nt, Artificial Sequence
  Description of Artificial Sequence: Synthetic oligonucleotide
cacguugggacucgaggcg

SEQ ID NO: 2042495 - RNA, 19 nt, Artificial Sequence
  Description of Artificial Sequence: Synthetic oligonucleotide
uuccguaguuucuuggcuc

SEQ ID NO: 2042496 - RNA, 19 nt, Artificial Sequence
  Description of Artificial Sequence: Synthetic oligonucleotide
uccucagacuccuggggcc

SEQ ID NO: 2042497 - RNA, 19 nt, Artificial Sequence
  Description of Artificial Sequence: Synthetic oligonucleotide
gaagccagcgcgcccgcgg

SEQ ID NO: 2042498 - RNA, 19 nt, Artificial Sequence
  Description of Artificial Sequence: Synthetic oligonucleotide
aaaaccgccgccgccagau

SEQ ID NO: 2042499 - RNA, 19 nt, Artificial Sequence
  Description of Artificial Sequence: Synthetic oligonucleotide
gucaugguuucgcuaacac

SEQ ID NO: 2042500 - RNA, 19 nt, Artificial Sequence
  Description of Artificial Sequence: Synthetic oligonucleotide
ucgcugggcucgacgaugg

SEQ ID NO: 2042501 - RNA, 19 nt, Artificial Sequence
  Description of Artificial Sequence: Synthetic oligonucleotide
aggaagaagauaacgccga

SEQ ID NO: 2042502 - RNA, 19 nt, Artificial Sequence
  Description of Artificial Sequence: Synthetic oligonucleotide
cacgcugggcuuuucgagc

SEQ ID NO: 2042503 - RNA, 19 nt, Artificial Sequence
  Description of Artificial Sequence: Synthetic oligonucleotide
aucacaccuguuagagucc

SEQ ID NO: 2042504 - RNA, 19 nt, Artificial Sequence
  Description of Artificial Sequence: Synthetic oligonucleotide
uuucgcuaacaccuuccuc

SEQ ID NO: 2042505 - RNA, 19 nt, Artificial Sequence
  Description of Artificial Sequence: Synthetic oligonucleotide
ugaauucugccaggaagcu

SEQ ID NO: 2042506 - RNA, 19 nt, Artificial Sequence
  Description of Artificial Sequence: Synthetic oligonucleotide
guagaugaauuugccccgg

SEQ ID NO: 2042507 - RNA, 19 nt, Artificial Sequence
  Description of Artificial Sequence: Synthetic oligonucleotide
uuccucacguucagcuucc

SEQ ID NO: 2042508 - RNA, 19 nt, Artificial Sequence
  Description of Artificial Sequence: Synthetic oligonucleotide
cugcgggucaggaagaaga

SEQ ID NO: 2042509 - RNA, 19 nt, Artificial Sequence
  Description of Artificial Sequence: Synthetic oligonucleotide
cugaugaaauuggccacgg

SEQ ID NO: 2042510 - RNA, 19 nt, Artificial Sequence
  Description of Artificial Sequence: Synthetic oligonucleotide
ucagccucacguugggacu

SEQ ID NO: 2042511 - RNA, 19 nt, Artificial Sequence
  Description of Artificial Sequence: Synthetic oligonucleotide
ugcccaagucccuccgacg

SEQ ID NO: 2042512 - RNA, 19 nt, Artificial Sequence
  Description of Artificial Sequence: Synthetic oligonucleotide
ugcccgcucuuccucauug

SEQ ID NO: 2042513 - RNA, 19 nt, Artificial Sequence
  Description of Artificial Sequence: Synthetic oligonucleotide
gacagcccggcagugaagc

SEQ ID NO: 2042514 - RNA, 19 nt, Artificial Sequence
  Description of Artificial Sequence: Synthetic oligonucleotide
acugcuuaauguaauugau

SEQ ID NO: 2042515 - RNA, 19 nt, Artificial Sequence
  Description of Artificial Sequence: Synthetic oligonucleotide
aagccagcgcgcccgcggg

SEQ ID NO: 2042516 - RNA, 19 nt, Artificial Sequence
  Description of Artificial Sequence: Synthetic oligonucleotide
cagugauggacacccggcc

SEQ ID NO: 2042517 - RNA, 19 nt, Artificial Sequence
  Description of Artificial Sequence: Synthetic oligonucleotide
ucuaccacgaaggccuccu

SEQ ID NO: 2042518 - RNA, 19 nt, Artificial Sequence
  Description of Artificial Sequence: Synthetic oligonucleotide
guauguaggccacaugaua

SEQ ID NO: 2042519 - RNA, 19 nt, Artificial Sequence
  Description of Artificial Sequence: Synthetic oligonucleotide
gacccggaucaccaggccc

SEQ ID NO: 2042520 - RNA, 19 nt, Artificial Sequence
  Description of Artificial Sequence: Synthetic oligonucleotide
ggaagucgagguauguagg

SEQ ID NO: 2042521 - RNA, 19 nt, Artificial Sequence
  Description of Artificial Sequence: Synthetic oligonucleotide
gucaaucacaccuguuaga

SEQ ID NO: 2042522 - RNA, 19 nt, Artificial Sequence
  Description of Artificial Sequence: Synthetic oligonucleotide
cuuggacugcuuaauguaa

SEQ ID NO: 2042523 - RNA, 19 nt, Artificial Sequence
  Description of Artificial Sequence: Synthetic oligonucleotide
auuccucgugcucccgccg

SEQ ID NO: 2042524 - RNA, 19 nt, Artificial Sequence
  Description of Artificial Sequence: Synthetic oligonucleotide
gaugcgguuuauggugucc

SEQ ID NO: 2042525 - RNA, 19 nt, Artificial Sequence
  Description of Artificial Sequence: Synthetic oligonucleotide
ugcccaggccacucgcugg

SEQ ID NO: 2042526 - RNA, 19 nt, Artificial Sequence
  Description of Artificial Sequence: Synthetic oligonucleotide
uuagacccaucuggaaagc

SEQ ID NO: 2042527 - RNA, 19 nt, Artificial Sequence
  Description of Artificial Sequence: Synthetic oligonucleotide
gguucucugcuccucagac

SEQ ID NO: 2042528 - RNA, 19 nt, Artificial Sequence
  Description of Artificial Sequence: Synthetic oligonucleotide
ccagauacacccagggccc

SEQ ID NO: 2042529 - RNA, 19 nt, Artificial Sequence
  Description of Artificial Sequence: Synthetic oligonucleotide
cuguugggugaguuucugc

SEQ ID NO: 2042530 - RNA, 19 nt, Artificial Sequence
  Description of Artificial Sequence: Synthetic oligonucleotide
uguaggccacaugauacau

SEQ ID NO: 2042531 - RNA, 19 nt, Artificial Sequence
  Description of Artificial Sequence: Synthetic oligonucleotide
uucugcccaggccacucgc

SEQ ID NO: 2042532 - RNA, 19 nt, Artificial Sequence
  Description of Artificial Sequence: Synthetic oligonucleotide
cucgaggcguuuccguucc

SEQ ID NO: 2042533 - RNA, 19 nt, Artificial Sequence
  Description of Artificial Sequence: Synthetic oligonucleotide
gaauuugccccggucguca

SEQ ID NO: 2042534 - RNA, 19 nt, Artificial Sequence
  Description of Artificial Sequence: Synthetic oligonucleotide
uaccacgaaggccuccuuc

SEQ ID NO: 2042535 - RNA, 19 nt, Artificial Sequence
  Description of Artificial Sequence: Synthetic oligonucleotide
ggcguuuccguuccucacg

SEQ ID NO: 2042536 - RNA, 19 nt, Artificial Sequence
  Description of Artificial Sequence: Synthetic oligonucleotide
uccucuaguuuccguaguu

SEQ ID NO: 2042537 - RNA, 19 nt, Artificial Sequence
  Description of Artificial Sequence: Synthetic oligonucleotide
uagaugaauuugccccggu

SEQ ID NO: 2042538 - RNA, 19 nt, Artificial Sequence
  Description of Artificial Sequence: Synthetic oligonucleotide
uaguuucuuggcuccaauu

SEQ ID NO: 2042539 - RNA, 19 nt, Artificial Sequence
  Description of Artificial Sequence: Synthetic oligonucleotide
aagccugggcaggaagguc

SEQ ID NO: 2042540 - RNA, 19 nt, Artificial Sequence
  Description of Artificial Sequence: Synthetic oligonucleotide
caccaugacgacagacagc

SEQ ID NO: 2042541 - RNA, 19 nt, Artificial Sequence
  Description of Artificial Sequence: Synthetic oligonucleotide
uggacugcuuaauguaauu

SEQ ID NO: 2042542 - RNA, 19 nt, Artificial Sequence
  Description of Artificial Sequence: Synthetic oligonucleotide
gagguauguaggccacaug

SEQ ID NO: 2042543 - RNA, 19 nt, Artificial Sequence
  Description of Artificial Sequence: Synthetic oligonucleotide
uccuuagacccaucuggaa

SEQ ID NO: 2042544 - RNA, 19 nt, Artificial Sequence
  Description of Artificial Sequence: Synthetic oligonucleotide
agcaaaaccgccgccgcca

SEQ ID NO: 2042545 - RNA, 19 nt, Artificial Sequence
  Description of Artificial Sequence: Synthetic oligonucleotide
ugaguaggucuuggaugcg

SEQ ID NO: 2042546 - RNA, 19 nt, Artificial Sequence
  Description of Artificial Sequence: Synthetic oligonucleotide
ugggguuauguagaugaau

SEQ ID NO: 2042547 - RNA, 19 nt, Artificial Sequence
  Description of Artificial Sequence: Synthetic oligonucleotide
uuugccccggucgucaauc

SEQ ID NO: 2042548 - RNA, 19 nt, Artificial Sequence
  Description of Artificial Sequence: Synthetic oligonucleotide
gauggcagggaaggaaguc

SEQ ID NO: 2042549 - RNA, 19 nt, Artificial Sequence
  Description of Artificial Sequence: Synthetic oligonucleotide
ugcgguuuaugguguccug

SEQ ID NO: 2042550 - RNA, 19 nt, Artificial Sequence
  Description of Artificial Sequence: Synthetic oligonucleotide
uguagacggcugcccaagu

SEQ ID NO: 2042551 - RNA, 19 nt, Artificial Sequence
  Description of Artificial Sequence: Synthetic oligonucleotide
ggacugcuuaauguaauug

SEQ ID NO: 2042552 - RNA, 19 nt, Artificial Sequence
  Description of Artificial Sequence: Synthetic oligonucleotide
auacacccagggccccacc

SEQ ID NO: 2042553 - RNA, 19 nt, Artificial Sequence
  Description of Artificial Sequence: Synthetic oligonucleotide
ccaaggcugggcuaccugg

SEQ ID NO: 2042554 - RNA, 19 nt, Artificial Sequence
  Description of Artificial Sequence: Synthetic oligonucleotide
ccaccaugacgacagacag

SEQ ID NO: 2042555 - RNA, 19 nt, Artificial Sequence
  Description of Artificial Sequence: Synthetic oligonucleotide
uccucgugcucccgccggg

SEQ ID NO: 2042556 - RNA, 19 nt, Artificial Sequence
  Description of Artificial Sequence: Synthetic oligonucleotide
cauugugcaguggcucucc

SEQ ID NO: 2042557 - RNA, 19 nt, Artificial Sequence
  Description of Artificial Sequence: Synthetic oligonucleotide
uccuucaagcgaagccgcu

SEQ ID NO: 2042558 - RNA, 19 nt, Artificial Sequence
  Description of Artificial Sequence: Synthetic oligonucleotide
aauuugccccggucgucaa

SEQ ID NO: 2042559 - RNA, 19 nt, Artificial Sequence
  Description of Artificial Sequence: Synthetic oligonucleotide
ccuguuagaguccccucgg

SEQ ID NO: 2042560 - RNA, 19 nt, Artificial Sequence
  Description of Artificial Sequence: Synthetic oligonucleotide
uuccucagucaugguuucg

SEQ ID NO: 2042561 - RNA, 19 nt, Artificial Sequence
  Description of Artificial Sequence: Synthetic oligonucleotide
ggccacaugauacauucaa

SEQ ID NO: 2042562 - RNA, 19 nt, Artificial Sequence
  Description of Artificial Sequence: Synthetic oligonucleotide
uugugcaguggcucuccac

SEQ ID NO: 2042563 - RNA, 19 nt, Artificial Sequence
  Description of Artificial Sequence: Synthetic oligonucleotide
cuuggaugcgguuuauggu

SEQ ID NO: 2042564 - RNA, 19 nt, Artificial Sequence
  Description of Artificial Sequence: Synthetic oligonucleotide
guagacggcugcccaaguc

SEQ ID NO: 2042565 - RNA, 19 nt, Artificial Sequence
  Description of Artificial Sequence: Synthetic oligonucleotide
ugaauuugccccggucguc

SEQ ID NO: 2042566 - RNA, 19 nt, Artificial Sequence
  Description of Artificial Sequence: Synthetic oligonucleotide
agcgguucucugcuccuca

SEQ ID NO: 2042567 - RNA, 19 nt, Artificial Sequence
  Description of Artificial Sequence: Synthetic oligonucleotide
cuguagacggcugcccaag

SEQ ID NO: 2042568 - RNA, 19 nt, Artificial Sequence
  Description of Artificial Sequence: Synthetic oligonucleotide
gacgccggggccugccucc

SEQ ID NO: 2042569 - RNA, 19 nt, Artificial Sequence
  Description of Artificial Sequence: Synthetic oligonucleotide
uggacacccggccccgcug

SEQ ID NO: 2042570 - RNA, 19 nt, Artificial Sequence
  Description of Artificial Sequence: Synthetic oligonucleotide
ugguguccugaguccuuag

SEQ ID NO: 2042571 - RNA, 19 nt, Artificial Sequence
  Description of Artificial Sequence: Synthetic oligonucleotide
uuccuccugggcuggaaua

SEQ ID NO: 2042572 - RNA, 19 nt, Artificial Sequence
  Description of Artificial Sequence: Synthetic oligonucleotide
agucccuccgacgccgggg

SEQ ID NO: 2042573 - RNA, 19 nt, Artificial Sequence
  Description of Artificial Sequence: Synthetic oligonucleotide
cugcccaagucccuccgac

SEQ ID NO: 2042574 - RNA, 19 nt, Artificial Sequence
  Description of Artificial Sequence: Synthetic oligonucleotide
augcgguuuaugguguccu

SEQ ID NO: 2042575 - RNA, 19 nt, Artificial Sequence
  Description of Artificial Sequence: Synthetic oligonucleotide
ucauugugcaguggcucuc

SEQ ID NO: 2042576 - RNA, 19 nt, Artificial Sequence
  Description of Artificial Sequence: Synthetic oligonucleotide
ugggcuaccuggccugcuc

SEQ ID NO: 2042577 - RNA, 19 nt, Artificial Sequence
  Description of Artificial Sequence: Synthetic oligonucleotide
uccuccugggcuggaauaa

SEQ ID NO: 2042578 - RNA, 19 nt, Artificial Sequence
  Description of Artificial Sequence: Synthetic oligonucleotide
cgucaaucacaccuguuag

SEQ ID NO: 2042579 - RNA, 19 nt, Artificial Sequence
  Description of Artificial Sequence: Synthetic oligonucleotide
cucacgcugggcuuuucga

SEQ ID NO: 2042580 - RNA, 19 nt, Artificial Sequence
  Description of Artificial Sequence: Synthetic oligonucleotide
cucgacgaugggccuguag

SEQ ID NO: 2042581 - RNA, 19 nt, Artificial Sequence
  Description of Artificial Sequence: Synthetic oligonucleotide
uuucccuguugggugaguu

SEQ ID NO: 2042582 - RNA, 19 nt, Artificial Sequence
  Description of Artificial Sequence: Synthetic oligonucleotide
gaucaccaggccccgccca

SEQ ID NO: 2042583 - RNA, 19 nt, Artificial Sequence
  Description of Artificial Sequence: Synthetic oligonucleotide
gauacacccagggccccac

SEQ ID NO: 2042584 - RNA, 19 nt, Artificial Sequence
  Description of Artificial Sequence: Synthetic oligonucleotide
aggcugggcuaccuggccu

SEQ ID NO: 2042585 - RNA, 19 nt, Artificial Sequence
  Description of Artificial Sequence: Synthetic oligonucleotide
gccacaugauacauucaag

SEQ ID NO: 2042586 - RNA, 19 nt, Artificial Sequence
  Description of Artificial Sequence: Synthetic oligonucleotide
ccggcugcgggucaggaag

SEQ ID NO: 2042587 - RNA, 19 nt, Artificial Sequence
  Description of Artificial Sequence: Synthetic oligonucleotide
ucgcuaacaccuuccucuu

SEQ ID NO: 2042588 - RNA, 19 nt, Artificial Sequence
  Description of Artificial Sequence: Synthetic oligonucleotide
aagcgaagccgcuccucuu

SEQ ID NO: 2042589 - RNA, 19 nt, Artificial Sequence
  Description of Artificial Sequence: Synthetic oligonucleotide
auaacgccgaugagcaaaa

SEQ ID NO: 2042590 - RNA, 19 nt, Artificial Sequence
  Description of Artificial Sequence: Synthetic oligonucleotide
gacgacagacagcccggca

SEQ ID NO: 2042591 - RNA, 19 nt, Artificial Sequence
  Description of Artificial Sequence: Synthetic oligonucleotide
ccacaugauacauucaagu

SEQ ID NO: 2042592 - RNA, 19 nt, Artificial Sequence
  Description of Artificial Sequence: Synthetic oligonucleotide
gacagacagcccggcagug

SEQ ID NO: 2042593 - RNA, 19 nt, Artificial Sequence
  Description of Artificial Sequence: Synthetic oligonucleotide
aggccacucgcugggcucg

SEQ ID NO: 2042594 - RNA, 19 nt, Artificial Sequence
  Description of Artificial Sequence: Synthetic oligonucleotide
cacaccuguuagagucccc

SEQ ID NO: 2042595 - RNA, 19 nt, Artificial Sequence
  Description of Artificial Sequence: Synthetic oligonucleotide
caagucccuccgacgccgg

SEQ ID NO: 2042596 - RNA, 19 nt, Artificial Sequence
  Description of Artificial Sequence: Synthetic oligonucleotide
cagucaugguuucgcuaac

SEQ ID NO: 2042597 - RNA, 19 nt, Artificial Sequence
  Description of Artificial Sequence: Synthetic oligonucleotide
guuucgcuaacaccuuccu

SEQ ID NO: 2042598 - RNA, 19 nt, Artificial Sequence
  Description of Artificial Sequence: Synthetic oligonucleotide
ucgugcucccgccgggccu

SEQ ID NO: 2042599 - RNA, 19 nt, Artificial Sequence
  Description of Artificial Sequence: Synthetic oligonucleotide
ucccgagccuuucuuucuu

SEQ ID NO: 2042600 - RNA, 19 nt, Artificial Sequence
  Description of Artificial Sequence: Synthetic oligonucleotide
agcccggcagugaagccag

SEQ ID NO: 2042601 - RNA, 19 nt, Artificial Sequence
  Description of Artificial Sequence: Synthetic oligonucleotide
gucccuccgacgccggggc

SEQ ID NO: 2042602 - RNA, 19 nt, Artificial Sequence
  Description of Artificial Sequence: Synthetic oligonucleotide
gcugugagacuguuccuca

SEQ ID NO: 2042603 - RNA, 19 nt, Artificial Sequence
  Description of Artificial Sequence: Synthetic oligonucleotide
cucagucaugguuucgcua

SEQ ID NO: 2042604 - RNA, 19 nt, Artificial Sequence
  Description of Artificial Sequence: Synthetic oligonucleotide
ugccccggucgucaaucac

SEQ ID NO: 2042605 - RNA, 19 nt, Artificial Sequence
  Description of Artificial Sequence: Synthetic oligonucleotide
agacuguuccucagucaug

SEQ ID NO: 2042606 - RNA, 19 nt, Artificial Sequence
  Description of Artificial Sequence: Synthetic oligonucleotide
cacuagcugcugccgcccg

SEQ ID NO: 2042607 - RNA, 19 nt, Artificial Sequence
  Description of Artificial Sequence: Synthetic oligonucleotide
cagugaagccagcgcgccc

SEQ ID NO: 2042608 - RNA, 19 nt, Artificial Sequence
  Description of Artificial Sequence: Synthetic oligonucleotide
gcaguggcucuccacuagc

SEQ ID NO: 2042609 - RNA, 19 nt, Artificial Sequence
  Description of Artificial Sequence: Synthetic oligonucleotide
uccucccgagccuuucuuu

SEQ ID NO: 2042610 - RNA, 19 nt, Artificial Sequence
  Description of Artificial Sequence: Synthetic oligonucleotide
ccgccagauacacccaggg

SEQ ID NO: 2042611 - RNA, 19 nt, Artificial Sequence
  Description of Artificial Sequence: Synthetic oligonucleotide
cuggccugcuccugcccgc

SEQ ID NO: 2042612 - RNA, 19 nt, Artificial Sequence
  Description of Artificial Sequence: Synthetic oligonucleotide
agauaacgccgaugagcaa

SEQ ID NO: 2042613 - RNA, 19 nt, Artificial Sequence
  Description of Artificial Sequence: Synthetic oligonucleotide
cagacuccuggggccaagg

SEQ ID NO: 2042614 - RNA, 19 nt, Artificial Sequence
  Description of Artificial Sequence: Synthetic oligonucleotide
ccuuagacccaucuggaaa

SEQ ID NO: 2042615 - RNA, 19 nt, Artificial Sequence
  Description of Artificial Sequence: Synthetic oligonucleotide
gucgagguauguaggccac

SEQ ID NO: 2042616 - RNA, 19 nt, Artificial Sequence
  Description of Artificial Sequence: Synthetic oligonucleotide
acguugggacucgaggcgu

SEQ ID NO: 2042617 - RNA, 19 nt, Artificial Sequence
  Description of Artificial Sequence: Synthetic oligonucleotide
caccuguuagaguccccuc

SEQ ID NO: 2042618 - RNA, 19 nt, Artificial Sequence
  Description of Artificial Sequence: Synthetic oligonucleotide
ggaagguccuggccccagg

SEQ ID NO: 2042619 - RNA, 19 nt, Artificial Sequence
  Description of Artificial Sequence: Synthetic oligonucleotide
cgaugagcaaaaccgccgc

SEQ ID NO: 2042620 - RNA, 19 nt, Artificial Sequence
  Description of Artificial Sequence: Synthetic oligonucleotide
agggccccaccaugacgac

SEQ ID NO: 2042621 - RNA, 19 nt, Artificial Sequence
  Description of Artificial Sequence: Synthetic oligonucleotide
auggacacccggccccgcu

SEQ ID NO: 2042622 - RNA, 19 nt, Artificial Sequence
  Description of Artificial Sequence: Synthetic oligonucleotide
uugccccggucgucaauca

SEQ ID NO: 2042623 - RNA, 19 nt, Artificial Sequence
  Description of Artificial Sequence: Synthetic oligonucleotide
ucgagguauguaggccaca

SEQ ID NO: 2042624 - RNA, 19 nt, Artificial Sequence
  Description of Artificial Sequence: Synthetic oligonucleotide
cacaaccuuggacugcuua

SEQ ID NO: 2042625 - RNA, 19 nt, Artificial Sequence
  Description of Artificial Sequence: Synthetic oligonucleotide
cacccagggccccaccaug

SEQ ID NO: 2042626 - RNA, 19 nt, Artificial Sequence
  Description of Artificial Sequence: Synthetic oligonucleotide
cggcagugaagccagcgcg

SEQ ID NO: 2042627 - RNA, 19 nt, Artificial Sequence
  Description of Artificial Sequence: Synthetic oligonucleotide
gccuccagcgguucucugc

SEQ ID NO: 2042628 - RNA, 19 nt, Artificial Sequence
  Description of Artificial Sequence: Synthetic oligonucleotide
cucgugcucccgccgggcc

SEQ ID NO: 2042629 - RNA, 19 nt, Artificial Sequence
  Description of Artificial Sequence: Synthetic oligonucleotide
cugccaggaagcugugaga

SEQ ID NO: 2042630 - RNA, 19 nt, Artificial Sequence
  Description of Artificial Sequence: Synthetic oligonucleotide
ugggcucgacgaugggccu

SEQ ID NO: 2042631 - RNA, 19 nt, Artificial Sequence
  Description of Artificial Sequence: Synthetic oligonucleotide
ccgagccuuucuuucuucc

SEQ ID NO: 2042632 - RNA, 19 nt, Artificial Sequence
  Description of Artificial Sequence: Synthetic oligonucleotide
cgguuuaugguguccugag

SEQ ID NO: 2042633 - RNA, 19 nt, Artificial Sequence
  Description of Artificial Sequence: Synthetic oligonucleotide
gguguccugaguccuuaga

SEQ ID NO: 2042634 - RNA, 19 nt, Artificial Sequence
  Description of Artificial Sequence: Synthetic oligonucleotide
ggcagugaagccagcgcgc

SEQ ID NO: 2042635 - RNA, 19 nt, Artificial Sequence
  Description of Artificial Sequence: Synthetic oligonucleotide
cagauacacccagggcccc

SEQ ID NO: 2042636 - RNA, 19 nt, Artificial Sequence
  Description of Artificial Sequence: Synthetic oligonucleotide
auuugccccggucgucaau

SEQ ID NO: 2042637 - RNA, 19 nt, Artificial Sequence
  Description of Artificial Sequence: Synthetic oligonucleotide
uugggacucgaggcguuuc

SEQ ID NO: 2042638 - RNA, 19 nt, Artificial Sequence
  Description of Artificial Sequence: Synthetic oligonucleotide
agaguccccucggugagua

SEQ ID NO: 2042639 - RNA, 19 nt, Artificial Sequence
  Description of Artificial Sequence: Synthetic oligonucleotide
ccuuggacugcuuaaugua

SEQ ID NO: 2042640 - RNA, 19 nt, Artificial Sequence
  Description of Artificial Sequence: Synthetic oligonucleotide
ccucacgcugggcuuuucg

SEQ ID NO: 2042641 - RNA, 19 nt, Artificial Sequence
  Description of Artificial Sequence: Synthetic oligonucleotide
agccucacguugggacucg

SEQ ID NO: 2042642 - RNA, 19 nt, Artificial Sequence
  Description of Artificial Sequence: Synthetic oligonucleotide
aggaagguccuggccccag

SEQ ID NO: 2042643 - RNA, 19 nt, Artificial Sequence
  Description of Artificial Sequence: Synthetic oligonucleotide
gaguccccucggugaguag

SEQ ID NO: 2042644 - RNA, 19 nt, Artificial Sequence
  Description of Artificial Sequence: Synthetic oligonucleotide
gcagugaagccagcgcgcc

SEQ ID NO: 2042645 - RNA, 19 nt, Artificial Sequence
  Description of Artificial Sequence: Synthetic oligonucleotide
gcccaggccacucgcuggg

SEQ ID NO: 2042646 - RNA, 19 nt, Artificial Sequence
  Description of Artificial Sequence: Synthetic oligonucleotide
ccggucgucaaucacaccu

SEQ ID NO: 2042647 - RNA, 19 nt, Artificial Sequence
  Description of Artificial Sequence: Synthetic oligonucleotide
caaucacaccuguuagagu

SEQ ID NO: 2042648 - RNA, 19 nt, Artificial Sequence
  Description of Artificial Sequence: Synthetic oligonucleotide
gcaaaaccgccgccgccag

SEQ ID NO: 2042649 - RNA, 19 nt, Artificial Sequence
  Description of Artificial Sequence: Synthetic oligonucleotide
gacucgaggcguuuccguu

SEQ ID NO: 2042650 - RNA, 19 nt, Artificial Sequence
  Description of Artificial Sequence: Synthetic oligonucleotide
gggacccggaucaccaggc

SEQ ID NO: 2042651 - RNA, 19 nt, Artificial Sequence
  Description of Artificial Sequence: Synthetic oligonucleotide
ccagggccccaccaugacg

SEQ ID NO: 2042652 - RNA, 19 nt, Artificial Sequence
  Description of Artificial Sequence: Synthetic oligonucleotide
ccggcagugaagccagcgc

SEQ ID NO: 2042653 - RNA, 19 nt, Artificial Sequence
  Description of Artificial Sequence: Synthetic oligonucleotide
augguguccugaguccuua

SEQ ID NO: 2042654 - RNA, 19 nt, Artificial Sequence
  Description of Artificial Sequence: Synthetic oligonucleotide
uaacgccgaugagcaaaac

SEQ ID NO: 2042655 - RNA, 19 nt, Artificial Sequence
  Description of Artificial Sequence: Synthetic oligonucleotide
cagccucacguugggacuc

SEQ ID NO: 2042656 - RNA, 19 nt, Artificial Sequence
  Description of Artificial Sequence: Synthetic oligonucleotide
cuaguuuccguaguuucuu

SEQ ID NO: 2042657 - RNA, 19 nt, Artificial Sequence
  Description of Artificial Sequence: Synthetic oligonucleotide
ccccggucgucaaucacac

SEQ ID NO: 2042658 - RNA, 19 nt, Artificial Sequence
  Description of Artificial Sequence: Synthetic oligonucleotide
ugcugccgcccgaccccgg

SEQ ID NO: 2042659 - RNA, 19 nt, Artificial Sequence
  Description of Artificial Sequence: Synthetic oligonucleotide
gauggacacccggccccgc

SEQ ID NO: 2042660 - RNA, 19 nt, Artificial Sequence
  Description of Artificial Sequence: Synthetic oligonucleotide
cgccgaugagcaaaaccgc

SEQ ID NO: 2042661 - RNA, 19 nt, Artificial Sequence
  Description of Artificial Sequence: Synthetic oligonucleotide
gaugggccuguagacggcu

SEQ ID NO: 2042662 - RNA, 19 nt, Artificial Sequence
  Description of Artificial Sequence: Synthetic oligonucleotide
gccugggcaagcucaguga

SEQ ID NO: 2042663 - RNA, 19 nt, Artificial Sequence
  Description of Artificial Sequence: Synthetic oligonucleotide
cgacgaugggccuguagac

SEQ ID NO: 2042664 - RNA, 19 nt, Artificial Sequence
  Description of Artificial Sequence: Synthetic oligonucleotide
uggggccaaggcugggcua

SEQ ID NO: 2042665 - RNA, 19 nt, Artificial Sequence
  Description of Artificial Sequence: Synthetic oligonucleotide
gguuuaugguguccugagu

SEQ ID NO: 2042666 - RNA, 19 nt, Artificial Sequence
  Description of Artificial Sequence: Synthetic oligonucleotide
ucccuccgacgccggggcc

SEQ ID NO: 2042667 - RNA, 19 nt, Artificial Sequence
  Description of Artificial Sequence: Synthetic oligonucleotide
ggacccggaucaccaggcc

SEQ ID NO: 2042668 - RNA, 19 nt, Artificial Sequence
  Description of Artificial Sequence: Synthetic oligonucleotide
gcgguucucugcuccucag

SEQ ID NO: 2042669 - RNA, 19 nt, Artificial Sequence
  Description of Artificial Sequence: Synthetic oligonucleotide
cagcccggcagugaagcca

SEQ ID NO: 2042670 - RNA, 19 nt, Artificial Sequence
  Description of Artificial Sequence: Synthetic oligonucleotide
auucugccaggaagcugug

SEQ ID NO: 2042671 - RNA, 19 nt, Artificial Sequence
  Description of Artificial Sequence: Synthetic oligonucleotide
gugcaguggcucuccacua

SEQ ID NO: 2042672 - RNA, 19 nt, Artificial Sequence
  Description of Artificial Sequence: Synthetic oligonucleotide
gccaaggcugggcuaccug

SEQ ID NO: 2042673 - RNA, 19 nt, Artificial Sequence
  Description of Artificial Sequence: Synthetic oligonucleotide
ugggcuuuucgagccuguu

SEQ ID NO: 2042674 - RNA, 19 nt, Artificial Sequence
  Description of Artificial Sequence: Synthetic oligonucleotide
ccacucgcugggcucgacg

SEQ ID NO: 2042675 - RNA, 19 nt, Artificial Sequence
  Description of Artificial Sequence: Synthetic oligonucleotide
gcgguuuaugguguccuga

SEQ ID NO: 2042676 - RNA, 19 nt, Artificial Sequence
  Description of Artificial Sequence: Synthetic oligonucleotide
ggggccaaggcugggcuac

SEQ ID NO: 2042677 - RNA, 19 nt, Artificial Sequence
  Description of Artificial Sequence: Synthetic oligonucleotide
gggucaggaagaagauaac

SEQ ID NO: 2042678 - RNA, 19 nt, Artificial Sequence
  Description of Artificial Sequence: Synthetic oligonucleotide
ccaaaagcacaaccuugga

SEQ ID NO: 2042679 - RNA, 19 nt, Artificial Sequence
  Description of Artificial Sequence: Synthetic oligonucleotide
ggaugcgguuuaugguguc

SEQ ID NO: 2042680 - RNA, 19 nt, Artificial Sequence
  Description of Artificial Sequence: Synthetic oligonucleotide
ucgaggcguuuccguuccu

SEQ ID NO: 2042681 - RNA, 19 nt, Artificial Sequence
  Description of Artificial Sequence: Synthetic oligonucleotide
ccacgaaggccuccuucag

SEQ ID NO: 2042682 - RNA, 19 nt, Artificial Sequence
  Description of Artificial Sequence: Synthetic oligonucleotide
cugcugccgcccgaccccg

SEQ ID NO: 2042683 - RNA, 19 nt, Artificial Sequence
  Description of Artificial Sequence: Synthetic oligonucleotide
gccgccagauacacccagg

SEQ ID NO: 2042684 - RNA, 19 nt, Artificial Sequence
  Description of Artificial Sequence: Synthetic oligonucleotide
ccucacguugggacucgag

SEQ ID NO: 2042685 - RNA, 19 nt, Artificial Sequence
  Description of Artificial Sequence: Synthetic oligonucleotide
aggccacaugauacauuca

SEQ ID NO: 2042686 - RNA, 19 nt, Artificial Sequence
  Description of Artificial Sequence: Synthetic oligonucleotide
ggucgucaaucacaccugu

SEQ ID NO: 2042687 - RNA, 19 nt, Artificial Sequence
  Description of Artificial Sequence: Synthetic oligonucleotide
cccggcagugaagccagcg

SEQ ID NO: 2042688 - RNA, 19 nt, Artificial Sequence
  Description of Artificial Sequence: Synthetic oligonucleotide
cacgaaggccuccuucagu

SEQ ID NO: 2042689 - RNA, 19 nt, Artificial Sequence
  Description of Artificial Sequence: Synthetic oligonucleotide
caguggcucuccacuagcu

SEQ ID NO: 2042690 - RNA, 19 nt, Artificial Sequence
  Description of Artificial Sequence: Synthetic oligonucleotide
gcccgcgggacccggauca

SEQ ID NO: 2042691 - RNA, 19 nt, Artificial Sequence
  Description of Artificial Sequence: Synthetic oligonucleotide
gguauguaggccacaugau

SEQ ID NO: 2042692 - RNA, 19 nt, Artificial Sequence
  Description of Artificial Sequence: Synthetic oligonucleotide
gcugcgggucaggaagaag

SEQ ID NO: 2042693 - RNA, 19 nt, Artificial Sequence
  Description of Artificial Sequence: Synthetic oligonucleotide
cuccagcgguucucugcuc

SEQ ID NO: 2042694 - RNA, 19 nt, Artificial Sequence
  Description of Artificial Sequence: Synthetic oligonucleotide
acacccggccccgcugucu

SEQ ID NO: 2042695 - RNA, 19 nt, Artificial Sequence
  Description of Artificial Sequence: Synthetic oligonucleotide
gacacccggccccgcuguc

SEQ ID NO: 2042696 - RNA, 19 nt, Artificial Sequence
  Description of Artificial Sequence: Synthetic oligonucleotide
cgccagauacacccagggc

SEQ ID NO: 2042697 - RNA, 19 nt, Artificial Sequence
  Description of Artificial Sequence: Synthetic oligonucleotide
caaccuuggacugcuuaau

SEQ ID NO: 2042698 - RNA, 19 nt, Artificial Sequence
  Description of Artificial Sequence: Synthetic oligonucleotide
guaggucuuggaugcgguu

SEQ ID NO: 2042699 - RNA, 19 nt, Artificial Sequence
  Description of Artificial Sequence: Synthetic oligonucleotide
uccccucggugaguagguc

SEQ ID NO: 2042700 - RNA, 19 nt, Artificial Sequence
  Description of Artificial Sequence: Synthetic oligonucleotide
uccucacguucagcuuccu

SEQ ID NO: 2042701 - RNA, 19 nt, Artificial Sequence
  Description of Artificial Sequence: Synthetic oligonucleotide
gccccggucgucaaucaca

SEQ ID NO: 2042702 - RNA, 19 nt, Artificial Sequence
  Description of Artificial Sequence: Synthetic oligonucleotide
cgggacccggaucaccagg

SEQ ID NO: 2042703 - RNA, 19 nt, Artificial Sequence
  Description of Artificial Sequence: Synthetic oligonucleotide
cagcgguucucugcuccuc

SEQ ID NO: 2042704 - RNA, 19 nt, Artificial Sequence
  Description of Artificial Sequence: Synthetic oligonucleotide
ggacucgaggcguuuccgu

SEQ ID NO: 2042705 - RNA, 19 nt, Artificial Sequence
  Description of Artificial Sequence: Synthetic oligonucleotide
caaaaccgccgccgccaga

SEQ ID NO: 2042706 - RNA, 19 nt, Artificial Sequence
  Description of Artificial Sequence: Synthetic oligonucleotide
cuggggccaaggcugggcu

SEQ ID NO: 2042707 - RNA, 19 nt, Artificial Sequence
  Description of Artificial Sequence: Synthetic oligonucleotide
agccagcgcgcccgcggga

SEQ ID NO: 2042708 - RNA, 19 nt, Artificial Sequence
  Description of Artificial Sequence: Synthetic oligonucleotide
ccucacguucagcuuccuc

SEQ ID NO: 2042709 - RNA, 19 nt, Artificial Sequence
  Description of Artificial Sequence: Synthetic oligonucleotide
gcguuuccguuccucacgu

SEQ ID NO: 2042710 - RNA, 19 nt, Artificial Sequence
  Description of Artificial Sequence: Synthetic oligonucleotide
gcugccgcccgaccccggc

SEQ ID NO: 2042711 - RNA, 19 nt, Artificial Sequence
  Description of Artificial Sequence: Synthetic oligonucleotide
cccgagccuuucuuucuuc

SEQ ID NO: 2042712 - RNA, 19 nt, Artificial Sequence
  Description of Artificial Sequence: Synthetic oligonucleotide
guaggccacaugauacauu

SEQ ID NO: 2042713 - RNA, 19 nt, Artificial Sequence
  Description of Artificial Sequence: Synthetic oligonucleotide
cacggcagccagcuccucu

SEQ ID NO: 2042714 - RNA, 19 nt, Artificial Sequence
  Description of Artificial Sequence: Synthetic oligonucleotide
cgaugggccuguagacggc

SEQ ID NO: 2042715 - RNA, 19 nt, Artificial Sequence
  Description of Artificial Sequence: Synthetic oligonucleotide
accccggcugcgggucagg

SEQ ID NO: 2042716 - RNA, 19 nt, Artificial Sequence
  Description of Artificial Sequence: Synthetic oligonucleotide
gcugcccaagucccuccga

SEQ ID NO: 2042717 - RNA, 19 nt, Artificial Sequence
  Description of Artificial Sequence: Synthetic oligonucleotide
agcgcgcccgcgggacccg

SEQ ID NO: 2042718 - RNA, 19 nt, Artificial Sequence
  Description of Artificial Sequence: Synthetic oligonucleotide
cugggcuuuucgagccugu

SEQ ID NO: 2042719 - RNA, 19 nt, Artificial Sequence
  Description of Artificial Sequence: Synthetic oligonucleotide
gggcucgacgaugggccug

SEQ ID NO: 2042720 - RNA, 19 nt, Artificial Sequence
  Description of Artificial Sequence: Synthetic oligonucleotide
gacggcugcccaagucccu

SEQ ID NO: 2042721 - RNA, 19 nt, Artificial Sequence
  Description of Artificial Sequence: Synthetic oligonucleotide
cccggucgucaaucacacc

SEQ ID NO: 2042722 - RNA, 19 nt, Artificial Sequence
  Description of Artificial Sequence: Synthetic oligonucleotide
ccaagauggcagggaagga

SEQ ID NO: 2042723 - RNA, 19 nt, Artificial Sequence
  Description of Artificial Sequence: Synthetic oligonucleotide
cgccgccagauacacccag

SEQ ID NO: 2042724 - RNA, 19 nt, Artificial Sequence
  Description of Artificial Sequence: Synthetic oligonucleotide
cgcgggacccggaucacca

SEQ ID NO: 2042725 - RNA, 19 nt, Artificial Sequence
  Description of Artificial Sequence: Synthetic oligonucleotide
gucgucaaucacaccuguu

SEQ ID NO: 2042726 - RNA, 19 nt, Artificial Sequence
  Description of Artificial Sequence: Synthetic oligonucleotide
cccggaucaccaggccccg

SEQ ID NO: 2042727 - RNA, 19 nt, Artificial Sequence
  Description of Artificial Sequence: Synthetic oligonucleotide
gggcaagcucagugaugga

SEQ ID NO: 2042728 - RNA, 19 nt, Artificial Sequence
  Description of Artificial Sequence: Synthetic oligonucleotide
cucagacuccuggggccaa

SEQ ID NO: 2042729 - RNA, 19 nt, Artificial Sequence
  Description of Artificial Sequence: Synthetic oligonucleotide
ccugggcaagcucagugau

SEQ ID NO: 2042730 - RNA, 19 nt, Artificial Sequence
  Description of Artificial Sequence: Synthetic oligonucleotide
ccucgugcucccgccgggc

SEQ ID NO: 2042731 - RNA, 19 nt, Artificial Sequence
  Description of Artificial Sequence: Synthetic oligonucleotide
ggacacccggccccgcugu

SEQ ID NO: 2042732 - RNA, 19 nt, Artificial Sequence
  Description of Artificial Sequence: Synthetic oligonucleotide
ccucagacuccuggggcca

SEQ ID NO: 2042733 - RNA, 19 nt, Artificial Sequence
  Description of Artificial Sequence: Synthetic oligonucleotide
ccucggugaguaggucuug

SEQ ID NO: 2042734 - RNA, 19 nt, Artificial Sequence
  Description of Artificial Sequence: Synthetic oligonucleotide
guugggacucgaggcguuu

SEQ ID NO: 2042735 - RNA, 19 nt, Artificial Sequence
  Description of Artificial Sequence: Synthetic oligonucleotide
gccagcgcgcccgcgggac

SEQ ID NO: 2042736 - RNA, 19 nt, Artificial Sequence
  Description of Artificial Sequence: Synthetic oligonucleotide
cgcuaacaccuuccucuuc

SEQ ID NO: 2042737 - RNA, 19 nt, Artificial Sequence
  Description of Artificial Sequence: Synthetic oligonucleotide
cuccucccgagccuuucuu

SEQ ID NO: 2042738 - RNA, 19 nt, Artificial Sequence
  Description of Artificial Sequence: Synthetic oligonucleotide
gggccaaggcugggcuacc

SEQ ID NO: 2042739 - RNA, 19 nt, Artificial Sequence
  Description of Artificial Sequence: Synthetic oligonucleotide
gggccccaccaugacgaca

SEQ ID NO: 2042740 - RNA, 19 nt, Artificial Sequence
  Description of Artificial Sequence: Synthetic oligonucleotide
ggcucgacgaugggccugu

SEQ ID NO: 2042741 - RNA, 19 nt, Artificial Sequence
  Description of Artificial Sequence: Synthetic oligonucleotide
gcuccucccgagccuuucu

SEQ ID NO: 2042742 - RNA, 19 nt, Artificial Sequence
  Description of Artificial Sequence: Synthetic oligonucleotide
ggcugcgggucaggaagaa

SEQ ID NO: 2042743 - RNA, 19 nt, Artificial Sequence
  Description of Artificial Sequence: Synthetic oligonucleotide
ccgcgggacccggaucacc

SEQ ID NO: 2042744 - RNA, 19 nt, Artificial Sequence
  Description of Artificial Sequence: Synthetic oligonucleotide
cggggccugccuccagcgg

SEQ ID NO: 2042745 - RNA, 19 nt, Artificial Sequence
  Description of Artificial Sequence: Synthetic oligonucleotide
cggugaguaggucuuggau

SEQ ID NO: 2042746 - RNA, 19 nt, Artificial Sequence
  Description of Artificial Sequence: Synthetic oligonucleotide
cuaccacgaaggccuccuu

SEQ ID NO: 2042747 - RNA, 19 nt, Artificial Sequence
  Description of Artificial Sequence: Synthetic oligonucleotide
ccgaccccggcugcggguc

SEQ ID NO: 2042748 - RNA, 19 nt, Artificial Sequence
  Description of Artificial Sequence: Synthetic oligonucleotide
cuccgacgccggggccugc

SEQ ID NO: 2042749 - RNA, 19 nt, Artificial Sequence
  Description of Artificial Sequence: Synthetic oligonucleotide
ccguaguuucuuggcucca

SEQ ID NO: 2042750 - RNA, 19 nt, Artificial Sequence
  Description of Artificial Sequence: Synthetic oligonucleotide
ccagcgguucucugcuccu

SEQ ID NO: 2042751 - RNA, 19 nt, Artificial Sequence
  Description of Artificial Sequence: Synthetic oligonucleotide
ggucuuggaugcgguuuau

SEQ ID NO: 2042752 - RNA, 19 nt, Artificial Sequence
  Description of Artificial Sequence: Synthetic oligonucleotide
cgagguauguaggccacau

SEQ ID NO: 2042753 - RNA, 19 nt, Artificial Sequence
  Description of Artificial Sequence: Synthetic oligonucleotide
ccggaucaccaggccccgc

SEQ ID NO: 2042754 - RNA, 19 nt, Artificial Sequence
  Description of Artificial Sequence: Synthetic oligonucleotide
cugggcuaccuggccugcu

SEQ ID NO: 2042755 - RNA, 19 nt, Artificial Sequence
  Description of Artificial Sequence: Synthetic oligonucleotide
ggccaaggcugggcuaccu

SEQ ID NO: 2042756 - RNA, 19 nt, Artificial Sequence
  Description of Artificial Sequence: Synthetic oligonucleotide
cccggcugcgggucaggaa

SEQ ID NO: 2042757 - RNA, 19 nt, Artificial Sequence
  Description of Artificial Sequence: Synthetic oligonucleotide
cgacgccggggccugccuc

SEQ ID NO: 2042758 - RNA, 19 nt, Artificial Sequence
  Description of Artificial Sequence: Synthetic oligonucleotide
gccacucgcugggcucgac

SEQ ID NO: 2042759 - RNA, 19 nt, Artificial Sequence
  Description of Artificial Sequence: Synthetic oligonucleotide
cagccucacgcugggcuuu

SEQ ID NO: 2042760 - RNA, 19 nt, Artificial Sequence
  Description of Artificial Sequence: Synthetic oligonucleotide
ccgccgccagauacaccca

SEQ ID NO: 2042761 - RNA, 19 nt, Artificial Sequence
  Description of Artificial Sequence: Synthetic oligonucleotide
cgcccgaccccggcugcgg

SEQ ID NO: 2042762 - RNA, 19 nt, Artificial Sequence
  Description of Artificial Sequence: Synthetic oligonucleotide
cccgcgggacccggaucac

SEQ ID NO: 2042763 - RNA, 19 nt, Artificial Sequence
  Description of Artificial Sequence: Synthetic oligonucleotide
gcgcgcccgcgggacccgg

SEQ ID NO: 2042764 - RNA, 19 nt, Artificial Sequence
  Description of Artificial Sequence: Synthetic oligonucleotide
gcccggcagugaagccagc

SEQ ID NO: 2042765 - RNA, 19 nt, Artificial Sequence
  Description of Artificial Sequence: Synthetic oligonucleotide
gggccugccuccagcgguu

SEQ ID NO: 2042766 - RNA, 19 nt, Artificial Sequence
  Description of Artificial Sequence: Synthetic oligonucleotide
cccuccgacgccggggccu

SEQ ID NO: 2042767 - RNA, 19 nt, Artificial Sequence
  Description of Artificial Sequence: Synthetic oligonucleotide
cgcccgcgggacccggauc

SEQ ID NO: 2042768 - RNA, 19 nt, Artificial Sequence
  Description of Artificial Sequence: Synthetic oligonucleotide
ccccggcugcgggucagga

SEQ ID NO: 2042769 - RNA, 19 nt, Artificial Sequence
  Description of Artificial Sequence: Synthetic oligonucleotide
gcgcccgcgggacccggau

SEQ ID NO: 2042770 - RNA, 19 nt, Artificial Sequence
  Description of Artificial Sequence: Synthetic oligonucleotide
cguugggacucgaggcguu

SEQ ID NO: 2042771 - RNA, 19 nt, Artificial Sequence
  Description of Artificial Sequence: Synthetic oligonucleotide
gcucgacgaugggccugua

SEQ ID NO: 2042772 - RNA, 19 nt, Artificial Sequence
  Description of Artificial Sequence: Synthetic oligonucleotide
cguuuccguuccucacguu

SEQ ID NO: 2042773 - RNA, 19 nt, Artificial Sequence
  Description of Artificial Sequence: Synthetic oligonucleotide
ccgacgccggggccugccu

SEQ ID NO: 2042774 - RNA, 19 nt, Artificial Sequence
  Description of Artificial Sequence: Synthetic oligonucleotide
ccagcuccucugggguuau

SEQ ID NO: 2042775 - RNA, 19 nt, Artificial Sequence
  Description of Artificial Sequence: Synthetic oligonucleotide
cccggccccgcugucugau

SEQ ID NO: 2042776 - RNA, 19 nt, Artificial Sequence
  Description of Artificial Sequence: Synthetic oligonucleotide
cgcgcccgcgggacccgga

SEQ ID NO: 2042777 - RNA, 19 nt, Artificial Sequence
  Description of Artificial Sequence: Synthetic oligonucleotide
cuuuauuggaaauugaaag

SEQ ID NO: 2042778 - RNA, 19 nt, Artificial Sequence
  Description of Artificial Sequence: Synthetic oligonucleotide
uuacauaacaauaaauccc

SEQ ID NO: 2042779 - RNA, 19 nt, Artificial Sequence
  Description of Artificial Sequence: Synthetic oligonucleotide
guuuacuggagcuagaagg

SEQ ID NO: 2042780 - RNA, 19 nt, Artificial Sequence
  Description of Artificial Sequence: Synthetic oligonucleotide
aagcuaaggaguuuggaac

SEQ ID NO: 2042781 - RNA, 19 nt, Artificial Sequence
  Description of Artificial Sequence: Synthetic oligonucleotide
ugaaguaagaucaaaguaa

SEQ ID NO: 2042782 - RNA, 19 nt, Artificial Sequence
  Description of Artificial Sequence: Synthetic oligonucleotide
acaauaaaucccaaaaugc

SEQ ID NO: 2042783 - RNA, 19 nt, Artificial Sequence
  Description of Artificial Sequence: Synthetic oligonucleotide
cauagcaucuaaaauaacc

SEQ ID NO: 2042784 - RNA, 19 nt, Artificial Sequence
  Description of Artificial Sequence: Synthetic oligonucleotide
auaucaguuaucuucuuac

SEQ ID NO: 2042785 - RNA, 19 nt, Artificial Sequence
  Description of Artificial Sequence: Synthetic oligonucleotide
auauccaugaaguaagauc

SEQ ID NO: 2042786 - RNA, 19 nt, Artificial Sequence
  Description of Artificial Sequence: Synthetic oligonucleotide
uuuauuggaaauugaaagc

SEQ ID NO: 2042787 - RNA, 19 nt, Artificial Sequence
  Description of Artificial Sequence: Synthetic oligonucleotide
aaaguaagcaucauuugac

SEQ ID NO: 2042788 - RNA, 19 nt, Artificial Sequence
  Description of Artificial Sequence: Synthetic oligonucleotide
aaagggcaagcuuuaaugg

SEQ ID NO: 2042789 - RNA, 19 nt, Artificial Sequence
  Description of Artificial Sequence: Synthetic oligonucleotide
uuuacuggagcuagaaggg

SEQ ID NO: 2042790 - RNA, 19 nt, Artificial Sequence
  Description of Artificial Sequence: Synthetic oligonucleotide
uacauaacaauaaauccca

SEQ ID NO: 2042791 - RNA, 19 nt, Artificial Sequence
  Description of Artificial Sequence: Synthetic oligonucleotide
cauauauccaugaaguaag

SEQ ID NO: 2042792 - RNA, 19 nt, Artificial Sequence
  Description of Artificial Sequence: Synthetic oligonucleotide
aacacaacaccuguguggc

SEQ ID NO: 2042793 - RNA, 19 nt, Artificial Sequence
  Description of Artificial Sequence: Synthetic oligonucleotide
aaaaguucaacuccugagu

SEQ ID NO: 2042794 - RNA, 19 nt, Artificial Sequence
  Description of Artificial Sequence: Synthetic oligonucleotide
aacccacaaaguuagguuc

SEQ ID NO: 2042795 - RNA, 19 nt, Artificial Sequence
  Description of Artificial Sequence: Synthetic oligonucleotide
uaauggucuagaaauaucu

SEQ ID NO: 2042796 - RNA, 19 nt, Artificial Sequence
  Description of Artificial Sequence: Synthetic oligonucleotide
aucaaauccacgcuguggg

SEQ ID NO: 2042797 - RNA, 19 nt, Artificial Sequence
  Description of Artificial Sequence: Synthetic oligonucleotide
cuaguugaaagcuaaggag

SEQ ID NO: 2042798 - RNA, 19 nt, Artificial Sequence
  Description of Artificial Sequence: Synthetic oligonucleotide
ucaauauggcacuuuauug

SEQ ID NO: 2042799 - RNA, 19 nt, Artificial Sequence
  Description of Artificial Sequence: Synthetic oligonucleotide
aggacaauggcccagauau

SEQ ID NO: 2042800 - RNA, 19 nt, Artificial Sequence
  Description of Artificial Sequence: Synthetic oligonucleotide
auaaaucccaaaaugcccc

SEQ ID NO: 2042801 - RNA, 19 nt, Artificial Sequence
  Description of Artificial Sequence: Synthetic oligonucleotide
ucaagggucucauacagcc

SEQ ID NO: 2042802 - RNA, 19 nt, Artificial Sequence
  Description of Artificial Sequence: Synthetic oligonucleotide
uccuuaucacacaacaucc

SEQ ID NO: 2042803 - RNA, 19 nt, Artificial Sequence
  Description of Artificial Sequence: Synthetic oligonucleotide
aguaagcaucauuugacac

SEQ ID NO: 2042804 - RNA, 19 nt, Artificial Sequence
  Description of Artificial Sequence: Synthetic oligonucleotide
ucuuucggagaacaggccg

SEQ ID NO: 2042805 - RNA, 19 nt, Artificial Sequence
  Description of Artificial Sequence: Synthetic oligonucleotide
ucacaaacagcuuucaccu

SEQ ID NO: 2042806 - RNA, 19 nt, Artificial Sequence
  Description of Artificial Sequence: Synthetic oligonucleotide
uacuuuagauguuuacugg

SEQ ID NO: 2042807 - RNA, 19 nt, Artificial Sequence
  Description of Artificial Sequence: Synthetic oligonucleotide
aauacuacccuaauaucag

SEQ ID NO: 2042808 - RNA, 19 nt, Artificial Sequence
  Description of Artificial Sequence: Synthetic oligonucleotide
aaguuagguucauugauca

SEQ ID NO: 2042809 - RNA, 19 nt, Artificial Sequence
  Description of Artificial Sequence: Synthetic oligonucleotide
agcuaaggaguuuggaacc

SEQ ID NO: 2042810 - RNA, 19 nt, Artificial Sequence
  Description of Artificial Sequence: Synthetic oligonucleotide
uuugagucagguucaagag

SEQ ID NO: 2042811 - RNA, 19 nt, Artificial Sequence
  Description of Artificial Sequence: Synthetic oligonucleotide
uaguugaaagcuaaggagu

SEQ ID NO: 2042812 - RNA, 19 nt, Artificial Sequence
  Description of Artificial Sequence: Synthetic oligonucleotide
uuuagauguuuacuggagc

SEQ ID NO: 2042813 - RNA, 19 nt, Artificial Sequence
  Description of Artificial Sequence: Synthetic oligonucleotide
ugucuuucggagaacaggc

SEQ ID NO: 2042814 - RNA, 19 nt, Artificial Sequence
  Description of Artificial Sequence: Synthetic oligonucleotide
aaagcuaaggaguuuggaa

SEQ ID NO: 2042815 - RNA, 19 nt, Artificial Sequence
  Description of Artificial Sequence: Synthetic oligonucleotide
gauuaugaccccuaguuga

SEQ ID NO: 2042816 - RNA, 19 nt, Artificial Sequence
  Description of Artificial Sequence: Synthetic oligonucleotide
uaagaucaaaguaagcauc

SEQ ID NO: 2042817 - RNA, 19 nt, Artificial Sequence
  Description of Artificial Sequence: Synthetic oligonucleotide
aaaguuagguucauugauc

SEQ ID NO: 2042818 - RNA, 19 nt, Artificial Sequence
  Description of Artificial Sequence: Synthetic oligonucleotide
gaaguaagaucaaaguaag

SEQ ID NO: 2042819 - RNA, 19 nt, Artificial Sequence
  Description of Artificial Sequence: Synthetic oligonucleotide
uuaggcuugacaagcagca

SEQ ID NO: 2042820 - RNA, 19 nt, Artificial Sequence
  Description of Artificial Sequence: Synthetic oligonucleotide
auaaaugaugacugcagug

SEQ ID NO: 2042821 - RNA, 19 nt, Artificial Sequence
  Description of Artificial Sequence: Synthetic oligonucleotide
aaacuaaaacaaaaguuca

SEQ ID NO: 2042822 - RNA, 19 nt, Artificial Sequence
  Description of Artificial Sequence: Synthetic oligonucleotide
ugagucagguucaagaguc

SEQ ID NO: 2042823 - RNA, 19 nt, Artificial Sequence
  Description of Artificial Sequence: Synthetic oligonucleotide
uugacaagcagcaaccggu

SEQ ID NO: 2042824 - RNA, 19 nt, Artificial Sequence
  Description of Artificial Sequence: Synthetic oligonucleotide
ccuaauaucaguuaucuuc

SEQ ID NO: 2042825 - RNA, 19 nt, Artificial Sequence
  Description of Artificial Sequence: Synthetic oligonucleotide
caaagggcaagcuuuaaug

SEQ ID NO: 2042826 - RNA, 19 nt, Artificial Sequence
  Description of Artificial Sequence: Synthetic oligonucleotide
uccuuuaccaucagcagcu

SEQ ID NO: 2042827 - RNA, 19 nt, Artificial Sequence
  Description of Artificial Sequence: Synthetic oligonucleotide
acaauacuacccuaauauc

SEQ ID NO: 2042828 - RNA, 19 nt, Artificial Sequence
  Description of Artificial Sequence: Synthetic oligonucleotide
aaaccauagcaucuaaaau

SEQ ID NO: 2042829 - RNA, 19 nt, Artificial Sequence
  Description of Artificial Sequence: Synthetic oligonucleotide
cugaguugaaugucaaagg

SEQ ID NO: 2042830 - RNA, 19 nt, Artificial Sequence
  Description of Artificial Sequence: Synthetic oligonucleotide
auaaugcauacuuuagaug

SEQ ID NO: 2042831 - RNA, 19 nt, Artificial Sequence
  Description of Artificial Sequence: Synthetic oligonucleotide
uuuggaacccacaaaguua

SEQ ID NO: 2042832 - RNA, 19 nt, Artificial Sequence
  Description of Artificial Sequence: Synthetic oligonucleotide
caacacaacaccugugugg

SEQ ID NO: 2042833 - RNA, 19 nt, Artificial Sequence
  Description of Artificial Sequence: Synthetic oligonucleotide
ugagaacuggaugaguccg

SEQ ID NO: 2042834 - RNA, 19 nt, Artificial Sequence
  Description of Artificial Sequence: Synthetic oligonucleotide
auugagaacuggaugaguc

SEQ ID NO: 2042835 - RNA, 19 nt, Artificial Sequence
  Description of Artificial Sequence: Synthetic oligonucleotide
aaugccccugaguugaaug

SEQ ID NO: 2042836 - RNA, 19 nt, Artificial Sequence
  Description of Artificial Sequence: Synthetic oligonucleotide
ucagguucaagaguccugg

SEQ ID NO: 2042837 - RNA, 19 nt, Artificial Sequence
  Description of Artificial Sequence: Synthetic oligonucleotide
cuuuagauguuuacuggag

SEQ ID NO: 2042838 - RNA, 19 nt, Artificial Sequence
  Description of Artificial Sequence: Synthetic oligonucleotide
caauacuacccuaauauca

SEQ ID NO: 2042839 - RNA, 19 nt, Artificial Sequence
  Description of Artificial Sequence: Synthetic oligonucleotide
acuuguguccuuaucacac

SEQ ID NO: 2042840 - RNA, 19 nt, Artificial Sequence
  Description of Artificial Sequence: Synthetic oligonucleotide
gaaauugaaagcauauauc

SEQ ID NO: 2042841 - RNA, 19 nt, Artificial Sequence
  Description of Artificial Sequence: Synthetic oligonucleotide
cuucaagggucuuugauuc

SEQ ID NO: 2042842 - RNA, 19 nt, Artificial Sequence
  Description of Artificial Sequence: Synthetic oligonucleotide
auggucuagaaauaucucu

SEQ ID NO: 2042843 - RNA, 19 nt, Artificial Sequence
  Description of Artificial Sequence: Synthetic oligonucleotide
uaugaccccuaguugaaag

SEQ ID NO: 2042844 - RNA, 19 nt, Artificial Sequence
  Description of Artificial Sequence: Synthetic oligonucleotide
ugaaagcauauauccauga

SEQ ID NO: 2042845 - RNA, 19 nt, Artificial Sequence
  Description of Artificial Sequence: Synthetic oligonucleotide
gacaauggcccagauaucc

SEQ ID NO: 2042846 - RNA, 19 nt, Artificial Sequence
  Description of Artificial Sequence: Synthetic oligonucleotide
aggcuugacaagcagcaac

SEQ ID NO: 2042847 - RNA, 19 nt, Artificial Sequence
  Description of Artificial Sequence: Synthetic oligonucleotide
aaguaagaucaaaguaagc

SEQ ID NO: 2042848 - RNA, 19 nt, Artificial Sequence
  Description of Artificial Sequence: Synthetic oligonucleotide
aacaggccgagggagagac

SEQ ID NO: 2042849 - RNA, 19 nt, Artificial Sequence
  Description of Artificial Sequence: Synthetic oligonucleotide
gagacuuguguccuuauca

SEQ ID NO: 2042850 - RNA, 19 nt, Artificial Sequence
  Description of Artificial Sequence: Synthetic oligonucleotide
ucaguuaucuucuuacaua

SEQ ID NO: 2042851 - RNA, 19 nt, Artificial Sequence
  Description of Artificial Sequence: Synthetic oligonucleotide
aguugaaugucaaagggca

SEQ ID NO: 2042852 - RNA, 19 nt, Artificial Sequence
  Description of Artificial Sequence: Synthetic oligonucleotide
ggggauguagcucagggcg

SEQ ID NO: 2042853 - RNA, 19 nt, Artificial Sequence
  Description of Artificial Sequence: Synthetic oligonucleotide
cacgcugugggcuagcugc

SEQ ID NO: 2042854 - RNA, 19 nt, Artificial Sequence
  Description of Artificial Sequence: Synthetic oligonucleotide
uuaauggucuagaaauauc

SEQ ID NO: 2042855 - RNA, 19 nt, Artificial Sequence
  Description of Artificial Sequence: Synthetic oligonucleotide
ucuaccccagcucuggagc

SEQ ID NO: 2042856 - RNA, 19 nt, Artificial Sequence
  Description of Artificial Sequence: Synthetic oligonucleotide
uuagguucauugaucaaau

SEQ ID NO: 2042857 - RNA, 19 nt, Artificial Sequence
  Description of Artificial Sequence: Synthetic oligonucleotide
aagggcaagcuuuaauggu

SEQ ID NO: 2042858 - RNA, 19 nt, Artificial Sequence
  Description of Artificial Sequence: Synthetic oligonucleotide
acuuuagauguuuacugga

SEQ ID NO: 2042859 - RNA, 19 nt, Artificial Sequence
  Description of Artificial Sequence: Synthetic oligonucleotide
uuuaauggucuagaaauau

SEQ ID NO: 2042860 - RNA, 19 nt, Artificial Sequence
  Description of Artificial Sequence: Synthetic oligonucleotide
acaggugauuggcugauag

SEQ ID NO: 2042861 - RNA, 19 nt, Artificial Sequence
  Description of Artificial Sequence: Synthetic oligonucleotide
gaucaaauccacgcugugg

SEQ ID NO: 2042862 - RNA, 19 nt, Artificial Sequence
  Description of Artificial Sequence: Synthetic oligonucleotide
augaccccuaguugaaagc

SEQ ID NO: 2042863 - RNA, 19 nt, Artificial Sequence
  Description of Artificial Sequence: Synthetic oligonucleotide
uuggcugauagcauccaug

SEQ ID NO: 2042864 - RNA, 19 nt, Artificial Sequence
  Description of Artificial Sequence: Synthetic oligonucleotide
uaucacacaacaucccacu

SEQ ID NO: 2042865 - RNA, 19 nt, Artificial Sequence
  Description of Artificial Sequence: Synthetic oligonucleotide
uccgcauucgauaaaugau

SEQ ID NO: 2042866 - RNA, 19 nt, Artificial Sequence
  Description of Artificial Sequence: Synthetic oligonucleotide
guccuuaucacacaacauc

SEQ ID NO: 2042867 - RNA, 19 nt, Artificial Sequence
  Description of Artificial Sequence: Synthetic oligonucleotide
uaaaauaaccauuguuguu

SEQ ID NO: 2042868 - RNA, 19 nt, Artificial Sequence
  Description of Artificial Sequence: Synthetic oligonucleotide
uugagaacuggaugagucc

SEQ ID NO: 2042869 - RNA, 19 nt, Artificial Sequence
  Description of Artificial Sequence: Synthetic oligonucleotide
uaagcaucauuugacacaa

SEQ ID NO: 2042870 - RNA, 19 nt, Artificial Sequence
  Description of Artificial Sequence: Synthetic oligonucleotide
uauuggaaauugaaagcau

SEQ ID NO: 2042871 - RNA, 19 nt, Artificial Sequence
  Description of Artificial Sequence: Synthetic oligonucleotide
auaaccauuguuguuuuga

SEQ ID NO: 2042872 - RNA, 19 nt, Artificial Sequence
  Description of Artificial Sequence: Synthetic oligonucleotide
cucgauccgaccccgaucc

SEQ ID NO: 2042873 - RNA, 19 nt, Artificial Sequence
  Description of Artificial Sequence: Synthetic oligonucleotide
gucucauacagccccauug

SEQ ID NO: 2042874 - RNA, 19 nt, Artificial Sequence
  Description of Artificial Sequence: Synthetic oligonucleotide
uggcuuucaacccugugaa

SEQ ID NO: 2042875 - RNA, 19 nt, Artificial Sequence
  Description of Artificial Sequence: Synthetic oligonucleotide
gaguugaaugucaaagggc

SEQ ID NO: 2042876 - RNA, 19 nt, Artificial Sequence
  Description of Artificial Sequence: Synthetic oligonucleotide
ucauugcacaacacaacac

SEQ ID NO: 2042877 - RNA, 19 nt, Artificial Sequence
  Description of Artificial Sequence: Synthetic oligonucleotide
ugacacaauacuacccuaa

SEQ ID NO: 2042878 - RNA, 19 nt, Artificial Sequence
  Description of Artificial Sequence: Synthetic oligonucleotide
aaccggugcuuuccggggc

SEQ ID NO: 2042879 - RNA, 19 nt, Artificial Sequence
  Description of Artificial Sequence: Synthetic oligonucleotide
ugggaaaucucuugaaaua

SEQ ID NO: 2042880 - RNA, 19 nt, Artificial Sequence
  Description of Artificial Sequence: Synthetic oligonucleotide
cucuugaaauaaugcauac

SEQ ID NO: 2042881 - RNA, 19 nt, Artificial Sequence
  Description of Artificial Sequence: Synthetic oligonucleotide
cuaaaauaaccauuguugu

SEQ ID NO: 2042882 - RNA, 19 nt, Artificial Sequence
  Description of Artificial Sequence: Synthetic oligonucleotide
aggugauuggcugauagca

SEQ ID NO: 2042883 - RNA, 19 nt, Artificial Sequence
  Description of Artificial Sequence: Synthetic oligonucleotide
caaagcuucucauugcaca

SEQ ID NO: 2042884 - RNA, 19 nt, Artificial Sequence
  Description of Artificial Sequence: Synthetic oligonucleotide
agagacuuguguccuuauc

SEQ ID NO: 2042885 - RNA, 19 nt, Artificial Sequence
  Description of Artificial Sequence: Synthetic oligonucleotide
cugucuuucggagaacagg

SEQ ID NO: 2042886 - RNA, 19 nt, Artificial Sequence
  Description of Artificial Sequence: Synthetic oligonucleotide
ucaaagggcaagcuuuaau

SEQ ID NO: 2042887 - RNA, 19 nt, Artificial Sequence
  Description of Artificial Sequence: Synthetic oligonucleotide
ucuugaaauaaugcauacu

SEQ ID NO: 2042888 - RNA, 19 nt, Artificial Sequence
  Description of Artificial Sequence: Synthetic oligonucleotide
gaucguaggggauccagca

SEQ ID NO: 2042889 - RNA, 19 nt, Artificial Sequence
  Description of Artificial Sequence: Synthetic oligonucleotide
agcgucgagaacgugcucg

SEQ ID NO: 2042890 - RNA, 19 nt, Artificial Sequence
  Description of Artificial Sequence: Synthetic oligonucleotide
ucaaagcuucucauugcac

SEQ ID NO: 2042891 - RNA, 19 nt, Artificial Sequence
  Description of Artificial Sequence: Synthetic oligonucleotide
uagcaucuaaaauaaccau

SEQ ID NO: 2042892 - RNA, 19 nt, Artificial Sequence
  Description of Artificial Sequence: Synthetic oligonucleotide
acaacacaacaccugugug

SEQ ID NO: 2042893 - RNA, 19 nt, Artificial Sequence
  Description of Artificial Sequence: Synthetic oligonucleotide
cuaauaucaguuaucuucu

SEQ ID NO: 2042894 - RNA, 19 nt, Artificial Sequence
  Description of Artificial Sequence: Synthetic oligonucleotide
guguccuuaucacacaaca

SEQ ID NO: 2042895 - RNA, 19 nt, Artificial Sequence
  Description of Artificial Sequence: Synthetic oligonucleotide
ugacaagcagcaaccggug

SEQ ID NO: 2042896 - RNA, 19 nt, Artificial Sequence
  Description of Artificial Sequence: Synthetic oligonucleotide
cuuaucacacaacauccca

SEQ ID NO: 2042897 - RNA, 19 nt, Artificial Sequence
  Description of Artificial Sequence: Synthetic oligonucleotide
uucaagggucucauacagc

SEQ ID NO: 2042898 - RNA, 19 nt, Artificial Sequence
  Description of Artificial Sequence: Synthetic oligonucleotide
aaacagcuuucaccuccac

SEQ ID NO: 2042899 - RNA, 19 nt, Artificial Sequence
  Description of Artificial Sequence: Synthetic oligonucleotide
ccuccacuaagucacaugg

SEQ ID NO: 2042900 - RNA, 19 nt, Artificial Sequence
  Description of Artificial Sequence: Synthetic oligonucleotide
gaagcaggacauccacagg

SEQ ID NO: 2042901 - RNA, 19 nt, Artificial Sequence
  Description of Artificial Sequence: Synthetic oligonucleotide
caucccacuuucaaggguc

SEQ ID NO: 2042902 - RNA, 19 nt, Artificial Sequence
  Description of Artificial Sequence: Synthetic oligonucleotide
gaugaguccgcauucgaua

SEQ ID NO: 2042903 - RNA, 19 nt, Artificial Sequence
  Description of Artificial Sequence: Synthetic oligonucleotide
uacuacccuaauaucaguu

SEQ ID NO: 2042904 - RNA, 19 nt, Artificial Sequence
  Description of Artificial Sequence: Synthetic oligonucleotide
acccuaauaucaguuaucu

SEQ ID NO: 2042905 - RNA, 19 nt, Artificial Sequence
  Description of Artificial Sequence: Synthetic oligonucleotide
caugaaguaagaucaaagu

SEQ ID NO: 2042906 - RNA, 19 nt, Artificial Sequence
  Description of Artificial Sequence: Synthetic oligonucleotide
aggaguuuggaacccacaa

SEQ ID NO: 2042907 - RNA, 19 nt, Artificial Sequence
  Description of Artificial Sequence: Synthetic oligonucleotide
ggaaauugaaagcauauau

SEQ ID NO: 2042908 - RNA, 19 nt, Artificial Sequence
  Description of Artificial Sequence: Synthetic oligonucleotide
agggcaagcuuuaaugguc

SEQ ID NO: 2042909 - RNA, 19 nt, Artificial Sequence
  Description of Artificial Sequence: Synthetic oligonucleotide
ucgagaacgugcucgggcu

SEQ ID NO: 2042910 - RNA, 19 nt, Artificial Sequence
  Description of Artificial Sequence: Synthetic oligonucleotide
caaaaugccccugaguuga

SEQ ID NO: 2042911 - RNA, 19 nt, Artificial Sequence
  Description of Artificial Sequence: Synthetic oligonucleotide
guaagaucaaaguaagcau

SEQ ID NO: 2042912 - RNA, 19 nt, Artificial Sequence
  Description of Artificial Sequence: Synthetic oligonucleotide
uacccuaauaucaguuauc

SEQ ID NO: 2042913 - RNA, 19 nt, Artificial Sequence
  Description of Artificial Sequence: Synthetic oligonucleotide
ccugaguugaaugucaaag

SEQ ID NO: 2042914 - RNA, 19 nt, Artificial Sequence
  Description of Artificial Sequence: Synthetic oligonucleotide
ucacacaacaucccacuuu

SEQ ID NO: 2042915 - RNA, 19 nt, Artificial Sequence
  Description of Artificial Sequence: Synthetic oligonucleotide
uaaaucccaaaaugccccu

SEQ ID NO: 2042916 - RNA, 19 nt, Artificial Sequence
  Description of Artificial Sequence: Synthetic oligonucleotide
uuccggggccccaggaucg

SEQ ID NO: 2042917 - RNA, 19 nt, Artificial Sequence
  Description of Artificial Sequence: Synthetic oligonucleotide
ggcacuuuauuggaaauug

SEQ ID NO: 2042918 - RNA, 19 nt, Artificial Sequence
  Description of Artificial Sequence: Synthetic oligonucleotide
caaucuaccccagcucugg

SEQ ID NO: 2042919 - RNA, 19 nt, Artificial Sequence
  Description of Artificial Sequence: Synthetic oligonucleotide
ucucaauauggcacuuuau

SEQ ID NO: 2042920 - RNA, 19 nt, Artificial Sequence
  Description of Artificial Sequence: Synthetic oligonucleotide
guccgcauucgauaaauga

SEQ ID NO: 2042921 - RNA, 19 nt, Artificial Sequence
  Description of Artificial Sequence: Synthetic oligonucleotide
acuacccuaauaucaguua

SEQ ID NO: 2042922 - RNA, 19 nt, Artificial Sequence
  Description of Artificial Sequence: Synthetic oligonucleotide
gucgagaacgugcucgggc

SEQ ID NO: 2042923 - RNA, 19 nt, Artificial Sequence
  Description of Artificial Sequence: Synthetic oligonucleotide
cauucgauaaaugaugacu

SEQ ID NO: 2042924 - RNA, 19 nt, Artificial Sequence
  Description of Artificial Sequence: Synthetic oligonucleotide
aaauccacgcugugggcua

SEQ ID NO: 2042925 - RNA, 19 nt, Artificial Sequence
  Description of Artificial Sequence: Synthetic oligonucleotide
aacgugcucgggcuccaag

SEQ ID NO: 2042926 - RNA, 19 nt, Artificial Sequence
  Description of Artificial Sequence: Synthetic oligonucleotide
ugaccccuaguugaaagcu

SEQ ID NO: 2042927 - RNA, 19 nt, Artificial Sequence
  Description of Artificial Sequence: Synthetic oligonucleotide
uccgggagcgcgcaggagu

SEQ ID NO: 2042928 - RNA, 19 nt, Artificial Sequence
  Description of Artificial Sequence: Synthetic oligonucleotide
acaacaccuguguggcuuc

SEQ ID NO: 2042929 - RNA, 19 nt, Artificial Sequence
  Description of Artificial Sequence: Synthetic oligonucleotide
guucauugaucaaauccac

SEQ ID NO: 2042930 - RNA, 19 nt, Artificial Sequence
  Description of Artificial Sequence: Synthetic oligonucleotide
ggauuaugaccccuaguug

SEQ ID NO: 2042931 - RNA, 19 nt, Artificial Sequence
  Description of Artificial Sequence: Synthetic oligonucleotide
augaguccgcauucgauaa

SEQ ID NO: 2042932 - RNA, 19 nt, Artificial Sequence
  Description of Artificial Sequence: Synthetic oligonucleotide
ugucaaagggcaagcuuua

SEQ ID NO: 2042933 - RNA, 19 nt, Artificial Sequence
  Description of Artificial Sequence: Synthetic oligonucleotide
auacuacccuaauaucagu

SEQ ID NO: 2042934 - RNA, 19 nt, Artificial Sequence
  Description of Artificial Sequence: Synthetic oligonucleotide
uggaugaguccgcauucga

SEQ ID NO: 2042935 - RNA, 19 nt, Artificial Sequence
  Description of Artificial Sequence: Synthetic oligonucleotide
aucuucuuacauaacaaua

SEQ ID NO: 2042936 - RNA, 19 nt, Artificial Sequence
  Description of Artificial Sequence: Synthetic oligonucleotide
aucuaccccagcucuggag

SEQ ID NO: 2042937 - RNA, 19 nt, Artificial Sequence
  Description of Artificial Sequence: Synthetic oligonucleotide
uggaaauugaaagcauaua

SEQ ID NO: 2042938 - RNA, 19 nt, Artificial Sequence
  Description of Artificial Sequence: Synthetic oligonucleotide
gacuuguguccuuaucaca

SEQ ID NO: 2042939 - RNA, 19 nt, Artificial Sequence
  Description of Artificial Sequence: Synthetic oligonucleotide
uuacuggagcuagaagggc

SEQ ID NO: 2042940 - RNA, 19 nt, Artificial Sequence
  Description of Artificial Sequence: Synthetic oligonucleotide
aucguaggggauccagcag

SEQ ID NO: 2042941 - RNA, 19 nt, Artificial Sequence
  Description of Artificial Sequence: Synthetic oligonucleotide
gauccgaccccgauccccg

SEQ ID NO: 2042942 - RNA, 19 nt, Artificial Sequence
  Description of Artificial Sequence: Synthetic oligonucleotide
agcuucaagggucuuugau

SEQ ID NO: 2042943 - RNA, 19 nt, Artificial Sequence
  Description of Artificial Sequence: Synthetic oligonucleotide
ugcauacuuuagauguuua

SEQ ID NO: 2042944 - RNA, 19 nt, Artificial Sequence
  Description of Artificial Sequence: Synthetic oligonucleotide
acuaagucacauggcuuuc

SEQ ID NO: 2042945 - RNA, 19 nt, Artificial Sequence
  Description of Artificial Sequence: Synthetic oligonucleotide
agcaucuaaaauaaccauu

SEQ ID NO: 2042946 - RNA, 19 nt, Artificial Sequence
  Description of Artificial Sequence: Synthetic oligonucleotide
ucaacuccugagucuuccc

SEQ ID NO: 2042947 - RNA, 19 nt, Artificial Sequence
  Description of Artificial Sequence: Synthetic oligonucleotide
uccaugaaguaagaucaaa

SEQ ID NO: 2042948 - RNA, 19 nt, Artificial Sequence
  Description of Artificial Sequence: Synthetic oligonucleotide
agcugcagaaucaaaacua

SEQ ID NO: 2042949 - RNA, 19 nt, Artificial Sequence
  Description of Artificial Sequence: Synthetic oligonucleotide
caggugauuggcugauagc

SEQ ID NO: 2042950 - RNA, 19 nt, Artificial Sequence
  Description of Artificial Sequence: Synthetic oligonucleotide
cccgcuagcgucgagaacg

SEQ ID NO: 2042951 - RNA, 19 nt, Artificial Sequence
  Description of Artificial Sequence: Synthetic oligonucleotide
uuucggagaacaggccgag

SEQ ID NO: 2042952 - RNA, 19 nt, Artificial Sequence
  Description of Artificial Sequence: Synthetic oligonucleotide
uccauguuggccccucgau

SEQ ID NO: 2042953 - RNA, 19 nt, Artificial Sequence
  Description of Artificial Sequence: Synthetic oligonucleotide
aaucuaccccagcucugga

SEQ ID NO: 2042954 - RNA, 19 nt, Artificial Sequence
  Description of Artificial Sequence: Synthetic oligonucleotide
acaucccacuuucaagggu

SEQ ID NO: 2042955 - RNA, 19 nt, Artificial Sequence
  Description of Artificial Sequence: Synthetic oligonucleotide
cuccacuaagucacauggc

SEQ ID NO: 2042956 - RNA, 19 nt, Artificial Sequence
  Description of Artificial Sequence: Synthetic oligonucleotide
uggaacccacaaaguuagg

SEQ ID NO: 2042957 - RNA, 19 nt, Artificial Sequence
  Description of Artificial Sequence: Synthetic oligonucleotide
caagggucucauacagccc

SEQ ID NO: 2042958 - RNA, 19 nt, Artificial Sequence
  Description of Artificial Sequence: Synthetic oligonucleotide
cuuucggagaacaggccga

SEQ ID NO: 2042959 - RNA, 19 nt, Artificial Sequence
  Description of Artificial Sequence: Synthetic oligonucleotide
ccagauauccaggaugugc

SEQ ID NO: 2042960 - RNA, 19 nt, Artificial Sequence
  Description of Artificial Sequence: Synthetic oligonucleotide
agcaaccggugcuuuccgg

SEQ ID NO: 2042961 - RNA, 19 nt, Artificial Sequence
  Description of Artificial Sequence: Synthetic oligonucleotide
aaugcauacuuuagauguu

SEQ ID NO: 2042962 - RNA, 19 nt, Artificial Sequence
  Description of Artificial Sequence: Synthetic oligonucleotide
agggauuaugaccccuagu

SEQ ID NO: 2042963 - RNA, 19 nt, Artificial Sequence
  Description of Artificial Sequence: Synthetic oligonucleotide
uucaagggucuuugauucu

SEQ ID NO: 2042964 - RNA, 19 nt, Artificial Sequence
  Description of Artificial Sequence: Synthetic oligonucleotide
aguugaaagcuaaggaguu

SEQ ID NO: 2042965 - RNA, 19 nt, Artificial Sequence
  Description of Artificial Sequence: Synthetic oligonucleotide
cugcucacaaacagcuuuc

SEQ ID NO: 2042966 - RNA, 19 nt, Artificial Sequence
  Description of Artificial Sequence: Synthetic oligonucleotide
gcauacuuuagauguuuac

SEQ ID NO: 2042967 - RNA, 19 nt, Artificial Sequence
  Description of Artificial Sequence: Synthetic oligonucleotide
aguaggagggcagggauua

SEQ ID NO: 2042968 - RNA, 19 nt, Artificial Sequence
  Description of Artificial Sequence: Synthetic oligonucleotide
guuuggaacccacaaaguu

SEQ ID NO: 2042969 - RNA, 19 nt, Artificial Sequence
  Description of Artificial Sequence: Synthetic oligonucleotide
ccgcauucgauaaaugaug

SEQ ID NO: 2042970 - RNA, 19 nt, Artificial Sequence
  Description of Artificial Sequence: Synthetic oligonucleotide
uagauguuuacuggagcua

SEQ ID NO: 2042971 - RNA, 19 nt, Artificial Sequence
  Description of Artificial Sequence: Synthetic oligonucleotide
gagaacgugcucgggcucc

SEQ ID NO: 2042972 - RNA, 19 nt, Artificial Sequence
  Description of Artificial Sequence: Synthetic oligonucleotide
ccuuaucacacaacauccc

SEQ ID NO: 2042973 - RNA, 19 nt, Artificial Sequence
  Description of Artificial Sequence: Synthetic oligonucleotide
cucagccccgcuagcgucg

SEQ ID NO: 2042974 - RNA, 19 nt, Artificial Sequence
  Description of Artificial Sequence: Synthetic oligonucleotide
aguuuggaacccacaaagu

SEQ ID NO: 2042975 - RNA, 19 nt, Artificial Sequence
  Description of Artificial Sequence: Synthetic oligonucleotide
aggaucguaggggauccag

SEQ ID NO: 2042976 - RNA, 19 nt, Artificial Sequence
  Description of Artificial Sequence: Synthetic oligonucleotide
cugccuugccuccuuuacc

SEQ ID NO: 2042977 - RNA, 19 nt, Artificial Sequence
  Description of Artificial Sequence: Synthetic oligonucleotide
auguuuacuggagcuagaa

SEQ ID NO: 2042978 - RNA, 19 nt, Artificial Sequence
  Description of Artificial Sequence: Synthetic oligonucleotide
gaacccacaaaguuagguu

SEQ ID NO: 2042979 - RNA, 19 nt, Artificial Sequence
  Description of Artificial Sequence: Synthetic oligonucleotide
auuggcugauagcauccau

SEQ ID NO: 2042980 - RNA, 19 nt, Artificial Sequence
  Description of Artificial Sequence: Synthetic oligonucleotide
ggcuugacaagcagcaacc

SEQ ID NO: 2042981 - RNA, 19 nt, Artificial Sequence
  Description of Artificial Sequence: Synthetic oligonucleotide
uagguucauugaucaaauc

SEQ ID NO: 2042982 - RNA, 19 nt, Artificial Sequence
  Description of Artificial Sequence: Synthetic oligonucleotide
uaauaucaguuaucuucuu

SEQ ID NO: 2042983 - RNA, 19 nt, Artificial Sequence
  Description of Artificial Sequence: Synthetic oligonucleotide
ucaagaguccugggaaauc

SEQ ID NO: 2042984 - RNA, 19 nt, Artificial Sequence
  Description of Artificial Sequence: Synthetic oligonucleotide
cagggauuaugaccccuag

SEQ ID NO: 2042985 - RNA, 19 nt, Artificial Sequence
  Description of Artificial Sequence: Synthetic oligonucleotide
gaaguaggagggcagggau

SEQ ID NO: 2042986 - RNA, 19 nt, Artificial Sequence
  Description of Artificial Sequence: Synthetic oligonucleotide
ggagccucagccccgcuag

SEQ ID NO: 2042987 - RNA, 19 nt, Artificial Sequence
  Description of Artificial Sequence: Synthetic oligonucleotide
auuaugaccccuaguugaa

SEQ ID NO: 2042988 - RNA, 19 nt, Artificial Sequence
  Description of Artificial Sequence: Synthetic oligonucleotide
auauauccaugaaguaaga

SEQ ID NO: 2042989 - RNA, 19 nt, Artificial Sequence
  Description of Artificial Sequence: Synthetic oligonucleotide
acgugcucgggcuccaagu

SEQ ID NO: 2042990 - RNA, 19 nt, Artificial Sequence
  Description of Artificial Sequence: Synthetic oligonucleotide
cagguucaagaguccuggg

SEQ ID NO: 2042991 - RNA, 19 nt, Artificial Sequence
  Description of Artificial Sequence: Synthetic oligonucleotide
cccuaguugaaagcuaagg

SEQ ID NO: 2042992 - RNA, 19 nt, Artificial Sequence
  Description of Artificial Sequence: Synthetic oligonucleotide
gggauuaugaccccuaguu

SEQ ID NO: 2042993 - RNA, 19 nt, Artificial Sequence
  Description of Artificial Sequence: Synthetic oligonucleotide
gcuuaggcuugacaagcag

SEQ ID NO: 2042994 - RNA, 19 nt, Artificial Sequence
  Description of Artificial Sequence: Synthetic oligonucleotide
ugaguccgcauucgauaaa

SEQ ID NO: 2042995 - RNA, 19 nt, Artificial Sequence
  Description of Artificial Sequence: Synthetic oligonucleotide
acugucuuucggagaacag

SEQ ID NO: 2042996 - RNA, 19 nt, Artificial Sequence
  Description of Artificial Sequence: Synthetic oligonucleotide
aauccacgcugugggcuag

SEQ ID NO: 2042997 - RNA, 19 nt, Artificial Sequence
  Description of Artificial Sequence: Synthetic oligonucleotide
uuaccaucagcagcuucaa

SEQ ID NO: 2042998 - RNA, 19 nt, Artificial Sequence
  Description of Artificial Sequence: Synthetic oligonucleotide
gcaagcuuuaauggucuag

SEQ ID NO: 2042999 - RNA, 19 nt, Artificial Sequence
  Description of Artificial Sequence: Synthetic oligonucleotide
cauugaucaaauccacgcu

SEQ ID NO: 2043000 - RNA, 19 nt, Artificial Sequence
  Description of Artificial Sequence: Synthetic oligonucleotide
agggagagacuuguguccu

SEQ ID NO: 2043001 - RNA, 19 nt, Artificial Sequence
  Description of Artificial Sequence: Synthetic oligonucleotide
auccauguuggccccucga

SEQ ID NO: 2043002 - RNA, 19 nt, Artificial Sequence
  Description of Artificial Sequence: Synthetic oligonucleotide
cucuggagccucagccccg

SEQ ID NO: 2043003 - RNA, 19 nt, Artificial Sequence
  Description of Artificial Sequence: Synthetic oligonucleotide
gauguuuacuggagcuaga

SEQ ID NO: 2043004 - RNA, 19 nt, Artificial Sequence
  Description of Artificial Sequence: Synthetic oligonucleotide
gggaaaucucuugaaauaa

SEQ ID NO: 2043005 - RNA, 19 nt, Artificial Sequence
  Description of Artificial Sequence: Synthetic oligonucleotide
uucggagaacaggccgagg

SEQ ID NO: 2043006 - RNA, 19 nt, Artificial Sequence
  Description of Artificial Sequence: Synthetic oligonucleotide
gagucagguucaagagucc

SEQ ID NO: 2043007 - RNA, 19 nt, Artificial Sequence
  Description of Artificial Sequence: Synthetic oligonucleotide
ccaaaaugccccugaguug

SEQ ID NO: 2043008 - RNA, 19 nt, Artificial Sequence
  Description of Artificial Sequence: Synthetic oligonucleotide
uccccgcuuaggcuugaca

SEQ ID NO: 2043009 - RNA, 19 nt, Artificial Sequence
  Description of Artificial Sequence: Synthetic oligonucleotide
uuaugaccccuaguugaaa

SEQ ID NO: 2043010 - RNA, 19 nt, Artificial Sequence
  Description of Artificial Sequence: Synthetic oligonucleotide
acccacaaaguuagguuca

SEQ ID NO: 2043011 - RNA, 19 nt, Artificial Sequence
  Description of Artificial Sequence: Synthetic oligonucleotide
agauauccaggaugugcuu

SEQ ID NO: 2043012 - RNA, 19 nt, Artificial Sequence
  Description of Artificial Sequence: Synthetic oligonucleotide
gucuuucggagaacaggcc

SEQ ID NO: 2043013 - RNA, 19 nt, Artificial Sequence
  Description of Artificial Sequence: Synthetic oligonucleotide
cuagcgucgagaacgugcu

SEQ ID NO: 2043014 - RNA, 19 nt, Artificial Sequence
  Description of Artificial Sequence: Synthetic oligonucleotide
auguagcucagggcgugag

SEQ ID NO: 2043015 - RNA, 19 nt, Artificial Sequence
  Description of Artificial Sequence: Synthetic oligonucleotide
gcuagaagggcuggggaug

SEQ ID NO: 2043016 - RNA, 19 nt, Artificial Sequence
  Description of Artificial Sequence: Synthetic oligonucleotide
acaauggcccagauaucca

SEQ ID NO: 2043017 - RNA, 19 nt, Artificial Sequence
  Description of Artificial Sequence: Synthetic oligonucleotide
aaaugccccugaguugaau

SEQ ID NO: 2043018 - RNA, 19 nt, Artificial Sequence
  Description of Artificial Sequence: Synthetic oligonucleotide
gcauucgauaaaugaugac

SEQ ID NO: 2043019 - RNA, 19 nt, Artificial Sequence
  Description of Artificial Sequence: Synthetic oligonucleotide
cuacccuaauaucaguuau

SEQ ID NO: 2043020 - RNA, 19 nt, Artificial Sequence
  Description of Artificial Sequence: Synthetic oligonucleotide
cagcaaccggugcuuuccg

SEQ ID NO: 2043021 - RNA, 19 nt, Artificial Sequence
  Description of Artificial Sequence: Synthetic oligonucleotide
gcuugacaagcagcaaccg

SEQ ID NO: 2043022 - RNA, 19 nt, Artificial Sequence
  Description of Artificial Sequence: Synthetic oligonucleotide
gaggacaauggcccagaua

SEQ ID NO: 2043023 - RNA, 19 nt, Artificial Sequence
  Description of Artificial Sequence: Synthetic oligonucleotide
aacaccuguguggcuucca

SEQ ID NO: 2043024 - RNA, 19 nt, Artificial Sequence
  Description of Artificial Sequence: Synthetic oligonucleotide
auccgaccccgauccccgc

SEQ ID NO: 2043025 - RNA, 19 nt, Artificial Sequence
  Description of Artificial Sequence: Synthetic oligonucleotide
uggagccucagccccgcua

SEQ ID NO: 2043026 - RNA, 19 nt, Artificial Sequence
  Description of Artificial Sequence: Synthetic oligonucleotide
ggacauccacaggugauug

SEQ ID NO: 2043027 - RNA, 19 nt, Artificial Sequence
  Description of Artificial Sequence: Synthetic oligonucleotide
accccuaguugaaagcuaa

SEQ ID NO: 2043028 - RNA, 19 nt, Artificial Sequence
  Description of Artificial Sequence: Synthetic oligonucleotide
agccccauugagaacugga

SEQ ID NO: 2043029 - RNA, 19 nt, Artificial Sequence
  Description of Artificial Sequence: Synthetic oligonucleotide
cuaagucacauggcuuuca

SEQ ID NO: 2043030 - RNA, 19 nt, Artificial Sequence
  Description of Artificial Sequence: Synthetic oligonucleotide
gagucuuccccacugucuu

SEQ ID NO: 2043031 - RNA, 19 nt, Artificial Sequence
  Description of Artificial Sequence: Synthetic oligonucleotide
ccccauugagaacuggaug

SEQ ID NO: 2043032 - RNA, 19 nt, Artificial Sequence
  Description of Artificial Sequence: Synthetic oligonucleotide
cagcuucaaucuaccccag

SEQ ID NO: 2043033 - RNA, 19 nt, Artificial Sequence
  Description of Artificial Sequence: Synthetic oligonucleotide
aguccgggagcgcgcagga

SEQ ID NO: 2043034 - RNA, 19 nt, Artificial Sequence
  Description of Artificial Sequence: Synthetic oligonucleotide
accccgauccccgcuuagg

SEQ ID NO: 2043035 - RNA, 19 nt, Artificial Sequence
  Description of Artificial Sequence: Synthetic oligonucleotide
gcgucgagaacgugcucgg

SEQ ID NO: 2043036 - RNA, 19 nt, Artificial Sequence
  Description of Artificial Sequence: Synthetic oligonucleotide
uguuggccccucgauccga

SEQ ID NO: 2043037 - RNA, 19 nt, Artificial Sequence
  Description of Artificial Sequence: Synthetic oligonucleotide
gagcgcgcaggaguggcug

SEQ ID NO: 2043038 - RNA, 19 nt, Artificial Sequence
  Description of Artificial Sequence: Synthetic oligonucleotide
ggaucguaggggauccagc

SEQ ID NO: 2043039 - RNA, 19 nt, Artificial Sequence
  Description of Artificial Sequence: Synthetic oligonucleotide
aguccgcauucgauaaaug

SEQ ID NO: 2043040 - RNA, 19 nt, Artificial Sequence
  Description of Artificial Sequence: Synthetic oligonucleotide
ccgcuuaggcuugacaagc

SEQ ID NO: 2043041 - RNA, 19 nt, Artificial Sequence
  Description of Artificial Sequence: Synthetic oligonucleotide
uccgaccccgauccccgcu

SEQ ID NO: 2043042 - RNA, 19 nt, Artificial Sequence
  Description of Artificial Sequence: Synthetic oligonucleotide
ucgauccgaccccgauccc

SEQ ID NO: 2043043 - RNA, 19 nt, Artificial Sequence
  Description of Artificial Sequence: Synthetic oligonucleotide
gaccccgauccccgcuuag

SEQ ID NO: 2043044 - RNA, 19 nt, Artificial Sequence
  Description of Artificial Sequence: Synthetic oligonucleotide
uaggcuugacaagcagcaa

SEQ ID NO: 2043045 - RNA, 19 nt, Artificial Sequence
  Description of Artificial Sequence: Synthetic oligonucleotide
acacaacaccuguguggcu

SEQ ID NO: 2043046 - RNA, 19 nt, Artificial Sequence
  Description of Artificial Sequence: Synthetic oligonucleotide
ccauugagaacuggaugag

SEQ ID NO: 2043047 - RNA, 19 nt, Artificial Sequence
  Description of Artificial Sequence: Synthetic oligonucleotide
ggauguagcucagggcgug

SEQ ID NO: 2043048 - RNA, 19 nt, Artificial Sequence
  Description of Artificial Sequence: Synthetic oligonucleotide
caaauccacgcugugggcu

SEQ ID NO: 2043049 - RNA, 19 nt, Artificial Sequence
  Description of Artificial Sequence: Synthetic oligonucleotide
gaguccgcauucgauaaau

SEQ ID NO: 2043050 - RNA, 19 nt, Artificial Sequence
  Description of Artificial Sequence: Synthetic oligonucleotide
uuggccccucgauccgacc

SEQ ID NO: 2043051 - RNA, 19 nt, Artificial Sequence
  Description of Artificial Sequence: Synthetic oligonucleotide
ggaacccacaaaguuaggu

SEQ ID NO: 2043052 - RNA, 19 nt, Artificial Sequence
  Description of Artificial Sequence: Synthetic oligonucleotide
aggaugugcuugggaagca

SEQ ID NO: 2043053 - RNA, 19 nt, Artificial Sequence
  Description of Artificial Sequence: Synthetic oligonucleotide
gauguagcucagggcguga

SEQ ID NO: 2043054 - RNA, 19 nt, Artificial Sequence
  Description of Artificial Sequence: Synthetic oligonucleotide
ggagggcagggauuaugac

SEQ ID NO: 2043055 - RNA, 19 nt, Artificial Sequence
  Description of Artificial Sequence: Synthetic oligonucleotide
ccaggaucguaggggaucc

SEQ ID NO: 2043056 - RNA, 19 nt, Artificial Sequence
  Description of Artificial Sequence: Synthetic oligonucleotide
auccacgcugugggcuagc

SEQ ID NO: 2043057 - RNA, 19 nt, Artificial Sequence
  Description of Artificial Sequence: Synthetic oligonucleotide
cgcauucgauaaaugauga

SEQ ID NO: 2043058 - RNA, 19 nt, Artificial Sequence
  Description of Artificial Sequence: Synthetic oligonucleotide
ccauguuggccccucgauc

SEQ ID NO: 2043059 - RNA, 19 nt, Artificial Sequence
  Description of Artificial Sequence: Synthetic oligonucleotide
uccacgcugugggcuagcu

SEQ ID NO: 2043060 - RNA, 19 nt, Artificial Sequence
  Description of Artificial Sequence: Synthetic oligonucleotide
cucuuucacagucugccuu

SEQ ID NO: 2043061 - RNA, 19 nt, Artificial Sequence
  Description of Artificial Sequence: Synthetic oligonucleotide
caacaccuguguggcuucc

SEQ ID NO: 2043062 - RNA, 19 nt, Artificial Sequence
  Description of Artificial Sequence: Synthetic oligonucleotide
cagggcgugaggggcacug

SEQ ID NO: 2043063 - RNA, 19 nt, Artificial Sequence
  Description of Artificial Sequence: Synthetic oligonucleotide
aucccacuuucaagggucu

SEQ ID NO: 2043064 - RNA, 19 nt, Artificial Sequence
  Description of Artificial Sequence: Synthetic oligonucleotide
uagcgucgagaacgugcuc

SEQ ID NO: 2043065 - RNA, 19 nt, Artificial Sequence
  Description of Artificial Sequence: Synthetic oligonucleotide
agccccgcuagcgucgaga

SEQ ID NO: 2043066 - RNA, 19 nt, Artificial Sequence
  Description of Artificial Sequence: Synthetic oligonucleotide
gggcgugaggggcacuggc

SEQ ID NO: 2043067 - RNA, 19 nt, Artificial Sequence
  Description of Artificial Sequence: Synthetic oligonucleotide
gaccccuaguugaaagcua

SEQ ID NO: 2043068 - RNA, 19 nt, Artificial Sequence
  Description of Artificial Sequence: Synthetic oligonucleotide
ccccgcuuaggcuugacaa

SEQ ID NO: 2043069 - RNA, 19 nt, Artificial Sequence
  Description of Artificial Sequence: Synthetic oligonucleotide
cagcuuucaccuccacuaa

SEQ ID NO: 2043070 - RNA, 19 nt, Artificial Sequence
  Description of Artificial Sequence: Synthetic oligonucleotide
agaacgugcucgggcucca

SEQ ID NO: 2043071 - RNA, 19 nt, Artificial Sequence
  Description of Artificial Sequence: Synthetic oligonucleotide
ccccgauccccgcuuaggc

SEQ ID NO: 2043072 - RNA, 19 nt, Artificial Sequence
  Description of Artificial Sequence: Synthetic oligonucleotide
cagccccauugagaacugg

SEQ ID NO: 2043073 - RNA, 19 nt, Artificial Sequence
  Description of Artificial Sequence: Synthetic oligonucleotide
caaguccgggagcgcgcag

SEQ ID NO: 2043074 - RNA, 19 nt, Artificial Sequence
  Description of Artificial Sequence: Synthetic oligonucleotide
guugaaagcuaaggaguuu

SEQ ID NO: 2043075 - RNA, 19 nt, Artificial Sequence
  Description of Artificial Sequence: Synthetic oligonucleotide
ggccccucgauccgacccc

SEQ ID NO: 2043076 - RNA, 19 nt, Artificial Sequence
  Description of Artificial Sequence: Synthetic oligonucleotide
ggaaaucucuugaaauaau

SEQ ID NO: 2043077 - RNA, 19 nt, Artificial Sequence
  Description of Artificial Sequence: Synthetic oligonucleotide
guuggccccucgauccgac

SEQ ID NO: 2043078 - RNA, 19 nt, Artificial Sequence
  Description of Artificial Sequence: Synthetic oligonucleotide
ccccuaguugaaagcuaag

SEQ ID NO: 2043079 - RNA, 19 nt, Artificial Sequence
  Description of Artificial Sequence: Synthetic oligonucleotide
cacaacaccuguguggcuu

SEQ ID NO: 2043080 - RNA, 19 nt, Artificial Sequence
  Description of Artificial Sequence: Synthetic oligonucleotide
caggaguggcugggaugcg

SEQ ID NO: 2043081 - RNA, 19 nt, Artificial Sequence
  Description of Artificial Sequence: Synthetic oligonucleotide
auccccgcuuaggcuugac

SEQ ID NO: 2043082 - RNA, 19 nt, Artificial Sequence
  Description of Artificial Sequence: Synthetic oligonucleotide
caguggcuggacacagaaa

SEQ ID NO: 2043083 - RNA, 19 nt, Artificial Sequence
  Description of Artificial Sequence: Synthetic oligonucleotide
cccaggaucguaggggauc

SEQ ID NO: 2043084 - RNA, 19 nt, Artificial Sequence
  Description of Artificial Sequence: Synthetic oligonucleotide
gcccagauauccaggaugu

SEQ ID NO: 2043085 - RNA, 19 nt, Artificial Sequence
  Description of Artificial Sequence: Synthetic oligonucleotide
ccucagccccgcuagcguc

SEQ ID NO: 2043086 - RNA, 19 nt, Artificial Sequence
  Description of Artificial Sequence: Synthetic oligonucleotide
gccccugaguugaauguca

SEQ ID NO: 2043087 - RNA, 19 nt, Artificial Sequence
  Description of Artificial Sequence: Synthetic oligonucleotide
cacuuucaagggucucaua

SEQ ID NO: 2043088 - RNA, 19 nt, Artificial Sequence
  Description of Artificial Sequence: Synthetic oligonucleotide
gugaggggcacuggccaaa

SEQ ID NO: 2043089 - RNA, 19 nt, Artificial Sequence
  Description of Artificial Sequence: Synthetic oligonucleotide
cgauccgaccccgaucccc

SEQ ID NO: 2043090 - RNA, 19 nt, Artificial Sequence
  Description of Artificial Sequence: Synthetic oligonucleotide
gggcaagcuuuaauggucu

SEQ ID NO: 2043091 - RNA, 19 nt, Artificial Sequence
  Description of Artificial Sequence: Synthetic oligonucleotide
ggugauuggcugauagcau

SEQ ID NO: 2043092 - RNA, 19 nt, Artificial Sequence
  Description of Artificial Sequence: Synthetic oligonucleotide
cgugcucgggcuccaaguc

SEQ ID NO: 2043093 - RNA, 19 nt, Artificial Sequence
  Description of Artificial Sequence: Synthetic oligonucleotide
caggccgagggagagacuu

SEQ ID NO: 2043094 - RNA, 19 nt, Artificial Sequence
  Description of Artificial Sequence: Synthetic oligonucleotide
ggaugaguccgcauucgau

SEQ ID NO: 2043095 - RNA, 19 nt, Artificial Sequence
  Description of Artificial Sequence: Synthetic oligonucleotide
guccgggagcgcgcaggag

SEQ ID NO: 2043096 - RNA, 19 nt, Artificial Sequence
  Description of Artificial Sequence: Synthetic oligonucleotide
gcagggauuaugaccccua

SEQ ID NO: 2043097 - RNA, 19 nt, Artificial Sequence
  Description of Artificial Sequence: Synthetic oligonucleotide
uccggggccccaggaucgu

SEQ ID NO: 2043098 - RNA, 19 nt, Artificial Sequence
  Description of Artificial Sequence: Synthetic oligonucleotide
gccccucgauccgaccccg

SEQ ID NO: 2043099 - RNA, 19 nt, Artificial Sequence
  Description of Artificial Sequence: Synthetic oligonucleotide
gauccccgcuuaggcuuga

SEQ ID NO: 2043100 - RNA, 19 nt, Artificial Sequence
  Description of Artificial Sequence: Synthetic oligonucleotide
ccgagggagagacuugugu

SEQ ID NO: 2043101 - RNA, 19 nt, Artificial Sequence
  Description of Artificial Sequence: Synthetic oligonucleotide
gggcuagcugcagaaucaa

SEQ ID NO: 2043102 - RNA, 19 nt, Artificial Sequence
  Description of Artificial Sequence: Synthetic oligonucleotide
gccccgcuagcgucgagaa

SEQ ID NO: 2043103 - RNA, 19 nt, Artificial Sequence
  Description of Artificial Sequence: Synthetic oligonucleotide
gggauguagcucagggcgu

SEQ ID NO: 2043104 - RNA, 19 nt, Artificial Sequence
  Description of Artificial Sequence: Synthetic oligonucleotide
gaacgugcucgggcuccaa

SEQ ID NO: 2043105 - RNA, 19 nt, Artificial Sequence
  Description of Artificial Sequence: Synthetic oligonucleotide
cgauccccgcuuaggcuug

SEQ ID NO: 2043106 - RNA, 19 nt, Artificial Sequence
  Description of Artificial Sequence: Synthetic oligonucleotide
gccgagggagagacuugug

SEQ ID NO: 2043107 - RNA, 19 nt, Artificial Sequence
  Description of Artificial Sequence: Synthetic oligonucleotide
cgcuuaggcuugacaagca

SEQ ID NO: 2043108 - RNA, 19 nt, Artificial Sequence
  Description of Artificial Sequence: Synthetic oligonucleotide
cgagaacgugcucgggcuc

SEQ ID NO: 2043109 - RNA, 19 nt, Artificial Sequence
  Description of Artificial Sequence: Synthetic oligonucleotide
ggccgagggagagacuugu

SEQ ID NO: 2043110 - RNA, 19 nt, Artificial Sequence
  Description of Artificial Sequence: Synthetic oligonucleotide
caggaucguaggggaucca

SEQ ID NO: 2043111 - RNA, 19 nt, Artificial Sequence
  Description of Artificial Sequence: Synthetic oligonucleotide
gccccauugagaacuggau

SEQ ID NO: 2043112 - RNA, 19 nt, Artificial Sequence
  Description of Artificial Sequence: Synthetic oligonucleotide
ggucucauacagccccauu

SEQ ID NO: 2043113 - RNA, 19 nt, Artificial Sequence
  Description of Artificial Sequence: Synthetic oligonucleotide
ccgauccccgcuuaggcuu

SEQ ID NO: 2043114 - RNA, 19 nt, Artificial Sequence
  Description of Artificial Sequence: Synthetic oligonucleotide
cacaggugauuggcugaua

SEQ ID NO: 2043115 - RNA, 19 nt, Artificial Sequence
  Description of Artificial Sequence: Synthetic oligonucleotide
gccucagccccgcuagcgu

SEQ ID NO: 2043116 - RNA, 19 nt, Artificial Sequence
  Description of Artificial Sequence: Synthetic oligonucleotide
ccaaguccgggagcgcgca

SEQ ID NO: 2043117 - RNA, 19 nt, Artificial Sequence
  Description of Artificial Sequence: Synthetic oligonucleotide
cccgauccccgcuuaggcu

SEQ ID NO: 2043118 - RNA, 19 nt, Artificial Sequence
  Description of Artificial Sequence: Synthetic oligonucleotide
ccccgcuagcgucgagaac

SEQ ID NO: 2043119 - RNA, 19 nt, Artificial Sequence
  Description of Artificial Sequence: Synthetic oligonucleotide
caccuccacuaagucacau

SEQ ID NO: 2043120 - RNA, 19 nt, Artificial Sequence
  Description of Artificial Sequence: Synthetic oligonucleotide
cccuaauaucaguuaucuu

SEQ ID NO: 2043121 - RNA, 19 nt, Artificial Sequence
  Description of Artificial Sequence: Synthetic oligonucleotide
ccggugcuuuccggggccc

SEQ ID NO: 2043122 - RNA, 19 nt, Artificial Sequence
  Description of Artificial Sequence: Synthetic oligonucleotide
guaggagggcagggauuau

SEQ ID NO: 2043123 - RNA, 19 nt, Artificial Sequence
  Description of Artificial Sequence: Synthetic oligonucleotide
ccacuuucaagggucucau

SEQ ID NO: 2043124 - RNA, 19 nt, Artificial Sequence
  Description of Artificial Sequence: Synthetic oligonucleotide
gcgcaggaguggcugggau

SEQ ID NO: 2043125 - RNA, 19 nt, Artificial Sequence
  Description of Artificial Sequence: Synthetic oligonucleotide
gggucucauacagccccau

SEQ ID NO: 2043126 - RNA, 19 nt, Artificial Sequence
  Description of Artificial Sequence: Synthetic oligonucleotide
cggugcuuuccggggcccc

SEQ ID NO: 2043127 - RNA, 19 nt, Artificial Sequence
  Description of Artificial Sequence: Synthetic oligonucleotide
ccgcuagcgucgagaacgu

SEQ ID NO: 2043128 - RNA, 19 nt, Artificial Sequence
  Description of Artificial Sequence: Synthetic oligonucleotide
cgcuagcgucgagaacgug

SEQ ID NO: 2043129 - RNA, 19 nt, Artificial Sequence
  Description of Artificial Sequence: Synthetic oligonucleotide
cccucgauccgaccccgau

SEQ ID NO: 2043130 - RNA, 19 nt, Artificial Sequence
  Description of Artificial Sequence: Synthetic oligonucleotide
ccccucgauccgaccccga

SEQ ID NO: 2043131 - RNA, 19 nt, Artificial Sequence
  Description of Artificial Sequence: Synthetic oligonucleotide
ccgaccccgauccccgcuu

SEQ ID NO: 2043132 - RNA, 19 nt, Artificial Sequence
  Description of Artificial Sequence: Synthetic oligonucleotide
cgaccccgauccccgcuua

SEQ ID NO: 2043133 - RNA, 19 nt, Artificial Sequence
  Description of Artificial Sequence: Synthetic oligonucleotide
ccggggccccaggaucgua

SEQ ID NO: 2043134 - RNA, 19 nt, Artificial Sequence
  Description of Artificial Sequence: Synthetic oligonucleotide
augucuaucagcuugaucu

SEQ ID NO: 2043135 - RNA, 19 nt, Artificial Sequence
  Description of Artificial Sequence: Synthetic oligonucleotide
uuggccauagguaucaugg

SEQ ID NO: 2043136 - RNA, 19 nt, Artificial Sequence
  Description of Artificial Sequence: Synthetic oligonucleotide
auugaguacaacuucuugg

SEQ ID NO: 2043137 - RNA, 19 nt, Artificial Sequence
  Description of Artificial Sequence: Synthetic oligonucleotide
caugauuccaucaaagcgc

SEQ ID NO: 2043138 - RNA, 19 nt, Artificial Sequence
  Description of Artificial Sequence: Synthetic oligonucleotide
auuugugcaugucaccucc

SEQ ID NO: 2043139 - RNA, 19 nt, Artificial Sequence
  Description of Artificial Sequence: Synthetic oligonucleotide
aucaaggaaucauuugugc

SEQ ID NO: 2043140 - RNA, 19 nt, Artificial Sequence
  Description of Artificial Sequence: Synthetic oligonucleotide
aaucauuugugcaugucac

SEQ ID NO: 2043141 - RNA, 19 nt, Artificial Sequence
  Description of Artificial Sequence: Synthetic oligonucleotide
uccucaguagccaaguucc

SEQ ID NO: 2043142 - RNA, 19 nt, Artificial Sequence
  Description of Artificial Sequence: Synthetic oligonucleotide
agaguggucagccaucugg

SEQ ID NO: 2043143 - RNA, 19 nt, Artificial Sequence
  Description of Artificial Sequence: Synthetic oligonucleotide
uugaguacaacuucuuggc

SEQ ID NO: 2043144 - RNA, 19 nt, Artificial Sequence
  Description of Artificial Sequence: Synthetic oligonucleotide
uucauagcagcccauugag

SEQ ID NO: 2043145 - RNA, 19 nt, Artificial Sequence
  Description of Artificial Sequence: Synthetic oligonucleotide
aguacaacuucuuggcaac

SEQ ID NO: 2043146 - RNA, 19 nt, Artificial Sequence
  Description of Artificial Sequence: Synthetic oligonucleotide
aagaugcuuacuuccuugg

SEQ ID NO: 2043147 - RNA, 19 nt, Artificial Sequence
  Description of Artificial Sequence: Synthetic oligonucleotide
ucaguagccaaguuccccg

SEQ ID NO: 2043148 - RNA, 19 nt, Artificial Sequence
  Description of Artificial Sequence: Synthetic oligonucleotide
gacauacccucucacaggg

SEQ ID NO: 2043149 - RNA, 19 nt, Artificial Sequence
  Description of Artificial Sequence: Synthetic oligonucleotide
guuugaaucccuaagccag

SEQ ID NO: 2043150 - RNA, 19 nt, Artificial Sequence
  Description of Artificial Sequence: Synthetic oligonucleotide
augcuuacuuccuuggcac

SEQ ID NO: 2043151 - RNA, 19 nt, Artificial Sequence
  Description of Artificial Sequence: Synthetic oligonucleotide
uaagccagucaacauguag

SEQ ID NO: 2043152 - RNA, 19 nt, Artificial Sequence
  Description of Artificial Sequence: Synthetic oligonucleotide
gaugcuggcggccugugcg

SEQ ID NO: 2043153 - RNA, 19 nt, Artificial Sequence
  Description of Artificial Sequence: Synthetic oligonucleotide
ucaaggaaucauuugugca

SEQ ID NO: 2043154 - RNA, 19 nt, Artificial Sequence
  Description of Artificial Sequence: Synthetic oligonucleotide
uuucauagcagcccauuga

SEQ ID NO: 2043155 - RNA, 19 nt, Artificial Sequence
  Description of Artificial Sequence: Synthetic oligonucleotide
aucauuugugcaugucacc

SEQ ID NO: 2043156 - RNA, 19 nt, Artificial Sequence
  Description of Artificial Sequence: Synthetic oligonucleotide
uguucauuuguccccauuc

SEQ ID NO: 2043157 - RNA, 19 nt, Artificial Sequence
  Description of Artificial Sequence: Synthetic oligonucleotide
auagguaucauggcagugg

SEQ ID NO: 2043158 - RNA, 19 nt, Artificial Sequence
  Description of Artificial Sequence: Synthetic oligonucleotide
gcaugauuccaucaaagcg

SEQ ID NO: 2043159 - RNA, 19 nt, Artificial Sequence
  Description of Artificial Sequence: Synthetic oligonucleotide
ucggaaagcaugucuauca

SEQ ID NO: 2043160 - RNA, 19 nt, Artificial Sequence
  Description of Artificial Sequence: Synthetic oligonucleotide
agcuucuggagguucacac

SEQ ID NO: 2043161 - RNA, 19 nt, Artificial Sequence
  Description of Artificial Sequence: Synthetic oligonucleotide
aaagcugguggcuucaaua

SEQ ID NO: 2043162 - RNA, 19 nt, Artificial Sequence
  Description of Artificial Sequence: Synthetic oligonucleotide
agccagucaacauguagac

SEQ ID NO: 2043163 - RNA, 19 nt, Artificial Sequence
  Description of Artificial Sequence: Synthetic oligonucleotide
uggaaacucucgucuaugg

SEQ ID NO: 2043164 - RNA, 19 nt, Artificial Sequence
  Description of Artificial Sequence: Synthetic oligonucleotide
cuuuggagagacaaagcug

SEQ ID NO: 2043165 - RNA, 19 nt, Artificial Sequence
  Description of Artificial Sequence: Synthetic oligonucleotide
uucauuuguccccauucca

SEQ ID NO: 2043166 - RNA, 19 nt, Artificial Sequence
  Description of Artificial Sequence: Synthetic oligonucleotide
aauaacagggagcccugcu

SEQ ID NO: 2043167 - RNA, 19 nt, Artificial Sequence
  Description of Artificial Sequence: Synthetic oligonucleotide
agaugcuuacuuccuuggc

SEQ ID NO: 2043168 - RNA, 19 nt, Artificial Sequence
  Description of Artificial Sequence: Synthetic oligonucleotide
uuuugcagaccaucucggg

SEQ ID NO: 2043169 - RNA, 19 nt, Artificial Sequence
  Description of Artificial Sequence: Synthetic oligonucleotide
ugugcggccugcaugauuc

SEQ ID NO: 2043170 - RNA, 19 nt, Artificial Sequence
  Description of Artificial Sequence: Synthetic oligonucleotide
uggagucaggacuggauag

SEQ ID NO: 2043171 - RNA, 19 nt, Artificial Sequence
  Description of Artificial Sequence: Synthetic oligonucleotide
auggaggaggugcuaaccg

SEQ ID NO: 2043172 - RNA, 19 nt, Artificial Sequence
  Description of Artificial Sequence: Synthetic oligonucleotide
guucacacccguuugaauc

SEQ ID NO: 2043173 - RNA, 19 nt, Artificial Sequence
  Description of Artificial Sequence: Synthetic oligonucleotide
uccaucaaagcgcuggaaa

SEQ ID NO: 2043174 - RNA, 19 nt, Artificial Sequence
  Description of Artificial Sequence: Synthetic oligonucleotide
agacauacccucucacagg

SEQ ID NO: 2043175 - RNA, 19 nt, Artificial Sequence
  Description of Artificial Sequence: Synthetic oligonucleotide
gacaccuguucauuugucc

SEQ ID NO: 2043176 - RNA, 19 nt, Artificial Sequence
  Description of Artificial Sequence: Synthetic oligonucleotide
gugcuaaccgcucggaggg

SEQ ID NO: 2043177 - RNA, 19 nt, Artificial Sequence
  Description of Artificial Sequence: Synthetic oligonucleotide
accaaugguguccccaagg

SEQ ID NO: 2043178 - RNA, 19 nt, Artificial Sequence
  Description of Artificial Sequence: Synthetic oligonucleotide
uggggaacccacuuuggag

SEQ ID NO: 2043179 - RNA, 19 nt, Artificial Sequence
  Description of Artificial Sequence: Synthetic oligonucleotide
aacaagggcucagaguuug

SEQ ID NO: 2043180 - RNA, 19 nt, Artificial Sequence
  Description of Artificial Sequence: Synthetic oligonucleotide
cauauuuggagucaggacu

SEQ ID NO: 2043181 - RNA, 19 nt, Artificial Sequence
  Description of Artificial Sequence: Synthetic oligonucleotide
aagccagucaacauguaga

SEQ ID NO: 2043182 - RNA, 19 nt, Artificial Sequence
  Description of Artificial Sequence: Synthetic oligonucleotide
agaccuuccccucguaggg

SEQ ID NO: 2043183 - RNA, 19 nt, Artificial Sequence
  Description of Artificial Sequence: Synthetic oligonucleotide
aagcugguggcuucaauaa

SEQ ID NO: 2043184 - RNA, 19 nt, Artificial Sequence
  Description of Artificial Sequence: Synthetic oligonucleotide
ucaauaacagggagcccug

SEQ ID NO: 2043185 - RNA, 19 nt, Artificial Sequence
  Description of Artificial Sequence: Synthetic oligonucleotide
cauagggacagccuccaag

SEQ ID NO: 2043186 - RNA, 19 nt, Artificial Sequence
  Description of Artificial Sequence: Synthetic oligonucleotide
gaaguccccggcuucgagg

SEQ ID NO: 2043187 - RNA, 19 nt, Artificial Sequence
  Description of Artificial Sequence: Synthetic oligonucleotide
cacagaggaguccacgacg

SEQ ID NO: 2043188 - RNA, 19 nt, Artificial Sequence
  Description of Artificial Sequence: Synthetic oligonucleotide
agcuacuuuagccggggag

SEQ ID NO: 2043189 - RNA, 19 nt, Artificial Sequence
  Description of Artificial Sequence: Synthetic oligonucleotide
ugucuuucaugaguccugg

SEQ ID NO: 2043190 - RNA, 19 nt, Artificial Sequence
  Description of Artificial Sequence: Synthetic oligonucleotide
gacgcucacucccaucugg

SEQ ID NO: 2043191 - RNA, 19 nt, Artificial Sequence
  Description of Artificial Sequence: Synthetic oligonucleotide
uucuguucagggcuugaca

SEQ ID NO: 2043192 - RNA, 19 nt, Artificial Sequence
  Description of Artificial Sequence: Synthetic oligonucleotide
uugacagaugaaguccccg

SEQ ID NO: 2043193 - RNA, 19 nt, Artificial Sequence
  Description of Artificial Sequence: Synthetic oligonucleotide
ugcuucggaaagcaugucu

SEQ ID NO: 2043194 - RNA, 19 nt, Artificial Sequence
  Description of Artificial Sequence: Synthetic oligonucleotide
gcaguggacagccagggcg

SEQ ID NO: 2043195 - RNA, 19 nt, Artificial Sequence
  Description of Artificial Sequence: Synthetic oligonucleotide
ucggggaccaacuuccaca

SEQ ID NO: 2043196 - RNA, 19 nt, Artificial Sequence
  Description of Artificial Sequence: Synthetic oligonucleotide
gaguccacgacgcucacuc

SEQ ID NO: 2043197 - RNA, 19 nt, Artificial Sequence
  Description of Artificial Sequence: Synthetic oligonucleotide
ugaguacaacuucuuggca

SEQ ID NO: 2043198 - RNA, 19 nt, Artificial Sequence
  Description of Artificial Sequence: Synthetic oligonucleotide
uucaagacuucagaguggu

SEQ ID NO: 2043199 - RNA, 19 nt, Artificial Sequence
  Description of Artificial Sequence: Synthetic oligonucleotide
gaguacaacuucuuggcaa

SEQ ID NO: 2043200 - RNA, 19 nt, Artificial Sequence
  Description of Artificial Sequence: Synthetic oligonucleotide
uuuggagucaggacuggau

SEQ ID NO: 2043201 - RNA, 19 nt, Artificial Sequence
  Description of Artificial Sequence: Synthetic oligonucleotide
ucauuuugcagaccaucuc

SEQ ID NO: 2043202 - RNA, 19 nt, Artificial Sequence
  Description of Artificial Sequence: Synthetic oligonucleotide
cucguaggggcauccaagg

SEQ ID NO: 2043203 - RNA, 19 nt, Artificial Sequence
  Description of Artificial Sequence: Synthetic oligonucleotide
ggugcuaaccgcucggagg

SEQ ID NO: 2043204 - RNA, 19 nt, Artificial Sequence
  Description of Artificial Sequence: Synthetic oligonucleotide
ugcccuucaagacuucaga

SEQ ID NO: 2043205 - RNA, 19 nt, Artificial Sequence
  Description of Artificial Sequence: Synthetic oligonucleotide
gaggccgccccaaagaugc

SEQ ID NO: 2043206 - RNA, 19 nt, Artificial Sequence
  Description of Artificial Sequence: Synthetic oligonucleotide
gaugaaguccccggcuucg

SEQ ID NO: 2043207 - RNA, 19 nt, Artificial Sequence
  Description of Artificial Sequence: Synthetic oligonucleotide
guaucauggcaguggacag

SEQ ID NO: 2043208 - RNA, 19 nt, Artificial Sequence
  Description of Artificial Sequence: Synthetic oligonucleotide
auauuuggagucaggacug

SEQ ID NO: 2043209 - RNA, 19 nt, Artificial Sequence
  Description of Artificial Sequence: Synthetic oligonucleotide
uagccaaguuccccgaggc

SEQ ID NO: 2043210 - RNA, 19 nt, Artificial Sequence
  Description of Artificial Sequence: Synthetic oligonucleotide
uugcauagggacagccucc

SEQ ID NO: 2043211 - RNA, 19 nt, Artificial Sequence
  Description of Artificial Sequence: Synthetic oligonucleotide
gucaggacuggauaguuga

SEQ ID NO: 2043212 - RNA, 19 nt, Artificial Sequence
  Description of Artificial Sequence: Synthetic oligonucleotide
aaguccccggcuucgagga

SEQ ID NO: 2043213 - RNA, 19 nt, Artificial Sequence
  Description of Artificial Sequence: Synthetic oligonucleotide
ucuuggcaaccucagcuac

SEQ ID NO: 2043214 - RNA, 19 nt, Artificial Sequence
  Description of Artificial Sequence: Synthetic oligonucleotide
gaaucccuaagccagucaa

SEQ ID NO: 2043215 - RNA, 19 nt, Artificial Sequence
  Description of Artificial Sequence: Synthetic oligonucleotide
agcgcuggaaacucucguc

SEQ ID NO: 2043216 - RNA, 19 nt, Artificial Sequence
  Description of Artificial Sequence: Synthetic oligonucleotide
uaacagggagcccugcuuc

SEQ ID NO: 2043217 - RNA, 19 nt, Artificial Sequence
  Description of Artificial Sequence: Synthetic oligonucleotide
accuuccccucguaggggc

SEQ ID NO: 2043218 - RNA, 19 nt, Artificial Sequence
  Description of Artificial Sequence: Synthetic oligonucleotide
ucguaggggcauccaaggg

SEQ ID NO: 2043219 - RNA, 19 nt, Artificial Sequence
  Description of Artificial Sequence: Synthetic oligonucleotide
guagccaaguuccccgagg

SEQ ID NO: 2043220 - RNA, 19 nt, Artificial Sequence
  Description of Artificial Sequence: Synthetic oligonucleotide
acuuuagccggggagaccu

SEQ ID NO: 2043221 - RNA, 19 nt, Artificial Sequence
  Description of Artificial Sequence: Synthetic oligonucleotide
cauggcaguggacagccag

SEQ ID NO: 2043222 - RNA, 19 nt, Artificial Sequence
  Description of Artificial Sequence: Synthetic oligonucleotide
caagggagauuucauagca

SEQ ID NO: 2043223 - RNA, 19 nt, Artificial Sequence
  Description of Artificial Sequence: Synthetic oligonucleotide
guugaugccaggaaacuuc

SEQ ID NO: 2043224 - RNA, 19 nt, Artificial Sequence
  Description of Artificial Sequence: Synthetic oligonucleotide
cauagcagcccauugagua

SEQ ID NO: 2043225 - RNA, 19 nt, Artificial Sequence
  Description of Artificial Sequence: Synthetic oligonucleotide
uucuggagguucacacccg

SEQ ID NO: 2043226 - RNA, 19 nt, Artificial Sequence
  Description of Artificial Sequence: Synthetic oligonucleotide
ucagcuacuuuagccgggg

SEQ ID NO: 2043227 - RNA, 19 nt, Artificial Sequence
  Description of Artificial Sequence: Synthetic oligonucleotide
agacaaagcugguggcuuc

SEQ ID NO: 2043228 - RNA, 19 nt, Artificial Sequence
  Description of Artificial Sequence: Synthetic oligonucleotide
acccguuugaaucccuaag

SEQ ID NO: 2043229 - RNA, 19 nt, Artificial Sequence
  Description of Artificial Sequence: Synthetic oligonucleotide
uggaggaggugcuaaccgc

SEQ ID NO: 2043230 - RNA, 19 nt, Artificial Sequence
  Description of Artificial Sequence: Synthetic oligonucleotide
ucuucaccgggguaggcac

SEQ ID NO: 2043231 - RNA, 19 nt, Artificial Sequence
  Description of Artificial Sequence: Synthetic oligonucleotide
agcugguggcuucaauaac

SEQ ID NO: 2043232 - RNA, 19 nt, Artificial Sequence
  Description of Artificial Sequence: Synthetic oligonucleotide
agggcuuggccauagguau

SEQ ID NO: 2043233 - RNA, 19 nt, Artificial Sequence
  Description of Artificial Sequence: Synthetic oligonucleotide
caucuggagggcuaccaag

SEQ ID NO: 2043234 - RNA, 19 nt, Artificial Sequence
  Description of Artificial Sequence: Synthetic oligonucleotide
uggauaguugaugccagga

SEQ ID NO: 2043235 - RNA, 19 nt, Artificial Sequence
  Description of Artificial Sequence: Synthetic oligonucleotide
acgacgcucacucccaucu

SEQ ID NO: 2043236 - RNA, 19 nt, Artificial Sequence
  Description of Artificial Sequence: Synthetic oligonucleotide
gacuggauaguugaugcca

SEQ ID NO: 2043237 - RNA, 19 nt, Artificial Sequence
  Description of Artificial Sequence: Synthetic oligonucleotide
uacccucucacagggaugc

SEQ ID NO: 2043238 - RNA, 19 nt, Artificial Sequence
  Description of Artificial Sequence: Synthetic oligonucleotide
gaguggucagccaucuggg

SEQ ID NO: 2043239 - RNA, 19 nt, Artificial Sequence
  Description of Artificial Sequence: Synthetic oligonucleotide
caggucucaggcaaacaag

SEQ ID NO: 2043240 - RNA, 19 nt, Artificial Sequence
  Description of Artificial Sequence: Synthetic oligonucleotide
aggaaacuucugaaugccc

SEQ ID NO: 2043241 - RNA, 19 nt, Artificial Sequence
  Description of Artificial Sequence: Synthetic oligonucleotide
gggaaagugcccauggagg

SEQ ID NO: 2043242 - RNA, 19 nt, Artificial Sequence
  Description of Artificial Sequence: Synthetic oligonucleotide
cccaaagaugcuuacuucc

SEQ ID NO: 2043243 - RNA, 19 nt, Artificial Sequence
  Description of Artificial Sequence: Synthetic oligonucleotide
agaggaguccacgacgcuc

SEQ ID NO: 2043244 - RNA, 19 nt, Artificial Sequence
  Description of Artificial Sequence: Synthetic oligonucleotide
caggaaacuucugaaugcc

SEQ ID NO: 2043245 - RNA, 19 nt, Artificial Sequence
  Description of Artificial Sequence: Synthetic oligonucleotide
gaacccacuuuggagagac

SEQ ID NO: 2043246 - RNA, 19 nt, Artificial Sequence
  Description of Artificial Sequence: Synthetic oligonucleotide
cauccaagggcacaggaga

SEQ ID NO: 2043247 - RNA, 19 nt, Artificial Sequence
  Description of Artificial Sequence: Synthetic oligonucleotide
gccugugccacuuuggagc

SEQ ID NO: 2043248 - RNA, 19 nt, Artificial Sequence
  Description of Artificial Sequence: Synthetic oligonucleotide
ggugccuacaccaauggug

SEQ ID NO: 2043249 - RNA, 19 nt, Artificial Sequence
  Description of Artificial Sequence: Synthetic oligonucleotide
cagggcuugacagaugaag

SEQ ID NO: 2043250 - RNA, 19 nt, Artificial Sequence
  Description of Artificial Sequence: Synthetic oligonucleotide
cuugacagaugaagucccc

SEQ ID NO: 2043251 - RNA, 19 nt, Artificial Sequence
  Description of Artificial Sequence: Synthetic oligonucleotide
uggggugccuacaccaaug

SEQ ID NO: 2043252 - RNA, 19 nt, Artificial Sequence
  Description of Artificial Sequence: Synthetic oligonucleotide
gccaggaaacuucugaaug

SEQ ID NO: 2043253 - RNA, 19 nt, Artificial Sequence
  Description of Artificial Sequence: Synthetic oligonucleotide
uggagguucacacccguuu

SEQ ID NO: 2043254 - RNA, 19 nt, Artificial Sequence
  Description of Artificial Sequence: Synthetic oligonucleotide
ggagauuucauagcagccc

SEQ ID NO: 2043255 - RNA, 19 nt, Artificial Sequence
  Description of Artificial Sequence: Synthetic oligonucleotide
uauuuggagucaggacugg

SEQ ID NO: 2043256 - RNA, 19 nt, Artificial Sequence
  Description of Artificial Sequence: Synthetic oligonucleotide
aggaggugcuaaccgcucg

SEQ ID NO: 2043257 - RNA, 19 nt, Artificial Sequence
  Description of Artificial Sequence: Synthetic oligonucleotide
ucauagcagcccauugagu

SEQ ID NO: 2043258 - RNA, 19 nt, Artificial Sequence
  Description of Artificial Sequence: Synthetic oligonucleotide
agccaaguuccccgaggcc

SEQ ID NO: 2043259 - RNA, 19 nt, Artificial Sequence
  Description of Artificial Sequence: Synthetic oligonucleotide
ucucccaucaaggaaucau

SEQ ID NO: 2043260 - RNA, 19 nt, Artificial Sequence
  Description of Artificial Sequence: Synthetic oligonucleotide
aaagcaugucuaucagcuu

SEQ ID NO: 2043261 - RNA, 19 nt, Artificial Sequence
  Description of Artificial Sequence: Synthetic oligonucleotide
ggggaaagugcccauggag

SEQ ID NO: 2043262 - RNA, 19 nt, Artificial Sequence
  Description of Artificial Sequence: Synthetic oligonucleotide
cucagaguuugcagguggc

SEQ ID NO: 2043263 - RNA, 19 nt, Artificial Sequence
  Description of Artificial Sequence: Synthetic oligonucleotide
ugaaguccccggcuucgag

SEQ ID NO: 2043264 - RNA, 19 nt, Artificial Sequence
  Description of Artificial Sequence: Synthetic oligonucleotide
uuugugcaugucaccuccc

SEQ ID NO: 2043265 - RNA, 19 nt, Artificial Sequence
  Description of Artificial Sequence: Synthetic oligonucleotide
uucagaguggucagccauc

SEQ ID NO: 2043266 - RNA, 19 nt, Artificial Sequence
  Description of Artificial Sequence: Synthetic oligonucleotide
cccaagggagauuucauag

SEQ ID NO: 2043267 - RNA, 19 nt, Artificial Sequence
  Description of Artificial Sequence: Synthetic oligonucleotide
uuacuuccuuggcaccugc

SEQ ID NO: 2043268 - RNA, 19 nt, Artificial Sequence
  Description of Artificial Sequence: Synthetic oligonucleotide
cuaccaagguguuggccag

SEQ ID NO: 2043269 - RNA, 19 nt, Artificial Sequence
  Description of Artificial Sequence: Synthetic oligonucleotide
uacaacuucuuggcaaccu

SEQ ID NO: 2043270 - RNA, 19 nt, Artificial Sequence
  Description of Artificial Sequence: Synthetic oligonucleotide
aucccuaagccagucaaca

SEQ ID NO: 2043271 - RNA, 19 nt, Artificial Sequence
  Description of Artificial Sequence: Synthetic oligonucleotide
caaagcgcuggaaacucuc

SEQ ID NO: 2043272 - RNA, 19 nt, Artificial Sequence
  Description of Artificial Sequence: Synthetic oligonucleotide
acuggauaguugaugccag

SEQ ID NO: 2043273 - RNA, 19 nt, Artificial Sequence
  Description of Artificial Sequence: Synthetic oligonucleotide
auaacagggagcccugcuu

SEQ ID NO: 2043274 - RNA, 19 nt, Artificial Sequence
  Description of Artificial Sequence: Synthetic oligonucleotide
agucccgccacagaggagu

SEQ ID NO: 2043275 - RNA, 19 nt, Artificial Sequence
  Description of Artificial Sequence: Synthetic oligonucleotide
gcuaccaagguguuggcca

SEQ ID NO: 2043276 - RNA, 19 nt, Artificial Sequence
  Description of Artificial Sequence: Synthetic oligonucleotide
cagcuugaucuucaccggg

SEQ ID NO: 2043277 - RNA, 19 nt, Artificial Sequence
  Description of Artificial Sequence: Synthetic oligonucleotide
guccucaguagccaaguuc

SEQ ID NO: 2043278 - RNA, 19 nt, Artificial Sequence
  Description of Artificial Sequence: Synthetic oligonucleotide
acccgcuuggggaaagugc

SEQ ID NO: 2043279 - RNA, 19 nt, Artificial Sequence
  Description of Artificial Sequence: Synthetic oligonucleotide
cuaaccgcucggagggacg

SEQ ID NO: 2043280 - RNA, 19 nt, Artificial Sequence
  Description of Artificial Sequence: Synthetic oligonucleotide
cauggaggaggugcuaacc

SEQ ID NO: 2043281 - RNA, 19 nt, Artificial Sequence
  Description of Artificial Sequence: Synthetic oligonucleotide
uggccauagguaucauggc

SEQ ID NO: 2043282 - RNA, 19 nt, Artificial Sequence
  Description of Artificial Sequence: Synthetic oligonucleotide
cucggagggacgccaagcc

SEQ ID NO: 2043283 - RNA, 19 nt, Artificial Sequence
  Description of Artificial Sequence: Synthetic oligonucleotide
aguccacgacgcucacucc

SEQ ID NO: 2043284 - RNA, 19 nt, Artificial Sequence
  Description of Artificial Sequence: Synthetic oligonucleotide
guccacgacgcucacuccc

SEQ ID NO: 2043285 - RNA, 19 nt, Artificial Sequence
  Description of Artificial Sequence: Synthetic oligonucleotide
aguagccaaguuccccgag

SEQ ID NO: 2043286 - RNA, 19 nt, Artificial Sequence
  Description of Artificial Sequence: Synthetic oligonucleotide
ugcuuacuuccuuggcacc

SEQ ID NO: 2043287 - RNA, 19 nt, Artificial Sequence
  Description of Artificial Sequence: Synthetic oligonucleotide
agagacaaagcugguggcu

SEQ ID NO: 2043288 - RNA, 19 nt, Artificial Sequence
  Description of Artificial Sequence: Synthetic oligonucleotide
uccgcgggaaagcccuccg

SEQ ID NO: 2043289 - RNA, 19 nt, Artificial Sequence
  Description of Artificial Sequence: Synthetic oligonucleotide
cauuucucccaucaaggaa

SEQ ID NO: 2043290 - RNA, 19 nt, Artificial Sequence
  Description of Artificial Sequence: Synthetic oligonucleotide
cacagucccaggucucagg

SEQ ID NO: 2043291 - RNA, 19 nt, Artificial Sequence
  Description of Artificial Sequence: Synthetic oligonucleotide
uuucuguucagggcuugac

SEQ ID NO: 2043292 - RNA, 19 nt, Artificial Sequence
  Description of Artificial Sequence: Synthetic oligonucleotide
uucggaaagcaugucuauc

SEQ ID NO: 2043293 - RNA, 19 nt, Artificial Sequence
  Description of Artificial Sequence: Synthetic oligonucleotide
uggggaaagugcccaugga

SEQ ID NO: 2043294 - RNA, 19 nt, Artificial Sequence
  Description of Artificial Sequence: Synthetic oligonucleotide
cuaucagcuugaucuucac

SEQ ID NO: 2043295 - RNA, 19 nt, Artificial Sequence
  Description of Artificial Sequence: Synthetic oligonucleotide
ccguuugaaucccuaagcc

SEQ ID NO: 2043296 - RNA, 19 nt, Artificial Sequence
  Description of Artificial Sequence: Synthetic oligonucleotide
ucuuuucauuuugcagacc

SEQ ID NO: 2043297 - RNA, 19 nt, Artificial Sequence
  Description of Artificial Sequence: Synthetic oligonucleotide
augucuuucaugaguccug

SEQ ID NO: 2043298 - RNA, 19 nt, Artificial Sequence
  Description of Artificial Sequence: Synthetic oligonucleotide
accaagguguuggccaggg

SEQ ID NO: 2043299 - RNA, 19 nt, Artificial Sequence
  Description of Artificial Sequence: Synthetic oligonucleotide
ucaggcaaacaagggcuca

SEQ ID NO: 2043300 - RNA, 19 nt, Artificial Sequence
  Description of Artificial Sequence: Synthetic oligonucleotide
agggacgccaagcccacca

SEQ ID NO: 2043301 - RNA, 19 nt, Artificial Sequence
  Description of Artificial Sequence: Synthetic oligonucleotide
ucgcgcaugacagcaguca

SEQ ID NO: 2043302 - RNA, 19 nt, Artificial Sequence
  Description of Artificial Sequence: Synthetic oligonucleotide
cccguuugaaucccuaagc

SEQ ID NO: 2043303 - RNA, 19 nt, Artificial Sequence
  Description of Artificial Sequence: Synthetic oligonucleotide
gagguucacacccguuuga

SEQ ID NO: 2043304 - RNA, 19 nt, Artificial Sequence
  Description of Artificial Sequence: Synthetic oligonucleotide
cauagguaucauggcagug

SEQ ID NO: 2043305 - RNA, 19 nt, Artificial Sequence
  Description of Artificial Sequence: Synthetic oligonucleotide
caagucccgccacagagga

SEQ ID NO: 2043306 - RNA, 19 nt, Artificial Sequence
  Description of Artificial Sequence: Synthetic oligonucleotide
ucaggacuggauaguugau

SEQ ID NO: 2043307 - RNA, 19 nt, Artificial Sequence
  Description of Artificial Sequence: Synthetic oligonucleotide
gucuuucaugaguccuggg

SEQ ID NO: 2043308 - RNA, 19 nt, Artificial Sequence
  Description of Artificial Sequence: Synthetic oligonucleotide
cucaggcaaacaagggcuc

SEQ ID NO: 2043309 - RNA, 19 nt, Artificial Sequence
  Description of Artificial Sequence: Synthetic oligonucleotide
cuacuuuagccggggagac

SEQ ID NO: 2043310 - RNA, 19 nt, Artificial Sequence
  Description of Artificial Sequence: Synthetic oligonucleotide
agcagucagcaugucuuuc

SEQ ID NO: 2043311 - RNA, 19 nt, Artificial Sequence
  Description of Artificial Sequence: Synthetic oligonucleotide
ggcaccucgcgcaugacag

SEQ ID NO: 2043312 - RNA, 19 nt, Artificial Sequence
  Description of Artificial Sequence: Synthetic oligonucleotide
caaccucagcuacuuuagc

SEQ ID NO: 2043313 - RNA, 19 nt, Artificial Sequence
  Description of Artificial Sequence: Synthetic oligonucleotide
ggaggugcuaaccgcucgg

SEQ ID NO: 2043314 - RNA, 19 nt, Artificial Sequence
  Description of Artificial Sequence: Synthetic oligonucleotide
ggagguucacacccguuug

SEQ ID NO: 2043315 - RNA, 19 nt, Artificial Sequence
  Description of Artificial Sequence: Synthetic oligonucleotide
gcagauaccgcuuccugga

SEQ ID NO: 2043316 - RNA, 19 nt, Artificial Sequence
  Description of Artificial Sequence: Synthetic oligonucleotide
uccccaagggagauuucau

SEQ ID NO: 2043317 - RNA, 19 nt, Artificial Sequence
  Description of Artificial Sequence: Synthetic oligonucleotide
gcuucgaggagcuucugga

SEQ ID NO: 2043318 - RNA, 19 nt, Artificial Sequence
  Description of Artificial Sequence: Synthetic oligonucleotide
ccucagcuacuuuagccgg

SEQ ID NO: 2043319 - RNA, 19 nt, Artificial Sequence
  Description of Artificial Sequence: Synthetic oligonucleotide
ggagacauacccucucaca

SEQ ID NO: 2043320 - RNA, 19 nt, Artificial Sequence
  Description of Artificial Sequence: Synthetic oligonucleotide
uacuuccuuggcaccugca

SEQ ID NO: 2043321 - RNA, 19 nt, Artificial Sequence
  Description of Artificial Sequence: Synthetic oligonucleotide
gacgccaagcccaccaguc

SEQ ID NO: 2043322 - RNA, 19 nt, Artificial Sequence
  Description of Artificial Sequence: Synthetic oligonucleotide
uaaccgcucggagggacgc

SEQ ID NO: 2043323 - RNA, 19 nt, Artificial Sequence
  Description of Artificial Sequence: Synthetic oligonucleotide
gccaaguuccccgaggccc

SEQ ID NO: 2043324 - RNA, 19 nt, Artificial Sequence
  Description of Artificial Sequence: Synthetic oligonucleotide
gcuugacagaugaaguccc

SEQ ID NO: 2043325 - RNA, 19 nt, Artificial Sequence
  Description of Artificial Sequence: Synthetic oligonucleotide
agucuccgcgggaaagccc

SEQ ID NO: 2043326 - RNA, 19 nt, Artificial Sequence
  Description of Artificial Sequence: Synthetic oligonucleotide
gcaaccucagcuacuuuag

SEQ ID NO: 2043327 - RNA, 19 nt, Artificial Sequence
  Description of Artificial Sequence: Synthetic oligonucleotide
ggcuucgaggagcuucugg

SEQ ID NO: 2043328 - RNA, 19 nt, Artificial Sequence
  Description of Artificial Sequence: Synthetic oligonucleotide
aucuucaccgggguaggca

SEQ ID NO: 2043329 - RNA, 19 nt, Artificial Sequence
  Description of Artificial Sequence: Synthetic oligonucleotide
ucccuaagccagucaacau

SEQ ID NO: 2043330 - RNA, 19 nt, Artificial Sequence
  Description of Artificial Sequence: Synthetic oligonucleotide
ggccauagguaucauggca

SEQ ID NO: 2043331 - RNA, 19 nt, Artificial Sequence
  Description of Artificial Sequence: Synthetic oligonucleotide
gggagauuucauagcagcc

SEQ ID NO: 2043332 - RNA, 19 nt, Artificial Sequence
  Description of Artificial Sequence: Synthetic oligonucleotide
ggagaccuuccccucguag

SEQ ID NO: 2043333 - RNA, 19 nt, Artificial Sequence
  Description of Artificial Sequence: Synthetic oligonucleotide
cccuaagccagucaacaug

SEQ ID NO: 2043334 - RNA, 19 nt, Artificial Sequence
  Description of Artificial Sequence: Synthetic oligonucleotide
aaccgcucggagggacgcc

SEQ ID NO: 2043335 - RNA, 19 nt, Artificial Sequence
  Description of Artificial Sequence: Synthetic oligonucleotide
ucacacccguuugaauccc

SEQ ID NO: 2043336 - RNA, 19 nt, Artificial Sequence
  Description of Artificial Sequence: Synthetic oligonucleotide
uuuagccggggagaccuuc

SEQ ID NO: 2043337 - RNA, 19 nt, Artificial Sequence
  Description of Artificial Sequence: Synthetic oligonucleotide
agcccauugaguacaacuu

SEQ ID NO: 2043338 - RNA, 19 nt, Artificial Sequence
  Description of Artificial Sequence: Synthetic oligonucleotide
uacuuuagccggggagacc

SEQ ID NO: 2043339 - RNA, 19 nt, Artificial Sequence
  Description of Artificial Sequence: Synthetic oligonucleotide
ggacuggauaguugaugcc

SEQ ID NO: 2043340 - RNA, 19 nt, Artificial Sequence
  Description of Artificial Sequence: Synthetic oligonucleotide
caauaacagggagcccugc

SEQ ID NO: 2043341 - RNA, 19 nt, Artificial Sequence
  Description of Artificial Sequence: Synthetic oligonucleotide
guacaacuucuuggcaacc

SEQ ID NO: 2043342 - RNA, 19 nt, Artificial Sequence
  Description of Artificial Sequence: Synthetic oligonucleotide
gcuacuuuagccggggaga

SEQ ID NO: 2043343 - RNA, 19 nt, Artificial Sequence
  Description of Artificial Sequence: Synthetic oligonucleotide
gcugguggcuucaauaaca

SEQ ID NO: 2043344 - RNA, 19 nt, Artificial Sequence
  Description of Artificial Sequence: Synthetic oligonucleotide
aggcaccucgcgcaugaca

SEQ ID NO: 2043345 - RNA, 19 nt, Artificial Sequence
  Description of Artificial Sequence: Synthetic oligonucleotide
agguaucauggcaguggac

SEQ ID NO: 2043346 - RNA, 19 nt, Artificial Sequence
  Description of Artificial Sequence: Synthetic oligonucleotide
aggaguccacgacgcucac

SEQ ID NO: 2043347 - RNA, 19 nt, Artificial Sequence
  Description of Artificial Sequence: Synthetic oligonucleotide
ccucguaggggcauccaag

SEQ ID NO: 2043348 - RNA, 19 nt, Artificial Sequence
  Description of Artificial Sequence: Synthetic oligonucleotide
ugaguccuggggugccuac

SEQ ID NO: 2043349 - RNA, 19 nt, Artificial Sequence
  Description of Artificial Sequence: Synthetic oligonucleotide
acucucgucuauggagcag

SEQ ID NO: 2043350 - RNA, 19 nt, Artificial Sequence
  Description of Artificial Sequence: Synthetic oligonucleotide
gccuacaccaauggugucc

SEQ ID NO: 2043351 - RNA, 19 nt, Artificial Sequence
  Description of Artificial Sequence: Synthetic oligonucleotide
cuguucagggcuugacaga

SEQ ID NO: 2043352 - RNA, 19 nt, Artificial Sequence
  Description of Artificial Sequence: Synthetic oligonucleotide
cagucuccgcgggaaagcc

SEQ ID NO: 2043353 - RNA, 19 nt, Artificial Sequence
  Description of Artificial Sequence: Synthetic oligonucleotide
aaacaagggcucagaguuu

SEQ ID NO: 2043354 - RNA, 19 nt, Artificial Sequence
  Description of Artificial Sequence: Synthetic oligonucleotide
ccuacaccaaugguguccc

SEQ ID NO: 2043355 - RNA, 19 nt, Artificial Sequence
  Description of Artificial Sequence: Synthetic oligonucleotide
uuccaucaaagcgcuggaa

SEQ ID NO: 2043356 - RNA, 19 nt, Artificial Sequence
  Description of Artificial Sequence: Synthetic oligonucleotide
ccaucaaggaaucauuugu

SEQ ID NO: 2043357 - RNA, 19 nt, Artificial Sequence
  Description of Artificial Sequence: Synthetic oligonucleotide
uucaccgggguaggcacaa

SEQ ID NO: 2043358 - RNA, 19 nt, Artificial Sequence
  Description of Artificial Sequence: Synthetic oligonucleotide
accaucucggggaccaacu

SEQ ID NO: 2043359 - RNA, 19 nt, Artificial Sequence
  Description of Artificial Sequence: Synthetic oligonucleotide
cagggcuuggccauaggua

SEQ ID NO: 2043360 - RNA, 19 nt, Artificial Sequence
  Description of Artificial Sequence: Synthetic oligonucleotide
cucggggaccaacuuccac

SEQ ID NO: 2043361 - RNA, 19 nt, Artificial Sequence
  Description of Artificial Sequence: Synthetic oligonucleotide
cuggggaacccacuuugga

SEQ ID NO: 2043362 - RNA, 19 nt, Artificial Sequence
  Description of Artificial Sequence: Synthetic oligonucleotide
ucucgucuauggagcaguu

SEQ ID NO: 2043363 - RNA, 19 nt, Artificial Sequence
  Description of Artificial Sequence: Synthetic oligonucleotide
gcauccaagggcacaggag

SEQ ID NO: 2043364 - RNA, 19 nt, Artificial Sequence
  Description of Artificial Sequence: Synthetic oligonucleotide
cauacccucucacagggau

SEQ ID NO: 2043365 - RNA, 19 nt, Artificial Sequence
  Description of Artificial Sequence: Synthetic oligonucleotide
gugacaccuguucauuugu

SEQ ID NO: 2043366 - RNA, 19 nt, Artificial Sequence
  Description of Artificial Sequence: Synthetic oligonucleotide
gguggccugugccacuuug

SEQ ID NO: 2043367 - RNA, 19 nt, Artificial Sequence
  Description of Artificial Sequence: Synthetic oligonucleotide
gcccauugaguacaacuuc

SEQ ID NO: 2043368 - RNA, 19 nt, Artificial Sequence
  Description of Artificial Sequence: Synthetic oligonucleotide
ggcggccacaggcaccucg

SEQ ID NO: 2043369 - RNA, 19 nt, Artificial Sequence
  Description of Artificial Sequence: Synthetic oligonucleotide
ccaaguuccccgaggcccc

SEQ ID NO: 2043370 - RNA, 19 nt, Artificial Sequence
  Description of Artificial Sequence: Synthetic oligonucleotide
auacccucucacagggaug

SEQ ID NO: 2043371 - RNA, 19 nt, Artificial Sequence
  Description of Artificial Sequence: Synthetic oligonucleotide
agguucacacccguuugaa

SEQ ID NO: 2043372 - RNA, 19 nt, Artificial Sequence
  Description of Artificial Sequence: Synthetic oligonucleotide
ccuuugcauagggacagcc

SEQ ID NO: 2043373 - RNA, 19 nt, Artificial Sequence
  Description of Artificial Sequence: Synthetic oligonucleotide
uucucccaucaaggaauca

SEQ ID NO: 2043374 - RNA, 19 nt, Artificial Sequence
  Description of Artificial Sequence: Synthetic oligonucleotide
ccuuggcaccugcagauac

SEQ ID NO: 2043375 - RNA, 19 nt, Artificial Sequence
  Description of Artificial Sequence: Synthetic oligonucleotide
gauuucauagcagcccauu

SEQ ID NO: 2043376 - RNA, 19 nt, Artificial Sequence
  Description of Artificial Sequence: Synthetic oligonucleotide
ugcggccugcaugauucca

SEQ ID NO: 2043377 - RNA, 19 nt, Artificial Sequence
  Description of Artificial Sequence: Synthetic oligonucleotide
gcaaacaagggcucagagu

SEQ ID NO: 2043378 - RNA, 19 nt, Artificial Sequence
  Description of Artificial Sequence: Synthetic oligonucleotide
aggcaaacaagggcucaga

SEQ ID NO: 2043379 - RNA, 19 nt, Artificial Sequence
  Description of Artificial Sequence: Synthetic oligonucleotide
cucgcgcaugacagcaguc

SEQ ID NO: 2043380 - RNA, 19 nt, Artificial Sequence
  Description of Artificial Sequence: Synthetic oligonucleotide
cguuugaaucccuaagcca

SEQ ID NO: 2043381 - RNA, 19 nt, Artificial Sequence
  Description of Artificial Sequence: Synthetic oligonucleotide
ccuaagccagucaacaugu

SEQ ID NO: 2043382 - RNA, 19 nt, Artificial Sequence
  Description of Artificial Sequence: Synthetic oligonucleotide
cuacaccaauggugucccc

SEQ ID NO: 2043383 - RNA, 19 nt, Artificial Sequence
  Description of Artificial Sequence: Synthetic oligonucleotide
guccccggcuucgaggagc

SEQ ID NO: 2043384 - RNA, 19 nt, Artificial Sequence
  Description of Artificial Sequence: Synthetic oligonucleotide
cuugaucuucaccggggua

SEQ ID NO: 2043385 - RNA, 19 nt, Artificial Sequence
  Description of Artificial Sequence: Synthetic oligonucleotide
uaggggcauccaagggcac

SEQ ID NO: 2043386 - RNA, 19 nt, Artificial Sequence
  Description of Artificial Sequence: Synthetic oligonucleotide
gagacaaagcugguggcuu

SEQ ID NO: 2043387 - RNA, 19 nt, Artificial Sequence
  Description of Artificial Sequence: Synthetic oligonucleotide
cucgucuauggagcaguuc

SEQ ID NO: 2043388 - RNA, 19 nt, Artificial Sequence
  Description of Artificial Sequence: Synthetic oligonucleotide
cuauggagcaguucacauu

SEQ ID NO: 2043389 - RNA, 19 nt, Artificial Sequence
  Description of Artificial Sequence: Synthetic oligonucleotide
gaggugcuaaccgcucgga

SEQ ID NO: 2043390 - RNA, 19 nt, Artificial Sequence
  Description of Artificial Sequence: Synthetic oligonucleotide
ccccaaagaugcuuacuuc

SEQ ID NO: 2043391 - RNA, 19 nt, Artificial Sequence
  Description of Artificial Sequence: Synthetic oligonucleotide
aagucccgccacagaggag

SEQ ID NO: 2043392 - RNA, 19 nt, Artificial Sequence
  Description of Artificial Sequence: Synthetic oligonucleotide
gcuucggaaagcaugucua

SEQ ID NO: 2043393 - RNA, 19 nt, Artificial Sequence
  Description of Artificial Sequence: Synthetic oligonucleotide
ggcuuggccauagguauca

SEQ ID NO: 2043394 - RNA, 19 nt, Artificial Sequence
  Description of Artificial Sequence: Synthetic oligonucleotide
cggaaagcaugucuaucag

SEQ ID NO: 2043395 - RNA, 19 nt, Artificial Sequence
  Description of Artificial Sequence: Synthetic oligonucleotide
caccucgcgcaugacagca

SEQ ID NO: 2043396 - RNA, 19 nt, Artificial Sequence
  Description of Artificial Sequence: Synthetic oligonucleotide
cacgacgcucacucccauc

SEQ ID NO: 2043397 - RNA, 19 nt, Artificial Sequence
  Description of Artificial Sequence: Synthetic oligonucleotide
gccacuuuggagcugguuu

SEQ ID NO: 2043398 - RNA, 19 nt, Artificial Sequence
  Description of Artificial Sequence: Synthetic oligonucleotide
cuucggaaagcaugucuau

SEQ ID NO: 2043399 - RNA, 19 nt, Artificial Sequence
  Description of Artificial Sequence: Synthetic oligonucleotide
cucccaucuggagggcuac

SEQ ID NO: 2043400 - RNA, 19 nt, Artificial Sequence
  Description of Artificial Sequence: Synthetic oligonucleotide
cagaguuugcagguggccu

SEQ ID NO: 2043401 - RNA, 19 nt, Artificial Sequence
  Description of Artificial Sequence: Synthetic oligonucleotide
ggcuaccaagguguuggcc

SEQ ID NO: 2043402 - RNA, 19 nt, Artificial Sequence
  Description of Artificial Sequence: Synthetic oligonucleotide
gccagucaacauguagacc

SEQ ID NO: 2043403 - RNA, 19 nt, Artificial Sequence
  Description of Artificial Sequence: Synthetic oligonucleotide
accgcucggagggacgcca

SEQ ID NO: 2043404 - RNA, 19 nt, Artificial Sequence
  Description of Artificial Sequence: Synthetic oligonucleotide
cacccguuugaaucccuaa

SEQ ID NO: 2043405 - RNA, 19 nt, Artificial Sequence
  Description of Artificial Sequence: Synthetic oligonucleotide
ggaccuucgugacaccugu

SEQ ID NO: 2043406 - RNA, 19 nt, Artificial Sequence
  Description of Artificial Sequence: Synthetic oligonucleotide
acgcucacucccaucugga

SEQ ID NO: 2043407 - RNA, 19 nt, Artificial Sequence
  Description of Artificial Sequence: Synthetic oligonucleotide
cacccgcuuggggaaagug

SEQ ID NO: 2043408 - RNA, 19 nt, Artificial Sequence
  Description of Artificial Sequence: Synthetic oligonucleotide
cucccaucaaggaaucauu

SEQ ID NO: 2043409 - RNA, 19 nt, Artificial Sequence
  Description of Artificial Sequence: Synthetic oligonucleotide
ggaccaacuuccacaaucu

SEQ ID NO: 2043410 - RNA, 19 nt, Artificial Sequence
  Description of Artificial Sequence: Synthetic oligonucleotide
gcgggaaagcccuccgcac

SEQ ID NO: 2043411 - RNA, 19 nt, Artificial Sequence
  Description of Artificial Sequence: Synthetic oligonucleotide
ucccgccacagaggagucc

SEQ ID NO: 2043412 - RNA, 19 nt, Artificial Sequence
  Description of Artificial Sequence: Synthetic oligonucleotide
ccugcuucggaaagcaugu

SEQ ID NO: 2043413 - RNA, 19 nt, Artificial Sequence
  Description of Artificial Sequence: Synthetic oligonucleotide
gucuccgcgggaaagcccu

SEQ ID NO: 2043414 - RNA, 19 nt, Artificial Sequence
  Description of Artificial Sequence: Synthetic oligonucleotide
ugcuaaccgcucggaggga

SEQ ID NO: 2043415 - RNA, 19 nt, Artificial Sequence
  Description of Artificial Sequence: Synthetic oligonucleotide
ccaaagaugcuuacuuccu

SEQ ID NO: 2043416 - RNA, 19 nt, Artificial Sequence
  Description of Artificial Sequence: Synthetic oligonucleotide
auggagcaguucacauucu

SEQ ID NO: 2043417 - RNA, 19 nt, Artificial Sequence
  Description of Artificial Sequence: Synthetic oligonucleotide
cuaagccagucaacaugua

SEQ ID NO: 2043418 - RNA, 19 nt, Artificial Sequence
  Description of Artificial Sequence: Synthetic oligonucleotide
agggaugcuggcggccugu

SEQ ID NO: 2043419 - RNA, 19 nt, Artificial Sequence
  Description of Artificial Sequence: Synthetic oligonucleotide
gcucggagggacgccaagc

SEQ ID NO: 2043420 - RNA, 19 nt, Artificial Sequence
  Description of Artificial Sequence: Synthetic oligonucleotide
aacccacuuuggagagaca

SEQ ID NO: 2043421 - RNA, 19 nt, Artificial Sequence
  Description of Artificial Sequence: Synthetic oligonucleotide
gcuaaccgcucggagggac

SEQ ID NO: 2043422 - RNA, 19 nt, Artificial Sequence
  Description of Artificial Sequence: Synthetic oligonucleotide
gaguuugcagguggccugu

SEQ ID NO: 2043423 - RNA, 19 nt, Artificial Sequence
  Description of Artificial Sequence: Synthetic oligonucleotide
ccagucuccgcgggaaagc

SEQ ID NO: 2043424 - RNA, 19 nt, Artificial Sequence
  Description of Artificial Sequence: Synthetic oligonucleotide
gugcggccugcaugauucc

SEQ ID NO: 2043425 - RNA, 19 nt, Artificial Sequence
  Description of Artificial Sequence: Synthetic oligonucleotide
ucacccgcuuggggaaagu

SEQ ID NO: 2043426 - RNA, 19 nt, Artificial Sequence
  Description of Artificial Sequence: Synthetic oligonucleotide
gcgcuggaaacucucgucu

SEQ ID NO: 2043427 - RNA, 19 nt, Artificial Sequence
  Description of Artificial Sequence: Synthetic oligonucleotide
accucgcgcaugacagcag

SEQ ID NO: 2043428 - RNA, 19 nt, Artificial Sequence
  Description of Artificial Sequence: Synthetic oligonucleotide
cagauaccgcuuccuggaa

SEQ ID NO: 2043429 - RNA, 19 nt, Artificial Sequence
  Description of Artificial Sequence: Synthetic oligonucleotide
cgcgcaugacagcagucag

SEQ ID NO: 2043430 - RNA, 19 nt, Artificial Sequence
  Description of Artificial Sequence: Synthetic oligonucleotide
cugcuucggaaagcauguc

SEQ ID NO: 2043431 - RNA, 19 nt, Artificial Sequence
  Description of Artificial Sequence: Synthetic oligonucleotide
acacccguuugaaucccua

SEQ ID NO: 2043432 - RNA, 19 nt, Artificial Sequence
  Description of Artificial Sequence: Synthetic oligonucleotide
gcaccucgcgcaugacagc

SEQ ID NO: 2043433 - RNA, 19 nt, Artificial Sequence
  Description of Artificial Sequence: Synthetic oligonucleotide
gagggacgccaagcccacc

SEQ ID NO: 2043434 - RNA, 19 nt, Artificial Sequence
  Description of Artificial Sequence: Synthetic oligonucleotide
ggagucaggacuggauagu

SEQ ID NO: 2043435 - RNA, 19 nt, Artificial Sequence
  Description of Artificial Sequence: Synthetic oligonucleotide
uuccccucguaggggcauc

SEQ ID NO: 2043436 - RNA, 19 nt, Artificial Sequence
  Description of Artificial Sequence: Synthetic oligonucleotide
cccacuuuggagagacaaa

SEQ ID NO: 2043437 - RNA, 19 nt, Artificial Sequence
  Description of Artificial Sequence: Synthetic oligonucleotide
ggagggacgccaagcccac

SEQ ID NO: 2043438 - RNA, 19 nt, Artificial Sequence
  Description of Artificial Sequence: Synthetic oligonucleotide
ccauagguaucauggcagu

SEQ ID NO: 2043439 - RNA, 19 nt, Artificial Sequence
  Description of Artificial Sequence: Synthetic oligonucleotide
caucuggggaacccacuuu

SEQ ID NO: 2043440 - RNA, 19 nt, Artificial Sequence
  Description of Artificial Sequence: Synthetic oligonucleotide
ggucagccaucuggggaac

SEQ ID NO: 2043441 - RNA, 19 nt, Artificial Sequence
  Description of Artificial Sequence: Synthetic oligonucleotide
ggacagccuccaagucccg

SEQ ID NO: 2043442 - RNA, 19 nt, Artificial Sequence
  Description of Artificial Sequence: Synthetic oligonucleotide
ggaacccacuuuggagaga

SEQ ID NO: 2043443 - RNA, 19 nt, Artificial Sequence
  Description of Artificial Sequence: Synthetic oligonucleotide
ccccaagggagauuucaua

SEQ ID NO: 2043444 - RNA, 19 nt, Artificial Sequence
  Description of Artificial Sequence: Synthetic oligonucleotide
cacacccguuugaaucccu

SEQ ID NO: 2043445 - RNA, 19 nt, Artificial Sequence
  Description of Artificial Sequence: Synthetic oligonucleotide
cuggggugccuacaccaau

SEQ ID NO: 2043446 - RNA, 19 nt, Artificial Sequence
  Description of Artificial Sequence: Synthetic oligonucleotide
ucaccgggguaggcacaau

SEQ ID NO: 2043447 - RNA, 19 nt, Artificial Sequence
  Description of Artificial Sequence: Synthetic oligonucleotide
ggacgccaagcccaccagu

SEQ ID NO: 2043448 - RNA, 19 nt, Artificial Sequence
  Description of Artificial Sequence: Synthetic oligonucleotide
cccaucuggagggcuacca

SEQ ID NO: 2043449 - RNA, 19 nt, Artificial Sequence
  Description of Artificial Sequence: Synthetic oligonucleotide
gggcuuggccauagguauc

SEQ ID NO: 2043450 - RNA, 19 nt, Artificial Sequence
  Description of Artificial Sequence: Synthetic oligonucleotide
ccgcgggaaagcccuccgc

SEQ ID NO: 2043451 - RNA, 19 nt, Artificial Sequence
  Description of Artificial Sequence: Synthetic oligonucleotide
acccucucacagggaugcu

SEQ ID NO: 2043452 - RNA, 19 nt, Artificial Sequence
  Description of Artificial Sequence: Synthetic oligonucleotide
gucccgccacagaggaguc

SEQ ID NO: 2043453 - RNA, 19 nt, Artificial Sequence
  Description of Artificial Sequence: Synthetic oligonucleotide
cgcgggaaagcccuccgca

SEQ ID NO: 2043454 - RNA, 19 nt, Artificial Sequence
  Description of Artificial Sequence: Synthetic oligonucleotide
cagaggaguccacgacgcu

SEQ ID NO: 2043455 - RNA, 19 nt, Artificial Sequence
  Description of Artificial Sequence: Synthetic oligonucleotide
ccgccccaaagaugcuuac

SEQ ID NO: 2043456 - RNA, 19 nt, Artificial Sequence
  Description of Artificial Sequence: Synthetic oligonucleotide
cggccugcaugauuccauc

SEQ ID NO: 2043457 - RNA, 19 nt, Artificial Sequence
  Description of Artificial Sequence: Synthetic oligonucleotide
ccggggagaccuuccccuc

SEQ ID NO: 2043458 - RNA, 19 nt, Artificial Sequence
  Description of Artificial Sequence: Synthetic oligonucleotide
caggcaccucgcgcaugac

SEQ ID NO: 2043459 - RNA, 19 nt, Artificial Sequence
  Description of Artificial Sequence: Synthetic oligonucleotide
cuggagguucacacccguu

SEQ ID NO: 2043460 - RNA, 19 nt, Artificial Sequence
  Description of Artificial Sequence: Synthetic oligonucleotide
cccuuugcauagggacagc

SEQ ID NO: 2043461 - RNA, 19 nt, Artificial Sequence
  Description of Artificial Sequence: Synthetic oligonucleotide
gcagcccauugaguacaac

SEQ ID NO: 2043462 - RNA, 19 nt, Artificial Sequence
  Description of Artificial Sequence: Synthetic oligonucleotide
gccgccccaaagaugcuua

SEQ ID NO: 2043463 - RNA, 19 nt, Artificial Sequence
  Description of Artificial Sequence: Synthetic oligonucleotide
gcauagggacagccuccaa

SEQ ID NO: 2043464 - RNA, 19 nt, Artificial Sequence
  Description of Artificial Sequence: Synthetic oligonucleotide
cccucguaggggcauccaa

SEQ ID NO: 2043465 - RNA, 19 nt, Artificial Sequence
  Description of Artificial Sequence: Synthetic oligonucleotide
cugugcggccugcaugauu

SEQ ID NO: 2043466 - RNA, 19 nt, Artificial Sequence
  Description of Artificial Sequence: Synthetic oligonucleotide
ccaccagucuccgcgggaa

SEQ ID NO: 2043467 - RNA, 19 nt, Artificial Sequence
  Description of Artificial Sequence: Synthetic oligonucleotide
gcccuccgcacugucgcca

SEQ ID NO: 2043468 - RNA, 19 nt, Artificial Sequence
  Description of Artificial Sequence: Synthetic oligonucleotide
ggaaagcccuccgcacugu

SEQ ID NO: 2043469 - RNA, 19 nt, Artificial Sequence
  Description of Artificial Sequence: Synthetic oligonucleotide
cgacgcucacucccaucug

SEQ ID NO: 2043470 - RNA, 19 nt, Artificial Sequence
  Description of Artificial Sequence: Synthetic oligonucleotide
cuuuagccggggagaccuu

SEQ ID NO: 2043471 - RNA, 19 nt, Artificial Sequence
  Description of Artificial Sequence: Synthetic oligonucleotide
cuuccccucguaggggcau

SEQ ID NO: 2043472 - RNA, 19 nt, Artificial Sequence
  Description of Artificial Sequence: Synthetic oligonucleotide
ccucgcgcaugacagcagu

SEQ ID NO: 2043473 - RNA, 19 nt, Artificial Sequence
  Description of Artificial Sequence: Synthetic oligonucleotide
ccgccacagaggaguccac

SEQ ID NO: 2043474 - RNA, 19 nt, Artificial Sequence
  Description of Artificial Sequence: Synthetic oligonucleotide
cccaccagucuccgcggga

SEQ ID NO: 2043475 - RNA, 19 nt, Artificial Sequence
  Description of Artificial Sequence: Synthetic oligonucleotide
cgcucggagggacgccaag

SEQ ID NO: 2043476 - RNA, 19 nt, Artificial Sequence
  Description of Artificial Sequence: Synthetic oligonucleotide
gggagaccuuccccucgua

SEQ ID NO: 2043477 - RNA, 19 nt, Artificial Sequence
  Description of Artificial Sequence: Synthetic oligonucleotide
gaccuucgugacaccuguu

SEQ ID NO: 2043478 - RNA, 19 nt, Artificial Sequence
  Description of Artificial Sequence: Synthetic oligonucleotide
gcggccugcaugauuccau

SEQ ID NO: 2043479 - RNA, 19 nt, Artificial Sequence
  Description of Artificial Sequence: Synthetic oligonucleotide
ccgggguaggcacaauguu

SEQ ID NO: 2043480 - RNA, 19 nt, Artificial Sequence
  Description of Artificial Sequence: Synthetic oligonucleotide
ggagggcuaccaagguguu

SEQ ID NO: 2043481 - RNA, 19 nt, Artificial Sequence
  Description of Artificial Sequence: Synthetic oligonucleotide
ggccgccccaaagaugcuu

SEQ ID NO: 2043482 - RNA, 19 nt, Artificial Sequence
  Description of Artificial Sequence: Synthetic oligonucleotide
ccgcucggagggacgccaa

SEQ ID NO: 2043483 - RNA, 19 nt, Artificial Sequence
  Description of Artificial Sequence: Synthetic oligonucleotide
ccccucguaggggcaucca

SEQ ID NO: 2043484 - RNA, 19 nt, Artificial Sequence
  Description of Artificial Sequence: Synthetic oligonucleotide
cccuccgcacugucgccau

SEQ ID NO: 2043485 - RNA, 19 nt, Artificial Sequence
  Description of Artificial Sequence: Synthetic oligonucleotide
cgccccaaagaugcuuacu

SEQ ID NO: 2043486 - RNA, 19 nt, Artificial Sequence
  Description of Artificial Sequence: Synthetic oligonucleotide
ccacgacgcucacucccau

SEQ ID NO: 2043487 - RNA, 19 nt, Artificial Sequence
  Description of Artificial Sequence: Synthetic oligonucleotide
ccugugcggccugcaugau

SEQ ID NO: 2043488 - RNA, 19 nt, Artificial Sequence
  Description of Artificial Sequence: Synthetic oligonucleotide
ccccggcuucgaggagcuu

SEQ ID NO: 2043489 - RNA, 19 nt, Artificial Sequence
  Description of Artificial Sequence: Synthetic oligonucleotide
aagauuaacacuuuacaag

SEQ ID NO: 2043490 - RNA, 19 nt, Artificial Sequence
  Description of Artificial Sequence: Synthetic oligonucleotide
uucacuaucacgaaugagg

SEQ ID NO: 2043491 - RNA, 19 nt, Artificial Sequence
  Description of Artificial Sequence: Synthetic oligonucleotide
augacgaucaccuuugucc

SEQ ID NO: 2043492 - RNA, 19 nt, Artificial Sequence
  Description of Artificial Sequence: Synthetic oligonucleotide
ugacagagaaccuacaugg

SEQ ID NO: 2043493 - RNA, 19 nt, Artificial Sequence
  Description of Artificial Sequence: Synthetic oligonucleotide
aaaaccauccaauuuuguc

SEQ ID NO: 2043494 - RNA, 19 nt, Artificial Sequence
  Description of Artificial Sequence: Synthetic oligonucleotide
aauaccaaggauugccagc

SEQ ID NO: 2043495 - RNA, 19 nt, Artificial Sequence
  Description of Artificial Sequence: Synthetic oligonucleotide
gacaguaagaaguuaaaag

SEQ ID NO: 2043496 - RNA, 19 nt, Artificial Sequence
  Description of Artificial Sequence: Synthetic oligonucleotide
uauagauaggauuuuaugu

SEQ ID NO: 2043497 - RNA, 19 nt, Artificial Sequence
  Description of Artificial Sequence: Synthetic oligonucleotide
ugaugaguaaucaagacaa

SEQ ID NO: 2043498 - RNA, 19 nt, Artificial Sequence
  Description of Artificial Sequence: Synthetic oligonucleotide
uguacuuuagcauaugcca

SEQ ID NO: 2043499 - RNA, 19 nt, Artificial Sequence
  Description of Artificial Sequence: Synthetic oligonucleotide
aaguuaaaagcuguguagc

SEQ ID NO: 2043500 - RNA, 19 nt, Artificial Sequence
  Description of Artificial Sequence: Synthetic oligonucleotide
ucaauaaaagaacucuucc

SEQ ID NO: 2043501 - RNA, 19 nt, Artificial Sequence
  Description of Artificial Sequence: Synthetic oligonucleotide
ugugaaaaggaacuauggg

SEQ ID NO: 2043502 - RNA, 19 nt, Artificial Sequence
  Description of Artificial Sequence: Synthetic oligonucleotide
aaagcuguguagcagucac

SEQ ID NO: 2043503 - RNA, 19 nt, Artificial Sequence
  Description of Artificial Sequence: Synthetic oligonucleotide
uacauggucaccuaaagga

SEQ ID NO: 2043504 - RNA, 19 nt, Artificial Sequence
  Description of Artificial Sequence: Synthetic oligonucleotide
uguauuuagguuauugaca

SEQ ID NO: 2043505 - RNA, 19 nt, Artificial Sequence
  Description of Artificial Sequence: Synthetic oligonucleotide
gaauacaaaacuugaacug

SEQ ID NO: 2043506 - RNA, 19 nt, Artificial Sequence
  Description of Artificial Sequence: Synthetic oligonucleotide
acuuguaaagauuggugcc

SEQ ID NO: 2043507 - RNA, 19 nt, Artificial Sequence
  Description of Artificial Sequence: Synthetic oligonucleotide
uuuugaaccaaauuauucu

SEQ ID NO: 2043508 - RNA, 19 nt, Artificial Sequence
  Description of Artificial Sequence: Synthetic oligonucleotide
ugaguaaucaagacaaaug

SEQ ID NO: 2043509 - RNA, 19 nt, Artificial Sequence
  Description of Artificial Sequence: Synthetic oligonucleotide
uauuuagucacagaaaaga

SEQ ID NO: 2043510 - RNA, 19 nt, Artificial Sequence
  Description of Artificial Sequence: Synthetic oligonucleotide
uuugccauaauaccaagga

SEQ ID NO: 2043511 - RNA, 19 nt, Artificial Sequence
  Description of Artificial Sequence: Synthetic oligonucleotide
uguaaucacacuguggagg

SEQ ID NO: 2043512 - RNA, 19 nt, Artificial Sequence
  Description of Artificial Sequence: Synthetic oligonucleotide
gcauaugccauauagauag

SEQ ID NO: 2043513 - RNA, 19 nt, Artificial Sequence
  Description of Artificial Sequence: Synthetic oligonucleotide
aauguuugacgagauauag

SEQ ID NO: 2043514 - RNA, 19 nt, Artificial Sequence
  Description of Artificial Sequence: Synthetic oligonucleotide
uuuagugauacugagaaau

SEQ ID NO: 2043515 - RNA, 19 nt, Artificial Sequence
  Description of Artificial Sequence: Synthetic oligonucleotide
agauuaacacuuuacaaga

SEQ ID NO: 2043516 - RNA, 19 nt, Artificial Sequence
  Description of Artificial Sequence: Synthetic oligonucleotide
ucccuuuuaucaaugacag

SEQ ID NO: 2043517 - RNA, 19 nt, Artificial Sequence
  Description of Artificial Sequence: Synthetic oligonucleotide
auaaugguaacauaguuuu

SEQ ID NO: 2043518 - RNA, 19 nt, Artificial Sequence
  Description of Artificial Sequence: Synthetic oligonucleotide
uuuaaugccauuucugccu

SEQ ID NO: 2043519 - RNA, 19 nt, Artificial Sequence
  Description of Artificial Sequence: Synthetic oligonucleotide
auguucuacaaguucuucc

SEQ ID NO: 2043520 - RNA, 19 nt, Artificial Sequence
  Description of Artificial Sequence: Synthetic oligonucleotide
uuggacuuuaaaaugcuug

SEQ ID NO: 2043521 - RNA, 19 nt, Artificial Sequence
  Description of Artificial Sequence: Synthetic oligonucleotide
ucauuggaugagcugaacg

SEQ ID NO: 2043522 - RNA, 19 nt, Artificial Sequence
  Description of Artificial Sequence: Synthetic oligonucleotide
uaaucaagacaaauguuug

SEQ ID NO: 2043523 - RNA, 19 nt, Artificial Sequence
  Description of Artificial Sequence: Synthetic oligonucleotide
aacacuuuacaagaaaugu

SEQ ID NO: 2043524 - RNA, 19 nt, Artificial Sequence
  Description of Artificial Sequence: Synthetic oligonucleotide
aacuguuagaaggaaagag

SEQ ID NO: 2043525 - RNA, 19 nt, Artificial Sequence
  Description of Artificial Sequence: Synthetic oligonucleotide
acuaucacgaaugaggaag

SEQ ID NO: 2043526 - RNA, 19 nt, Artificial Sequence
  Description of Artificial Sequence: Synthetic oligonucleotide
cauuuaaugccauuucugc

SEQ ID NO: 2043527 - RNA, 19 nt, Artificial Sequence
  Description of Artificial Sequence: Synthetic oligonucleotide
aaagaacucuuccauauau

SEQ ID NO: 2043528 - RNA, 19 nt, Artificial Sequence
  Description of Artificial Sequence: Synthetic oligonucleotide
uuauucugcauaaugguaa

SEQ ID NO: 2043529 - RNA, 19 nt, Artificial Sequence
  Description of Artificial Sequence: Synthetic oligonucleotide
aauacaaaacuugaacugu

SEQ ID NO: 2043530 - RNA, 19 nt, Artificial Sequence
  Description of Artificial Sequence: Synthetic oligonucleotide
uaauguaaucacacugugg

SEQ ID NO: 2043531 - RNA, 19 nt, Artificial Sequence
  Description of Artificial Sequence: Synthetic oligonucleotide
auauagauaggauuuuaug

SEQ ID NO: 2043532 - RNA, 19 nt, Artificial Sequence
  Description of Artificial Sequence: Synthetic oligonucleotide
uucaguuggacuuuaaaau

SEQ ID NO: 2043533 - RNA, 19 nt, Artificial Sequence
  Description of Artificial Sequence: Synthetic oligonucleotide
cauuggaugagcugaacgg

SEQ ID NO: 2043534 - RNA, 19 nt, Artificial Sequence
  Description of Artificial Sequence: Synthetic oligonucleotide
ucaagacaaauguuugacg

SEQ ID NO: 2043535 - RNA, 19 nt, Artificial Sequence
  Description of Artificial Sequence: Synthetic oligonucleotide
uuaacacuuuacaagaaau

SEQ ID NO: 2043536 - RNA, 19 nt, Artificial Sequence
  Description of Artificial Sequence: Synthetic oligonucleotide
uguuugacgagauauaguu

SEQ ID NO: 2043537 - RNA, 19 nt, Artificial Sequence
  Description of Artificial Sequence: Synthetic oligonucleotide
acuaugggagaacaggagg

SEQ ID NO: 2043538 - RNA, 19 nt, Artificial Sequence
  Description of Artificial Sequence: Synthetic oligonucleotide
uccccuuucauuuaaugcc

SEQ ID NO: 2043539 - RNA, 19 nt, Artificial Sequence
  Description of Artificial Sequence: Synthetic oligonucleotide
ucaguuggacuuuaaaaug

SEQ ID NO: 2043540 - RNA, 19 nt, Artificial Sequence
  Description of Artificial Sequence: Synthetic oligonucleotide
gaugguuccaaaccugagg

SEQ ID NO: 2043541 - RNA, 19 nt, Artificial Sequence
  Description of Artificial Sequence: Synthetic oligonucleotide
aggauuuuaugugaaaagg

SEQ ID NO: 2043542 - RNA, 19 nt, Artificial Sequence
  Description of Artificial Sequence: Synthetic oligonucleotide
aauggauuauucugcauaa

SEQ ID NO: 2043543 - RNA, 19 nt, Artificial Sequence
  Description of Artificial Sequence: Synthetic oligonucleotide
aagacaaauguuugacgag

SEQ ID NO: 2043544 - RNA, 19 nt, Artificial Sequence
  Description of Artificial Sequence: Synthetic oligonucleotide
aguucuucaucauuggaug

SEQ ID NO: 2043545 - RNA, 19 nt, Artificial Sequence
  Description of Artificial Sequence: Synthetic oligonucleotide
uacaaguucuuccauggug

SEQ ID NO: 2043546 - RNA, 19 nt, Artificial Sequence
  Description of Artificial Sequence: Synthetic oligonucleotide
uucauuuaaugccauuucu

SEQ ID NO: 2043547 - RNA, 19 nt, Artificial Sequence
  Description of Artificial Sequence: Synthetic oligonucleotide
cagaauacaaaacuugaac

SEQ ID NO: 2043548 - RNA, 19 nt, Artificial Sequence
  Description of Artificial Sequence: Synthetic oligonucleotide
agguuaauggauuauucug

SEQ ID NO: 2043549 - RNA, 19 nt, Artificial Sequence
  Description of Artificial Sequence: Synthetic oligonucleotide
cauuacaucaccuuucuca

SEQ ID NO: 2043550 - RNA, 19 nt, Artificial Sequence
  Description of Artificial Sequence: Synthetic oligonucleotide
cacuuguaaagauuggugc

SEQ ID NO: 2043551 - RNA, 19 nt, Artificial Sequence
  Description of Artificial Sequence: Synthetic oligonucleotide
uaaacagucucuuucaguu

SEQ ID NO: 2043552 - RNA, 19 nt, Artificial Sequence
  Description of Artificial Sequence: Synthetic oligonucleotide
uuugacgagauauaguuuu

SEQ ID NO: 2043553 - RNA, 19 nt, Artificial Sequence
  Description of Artificial Sequence: Synthetic oligonucleotide
caagaaauguacuuuagca

SEQ ID NO: 2043554 - RNA, 19 nt, Artificial Sequence
  Description of Artificial Sequence: Synthetic oligonucleotide
ugacuuugccauaauacca

SEQ ID NO: 2043555 - RNA, 19 nt, Artificial Sequence
  Description of Artificial Sequence: Synthetic oligonucleotide
caguuacauaguuugaagg

SEQ ID NO: 2043556 - RNA, 19 nt, Artificial Sequence
  Description of Artificial Sequence: Synthetic oligonucleotide
aucaagacaaauguuugac

SEQ ID NO: 2043557 - RNA, 19 nt, Artificial Sequence
  Description of Artificial Sequence: Synthetic oligonucleotide
uaucaaugacaguucaucc

SEQ ID NO: 2043558 - RNA, 19 nt, Artificial Sequence
  Description of Artificial Sequence: Synthetic oligonucleotide
aaucaagacaaauguuuga

SEQ ID NO: 2043559 - RNA, 19 nt, Artificial Sequence
  Description of Artificial Sequence: Synthetic oligonucleotide
aacaggaggucuuuacaag

SEQ ID NO: 2043560 - RNA, 19 nt, Artificial Sequence
  Description of Artificial Sequence: Synthetic oligonucleotide
uuuccuguuuauuauuggc

SEQ ID NO: 2043561 - RNA, 19 nt, Artificial Sequence
  Description of Artificial Sequence: Synthetic oligonucleotide
aauuuccgcugcccaaugc

SEQ ID NO: 2043562 - RNA, 19 nt, Artificial Sequence
  Description of Artificial Sequence: Synthetic oligonucleotide
acaaaacuugaacuguuag

SEQ ID NO: 2043563 - RNA, 19 nt, Artificial Sequence
  Description of Artificial Sequence: Synthetic oligonucleotide
cuguauuuagguuauugac

SEQ ID NO: 2043564 - RNA, 19 nt, Artificial Sequence
  Description of Artificial Sequence: Synthetic oligonucleotide
uuagguuauugacaacugc

SEQ ID NO: 2043565 - RNA, 19 nt, Artificial Sequence
  Description of Artificial Sequence: Synthetic oligonucleotide
auuuagguuauugacaacu

SEQ ID NO: 2043566 - RNA, 19 nt, Artificial Sequence
  Description of Artificial Sequence: Synthetic oligonucleotide
ucuaguuuccuguuuauua

SEQ ID NO: 2043567 - RNA, 19 nt, Artificial Sequence
  Description of Artificial Sequence: Synthetic oligonucleotide
aaaagcaaagaagacagua

SEQ ID NO: 2043568 - RNA, 19 nt, Artificial Sequence
  Description of Artificial Sequence: Synthetic oligonucleotide
uuagcauaugccauauaga

SEQ ID NO: 2043569 - RNA, 19 nt, Artificial Sequence
  Description of Artificial Sequence: Synthetic oligonucleotide
uuuagguuauugacaacug

SEQ ID NO: 2043570 - RNA, 19 nt, Artificial Sequence
  Description of Artificial Sequence: Synthetic oligonucleotide
uagcauaugccauauagau

SEQ ID NO: 2043571 - RNA, 19 nt, Artificial Sequence
  Description of Artificial Sequence: Synthetic oligonucleotide
cuuuuagugauacugagaa

SEQ ID NO: 2043572 - RNA, 19 nt, Artificial Sequence
  Description of Artificial Sequence: Synthetic oligonucleotide
ucacuaucacgaaugagga

SEQ ID NO: 2043573 - RNA, 19 nt, Artificial Sequence
  Description of Artificial Sequence: Synthetic oligonucleotide
acagagaaccuacaugguc

SEQ ID NO: 2043574 - RNA, 19 nt, Artificial Sequence
  Description of Artificial Sequence: Synthetic oligonucleotide
accuuugucccuuuuauca

SEQ ID NO: 2043575 - RNA, 19 nt, Artificial Sequence
  Description of Artificial Sequence: Synthetic oligonucleotide
uggcuauuuagucacagaa

SEQ ID NO: 2043576 - RNA, 19 nt, Artificial Sequence
  Description of Artificial Sequence: Synthetic oligonucleotide
uuuccagugagugaaggcc

SEQ ID NO: 2043577 - RNA, 19 nt, Artificial Sequence
  Description of Artificial Sequence: Synthetic oligonucleotide
aucaauaaaagaacucuuc

SEQ ID NO: 2043578 - RNA, 19 nt, Artificial Sequence
  Description of Artificial Sequence: Synthetic oligonucleotide
ucacgaaugaggaagucuc

SEQ ID NO: 2043579 - RNA, 19 nt, Artificial Sequence
  Description of Artificial Sequence: Synthetic oligonucleotide
auguacuuuagcauaugcc

SEQ ID NO: 2043580 - RNA, 19 nt, Artificial Sequence
  Description of Artificial Sequence: Synthetic oligonucleotide
cugcuaauuucucugacag

SEQ ID NO: 2043581 - RNA, 19 nt, Artificial Sequence
  Description of Artificial Sequence: Synthetic oligonucleotide
caguuggacuuuaaaaugc

SEQ ID NO: 2043582 - RNA, 19 nt, Artificial Sequence
  Description of Artificial Sequence: Synthetic oligonucleotide
guauuuagguuauugacaa

SEQ ID NO: 2043583 - RNA, 19 nt, Artificial Sequence
  Description of Artificial Sequence: Synthetic oligonucleotide
ucaccuaaaggacugucac

SEQ ID NO: 2043584 - RNA, 19 nt, Artificial Sequence
  Description of Artificial Sequence: Synthetic oligonucleotide
caagacaaauguuugacga

SEQ ID NO: 2043585 - RNA, 19 nt, Artificial Sequence
  Description of Artificial Sequence: Synthetic oligonucleotide
ggauuauucugcauaaugg

SEQ ID NO: 2043586 - RNA, 19 nt, Artificial Sequence
  Description of Artificial Sequence: Synthetic oligonucleotide
gaguaaucaagacaaaugu

SEQ ID NO: 2043587 - RNA, 19 nt, Artificial Sequence
  Description of Artificial Sequence: Synthetic oligonucleotide
uggacuuuaaaaugcuugu

SEQ ID NO: 2043588 - RNA, 19 nt, Artificial Sequence
  Description of Artificial Sequence: Synthetic oligonucleotide
uucccuugugcuuuuagug

SEQ ID NO: 2043589 - RNA, 19 nt, Artificial Sequence
  Description of Artificial Sequence: Synthetic oligonucleotide
ucagaauacaaaacuugaa

SEQ ID NO: 2043590 - RNA, 19 nt, Artificial Sequence
  Description of Artificial Sequence: Synthetic oligonucleotide
ugauacugagaaaucauuu

SEQ ID NO: 2043591 - RNA, 19 nt, Artificial Sequence
  Description of Artificial Sequence: Synthetic oligonucleotide
gcuaauuucucugacagag

SEQ ID NO: 2043592 - RNA, 19 nt, Artificial Sequence
  Description of Artificial Sequence: Synthetic oligonucleotide
uccaauuuuguccauugua

SEQ ID NO: 2043593 - RNA, 19 nt, Artificial Sequence
  Description of Artificial Sequence: Synthetic oligonucleotide
uuggcgaagauucacuauc

SEQ ID NO: 2043594 - RNA, 19 nt, Artificial Sequence
  Description of Artificial Sequence: Synthetic oligonucleotide
uccaugacgaucaccuuug

SEQ ID NO: 2043595 - RNA, 19 nt, Artificial Sequence
  Description of Artificial Sequence: Synthetic oligonucleotide
augguuccaaaccugaggu

SEQ ID NO: 2043596 - RNA, 19 nt, Artificial Sequence
  Description of Artificial Sequence: Synthetic oligonucleotide
ugcugaugaguaaucaaga

SEQ ID NO: 2043597 - RNA, 19 nt, Artificial Sequence
  Description of Artificial Sequence: Synthetic oligonucleotide
uaauaccaaggauugccag

SEQ ID NO: 2043598 - RNA, 19 nt, Artificial Sequence
  Description of Artificial Sequence: Synthetic oligonucleotide
cuauuuagucacagaaaag

SEQ ID NO: 2043599 - RNA, 19 nt, Artificial Sequence
  Description of Artificial Sequence: Synthetic oligonucleotide
agcugaacggguaaagagc

SEQ ID NO: 2043600 - RNA, 19 nt, Artificial Sequence
  Description of Artificial Sequence: Synthetic oligonucleotide
gaggcgaugguuccaaacc

SEQ ID NO: 2043601 - RNA, 19 nt, Artificial Sequence
  Description of Artificial Sequence: Synthetic oligonucleotide
guaaucacacuguggaggc

SEQ ID NO: 2043602 - RNA, 19 nt, Artificial Sequence
  Description of Artificial Sequence: Synthetic oligonucleotide
gauuuuaugugaaaaggaa

SEQ ID NO: 2043603 - RNA, 19 nt, Artificial Sequence
  Description of Artificial Sequence: Synthetic oligonucleotide
aucaaugacaguucauccu

SEQ ID NO: 2043604 - RNA, 19 nt, Artificial Sequence
  Description of Artificial Sequence: Synthetic oligonucleotide
aguuugaaggaaaaccauc

SEQ ID NO: 2043605 - RNA, 19 nt, Artificial Sequence
  Description of Artificial Sequence: Synthetic oligonucleotide
aguaagaaguuaaaagcug

SEQ ID NO: 2043606 - RNA, 19 nt, Artificial Sequence
  Description of Artificial Sequence: Synthetic oligonucleotide
auuacaucaccuuucucaa

SEQ ID NO: 2043607 - RNA, 19 nt, Artificial Sequence
  Description of Artificial Sequence: Synthetic oligonucleotide
aauuucucugacagagaac

SEQ ID NO: 2043608 - RNA, 19 nt, Artificial Sequence
  Description of Artificial Sequence: Synthetic oligonucleotide
ugacgaucaccuuuguccc

SEQ ID NO: 2043609 - RNA, 19 nt, Artificial Sequence
  Description of Artificial Sequence: Synthetic oligonucleotide
uuugucccuuuuaucaaug

SEQ ID NO: 2043610 - RNA, 19 nt, Artificial Sequence
  Description of Artificial Sequence: Synthetic oligonucleotide
cuaauguaaucacacugug

SEQ ID NO: 2043611 - RNA, 19 nt, Artificial Sequence
  Description of Artificial Sequence: Synthetic oligonucleotide
uuaaugccauuucugccug

SEQ ID NO: 2043612 - RNA, 19 nt, Artificial Sequence
  Description of Artificial Sequence: Synthetic oligonucleotide
cuuuuaucaaugacaguuc

SEQ ID NO: 2043613 - RNA, 19 nt, Artificial Sequence
  Description of Artificial Sequence: Synthetic oligonucleotide
augugaaaaggaacuaugg

SEQ ID NO: 2043614 - RNA, 19 nt, Artificial Sequence
  Description of Artificial Sequence: Synthetic oligonucleotide
guuaaaagcuguguagcag

SEQ ID NO: 2043615 - RNA, 19 nt, Artificial Sequence
  Description of Artificial Sequence: Synthetic oligonucleotide
gauuauucugcauaauggu

SEQ ID NO: 2043616 - RNA, 19 nt, Artificial Sequence
  Description of Artificial Sequence: Synthetic oligonucleotide
ugagugaaggccuaaugua

SEQ ID NO: 2043617 - RNA, 19 nt, Artificial Sequence
  Description of Artificial Sequence: Synthetic oligonucleotide
aaggacugucaccuucuuc

SEQ ID NO: 2043618 - RNA, 19 nt, Artificial Sequence
  Description of Artificial Sequence: Synthetic oligonucleotide
aagauucacuaucacgaau

SEQ ID NO: 2043619 - RNA, 19 nt, Artificial Sequence
  Description of Artificial Sequence: Synthetic oligonucleotide
cuacauggucaccuaaagg

SEQ ID NO: 2043620 - RNA, 19 nt, Artificial Sequence
  Description of Artificial Sequence: Synthetic oligonucleotide
uaaaggacugucaccuucu

SEQ ID NO: 2043621 - RNA, 19 nt, Artificial Sequence
  Description of Artificial Sequence: Synthetic oligonucleotide
uccauuacaucaccuuucu

SEQ ID NO: 2043622 - RNA, 19 nt, Artificial Sequence
  Description of Artificial Sequence: Synthetic oligonucleotide
uuagugauacugagaaauc

SEQ ID NO: 2043623 - RNA, 19 nt, Artificial Sequence
  Description of Artificial Sequence: Synthetic oligonucleotide
ugaaccaaauuauucuuuu

SEQ ID NO: 2043624 - RNA, 19 nt, Artificial Sequence
  Description of Artificial Sequence: Synthetic oligonucleotide
uaacauccauuacaucacc

SEQ ID NO: 2043625 - RNA, 19 nt, Artificial Sequence
  Description of Artificial Sequence: Synthetic oligonucleotide
uguguagcagucacugcug

SEQ ID NO: 2043626 - RNA, 19 nt, Artificial Sequence
  Description of Artificial Sequence: Synthetic oligonucleotide
uagugauacugagaaauca

SEQ ID NO: 2043627 - RNA, 19 nt, Artificial Sequence
  Description of Artificial Sequence: Synthetic oligonucleotide
uucacuuguaaagauuggu

SEQ ID NO: 2043628 - RNA, 19 nt, Artificial Sequence
  Description of Artificial Sequence: Synthetic oligonucleotide
accuaaaggacugucaccu

SEQ ID NO: 2043629 - RNA, 19 nt, Artificial Sequence
  Description of Artificial Sequence: Synthetic oligonucleotide
aaaucauuuggcgaagauu

SEQ ID NO: 2043630 - RNA, 19 nt, Artificial Sequence
  Description of Artificial Sequence: Synthetic oligonucleotide
uuuaucaaugacaguucau

SEQ ID NO: 2043631 - RNA, 19 nt, Artificial Sequence
  Description of Artificial Sequence: Synthetic oligonucleotide
uguuagaaggaaagagaaa

SEQ ID NO: 2043632 - RNA, 19 nt, Artificial Sequence
  Description of Artificial Sequence: Synthetic oligonucleotide
guuaauggauuauucugca

SEQ ID NO: 2043633 - RNA, 19 nt, Artificial Sequence
  Description of Artificial Sequence: Synthetic oligonucleotide
acauaguuugaaggaaaac

SEQ ID NO: 2043634 - RNA, 19 nt, Artificial Sequence
  Description of Artificial Sequence: Synthetic oligonucleotide
ugaaggccuaauguaauca

SEQ ID NO: 2043635 - RNA, 19 nt, Artificial Sequence
  Description of Artificial Sequence: Synthetic oligonucleotide
gaagucuccuucauguccc

SEQ ID NO: 2043636 - RNA, 19 nt, Artificial Sequence
  Description of Artificial Sequence: Synthetic oligonucleotide
uucaguuacauaguuugaa

SEQ ID NO: 2043637 - RNA, 19 nt, Artificial Sequence
  Description of Artificial Sequence: Synthetic oligonucleotide
guacuugaccuguauuuag

SEQ ID NO: 2043638 - RNA, 19 nt, Artificial Sequence
  Description of Artificial Sequence: Synthetic oligonucleotide
agugagugaaggccuaaug

SEQ ID NO: 2043639 - RNA, 19 nt, Artificial Sequence
  Description of Artificial Sequence: Synthetic oligonucleotide
aaucacacuguggaggcga

SEQ ID NO: 2043640 - RNA, 19 nt, Artificial Sequence
  Description of Artificial Sequence: Synthetic oligonucleotide
agaaccuacauggucaccu

SEQ ID NO: 2043641 - RNA, 19 nt, Artificial Sequence
  Description of Artificial Sequence: Synthetic oligonucleotide
auaggauuuuaugugaaaa

SEQ ID NO: 2043642 - RNA, 19 nt, Artificial Sequence
  Description of Artificial Sequence: Synthetic oligonucleotide
uccuguuuauuauuggcua

SEQ ID NO: 2043643 - RNA, 19 nt, Artificial Sequence
  Description of Artificial Sequence: Synthetic oligonucleotide
cauccaauuuuguccauug

SEQ ID NO: 2043644 - RNA, 19 nt, Artificial Sequence
  Description of Artificial Sequence: Synthetic oligonucleotide
acuguuagaaggaaagaga

SEQ ID NO: 2043645 - RNA, 19 nt, Artificial Sequence
  Description of Artificial Sequence: Synthetic oligonucleotide
agaacaggaggucuuuaca

SEQ ID NO: 2043646 - RNA, 19 nt, Artificial Sequence
  Description of Artificial Sequence: Synthetic oligonucleotide
gaagacaguaagaaguuaa

SEQ ID NO: 2043647 - RNA, 19 nt, Artificial Sequence
  Description of Artificial Sequence: Synthetic oligonucleotide
auaaaagaacucuuccaua

SEQ ID NO: 2043648 - RNA, 19 nt, Artificial Sequence
  Description of Artificial Sequence: Synthetic oligonucleotide
ugaacggguaaagagccug

SEQ ID NO: 2043649 - RNA, 19 nt, Artificial Sequence
  Description of Artificial Sequence: Synthetic oligonucleotide
aaaccugagguuaauggau

SEQ ID NO: 2043650 - RNA, 19 nt, Artificial Sequence
  Description of Artificial Sequence: Synthetic oligonucleotide
uuaugugaaaaggaacuau

SEQ ID NO: 2043651 - RNA, 19 nt, Artificial Sequence
  Description of Artificial Sequence: Synthetic oligonucleotide
cugacagagaaccuacaug

SEQ ID NO: 2043652 - RNA, 19 nt, Artificial Sequence
  Description of Artificial Sequence: Synthetic oligonucleotide
gaaggccuaauguaaucac

SEQ ID NO: 2043653 - RNA, 19 nt, Artificial Sequence
  Description of Artificial Sequence: Synthetic oligonucleotide
gguuaauggauuauucugc

SEQ ID NO: 2043654 - RNA, 19 nt, Artificial Sequence
  Description of Artificial Sequence: Synthetic oligonucleotide
uuuccgcugcccaaugcag

SEQ ID NO: 2043655 - RNA, 19 nt, Artificial Sequence
  Description of Artificial Sequence: Synthetic oligonucleotide
aaaagaacucuuccauaua

SEQ ID NO: 2043656 - RNA, 19 nt, Artificial Sequence
  Description of Artificial Sequence: Synthetic oligonucleotide
cuguuagaaggaaagagaa

SEQ ID NO: 2043657 - RNA, 19 nt, Artificial Sequence
  Description of Artificial Sequence: Synthetic oligonucleotide
aucacugcauuucuccaug

SEQ ID NO: 2043658 - RNA, 19 nt, Artificial Sequence
  Description of Artificial Sequence: Synthetic oligonucleotide
acggguaaagagccuguac

SEQ ID NO: 2043659 - RNA, 19 nt, Artificial Sequence
  Description of Artificial Sequence: Synthetic oligonucleotide
uuuuccggcuuuucaauaa

SEQ ID NO: 2043660 - RNA, 19 nt, Artificial Sequence
  Description of Artificial Sequence: Synthetic oligonucleotide
cagagaaccuacaugguca

SEQ ID NO: 2043661 - RNA, 19 nt, Artificial Sequence
  Description of Artificial Sequence: Synthetic oligonucleotide
uucugcauaaugguaacau

SEQ ID NO: 2043662 - RNA, 19 nt, Artificial Sequence
  Description of Artificial Sequence: Synthetic oligonucleotide
gguuauugacaacugcugc

SEQ ID NO: 2043663 - RNA, 19 nt, Artificial Sequence
  Description of Artificial Sequence: Synthetic oligonucleotide
agaaaagauuaacacuuua

SEQ ID NO: 2043664 - RNA, 19 nt, Artificial Sequence
  Description of Artificial Sequence: Synthetic oligonucleotide
uugaaccaaauuauucuuu

SEQ ID NO: 2043665 - RNA, 19 nt, Artificial Sequence
  Description of Artificial Sequence: Synthetic oligonucleotide
uaccacaugcaguacuuga

SEQ ID NO: 2043666 - RNA, 19 nt, Artificial Sequence
  Description of Artificial Sequence: Synthetic oligonucleotide
cuaaaggacugucaccuuc

SEQ ID NO: 2043667 - RNA, 19 nt, Artificial Sequence
  Description of Artificial Sequence: Synthetic oligonucleotide
acauggucaccuaaaggac

SEQ ID NO: 2043668 - RNA, 19 nt, Artificial Sequence
  Description of Artificial Sequence: Synthetic oligonucleotide
cugaugaguaaucaagaca

SEQ ID NO: 2043669 - RNA, 19 nt, Artificial Sequence
  Description of Artificial Sequence: Synthetic oligonucleotide
gcgaagauucacuaucacg

SEQ ID NO: 2043670 - RNA, 19 nt, Artificial Sequence
  Description of Artificial Sequence: Synthetic oligonucleotide
agacaaauguuugacgaga

SEQ ID NO: 2043671 - RNA, 19 nt, Artificial Sequence
  Description of Artificial Sequence: Synthetic oligonucleotide
auuuccgcugcccaaugca

SEQ ID NO: 2043672 - RNA, 19 nt, Artificial Sequence
  Description of Artificial Sequence: Synthetic oligonucleotide
auguaaucacacuguggag

SEQ ID NO: 2043673 - RNA, 19 nt, Artificial Sequence
  Description of Artificial Sequence: Synthetic oligonucleotide
uuuaugugaaaaggaacua

SEQ ID NO: 2043674 - RNA, 19 nt, Artificial Sequence
  Description of Artificial Sequence: Synthetic oligonucleotide
gccuaauguaaucacacug

SEQ ID NO: 2043675 - RNA, 19 nt, Artificial Sequence
  Description of Artificial Sequence: Synthetic oligonucleotide
uguaccacaugcaguacuu

SEQ ID NO: 2043676 - RNA, 19 nt, Artificial Sequence
  Description of Artificial Sequence: Synthetic oligonucleotide
gauucacuaucacgaauga

SEQ ID NO: 2043677 - RNA, 19 nt, Artificial Sequence
  Description of Artificial Sequence: Synthetic oligonucleotide
cacucugggucauuuuccg

SEQ ID NO: 2043678 - RNA, 19 nt, Artificial Sequence
  Description of Artificial Sequence: Synthetic oligonucleotide
auaccaaggauugccagca

SEQ ID NO: 2043679 - RNA, 19 nt, Artificial Sequence
  Description of Artificial Sequence: Synthetic oligonucleotide
uggcgaagauucacuauca

SEQ ID NO: 2043680 - RNA, 19 nt, Artificial Sequence
  Description of Artificial Sequence: Synthetic oligonucleotide
augaguaaucaagacaaau

SEQ ID NO: 2043681 - RNA, 19 nt, Artificial Sequence
  Description of Artificial Sequence: Synthetic oligonucleotide
uugccauaauaccaaggau

SEQ ID NO: 2043682 - RNA, 19 nt, Artificial Sequence
  Description of Artificial Sequence: Synthetic oligonucleotide
acuuuccagugagugaagg

SEQ ID NO: 2043683 - RNA, 19 nt, Artificial Sequence
  Description of Artificial Sequence: Synthetic oligonucleotide
uuauugacaacugcugcua

SEQ ID NO: 2043684 - RNA, 19 nt, Artificial Sequence
  Description of Artificial Sequence: Synthetic oligonucleotide
accuguauuuagguuauug

SEQ ID NO: 2043685 - RNA, 19 nt, Artificial Sequence
  Description of Artificial Sequence: Synthetic oligonucleotide
uuuccggcuuuucaauaac

SEQ ID NO: 2043686 - RNA, 19 nt, Artificial Sequence
  Description of Artificial Sequence: Synthetic oligonucleotide
uacuuuagcauaugccaua

SEQ ID NO: 2043687 - RNA, 19 nt, Artificial Sequence
  Description of Artificial Sequence: Synthetic oligonucleotide
ugaccuguauuuagguuau

SEQ ID NO: 2043688 - RNA, 19 nt, Artificial Sequence
  Description of Artificial Sequence: Synthetic oligonucleotide
uuguucacuuguaaagauu

SEQ ID NO: 2043689 - RNA, 19 nt, Artificial Sequence
  Description of Artificial Sequence: Synthetic oligonucleotide
agcuguguagcagucacug

SEQ ID NO: 2043690 - RNA, 19 nt, Artificial Sequence
  Description of Artificial Sequence: Synthetic oligonucleotide
uccggcuuuucaauaacau

SEQ ID NO: 2043691 - RNA, 19 nt, Artificial Sequence
  Description of Artificial Sequence: Synthetic oligonucleotide
ugccuggugacuuugccau

SEQ ID NO: 2043692 - RNA, 19 nt, Artificial Sequence
  Description of Artificial Sequence: Synthetic oligonucleotide
aagaagacaguaagaaguu

SEQ ID NO: 2043693 - RNA, 19 nt, Artificial Sequence
  Description of Artificial Sequence: Synthetic oligonucleotide
ucugcauaaugguaacaua

SEQ ID NO: 2043694 - RNA, 19 nt, Artificial Sequence
  Description of Artificial Sequence: Synthetic oligonucleotide
acaugcaguacuugaccug

SEQ ID NO: 2043695 - RNA, 19 nt, Artificial Sequence
  Description of Artificial Sequence: Synthetic oligonucleotide
uuuuagugauacugagaaa

SEQ ID NO: 2043696 - RNA, 19 nt, Artificial Sequence
  Description of Artificial Sequence: Synthetic oligonucleotide
uuaauggauuauucugcau

SEQ ID NO: 2043697 - RNA, 19 nt, Artificial Sequence
  Description of Artificial Sequence: Synthetic oligonucleotide
guagcagucacugcugaug

SEQ ID NO: 2043698 - RNA, 19 nt, Artificial Sequence
  Description of Artificial Sequence: Synthetic oligonucleotide
accacaugcaguacuugac

SEQ ID NO: 2043699 - RNA, 19 nt, Artificial Sequence
  Description of Artificial Sequence: Synthetic oligonucleotide
auuuagucacagaaaagau

SEQ ID NO: 2043700 - RNA, 19 nt, Artificial Sequence
  Description of Artificial Sequence: Synthetic oligonucleotide
aaugccauuucugccuggu

SEQ ID NO: 2043701 - RNA, 19 nt, Artificial Sequence
  Description of Artificial Sequence: Synthetic oligonucleotide
guaaucaagacaaauguuu

SEQ ID NO: 2043702 - RNA, 19 nt, Artificial Sequence
  Description of Artificial Sequence: Synthetic oligonucleotide
cuugugcuuuuagugauac

SEQ ID NO: 2043703 - RNA, 19 nt, Artificial Sequence
  Description of Artificial Sequence: Synthetic oligonucleotide
acauccauuacaucaccuu

SEQ ID NO: 2043704 - RNA, 19 nt, Artificial Sequence
  Description of Artificial Sequence: Synthetic oligonucleotide
acugcugaugaguaaucaa

SEQ ID NO: 2043705 - RNA, 19 nt, Artificial Sequence
  Description of Artificial Sequence: Synthetic oligonucleotide
gacuuuaaaaugcuuguuu

SEQ ID NO: 2043706 - RNA, 19 nt, Artificial Sequence
  Description of Artificial Sequence: Synthetic oligonucleotide
aaaagcuguguagcaguca

SEQ ID NO: 2043707 - RNA, 19 nt, Artificial Sequence
  Description of Artificial Sequence: Synthetic oligonucleotide
uuuggcgaagauucacuau

SEQ ID NO: 2043708 - RNA, 19 nt, Artificial Sequence
  Description of Artificial Sequence: Synthetic oligonucleotide
aaggccuaauguaaucaca

SEQ ID NO: 2043709 - RNA, 19 nt, Artificial Sequence
  Description of Artificial Sequence: Synthetic oligonucleotide
ugcugcuaauuucucugac

SEQ ID NO: 2043710 - RNA, 19 nt, Artificial Sequence
  Description of Artificial Sequence: Synthetic oligonucleotide
uauuuagguuauugacaac

SEQ ID NO: 2043711 - RNA, 19 nt, Artificial Sequence
  Description of Artificial Sequence: Synthetic oligonucleotide
gagaaaucauuuggcgaag

SEQ ID NO: 2043712 - RNA, 19 nt, Artificial Sequence
  Description of Artificial Sequence: Synthetic oligonucleotide
auaauaccaaggauugcca

SEQ ID NO: 2043713 - RNA, 19 nt, Artificial Sequence
  Description of Artificial Sequence: Synthetic oligonucleotide
aucacgaaugaggaagucu

SEQ ID NO: 2043714 - RNA, 19 nt, Artificial Sequence
  Description of Artificial Sequence: Synthetic oligonucleotide
cauaugccauauagauagg

SEQ ID NO: 2043715 - RNA, 19 nt, Artificial Sequence
  Description of Artificial Sequence: Synthetic oligonucleotide
caccuaaaggacugucacc

SEQ ID NO: 2043716 - RNA, 19 nt, Artificial Sequence
  Description of Artificial Sequence: Synthetic oligonucleotide
guucacuuguaaagauugg

SEQ ID NO: 2043717 - RNA, 19 nt, Artificial Sequence
  Description of Artificial Sequence: Synthetic oligonucleotide
acuugaacuguuagaagga

SEQ ID NO: 2043718 - RNA, 19 nt, Artificial Sequence
  Description of Artificial Sequence: Synthetic oligonucleotide
auuauucugcauaauggua

SEQ ID NO: 2043719 - RNA, 19 nt, Artificial Sequence
  Description of Artificial Sequence: Synthetic oligonucleotide
guccauuguagcugccgcg

SEQ ID NO: 2043720 - RNA, 19 nt, Artificial Sequence
  Description of Artificial Sequence: Synthetic oligonucleotide
agugauacugagaaaucau

SEQ ID NO: 2043721 - RNA, 19 nt, Artificial Sequence
  Description of Artificial Sequence: Synthetic oligonucleotide
ucugggucauuuuccggcu

SEQ ID NO: 2043722 - RNA, 19 nt, Artificial Sequence
  Description of Artificial Sequence: Synthetic oligonucleotide
cacgaaugaggaagucucc

SEQ ID NO: 2043723 - RNA, 19 nt, Artificial Sequence
  Description of Artificial Sequence: Synthetic oligonucleotide
uuucuaguuuccuguuuau

SEQ ID NO: 2043724 - RNA, 19 nt, Artificial Sequence
  Description of Artificial Sequence: Synthetic oligonucleotide
caaauguuugacgagauau

SEQ ID NO: 2043725 - RNA, 19 nt, Artificial Sequence
  Description of Artificial Sequence: Synthetic oligonucleotide
auugacaacugcugcuaau

SEQ ID NO: 2043726 - RNA, 19 nt, Artificial Sequence
  Description of Artificial Sequence: Synthetic oligonucleotide
uucucugacagagaaccua

SEQ ID NO: 2043727 - RNA, 19 nt, Artificial Sequence
  Description of Artificial Sequence: Synthetic oligonucleotide
uuucucugacagagaaccu

SEQ ID NO: 2043728 - RNA, 19 nt, Artificial Sequence
  Description of Artificial Sequence: Synthetic oligonucleotide
ugcaguacuugaccuguau

SEQ ID NO: 2043729 - RNA, 19 nt, Artificial Sequence
  Description of Artificial Sequence: Synthetic oligonucleotide
gaauuuccgcugcccaaug

SEQ ID NO: 2043730 - RNA, 19 nt, Artificial Sequence
  Description of Artificial Sequence: Synthetic oligonucleotide
aaccuacauggucaccuaa

SEQ ID NO: 2043731 - RNA, 19 nt, Artificial Sequence
  Description of Artificial Sequence: Synthetic oligonucleotide
ugaauuuccgcugcccaau

SEQ ID NO: 2043732 - RNA, 19 nt, Artificial Sequence
  Description of Artificial Sequence: Synthetic oligonucleotide
gacuuugccauaauaccaa

SEQ ID NO: 2043733 - RNA, 19 nt, Artificial Sequence
  Description of Artificial Sequence: Synthetic oligonucleotide
ugacaacugcugcuaauuu

SEQ ID NO: 2043734 - RNA, 19 nt, Artificial Sequence
  Description of Artificial Sequence: Synthetic oligonucleotide
aguaaucaagacaaauguu

SEQ ID NO: 2043735 - RNA, 19 nt, Artificial Sequence
  Description of Artificial Sequence: Synthetic oligonucleotide
ucucaaaauugaguucuuc

SEQ ID NO: 2043736 - RNA, 19 nt, Artificial Sequence
  Description of Artificial Sequence: Synthetic oligonucleotide
aggcgaugguuccaaaccu

SEQ ID NO: 2043737 - RNA, 19 nt, Artificial Sequence
  Description of Artificial Sequence: Synthetic oligonucleotide
uauuggcuauuuagucaca

SEQ ID NO: 2043738 - RNA, 19 nt, Artificial Sequence
  Description of Artificial Sequence: Synthetic oligonucleotide
uaaugccauuucugccugg

SEQ ID NO: 2043739 - RNA, 19 nt, Artificial Sequence
  Description of Artificial Sequence: Synthetic oligonucleotide
uccaaaccugagguuaaug

SEQ ID NO: 2043740 - RNA, 19 nt, Artificial Sequence
  Description of Artificial Sequence: Synthetic oligonucleotide
gcugaacggguaaagagcc

SEQ ID NO: 2043741 - RNA, 19 nt, Artificial Sequence
  Description of Artificial Sequence: Synthetic oligonucleotide
gcugaugaguaaucaagac

SEQ ID NO: 2043742 - RNA, 19 nt, Artificial Sequence
  Description of Artificial Sequence: Synthetic oligonucleotide
aguuggacuuuaaaaugcu

SEQ ID NO: 2043743 - RNA, 19 nt, Artificial Sequence
  Description of Artificial Sequence: Synthetic oligonucleotide
caauaacauccauuacauc

SEQ ID NO: 2043744 - RNA, 19 nt, Artificial Sequence
  Description of Artificial Sequence: Synthetic oligonucleotide
aggauugccagcaaacuuu

SEQ ID NO: 2043745 - RNA, 19 nt, Artificial Sequence
  Description of Artificial Sequence: Synthetic oligonucleotide
uaaucacacuguggaggcg

SEQ ID NO: 2043746 - RNA, 19 nt, Artificial Sequence
  Description of Artificial Sequence: Synthetic oligonucleotide
auuuuccggcuuuucaaua

SEQ ID NO: 2043747 - RNA, 19 nt, Artificial Sequence
  Description of Artificial Sequence: Synthetic oligonucleotide
uggugacuuugccauaaua

SEQ ID NO: 2043748 - RNA, 19 nt, Artificial Sequence
  Description of Artificial Sequence: Synthetic oligonucleotide
ugccauugauuuuccugca

SEQ ID NO: 2043749 - RNA, 19 nt, Artificial Sequence
  Description of Artificial Sequence: Synthetic oligonucleotide
gauuaacacuuuacaagaa

SEQ ID NO: 2043750 - RNA, 19 nt, Artificial Sequence
  Description of Artificial Sequence: Synthetic oligonucleotide
ucacugcugaugaguaauc

SEQ ID NO: 2043751 - RNA, 19 nt, Artificial Sequence
  Description of Artificial Sequence: Synthetic oligonucleotide
augagcugaacggguaaag

SEQ ID NO: 2043752 - RNA, 19 nt, Artificial Sequence
  Description of Artificial Sequence: Synthetic oligonucleotide
ugcugaauuuccgcugccc

SEQ ID NO: 2043753 - RNA, 19 nt, Artificial Sequence
  Description of Artificial Sequence: Synthetic oligonucleotide
uaugggagaacaggagguc

SEQ ID NO: 2043754 - RNA, 19 nt, Artificial Sequence
  Description of Artificial Sequence: Synthetic oligonucleotide
uggaugagcugaacgggua

SEQ ID NO: 2043755 - RNA, 19 nt, Artificial Sequence
  Description of Artificial Sequence: Synthetic oligonucleotide
acaaauguuugacgagaua

SEQ ID NO: 2043756 - RNA, 19 nt, Artificial Sequence
  Description of Artificial Sequence: Synthetic oligonucleotide
ccaaggauugccagcaaac

SEQ ID NO: 2043757 - RNA, 19 nt, Artificial Sequence
  Description of Artificial Sequence: Synthetic oligonucleotide
aagaacucuuccauauaua

SEQ ID NO: 2043758 - RNA, 19 nt, Artificial Sequence
  Description of Artificial Sequence: Synthetic oligonucleotide
gugaaggccuaauguaauc

SEQ ID NO: 2043759 - RNA, 19 nt, Artificial Sequence
  Description of Artificial Sequence: Synthetic oligonucleotide
cuaugggagaacaggaggu

SEQ ID NO: 2043760 - RNA, 19 nt, Artificial Sequence
  Description of Artificial Sequence: Synthetic oligonucleotide
caugacgaucaccuuuguc

SEQ ID NO: 2043761 - RNA, 19 nt, Artificial Sequence
  Description of Artificial Sequence: Synthetic oligonucleotide
cuucaguuacauaguuuga

SEQ ID NO: 2043762 - RNA, 19 nt, Artificial Sequence
  Description of Artificial Sequence: Synthetic oligonucleotide
uuacaucaccuuucucaaa

SEQ ID NO: 2043763 - RNA, 19 nt, Artificial Sequence
  Description of Artificial Sequence: Synthetic oligonucleotide
gaaauguacuuuagcauau

SEQ ID NO: 2043764 - RNA, 19 nt, Artificial Sequence
  Description of Artificial Sequence: Synthetic oligonucleotide
agaaaucauuuggcgaaga

SEQ ID NO: 2043765 - RNA, 19 nt, Artificial Sequence
  Description of Artificial Sequence: Synthetic oligonucleotide
uggcaccaggccaaccaug

SEQ ID NO: 2043766 - RNA, 19 nt, Artificial Sequence
  Description of Artificial Sequence: Synthetic oligonucleotide
ggguaaagagccuguacca

SEQ ID NO: 2043767 - RNA, 19 nt, Artificial Sequence
  Description of Artificial Sequence: Synthetic oligonucleotide
aaaggacugucaccuucuu

SEQ ID NO: 2043768 - RNA, 19 nt, Artificial Sequence
  Description of Artificial Sequence: Synthetic oligonucleotide
gaaaucauuuggcgaagau

SEQ ID NO: 2043769 - RNA, 19 nt, Artificial Sequence
  Description of Artificial Sequence: Synthetic oligonucleotide
agauaggauuuuaugugaa

SEQ ID NO: 2043770 - RNA, 19 nt, Artificial Sequence
  Description of Artificial Sequence: Synthetic oligonucleotide
cggguaaagagccuguacc

SEQ ID NO: 2043771 - RNA, 19 nt, Artificial Sequence
  Description of Artificial Sequence: Synthetic oligonucleotide
auguuugacgagauauagu

SEQ ID NO: 2043772 - RNA, 19 nt, Artificial Sequence
  Description of Artificial Sequence: Synthetic oligonucleotide
uguaaagauuggugccuuu

SEQ ID NO: 2043773 - RNA, 19 nt, Artificial Sequence
  Description of Artificial Sequence: Synthetic oligonucleotide
agugaaggccuaauguaau

SEQ ID NO: 2043774 - RNA, 19 nt, Artificial Sequence
  Description of Artificial Sequence: Synthetic oligonucleotide
cuguguagcagucacugcu

SEQ ID NO: 2043775 - RNA, 19 nt, Artificial Sequence
  Description of Artificial Sequence: Synthetic oligonucleotide
augggagaacaggaggucu

SEQ ID NO: 2043776 - RNA, 19 nt, Artificial Sequence
  Description of Artificial Sequence: Synthetic oligonucleotide
uucucaaaauugaguucuu

SEQ ID NO: 2043777 - RNA, 19 nt, Artificial Sequence
  Description of Artificial Sequence: Synthetic oligonucleotide
ccuguauuuagguuauuga

SEQ ID NO: 2043778 - RNA, 19 nt, Artificial Sequence
  Description of Artificial Sequence: Synthetic oligonucleotide
aaccugagguuaauggauu

SEQ ID NO: 2043779 - RNA, 19 nt, Artificial Sequence
  Description of Artificial Sequence: Synthetic oligonucleotide
ccacaugcaguacuugacc

SEQ ID NO: 2043780 - RNA, 19 nt, Artificial Sequence
  Description of Artificial Sequence: Synthetic oligonucleotide
acaucaccuuucucaaaau

SEQ ID NO: 2043781 - RNA, 19 nt, Artificial Sequence
  Description of Artificial Sequence: Synthetic oligonucleotide
aggaacuaugggagaacag

SEQ ID NO: 2043782 - RNA, 19 nt, Artificial Sequence
  Description of Artificial Sequence: Synthetic oligonucleotide
cacugcauuucuccaugac

SEQ ID NO: 2043783 - RNA, 19 nt, Artificial Sequence
  Description of Artificial Sequence: Synthetic oligonucleotide
uuguaaagauuggugccuu

SEQ ID NO: 2043784 - RNA, 19 nt, Artificial Sequence
  Description of Artificial Sequence: Synthetic oligonucleotide
uucuaguuuccuguuuauu

SEQ ID NO: 2043785 - RNA, 19 nt, Artificial Sequence
  Description of Artificial Sequence: Synthetic oligonucleotide
caccuuugucccuuuuauc

SEQ ID NO: 2043786 - RNA, 19 nt, Artificial Sequence
  Description of Artificial Sequence: Synthetic oligonucleotide
gucaccuaaaggacuguca

SEQ ID NO: 2043787 - RNA, 19 nt, Artificial Sequence
  Description of Artificial Sequence: Synthetic oligonucleotide
gguaaagagccuguaccac

SEQ ID NO: 2043788 - RNA, 19 nt, Artificial Sequence
  Description of Artificial Sequence: Synthetic oligonucleotide
cuuguucacuuguaaagau

SEQ ID NO: 2043789 - RNA, 19 nt, Artificial Sequence
  Description of Artificial Sequence: Synthetic oligonucleotide
gauugccagcaaacuuucc

SEQ ID NO: 2043790 - RNA, 19 nt, Artificial Sequence
  Description of Artificial Sequence: Synthetic oligonucleotide
gcugcuaauuucucugaca

SEQ ID NO: 2043791 - RNA, 19 nt, Artificial Sequence
  Description of Artificial Sequence: Synthetic oligonucleotide
cuuguaaagauuggugccu

SEQ ID NO: 2043792 - RNA, 19 nt, Artificial Sequence
  Description of Artificial Sequence: Synthetic oligonucleotide
uaucacgaaugaggaaguc

SEQ ID NO: 2043793 - RNA, 19 nt, Artificial Sequence
  Description of Artificial Sequence: Synthetic oligonucleotide
caguacuugaccuguauuu

SEQ ID NO: 2043794 - RNA, 19 nt, Artificial Sequence
  Description of Artificial Sequence: Synthetic oligonucleotide
cauggucaccuaaaggacu

SEQ ID NO: 2043795 - RNA, 19 nt, Artificial Sequence
  Description of Artificial Sequence: Synthetic oligonucleotide
accugagguuaauggauua

SEQ ID NO: 2043796 - RNA, 19 nt, Artificial Sequence
  Description of Artificial Sequence: Synthetic oligonucleotide
gaugaguaaucaagacaaa

SEQ ID NO: 2043797 - RNA, 19 nt, Artificial Sequence
  Description of Artificial Sequence: Synthetic oligonucleotide
aggucuuuacaaggaaaau

SEQ ID NO: 2043798 - RNA, 19 nt, Artificial Sequence
  Description of Artificial Sequence: Synthetic oligonucleotide
gaugagcugaacggguaaa

SEQ ID NO: 2043799 - RNA, 19 nt, Artificial Sequence
  Description of Artificial Sequence: Synthetic oligonucleotide
agcauaugccauauagaua

SEQ ID NO: 2043800 - RNA, 19 nt, Artificial Sequence
  Description of Artificial Sequence: Synthetic oligonucleotide
uuuuggcaccaggccaacc

SEQ ID NO: 2043801 - RNA, 19 nt, Artificial Sequence
  Description of Artificial Sequence: Synthetic oligonucleotide
gguuccaaaccugagguua

SEQ ID NO: 2043802 - RNA, 19 nt, Artificial Sequence
  Description of Artificial Sequence: Synthetic oligonucleotide
cacaugcaguacuugaccu

SEQ ID NO: 2043803 - RNA, 19 nt, Artificial Sequence
  Description of Artificial Sequence: Synthetic oligonucleotide
ggaggcgaugguuccaaac

SEQ ID NO: 2043804 - RNA, 19 nt, Artificial Sequence
  Description of Artificial Sequence: Synthetic oligonucleotide
ggugccuggugacuuugcc

SEQ ID NO: 2043805 - RNA, 19 nt, Artificial Sequence
  Description of Artificial Sequence: Synthetic oligonucleotide
aucauuuggcgaagauuca

SEQ ID NO: 2043806 - RNA, 19 nt, Artificial Sequence
  Description of Artificial Sequence: Synthetic oligonucleotide
cuugaacuguuagaaggaa

SEQ ID NO: 2043807 - RNA, 19 nt, Artificial Sequence
  Description of Artificial Sequence: Synthetic oligonucleotide
guagcugccgcgccaccac

SEQ ID NO: 2043808 - RNA, 19 nt, Artificial Sequence
  Description of Artificial Sequence: Synthetic oligonucleotide
caacugcugcuaauuucuc

SEQ ID NO: 2043809 - RNA, 19 nt, Artificial Sequence
  Description of Artificial Sequence: Synthetic oligonucleotide
cuaucacgaaugaggaagu

SEQ ID NO: 2043810 - RNA, 19 nt, Artificial Sequence
  Description of Artificial Sequence: Synthetic oligonucleotide
aacggguaaagagccugua

SEQ ID NO: 2043811 - RNA, 19 nt, Artificial Sequence
  Description of Artificial Sequence: Synthetic oligonucleotide
ccuuucucaaaauugaguu

SEQ ID NO: 2043812 - RNA, 19 nt, Artificial Sequence
  Description of Artificial Sequence: Synthetic oligonucleotide
caucauuggaugagcugaa

SEQ ID NO: 2043813 - RNA, 19 nt, Artificial Sequence
  Description of Artificial Sequence: Synthetic oligonucleotide
gaaccuacauggucaccua

SEQ ID NO: 2043814 - RNA, 19 nt, Artificial Sequence
  Description of Artificial Sequence: Synthetic oligonucleotide
gaaaaccauccaauuuugu

SEQ ID NO: 2043815 - RNA, 19 nt, Artificial Sequence
  Description of Artificial Sequence: Synthetic oligonucleotide
augcaguaaacagucucuu

SEQ ID NO: 2043816 - RNA, 19 nt, Artificial Sequence
  Description of Artificial Sequence: Synthetic oligonucleotide
guaccacaugcaguacuug

SEQ ID NO: 2043817 - RNA, 19 nt, Artificial Sequence
  Description of Artificial Sequence: Synthetic oligonucleotide
cauguccccuuucauuuaa

SEQ ID NO: 2043818 - RNA, 19 nt, Artificial Sequence
  Description of Artificial Sequence: Synthetic oligonucleotide
gacaaauguuugacgagau

SEQ ID NO: 2043819 - RNA, 19 nt, Artificial Sequence
  Description of Artificial Sequence: Synthetic oligonucleotide
ggcgaagauucacuaucac

SEQ ID NO: 2043820 - RNA, 19 nt, Artificial Sequence
  Description of Artificial Sequence: Synthetic oligonucleotide
gcuuuuagugauacugaga

SEQ ID NO: 2043821 - RNA, 19 nt, Artificial Sequence
  Description of Artificial Sequence: Synthetic oligonucleotide
cauuuuccggcuuuucaau

SEQ ID NO: 2043822 - RNA, 19 nt, Artificial Sequence
  Description of Artificial Sequence: Synthetic oligonucleotide
ccggcuuuucaauaacauc

SEQ ID NO: 2043823 - RNA, 19 nt, Artificial Sequence
  Description of Artificial Sequence: Synthetic oligonucleotide
auggauuauucugcauaau

SEQ ID NO: 2043824 - RNA, 19 nt, Artificial Sequence
  Description of Artificial Sequence: Synthetic oligonucleotide
uaccaaggauugccagcaa

SEQ ID NO: 2043825 - RNA, 19 nt, Artificial Sequence
  Description of Artificial Sequence: Synthetic oligonucleotide
cauccauuacaucaccuuu

SEQ ID NO: 2043826 - RNA, 19 nt, Artificial Sequence
  Description of Artificial Sequence: Synthetic oligonucleotide
cacugcugaugaguaauca

SEQ ID NO: 2043827 - RNA, 19 nt, Artificial Sequence
  Description of Artificial Sequence: Synthetic oligonucleotide
cuuugucccuuuuaucaau

SEQ ID NO: 2043828 - RNA, 19 nt, Artificial Sequence
  Description of Artificial Sequence: Synthetic oligonucleotide
ggcuauuuagucacagaaa

SEQ ID NO: 2043829 - RNA, 19 nt, Artificial Sequence
  Description of Artificial Sequence: Synthetic oligonucleotide
guuccaaaccugagguuaa

SEQ ID NO: 2043830 - RNA, 19 nt, Artificial Sequence
  Description of Artificial Sequence: Synthetic oligonucleotide
acgaucaccuuugucccuu

SEQ ID NO: 2043831 - RNA, 19 nt, Artificial Sequence
  Description of Artificial Sequence: Synthetic oligonucleotide
cuguaccacaugcaguacu

SEQ ID NO: 2043832 - RNA, 19 nt, Artificial Sequence
  Description of Artificial Sequence: Synthetic oligonucleotide
cacuaucacgaaugaggaa

SEQ ID NO: 2043833 - RNA, 19 nt, Artificial Sequence
  Description of Artificial Sequence: Synthetic oligonucleotide
ggcgaugguuccaaaccug

SEQ ID NO: 2043834 - RNA, 19 nt, Artificial Sequence
  Description of Artificial Sequence: Synthetic oligonucleotide
uuccaaaccugagguuaau

SEQ ID NO: 2043835 - RNA, 19 nt, Artificial Sequence
  Description of Artificial Sequence: Synthetic oligonucleotide
ggauugccagcaaacuuuc

SEQ ID NO: 2043836 - RNA, 19 nt, Artificial Sequence
  Description of Artificial Sequence: Synthetic oligonucleotide
caaugacaguucauccucu

SEQ ID NO: 2043837 - RNA, 19 nt, Artificial Sequence
  Description of Artificial Sequence: Synthetic oligonucleotide
cuugaccuguauuuagguu

SEQ ID NO: 2043838 - RNA, 19 nt, Artificial Sequence
  Description of Artificial Sequence: Synthetic oligonucleotide
gugauacugagaaaucauu

SEQ ID NO: 2043839 - RNA, 19 nt, Artificial Sequence
  Description of Artificial Sequence: Synthetic oligonucleotide
caaggauugccagcaaacu

SEQ ID NO: 2043840 - RNA, 19 nt, Artificial Sequence
  Description of Artificial Sequence: Synthetic oligonucleotide
gacagagaaccuacauggu

SEQ ID NO: 2043841 - RNA, 19 nt, Artificial Sequence
  Description of Artificial Sequence: Synthetic oligonucleotide
ggaugagcugaacggguaa

SEQ ID NO: 2043842 - RNA, 19 nt, Artificial Sequence
  Description of Artificial Sequence: Synthetic oligonucleotide
ccccuuucauuuaaugcca

SEQ ID NO: 2043843 - RNA, 19 nt, Artificial Sequence
  Description of Artificial Sequence: Synthetic oligonucleotide
uggucaccuaaaggacugu

SEQ ID NO: 2043844 - RNA, 19 nt, Artificial Sequence
  Description of Artificial Sequence: Synthetic oligonucleotide
accauccaauuuuguccau

SEQ ID NO: 2043845 - RNA, 19 nt, Artificial Sequence
  Description of Artificial Sequence: Synthetic oligonucleotide
caucacugcauuucuccau

SEQ ID NO: 2043846 - RNA, 19 nt, Artificial Sequence
  Description of Artificial Sequence: Synthetic oligonucleotide
gacgaucaccuuugucccu

SEQ ID NO: 2043847 - RNA, 19 nt, Artificial Sequence
  Description of Artificial Sequence: Synthetic oligonucleotide
ccacccaucacugcauuuc

SEQ ID NO: 2043848 - RNA, 19 nt, Artificial Sequence
  Description of Artificial Sequence: Synthetic oligonucleotide
caucaccuuucucaaaauu

SEQ ID NO: 2043849 - RNA, 19 nt, Artificial Sequence
  Description of Artificial Sequence: Synthetic oligonucleotide
gaacggguaaagagccugu

SEQ ID NO: 2043850 - RNA, 19 nt, Artificial Sequence
  Description of Artificial Sequence: Synthetic oligonucleotide
ggucaccuaaaggacuguc

SEQ ID NO: 2043851 - RNA, 19 nt, Artificial Sequence
  Description of Artificial Sequence: Synthetic oligonucleotide
uggaggcgaugguuccaaa

SEQ ID NO: 2043852 - RNA, 19 nt, Artificial Sequence
  Description of Artificial Sequence: Synthetic oligonucleotide
guuugacgagauauaguuu

SEQ ID NO: 2043853 - RNA, 19 nt, Artificial Sequence
  Description of Artificial Sequence: Synthetic oligonucleotide
gcgaugguuccaaaccuga

SEQ ID NO: 2043854 - RNA, 19 nt, Artificial Sequence
  Description of Artificial Sequence: Synthetic oligonucleotide
cugagguuaauggauuauu

SEQ ID NO: 2043855 - RNA, 19 nt, Artificial Sequence
  Description of Artificial Sequence: Synthetic oligonucleotide
ggccuaauguaaucacacu

SEQ ID NO: 2043856 - RNA, 19 nt, Artificial Sequence
  Description of Artificial Sequence: Synthetic oligonucleotide
guggaggcgaugguuccaa

SEQ ID NO: 2043857 - RNA, 19 nt, Artificial Sequence
  Description of Artificial Sequence: Synthetic oligonucleotide
aucacacuguggaggcgau

SEQ ID NO: 2043858 - RNA, 19 nt, Artificial Sequence
  Description of Artificial Sequence: Synthetic oligonucleotide
cugaacggguaaagagccu

SEQ ID NO: 2043859 - RNA, 19 nt, Artificial Sequence
  Description of Artificial Sequence: Synthetic oligonucleotide
gcccaaugcaguaaacagu

SEQ ID NO: 2043860 - RNA, 19 nt, Artificial Sequence
  Description of Artificial Sequence: Synthetic oligonucleotide
auguccccuuucauuuaau

SEQ ID NO: 2043861 - RNA, 19 nt, Artificial Sequence
  Description of Artificial Sequence: Synthetic oligonucleotide
cucuuucaguuggacuuua

SEQ ID NO: 2043862 - RNA, 19 nt, Artificial Sequence
  Description of Artificial Sequence: Synthetic oligonucleotide
gcaguacuugaccuguauu

SEQ ID NO: 2043863 - RNA, 19 nt, Artificial Sequence
  Description of Artificial Sequence: Synthetic oligonucleotide
caaccaugccauugauuuu

SEQ ID NO: 2043864 - RNA, 19 nt, Artificial Sequence
  Description of Artificial Sequence: Synthetic oligonucleotide
ccauugauuuuccugcauu

SEQ ID NO: 2043865 - RNA, 19 nt, Artificial Sequence
  Description of Artificial Sequence: Synthetic oligonucleotide
ggagaacaggaggucuuua

SEQ ID NO: 2043866 - RNA, 19 nt, Artificial Sequence
  Description of Artificial Sequence: Synthetic oligonucleotide
cccuugugcuuuuagugau

SEQ ID NO: 2043867 - RNA, 19 nt, Artificial Sequence
  Description of Artificial Sequence: Synthetic oligonucleotide
cuggugacuuugccauaau

SEQ ID NO: 2043868 - RNA, 19 nt, Artificial Sequence
  Description of Artificial Sequence: Synthetic oligonucleotide
ggccaaccaugccauugau

SEQ ID NO: 2043869 - RNA, 19 nt, Artificial Sequence
  Description of Artificial Sequence: Synthetic oligonucleotide
cugggucauuuuccggcuu

SEQ ID NO: 2043870 - RNA, 19 nt, Artificial Sequence
  Description of Artificial Sequence: Synthetic oligonucleotide
cccuuuuaucaaugacagu

SEQ ID NO: 2043871 - RNA, 19 nt, Artificial Sequence
  Description of Artificial Sequence: Synthetic oligonucleotide
ccugagguuaauggauuau

SEQ ID NO: 2043872 - RNA, 19 nt, Artificial Sequence
  Description of Artificial Sequence: Synthetic oligonucleotide
caccacucugggucauuuu

SEQ ID NO: 2043873 - RNA, 19 nt, Artificial Sequence
  Description of Artificial Sequence: Synthetic oligonucleotide
cgccaccacccaucacugc

SEQ ID NO: 2043874 - RNA, 19 nt, Artificial Sequence
  Description of Artificial Sequence: Synthetic oligonucleotide
gggagaacaggaggucuuu

SEQ ID NO: 2043875 - RNA, 19 nt, Artificial Sequence
  Description of Artificial Sequence: Synthetic oligonucleotide
cccuuucauuuaaugccau

SEQ ID NO: 2043876 - RNA, 19 nt, Artificial Sequence
  Description of Artificial Sequence: Synthetic oligonucleotide
gaccuguauuuagguuauu

SEQ ID NO: 2043877 - RNA, 19 nt, Artificial Sequence
  Description of Artificial Sequence: Synthetic oligonucleotide
ccaugccauugauuuuccu

SEQ ID NO: 2043878 - RNA, 19 nt, Artificial Sequence
  Description of Artificial Sequence: Synthetic oligonucleotide
ccuaaaggacugucaccuu

SEQ ID NO: 2043879 - RNA, 19 nt, Artificial Sequence
  Description of Artificial Sequence: Synthetic oligonucleotide
ccaccacccaucacugcau

SEQ ID NO: 2043880 - RNA, 19 nt, Artificial Sequence
  Description of Artificial Sequence: Synthetic oligonucleotide
ccauccaauuuuguccauu

SEQ ID NO: 2043881 - RNA, 19 nt, Artificial Sequence
  Description of Artificial Sequence: Synthetic oligonucleotide
ccauuucugccuggugccu

SEQ ID NO: 2043882 - RNA, 19 nt, Artificial Sequence
  Description of Artificial Sequence: Synthetic oligonucleotide
ccaugacgaucaccuuugu

SEQ ID NO: 2043883 - RNA, 19 nt, Artificial Sequence
  Description of Artificial Sequence: Synthetic oligonucleotide
cgaucaccuuugucccuuu

SEQ ID NO: 2043884 - RNA, 19 nt, Artificial Sequence
  Description of Artificial Sequence: Synthetic oligonucleotide
uguacaaucaaccugucag

SEQ ID NO: 2043885 - RNA, 19 nt, Artificial Sequence
  Description of Artificial Sequence: Synthetic oligonucleotide
uuuaacuguacaaucaacc

SEQ ID NO: 2043886 - RNA, 19 nt, Artificial Sequence
  Description of Artificial Sequence: Synthetic oligonucleotide
ucaauaauuuauuuaacug

SEQ ID NO: 2043887 - RNA, 19 nt, Artificial Sequence
  Description of Artificial Sequence: Synthetic oligonucleotide
gauccuuauuuucagaggg

SEQ ID NO: 2043888 - RNA, 19 nt, Artificial Sequence
  Description of Artificial Sequence: Synthetic oligonucleotide
aauugagauccuuauuuuc

SEQ ID NO: 2043889 - RNA, 19 nt, Artificial Sequence
  Description of Artificial Sequence: Synthetic oligonucleotide
uuauuuaacuguacaauca

SEQ ID NO: 2043890 - RNA, 19 nt, Artificial Sequence
  Description of Artificial Sequence: Synthetic oligonucleotide
ucaaggaugagaacaauca

SEQ ID NO: 2043891 - RNA, 19 nt, Artificial Sequence
  Description of Artificial Sequence: Synthetic oligonucleotide
aucaaguucaaauugagau

SEQ ID NO: 2043892 - RNA, 19 nt, Artificial Sequence
  Description of Artificial Sequence: Synthetic oligonucleotide
uaauuuauuuaacuguaca

SEQ ID NO: 2043893 - RNA, 19 nt, Artificial Sequence
  Description of Artificial Sequence: Synthetic oligonucleotide
uaaguuaucucaauaauuu

SEQ ID NO: 2043894 - RNA, 19 nt, Artificial Sequence
  Description of Artificial Sequence: Synthetic oligonucleotide
uuuauuuaacuguacaauc

SEQ ID NO: 2043895 - RNA, 19 nt, Artificial Sequence
  Description of Artificial Sequence: Synthetic oligonucleotide
cugaguuucuccuaggagg

SEQ ID NO: 2043896 - RNA, 19 nt, Artificial Sequence
  Description of Artificial Sequence: Synthetic oligonucleotide
aucucaauaauuuauuuaa

SEQ ID NO: 2043897 - RNA, 19 nt, Artificial Sequence
  Description of Artificial Sequence: Synthetic oligonucleotide
agcucauaggaucacaggg

SEQ ID NO: 2043898 - RNA, 19 nt, Artificial Sequence
  Description of Artificial Sequence: Synthetic oligonucleotide
ugucauuccauccaugcca

SEQ ID NO: 2043899 - RNA, 19 nt, Artificial Sequence
  Description of Artificial Sequence: Synthetic oligonucleotide
caaguucaaauugagaucc

SEQ ID NO: 2043900 - RNA, 19 nt, Artificial Sequence
  Description of Artificial Sequence: Synthetic oligonucleotide
aagacguugucugucauuc

SEQ ID NO: 2043901 - RNA, 19 nt, Artificial Sequence
  Description of Artificial Sequence: Synthetic oligonucleotide
gagauccuuauuuucagag

SEQ ID NO: 2043902 - RNA, 19 nt, Artificial Sequence
  Description of Artificial Sequence: Synthetic oligonucleotide
uuaacuguacaaucaaccu

SEQ ID NO: 2043903 - RNA, 19 nt, Artificial Sequence
  Description of Artificial Sequence: Synthetic oligonucleotide
aauaauuuauuuaacugua

SEQ ID NO: 2043904 - RNA, 19 nt, Artificial Sequence
  Description of Artificial Sequence: Synthetic oligonucleotide
uaacuguacaaucaaccug

SEQ ID NO: 2043905 - RNA, 19 nt, Artificial Sequence
  Description of Artificial Sequence: Synthetic oligonucleotide
aaggaugagaacaaucaag

SEQ ID NO: 2043906 - RNA, 19 nt, Artificial Sequence
  Description of Artificial Sequence: Synthetic oligonucleotide
uauuuaacuguacaaucaa

SEQ ID NO: 2043907 - RNA, 19 nt, Artificial Sequence
  Description of Artificial Sequence: Synthetic oligonucleotide
aacuguacaaucaaccugu

SEQ ID NO: 2043908 - RNA, 19 nt, Artificial Sequence
  Description of Artificial Sequence: Synthetic oligonucleotide
ucugucauuccauccaugc

SEQ ID NO: 2043909 - RNA, 19 nt, Artificial Sequence
  Description of Artificial Sequence: Synthetic oligonucleotide
ucaaccugucagaucaagg

SEQ ID NO: 2043910 - RNA, 19 nt, Artificial Sequence
  Description of Artificial Sequence: Synthetic oligonucleotide
augagaacaaucaaguuca

SEQ ID NO: 2043911 - RNA, 19 nt, Artificial Sequence
  Description of Artificial Sequence: Synthetic oligonucleotide
caaucaaccugucagauca

SEQ ID NO: 2043912 - RNA, 19 nt, Artificial Sequence
  Description of Artificial Sequence: Synthetic oligonucleotide
ugagcucauaggaucacag

SEQ ID NO: 2043913 - RNA, 19 nt, Artificial Sequence
  Description of Artificial Sequence: Synthetic oligonucleotide
ugaguuucuccuaggagga

SEQ ID NO: 2043914 - RNA, 19 nt, Artificial Sequence
  Description of Artificial Sequence: Synthetic oligonucleotide
agauccuuauuuucagagg

SEQ ID NO: 2043915 - RNA, 19 nt, Artificial Sequence
  Description of Artificial Sequence: Synthetic oligonucleotide
auuuauuuaacuguacaau

SEQ ID NO: 2043916 - RNA, 19 nt, Artificial Sequence
  Description of Artificial Sequence: Synthetic oligonucleotide
aaauugagauccuuauuuu

SEQ ID NO: 2043917 - RNA, 19 nt, Artificial Sequence
  Description of Artificial Sequence: Synthetic oligonucleotide
ucaaguucaaauugagauc

SEQ ID NO: 2043918 - RNA, 19 nt, Artificial Sequence
  Description of Artificial Sequence: Synthetic oligonucleotide
uucaaauugagauccuuau

SEQ ID NO: 2043919 - RNA, 19 nt, Artificial Sequence
  Description of Artificial Sequence: Synthetic oligonucleotide
uaucucaauaauuuauuua

SEQ ID NO: 2043920 - RNA, 19 nt, Artificial Sequence
  Description of Artificial Sequence: Synthetic oligonucleotide
uugagauccuuauuuucag

SEQ ID NO: 2043921 - RNA, 19 nt, Artificial Sequence
  Description of Artificial Sequence: Synthetic oligonucleotide
auaauuuauuuaacuguac

SEQ ID NO: 2043922 - RNA, 19 nt, Artificial Sequence
  Description of Artificial Sequence: Synthetic oligonucleotide
ucucaauaauuuauuuaac

SEQ ID NO: 2043923 - RNA, 19 nt, Artificial Sequence
  Description of Artificial Sequence: Synthetic oligonucleotide
caaucaaguucaaauugag

SEQ ID NO: 2043924 - RNA, 19 nt, Artificial Sequence
  Description of Artificial Sequence: Synthetic oligonucleotide
auuguuuguacccgcggag

SEQ ID NO: 2043925 - RNA, 19 nt, Artificial Sequence
  Description of Artificial Sequence: Synthetic oligonucleotide
ugucagaucaaggaugaga

SEQ ID NO: 2043926 - RNA, 19 nt, Artificial Sequence
  Description of Artificial Sequence: Synthetic oligonucleotide
cagacagcugucuucacgc

SEQ ID NO: 2043927 - RNA, 19 nt, Artificial Sequence
  Description of Artificial Sequence: Synthetic oligonucleotide
auuuaacuguacaaucaac

SEQ ID NO: 2043928 - RNA, 19 nt, Artificial Sequence
  Description of Artificial Sequence: Synthetic oligonucleotide
uuaucucaauaauuuauuu

SEQ ID NO: 2043929 - RNA, 19 nt, Artificial Sequence
  Description of Artificial Sequence: Synthetic oligonucleotide
uuuguacccgcggaggagg

SEQ ID NO: 2043930 - RNA, 19 nt, Artificial Sequence
  Description of Artificial Sequence: Synthetic oligonucleotide
ucuccuaggaggaggcucc

SEQ ID NO: 2043931 - RNA, 19 nt, Artificial Sequence
  Description of Artificial Sequence: Synthetic oligonucleotide
aaguuaucucaauaauuua

SEQ ID NO: 2043932 - RNA, 19 nt, Artificial Sequence
  Description of Artificial Sequence: Synthetic oligonucleotide
acaaucaaccugucagauc

SEQ ID NO: 2043933 - RNA, 19 nt, Artificial Sequence
  Description of Artificial Sequence: Synthetic oligonucleotide
aguuaucucaauaauuuau

SEQ ID NO: 2043934 - RNA, 19 nt, Artificial Sequence
  Description of Artificial Sequence: Synthetic oligonucleotide
aucaaggaugagaacaauc

SEQ ID NO: 2043935 - RNA, 19 nt, Artificial Sequence
  Description of Artificial Sequence: Synthetic oligonucleotide
aaccugucagaucaaggau

SEQ ID NO: 2043936 - RNA, 19 nt, Artificial Sequence
  Description of Artificial Sequence: Synthetic oligonucleotide
gagcucauaggaucacagg

SEQ ID NO: 2043937 - RNA, 19 nt, Artificial Sequence
  Description of Artificial Sequence: Synthetic oligonucleotide
caggaaggcaccaccagag

SEQ ID NO: 2043938 - RNA, 19 nt, Artificial Sequence
  Description of Artificial Sequence: Synthetic oligonucleotide
aguuucuccuaggaggagg

SEQ ID NO: 2043939 - RNA, 19 nt, Artificial Sequence
  Description of Artificial Sequence: Synthetic oligonucleotide
aaucaaguucaaauugaga

SEQ ID NO: 2043940 - RNA, 19 nt, Artificial Sequence
  Description of Artificial Sequence: Synthetic oligonucleotide
uuguuuguacccgcggagg

SEQ ID NO: 2043941 - RNA, 19 nt, Artificial Sequence
  Description of Artificial Sequence: Synthetic oligonucleotide
gaggcucccaucgucaggg

SEQ ID NO: 2043942 - RNA, 19 nt, Artificial Sequence
  Description of Artificial Sequence: Synthetic oligonucleotide
uccuuauuuucagagggga

SEQ ID NO: 2043943 - RNA, 19 nt, Artificial Sequence
  Description of Artificial Sequence: Synthetic oligonucleotide
uguuuguacccgcggagga

SEQ ID NO: 2043944 - RNA, 19 nt, Artificial Sequence
  Description of Artificial Sequence: Synthetic oligonucleotide
cagaucaaggaugagaaca

SEQ ID NO: 2043945 - RNA, 19 nt, Artificial Sequence
  Description of Artificial Sequence: Synthetic oligonucleotide
cucaauaauuuauuuaacu

SEQ ID NO: 2043946 - RNA, 19 nt, Artificial Sequence
  Description of Artificial Sequence: Synthetic oligonucleotide
ucaaauugagauccuuauu

SEQ ID NO: 2043947 - RNA, 19 nt, Artificial Sequence
  Description of Artificial Sequence: Synthetic oligonucleotide
gauuguuuguacccgcgga

SEQ ID NO: 2043948 - RNA, 19 nt, Artificial Sequence
  Description of Artificial Sequence: Synthetic oligonucleotide
acaaucaaguucaaauuga

SEQ ID NO: 2043949 - RNA, 19 nt, Artificial Sequence
  Description of Artificial Sequence: Synthetic oligonucleotide
uucacgcuggagcuggagc

SEQ ID NO: 2043950 - RNA, 19 nt, Artificial Sequence
  Description of Artificial Sequence: Synthetic oligonucleotide
uccuccucccuucugccag

SEQ ID NO: 2043951 - RNA, 19 nt, Artificial Sequence
  Description of Artificial Sequence: Synthetic oligonucleotide
gacguugucugucauucca

SEQ ID NO: 2043952 - RNA, 19 nt, Artificial Sequence
  Description of Artificial Sequence: Synthetic oligonucleotide
ucacgcuggagcuggagca

SEQ ID NO: 2043953 - RNA, 19 nt, Artificial Sequence
  Description of Artificial Sequence: Synthetic oligonucleotide
cuucugccaggucagggcg

SEQ ID NO: 2043954 - RNA, 19 nt, Artificial Sequence
  Description of Artificial Sequence: Synthetic oligonucleotide
caaccugucagaucaagga

SEQ ID NO: 2043955 - RNA, 19 nt, Artificial Sequence
  Description of Artificial Sequence: Synthetic oligonucleotide
ugagauccuuauuuucaga

SEQ ID NO: 2043956 - RNA, 19 nt, Artificial Sequence
  Description of Artificial Sequence: Synthetic oligonucleotide
guaggcgauuguuuguacc

SEQ ID NO: 2043957 - RNA, 19 nt, Artificial Sequence
  Description of Artificial Sequence: Synthetic oligonucleotide
caaauugagauccuuauuu

SEQ ID NO: 2043958 - RNA, 19 nt, Artificial Sequence
  Description of Artificial Sequence: Synthetic oligonucleotide
agacguugucugucauucc

SEQ ID NO: 2043959 - RNA, 19 nt, Artificial Sequence
  Description of Artificial Sequence: Synthetic oligonucleotide
gucagaucaaggaugagaa

SEQ ID NO: 2043960 - RNA, 19 nt, Artificial Sequence
  Description of Artificial Sequence: Synthetic oligonucleotide
augccagacagcugucuuc

SEQ ID NO: 2043961 - RNA, 19 nt, Artificial Sequence
  Description of Artificial Sequence: Synthetic oligonucleotide
cauuccauccaugccagac

SEQ ID NO: 2043962 - RNA, 19 nt, Artificial Sequence
  Description of Artificial Sequence: Synthetic oligonucleotide
gacagcugucuucacgcug

SEQ ID NO: 2043963 - RNA, 19 nt, Artificial Sequence
  Description of Artificial Sequence: Synthetic oligonucleotide
cugucauuccauccaugcc

SEQ ID NO: 2043964 - RNA, 19 nt, Artificial Sequence
  Description of Artificial Sequence: Synthetic oligonucleotide
uacaaucaaccugucagau

SEQ ID NO: 2043965 - RNA, 19 nt, Artificial Sequence
  Description of Artificial Sequence: Synthetic oligonucleotide
auugagcucauaggaucac

SEQ ID NO: 2043966 - RNA, 19 nt, Artificial Sequence
  Description of Artificial Sequence: Synthetic oligonucleotide
cauugagcucauaggauca

SEQ ID NO: 2043967 - RNA, 19 nt, Artificial Sequence
  Description of Artificial Sequence: Synthetic oligonucleotide
ucagaucaaggaugagaac

SEQ ID NO: 2043968 - RNA, 19 nt, Artificial Sequence
  Description of Artificial Sequence: Synthetic oligonucleotide
accugucagaucaaggaug

SEQ ID NO: 2043969 - RNA, 19 nt, Artificial Sequence
  Description of Artificial Sequence: Synthetic oligonucleotide
gucuucacgcuggagcugg

SEQ ID NO: 2043970 - RNA, 19 nt, Artificial Sequence
  Description of Artificial Sequence: Synthetic oligonucleotide
auccuuauuuucagagggg

SEQ ID NO: 2043971 - RNA, 19 nt, Artificial Sequence
  Description of Artificial Sequence: Synthetic oligonucleotide
uccccaggaaggcaccacc

SEQ ID NO: 2043972 - RNA, 19 nt, Artificial Sequence
  Description of Artificial Sequence: Synthetic oligonucleotide
gucauuccauccaugccag

SEQ ID NO: 2043973 - RNA, 19 nt, Artificial Sequence
  Description of Artificial Sequence: Synthetic oligonucleotide
guuucuccuaggaggaggc

SEQ ID NO: 2043974 - RNA, 19 nt, Artificial Sequence
  Description of Artificial Sequence: Synthetic oligonucleotide
ugccagacagcugucuuca

SEQ ID NO: 2043975 - RNA, 19 nt, Artificial Sequence
  Description of Artificial Sequence: Synthetic oligonucleotide
accugaguuucuccuagga

SEQ ID NO: 2043976 - RNA, 19 nt, Artificial Sequence
  Description of Artificial Sequence: Synthetic oligonucleotide
aucaaccugucagaucaag

SEQ ID NO: 2043977 - RNA, 19 nt, Artificial Sequence
  Description of Artificial Sequence: Synthetic oligonucleotide
agaucaaggaugagaacaa

SEQ ID NO: 2043978 - RNA, 19 nt, Artificial Sequence
  Description of Artificial Sequence: Synthetic oligonucleotide
cucauaggaucacagggaa

SEQ ID NO: 2043979 - RNA, 19 nt, Artificial Sequence
  Description of Artificial Sequence: Synthetic oligonucleotide
ugaagacguugucugucau

SEQ ID NO: 2043980 - RNA, 19 nt, Artificial Sequence
  Description of Artificial Sequence: Synthetic oligonucleotide
uucuccuaggaggaggcuc

SEQ ID NO: 2043981 - RNA, 19 nt, Artificial Sequence
  Description of Artificial Sequence: Synthetic oligonucleotide
caucgucagggugaggggc

SEQ ID NO: 2043982 - RNA, 19 nt, Artificial Sequence
  Description of Artificial Sequence: Synthetic oligonucleotide
aggcgauuguuuguacccg

SEQ ID NO: 2043983 - RNA, 19 nt, Artificial Sequence
  Description of Artificial Sequence: Synthetic oligonucleotide
uugagcucauaggaucaca

SEQ ID NO: 2043984 - RNA, 19 nt, Artificial Sequence
  Description of Artificial Sequence: Synthetic oligonucleotide
gggcugaagacguugucug

SEQ ID NO: 2043985 - RNA, 19 nt, Artificial Sequence
  Description of Artificial Sequence: Synthetic oligonucleotide
cccaucgucagggugaggg

SEQ ID NO: 2043986 - RNA, 19 nt, Artificial Sequence
  Description of Artificial Sequence: Synthetic oligonucleotide
ugagaacaaucaaguucaa

SEQ ID NO: 2043987 - RNA, 19 nt, Artificial Sequence
  Description of Artificial Sequence: Synthetic oligonucleotide
guuuguacccgcggaggag

SEQ ID NO: 2043988 - RNA, 19 nt, Artificial Sequence
  Description of Artificial Sequence: Synthetic oligonucleotide
caaggaugagaacaaucaa

SEQ ID NO: 2043989 - RNA, 19 nt, Artificial Sequence
  Description of Artificial Sequence: Synthetic oligonucleotide
cugaagacguugucuguca

SEQ ID NO: 2043990 - RNA, 19 nt, Artificial Sequence
  Description of Artificial Sequence: Synthetic oligonucleotide
guucaaauugagauccuua

SEQ ID NO: 2043991 - RNA, 19 nt, Artificial Sequence
  Description of Artificial Sequence: Synthetic oligonucleotide
aguucaaauugagauccuu

SEQ ID NO: 2043992 - RNA, 19 nt, Artificial Sequence
  Description of Artificial Sequence: Synthetic oligonucleotide
aggagagggcugaagacgu

SEQ ID NO: 2043993 - RNA, 19 nt, Artificial Sequence
  Description of Artificial Sequence: Synthetic oligonucleotide
ucguugccgucguaggcga

SEQ ID NO: 2043994 - RNA, 19 nt, Artificial Sequence
  Description of Artificial Sequence: Synthetic oligonucleotide
aggaggcucccaucgucag

SEQ ID NO: 2043995 - RNA, 19 nt, Artificial Sequence
  Description of Artificial Sequence: Synthetic oligonucleotide
cuccuccccaggaaggcac

SEQ ID NO: 2043996 - RNA, 19 nt, Artificial Sequence
  Description of Artificial Sequence: Synthetic oligonucleotide
uccauccaugccagacagc

SEQ ID NO: 2043997 - RNA, 19 nt, Artificial Sequence
  Description of Artificial Sequence: Synthetic oligonucleotide
guuaucucaauaauuuauu

SEQ ID NO: 2043998 - RNA, 19 nt, Artificial Sequence
  Description of Artificial Sequence: Synthetic oligonucleotide
aaguucaaauugagauccu

SEQ ID NO: 2043999 - RNA, 19 nt, Artificial Sequence
  Description of Artificial Sequence: Synthetic oligonucleotide
ucguaggcgauuguuugua

SEQ ID NO: 2044000 - RNA, 19 nt, Artificial Sequence
  Description of Artificial Sequence: Synthetic oligonucleotide
ccugaguuucuccuaggag

SEQ ID NO: 2044001 - RNA, 19 nt, Artificial Sequence
  Description of Artificial Sequence: Synthetic oligonucleotide
caccugaguuucuccuagg

SEQ ID NO: 2044002 - RNA, 19 nt, Artificial Sequence
  Description of Artificial Sequence: Synthetic oligonucleotide
cuaggaggaggcucccauc

SEQ ID NO: 2044003 - RNA, 19 nt, Artificial Sequence
  Description of Artificial Sequence: Synthetic oligonucleotide
aggaaggcaccaccagaga

SEQ ID NO: 2044004 - RNA, 19 nt, Artificial Sequence
  Description of Artificial Sequence: Synthetic oligonucleotide
acuguacaaucaaccuguc

SEQ ID NO: 2044005 - RNA, 19 nt, Artificial Sequence
  Description of Artificial Sequence: Synthetic oligonucleotide
ggcgauuguuuguacccgc

SEQ ID NO: 2044006 - RNA, 19 nt, Artificial Sequence
  Description of Artificial Sequence: Synthetic oligonucleotide
uugccgucguaggcgauug

SEQ ID NO: 2044007 - RNA, 19 nt, Artificial Sequence
  Description of Artificial Sequence: Synthetic oligonucleotide
agacagcugucuucacgcu

SEQ ID NO: 2044008 - RNA, 19 nt, Artificial Sequence
  Description of Artificial Sequence: Synthetic oligonucleotide
uuccuccucccuucugcca

SEQ ID NO: 2044009 - RNA, 19 nt, Artificial Sequence
  Description of Artificial Sequence: Synthetic oligonucleotide
gaguuucuccuaggaggag

SEQ ID NO: 2044010 - RNA, 19 nt, Artificial Sequence
  Description of Artificial Sequence: Synthetic oligonucleotide
gaggaggcucccaucguca

SEQ ID NO: 2044011 - RNA, 19 nt, Artificial Sequence
  Description of Artificial Sequence: Synthetic oligonucleotide
ccugucagaucaaggauga

SEQ ID NO: 2044012 - RNA, 19 nt, Artificial Sequence
  Description of Artificial Sequence: Synthetic oligonucleotide
ucauuccauccaugccaga

SEQ ID NO: 2044013 - RNA, 19 nt, Artificial Sequence
  Description of Artificial Sequence: Synthetic oligonucleotide
gcucauaggaucacaggga

SEQ ID NO: 2044014 - RNA, 19 nt, Artificial Sequence
  Description of Artificial Sequence: Synthetic oligonucleotide
gcgauuguuuguacccgcg

SEQ ID NO: 2044015 - RNA, 19 nt, Artificial Sequence
  Description of Artificial Sequence: Synthetic oligonucleotide
ggaggcucccaucgucagg

SEQ ID NO: 2044016 - RNA, 19 nt, Artificial Sequence
  Description of Artificial Sequence: Synthetic oligonucleotide
uuucuccuaggaggaggcu

SEQ ID NO: 2044017 - RNA, 19 nt, Artificial Sequence
  Description of Artificial Sequence: Synthetic oligonucleotide
aaucaaccugucagaucaa

SEQ ID NO: 2044018 - RNA, 19 nt, Artificial Sequence
  Description of Artificial Sequence: Synthetic oligonucleotide
ucuucacgcuggagcugga

SEQ ID NO: 2044019 - RNA, 19 nt, Artificial Sequence
  Description of Artificial Sequence: Synthetic oligonucleotide
ggaggaggcucccaucguc

SEQ ID NO: 2044020 - RNA, 19 nt, Artificial Sequence
  Description of Artificial Sequence: Synthetic oligonucleotide
cuucacgcuggagcuggag

SEQ ID NO: 2044021 - RNA, 19 nt, Artificial Sequence
  Description of Artificial Sequence: Synthetic oligonucleotide
gcugaagacguugucuguc

SEQ ID NO: 2044022 - RNA, 19 nt, Artificial Sequence
  Description of Artificial Sequence: Synthetic oligonucleotide
aucgucagggugaggggcu

SEQ ID NO: 2044023 - RNA, 19 nt, Artificial Sequence
  Description of Artificial Sequence: Synthetic oligonucleotide
cgucguaggcgauuguuug

SEQ ID NO: 2044024 - RNA, 19 nt, Artificial Sequence
  Description of Artificial Sequence: Synthetic oligonucleotide
gaagacguugucugucauu

SEQ ID NO: 2044025 - RNA, 19 nt, Artificial Sequence
  Description of Artificial Sequence: Synthetic oligonucleotide
cgauuguuuguacccgcgg

SEQ ID NO: 2044026 - RNA, 19 nt, Artificial Sequence
  Description of Artificial Sequence: Synthetic oligonucleotide
ccucccuucugccagguca

SEQ ID NO: 2044027 - RNA, 19 nt, Artificial Sequence
  Description of Artificial Sequence: Synthetic oligonucleotide
ccaucgucagggugagggg

SEQ ID NO: 2044028 - RNA, 19 nt, Artificial Sequence
  Description of Artificial Sequence: Synthetic oligonucleotide
cucccaucgucagggugag

SEQ ID NO: 2044029 - RNA, 19 nt, Artificial Sequence
  Description of Artificial Sequence: Synthetic oligonucleotide
gucguaggcgauuguuugu

SEQ ID NO: 2044030 - RNA, 19 nt, Artificial Sequence
  Description of Artificial Sequence: Synthetic oligonucleotide
acguugucugucauuccau

SEQ ID NO: 2044031 - RNA, 19 nt, Artificial Sequence
  Description of Artificial Sequence: Synthetic oligonucleotide
gcucccaucgucaggguga

SEQ ID NO: 2044032 - RNA, 19 nt, Artificial Sequence
  Description of Artificial Sequence: Synthetic oligonucleotide
uccuaggaggaggcuccca

SEQ ID NO: 2044033 - RNA, 19 nt, Artificial Sequence
  Description of Artificial Sequence: Synthetic oligonucleotide
cugucagaucaaggaugag

SEQ ID NO: 2044034 - RNA, 19 nt, Artificial Sequence
  Description of Artificial Sequence: Synthetic oligonucleotide
ggcucccaucgucagggug

SEQ ID NO: 2044035 - RNA, 19 nt, Artificial Sequence
  Description of Artificial Sequence: Synthetic oligonucleotide
gaucaaggaugagaacaau

SEQ ID NO: 2044036 - RNA, 19 nt, Artificial Sequence
  Description of Artificial Sequence: Synthetic oligonucleotide
ccuuauuuucagaggggaa

SEQ ID NO: 2044037 - RNA, 19 nt, Artificial Sequence
  Description of Artificial Sequence: Synthetic oligonucleotide
ugccgucguaggcgauugu

SEQ ID NO: 2044038 - RNA, 19 nt, Artificial Sequence
  Description of Artificial Sequence: Synthetic oligonucleotide
ggaugagaacaaucaaguu

SEQ ID NO: 2044039 - RNA, 19 nt, Artificial Sequence
  Description of Artificial Sequence: Synthetic oligonucleotide
cguugucugucauuccauc

SEQ ID NO: 2044040 - RNA, 19 nt, Artificial Sequence
  Description of Artificial Sequence: Synthetic oligonucleotide
ccaggaaggcaccaccaga

SEQ ID NO: 2044041 - RNA, 19 nt, Artificial Sequence
  Description of Artificial Sequence: Synthetic oligonucleotide
cuccuaggaggaggcuccc

SEQ ID NO: 2044042 - RNA, 19 nt, Artificial Sequence
  Description of Artificial Sequence: Synthetic oligonucleotide
cuccccaggaaggcaccac

SEQ ID NO: 2044043 - RNA, 19 nt, Artificial Sequence
  Description of Artificial Sequence: Synthetic oligonucleotide
uccucccuucugccagguc

SEQ ID NO: 2044044 - RNA, 19 nt, Artificial Sequence
  Description of Artificial Sequence: Synthetic oligonucleotide
ccauccaugccagacagcu

SEQ ID NO: 2044045 - RNA, 19 nt, Artificial Sequence
  Description of Artificial Sequence: Synthetic oligonucleotide
ucgucagggugaggggcuc

SEQ ID NO: 2044046 - RNA, 19 nt, Artificial Sequence
  Description of Artificial Sequence: Synthetic oligonucleotide
caugccagacagcugucuu

SEQ ID NO: 2044047 - RNA, 19 nt, Artificial Sequence
  Description of Artificial Sequence: Synthetic oligonucleotide
ucccaucgucagggugagg

SEQ ID NO: 2044048 - RNA, 19 nt, Artificial Sequence
  Description of Artificial Sequence: Synthetic oligonucleotide
ccuccucccuucugccagg

SEQ ID NO: 2044049 - RNA, 19 nt, Artificial Sequence
  Description of Artificial Sequence: Synthetic oligonucleotide
cguaggcgauuguuuguac

SEQ ID NO: 2044050 - RNA, 19 nt, Artificial Sequence
  Description of Artificial Sequence: Synthetic oligonucleotide
aggcucccaucgucagggu

SEQ ID NO: 2044051 - RNA, 19 nt, Artificial Sequence
  Description of Artificial Sequence: Synthetic oligonucleotide
acgcuggagcuggagcaua

SEQ ID NO: 2044052 - RNA, 19 nt, Artificial Sequence
  Description of Artificial Sequence: Synthetic oligonucleotide
guugccgucguaggcgauu

SEQ ID NO: 2044053 - RNA, 19 nt, Artificial Sequence
  Description of Artificial Sequence: Synthetic oligonucleotide
gccagacagcugucuucac

SEQ ID NO: 2044054 - RNA, 19 nt, Artificial Sequence
  Description of Artificial Sequence: Synthetic oligonucleotide
ccuaggaggaggcucccau

SEQ ID NO: 2044055 - RNA, 19 nt, Artificial Sequence
  Description of Artificial Sequence: Synthetic oligonucleotide
gcuccuccccaggaaggca

SEQ ID NO: 2044056 - RNA, 19 nt, Artificial Sequence
  Description of Artificial Sequence: Synthetic oligonucleotide
cacgcuggagcuggagcau

SEQ ID NO: 2044057 - RNA, 19 nt, Artificial Sequence
  Description of Artificial Sequence: Synthetic oligonucleotide
ccgucguaggcgauuguuu

SEQ ID NO: 2044058 - RNA, 19 nt, Artificial Sequence
  Description of Artificial Sequence: Synthetic oligonucleotide
gccgucguaggcgauuguu

SEQ ID NO: 2044059 - RNA, 19 nt, Artificial Sequence
  Description of Artificial Sequence: Synthetic oligonucleotide
cuccucccuucugccaggu

SEQ ID NO: 2044060 - RNA, 19 nt, Artificial Sequence
  Description of Artificial Sequence: Synthetic oligonucleotide
ccuccccaggaaggcacca

SEQ ID NO: 2044061 - RNA, 19 nt, Artificial Sequence
  Description of Artificial Sequence: Synthetic oligonucleotide
cgucagggugaggggcuca

SEQ ID NO: 2044062 - RNA, 19 nt, Artificial Sequence
  Description of Artificial Sequence: Synthetic oligonucleotide
cguugccgucguaggcgau

SEQ ID NO: 2044063 - RNA, 19 nt, Artificial Sequence
  Description of Artificial Sequence: Synthetic oligonucleotide
  modified_base (10)..(10): a, c, u, g, unknown or other
aauauauaunuauauauau

SEQ ID NO: 2044064 - RNA, 19 nt, Artificial Sequence
  Description of Artificial Sequence: Synthetic oligonucleotide
uauauauauauauauauac

SEQ ID NO: 2044065 - RNA, 19 nt, Artificial Sequence
  Description of Artificial Sequence: Synthetic oligonucleotide
  modified_base (8)..(8): a, c, u, g, unknown or other
uauauaunuauauauauau

SEQ ID NO: 2044066 - RNA, 19 nt, Artificial Sequence
  Description of Artificial Sequence: Synthetic oligonucleotide
  modified_base (4)..(4): a, c, u, g, unknown or other
uaunuauauauauauauau

SEQ ID NO: 2044067 - RNA, 19 nt, Artificial Sequence
  Description of Artificial Sequence: Synthetic oligonucleotide
  modified_base (2)..(2): a, c, u, g, unknown or other
unuauauauauauauauau

SEQ ID NO: 2044068 - RNA, 19 nt, Artificial Sequence
  Description of Artificial Sequence: Synthetic oligonucleotide
  modified_base (6)..(6): a, c, u, g, unknown or other
uauaunuauauauauauau

SEQ ID NO: 2044069 - RNA, 19 nt, Artificial Sequence
  Description of Artificial Sequence: Synthetic oligonucleotide
uauauauauauauauauau

SEQ ID NO: 2044070 - RNA, 19 nt, Artificial Sequence
  Description of Artificial Sequence: Synthetic oligonucleotide
uauauauauauauauacuc

SEQ ID NO: 2044071 - RNA, 19 nt, Artificial Sequence
  Description of Artificial Sequence: Synthetic oligonucleotide
aaaagugagccuccaaagc

SEQ ID NO: 2044072 - RNA, 19 nt, Artificial Sequence
  Description of Artificial Sequence: Synthetic oligonucleotide
auguuaauacuguugcugc

SEQ ID NO: 2044073 - RNA, 19 nt, Artificial Sequence
  Description of Artificial Sequence: Synthetic oligonucleotide
gacauguuaauacuguugc

SEQ ID NO: 2044074 - RNA, 19 nt, Artificial Sequence
  Description of Artificial Sequence: Synthetic oligonucleotide
uauauauauauauacucuc

SEQ ID NO: 2044075 - RNA, 19 nt, Artificial Sequence
  Description of Artificial Sequence: Synthetic oligonucleotide
agauacuucauguacugag

SEQ ID NO: 2044076 - RNA, 19 nt, Artificial Sequence
  Description of Artificial Sequence: Synthetic oligonucleotide
aauacuguugcugccauug

SEQ ID NO: 2044077 - RNA, 19 nt, Artificial Sequence
  Description of Artificial Sequence: Synthetic oligonucleotide
uauauauauauacucucuc

SEQ ID NO: 2044078 - RNA, 19 nt, Artificial Sequence
  Description of Artificial Sequence: Synthetic oligonucleotide
guaaagauacuucauguac

SEQ ID NO: 2044079 - RNA, 19 nt, Artificial Sequence
  Description of Artificial Sequence: Synthetic oligonucleotide
uaaagauacuucauguacu

SEQ ID NO: 2044080 - RNA, 19 nt, Artificial Sequence
  Description of Artificial Sequence: Synthetic oligonucleotide
uccacugacauguuaauac

SEQ ID NO: 2044081 - RNA, 19 nt, Artificial Sequence
  Description of Artificial Sequence: Synthetic oligonucleotide
cucauagggguaaagauac

SEQ ID NO: 2044082 - RNA, 19 nt, Artificial Sequence
  Description of Artificial Sequence: Synthetic oligonucleotide
gauccugauauucaugggc

SEQ ID NO: 2044083 - RNA, 19 nt, Artificial Sequence
  Description of Artificial Sequence: Synthetic oligonucleotide
gauauucaugggcagcugg

SEQ ID NO: 2044084 - RNA, 19 nt, Artificial Sequence
  Description of Artificial Sequence: Synthetic oligonucleotide
uggcuauugauccugauau

SEQ ID NO: 2044085 - RNA, 19 nt, Artificial Sequence
  Description of Artificial Sequence: Synthetic oligonucleotide
aaagcucuggcgccggccc

SEQ ID NO: 2044086 - RNA, 19 nt, Artificial Sequence
  Description of Artificial Sequence: Synthetic oligonucleotide
ucuucaaauguccagucuc

SEQ ID NO: 2044087 - RNA, 19 nt, Artificial Sequence
  Description of Artificial Sequence: Synthetic oligonucleotide
auacagcaugaacaggucc

SEQ ID NO: 2044088 - RNA, 19 nt, Artificial Sequence
  Description of Artificial Sequence: Synthetic oligonucleotide
auauauauacucucucucu

SEQ ID NO: 2044089 - RNA, 19 nt, Artificial Sequence
  Description of Artificial Sequence: Synthetic oligonucleotide
uauauauacucucucucuc

SEQ ID NO: 2044090 - RNA, 19 nt, Artificial Sequence
  Description of Artificial Sequence: Synthetic oligonucleotide
aaagacacaggcaggcggc

SEQ ID NO: 2044091 - RNA, 19 nt, Artificial Sequence
  Description of Artificial Sequence: Synthetic oligonucleotide
auauauauauauauacucu

SEQ ID NO: 2044092 - RNA, 19 nt, Artificial Sequence
  Description of Artificial Sequence: Synthetic oligonucleotide
auacuucauguacugaguc

SEQ ID NO: 2044093 - RNA, 19 nt, Artificial Sequence
  Description of Artificial Sequence: Synthetic oligonucleotide
  modified_base (11)..(11): a, c, u, g, unknown or other
aaauauauaunuauauaua

SEQ ID NO: 2044094 - RNA, 19 nt, Artificial Sequence
  Description of Artificial Sequence: Synthetic oligonucleotide
uugaacugucuucaaaugu

SEQ ID NO: 2044095 - RNA, 19 nt, Artificial Sequence
  Description of Artificial Sequence: Synthetic oligonucleotide
uuugaacugucuucaaaug

SEQ ID NO: 2044096 - RNA, 19 nt, Artificial Sequence
  Description of Artificial Sequence: Synthetic oligonucleotide
auauacucucucucucucc

SEQ ID NO: 2044097 - RNA, 19 nt, Artificial Sequence
  Description of Artificial Sequence: Synthetic oligonucleotide
ucgucgcucacacucauag

SEQ ID NO: 2044098 - RNA, 19 nt, Artificial Sequence
  Description of Artificial Sequence: Synthetic oligonucleotide
auauauauauauauauacu

SEQ ID NO: 2044099 - RNA, 19 nt, Artificial Sequence
  Description of Artificial Sequence: Synthetic oligonucleotide
uuggccaugauagggaucc

SEQ ID NO: 2044100 - RNA, 19 nt, Artificial Sequence
  Description of Artificial Sequence: Synthetic oligonucleotide
uauacucucucucucuccu

SEQ ID NO: 2044101 - RNA, 19 nt, Artificial Sequence
  Description of Artificial Sequence: Synthetic oligonucleotide
uagggguaaagauacuuca

SEQ ID NO: 2044102 - RNA, 19 nt, Artificial Sequence
  Description of Artificial Sequence: Synthetic oligonucleotide
auagggauccgguucacug

SEQ ID NO: 2044103 - RNA, 19 nt, Artificial Sequence
  Description of Artificial Sequence: Synthetic oligonucleotide
ucuauggcggccuggagcu

SEQ ID NO: 2044104 - RNA, 19 nt, Artificial Sequence
  Description of Artificial Sequence: Synthetic oligonucleotide
aggucauccaaggaacucc

SEQ ID NO: 2044105 - RNA, 19 nt, Artificial Sequence
  Description of Artificial Sequence: Synthetic oligonucleotide
acagcugaguccuggcggc

SEQ ID NO: 2044106 - RNA, 19 nt, Artificial Sequence
  Description of Artificial Sequence: Synthetic oligonucleotide
uguuaauacuguugcugcc

SEQ ID NO: 2044107 - RNA, 19 nt, Artificial Sequence
  Description of Artificial Sequence: Synthetic oligonucleotide
auauauacucucucucucu

SEQ ID NO: 2044108 - RNA, 19 nt, Artificial Sequence
  Description of Artificial Sequence: Synthetic oligonucleotide
cauguugugggcuccacug

SEQ ID NO: 2044109 - RNA, 19 nt, Artificial Sequence
  Description of Artificial Sequence: Synthetic oligonucleotide
uauauacucucucucucuc

SEQ ID NO: 2044110 - RNA, 19 nt, Artificial Sequence
  Description of Artificial Sequence: Synthetic oligonucleotide
auauauauauauacucucu

SEQ ID NO: 2044111 - RNA, 19 nt, Artificial Sequence
  Description of Artificial Sequence: Synthetic oligonucleotide
aguucauagagcuguuuga

SEQ ID NO: 2044112 - RNA, 19 nt, Artificial Sequence
  Description of Artificial Sequence: Synthetic oligonucleotide
aacuccuuccucguugggg

SEQ ID NO: 2044113 - RNA, 19 nt, Artificial Sequence
  Description of Artificial Sequence: Synthetic oligonucleotide
caugauagggauccgguuc

SEQ ID NO: 2044114 - RNA, 19 nt, Artificial Sequence
  Description of Artificial Sequence: Synthetic oligonucleotide
agggauccgguucacuggc

SEQ ID NO: 2044115 - RNA, 19 nt, Artificial Sequence
  Description of Artificial Sequence: Synthetic oligonucleotide
uauugauccugauauucau

SEQ ID NO: 2044116 - RNA, 19 nt, Artificial Sequence
  Description of Artificial Sequence: Synthetic oligonucleotide
uagggauccgguucacugg

SEQ ID NO: 2044117 - RNA, 19 nt, Artificial Sequence
  Description of Artificial Sequence: Synthetic oligonucleotide
uacuguugcugccauuggc

SEQ ID NO: 2044118 - RNA, 19 nt, Artificial Sequence
  Description of Artificial Sequence: Synthetic oligonucleotide
ugaacaggucauccaagga

SEQ ID NO: 2044119 - RNA, 19 nt, Artificial Sequence
  Description of Artificial Sequence: Synthetic oligonucleotide
aagugagccuccaaagcuc

SEQ ID NO: 2044120 - RNA, 19 nt, Artificial Sequence
  Description of Artificial Sequence: Synthetic oligonucleotide
agagcucgcugcaugaggc

SEQ ID NO: 2044121 - RNA, 19 nt, Artificial Sequence
  Description of Artificial Sequence: Synthetic oligonucleotide
auagggguaaagauacuuc

SEQ ID NO: 2044122 - RNA, 19 nt, Artificial Sequence
  Description of Artificial Sequence: Synthetic oligonucleotide
uguccagucuccguggucc

SEQ ID NO: 2044123 - RNA, 19 nt, Artificial Sequence
  Description of Artificial Sequence: Synthetic oligonucleotide
  modified_base (3)..(3): a, c, u, g, unknown or other
aunuauauauauauauaua

SEQ ID NO: 2044124 - RNA, 19 nt, Artificial Sequence
  Description of Artificial Sequence: Synthetic oligonucleotide
  modified_base (7)..(7): a, c, u, g, unknown or other
auauaunuauauauauaua

SEQ ID NO: 2044125 - RNA, 19 nt, Artificial Sequence
  Description of Artificial Sequence: Synthetic oligonucleotide
  modified_base (9)..(9): a, c, u, g, unknown or other
auauauaunuauauauaua

SEQ ID NO: 2044126 - RNA, 19 nt, Artificial Sequence
  Description of Artificial Sequence: Synthetic oligonucleotide
  modified_base (5)..(5): a, c, u, g, unknown or other
auaunuauauauauauaua

SEQ ID NO: 2044127 - RNA, 19 nt, Artificial Sequence
  Description of Artificial Sequence: Synthetic oligonucleotide
caugaagcugaacagguca

SEQ ID NO: 2044128 - RNA, 19 nt, Artificial Sequence
  Description of Artificial Sequence: Synthetic oligonucleotide
uucaaauguccagucuccg

SEQ ID NO: 2044129 - RNA, 19 nt, Artificial Sequence
  Description of Artificial Sequence: Synthetic oligonucleotide
auauauauauauauauaua

SEQ ID NO: 2044130 - RNA, 19 nt, Artificial Sequence
  Description of Artificial Sequence: Synthetic oligonucleotide
gaucuugggugcuggagug

SEQ ID NO: 2044131 - RNA, 19 nt, Artificial Sequence
  Description of Artificial Sequence: Synthetic oligonucleotide
agaggcuuggcuauugauc

SEQ ID NO: 2044132 - RNA, 19 nt, Artificial Sequence
  Description of Artificial Sequence: Synthetic oligonucleotide
ucugcguccaguucauaga

SEQ ID NO: 2044133 - RNA, 19 nt, Artificial Sequence
  Description of Artificial Sequence: Synthetic oligonucleotide
caguucauagagcuguuug

SEQ ID NO: 2044134 - RNA, 19 nt, Artificial Sequence
  Description of Artificial Sequence: Synthetic oligonucleotide
uguugaugaccuccacgag

SEQ ID NO: 2044135 - RNA, 19 nt, Artificial Sequence
  Description of Artificial Sequence: Synthetic oligonucleotide
uucucggucaccagcacau

SEQ ID NO: 2044136 - RNA, 19 nt, Artificial Sequence
  Description of Artificial Sequence: Synthetic oligonucleotide
aaggcggcgcuggugaugg

SEQ ID NO: 2044137 - RNA, 19 nt, Artificial Sequence
  Description of Artificial Sequence: Synthetic oligonucleotide
augauagggauccgguuca

SEQ ID NO: 2044138 - RNA, 19 nt, Artificial Sequence
  Description of Artificial Sequence: Synthetic oligonucleotide
uuggcuauugauccugaua

SEQ ID NO: 2044139 - RNA, 19 nt, Artificial Sequence
  Description of Artificial Sequence: Synthetic oligonucleotide
ugcuuggccaugauaggga

SEQ ID NO: 2044140 - RNA, 19 nt, Artificial Sequence
  Description of Artificial Sequence: Synthetic oligonucleotide
ucaaauguccagucuccgu

SEQ ID NO: 2044141 - RNA, 19 nt, Artificial Sequence
  Description of Artificial Sequence: Synthetic oligonucleotide
auauucaugggcagcuggg

SEQ ID NO: 2044142 - RNA, 19 nt, Artificial Sequence
  Description of Artificial Sequence: Synthetic oligonucleotide
gucuauggcggccuggagc

SEQ ID NO: 2044143 - RNA, 19 nt, Artificial Sequence
  Description of Artificial Sequence: Synthetic oligonucleotide
uacucucucucucuccucu

SEQ ID NO: 2044144 - RNA, 19 nt, Artificial Sequence
  Description of Artificial Sequence: Synthetic oligonucleotide
cuauugauccugauauuca

SEQ ID NO: 2044145 - RNA, 19 nt, Artificial Sequence
  Description of Artificial Sequence: Synthetic oligonucleotide
aagcugaacaggucaucca

SEQ ID NO: 2044146 - RNA, 19 nt, Artificial Sequence
  Description of Artificial Sequence: Synthetic oligonucleotide
gaagucacuggcagcuugg

SEQ ID NO: 2044147 - RNA, 19 nt, Artificial Sequence
  Description of Artificial Sequence: Synthetic oligonucleotide
uccugauauucaugggcag

SEQ ID NO: 2044148 - RNA, 19 nt, Artificial Sequence
  Description of Artificial Sequence: Synthetic oligonucleotide
aacaggauggcccgccaaa

SEQ ID NO: 2044149 - RNA, 19 nt, Artificial Sequence
  Description of Artificial Sequence: Synthetic oligonucleotide
cuugggugaggacagcaug

SEQ ID NO: 2044150 - RNA, 19 nt, Artificial Sequence
  Description of Artificial Sequence: Synthetic oligonucleotide
aauguccagucuccguggu

SEQ ID NO: 2044151 - RNA, 19 nt, Artificial Sequence
  Description of Artificial Sequence: Synthetic oligonucleotide
auguugugggcuccacugg

SEQ ID NO: 2044152 - RNA, 19 nt, Artificial Sequence
  Description of Artificial Sequence: Synthetic oligonucleotide
ccaaggaacuccuuccucg

SEQ ID NO: 2044153 - RNA, 19 nt, Artificial Sequence
  Description of Artificial Sequence: Synthetic oligonucleotide
ucuccucucucucucucca

SEQ ID NO: 2044154 - RNA, 19 nt, Artificial Sequence
  Description of Artificial Sequence: Synthetic oligonucleotide
guugcugccauuggcacug

SEQ ID NO: 2044155 - RNA, 19 nt, Artificial Sequence
  Description of Artificial Sequence: Synthetic oligonucleotide
gggguaaagauacuucaug

SEQ ID NO: 2044156 - RNA, 19 nt, Artificial Sequence
  Description of Artificial Sequence: Synthetic oligonucleotide
acauguuaauacuguugcu

SEQ ID NO: 2044157 - RNA, 19 nt, Artificial Sequence
  Description of Artificial Sequence: Synthetic oligonucleotide
guuaauacuguugcugcca

SEQ ID NO: 2044158 - RNA, 19 nt, Artificial Sequence
  Description of Artificial Sequence: Synthetic oligonucleotide
ucacuggcagcuuggguga

SEQ ID NO: 2044159 - RNA, 19 nt, Artificial Sequence
  Description of Artificial Sequence: Synthetic oligonucleotide
agcugaacaggucauccaa

SEQ ID NO: 2044160 - RNA, 19 nt, Artificial Sequence
  Description of Artificial Sequence: Synthetic oligonucleotide
uggcgugccacgcuucugc

SEQ ID NO: 2044161 - RNA, 19 nt, Artificial Sequence
  Description of Artificial Sequence: Synthetic oligonucleotide
ucagcaaccaaggccauuu

SEQ ID NO: 2044162 - RNA, 19 nt, Artificial Sequence
  Description of Artificial Sequence: Synthetic oligonucleotide
cugcguccaguucauagag

SEQ ID NO: 2044163 - RNA, 19 nt, Artificial Sequence
  Description of Artificial Sequence: Synthetic oligonucleotide
aagauacuucauguacuga

SEQ ID NO: 2044164 - RNA, 19 nt, Artificial Sequence
  Description of Artificial Sequence: Synthetic oligonucleotide
ucucucucucuccacugac

SEQ ID NO: 2044165 - RNA, 19 nt, Artificial Sequence
  Description of Artificial Sequence: Synthetic oligonucleotide
aaggcggcugccugggcug

SEQ ID NO: 2044166 - RNA, 19 nt, Artificial Sequence
  Description of Artificial Sequence: Synthetic oligonucleotide
guccuggcggcucucagag

SEQ ID NO: 2044167 - RNA, 19 nt, Artificial Sequence
  Description of Artificial Sequence: Synthetic oligonucleotide
gauggcccgccaaagacac

SEQ ID NO: 2044168 - RNA, 19 nt, Artificial Sequence
  Description of Artificial Sequence: Synthetic oligonucleotide
cauacagcaugaacagguc

SEQ ID NO: 2044169 - RNA, 19 nt, Artificial Sequence
  Description of Artificial Sequence: Synthetic oligonucleotide
caaggcucacagcugaguc

SEQ ID NO: 2044170 - RNA, 19 nt, Artificial Sequence
  Description of Artificial Sequence: Synthetic oligonucleotide
auccugauauucaugggca

SEQ ID NO: 2044171 - RNA, 19 nt, Artificial Sequence
  Description of Artificial Sequence: Synthetic oligonucleotide
uccucucucucucuccacu

SEQ ID NO: 2044172 - RNA, 19 nt, Artificial Sequence
  Description of Artificial Sequence: Synthetic oligonucleotide
gcgguugcugucuauggcg

SEQ ID NO: 2044173 - RNA, 19 nt, Artificial Sequence
  Description of Artificial Sequence: Synthetic oligonucleotide
acacucauagggguaaaga

SEQ ID NO: 2044174 - RNA, 19 nt, Artificial Sequence
  Description of Artificial Sequence: Synthetic oligonucleotide
cucguuggggucugcgucc

SEQ ID NO: 2044175 - RNA, 19 nt, Artificial Sequence
  Description of Artificial Sequence: Synthetic oligonucleotide
ucucucuccucucucucuc

SEQ ID NO: 2044176 - RNA, 19 nt, Artificial Sequence
  Description of Artificial Sequence: Synthetic oligonucleotide
gacagcauguugugggcuc

SEQ ID NO: 2044177 - RNA, 19 nt, Artificial Sequence
  Description of Artificial Sequence: Synthetic oligonucleotide
cugcgguugcugucuaugg

SEQ ID NO: 2044178 - RNA, 19 nt, Artificial Sequence
  Description of Artificial Sequence: Synthetic oligonucleotide
uccgcagugugaaggcggc

SEQ ID NO: 2044179 - RNA, 19 nt, Artificial Sequence
  Description of Artificial Sequence: Synthetic oligonucleotide
auacucucucucucuccuc

SEQ ID NO: 2044180 - RNA, 19 nt, Artificial Sequence
  Description of Artificial Sequence: Synthetic oligonucleotide
ugccauuggcacuggcaag

SEQ ID NO: 2044181 - RNA, 19 nt, Artificial Sequence
  Description of Artificial Sequence: Synthetic oligonucleotide
uguugcugccauuggcacu

SEQ ID NO: 2044182 - RNA, 19 nt, Artificial Sequence
  Description of Artificial Sequence: Synthetic oligonucleotide
cagcacauacagcaugaac

SEQ ID NO: 2044183 - RNA, 19 nt, Artificial Sequence
  Description of Artificial Sequence: Synthetic oligonucleotide
uggugauuucccgccacag

SEQ ID NO: 2044184 - RNA, 19 nt, Artificial Sequence
  Description of Artificial Sequence: Synthetic oligonucleotide
ugcguccaguucauagagc

SEQ ID NO: 2044185 - RNA, 19 nt, Artificial Sequence
  Description of Artificial Sequence: Synthetic oligonucleotide
auccaaggaacuccuuccu

SEQ ID NO: 2044186 - RNA, 19 nt, Artificial Sequence
  Description of Artificial Sequence: Synthetic oligonucleotide
guacugaguccgcagugug

SEQ ID NO: 2044187 - RNA, 19 nt, Artificial Sequence
  Description of Artificial Sequence: Synthetic oligonucleotide
ucguuggggcugcucaggc

SEQ ID NO: 2044188 - RNA, 19 nt, Artificial Sequence
  Description of Artificial Sequence: Synthetic oligonucleotide
ccacgcuucugcaugaagc

SEQ ID NO: 2044189 - RNA, 19 nt, Artificial Sequence
  Description of Artificial Sequence: Synthetic oligonucleotide
cuguugcugccauuggcac

SEQ ID NO: 2044190 - RNA, 19 nt, Artificial Sequence
  Description of Artificial Sequence: Synthetic oligonucleotide
acucauagggguaaagaua

SEQ ID NO: 2044191 - RNA, 19 nt, Artificial Sequence
  Description of Artificial Sequence: Synthetic oligonucleotide
gccuccaaagcucuggcgc

SEQ ID NO: 2044192 - RNA, 19 nt, Artificial Sequence
  Description of Artificial Sequence: Synthetic oligonucleotide
cacauacagcaugaacagg

SEQ ID NO: 2044193 - RNA, 19 nt, Artificial Sequence
  Description of Artificial Sequence: Synthetic oligonucleotide
gauccgguucacuggcgug

SEQ ID NO: 2044194 - RNA, 19 nt, Artificial Sequence
  Description of Artificial Sequence: Synthetic oligonucleotide
gacacaggcaggcggccug

SEQ ID NO: 2044195 - RNA, 19 nt, Artificial Sequence
  Description of Artificial Sequence: Synthetic oligonucleotide
ugauauucaugggcagcug

SEQ ID NO: 2044196 - RNA, 19 nt, Artificial Sequence
  Description of Artificial Sequence: Synthetic oligonucleotide
uucacuggcgugccacgcu

SEQ ID NO: 2044197 - RNA, 19 nt, Artificial Sequence
  Description of Artificial Sequence: Synthetic oligonucleotide
cucggucaccagcacauac

SEQ ID NO: 2044198 - RNA, 19 nt, Artificial Sequence
  Description of Artificial Sequence: Synthetic oligonucleotide
ucauagggguaaagauacu

SEQ ID NO: 2044199 - RNA, 19 nt, Artificial Sequence
  Description of Artificial Sequence: Synthetic oligonucleotide
guugcugucuauggcggcc

SEQ ID NO: 2044200 - RNA, 19 nt, Artificial Sequence
  Description of Artificial Sequence: Synthetic oligonucleotide
cuggccgcaaggcccaggg

SEQ ID NO: 2044201 - RNA, 19 nt, Artificial Sequence
  Description of Artificial Sequence: Synthetic oligonucleotide
uggugcuggccgcaaggcc

SEQ ID NO: 2044202 - RNA, 19 nt, Artificial Sequence
  Description of Artificial Sequence: Synthetic oligonucleotide
ucucucucuccucucucuc

SEQ ID NO: 2044203 - RNA, 19 nt, Artificial Sequence
  Description of Artificial Sequence: Synthetic oligonucleotide
gguaaagauacuucaugua

SEQ ID NO: 2044204 - RNA, 19 nt, Artificial Sequence
  Description of Artificial Sequence: Synthetic oligonucleotide
acugaguccgcagugugaa

SEQ ID NO: 2044205 - RNA, 19 nt, Artificial Sequence
  Description of Artificial Sequence: Synthetic oligonucleotide
gauacuucauguacugagu

SEQ ID NO: 2044206 - RNA, 19 nt, Artificial Sequence
  Description of Artificial Sequence: Synthetic oligonucleotide
acucucucucucuccucuc

SEQ ID NO: 2044207 - RNA, 19 nt, Artificial Sequence
  Description of Artificial Sequence: Synthetic oligonucleotide
cucuccucucucucucucc

SEQ ID NO: 2044208 - RNA, 19 nt, Artificial Sequence
  Description of Artificial Sequence: Synthetic oligonucleotide
agucuccgugguccggugg

SEQ ID NO: 2044209 - RNA, 19 nt, Artificial Sequence
  Description of Artificial Sequence: Synthetic oligonucleotide
gccauuggcacuggcaagg

SEQ ID NO: 2044210 - RNA, 19 nt, Artificial Sequence
  Description of Artificial Sequence: Synthetic oligonucleotide
ucucucucucuccucucuc

SEQ ID NO: 2044211 - RNA, 19 nt, Artificial Sequence
  Description of Artificial Sequence: Synthetic oligonucleotide
ucucuccucucucucucuc

SEQ ID NO: 2044212 - RNA, 19 nt, Artificial Sequence
  Description of Artificial Sequence: Synthetic oligonucleotide
uuucuugaucuugggugcu

SEQ ID NO: 2044213 - RNA, 19 nt, Artificial Sequence
  Description of Artificial Sequence: Synthetic oligonucleotide
guccgcagugugaaggcgg

SEQ ID NO: 2044214 - RNA, 19 nt, Artificial Sequence
  Description of Artificial Sequence: Synthetic oligonucleotide
ccuggcggcucucagaggc

SEQ ID NO: 2044215 - RNA, 19 nt, Artificial Sequence
  Description of Artificial Sequence: Synthetic oligonucleotide
gcuguuugaacugucuuca

SEQ ID NO: 2044216 - RNA, 19 nt, Artificial Sequence
  Description of Artificial Sequence: Synthetic oligonucleotide
ggugauuucccgccacagc

SEQ ID NO: 2044217 - RNA, 19 nt, Artificial Sequence
  Description of Artificial Sequence: Synthetic oligonucleotide
ucucuccacugacauguua

SEQ ID NO: 2044218 - RNA, 19 nt, Artificial Sequence
  Description of Artificial Sequence: Synthetic oligonucleotide
ugcugccgcuuguacagca

SEQ ID NO: 2044219 - RNA, 19 nt, Artificial Sequence
  Description of Artificial Sequence: Synthetic oligonucleotide
uuccucguuggggucugcg

SEQ ID NO: 2044220 - RNA, 19 nt, Artificial Sequence
  Description of Artificial Sequence: Synthetic oligonucleotide
cugggcugccacaacagga

SEQ ID NO: 2044221 - RNA, 19 nt, Artificial Sequence
  Description of Artificial Sequence: Synthetic oligonucleotide
agagcuguuugaacugucu

SEQ ID NO: 2044222 - RNA, 19 nt, Artificial Sequence
  Description of Artificial Sequence: Synthetic oligonucleotide
cuggcaaggcucacagcug

SEQ ID NO: 2044223 - RNA, 19 nt, Artificial Sequence
  Description of Artificial Sequence: Synthetic oligonucleotide
ugaugaccuccacgaggcc

SEQ ID NO: 2044224 - RNA, 19 nt, Artificial Sequence
  Description of Artificial Sequence: Synthetic oligonucleotide
uccaaagcucuggcgccgg

SEQ ID NO: 2044225 - RNA, 19 nt, Artificial Sequence
  Description of Artificial Sequence: Synthetic oligonucleotide
ugcaugaggcgcugcugcu

SEQ ID NO: 2044226 - RNA, 19 nt, Artificial Sequence
  Description of Artificial Sequence: Synthetic oligonucleotide
uccucguuggggucugcgu

SEQ ID NO: 2044227 - RNA, 19 nt, Artificial Sequence
  Description of Artificial Sequence: Synthetic oligonucleotide
ucuugggugcuggagugau

SEQ ID NO: 2044228 - RNA, 19 nt, Artificial Sequence
  Description of Artificial Sequence: Synthetic oligonucleotide
aguccgcagugugaaggcg

SEQ ID NO: 2044229 - RNA, 19 nt, Artificial Sequence
  Description of Artificial Sequence: Synthetic oligonucleotide
ggcugccacaacaggaugg

SEQ ID NO: 2044230 - RNA, 19 nt, Artificial Sequence
  Description of Artificial Sequence: Synthetic oligonucleotide
caggccucgucgcucacac

SEQ ID NO: 2044231 - RNA, 19 nt, Artificial Sequence
  Description of Artificial Sequence: Synthetic oligonucleotide
ggaaguucugcugcagagc

SEQ ID NO: 2044232 - RNA, 19 nt, Artificial Sequence
  Description of Artificial Sequence: Synthetic oligonucleotide
augaacagguccaggacuu

SEQ ID NO: 2044233 - RNA, 19 nt, Artificial Sequence
  Description of Artificial Sequence: Synthetic oligonucleotide
ugaacagguccaggacuug

SEQ ID NO: 2044234 - RNA, 19 nt, Artificial Sequence
  Description of Artificial Sequence: Synthetic oligonucleotide
ucccgccacagcuucuugu

SEQ ID NO: 2044235 - RNA, 19 nt, Artificial Sequence
  Description of Artificial Sequence: Synthetic oligonucleotide
gcggccuggagcucguugg

SEQ ID NO: 2044236 - RNA, 19 nt, Artificial Sequence
  Description of Artificial Sequence: Synthetic oligonucleotide
caaagcucuggcgccggcc

SEQ ID NO: 2044237 - RNA, 19 nt, Artificial Sequence
  Description of Artificial Sequence: Synthetic oligonucleotide
ggccucgucgcucacacuc

SEQ ID NO: 2044238 - RNA, 19 nt, Artificial Sequence
  Description of Artificial Sequence: Synthetic oligonucleotide
gguucacuggcgugccacg

SEQ ID NO: 2044239 - RNA, 19 nt, Artificial Sequence
  Description of Artificial Sequence: Synthetic oligonucleotide
uccguggauuccagcuucu

SEQ ID NO: 2044240 - RNA, 19 nt, Artificial Sequence
  Description of Artificial Sequence: Synthetic oligonucleotide
cacacucauagggguaaag

SEQ ID NO: 2044241 - RNA, 19 nt, Artificial Sequence
  Description of Artificial Sequence: Synthetic oligonucleotide
caugaggcgcugcugcuca

SEQ ID NO: 2044242 - RNA, 19 nt, Artificial Sequence
  Description of Artificial Sequence: Synthetic oligonucleotide
cuccaaagcucuggcgccg

SEQ ID NO: 2044243 - RNA, 19 nt, Artificial Sequence
  Description of Artificial Sequence: Synthetic oligonucleotide
cucguuggggcugcucagg

SEQ ID NO: 2044244 - RNA, 19 nt, Artificial Sequence
  Description of Artificial Sequence: Synthetic oligonucleotide
acuggcgugccacgcuucu

SEQ ID NO: 2044245 - RNA, 19 nt, Artificial Sequence
  Description of Artificial Sequence: Synthetic oligonucleotide
ucacuggcgugccacgcuu

SEQ ID NO: 2044246 - RNA, 19 nt, Artificial Sequence
  Description of Artificial Sequence: Synthetic oligonucleotide
cugguggcuccguggauuc

SEQ ID NO: 2044247 - RNA, 19 nt, Artificial Sequence
  Description of Artificial Sequence: Synthetic oligonucleotide
ugcuggagugauggggcug

SEQ ID NO: 2044248 - RNA, 19 nt, Artificial Sequence
  Description of Artificial Sequence: Synthetic oligonucleotide
gacuugcuuggccaugaua

SEQ ID NO: 2044249 - RNA, 19 nt, Artificial Sequence
  Description of Artificial Sequence: Synthetic oligonucleotide
agcuugggugaggacagca

SEQ ID NO: 2044250 - RNA, 19 nt, Artificial Sequence
  Description of Artificial Sequence: Synthetic oligonucleotide
agggguaaagauacuucau

SEQ ID NO: 2044251 - RNA, 19 nt, Artificial Sequence
  Description of Artificial Sequence: Synthetic oligonucleotide
cuucucggucaccagcaca

SEQ ID NO: 2044252 - RNA, 19 nt, Artificial Sequence
  Description of Artificial Sequence: Synthetic oligonucleotide
ccuccaaagcucuggcgcc

SEQ ID NO: 2044253 - RNA, 19 nt, Artificial Sequence
  Description of Artificial Sequence: Synthetic oligonucleotide
cugauauucaugggcagcu

SEQ ID NO: 2044254 - RNA, 19 nt, Artificial Sequence
  Description of Artificial Sequence: Synthetic oligonucleotide
ggugaggacagcauguugu

SEQ ID NO: 2044255 - RNA, 19 nt, Artificial Sequence
  Description of Artificial Sequence: Synthetic oligonucleotide
gcugaacaggucauccaag

SEQ ID NO: 2044256 - RNA, 19 nt, Artificial Sequence
  Description of Artificial Sequence: Synthetic oligonucleotide
cuugggugcuggagugaug

SEQ ID NO: 2044257 - RNA, 19 nt, Artificial Sequence
  Description of Artificial Sequence: Synthetic oligonucleotide
gaaggcggcgcuggugaug

SEQ ID NO: 2044258 - RNA, 19 nt, Artificial Sequence
  Description of Artificial Sequence: Synthetic oligonucleotide
uccuggcggcucucagagg

SEQ ID NO: 2044259 - RNA, 19 nt, Artificial Sequence
  Description of Artificial Sequence: Synthetic oligonucleotide
cacgcuucugcaugaagcu

SEQ ID NO: 2044260 - RNA, 19 nt, Artificial Sequence
  Description of Artificial Sequence: Synthetic oligonucleotide
uugagccccuuggugauuu

SEQ ID NO: 2044261 - RNA, 19 nt, Artificial Sequence
  Description of Artificial Sequence: Synthetic oligonucleotide
aggcuuggcuauugauccu

SEQ ID NO: 2044262 - RNA, 19 nt, Artificial Sequence
  Description of Artificial Sequence: Synthetic oligonucleotide
cugaguccgcagugugaag

SEQ ID NO: 2044263 - RNA, 19 nt, Artificial Sequence
  Description of Artificial Sequence: Synthetic oligonucleotide
acgcuucugcaugaagcug

SEQ ID NO: 2044264 - RNA, 19 nt, Artificial Sequence
  Description of Artificial Sequence: Synthetic oligonucleotide
uucccgccacagcuucuug

SEQ ID NO: 2044265 - RNA, 19 nt, Artificial Sequence
  Description of Artificial Sequence: Synthetic oligonucleotide
cugucuucaaauguccagu

SEQ ID NO: 2044266 - RNA, 19 nt, Artificial Sequence
  Description of Artificial Sequence: Synthetic oligonucleotide
ggcuuggcuauugauccug

SEQ ID NO: 2044267 - RNA, 19 nt, Artificial Sequence
  Description of Artificial Sequence: Synthetic oligonucleotide
cuccgugguccgguggugg

SEQ ID NO: 2044268 - RNA, 19 nt, Artificial Sequence
  Description of Artificial Sequence: Synthetic oligonucleotide
ugauagggauccgguucac

SEQ ID NO: 2044269 - RNA, 19 nt, Artificial Sequence
  Description of Artificial Sequence: Synthetic oligonucleotide
cacuggcaaggcucacagc

SEQ ID NO: 2044270 - RNA, 19 nt, Artificial Sequence
  Description of Artificial Sequence: Synthetic oligonucleotide
gggugaggacagcauguug

SEQ ID NO: 2044271 - RNA, 19 nt, Artificial Sequence
  Description of Artificial Sequence: Synthetic oligonucleotide
uggagugauggggcugcca

SEQ ID NO: 2044272 - RNA, 19 nt, Artificial Sequence
  Description of Artificial Sequence: Synthetic oligonucleotide
uggagcucguuggggcugc

SEQ ID NO: 2044273 - RNA, 19 nt, Artificial Sequence
  Description of Artificial Sequence: Synthetic oligonucleotide
acugggugaguaggcaaaa

SEQ ID NO: 2044274 - RNA, 19 nt, Artificial Sequence
  Description of Artificial Sequence: Synthetic oligonucleotide
cucucucucucuccacuga

SEQ ID NO: 2044275 - RNA, 19 nt, Artificial Sequence
  Description of Artificial Sequence: Synthetic oligonucleotide
cauagggguaaagauacuu

SEQ ID NO: 2044276 - RNA, 19 nt, Artificial Sequence
  Description of Artificial Sequence: Synthetic oligonucleotide
ugggugaggacagcauguu

SEQ ID NO: 2044277 - RNA, 19 nt, Artificial Sequence
  Description of Artificial Sequence: Synthetic oligonucleotide
ucaggccucgucgcucaca

SEQ ID NO: 2044278 - RNA, 19 nt, Artificial Sequence
  Description of Artificial Sequence: Synthetic oligonucleotide
ugguccggugguggcaucu

SEQ ID NO: 2044279 - RNA, 19 nt, Artificial Sequence
  Description of Artificial Sequence: Synthetic oligonucleotide
ccugggacggugaugggca

SEQ ID NO: 2044280 - RNA, 19 nt, Artificial Sequence
  Description of Artificial Sequence: Synthetic oligonucleotide
uggcuccguggauuccagc

SEQ ID NO: 2044281 - RNA, 19 nt, Artificial Sequence
  Description of Artificial Sequence: Synthetic oligonucleotide
ugggacggugaugggcaug

SEQ ID NO: 2044282 - RNA, 19 nt, Artificial Sequence
  Description of Artificial Sequence: Synthetic oligonucleotide
cuccucucucucucuccac

SEQ ID NO: 2044283 - RNA, 19 nt, Artificial Sequence
  Description of Artificial Sequence: Synthetic oligonucleotide
gcucucagaggcuuggcua

SEQ ID NO: 2044284 - RNA, 19 nt, Artificial Sequence
  Description of Artificial Sequence: Synthetic oligonucleotide
gcugcuccaaggcggcugc

SEQ ID NO: 2044285 - RNA, 19 nt, Artificial Sequence
  Description of Artificial Sequence: Synthetic oligonucleotide
ggccgcaaggcccagggaa

SEQ ID NO: 2044286 - RNA, 19 nt, Artificial Sequence
  Description of Artificial Sequence: Synthetic oligonucleotide
ucguuggggucugcgucca

SEQ ID NO: 2044287 - RNA, 19 nt, Artificial Sequence
  Description of Artificial Sequence: Synthetic oligonucleotide
uggccaugauagggauccg

SEQ ID NO: 2044288 - RNA, 19 nt, Artificial Sequence
  Description of Artificial Sequence: Synthetic oligonucleotide
cugucuauggcggccugga

SEQ ID NO: 2044289 - RNA, 19 nt, Artificial Sequence
  Description of Artificial Sequence: Synthetic oligonucleotide
caaggaacuccuuccucgu

SEQ ID NO: 2044290 - RNA, 19 nt, Artificial Sequence
  Description of Artificial Sequence: Synthetic oligonucleotide
ucacacucauagggguaaa

SEQ ID NO: 2044291 - RNA, 19 nt, Artificial Sequence
  Description of Artificial Sequence: Synthetic oligonucleotide
cgguugcugucuauggcgg

SEQ ID NO: 2044292 - RNA, 19 nt, Artificial Sequence
  Description of Artificial Sequence: Synthetic oligonucleotide
cgugccacgcuucugcaug

SEQ ID NO: 2044293 - RNA, 19 nt, Artificial Sequence
  Description of Artificial Sequence: Synthetic oligonucleotide
aucuugggugcuggaguga

SEQ ID NO: 2044294 - RNA, 19 nt, Artificial Sequence
  Description of Artificial Sequence: Synthetic oligonucleotide
gcucguuggggcugcucag

SEQ ID NO: 2044295 - RNA, 19 nt, Artificial Sequence
  Description of Artificial Sequence: Synthetic oligonucleotide
ccucucucucucuccacug

SEQ ID NO: 2044296 - RNA, 19 nt, Artificial Sequence
  Description of Artificial Sequence: Synthetic oligonucleotide
ggagugauggggcugccau

SEQ ID NO: 2044297 - RNA, 19 nt, Artificial Sequence
  Description of Artificial Sequence: Synthetic oligonucleotide
gcugucuauggcggccugg

SEQ ID NO: 2044298 - RNA, 19 nt, Artificial Sequence
  Description of Artificial Sequence: Synthetic oligonucleotide
gauagggauccgguucacu

SEQ ID NO: 2044299 - RNA, 19 nt, Artificial Sequence
  Description of Artificial Sequence: Synthetic oligonucleotide
cagugugaaggcggcgcug

SEQ ID NO: 2044300 - RNA, 19 nt, Artificial Sequence
  Description of Artificial Sequence: Synthetic oligonucleotide
cuucugcaugaagcugaac

SEQ ID NO: 2044301 - RNA, 19 nt, Artificial Sequence
  Description of Artificial Sequence: Synthetic oligonucleotide
ggauggcccgccaaagaca

SEQ ID NO: 2044302 - RNA, 19 nt, Artificial Sequence
  Description of Artificial Sequence: Synthetic oligonucleotide
gugccacgcuucugcauga

SEQ ID NO: 2044303 - RNA, 19 nt, Artificial Sequence
  Description of Artificial Sequence: Synthetic oligonucleotide
cucucucucuccucucucu

SEQ ID NO: 2044304 - RNA, 19 nt, Artificial Sequence
  Description of Artificial Sequence: Synthetic oligonucleotide
cacuggcgugccacgcuuc

SEQ ID NO: 2044305 - RNA, 19 nt, Artificial Sequence
  Description of Artificial Sequence: Synthetic oligonucleotide
ccugcgguugcugucuaug

SEQ ID NO: 2044306 - RNA, 19 nt, Artificial Sequence
  Description of Artificial Sequence: Synthetic oligonucleotide
gccgcaaggcccagggaag

SEQ ID NO: 2044307 - RNA, 19 nt, Artificial Sequence
  Description of Artificial Sequence: Synthetic oligonucleotide
ggucaccagcacauacagc

SEQ ID NO: 2044308 - RNA, 19 nt, Artificial Sequence
  Description of Artificial Sequence: Synthetic oligonucleotide
cgccaaagacacaggcagg

SEQ ID NO: 2044309 - RNA, 19 nt, Artificial Sequence
  Description of Artificial Sequence: Synthetic oligonucleotide
uggcagcuugggugaggac

SEQ ID NO: 2044310 - RNA, 19 nt, Artificial Sequence
  Description of Artificial Sequence: Synthetic oligonucleotide
cucucucuccucucucucu

SEQ ID NO: 2044311 - RNA, 19 nt, Artificial Sequence
  Description of Artificial Sequence: Synthetic oligonucleotide
auuucccgccacagcuucu

SEQ ID NO: 2044312 - RNA, 19 nt, Artificial Sequence
  Description of Artificial Sequence: Synthetic oligonucleotide
caaggcggcugccugggcu

SEQ ID NO: 2044313 - RNA, 19 nt, Artificial Sequence
  Description of Artificial Sequence: Synthetic oligonucleotide
cucucucucucuccucucu

SEQ ID NO: 2044314 - RNA, 19 nt, Artificial Sequence
  Description of Artificial Sequence: Synthetic oligonucleotide
ugauggaggugggcagguu

SEQ ID NO: 2044315 - RNA, 19 nt, Artificial Sequence
  Description of Artificial Sequence: Synthetic oligonucleotide
ucucggucaccagcacaua

SEQ ID NO: 2044316 - RNA, 19 nt, Artificial Sequence
  Description of Artificial Sequence: Synthetic oligonucleotide
gugagccuccaaagcucug

SEQ ID NO: 2044317 - RNA, 19 nt, Artificial Sequence
  Description of Artificial Sequence: Synthetic oligonucleotide
ggcgccggcccucccugcg

SEQ ID NO: 2044318 - RNA, 19 nt, Artificial Sequence
  Description of Artificial Sequence: Synthetic oligonucleotide
gggauccgguucacuggcg

SEQ ID NO: 2044319 - RNA, 19 nt, Artificial Sequence
  Description of Artificial Sequence: Synthetic oligonucleotide
ggauccgguucacuggcgu

SEQ ID NO: 2044320 - RNA, 19 nt, Artificial Sequence
  Description of Artificial Sequence: Synthetic oligonucleotide
ucccugcgguugcugucua

SEQ ID NO: 2044321 - RNA, 19 nt, Artificial Sequence
  Description of Artificial Sequence: Synthetic oligonucleotide
ggucauccaaggaacuccu

SEQ ID NO: 2044322 - RNA, 19 nt, Artificial Sequence
  Description of Artificial Sequence: Synthetic oligonucleotide
cuuggcuauugauccugau

SEQ ID NO: 2044323 - RNA, 19 nt, Artificial Sequence
  Description of Artificial Sequence: Synthetic oligonucleotide
gccgccauggccaggaagu

SEQ ID NO: 2044324 - RNA, 19 nt, Artificial Sequence
  Description of Artificial Sequence: Synthetic oligonucleotide
gguugagccccuuggugau

SEQ ID NO: 2044325 - RNA, 19 nt, Artificial Sequence
  Description of Artificial Sequence: Synthetic oligonucleotide
guugugggcuccacugggu

SEQ ID NO: 2044326 - RNA, 19 nt, Artificial Sequence
  Description of Artificial Sequence: Synthetic oligonucleotide
guucugcugcagagcucgc

SEQ ID NO: 2044327 - RNA, 19 nt, Artificial Sequence
  Description of Artificial Sequence: Synthetic oligonucleotide
augaggcgcugcugcucau

SEQ ID NO: 2044328 - RNA, 19 nt, Artificial Sequence
  Description of Artificial Sequence: Synthetic oligonucleotide
cuggcgugccacgcuucug

SEQ ID NO: 2044329 - RNA, 19 nt, Artificial Sequence
  Description of Artificial Sequence: Synthetic oligonucleotide
cagcuugggugaggacagc

SEQ ID NO: 2044330 - RNA, 19 nt, Artificial Sequence
  Description of Artificial Sequence: Synthetic oligonucleotide
gccaugauagggauccggu

SEQ ID NO: 2044331 - RNA, 19 nt, Artificial Sequence
  Description of Artificial Sequence: Synthetic oligonucleotide
aggccucgucgcucacacu

SEQ ID NO: 2044332 - RNA, 19 nt, Artificial Sequence
  Description of Artificial Sequence: Synthetic oligonucleotide
uggcgccggcccucccugc

SEQ ID NO: 2044333 - RNA, 19 nt, Artificial Sequence
  Description of Artificial Sequence: Synthetic oligonucleotide
ggcgcuggugauggaggug

SEQ ID NO: 2044334 - RNA, 19 nt, Artificial Sequence
  Description of Artificial Sequence: Synthetic oligonucleotide
cucucuccucucucucucu

SEQ ID NO: 2044335 - RNA, 19 nt, Artificial Sequence
  Description of Artificial Sequence: Synthetic oligonucleotide
ggcgugccacgcuucugca

SEQ ID NO: 2044336 - RNA, 19 nt, Artificial Sequence
  Description of Artificial Sequence: Synthetic oligonucleotide
gcuuggcuauugauccuga

SEQ ID NO: 2044337 - RNA, 19 nt, Artificial Sequence
  Description of Artificial Sequence: Synthetic oligonucleotide
cucgucgcucacacucaua

SEQ ID NO: 2044338 - RNA, 19 nt, Artificial Sequence
  Description of Artificial Sequence: Synthetic oligonucleotide
ggcauggcagagucuuccu

SEQ ID NO: 2044339 - RNA, 19 nt, Artificial Sequence
  Description of Artificial Sequence: Synthetic oligonucleotide
ccgccacagcuucuuguug

SEQ ID NO: 2044340 - RNA, 19 nt, Artificial Sequence
  Description of Artificial Sequence: Synthetic oligonucleotide
gguccggugguggcaucug

SEQ ID NO: 2044341 - RNA, 19 nt, Artificial Sequence
  Description of Artificial Sequence: Synthetic oligonucleotide
cugaguccuggcggcucuc

SEQ ID NO: 2044342 - RNA, 19 nt, Artificial Sequence
  Description of Artificial Sequence: Synthetic oligonucleotide
gcagugugaaggcggcgcu

SEQ ID NO: 2044343 - RNA, 19 nt, Artificial Sequence
  Description of Artificial Sequence: Synthetic oligonucleotide
ugcuggccgcaaggcccag

SEQ ID NO: 2044344 - RNA, 19 nt, Artificial Sequence
  Description of Artificial Sequence: Synthetic oligonucleotide
cagcauguugugggcucca

SEQ ID NO: 2044345 - RNA, 19 nt, Artificial Sequence
  Description of Artificial Sequence: Synthetic oligonucleotide
ggcuauugauccugauauu

SEQ ID NO: 2044346 - RNA, 19 nt, Artificial Sequence
  Description of Artificial Sequence: Synthetic oligonucleotide
cuauggcggccuggagcuc

SEQ ID NO: 2044347 - RNA, 19 nt, Artificial Sequence
  Description of Artificial Sequence: Synthetic oligonucleotide
cucccugcgguugcugucu

SEQ ID NO: 2044348 - RNA, 19 nt, Artificial Sequence
  Description of Artificial Sequence: Synthetic oligonucleotide
cgguucacuggcgugccac

SEQ ID NO: 2044349 - RNA, 19 nt, Artificial Sequence
  Description of Artificial Sequence: Synthetic oligonucleotide
ggacagcauguugugggcu

SEQ ID NO: 2044350 - RNA, 19 nt, Artificial Sequence
  Description of Artificial Sequence: Synthetic oligonucleotide
gcgccggcccucccugcgg

SEQ ID NO: 2044351 - RNA, 19 nt, Artificial Sequence
  Description of Artificial Sequence: Synthetic oligonucleotide
gugguccggugguggcauc

SEQ ID NO: 2044352 - RNA, 19 nt, Artificial Sequence
  Description of Artificial Sequence: Synthetic oligonucleotide
gcuggccgcaaggcccagg

SEQ ID NO: 2044353 - RNA, 19 nt, Artificial Sequence
  Description of Artificial Sequence: Synthetic oligonucleotide
ggcggcucucagaggcuug

SEQ ID NO: 2044354 - RNA, 19 nt, Artificial Sequence
  Description of Artificial Sequence: Synthetic oligonucleotide
gcaaggcucacagcugagu

SEQ ID NO: 2044355 - RNA, 19 nt, Artificial Sequence
  Description of Artificial Sequence: Synthetic oligonucleotide
auggcccgccaaagacaca

SEQ ID NO: 2044356 - RNA, 19 nt, Artificial Sequence
  Description of Artificial Sequence: Synthetic oligonucleotide
gccucgucgcucacacuca

SEQ ID NO: 2044357 - RNA, 19 nt, Artificial Sequence
  Description of Artificial Sequence: Synthetic oligonucleotide
cugcucaggccucgucgcu

SEQ ID NO: 2044358 - RNA, 19 nt, Artificial Sequence
  Description of Artificial Sequence: Synthetic oligonucleotide
cgcucacacucauaggggu

SEQ ID NO: 2044359 - RNA, 19 nt, Artificial Sequence
  Description of Artificial Sequence: Synthetic oligonucleotide
gcuccguggauuccagcuu

SEQ ID NO: 2044360 - RNA, 19 nt, Artificial Sequence
  Description of Artificial Sequence: Synthetic oligonucleotide
ccaugauagggauccgguu

SEQ ID NO: 2044361 - RNA, 19 nt, Artificial Sequence
  Description of Artificial Sequence: Synthetic oligonucleotide
ccgcagugugaaggcggcg

SEQ ID NO: 2044362 - RNA, 19 nt, Artificial Sequence
  Description of Artificial Sequence: Synthetic oligonucleotide
ccguggauuccagcuucuc

SEQ ID NO: 2044363 - RNA, 19 nt, Artificial Sequence
  Description of Artificial Sequence: Synthetic oligonucleotide
ccggcccucccugcgguug

SEQ ID NO: 2044364 - RNA, 19 nt, Artificial Sequence
  Description of Artificial Sequence: Synthetic oligonucleotide
cugggacggugaugggcau

SEQ ID NO: 2044365 - RNA, 19 nt, Artificial Sequence
  Description of Artificial Sequence: Synthetic oligonucleotide
gcucgcugcaugaggcgcu

SEQ ID NO: 2044366 - RNA, 19 nt, Artificial Sequence
  Description of Artificial Sequence: Synthetic oligonucleotide
guugagccccuuggugauu

SEQ ID NO: 2044367 - RNA, 19 nt, Artificial Sequence
  Description of Artificial Sequence: Synthetic oligonucleotide
ggacuugcuuggccaugau

SEQ ID NO: 2044368 - RNA, 19 nt, Artificial Sequence
  Description of Artificial Sequence: Synthetic oligonucleotide
cccgccacagcuucuuguu

SEQ ID NO: 2044369 - RNA, 19 nt, Artificial Sequence
  Description of Artificial Sequence: Synthetic oligonucleotide
cgcaaggcccagggaaguc

SEQ ID NO: 2044370 - RNA, 19 nt, Artificial Sequence
  Description of Artificial Sequence: Synthetic oligonucleotide
gggucugcguccaguucau

SEQ ID NO: 2044371 - RNA, 19 nt, Artificial Sequence
  Description of Artificial Sequence: Synthetic oligonucleotide
ccagucuccgugguccggu

SEQ ID NO: 2044372 - RNA, 19 nt, Artificial Sequence
  Description of Artificial Sequence: Synthetic oligonucleotide
gcgugccacgcuucugcau

SEQ ID NO: 2044373 - RNA, 19 nt, Artificial Sequence
  Description of Artificial Sequence: Synthetic oligonucleotide
uggcggccuggagcucguu

SEQ ID NO: 2044374 - RNA, 19 nt, Artificial Sequence
  Description of Artificial Sequence: Synthetic oligonucleotide
ccgugguccggugguggca

SEQ ID NO: 2044375 - RNA, 19 nt, Artificial Sequence
  Description of Artificial Sequence: Synthetic oligonucleotide
ggcggccugggacggugau

SEQ ID NO: 2044376 - RNA, 19 nt, Artificial Sequence
  Description of Artificial Sequence: Synthetic oligonucleotide
ccgguucacuggcgugcca

SEQ ID NO: 2044377 - RNA, 19 nt, Artificial Sequence
  Description of Artificial Sequence: Synthetic oligonucleotide
ccucgucgcucacacucau

SEQ ID NO: 2044378 - RNA, 19 nt, Artificial Sequence
  Description of Artificial Sequence: Synthetic oligonucleotide
ccgcaaggcccagggaagu

SEQ ID NO: 2044379 - RNA, 19 nt, Artificial Sequence
  Description of Artificial Sequence: Synthetic oligonucleotide
cacggcugccugggcugcu

SEQ ID NO: 2044380 - RNA, 19 nt, Artificial Sequence
  Description of Artificial Sequence: Synthetic oligonucleotide
ggggcugcucaggccucgu

SEQ ID NO: 2044381 - RNA, 19 nt, Artificial Sequence
  Description of Artificial Sequence: Synthetic oligonucleotide
ggagcucguuggggcugcu

SEQ ID NO: 2044382 - RNA, 19 nt, Artificial Sequence
  Description of Artificial Sequence: Synthetic oligonucleotide
cgugguccggugguggcau

SEQ ID NO: 2044383 - RNA, 19 nt, Artificial Sequence
  Description of Artificial Sequence: Synthetic oligonucleotide
gcaggcggccugggacggu

SEQ ID NO: 2044384 - RNA, 19 nt, Artificial Sequence
  Description of Artificial Sequence: Synthetic oligonucleotide
ccgccauggccaggaaguu

SEQ ID NO: 2044385 - RNA, 19 nt, Artificial Sequence
  Description of Artificial Sequence: Synthetic oligonucleotide
gccggcccucccugcgguu

SEQ ID NO: 2044386 - RNA, 19 nt, Artificial Sequence
  Description of Artificial Sequence: Synthetic oligonucleotide
  modified_base (1)..(1): a, c, u, g, unknown or other
nuauauauauauauauaua

SEQ ID NO: 2044387 - RNA, 19 nt, Artificial Sequence
  Description of Artificial Sequence: Synthetic oligonucleotide
aaauauaugaguccuauug

SEQ ID NO: 2044388 - RNA, 19 nt, Artificial Sequence
  Description of Artificial Sequence: Synthetic oligonucleotide
ugagauuuuauauacauag

SEQ ID NO: 2044389 - RNA, 19 nt, Artificial Sequence
  Description of Artificial Sequence: Synthetic oligonucleotide
cuguauacaacaaauauag

SEQ ID NO: 2044390 - RNA, 19 nt, Artificial Sequence
  Description of Artificial Sequence: Synthetic oligonucleotide
auugauauaguaauuuugc

SEQ ID NO: 2044391 - RNA, 19 nt, Artificial Sequence
  Description of Artificial Sequence: Synthetic oligonucleotide
uacguuaagagcaugaacu

SEQ ID NO: 2044392 - RNA, 19 nt, Artificial Sequence
  Description of Artificial Sequence: Synthetic oligonucleotide
uguauauugauauaguaau

SEQ ID NO: 2044393 - RNA, 19 nt, Artificial Sequence
  Description of Artificial Sequence: Synthetic oligonucleotide
ugugucuacguuaagagca

SEQ ID NO: 2044394 - RNA, 19 nt, Artificial Sequence
  Description of Artificial Sequence: Synthetic oligonucleotide
ugauauaguaauuuugccc

SEQ ID NO: 2044395 - RNA, 19 nt, Artificial Sequence
  Description of Artificial Sequence: Synthetic oligonucleotide
aguuuuaaacuauugggag

SEQ ID NO: 2044396 - RNA, 19 nt, Artificial Sequence
  Description of Artificial Sequence: Synthetic oligonucleotide
uuagacaacacagagaggu

SEQ ID NO: 2044397 - RNA, 19 nt, Artificial Sequence
  Description of Artificial Sequence: Synthetic oligonucleotide
uaauuguauauugauauag

SEQ ID NO: 2044398 - RNA, 19 nt, Artificial Sequence
  Description of Artificial Sequence: Synthetic oligonucleotide
aagauauaggcacacuaag

SEQ ID NO: 2044399 - RNA, 19 nt, Artificial Sequence
  Description of Artificial Sequence: Synthetic oligonucleotide
aauauaugaguccuauugu

SEQ ID NO: 2044400 - RNA, 19 nt, Artificial Sequence
  Description of Artificial Sequence: Synthetic oligonucleotide
uaagucaagagucauacau

SEQ ID NO: 2044401 - RNA, 19 nt, Artificial Sequence
  Description of Artificial Sequence: Synthetic oligonucleotide
uguaugacagugaagacuc

SEQ ID NO: 2044402 - RNA, 19 nt, Artificial Sequence
  Description of Artificial Sequence: Synthetic oligonucleotide
aaugguaguaauucucuug

SEQ ID NO: 2044403 - RNA, 19 nt, Artificial Sequence
  Description of Artificial Sequence: Synthetic oligonucleotide
uuuauuaccuaauuucugu

SEQ ID NO: 2044404 - RNA, 19 nt, Artificial Sequence
  Description of Artificial Sequence: Synthetic oligonucleotide
ugaucuuaauuguauauug

SEQ ID NO: 2044405 - RNA, 19 nt, Artificial Sequence
  Description of Artificial Sequence: Synthetic oligonucleotide
augguaguaauucucuugg

SEQ ID NO: 2044406 - RNA, 19 nt, Artificial Sequence
  Description of Artificial Sequence: Synthetic oligonucleotide
aagguuucaugucacuuuc

SEQ ID NO: 2044407 - RNA, 19 nt, Artificial Sequence
  Description of Artificial Sequence: Synthetic oligonucleotide
uaaagagacuuuauuaccu

SEQ ID NO: 2044408 - RNA, 19 nt, Artificial Sequence
  Description of Artificial Sequence: Synthetic oligonucleotide
ucauacaguagucuggaug

SEQ ID NO: 2044409 - RNA, 19 nt, Artificial Sequence
  Description of Artificial Sequence: Synthetic oligonucleotide
uccucaauuaucuucuuug

SEQ ID NO: 2044410 - RNA, 19 nt, Artificial Sequence
  Description of Artificial Sequence: Synthetic oligonucleotide
aguccuauuguguacauga

SEQ ID NO: 2044411 - RNA, 19 nt, Artificial Sequence
  Description of Artificial Sequence: Synthetic oligonucleotide
uuuacaauacugaucuuaa

SEQ ID NO: 2044412 - RNA, 19 nt, Artificial Sequence
  Description of Artificial Sequence: Synthetic oligonucleotide
aacaucuuuccacaggccu

SEQ ID NO: 2044413 - RNA, 19 nt, Artificial Sequence
  Description of Artificial Sequence: Synthetic oligonucleotide
aagcauucuaagucaagag

SEQ ID NO: 2044414 - RNA, 19 nt, Artificial Sequence
  Description of Artificial Sequence: Synthetic oligonucleotide
uacaauacugaucuuaauu

SEQ ID NO: 2044415 - RNA, 19 nt, Artificial Sequence
  Description of Artificial Sequence: Synthetic oligonucleotide
gauaggcauggucagaaag

SEQ ID NO: 2044416 - RNA, 19 nt, Artificial Sequence
  Description of Artificial Sequence: Synthetic oligonucleotide
cucuagaacuguaugacag

SEQ ID NO: 2044417 - RNA, 19 nt, Artificial Sequence
  Description of Artificial Sequence: Synthetic oligonucleotide
ucuaaaaguuuuaaacuau

SEQ ID NO: 2044418 - RNA, 19 nt, Artificial Sequence
  Description of Artificial Sequence: Synthetic oligonucleotide
caugggaucauucauggug

SEQ ID NO: 2044419 - RNA, 19 nt, Artificial Sequence
  Description of Artificial Sequence: Synthetic oligonucleotide
acaaauauaggaaaaggcu

SEQ ID NO: 2044420 - RNA, 19 nt, Artificial Sequence
  Description of Artificial Sequence: Synthetic oligonucleotide
aaguuuuaaacuauuggga

SEQ ID NO: 2044421 - RNA, 19 nt, Artificial Sequence
  Description of Artificial Sequence: Synthetic oligonucleotide
uguauacaacaaauauagg

SEQ ID NO: 2044422 - RNA, 19 nt, Artificial Sequence
  Description of Artificial Sequence: Synthetic oligonucleotide
ugaagaauggcugucuugc

SEQ ID NO: 2044423 - RNA, 19 nt, Artificial Sequence
  Description of Artificial Sequence: Synthetic oligonucleotide
aaacuauugggagaaaagu

SEQ ID NO: 2044424 - RNA, 19 nt, Artificial Sequence
  Description of Artificial Sequence: Synthetic oligonucleotide
aauugcuacgucauuugcg

SEQ ID NO: 2044425 - RNA, 19 nt, Artificial Sequence
  Description of Artificial Sequence: Synthetic oligonucleotide
uauaugaguccuauugugu

SEQ ID NO: 2044426 - RNA, 19 nt, Artificial Sequence
  Description of Artificial Sequence: Synthetic oligonucleotide
aaagcauucuaagucaaga

SEQ ID NO: 2044427 - RNA, 19 nt, Artificial Sequence
  Description of Artificial Sequence: Synthetic oligonucleotide
aacgcuauaguacuauaaa

SEQ ID NO: 2044428 - RNA, 19 nt, Artificial Sequence
  Description of Artificial Sequence: Synthetic oligonucleotide
aaugaagguuucaugucac

SEQ ID NO: 2044429 - RNA, 19 nt, Artificial Sequence
  Description of Artificial Sequence: Synthetic oligonucleotide
aaaaugguaguaauucucu

SEQ ID NO: 2044430 - RNA, 19 nt, Artificial Sequence
  Description of Artificial Sequence: Synthetic oligonucleotide
ucuuaauuguauauugaua

SEQ ID NO: 2044431 - RNA, 19 nt, Artificial Sequence
  Description of Artificial Sequence: Synthetic oligonucleotide
uccuauuguguacaugaag

SEQ ID NO: 2044432 - RNA, 19 nt, Artificial Sequence
  Description of Artificial Sequence: Synthetic oligonucleotide
uauaggcacacuaaggcua

SEQ ID NO: 2044433 - RNA, 19 nt, Artificial Sequence
  Description of Artificial Sequence: Synthetic oligonucleotide
auugcuacgucauuugcgu

SEQ ID NO: 2044434 - RNA, 19 nt, Artificial Sequence
  Description of Artificial Sequence: Synthetic oligonucleotide
ugucuaacgcuauaguacu

SEQ ID NO: 2044435 - RNA, 19 nt, Artificial Sequence
  Description of Artificial Sequence: Synthetic oligonucleotide
gaguacauagaauacaacu

SEQ ID NO: 2044436 - RNA, 19 nt, Artificial Sequence
  Description of Artificial Sequence: Synthetic oligonucleotide
guugcuauguagaaguuug

SEQ ID NO: 2044437 - RNA, 19 nt, Artificial Sequence
  Description of Artificial Sequence: Synthetic oligonucleotide
acuuagccaccccacaugg

SEQ ID NO: 2044438 - RNA, 19 nt, Artificial Sequence
  Description of Artificial Sequence: Synthetic oligonucleotide
cacaugggaucauucaugg

SEQ ID NO: 2044439 - RNA, 19 nt, Artificial Sequence
  Description of Artificial Sequence: Synthetic oligonucleotide
uacaacugaugcuugcugc

SEQ ID NO: 2044440 - RNA, 19 nt, Artificial Sequence
  Description of Artificial Sequence: Synthetic oligonucleotide
aauuguauauugauauagu

SEQ ID NO: 2044441 - RNA, 19 nt, Artificial Sequence
  Description of Artificial Sequence: Synthetic oligonucleotide
ugcacaacaucuuuccaca

SEQ ID NO: 2044442 - RNA, 19 nt, Artificial Sequence
  Description of Artificial Sequence: Synthetic oligonucleotide
ucauaucgaaagcaaggca

SEQ ID NO: 2044443 - RNA, 19 nt, Artificial Sequence
  Description of Artificial Sequence: Synthetic oligonucleotide
acuauugggagaaaaguug

SEQ ID NO: 2044444 - RNA, 19 nt, Artificial Sequence
  Description of Artificial Sequence: Synthetic oligonucleotide
aucuuaauuguauauugau

SEQ ID NO: 2044445 - RNA, 19 nt, Artificial Sequence
  Description of Artificial Sequence: Synthetic oligonucleotide
agcauucuaagucaagagu

SEQ ID NO: 2044446 - RNA, 19 nt, Artificial Sequence
  Description of Artificial Sequence: Synthetic oligonucleotide
uguguacaugaagauauag

SEQ ID NO: 2044447 - RNA, 19 nt, Artificial Sequence
  Description of Artificial Sequence: Synthetic oligonucleotide
uuugcguugagauuuuaua

SEQ ID NO: 2044448 - RNA, 19 nt, Artificial Sequence
  Description of Artificial Sequence: Synthetic oligonucleotide
agucaagagucauacauaa

SEQ ID NO: 2044449 - RNA, 19 nt, Artificial Sequence
  Description of Artificial Sequence: Synthetic oligonucleotide
ggaacugauguucagauga

SEQ ID NO: 2044450 - RNA, 19 nt, Artificial Sequence
  Description of Artificial Sequence: Synthetic oligonucleotide
agaacuguaugacagugaa

SEQ ID NO: 2044451 - RNA, 19 nt, Artificial Sequence
  Description of Artificial Sequence: Synthetic oligonucleotide
uaauuuugcccugagagua

SEQ ID NO: 2044452 - RNA, 19 nt, Artificial Sequence
  Description of Artificial Sequence: Synthetic oligonucleotide
ugugugugugugucuaacg

SEQ ID NO: 2044453 - RNA, 19 nt, Artificial Sequence
  Description of Artificial Sequence: Synthetic oligonucleotide
ugugugucuaacgcuauag

SEQ ID NO: 2044454 - RNA, 19 nt, Artificial Sequence
  Description of Artificial Sequence: Synthetic oligonucleotide
aauacaacugaugcuugcu

SEQ ID NO: 2044455 - RNA, 19 nt, Artificial Sequence
  Description of Artificial Sequence: Synthetic oligonucleotide
ugugucuaacgcuauagua

SEQ ID NO: 2044456 - RNA, 19 nt, Artificial Sequence
  Description of Artificial Sequence: Synthetic oligonucleotide
auauaggcacacuaaggcu

SEQ ID NO: 2044457 - RNA, 19 nt, Artificial Sequence
  Description of Artificial Sequence: Synthetic oligonucleotide
acugaucuuaauuguauau

SEQ ID NO: 2044458 - RNA, 19 nt, Artificial Sequence
  Description of Artificial Sequence: Synthetic oligonucleotide
gaauacaacugaugcuugc

SEQ ID NO: 2044459 - RNA, 19 nt, Artificial Sequence
  Description of Artificial Sequence: Synthetic oligonucleotide
acuuuauuaccuaauuucu

SEQ ID NO: 2044460 - RNA, 19 nt, Artificial Sequence
  Description of Artificial Sequence: Synthetic oligonucleotide
uauuaccuaauuucuguau

SEQ ID NO: 2044461 - RNA, 19 nt, Artificial Sequence
  Description of Artificial Sequence: Synthetic oligonucleotide
uaacgcuauaguacuauaa

SEQ ID NO: 2044462 - RNA, 19 nt, Artificial Sequence
  Description of Artificial Sequence: Synthetic oligonucleotide
ugcuacgucauuugcguug

SEQ ID NO: 2044463 - RNA, 19 nt, Artificial Sequence
  Description of Artificial Sequence: Synthetic oligonucleotide
ugucccaauugcuacguca

SEQ ID NO: 2044464 - RNA, 19 nt, Artificial Sequence
  Description of Artificial Sequence: Synthetic oligonucleotide
uugcguugagauuuuauau

SEQ ID NO: 2044465 - RNA, 19 nt, Artificial Sequence
  Description of Artificial Sequence: Synthetic oligonucleotide
aagagucauacauaaccuu

SEQ ID NO: 2044466 - RNA, 19 nt, Artificial Sequence
  Description of Artificial Sequence: Synthetic oligonucleotide
aagagacuuuauuaccuaa

SEQ ID NO: 2044467 - RNA, 19 nt, Artificial Sequence
  Description of Artificial Sequence: Synthetic oligonucleotide
uguacuuagccaccccaca

SEQ ID NO: 2044468 - RNA, 19 nt, Artificial Sequence
  Description of Artificial Sequence: Synthetic oligonucleotide
auuaccuaauuucuguaua

SEQ ID NO: 2044469 - RNA, 19 nt, Artificial Sequence
  Description of Artificial Sequence: Synthetic oligonucleotide
aagacucauacaguagucu

SEQ ID NO: 2044470 - RNA, 19 nt, Artificial Sequence
  Description of Artificial Sequence: Synthetic oligonucleotide
uuuggguuagguguaguac

SEQ ID NO: 2044471 - RNA, 19 nt, Artificial Sequence
  Description of Artificial Sequence: Synthetic oligonucleotide
uugcuauguagaaguuugg

SEQ ID NO: 2044472 - RNA, 19 nt, Artificial Sequence
  Description of Artificial Sequence: Synthetic oligonucleotide
aggcucauauccaaggaac

SEQ ID NO: 2044473 - RNA, 19 nt, Artificial Sequence
  Description of Artificial Sequence: Synthetic oligonucleotide
  modified_base (14)..(14): a, c, u, g, unknown or other
ugugugugugugunugugu

SEQ ID NO: 2044474 - RNA, 19 nt, Artificial Sequence
  Description of Artificial Sequence: Synthetic oligonucleotide
augacagugaagacucacc

SEQ ID NO: 2044475 - RNA, 19 nt, Artificial Sequence
  Description of Artificial Sequence: Synthetic oligonucleotide
uaguaauucucuuggcuuc

SEQ ID NO: 2044476 - RNA, 19 nt, Artificial Sequence
  Description of Artificial Sequence: Synthetic oligonucleotide
auaguaauuuugcccugag

SEQ ID NO: 2044477 - RNA, 19 nt, Artificial Sequence
  Description of Artificial Sequence: Synthetic oligonucleotide
ggaguguggaacuugggcc

SEQ ID NO: 2044478 - RNA, 19 nt, Artificial Sequence
  Description of Artificial Sequence: Synthetic oligonucleotide
aagagccccaagucucugg

SEQ ID NO: 2044479 - RNA, 19 nt, Artificial Sequence
  Description of Artificial Sequence: Synthetic oligonucleotide
ucgaaagcaaggcauuuua

SEQ ID NO: 2044480 - RNA, 19 nt, Artificial Sequence
  Description of Artificial Sequence: Synthetic oligonucleotide
ugcguugagauuuuauaua

SEQ ID NO: 2044481 - RNA, 19 nt, Artificial Sequence
  Description of Artificial Sequence: Synthetic oligonucleotide
ugcccugagaguaucaaua

SEQ ID NO: 2044482 - RNA, 19 nt, Artificial Sequence
  Description of Artificial Sequence: Synthetic oligonucleotide
gugucuaacgcuauaguac

SEQ ID NO: 2044483 - RNA, 19 nt, Artificial Sequence
  Description of Artificial Sequence: Synthetic oligonucleotide
agugugacuuuacaauacu

SEQ ID NO: 2044484 - RNA, 19 nt, Artificial Sequence
  Description of Artificial Sequence: Synthetic oligonucleotide
gugugugugugucuaacgc

SEQ ID NO: 2044485 - RNA, 19 nt, Artificial Sequence
  Description of Artificial Sequence: Synthetic oligonucleotide
ucucuagaacuguaugaca

SEQ ID NO: 2044486 - RNA, 19 nt, Artificial Sequence
  Description of Artificial Sequence: Synthetic oligonucleotide
ucuagaacuguaugacagu

SEQ ID NO: 2044487 - RNA, 19 nt, Artificial Sequence
  Description of Artificial Sequence: Synthetic oligonucleotide
gugaaauccagaguagccc

SEQ ID NO: 2044488 - RNA, 19 nt, Artificial Sequence
  Description of Artificial Sequence: Synthetic oligonucleotide
aacuauugggagaaaaguu

SEQ ID NO: 2044489 - RNA, 19 nt, Artificial Sequence
  Description of Artificial Sequence: Synthetic oligonucleotide
aaaugguaguaauucucuu

SEQ ID NO: 2044490 - RNA, 19 nt, Artificial Sequence
  Description of Artificial Sequence: Synthetic oligonucleotide
accuaauuucuguauacaa

SEQ ID NO: 2044491 - RNA, 19 nt, Artificial Sequence
  Description of Artificial Sequence: Synthetic oligonucleotide
gaagaacaaagccugugaa

SEQ ID NO: 2044492 - RNA, 19 nt, Artificial Sequence
  Description of Artificial Sequence: Synthetic oligonucleotide
ugaggcucauauccaagga

SEQ ID NO: 2044493 - RNA, 19 nt, Artificial Sequence
  Description of Artificial Sequence: Synthetic oligonucleotide
agacuuuauuaccuaauuu

SEQ ID NO: 2044494 - RNA, 19 nt, Artificial Sequence
  Description of Artificial Sequence: Synthetic oligonucleotide
agagccccaagucucuggg

SEQ ID NO: 2044495 - RNA, 19 nt, Artificial Sequence
  Description of Artificial Sequence: Synthetic oligonucleotide
cuacguuaagagcaugaac

SEQ ID NO: 2044496 - RNA, 19 nt, Artificial Sequence
  Description of Artificial Sequence: Synthetic oligonucleotide
aaacaucugguugggugag

SEQ ID NO: 2044497 - RNA, 19 nt, Artificial Sequence
  Description of Artificial Sequence: Synthetic oligonucleotide
ugugucucugaagaauggc

SEQ ID NO: 2044498 - RNA, 19 nt, Artificial Sequence
  Description of Artificial Sequence: Synthetic oligonucleotide
uugucuacuccaacacuga

SEQ ID NO: 2044499 - RNA, 19 nt, Artificial Sequence
  Description of Artificial Sequence: Synthetic oligonucleotide
caaugaagguuucauguca

SEQ ID NO: 2044500 - RNA, 19 nt, Artificial Sequence
  Description of Artificial Sequence: Synthetic oligonucleotide
uggguuagguguaguaccu

SEQ ID NO: 2044501 - RNA, 19 nt, Artificial Sequence
  Description of Artificial Sequence: Synthetic oligonucleotide
acgcuauaguacuauaaaa

SEQ ID NO: 2044502 - RNA, 19 nt, Artificial Sequence
  Description of Artificial Sequence: Synthetic oligonucleotide
uugcaaagacucauacagu

SEQ ID NO: 2044503 - RNA, 19 nt, Artificial Sequence
  Description of Artificial Sequence: Synthetic oligonucleotide
uuggcuucucauaucgaaa

SEQ ID NO: 2044504 - RNA, 19 nt, Artificial Sequence
  Description of Artificial Sequence: Synthetic oligonucleotide
caauugcuacgucauuugc

SEQ ID NO: 2044505 - RNA, 19 nt, Artificial Sequence
  Description of Artificial Sequence: Synthetic oligonucleotide
guucagaugacuuucccgu

SEQ ID NO: 2044506 - RNA, 19 nt, Artificial Sequence
  Description of Artificial Sequence: Synthetic oligonucleotide
ccuauuguguacaugaaga

SEQ ID NO: 2044507 - RNA, 19 nt, Artificial Sequence
  Description of Artificial Sequence: Synthetic oligonucleotide
augacuuucccgugugucu

SEQ ID NO: 2044508 - RNA, 19 nt, Artificial Sequence
  Description of Artificial Sequence: Synthetic oligonucleotide
cauucuaagucaagaguca

SEQ ID NO: 2044509 - RNA, 19 nt, Artificial Sequence
  Description of Artificial Sequence: Synthetic oligonucleotide
ucuaacgcuauaguacuau

SEQ ID NO: 2044510 - RNA, 19 nt, Artificial Sequence
  Description of Artificial Sequence: Synthetic oligonucleotide
aguggaguguggaacuugg

SEQ ID NO: 2044511 - RNA, 19 nt, Artificial Sequence
  Description of Artificial Sequence: Synthetic oligonucleotide
  modified_base (16)..(16): a, c, u, g, unknown or other
ugugugugugugugunugu

SEQ ID NO: 2044512 - RNA, 19 nt, Artificial Sequence
  Description of Artificial Sequence: Synthetic oligonucleotide
  modified_base (4)..(4): a, c, u, g, unknown or other
ugunugugugugugugucu

SEQ ID NO: 2044513 - RNA, 19 nt, Artificial Sequence
  Description of Artificial Sequence: Synthetic oligonucleotide
agaaagggcuguguguguc

SEQ ID NO: 2044514 - RNA, 19 nt, Artificial Sequence
  Description of Artificial Sequence: Synthetic oligonucleotide
guguugcaaagacucauac

SEQ ID NO: 2044515 - RNA, 19 nt, Artificial Sequence
  Description of Artificial Sequence: Synthetic oligonucleotide
  modified_base (10)..(10): a, c, u, g, unknown or other
ugugugugunugugugugu

SEQ ID NO: 2044516 - RNA, 19 nt, Artificial Sequence
  Description of Artificial Sequence: Synthetic oligonucleotide
cacacugauaggcaugguc

SEQ ID NO: 2044517 - RNA, 19 nt, Artificial Sequence
  Description of Artificial Sequence: Synthetic oligonucleotide
uucagaugacuuucccgug

SEQ ID NO: 2044518 - RNA, 19 nt, Artificial Sequence
  Description of Artificial Sequence: Synthetic oligonucleotide
  modified_base (7)..(7): a, c, u, g, unknown or other
gugugunugugugugugug

SEQ ID NO: 2044519 - RNA, 19 nt, Artificial Sequence
  Description of Artificial Sequence: Synthetic oligonucleotide
cauaucgaaagcaaggcau

SEQ ID NO: 2044520 - RNA, 19 nt, Artificial Sequence
  Description of Artificial Sequence: Synthetic oligonucleotide
ucuacguuaagagcaugaa

SEQ ID NO: 2044521 - RNA, 19 nt, Artificial Sequence
  Description of Artificial Sequence: Synthetic oligonucleotide
gugugucuacguuaagagc

SEQ ID NO: 2044522 - RNA, 19 nt, Artificial Sequence
  Description of Artificial Sequence: Synthetic oligonucleotide
cuaaauggcuugucccuug

SEQ ID NO: 2044523 - RNA, 19 nt, Artificial Sequence
  Description of Artificial Sequence: Synthetic oligonucleotide
uucuaagucaagagucaua

SEQ ID NO: 2044524 - RNA, 19 nt, Artificial Sequence
  Description of Artificial Sequence: Synthetic oligonucleotide
uaaauauaugaguccuauu

SEQ ID NO: 2044525 - RNA, 19 nt, Artificial Sequence
  Description of Artificial Sequence: Synthetic oligonucleotide
cuauguagaaguuuggguu

SEQ ID NO: 2044526 - RNA, 19 nt, Artificial Sequence
  Description of Artificial Sequence: Synthetic oligonucleotide
  modified_base (6)..(6): a, c, u, g, unknown or other
ugugunugugugugugugu

SEQ ID NO: 2044527 - RNA, 19 nt, Artificial Sequence
  Description of Artificial Sequence: Synthetic oligonucleotide
ugagacccaugucuguacu

SEQ ID NO: 2044528 - RNA, 19 nt, Artificial Sequence
  Description of Artificial Sequence: Synthetic oligonucleotide
ugguaguaauucucuuggc

SEQ ID NO: 2044529 - RNA, 19 nt, Artificial Sequence
  Description of Artificial Sequence: Synthetic oligonucleotide
aagacucaccaggaugcag

SEQ ID NO: 2044530 - RNA, 19 nt, Artificial Sequence
  Description of Artificial Sequence: Synthetic oligonucleotide
  modified_base (12)..(12): a, c, u, g, unknown or other
ugugugugugunugugugu

SEQ ID NO: 2044531 - RNA, 19 nt, Artificial Sequence
  Description of Artificial Sequence: Synthetic oligonucleotide
aaguuugaguacauagaau

SEQ ID NO: 2044532 - RNA, 19 nt, Artificial Sequence
  Description of Artificial Sequence: Synthetic oligonucleotide
caugucacuuucuaaaagu

SEQ ID NO: 2044533 - RNA, 19 nt, Artificial Sequence
  Description of Artificial Sequence: Synthetic oligonucleotide
  modified_base (8)..(8): a, c, u, g, unknown or other
ugugugunugugugugugu

SEQ ID NO: 2044534 - RNA, 19 nt, Artificial Sequence
  Description of Artificial Sequence: Synthetic oligonucleotide
gcguugagauuuuauauac

SEQ ID NO: 2044535 - RNA, 19 nt, Artificial Sequence
  Description of Artificial Sequence: Synthetic oligonucleotide
ggaaaaggcuuuucaauga

SEQ ID NO: 2044536 - RNA, 19 nt, Artificial Sequence
  Description of Artificial Sequence: Synthetic oligonucleotide
uccuguugcuauguagaag

SEQ ID NO: 2044537 - RNA, 19 nt, Artificial Sequence
  Description of Artificial Sequence: Synthetic oligonucleotide
gcauucuaagucaagaguc

SEQ ID NO: 2044538 - RNA, 19 nt, Artificial Sequence
  Description of Artificial Sequence: Synthetic oligonucleotide
acucauacaguagucugga

SEQ ID NO: 2044539 - RNA, 19 nt, Artificial Sequence
  Description of Artificial Sequence: Synthetic oligonucleotide
uacacacaguggagugugg

SEQ ID NO: 2044540 - RNA, 19 nt, Artificial Sequence
  Description of Artificial Sequence: Synthetic oligonucleotide
gagucauacauaaccuuca

SEQ ID NO: 2044541 - RNA, 19 nt, Artificial Sequence
  Description of Artificial Sequence: Synthetic oligonucleotide
ugccaaugacaagugagac

SEQ ID NO: 2044542 - RNA, 19 nt, Artificial Sequence
  Description of Artificial Sequence: Synthetic oligonucleotide
uuuugcccugagaguauca

SEQ ID NO: 2044543 - RNA, 19 nt, Artificial Sequence
  Description of Artificial Sequence: Synthetic oligonucleotide
uuacaauacugaucuuaau

SEQ ID NO: 2044544 - RNA, 19 nt, Artificial Sequence
  Description of Artificial Sequence: Synthetic oligonucleotide
ugaagguuucaugucacuu

SEQ ID NO: 2044545 - RNA, 19 nt, Artificial Sequence
  Description of Artificial Sequence: Synthetic oligonucleotide
  modified_base (13)..(13): a, c, u, g, unknown or other
gugugugugugunugugug

SEQ ID NO: 2044546 - RNA, 19 nt, Artificial Sequence
  Description of Artificial Sequence: Synthetic oligonucleotide
cuuggcuucucauaucgaa

SEQ ID NO: 2044547 - RNA, 19 nt, Artificial Sequence
  Description of Artificial Sequence: Synthetic oligonucleotide
uauugggagaaaaguuguu

SEQ ID NO: 2044548 - RNA, 19 nt, Artificial Sequence
  Description of Artificial Sequence: Synthetic oligonucleotide
aagucaagagucauacaua

SEQ ID NO: 2044549 - RNA, 19 nt, Artificial Sequence
  Description of Artificial Sequence: Synthetic oligonucleotide
aggaaggaacuccucaauu

SEQ ID NO: 2044550 - RNA, 19 nt, Artificial Sequence
  Description of Artificial Sequence: Synthetic oligonucleotide
aguagcccugggcuugggg

SEQ ID NO: 2044551 - RNA, 19 nt, Artificial Sequence
  Description of Artificial Sequence: Synthetic oligonucleotide
acguuaagagcaugaacuu

SEQ ID NO: 2044552 - RNA, 19 nt, Artificial Sequence
  Description of Artificial Sequence: Synthetic oligonucleotide
gacucaccaggaugcagug

SEQ ID NO: 2044553 - RNA, 19 nt, Artificial Sequence
  Description of Artificial Sequence: Synthetic oligonucleotide
augggaucauucauggugu

SEQ ID NO: 2044554 - RNA, 19 nt, Artificial Sequence
  Description of Artificial Sequence: Synthetic oligonucleotide
gaggcucauauccaaggaa

SEQ ID NO: 2044555 - RNA, 19 nt, Artificial Sequence
  Description of Artificial Sequence: Synthetic oligonucleotide
ugucccuuguacacacagu

SEQ ID NO: 2044556 - RNA, 19 nt, Artificial Sequence
  Description of Artificial Sequence: Synthetic oligonucleotide
  modified_base (11)..(11): a, c, u, g, unknown or other
gugugugugunugugugug

SEQ ID NO: 2044557 - RNA, 19 nt, Artificial Sequence
  Description of Artificial Sequence: Synthetic oligonucleotide
agaauacaacugaugcuug

SEQ ID NO: 2044558 - RNA, 19 nt, Artificial Sequence
  Description of Artificial Sequence: Synthetic oligonucleotide
ucuuggcuucucauaucga

SEQ ID NO: 2044559 - RNA, 19 nt, Artificial Sequence
  Description of Artificial Sequence: Synthetic oligonucleotide
caagagucauacauaaccu

SEQ ID NO: 2044560 - RNA, 19 nt, Artificial Sequence
  Description of Artificial Sequence: Synthetic oligonucleotide
gaacuguaugacagugaag

SEQ ID NO: 2044561 - RNA, 19 nt, Artificial Sequence
  Description of Artificial Sequence: Synthetic oligonucleotide
aacuucucuagaacuguau

SEQ ID NO: 2044562 - RNA, 19 nt, Artificial Sequence
  Description of Artificial Sequence: Synthetic oligonucleotide
uguugcuauguagaaguuu

SEQ ID NO: 2044563 - RNA, 19 nt, Artificial Sequence
  Description of Artificial Sequence: Synthetic oligonucleotide
  modified_base (9)..(9): a, c, u, g, unknown or other
gugugugunugugugugug

SEQ ID NO: 2044564 - RNA, 19 nt, Artificial Sequence
  Description of Artificial Sequence: Synthetic oligonucleotide
ucugucccaauugcuacgu

SEQ ID NO: 2044565 - RNA, 19 nt, Artificial Sequence
  Description of Artificial Sequence: Synthetic oligonucleotide
ugguguugcaaagacucau

SEQ ID NO: 2044566 - RNA, 19 nt, Artificial Sequence
  Description of Artificial Sequence: Synthetic oligonucleotide
agacucaccaggaugcagu

SEQ ID NO: 2044567 - RNA, 19 nt, Artificial Sequence
  Description of Artificial Sequence: Synthetic oligonucleotide
ugugugugucuaacgcuau

SEQ ID NO: 2044568 - RNA, 19 nt, Artificial Sequence
  Description of Artificial Sequence: Synthetic oligonucleotide
acccaugucuguacuuagc

SEQ ID NO: 2044569 - RNA, 19 nt, Artificial Sequence
  Description of Artificial Sequence: Synthetic oligonucleotide
caauacugaucuuaauugu

SEQ ID NO: 2044570 - RNA, 19 nt, Artificial Sequence
  Description of Artificial Sequence: Synthetic oligonucleotide
gaaauccagaguagcccug

SEQ ID NO: 2044571 - RNA, 19 nt, Artificial Sequence
  Description of Artificial Sequence: Synthetic oligonucleotide
gaucauucaugguguugca

SEQ ID NO: 2044572 - RNA, 19 nt, Artificial Sequence
  Description of Artificial Sequence: Synthetic oligonucleotide
gccaaugacaagugagacc

SEQ ID NO: 2044573 - RNA, 19 nt, Artificial Sequence
  Description of Artificial Sequence: Synthetic oligonucleotide
uuucccgugugucuacguu

SEQ ID NO: 2044574 - RNA, 19 nt, Artificial Sequence
  Description of Artificial Sequence: Synthetic oligonucleotide
uuugcccugagaguaucaa

SEQ ID NO: 2044575 - RNA, 19 nt, Artificial Sequence
  Description of Artificial Sequence: Synthetic oligonucleotide
gccugugaaauccagagua

SEQ ID NO: 2044576 - RNA, 19 nt, Artificial Sequence
  Description of Artificial Sequence: Synthetic oligonucleotide
  modified_base (17)..(17): a, c, u, g, unknown or other
gugugugugugugugunug

SEQ ID NO: 2044577 - RNA, 19 nt, Artificial Sequence
  Description of Artificial Sequence: Synthetic oligonucleotide
ugugugugugugugugugu

SEQ ID NO: 2044578 - RNA, 19 nt, Artificial Sequence
  Description of Artificial Sequence: Synthetic oligonucleotide
acuugggccugacuaucug

SEQ ID NO: 2044579 - RNA, 19 nt, Artificial Sequence
  Description of Artificial Sequence: Synthetic oligonucleotide
aauuuugcccugagaguau

SEQ ID NO: 2044580 - RNA, 19 nt, Artificial Sequence
  Description of Artificial Sequence: Synthetic oligonucleotide
gguaguaauucucuuggcu

SEQ ID NO: 2044581 - RNA, 19 nt, Artificial Sequence
  Description of Artificial Sequence: Synthetic oligonucleotide
  modified_base (5)..(5): a, c, u, g, unknown or other
gugunuguguguguguguc

SEQ ID NO: 2044582 - RNA, 19 nt, Artificial Sequence
  Description of Artificial Sequence: Synthetic oligonucleotide
  modified_base (2)..(2): a, c, u, g, unknown or other
unugugugugugugucuaa

SEQ ID NO: 2044583 - RNA, 19 nt, Artificial Sequence
  Description of Artificial Sequence: Synthetic oligonucleotide
cugugugugugugugugug

SEQ ID NO: 2044584 - RNA, 19 nt, Artificial Sequence
  Description of Artificial Sequence: Synthetic oligonucleotide
uggaugccuugucuuacau

SEQ ID NO: 2044585 - RNA, 19 nt, Artificial Sequence
  Description of Artificial Sequence: Synthetic oligonucleotide
aggcauggucagaaagggc

SEQ ID NO: 2044586 - RNA, 19 nt, Artificial Sequence
  Description of Artificial Sequence: Synthetic oligonucleotide
agccugugaaauccagagu

SEQ ID NO: 2044587 - RNA, 19 nt, Artificial Sequence
  Description of Artificial Sequence: Synthetic oligonucleotide
  modified_base (18)..(18): a, c, u, g, unknown or other
ugugugugugugugugunu

SEQ ID NO: 2044588 - RNA, 19 nt, Artificial Sequence
  Description of Artificial Sequence: Synthetic oligonucleotide
uaucgaaagcaaggcauuu

SEQ ID NO: 2044589 - RNA, 19 nt, Artificial Sequence
  Description of Artificial Sequence: Synthetic oligonucleotide
gugagacccaugucuguac

SEQ ID NO: 2044590 - RNA, 19 nt, Artificial Sequence
  Description of Artificial Sequence: Synthetic oligonucleotide
gaaguuuggguuaggugua

SEQ ID NO: 2044591 - RNA, 19 nt, Artificial Sequence
  Description of Artificial Sequence: Synthetic oligonucleotide
uuuaaacuauugggagaaa

SEQ ID NO: 2044592 - RNA, 19 nt, Artificial Sequence
  Description of Artificial Sequence: Synthetic oligonucleotide
gucuacguuaagagcauga

SEQ ID NO: 2044593 - RNA, 19 nt, Artificial Sequence
  Description of Artificial Sequence: Synthetic oligonucleotide
guuuggguuagguguagua

SEQ ID NO: 2044594 - RNA, 19 nt, Artificial Sequence
  Description of Artificial Sequence: Synthetic oligonucleotide
ucauuugcguugagauuuu

SEQ ID NO: 2044595 - RNA, 19 nt, Artificial Sequence
  Description of Artificial Sequence: Synthetic oligonucleotide
  modified_base (15)..(15): a, c, u, g, unknown or other
gugugugugugugunugug

SEQ ID NO: 2044596 - RNA, 19 nt, Artificial Sequence
  Description of Artificial Sequence: Synthetic oligonucleotide
uaaggcuaaauggcuuguc

SEQ ID NO: 2044597 - RNA, 19 nt, Artificial Sequence
  Description of Artificial Sequence: Synthetic oligonucleotide
ugucuacguuaagagcaug

SEQ ID NO: 2044598 - RNA, 19 nt, Artificial Sequence
  Description of Artificial Sequence: Synthetic oligonucleotide
gcucauauccaaggaaccc

SEQ ID NO: 2044599 - RNA, 19 nt, Artificial Sequence
  Description of Artificial Sequence: Synthetic oligonucleotide
gugccaaugacaagugaga

SEQ ID NO: 2044600 - RNA, 19 nt, Artificial Sequence
  Description of Artificial Sequence: Synthetic oligonucleotide
acuuucccgugugucuacg

SEQ ID NO: 2044601 - RNA, 19 nt, Artificial Sequence
  Description of Artificial Sequence: Synthetic oligonucleotide
auaucgaaagcaaggcauu

SEQ ID NO: 2044602 - RNA, 19 nt, Artificial Sequence
  Description of Artificial Sequence: Synthetic oligonucleotide
auuugcguugagauuuuau

SEQ ID NO: 2044603 - RNA, 19 nt, Artificial Sequence
  Description of Artificial Sequence: Synthetic oligonucleotide
gcuauguagaaguuugggu

SEQ ID NO: 2044604 - RNA, 19 nt, Artificial Sequence
  Description of Artificial Sequence: Synthetic oligonucleotide
guagucuggaugccuuguc

SEQ ID NO: 2044605 - RNA, 19 nt, Artificial Sequence
  Description of Artificial Sequence: Synthetic oligonucleotide
acacacaguggagugugga

SEQ ID NO: 2044606 - RNA, 19 nt, Artificial Sequence
  Description of Artificial Sequence: Synthetic oligonucleotide
cuauuguguacaugaagau

SEQ ID NO: 2044607 - RNA, 19 nt, Artificial Sequence
  Description of Artificial Sequence: Synthetic oligonucleotide
uggucagaaagggcugugu

SEQ ID NO: 2044608 - RNA, 19 nt, Artificial Sequence
  Description of Artificial Sequence: Synthetic oligonucleotide
acugauaggcauggucaga

SEQ ID NO: 2044609 - RNA, 19 nt, Artificial Sequence
  Description of Artificial Sequence: Synthetic oligonucleotide
uagccaccccacaugggau

SEQ ID NO: 2044610 - RNA, 19 nt, Artificial Sequence
  Description of Artificial Sequence: Synthetic oligonucleotide
ccugagaguaucaauauau

SEQ ID NO: 2044611 - RNA, 19 nt, Artificial Sequence
  Description of Artificial Sequence: Synthetic oligonucleotide
ggcucauauccaaggaacc

SEQ ID NO: 2044612 - RNA, 19 nt, Artificial Sequence
  Description of Artificial Sequence: Synthetic oligonucleotide
  modified_base (3)..(3): a, c, u, g, unknown or other
gunugugugugugugucua

SEQ ID NO: 2044613 - RNA, 19 nt, Artificial Sequence
  Description of Artificial Sequence: Synthetic oligonucleotide
cagaguagcccugggcuug

SEQ ID NO: 2044614 - RNA, 19 nt, Artificial Sequence
  Description of Artificial Sequence: Synthetic oligonucleotide
cugccugugugugugugug

SEQ ID NO: 2044615 - RNA, 19 nt, Artificial Sequence
  Description of Artificial Sequence: Synthetic oligonucleotide
acaggccuccuguugcuau

SEQ ID NO: 2044616 - RNA, 19 nt, Artificial Sequence
  Description of Artificial Sequence: Synthetic oligonucleotide
cuuguacacacaguggagu

SEQ ID NO: 2044617 - RNA, 19 nt, Artificial Sequence
  Description of Artificial Sequence: Synthetic oligonucleotide
cuaacgcuauaguacuaua

SEQ ID NO: 2044618 - RNA, 19 nt, Artificial Sequence
  Description of Artificial Sequence: Synthetic oligonucleotide
gucaagagucauacauaac

SEQ ID NO: 2044619 - RNA, 19 nt, Artificial Sequence
  Description of Artificial Sequence: Synthetic oligonucleotide
gaagaauggcugucuugcu

SEQ ID NO: 2044620 - RNA, 19 nt, Artificial Sequence
  Description of Artificial Sequence: Synthetic oligonucleotide
aucgaaagcaaggcauuuu

SEQ ID NO: 2044621 - RNA, 19 nt, Artificial Sequence
  Description of Artificial Sequence: Synthetic oligonucleotide
cucauauccaaggaacccu

SEQ ID NO: 2044622 - RNA, 19 nt, Artificial Sequence
  Description of Artificial Sequence: Synthetic oligonucleotide
guagaaguuuggguuaggu

SEQ ID NO: 2044623 - RNA, 19 nt, Artificial Sequence
  Description of Artificial Sequence: Synthetic oligonucleotide
ugcugccugugugugugug

SEQ ID NO: 2044624 - RNA, 19 nt, Artificial Sequence
  Description of Artificial Sequence: Synthetic oligonucleotide
accccacaugggaucauuc

SEQ ID NO: 2044625 - RNA, 19 nt, Artificial Sequence
  Description of Artificial Sequence: Synthetic oligonucleotide
acaguagucuggaugccuu

SEQ ID NO: 2044626 - RNA, 19 nt, Artificial Sequence
  Description of Artificial Sequence: Synthetic oligonucleotide
gcacaacaucuuuccacag

SEQ ID NO: 2044627 - RNA, 19 nt, Artificial Sequence
  Description of Artificial Sequence: Synthetic oligonucleotide
gaggaaggaacuccucaau

SEQ ID NO: 2044628 - RNA, 19 nt, Artificial Sequence
  Description of Artificial Sequence: Synthetic oligonucleotide
gguuagguguaguaccugu

SEQ ID NO: 2044629 - RNA, 19 nt, Artificial Sequence
  Description of Artificial Sequence: Synthetic oligonucleotide
gagagguucugucccaauu

SEQ ID NO: 2044630 - RNA, 19 nt, Artificial Sequence
  Description of Artificial Sequence: Synthetic oligonucleotide
caguggaguguggaacuug

SEQ ID NO: 2044631 - RNA, 19 nt, Artificial Sequence
  Description of Artificial Sequence: Synthetic oligonucleotide
augguguugcaaagacuca

SEQ ID NO: 2044632 - RNA, 19 nt, Artificial Sequence
  Description of Artificial Sequence: Synthetic oligonucleotide
guacuuagccaccccacau

SEQ ID NO: 2044633 - RNA, 19 nt, Artificial Sequence
  Description of Artificial Sequence: Synthetic oligonucleotide
ggcuaaauggcuugucccu

SEQ ID NO: 2044634 - RNA, 19 nt, Artificial Sequence
  Description of Artificial Sequence: Synthetic oligonucleotide
gugugucuaacgcuauagu

SEQ ID NO: 2044635 - RNA, 19 nt, Artificial Sequence
  Description of Artificial Sequence: Synthetic oligonucleotide
caggccuccuguugcuaug

SEQ ID NO: 2044636 - RNA, 19 nt, Artificial Sequence
  Description of Artificial Sequence: Synthetic oligonucleotide
uugcuacgucauuugcguu

SEQ ID NO: 2044637 - RNA, 19 nt, Artificial Sequence
  Description of Artificial Sequence: Synthetic oligonucleotide
cugaucuuaauuguauauu

SEQ ID NO: 2044638 - RNA, 19 nt, Artificial Sequence
  Description of Artificial Sequence: Synthetic oligonucleotide
ugccugugugugugugugu

SEQ ID NO: 2044639 - RNA, 19 nt, Artificial Sequence
  Description of Artificial Sequence: Synthetic oligonucleotide
cugagaguaucaauauauu

SEQ ID NO: 2044640 - RNA, 19 nt, Artificial Sequence
  Description of Artificial Sequence: Synthetic oligonucleotide
  modified_base (19)..(19): a, c, u, g, unknown or other
gugugugugugugugugun

SEQ ID NO: 2044641 - RNA, 19 nt, Artificial Sequence
  Description of Artificial Sequence: Synthetic oligonucleotide
agguuucaugucacuuucu

SEQ ID NO: 2044642 - RNA, 19 nt, Artificial Sequence
  Description of Artificial Sequence: Synthetic oligonucleotide
gccugugugugugugugug

SEQ ID NO: 2044643 - RNA, 19 nt, Artificial Sequence
  Description of Artificial Sequence: Synthetic oligonucleotide
gcauggucagaaagggcug

SEQ ID NO: 2044644 - RNA, 19 nt, Artificial Sequence
  Description of Artificial Sequence: Synthetic oligonucleotide
caaugacaagugagaccca

SEQ ID NO: 2044645 - RNA, 19 nt, Artificial Sequence
  Description of Artificial Sequence: Synthetic oligonucleotide
cacuaaggcuaaauggcuu

SEQ ID NO: 2044646 - RNA, 19 nt, Artificial Sequence
  Description of Artificial Sequence: Synthetic oligonucleotide
gcuacgucauuugcguuga

SEQ ID NO: 2044647 - RNA, 19 nt, Artificial Sequence
  Description of Artificial Sequence: Synthetic oligonucleotide
cuacgucauuugcguugag

SEQ ID NO: 2044648 - RNA, 19 nt, Artificial Sequence
  Description of Artificial Sequence: Synthetic oligonucleotide
guccuauuguguacaugaa

SEQ ID NO: 2044649 - RNA, 19 nt, Artificial Sequence
  Description of Artificial Sequence: Synthetic oligonucleotide
gugugugucuaacgcuaua

SEQ ID NO: 2044650 - RNA, 19 nt, Artificial Sequence
  Description of Artificial Sequence: Synthetic oligonucleotide
cugucccaauugcuacguc

SEQ ID NO: 2044651 - RNA, 19 nt, Artificial Sequence
  Description of Artificial Sequence: Synthetic oligonucleotide
guaugacagugaagacuca

SEQ ID NO: 2044652 - RNA, 19 nt, Artificial Sequence
  Description of Artificial Sequence: Synthetic oligonucleotide
gucccaauugcuacgucau

SEQ ID NO: 2044653 - RNA, 19 nt, Artificial Sequence
  Description of Artificial Sequence: Synthetic oligonucleotide
gaguagcccugggcuuggg

SEQ ID NO: 2044654 - RNA, 19 nt, Artificial Sequence
  Description of Artificial Sequence: Synthetic oligonucleotide
cuaaggcuaaauggcuugu

SEQ ID NO: 2044655 - RNA, 19 nt, Artificial Sequence
  Description of Artificial Sequence: Synthetic oligonucleotide
gguguugcaaagacucaua

SEQ ID NO: 2044656 - RNA, 19 nt, Artificial Sequence
  Description of Artificial Sequence: Synthetic oligonucleotide
ggguuagguguaguaccug

SEQ ID NO: 2044657 - RNA, 19 nt, Artificial Sequence
  Description of Artificial Sequence: Synthetic oligonucleotide
ggaacccugggaaggccac

SEQ ID NO: 2044658 - RNA, 19 nt, Artificial Sequence
  Description of Artificial Sequence: Synthetic oligonucleotide
ggccugacuaucugucuua

SEQ ID NO: 2044659 - RNA, 19 nt, Artificial Sequence
  Description of Artificial Sequence: Synthetic oligonucleotide
gucuaacgcuauaguacua

SEQ ID NO: 2044660 - RNA, 19 nt, Artificial Sequence
  Description of Artificial Sequence: Synthetic oligonucleotide
cagaaagggcugugugugu

SEQ ID NO: 2044661 - RNA, 19 nt, Artificial Sequence
  Description of Artificial Sequence: Synthetic oligonucleotide
cuuucccgugugucuacgu

SEQ ID NO: 2044662 - RNA, 19 nt, Artificial Sequence
  Description of Artificial Sequence: Synthetic oligonucleotide
ccugggcuuggggugaaac

SEQ ID NO: 2044663 - RNA, 19 nt, Artificial Sequence
  Description of Artificial Sequence: Synthetic oligonucleotide
gugucuacguuaagagcau

SEQ ID NO: 2044664 - RNA, 19 nt, Artificial Sequence
  Description of Artificial Sequence: Synthetic oligonucleotide
cagagagguucugucccaa

SEQ ID NO: 2044665 - RNA, 19 nt, Artificial Sequence
  Description of Artificial Sequence: Synthetic oligonucleotide
cauuugcguugagauuuua

SEQ ID NO: 2044666 - RNA, 19 nt, Artificial Sequence
  Description of Artificial Sequence: Synthetic oligonucleotide
cuacuccaacacugaggcu

SEQ ID NO: 2044667 - RNA, 19 nt, Artificial Sequence
  Description of Artificial Sequence: Synthetic oligonucleotide
caggaugcagugugacuuu

SEQ ID NO: 2044668 - RNA, 19 nt, Artificial Sequence
  Description of Artificial Sequence: Synthetic oligonucleotide
ggaugccuugucuuacauu

SEQ ID NO: 2044669 - RNA, 19 nt, Artificial Sequence
  Description of Artificial Sequence: Synthetic oligonucleotide
ggggaggaaggaacuccuc

SEQ ID NO: 2044670 - RNA, 19 nt, Artificial Sequence
  Description of Artificial Sequence: Synthetic oligonucleotide
gcuaaauggcuugucccuu

SEQ ID NO: 2044671 - RNA, 19 nt, Artificial Sequence
  Description of Artificial Sequence: Synthetic oligonucleotide
cccaauugcuacgucauuu

SEQ ID NO: 2044672 - RNA, 19 nt, Artificial Sequence
  Description of Artificial Sequence: Synthetic oligonucleotide
gcugccugugugugugugu

SEQ ID NO: 2044673 - RNA, 19 nt, Artificial Sequence
  Description of Artificial Sequence: Synthetic oligonucleotide
ccugugugugugugugugu

SEQ ID NO: 2044674 - RNA, 19 nt, Artificial Sequence
  Description of Artificial Sequence: Synthetic oligonucleotide
caccccacaugggaucauu

SEQ ID NO: 2044675 - RNA, 19 nt, Artificial Sequence
  Description of Artificial Sequence: Synthetic oligonucleotide
ccaccccacaugggaucau

SEQ ID NO: 2044676 - RNA, 19 nt, Artificial Sequence
  Description of Artificial Sequence: Synthetic oligonucleotide
  modified_base (1)..(1): a, c, u, g, unknown or other
nugugugugugugucuaac

SEQ ID NO: 2044677 - RNA, 19 nt, Artificial Sequence
  Description of Artificial Sequence: Synthetic oligonucleotide
aguaacaacaggcuggacc

SEQ ID NO: 2044678 - RNA, 19 nt, Artificial Sequence
  Description of Artificial Sequence: Synthetic oligonucleotide
cucaucugcaauuagagcc

SEQ ID NO: 2044679 - RNA, 19 nt, Artificial Sequence
  Description of Artificial Sequence: Synthetic oligonucleotide
aaugcgaugagggacggcc

SEQ ID NO: 2044680 - RNA, 19 nt, Artificial Sequence
  Description of Artificial Sequence: Synthetic oligonucleotide
ugcaauuagagccucguag

SEQ ID NO: 2044681 - RNA, 19 nt, Artificial Sequence
  Description of Artificial Sequence: Synthetic oligonucleotide
auuagagccucguagaaag

SEQ ID NO: 2044682 - RNA, 19 nt, Artificial Sequence
  Description of Artificial Sequence: Synthetic oligonucleotide
aaguccagcaaguaacaac

SEQ ID NO: 2044683 - RNA, 19 nt, Artificial Sequence
  Description of Artificial Sequence: Synthetic oligonucleotide
uaauucaagguucauguac

SEQ ID NO: 2044684 - RNA, 19 nt, Artificial Sequence
  Description of Artificial Sequence: Synthetic oligonucleotide
aguaaaugcgaugagggac

SEQ ID NO: 2044685 - RNA, 19 nt, Artificial Sequence
  Description of Artificial Sequence: Synthetic oligonucleotide
ucaagguucauguacaguc

SEQ ID NO: 2044686 - RNA, 19 nt, Artificial Sequence
  Description of Artificial Sequence: Synthetic oligonucleotide
gauggggacuccuagacag

SEQ ID NO: 2044687 - RNA, 19 nt, Artificial Sequence
  Description of Artificial Sequence: Synthetic oligonucleotide
uguacagucucagauuucg

SEQ ID NO: 2044688 - RNA, 19 nt, Artificial Sequence
  Description of Artificial Sequence: Synthetic oligonucleotide
uccagaagauagcacacgg

SEQ ID NO: 2044689 - RNA, 19 nt, Artificial Sequence
  Description of Artificial Sequence: Synthetic oligonucleotide
ugauguucccuccagcucc

SEQ ID NO: 2044690 - RNA, 19 nt, Artificial Sequence
  Description of Artificial Sequence: Synthetic oligonucleotide
uucauguacagucucagau

SEQ ID NO: 2044691 - RNA, 19 nt, Artificial Sequence
  Description of Artificial Sequence: Synthetic oligonucleotide
uccaaguccagcaaguaac

SEQ ID NO: 2044692 - RNA, 19 nt, Artificial Sequence
  Description of Artificial Sequence: Synthetic oligonucleotide
gaagauagcacacggcagc

SEQ ID NO: 2044693 - RNA, 19 nt, Artificial Sequence
  Description of Artificial Sequence: Synthetic oligonucleotide
aaagugggcaccacagucc

SEQ ID NO: 2044694 - RNA, 19 nt, Artificial Sequence
  Description of Artificial Sequence: Synthetic oligonucleotide
aggggaguccaccagaagg

SEQ ID NO: 2044695 - RNA, 19 nt, Artificial Sequence
  Description of Artificial Sequence: Synthetic oligonucleotide
uccaccagaaggcaucgcg

SEQ ID NO: 2044696 - RNA, 19 nt, Artificial Sequence
  Description of Artificial Sequence: Synthetic oligonucleotide
aaaugugugacucgggguu

SEQ ID NO: 2044697 - RNA, 19 nt, Artificial Sequence
  Description of Artificial Sequence: Synthetic oligonucleotide
ucaagugcccaugucaggg

SEQ ID NO: 2044698 - RNA, 19 nt, Artificial Sequence
  Description of Artificial Sequence: Synthetic oligonucleotide
gaggauagugggaauaggg

SEQ ID NO: 2044699 - RNA, 19 nt, Artificial Sequence
  Description of Artificial Sequence: Synthetic oligonucleotide
aguucaagugcccauguca

SEQ ID NO: 2044700 - RNA, 19 nt, Artificial Sequence
  Description of Artificial Sequence: Synthetic oligonucleotide
guuggcacggccuucaccc

SEQ ID NO: 2044701 - RNA, 19 nt, Artificial Sequence
  Description of Artificial Sequence: Synthetic oligonucleotide
gacuccuagacagugacag

SEQ ID NO: 2044702 - RNA, 19 nt, Artificial Sequence
  Description of Artificial Sequence: Synthetic oligonucleotide
aauucaagguucauguaca

SEQ ID NO: 2044703 - RNA, 19 nt, Artificial Sequence
  Description of Artificial Sequence: Synthetic oligonucleotide
aagauagcacacggcagcc

SEQ ID NO: 2044704 - RNA, 19 nt, Artificial Sequence
  Description of Artificial Sequence: Synthetic oligonucleotide
ucauaauucaagguucaug

SEQ ID NO: 2044705 - RNA, 19 nt, Artificial Sequence
  Description of Artificial Sequence: Synthetic oligonucleotide
ucuuuuguccucugacagg

SEQ ID NO: 2044706 - RNA, 19 nt, Artificial Sequence
  Description of Artificial Sequence: Synthetic oligonucleotide
gaaccagucauaauucaag

SEQ ID NO: 2044707 - RNA, 19 nt, Artificial Sequence
  Description of Artificial Sequence: Synthetic oligonucleotide
guaaaugcgaugagggacg

SEQ ID NO: 2044708 - RNA, 19 nt, Artificial Sequence
  Description of Artificial Sequence: Synthetic oligonucleotide
agcaaguaacaacaggcug

SEQ ID NO: 2044709 - RNA, 19 nt, Artificial Sequence
  Description of Artificial Sequence: Synthetic oligonucleotide
ugggaaaugugugacucgg

SEQ ID NO: 2044710 - RNA, 19 nt, Artificial Sequence
  Description of Artificial Sequence: Synthetic oligonucleotide
ugggaauaggguuggcacg

SEQ ID NO: 2044711 - RNA, 19 nt, Artificial Sequence
  Description of Artificial Sequence: Synthetic oligonucleotide
gauagcacacggcagccgc

SEQ ID NO: 2044712 - RNA, 19 nt, Artificial Sequence
  Description of Artificial Sequence: Synthetic oligonucleotide
ggaaaugugugacucgggg

SEQ ID NO: 2044713 - RNA, 19 nt, Artificial Sequence
  Description of Artificial Sequence: Synthetic oligonucleotide
agauuucgcucccaggcuc

SEQ ID NO: 2044714 - RNA, 19 nt, Artificial Sequence
  Description of Artificial Sequence: Synthetic oligonucleotide
cagucauaauucaagguuc

SEQ ID NO: 2044715 - RNA, 19 nt, Artificial Sequence
  Description of Artificial Sequence: Synthetic oligonucleotide
caaggggaagguuggaggg

SEQ ID NO: 2044716 - RNA, 19 nt, Artificial Sequence
  Description of Artificial Sequence: Synthetic oligonucleotide
ucuggcggcgcacaucagg

SEQ ID NO: 2044717 - RNA, 19 nt, Artificial Sequence
  Description of Artificial Sequence: Synthetic oligonucleotide
aaguucaagugcccauguc

SEQ ID NO: 2044718 - RNA, 19 nt, Artificial Sequence
  Description of Artificial Sequence: Synthetic oligonucleotide
aggggagcuacucucaucu

SEQ ID NO: 2044719 - RNA, 19 nt, Artificial Sequence
  Description of Artificial Sequence: Synthetic oligonucleotide
uuucuguucucccucugac

SEQ ID NO: 2044720 - RNA, 19 nt, Artificial Sequence
  Description of Artificial Sequence: Synthetic oligonucleotide
aggugagcaguugaugugc

SEQ ID NO: 2044721 - RNA, 19 nt, Artificial Sequence
  Description of Artificial Sequence: Synthetic oligonucleotide
cucccucugacuuagugug

SEQ ID NO: 2044722 - RNA, 19 nt, Artificial Sequence
  Description of Artificial Sequence: Synthetic oligonucleotide
agaaagcccgggcugcggc

SEQ ID NO: 2044723 - RNA, 19 nt, Artificial Sequence
  Description of Artificial Sequence: Synthetic oligonucleotide
gcaaguaacaacaggcugg

SEQ ID NO: 2044724 - RNA, 19 nt, Artificial Sequence
  Description of Artificial Sequence: Synthetic oligonucleotide
accagaaggcaucgcgugc

SEQ ID NO: 2044725 - RNA, 19 nt, Artificial Sequence
  Description of Artificial Sequence: Synthetic oligonucleotide
ugugacucgggguuggggu

SEQ ID NO: 2044726 - RNA, 19 nt, Artificial Sequence
  Description of Artificial Sequence: Synthetic oligonucleotide
aucgcgugcauugauguuc

SEQ ID NO: 2044727 - RNA, 19 nt, Artificial Sequence
  Description of Artificial Sequence: Synthetic oligonucleotide
cuuaguguggcgacucgag

SEQ ID NO: 2044728 - RNA, 19 nt, Artificial Sequence
  Description of Artificial Sequence: Synthetic oligonucleotide
ucugucagauccccguucu

SEQ ID NO: 2044729 - RNA, 19 nt, Artificial Sequence
  Description of Artificial Sequence: Synthetic oligonucleotide
agggaagcccgcuucuucg

SEQ ID NO: 2044730 - RNA, 19 nt, Artificial Sequence
  Description of Artificial Sequence: Synthetic oligonucleotide
caaagugggcaccacaguc

SEQ ID NO: 2044731 - RNA, 19 nt, Artificial Sequence
  Description of Artificial Sequence: Synthetic oligonucleotide
ucguagaaagcccgggcug

SEQ ID NO: 2044732 - RNA, 19 nt, Artificial Sequence
  Description of Artificial Sequence: Synthetic oligonucleotide
ucuucggccagcugagcag

SEQ ID NO: 2044733 - RNA, 19 nt, Artificial Sequence
  Description of Artificial Sequence: Synthetic oligonucleotide
ugucagggguccaagucca

SEQ ID NO: 2044734 - RNA, 19 nt, Artificial Sequence
  Description of Artificial Sequence: Synthetic oligonucleotide
uaguguggcgacucgaggu

SEQ ID NO: 2044735 - RNA, 19 nt, Artificial Sequence
  Description of Artificial Sequence: Synthetic oligonucleotide
gugggaauaggguuggcac

SEQ ID NO: 2044736 - RNA, 19 nt, Artificial Sequence
  Description of Artificial Sequence: Synthetic oligonucleotide
uucaagugcccaugucagg

SEQ ID NO: 2044737 - RNA, 19 nt, Artificial Sequence
  Description of Artificial Sequence: Synthetic oligonucleotide
aagugggcaccacaguccu

SEQ ID NO: 2044738 - RNA, 19 nt, Artificial Sequence
  Description of Artificial Sequence: Synthetic oligonucleotide
uagagccucguagaaagcc

SEQ ID NO: 2044739 - RNA, 19 nt, Artificial Sequence
  Description of Artificial Sequence: Synthetic oligonucleotide
ucugacuuaguguggcgac

SEQ ID NO: 2044740 - RNA, 19 nt, Artificial Sequence
  Description of Artificial Sequence: Synthetic oligonucleotide
uucucccucugacuuagug

SEQ ID NO: 2044741 - RNA, 19 nt, Artificial Sequence
  Description of Artificial Sequence: Synthetic oligonucleotide
aacagcagccugaagccag

SEQ ID NO: 2044742 - RNA, 19 nt, Artificial Sequence
  Description of Artificial Sequence: Synthetic oligonucleotide
ucucugaccaugcgggcca

SEQ ID NO: 2044743 - RNA, 19 nt, Artificial Sequence
  Description of Artificial Sequence: Synthetic oligonucleotide
aauuagagccucguagaaa

SEQ ID NO: 2044744 - RNA, 19 nt, Artificial Sequence
  Description of Artificial Sequence: Synthetic oligonucleotide
uccuagacagugacagcag

SEQ ID NO: 2044745 - RNA, 19 nt, Artificial Sequence
  Description of Artificial Sequence: Synthetic oligonucleotide
aauaggguuggcacggccu

SEQ ID NO: 2044746 - RNA, 19 nt, Artificial Sequence
  Description of Artificial Sequence: Synthetic oligonucleotide
ugaggauagugggaauagg

SEQ ID NO: 2044747 - RNA, 19 nt, Artificial Sequence
  Description of Artificial Sequence: Synthetic oligonucleotide
ucucccucugacuuagugu

SEQ ID NO: 2044748 - RNA, 19 nt, Artificial Sequence
  Description of Artificial Sequence: Synthetic oligonucleotide
ugagggacggccuggacau

SEQ ID NO: 2044749 - RNA, 19 nt, Artificial Sequence
  Description of Artificial Sequence: Synthetic oligonucleotide
gucagauccccguucuggg

SEQ ID NO: 2044750 - RNA, 19 nt, Artificial Sequence
  Description of Artificial Sequence: Synthetic oligonucleotide
agcaggauccacuggguca

SEQ ID NO: 2044751 - RNA, 19 nt, Artificial Sequence
  Description of Artificial Sequence: Synthetic oligonucleotide
acuccuagacagugacagc

SEQ ID NO: 2044752 - RNA, 19 nt, Artificial Sequence
  Description of Artificial Sequence: Synthetic oligonucleotide
cucgcagccucccuggucc

SEQ ID NO: 2044753 - RNA, 19 nt, Artificial Sequence
  Description of Artificial Sequence: Synthetic oligonucleotide
ugagcaguugaugugcggu

SEQ ID NO: 2044754 - RNA, 19 nt, Artificial Sequence
  Description of Artificial Sequence: Synthetic oligonucleotide
uggggugcaggucuauagc

SEQ ID NO: 2044755 - RNA, 19 nt, Artificial Sequence
  Description of Artificial Sequence: Synthetic oligonucleotide
caugcgggccaccucaggg

SEQ ID NO: 2044756 - RNA, 19 nt, Artificial Sequence
  Description of Artificial Sequence: Synthetic oligonucleotide
gaaguucugucagaucccc

SEQ ID NO: 2044757 - RNA, 19 nt, Artificial Sequence
  Description of Artificial Sequence: Synthetic oligonucleotide
uccucgcagaacugggagg

SEQ ID NO: 2044758 - RNA, 19 nt, Artificial Sequence
  Description of Artificial Sequence: Synthetic oligonucleotide
ugguccugcuugaggauag

SEQ ID NO: 2044759 - RNA, 19 nt, Artificial Sequence
  Description of Artificial Sequence: Synthetic oligonucleotide
ucaaagugggcaccacagu

SEQ ID NO: 2044760 - RNA, 19 nt, Artificial Sequence
  Description of Artificial Sequence: Synthetic oligonucleotide
agcaccccgguccagaaga

SEQ ID NO: 2044761 - RNA, 19 nt, Artificial Sequence
  Description of Artificial Sequence: Synthetic oligonucleotide
aaagcccgggcugcggccc

SEQ ID NO: 2044762 - RNA, 19 nt, Artificial Sequence
  Description of Artificial Sequence: Synthetic oligonucleotide
uacucucaucugcaauuag

SEQ ID NO: 2044763 - RNA, 19 nt, Artificial Sequence
  Description of Artificial Sequence: Synthetic oligonucleotide
accgaaccagucauaauuc

SEQ ID NO: 2044764 - RNA, 19 nt, Artificial Sequence
  Description of Artificial Sequence: Synthetic oligonucleotide
cuggcggcgcacaucaggg

SEQ ID NO: 2044765 - RNA, 19 nt, Artificial Sequence
  Description of Artificial Sequence: Synthetic oligonucleotide
ucugcaauuagagccucgu

SEQ ID NO: 2044766 - RNA, 19 nt, Artificial Sequence
  Description of Artificial Sequence: Synthetic oligonucleotide
augagggacggccuggaca

SEQ ID NO: 2044767 - RNA, 19 nt, Artificial Sequence
  Description of Artificial Sequence: Synthetic oligonucleotide
agaagauagcacacggcag

SEQ ID NO: 2044768 - RNA, 19 nt, Artificial Sequence
  Description of Artificial Sequence: Synthetic oligonucleotide
agguuggagggauggggac

SEQ ID NO: 2044769 - RNA, 19 nt, Artificial Sequence
  Description of Artificial Sequence: Synthetic oligonucleotide
ugcuugaggauagugggaa

SEQ ID NO: 2044770 - RNA, 19 nt, Artificial Sequence
  Description of Artificial Sequence: Synthetic oligonucleotide
gguuggagucuucaaagug

SEQ ID NO: 2044771 - RNA, 19 nt, Artificial Sequence
  Description of Artificial Sequence: Synthetic oligonucleotide
cauugauguucccuccagc

SEQ ID NO: 2044772 - RNA, 19 nt, Artificial Sequence
  Description of Artificial Sequence: Synthetic oligonucleotide
augugcggugguuggaguc

SEQ ID NO: 2044773 - RNA, 19 nt, Artificial Sequence
  Description of Artificial Sequence: Synthetic oligonucleotide
uaaaugcgaugagggacgg

SEQ ID NO: 2044774 - RNA, 19 nt, Artificial Sequence
  Description of Artificial Sequence: Synthetic oligonucleotide
ucgcgugcauugauguucc

SEQ ID NO: 2044775 - RNA, 19 nt, Artificial Sequence
  Description of Artificial Sequence: Synthetic oligonucleotide
cugggaaaugugugacucg

SEQ ID NO: 2044776 - RNA, 19 nt, Artificial Sequence
  Description of Artificial Sequence: Synthetic oligonucleotide
gacuuaguguggcgacucg

SEQ ID NO: 2044777 - RNA, 19 nt, Artificial Sequence
  Description of Artificial Sequence: Synthetic oligonucleotide
ugcggccccauccaggacu

SEQ ID NO: 2044778 - RNA, 19 nt, Artificial Sequence
  Description of Artificial Sequence: Synthetic oligonucleotide
caccccaaggggaagguug

SEQ ID NO: 2044779 - RNA, 19 nt, Artificial Sequence
  Description of Artificial Sequence: Synthetic oligonucleotide
aaaugcgaugagggacggc

SEQ ID NO: 2044780 - RNA, 19 nt, Artificial Sequence
  Description of Artificial Sequence: Synthetic oligonucleotide
agcaguugaugugcggugg

SEQ ID NO: 2044781 - RNA, 19 nt, Artificial Sequence
  Description of Artificial Sequence: Synthetic oligonucleotide
caacaggcuggaccgaacc

SEQ ID NO: 2044782 - RNA, 19 nt, Artificial Sequence
  Description of Artificial Sequence: Synthetic oligonucleotide
uccuugucucuccacggcu

SEQ ID NO: 2044783 - RNA, 19 nt, Artificial Sequence
  Description of Artificial Sequence: Synthetic oligonucleotide
gagccucguagaaagcccg

SEQ ID NO: 2044784 - RNA, 19 nt, Artificial Sequence
  Description of Artificial Sequence: Synthetic oligonucleotide
aguugaugugcggugguug

SEQ ID NO: 2044785 - RNA, 19 nt, Artificial Sequence
  Description of Artificial Sequence: Synthetic oligonucleotide
gagcaguugaugugcggug

SEQ ID NO: 2044786 - RNA, 19 nt, Artificial Sequence
  Description of Artificial Sequence: Synthetic oligonucleotide
acggccuucaccccggggu

SEQ ID NO: 2044787 - RNA, 19 nt, Artificial Sequence
  Description of Artificial Sequence: Synthetic oligonucleotide
ucgagguacucuuucucuc

SEQ ID NO: 2044788 - RNA, 19 nt, Artificial Sequence
  Description of Artificial Sequence: Synthetic oligonucleotide
gaccgaaccagucauaauu

SEQ ID NO: 2044789 - RNA, 19 nt, Artificial Sequence
  Description of Artificial Sequence: Synthetic oligonucleotide
ucgcagaacugggaggcgg

SEQ ID NO: 2044790 - RNA, 19 nt, Artificial Sequence
  Description of Artificial Sequence: Synthetic oligonucleotide
auaauucaagguucaugua

SEQ ID NO: 2044791 - RNA, 19 nt, Artificial Sequence
  Description of Artificial Sequence: Synthetic oligonucleotide
ucgucauccucgcagccuc

SEQ ID NO: 2044792 - RNA, 19 nt, Artificial Sequence
  Description of Artificial Sequence: Synthetic oligonucleotide
gaagcccgcuucuucggcc

SEQ ID NO: 2044793 - RNA, 19 nt, Artificial Sequence
  Description of Artificial Sequence: Synthetic oligonucleotide
agcagccugaagccaggac

SEQ ID NO: 2044794 - RNA, 19 nt, Artificial Sequence
  Description of Artificial Sequence: Synthetic oligonucleotide
guccuaggcccauuccugg

SEQ ID NO: 2044795 - RNA, 19 nt, Artificial Sequence
  Description of Artificial Sequence: Synthetic oligonucleotide
uggcacggccuucaccccg

SEQ ID NO: 2044796 - RNA, 19 nt, Artificial Sequence
  Description of Artificial Sequence: Synthetic oligonucleotide
gaaaugugugacucggggu

SEQ ID NO: 2044797 - RNA, 19 nt, Artificial Sequence
  Description of Artificial Sequence: Synthetic oligonucleotide
aggauagugggaauagggu

SEQ ID NO: 2044798 - RNA, 19 nt, Artificial Sequence
  Description of Artificial Sequence: Synthetic oligonucleotide
ugguucucggggcuccuug

SEQ ID NO: 2044799 - RNA, 19 nt, Artificial Sequence
  Description of Artificial Sequence: Synthetic oligonucleotide
uucaagguucauguacagu

SEQ ID NO: 2044800 - RNA, 19 nt, Artificial Sequence
  Description of Artificial Sequence: Synthetic oligonucleotide
ggcaccacaguccucgcag

SEQ ID NO: 2044801 - RNA, 19 nt, Artificial Sequence
  Description of Artificial Sequence: Synthetic oligonucleotide
acucucaucugcaauuaga

SEQ ID NO: 2044802 - RNA, 19 nt, Artificial Sequence
  Description of Artificial Sequence: Synthetic oligonucleotide
aaguucugucagauccccg

SEQ ID NO: 2044803 - RNA, 19 nt, Artificial Sequence
  Description of Artificial Sequence: Synthetic oligonucleotide
ucauccugucgucauccuc

SEQ ID NO: 2044804 - RNA, 19 nt, Artificial Sequence
  Description of Artificial Sequence: Synthetic oligonucleotide
ugucgucauccucgcagcc

SEQ ID NO: 2044805 - RNA, 19 nt, Artificial Sequence
  Description of Artificial Sequence: Synthetic oligonucleotide
guccagaagauagcacacg

SEQ ID NO: 2044806 - RNA, 19 nt, Artificial Sequence
  Description of Artificial Sequence: Synthetic oligonucleotide
agugggaauaggguuggca

SEQ ID NO: 2044807 - RNA, 19 nt, Artificial Sequence
  Description of Artificial Sequence: Synthetic oligonucleotide
caggugagcaguugaugug

SEQ ID NO: 2044808 - RNA, 19 nt, Artificial Sequence
  Description of Artificial Sequence: Synthetic oligonucleotide
uggaccgaaccagucauaa

SEQ ID NO: 2044809 - RNA, 19 nt, Artificial Sequence
  Description of Artificial Sequence: Synthetic oligonucleotide
acagacuccuacccaggca

SEQ ID NO: 2044810 - RNA, 19 nt, Artificial Sequence
  Description of Artificial Sequence: Synthetic oligonucleotide
accccgguccagaagauag

SEQ ID NO: 2044811 - RNA, 19 nt, Artificial Sequence
  Description of Artificial Sequence: Synthetic oligonucleotide
cagccuucgaaguucuguc

SEQ ID NO: 2044812 - RNA, 19 nt, Artificial Sequence
  Description of Artificial Sequence: Synthetic oligonucleotide
cuacccaggcagcaccccg

SEQ ID NO: 2044813 - RNA, 19 nt, Artificial Sequence
  Description of Artificial Sequence: Synthetic oligonucleotide
gggagcuacucucaucugc

SEQ ID NO: 2044814 - RNA, 19 nt, Artificial Sequence
  Description of Artificial Sequence: Synthetic oligonucleotide
cagcucacagacuccuacc

SEQ ID NO: 2044815 - RNA, 19 nt, Artificial Sequence
  Description of Artificial Sequence: Synthetic oligonucleotide
cuccuacccaggcagcacc

SEQ ID NO: 2044816 - RNA, 19 nt, Artificial Sequence
  Description of Artificial Sequence: Synthetic oligonucleotide
accacaguccucgcagaac

SEQ ID NO: 2044817 - RNA, 19 nt, Artificial Sequence
  Description of Artificial Sequence: Synthetic oligonucleotide
gguucauguacagucucag

SEQ ID NO: 2044818 - RNA, 19 nt, Artificial Sequence
  Description of Artificial Sequence: Synthetic oligonucleotide
gcucucucugaccaugcgg

SEQ ID NO: 2044819 - RNA, 19 nt, Artificial Sequence
  Description of Artificial Sequence: Synthetic oligonucleotide
ccugucgucauccucgcag

SEQ ID NO: 2044820 - RNA, 19 nt, Artificial Sequence
  Description of Artificial Sequence: Synthetic oligonucleotide
uggggacuccuagacagug

SEQ ID NO: 2044821 - RNA, 19 nt, Artificial Sequence
  Description of Artificial Sequence: Synthetic oligonucleotide
ugacuuaguguggcgacuc

SEQ ID NO: 2044822 - RNA, 19 nt, Artificial Sequence
  Description of Artificial Sequence: Synthetic oligonucleotide
agcccaguccuuccugguc

SEQ ID NO: 2044823 - RNA, 19 nt, Artificial Sequence
  Description of Artificial Sequence: Synthetic oligonucleotide
agcuacucucaucugcaau

SEQ ID NO: 2044824 - RNA, 19 nt, Artificial Sequence
  Description of Artificial Sequence: Synthetic oligonucleotide
cuuaggggagcuacucuca

SEQ ID NO: 2044825 - RNA, 19 nt, Artificial Sequence
  Description of Artificial Sequence: Synthetic oligonucleotide
ggggugcaggucuauagcc

SEQ ID NO: 2044826 - RNA, 19 nt, Artificial Sequence
  Description of Artificial Sequence: Synthetic oligonucleotide
cacaucaggggaguccacc

SEQ ID NO: 2044827 - RNA, 19 nt, Artificial Sequence
  Description of Artificial Sequence: Synthetic oligonucleotide
agggacggccuggacaugg

SEQ ID NO: 2044828 - RNA, 19 nt, Artificial Sequence
  Description of Artificial Sequence: Synthetic oligonucleotide
ugugcggugguuggagucu

SEQ ID NO: 2044829 - RNA, 19 nt, Artificial Sequence
  Description of Artificial Sequence: Synthetic oligonucleotide
uggggcuuaggggagcuac

SEQ ID NO: 2044830 - RNA, 19 nt, Artificial Sequence
  Description of Artificial Sequence: Synthetic oligonucleotide
uucgcucccaggcucuguc

SEQ ID NO: 2044831 - RNA, 19 nt, Artificial Sequence
  Description of Artificial Sequence: Synthetic oligonucleotide
ucgguggcuggaguaaaug

SEQ ID NO: 2044832 - RNA, 19 nt, Artificial Sequence
  Description of Artificial Sequence: Synthetic oligonucleotide
uguggcgacucgagguacu

SEQ ID NO: 2044833 - RNA, 19 nt, Artificial Sequence
  Description of Artificial Sequence: Synthetic oligonucleotide
agccuucgaaguucuguca

SEQ ID NO: 2044834 - RNA, 19 nt, Artificial Sequence
  Description of Artificial Sequence: Synthetic oligonucleotide
cccaucuuuccagaggucg

SEQ ID NO: 2044835 - RNA, 19 nt, Artificial Sequence
  Description of Artificial Sequence: Synthetic oligonucleotide
gaguccaccagaaggcauc

SEQ ID NO: 2044836 - RNA, 19 nt, Artificial Sequence
  Description of Artificial Sequence: Synthetic oligonucleotide
ucccgagcugggaaaugug

SEQ ID NO: 2044837 - RNA, 19 nt, Artificial Sequence
  Description of Artificial Sequence: Synthetic oligonucleotide
aguguggcgacucgaggua

SEQ ID NO: 2044838 - RNA, 19 nt, Artificial Sequence
  Description of Artificial Sequence: Synthetic oligonucleotide
acggcagccgcuuggccug

SEQ ID NO: 2044839 - RNA, 19 nt, Artificial Sequence
  Description of Artificial Sequence: Synthetic oligonucleotide
caucaggggaguccaccag

SEQ ID NO: 2044840 - RNA, 19 nt, Artificial Sequence
  Description of Artificial Sequence: Synthetic oligonucleotide
agcccggguaucccgagcu

SEQ ID NO: 2044841 - RNA, 19 nt, Artificial Sequence
  Description of Artificial Sequence: Synthetic oligonucleotide
guucauguacagucucaga

SEQ ID NO: 2044842 - RNA, 19 nt, Artificial Sequence
  Description of Artificial Sequence: Synthetic oligonucleotide
caaguaacaacaggcugga

SEQ ID NO: 2044843 - RNA, 19 nt, Artificial Sequence
  Description of Artificial Sequence: Synthetic oligonucleotide
gccuucgaaguucugucag

SEQ ID NO: 2044844 - RNA, 19 nt, Artificial Sequence
  Description of Artificial Sequence: Synthetic oligonucleotide
uucaccccgggguccuagg

SEQ ID NO: 2044845 - RNA, 19 nt, Artificial Sequence
  Description of Artificial Sequence: Synthetic oligonucleotide
gcuccuugucucuccacgg

SEQ ID NO: 2044846 - RNA, 19 nt, Artificial Sequence
  Description of Artificial Sequence: Synthetic oligonucleotide
guagaaagcccgggcugcg

SEQ ID NO: 2044847 - RNA, 19 nt, Artificial Sequence
  Description of Artificial Sequence: Synthetic oligonucleotide
ugggucauccugucgucau

SEQ ID NO: 2044848 - RNA, 19 nt, Artificial Sequence
  Description of Artificial Sequence: Synthetic oligonucleotide
gggauggggacuccuagac

SEQ ID NO: 2044849 - RNA, 19 nt, Artificial Sequence
  Description of Artificial Sequence: Synthetic oligonucleotide
gauguucccuccagcuccc

SEQ ID NO: 2044850 - RNA, 19 nt, Artificial Sequence
  Description of Artificial Sequence: Synthetic oligonucleotide
acuuaguguggcgacucga

SEQ ID NO: 2044851 - RNA, 19 nt, Artificial Sequence
  Description of Artificial Sequence: Synthetic oligonucleotide
ccagaagauagcacacggc

SEQ ID NO: 2044852 - RNA, 19 nt, Artificial Sequence
  Description of Artificial Sequence: Synthetic oligonucleotide
acaacaggcuggaccgaac

SEQ ID NO: 2044853 - RNA, 19 nt, Artificial Sequence
  Description of Artificial Sequence: Synthetic oligonucleotide
gcuuaggggagcuacucuc

SEQ ID NO: 2044854 - RNA, 19 nt, Artificial Sequence
  Description of Artificial Sequence: Synthetic oligonucleotide
gugacucgggguuggggug

SEQ ID NO: 2044855 - RNA, 19 nt, Artificial Sequence
  Description of Artificial Sequence: Synthetic oligonucleotide
cagaggucgcuggagucgg

SEQ ID NO: 2044856 - RNA, 19 nt, Artificial Sequence
  Description of Artificial Sequence: Synthetic oligonucleotide
ucaccccgggguccuaggc

SEQ ID NO: 2044857 - RNA, 19 nt, Artificial Sequence
  Description of Artificial Sequence: Synthetic oligonucleotide
aaggcaucgcgugcauuga

SEQ ID NO: 2044858 - RNA, 19 nt, Artificial Sequence
  Description of Artificial Sequence: Synthetic oligonucleotide
aguccuuccugguccugcu

SEQ ID NO: 2044859 - RNA, 19 nt, Artificial Sequence
  Description of Artificial Sequence: Synthetic oligonucleotide
cauccucgcagccucccug

SEQ ID NO: 2044860 - RNA, 19 nt, Artificial Sequence
  Description of Artificial Sequence: Synthetic oligonucleotide
cuucggccagcugagcagc

SEQ ID NO: 2044861 - RNA, 19 nt, Artificial Sequence
  Description of Artificial Sequence: Synthetic oligonucleotide
ggucauccugucgucaucc

SEQ ID NO: 2044862 - RNA, 19 nt, Artificial Sequence
  Description of Artificial Sequence: Synthetic oligonucleotide
uggagucgguggcuggagu

SEQ ID NO: 2044863 - RNA, 19 nt, Artificial Sequence
  Description of Artificial Sequence: Synthetic oligonucleotide
agauccccguucugggcug

SEQ ID NO: 2044864 - RNA, 19 nt, Artificial Sequence
  Description of Artificial Sequence: Synthetic oligonucleotide
guggcuggaguaaaugcga

SEQ ID NO: 2044865 - RNA, 19 nt, Artificial Sequence
  Description of Artificial Sequence: Synthetic oligonucleotide
ugugugacucgggguuggg

SEQ ID NO: 2044866 - RNA, 19 nt, Artificial Sequence
  Description of Artificial Sequence: Synthetic oligonucleotide
ugacucgggguuggggugc

SEQ ID NO: 2044867 - RNA, 19 nt, Artificial Sequence
  Description of Artificial Sequence: Synthetic oligonucleotide
uccuaggcccauuccuggu

SEQ ID NO: 2044868 - RNA, 19 nt, Artificial Sequence
  Description of Artificial Sequence: Synthetic oligonucleotide
cuagacagugacagcaggu

SEQ ID NO: 2044869 - RNA, 19 nt, Artificial Sequence
  Description of Artificial Sequence: Synthetic oligonucleotide
ugugguugcugcugcccau

SEQ ID NO: 2044870 - RNA, 19 nt, Artificial Sequence
  Description of Artificial Sequence: Synthetic oligonucleotide
cucccgggguuccagcagc

SEQ ID NO: 2044871 - RNA, 19 nt, Artificial Sequence
  Description of Artificial Sequence: Synthetic oligonucleotide
gcuuggccugcucuggcgg

SEQ ID NO: 2044872 - RNA, 19 nt, Artificial Sequence
  Description of Artificial Sequence: Synthetic oligonucleotide
aucccgagcugggaaaugu

SEQ ID NO: 2044873 - RNA, 19 nt, Artificial Sequence
  Description of Artificial Sequence: Synthetic oligonucleotide
cuugaggauagugggaaua

SEQ ID NO: 2044874 - RNA, 19 nt, Artificial Sequence
  Description of Artificial Sequence: Synthetic oligonucleotide
cucccagacacagcccggg

SEQ ID NO: 2044875 - RNA, 19 nt, Artificial Sequence
  Description of Artificial Sequence: Synthetic oligonucleotide
gaccggcucugguucucgg

SEQ ID NO: 2044876 - RNA, 19 nt, Artificial Sequence
  Description of Artificial Sequence: Synthetic oligonucleotide
uaggggagcuacucucauc

SEQ ID NO: 2044877 - RNA, 19 nt, Artificial Sequence
  Description of Artificial Sequence: Synthetic oligonucleotide
gaugagggacggccuggac

SEQ ID NO: 2044878 - RNA, 19 nt, Artificial Sequence
  Description of Artificial Sequence: Synthetic oligonucleotide
ggugagcaguugaugugcg

SEQ ID NO: 2044879 - RNA, 19 nt, Artificial Sequence
  Description of Artificial Sequence: Synthetic oligonucleotide
gggguccaaguccagcaag

SEQ ID NO: 2044880 - RNA, 19 nt, Artificial Sequence
  Description of Artificial Sequence: Synthetic oligonucleotide
gaacugggaggcggugggg

SEQ ID NO: 2044881 - RNA, 19 nt, Artificial Sequence
  Description of Artificial Sequence: Synthetic oligonucleotide
guacagucucagauuucgc

SEQ ID NO: 2044882 - RNA, 19 nt, Artificial Sequence
  Description of Artificial Sequence: Synthetic oligonucleotide
gacggccuggacauggcuc

SEQ ID NO: 2044883 - RNA, 19 nt, Artificial Sequence
  Description of Artificial Sequence: Synthetic oligonucleotide
ugcaggucuauagcccagu

SEQ ID NO: 2044884 - RNA, 19 nt, Artificial Sequence
  Description of Artificial Sequence: Synthetic oligonucleotide
caagguucauguacagucu

SEQ ID NO: 2044885 - RNA, 19 nt, Artificial Sequence
  Description of Artificial Sequence: Synthetic oligonucleotide
uuggcacggccuucacccc

SEQ ID NO: 2044886 - RNA, 19 nt, Artificial Sequence
  Description of Artificial Sequence: Synthetic oligonucleotide
agugcccaugucagggguc

SEQ ID NO: 2044887 - RNA, 19 nt, Artificial Sequence
  Description of Artificial Sequence: Synthetic oligonucleotide
cacaguccucgcagaacug

SEQ ID NO: 2044888 - RNA, 19 nt, Artificial Sequence
  Description of Artificial Sequence: Synthetic oligonucleotide
caguccuuccugguccugc

SEQ ID NO: 2044889 - RNA, 19 nt, Artificial Sequence
  Description of Artificial Sequence: Synthetic oligonucleotide
ggcuggaguaaaugcgaug

SEQ ID NO: 2044890 - RNA, 19 nt, Artificial Sequence
  Description of Artificial Sequence: Synthetic oligonucleotide
cagggaagcccgcuucuuc

SEQ ID NO: 2044891 - RNA, 19 nt, Artificial Sequence
  Description of Artificial Sequence: Synthetic oligonucleotide
gaggucgcuggagucggug

SEQ ID NO: 2044892 - RNA, 19 nt, Artificial Sequence
  Description of Artificial Sequence: Synthetic oligonucleotide
cucccagcucacagacucc

SEQ ID NO: 2044893 - RNA, 19 nt, Artificial Sequence
  Description of Artificial Sequence: Synthetic oligonucleotide
cucgagguacucuuucucu

SEQ ID NO: 2044894 - RNA, 19 nt, Artificial Sequence
  Description of Artificial Sequence: Synthetic oligonucleotide
ggagcuacucucaucugca

SEQ ID NO: 2044895 - RNA, 19 nt, Artificial Sequence
  Description of Artificial Sequence: Synthetic oligonucleotide
acagcccggguaucccgag

SEQ ID NO: 2044896 - RNA, 19 nt, Artificial Sequence
  Description of Artificial Sequence: Synthetic oligonucleotide
cugcuugaggauaguggga

SEQ ID NO: 2044897 - RNA, 19 nt, Artificial Sequence
  Description of Artificial Sequence: Synthetic oligonucleotide
ccucgcagaacugggaggc

SEQ ID NO: 2044898 - RNA, 19 nt, Artificial Sequence
  Description of Artificial Sequence: Synthetic oligonucleotide
cuccacggcucucucugac

SEQ ID NO: 2044899 - RNA, 19 nt, Artificial Sequence
  Description of Artificial Sequence: Synthetic oligonucleotide
gggagaccggcucugguuc

SEQ ID NO: 2044900 - RNA, 19 nt, Artificial Sequence
  Description of Artificial Sequence: Synthetic oligonucleotide
ccagcucacagacuccuac

SEQ ID NO: 2044901 - RNA, 19 nt, Artificial Sequence
  Description of Artificial Sequence: Synthetic oligonucleotide
uaacaacaggcuggaccga

SEQ ID NO: 2044902 - RNA, 19 nt, Artificial Sequence
  Description of Artificial Sequence: Synthetic oligonucleotide
ggauagugggaauaggguu

SEQ ID NO: 2044903 - RNA, 19 nt, Artificial Sequence
  Description of Artificial Sequence: Synthetic oligonucleotide
cucguagaaagcccgggcu

SEQ ID NO: 2044904 - RNA, 19 nt, Artificial Sequence
  Description of Artificial Sequence: Synthetic oligonucleotide
ucgcucccaggcucugucc

SEQ ID NO: 2044905 - RNA, 19 nt, Artificial Sequence
  Description of Artificial Sequence: Synthetic oligonucleotide
gcagccugaagccaggacu

SEQ ID NO: 2044906 - RNA, 19 nt, Artificial Sequence
  Description of Artificial Sequence: Synthetic oligonucleotide
gacuccuacccaggcagca

SEQ ID NO: 2044907 - RNA, 19 nt, Artificial Sequence
  Description of Artificial Sequence: Synthetic oligonucleotide
gcuucuucggccagcugag

SEQ ID NO: 2044908 - RNA, 19 nt, Artificial Sequence
  Description of Artificial Sequence: Synthetic oligonucleotide
ggaagguuggagggauggg

SEQ ID NO: 2044909 - RNA, 19 nt, Artificial Sequence
  Description of Artificial Sequence: Synthetic oligonucleotide
ccaccccucaacagcagcc

SEQ ID NO: 2044910 - RNA, 19 nt, Artificial Sequence
  Description of Artificial Sequence: Synthetic oligonucleotide
gcucuggcggcgcacauca

SEQ ID NO: 2044911 - RNA, 19 nt, Artificial Sequence
  Description of Artificial Sequence: Synthetic oligonucleotide
uucggccagcugagcagca

SEQ ID NO: 2044912 - RNA, 19 nt, Artificial Sequence
  Description of Artificial Sequence: Synthetic oligonucleotide
cgagguacucuuucucucc

SEQ ID NO: 2044913 - RNA, 19 nt, Artificial Sequence
  Description of Artificial Sequence: Synthetic oligonucleotide
aggggaagguuggagggau

SEQ ID NO: 2044914 - RNA, 19 nt, Artificial Sequence
  Description of Artificial Sequence: Synthetic oligonucleotide
ccucguagaaagcccgggc

SEQ ID NO: 2044915 - RNA, 19 nt, Artificial Sequence
  Description of Artificial Sequence: Synthetic oligonucleotide
gggaaaugugugacucggg

SEQ ID NO: 2044916 - RNA, 19 nt, Artificial Sequence
  Description of Artificial Sequence: Synthetic oligonucleotide
ccgagcugggaaaugugug

SEQ ID NO: 2044917 - RNA, 19 nt, Artificial Sequence
  Description of Artificial Sequence: Synthetic oligonucleotide
agccucguagaaagcccgg

SEQ ID NO: 2044918 - RNA, 19 nt, Artificial Sequence
  Description of Artificial Sequence: Synthetic oligonucleotide
ccagaggucgcuggagucg

SEQ ID NO: 2044919 - RNA, 19 nt, Artificial Sequence
  Description of Artificial Sequence: Synthetic oligonucleotide
gguaucccgagcugggaaa

SEQ ID NO: 2044920 - RNA, 19 nt, Artificial Sequence
  Description of Artificial Sequence: Synthetic oligonucleotide
gggugcaggucuauagccc

SEQ ID NO: 2044921 - RNA, 19 nt, Artificial Sequence
  Description of Artificial Sequence: Synthetic oligonucleotide
cauuccugguucccagcca

SEQ ID NO: 2044922 - RNA, 19 nt, Artificial Sequence
  Description of Artificial Sequence: Synthetic oligonucleotide
caucugcaauuagagccuc

SEQ ID NO: 2044923 - RNA, 19 nt, Artificial Sequence
  Description of Artificial Sequence: Synthetic oligonucleotide
caggggaguccaccagaag

SEQ ID NO: 2044924 - RNA, 19 nt, Artificial Sequence
  Description of Artificial Sequence: Synthetic oligonucleotide
gcacacggcagccgcuugg

SEQ ID NO: 2044925 - RNA, 19 nt, Artificial Sequence
  Description of Artificial Sequence: Synthetic oligonucleotide
agcacacggcagccgcuug

SEQ ID NO: 2044926 - RNA, 19 nt, Artificial Sequence
  Description of Artificial Sequence: Synthetic oligonucleotide
ggaagcccgcuucuucggc

SEQ ID NO: 2044927 - RNA, 19 nt, Artificial Sequence
  Description of Artificial Sequence: Synthetic oligonucleotide
gaugugcggugguuggagu

SEQ ID NO: 2044928 - RNA, 19 nt, Artificial Sequence
  Description of Artificial Sequence: Synthetic oligonucleotide
cugucagauccccguucug

SEQ ID NO: 2044929 - RNA, 19 nt, Artificial Sequence
  Description of Artificial Sequence: Synthetic oligonucleotide
gagcuacucucaucugcaa

SEQ ID NO: 2044930 - RNA, 19 nt, Artificial Sequence
  Description of Artificial Sequence: Synthetic oligonucleotide
ucgcuggagucgguggcug

SEQ ID NO: 2044931 - RNA, 19 nt, Artificial Sequence
  Description of Artificial Sequence: Synthetic oligonucleotide
cucgcagaacugggaggcg

SEQ ID NO: 2044932 - RNA, 19 nt, Artificial Sequence
  Description of Artificial Sequence: Synthetic oligonucleotide
gcuacucucaucugcaauu

SEQ ID NO: 2044933 - RNA, 19 nt, Artificial Sequence
  Description of Artificial Sequence: Synthetic oligonucleotide
gucauccucgcagccuccc

SEQ ID NO: 2044934 - RNA, 19 nt, Artificial Sequence
  Description of Artificial Sequence: Synthetic oligonucleotide
ggcaucgcgugcauugaug

SEQ ID NO: 2044935 - RNA, 19 nt, Artificial Sequence
  Description of Artificial Sequence: Synthetic oligonucleotide
aguccucgcagaacuggga

SEQ ID NO: 2044936 - RNA, 19 nt, Artificial Sequence
  Description of Artificial Sequence: Synthetic oligonucleotide
cgguggcuggaguaaaugc

SEQ ID NO: 2044937 - RNA, 19 nt, Artificial Sequence
  Description of Artificial Sequence: Synthetic oligonucleotide
gauuucgcucccaggcucu

SEQ ID NO: 2044938 - RNA, 19 nt, Artificial Sequence
  Description of Artificial Sequence: Synthetic oligonucleotide
gagucgguggcuggaguaa

SEQ ID NO: 2044939 - RNA, 19 nt, Artificial Sequence
  Description of Artificial Sequence: Synthetic oligonucleotide
ggcuggaccgaaccaguca

SEQ ID NO: 2044940 - RNA, 19 nt, Artificial Sequence
  Description of Artificial Sequence: Synthetic oligonucleotide
ugguucccagccaccccuc

SEQ ID NO: 2044941 - RNA, 19 nt, Artificial Sequence
  Description of Artificial Sequence: Synthetic oligonucleotide
ugccucccgggguuccagc

SEQ ID NO: 2044942 - RNA, 19 nt, Artificial Sequence
  Description of Artificial Sequence: Synthetic oligonucleotide
cuacucucaucugcaauua

SEQ ID NO: 2044943 - RNA, 19 nt, Artificial Sequence
  Description of Artificial Sequence: Synthetic oligonucleotide
ccaaguccagcaaguaaca

SEQ ID NO: 2044944 - RNA, 19 nt, Artificial Sequence
  Description of Artificial Sequence: Synthetic oligonucleotide
ugggcaccccaaggggaag

SEQ ID NO: 2044945 - RNA, 19 nt, Artificial Sequence
  Description of Artificial Sequence: Synthetic oligonucleotide
cuucaccccgggguccuag

SEQ ID NO: 2044946 - RNA, 19 nt, Artificial Sequence
  Description of Artificial Sequence: Synthetic oligonucleotide
ggcggcgcacaucagggga

SEQ ID NO: 2044947 - RNA, 19 nt, Artificial Sequence
  Description of Artificial Sequence: Synthetic oligonucleotide
ccuugucucuccacggcuc

SEQ ID NO: 2044948 - RNA, 19 nt, Artificial Sequence
  Description of Artificial Sequence: Synthetic oligonucleotide
cucugacagggccagcucu

SEQ ID NO: 2044949 - RNA, 19 nt, Artificial Sequence
  Description of Artificial Sequence: Synthetic oligonucleotide
gccucguagaaagcccggg

SEQ ID NO: 2044950 - RNA, 19 nt, Artificial Sequence
  Description of Artificial Sequence: Synthetic oligonucleotide
cagauccccguucugggcu

SEQ ID NO: 2044951 - RNA, 19 nt, Artificial Sequence
  Description of Artificial Sequence: Synthetic oligonucleotide
ccggguaucccgagcuggg

SEQ ID NO: 2044952 - RNA, 19 nt, Artificial Sequence
  Description of Artificial Sequence: Synthetic oligonucleotide
gcaucgcgugcauugaugu

SEQ ID NO: 2044953 - RNA, 19 nt, Artificial Sequence
  Description of Artificial Sequence: Synthetic oligonucleotide
cuucgaaguucugucagau

SEQ ID NO: 2044954 - RNA, 19 nt, Artificial Sequence
  Description of Artificial Sequence: Synthetic oligonucleotide
cguagaaagcccgggcugc

SEQ ID NO: 2044955 - RNA, 19 nt, Artificial Sequence
  Description of Artificial Sequence: Synthetic oligonucleotide
ucugaccaugcgggccacc

SEQ ID NO: 2044956 - RNA, 19 nt, Artificial Sequence
  Description of Artificial Sequence: Synthetic oligonucleotide
cagauuucgcucccaggcu

SEQ ID NO: 2044957 - RNA, 19 nt, Artificial Sequence
  Description of Artificial Sequence: Synthetic oligonucleotide
guguggcgacucgagguac

SEQ ID NO: 2044958 - RNA, 19 nt, Artificial Sequence
  Description of Artificial Sequence: Synthetic oligonucleotide
cacagcccggguaucccga

SEQ ID NO: 2044959 - RNA, 19 nt, Artificial Sequence
  Description of Artificial Sequence: Synthetic oligonucleotide
auccccguucugggcugcc

SEQ ID NO: 2044960 - RNA, 19 nt, Artificial Sequence
  Description of Artificial Sequence: Synthetic oligonucleotide
gcugcggccccauccagga

SEQ ID NO: 2044961 - RNA, 19 nt, Artificial Sequence
  Description of Artificial Sequence: Synthetic oligonucleotide
caaguccagcaaguaacaa

SEQ ID NO: 2044962 - RNA, 19 nt, Artificial Sequence
  Description of Artificial Sequence: Synthetic oligonucleotide
ugcggugguuggagucuuc

SEQ ID NO: 2044963 - RNA, 19 nt, Artificial Sequence
  Description of Artificial Sequence: Synthetic oligonucleotide
cacggcagccgcuuggccu

SEQ ID NO: 2044964 - RNA, 19 nt, Artificial Sequence
  Description of Artificial Sequence: Synthetic oligonucleotide
cuugucucuccacggcucu

SEQ ID NO: 2044965 - RNA, 19 nt, Artificial Sequence
  Description of Artificial Sequence: Synthetic oligonucleotide
agcccgcuucuucggccag

SEQ ID NO: 2044966 - RNA, 19 nt, Artificial Sequence
  Description of Artificial Sequence: Synthetic oligonucleotide
uagcacacggcagccgcuu

SEQ ID NO: 2044967 - RNA, 19 nt, Artificial Sequence
  Description of Artificial Sequence: Synthetic oligonucleotide
cuauagcccaguccuuccu

SEQ ID NO: 2044968 - RNA, 19 nt, Artificial Sequence
  Description of Artificial Sequence: Synthetic oligonucleotide
ggagucgguggcuggagua

SEQ ID NO: 2044969 - RNA, 19 nt, Artificial Sequence
  Description of Artificial Sequence: Synthetic oligonucleotide
cccaaggggaagguuggag

SEQ ID NO: 2044970 - RNA, 19 nt, Artificial Sequence
  Description of Artificial Sequence: Synthetic oligonucleotide
gggguccuaggcccauucc

SEQ ID NO: 2044971 - RNA, 19 nt, Artificial Sequence
  Description of Artificial Sequence: Synthetic oligonucleotide
ggguaucccgagcugggaa

SEQ ID NO: 2044972 - RNA, 19 nt, Artificial Sequence
  Description of Artificial Sequence: Synthetic oligonucleotide
augcgaugagggacggccu

SEQ ID NO: 2044973 - RNA, 19 nt, Artificial Sequence
  Description of Artificial Sequence: Synthetic oligonucleotide
cccggguaucccgagcugg

SEQ ID NO: 2044974 - RNA, 19 nt, Artificial Sequence
  Description of Artificial Sequence: Synthetic oligonucleotide
gacuggaggugggcacccc

SEQ ID NO: 2044975 - RNA, 19 nt, Artificial Sequence
  Description of Artificial Sequence: Synthetic oligonucleotide
cagcccggguaucccgagc

SEQ ID NO: 2044976 - RNA, 19 nt, Artificial Sequence
  Description of Artificial Sequence: Synthetic oligonucleotide
ccgaaccagucauaauuca

SEQ ID NO: 2044977 - RNA, 19 nt, Artificial Sequence
  Description of Artificial Sequence: Synthetic oligonucleotide
cugcaauuagagccucgua

SEQ ID NO: 2044978 - RNA, 19 nt, Artificial Sequence
  Description of Artificial Sequence: Synthetic oligonucleotide
ggugggcaccccaagggga

SEQ ID NO: 2044979 - RNA, 19 nt, Artificial Sequence
  Description of Artificial Sequence: Synthetic oligonucleotide
ggguccuaggcccauuccu

SEQ ID NO: 2044980 - RNA, 19 nt, Artificial Sequence
  Description of Artificial Sequence: Synthetic oligonucleotide
cuguucucccucugacuua

SEQ ID NO: 2044981 - RNA, 19 nt, Artificial Sequence
  Description of Artificial Sequence: Synthetic oligonucleotide
gcuggaccgaaccagucau

SEQ ID NO: 2044982 - RNA, 19 nt, Artificial Sequence
  Description of Artificial Sequence: Synthetic oligonucleotide
caggcagcaccccggucca

SEQ ID NO: 2044983 - RNA, 19 nt, Artificial Sequence
  Description of Artificial Sequence: Synthetic oligonucleotide
gcgcacaucaggggagucc

SEQ ID NO: 2044984 - RNA, 19 nt, Artificial Sequence
  Description of Artificial Sequence: Synthetic oligonucleotide
accaugcgggccaccucag

SEQ ID NO: 2044985 - RNA, 19 nt, Artificial Sequence
  Description of Artificial Sequence: Synthetic oligonucleotide
ggcugcggccccauccagg

SEQ ID NO: 2044986 - RNA, 19 nt, Artificial Sequence
  Description of Artificial Sequence: Synthetic oligonucleotide
ccgguccagaagauagcac

SEQ ID NO: 2044987 - RNA, 19 nt, Artificial Sequence
  Description of Artificial Sequence: Synthetic oligonucleotide
cugggucauccugucguca

SEQ ID NO: 2044988 - RNA, 19 nt, Artificial Sequence
  Description of Artificial Sequence: Synthetic oligonucleotide
ccuucgaaguucugucaga

SEQ ID NO: 2044989 - RNA, 19 nt, Artificial Sequence
  Description of Artificial Sequence: Synthetic oligonucleotide
cccagccaccccucaacag

SEQ ID NO: 2044990 - RNA, 19 nt, Artificial Sequence
  Description of Artificial Sequence: Synthetic oligonucleotide
cgaaccagucauaauucaa

SEQ ID NO: 2044991 - RNA, 19 nt, Artificial Sequence
  Description of Artificial Sequence: Synthetic oligonucleotide
guggcgacucgagguacuc

SEQ ID NO: 2044992 - RNA, 19 nt, Artificial Sequence
  Description of Artificial Sequence: Synthetic oligonucleotide
ccgggcugcggccccaucc

SEQ ID NO: 2044993 - RNA, 19 nt, Artificial Sequence
  Description of Artificial Sequence: Synthetic oligonucleotide
gucucagauuucgcuccca

SEQ ID NO: 2044994 - RNA, 19 nt, Artificial Sequence
  Description of Artificial Sequence: Synthetic oligonucleotide
ucggggcuccuugucucuc

SEQ ID NO: 2044995 - RNA, 19 nt, Artificial Sequence
  Description of Artificial Sequence: Synthetic oligonucleotide
gggcuuaggggagcuacuc

SEQ ID NO: 2044996 - RNA, 19 nt, Artificial Sequence
  Description of Artificial Sequence: Synthetic oligonucleotide
ggacuggaggugggcaccc

SEQ ID NO: 2044997 - RNA, 19 nt, Artificial Sequence
  Description of Artificial Sequence: Synthetic oligonucleotide
ccacaguccucgcagaacu

SEQ ID NO: 2044998 - RNA, 19 nt, Artificial Sequence
  Description of Artificial Sequence: Synthetic oligonucleotide
gcagccuucgaaguucugu

SEQ ID NO: 2044999 - RNA, 19 nt, Artificial Sequence
  Description of Artificial Sequence: Synthetic oligonucleotide
cccguucugggcugccagc

SEQ ID NO: 2045000 - RNA, 19 nt, Artificial Sequence
  Description of Artificial Sequence: Synthetic oligonucleotide
ccccgguccagaagauagc

SEQ ID NO: 2045001 - RNA, 19 nt, Artificial Sequence
  Description of Artificial Sequence: Synthetic oligonucleotide
guuggggugcaggucuaua

SEQ ID NO: 2045002 - RNA, 19 nt, Artificial Sequence
  Description of Artificial Sequence: Synthetic oligonucleotide
guccaccagaaggcaucgc

SEQ ID NO: 2045003 - RNA, 19 nt, Artificial Sequence
  Description of Artificial Sequence: Synthetic oligonucleotide
cugacuuaguguggcgacu

SEQ ID NO: 2045004 - RNA, 19 nt, Artificial Sequence
  Description of Artificial Sequence: Synthetic oligonucleotide
agccaccccucaacagcag

SEQ ID NO: 2045005 - RNA, 19 nt, Artificial Sequence
  Description of Artificial Sequence: Synthetic oligonucleotide
gcggcgcacaucaggggag

SEQ ID NO: 2045006 - RNA, 19 nt, Artificial Sequence
  Description of Artificial Sequence: Synthetic oligonucleotide
gucauccugucgucauccu

SEQ ID NO: 2045007 - RNA, 19 nt, Artificial Sequence
  Description of Artificial Sequence: Synthetic oligonucleotide
cccaugucagggguccaag

SEQ ID NO: 2045008 - RNA, 19 nt, Artificial Sequence
  Description of Artificial Sequence: Synthetic oligonucleotide
cuggaccgaaccagucaua

SEQ ID NO: 2045009 - RNA, 19 nt, Artificial Sequence
  Description of Artificial Sequence: Synthetic oligonucleotide
ggcgacucgagguacucuu

SEQ ID NO: 2045010 - RNA, 19 nt, Artificial Sequence
  Description of Artificial Sequence: Synthetic oligonucleotide
cgacucgagguacucuuuc

SEQ ID NO: 2045011 - RNA, 19 nt, Artificial Sequence
  Description of Artificial Sequence: Synthetic oligonucleotide
guaucccgagcugggaaau

SEQ ID NO: 2045012 - RNA, 19 nt, Artificial Sequence
  Description of Artificial Sequence: Synthetic oligonucleotide
ccaugcgggccaccucagg

SEQ ID NO: 2045013 - RNA, 19 nt, Artificial Sequence
  Description of Artificial Sequence: Synthetic oligonucleotide
gguuggagggauggggacu

SEQ ID NO: 2045014 - RNA, 19 nt, Artificial Sequence
  Description of Artificial Sequence: Synthetic oligonucleotide
ccccucaacagcagccuga

SEQ ID NO: 2045015 - RNA, 19 nt, Artificial Sequence
  Description of Artificial Sequence: Synthetic oligonucleotide
agcagccuucgaaguucug

SEQ ID NO: 2045016 - RNA, 19 nt, Artificial Sequence
  Description of Artificial Sequence: Synthetic oligonucleotide
gacucgggguuggggugca

SEQ ID NO: 2045017 - RNA, 19 nt, Artificial Sequence
  Description of Artificial Sequence: Synthetic oligonucleotide
gagggacggccuggacaug

SEQ ID NO: 2045018 - RNA, 19 nt, Artificial Sequence
  Description of Artificial Sequence: Synthetic oligonucleotide
ggacuccuagacagugaca

SEQ ID NO: 2045019 - RNA, 19 nt, Artificial Sequence
  Description of Artificial Sequence: Synthetic oligonucleotide
gguucucggggcuccuugu

SEQ ID NO: 2045020 - RNA, 19 nt, Artificial Sequence
  Description of Artificial Sequence: Synthetic oligonucleotide
ggggcuccuugucucucca

SEQ ID NO: 2045021 - RNA, 19 nt, Artificial Sequence
  Description of Artificial Sequence: Synthetic oligonucleotide
cccgguccagaagauagca

SEQ ID NO: 2045022 - RNA, 19 nt, Artificial Sequence
  Description of Artificial Sequence: Synthetic oligonucleotide
ccaccucagggaagcccgc

SEQ ID NO: 2045023 - RNA, 19 nt, Artificial Sequence
  Description of Artificial Sequence: Synthetic oligonucleotide
cugcggccccauccaggac

SEQ ID NO: 2045024 - RNA, 19 nt, Artificial Sequence
  Description of Artificial Sequence: Synthetic oligonucleotide
gcggugguuggagucuuca

SEQ ID NO: 2045025 - RNA, 19 nt, Artificial Sequence
  Description of Artificial Sequence: Synthetic oligonucleotide
ggguccaaguccagcaagu

SEQ ID NO: 2045026 - RNA, 19 nt, Artificial Sequence
  Description of Artificial Sequence: Synthetic oligonucleotide
ggggaagguuggagggaug

SEQ ID NO: 2045027 - RNA, 19 nt, Artificial Sequence
  Description of Artificial Sequence: Synthetic oligonucleotide
gggcugcggccccauccag

SEQ ID NO: 2045028 - RNA, 19 nt, Artificial Sequence
  Description of Artificial Sequence: Synthetic oligonucleotide
gccucccgggguuccagca

SEQ ID NO: 2045029 - RNA, 19 nt, Artificial Sequence
  Description of Artificial Sequence: Synthetic oligonucleotide
ccagcugagcagcaucucu

SEQ ID NO: 2045030 - RNA, 19 nt, Artificial Sequence
  Description of Artificial Sequence: Synthetic oligonucleotide
gggacggccuggacauggc

SEQ ID NO: 2045031 - RNA, 19 nt, Artificial Sequence
  Description of Artificial Sequence: Synthetic oligonucleotide
gcgugcauugauguucccu

SEQ ID NO: 2045032 - RNA, 19 nt, Artificial Sequence
  Description of Artificial Sequence: Synthetic oligonucleotide
agaggucgcuggagucggu

SEQ ID NO: 2045033 - RNA, 19 nt, Artificial Sequence
  Description of Artificial Sequence: Synthetic oligonucleotide
gcccggguaucccgagcug

SEQ ID NO: 2045034 - RNA, 19 nt, Artificial Sequence
  Description of Artificial Sequence: Synthetic oligonucleotide
cccgagcugggaaaugugu

SEQ ID NO: 2045035 - RNA, 19 nt, Artificial Sequence
  Description of Artificial Sequence: Synthetic oligonucleotide
caucgcgugcauugauguu

SEQ ID NO: 2045036 - RNA, 19 nt, Artificial Sequence
  Description of Artificial Sequence: Synthetic oligonucleotide
ggagaccggcucugguucu

SEQ ID NO: 2045037 - RNA, 19 nt, Artificial Sequence
  Description of Artificial Sequence: Synthetic oligonucleotide
gcuugaggauagugggaau

SEQ ID NO: 2045038 - RNA, 19 nt, Artificial Sequence
  Description of Artificial Sequence: Synthetic oligonucleotide
cgucauccucgcagccucc

SEQ ID NO: 2045039 - RNA, 19 nt, Artificial Sequence
  Description of Artificial Sequence: Synthetic oligonucleotide
cggggcuccuugucucucc

SEQ ID NO: 2045040 - RNA, 19 nt, Artificial Sequence
  Description of Artificial Sequence: Synthetic oligonucleotide
gcacggccuucaccccggg

SEQ ID NO: 2045041 - RNA, 19 nt, Artificial Sequence
  Description of Artificial Sequence: Synthetic oligonucleotide
ggaccgaaccagucauaau

SEQ ID NO: 2045042 - RNA, 19 nt, Artificial Sequence
  Description of Artificial Sequence: Synthetic oligonucleotide
ggacggccuggacauggcu

SEQ ID NO: 2045043 - RNA, 19 nt, Artificial Sequence
  Description of Artificial Sequence: Synthetic oligonucleotide
gccagcugagcagcaucuc

SEQ ID NO: 2045044 - RNA, 19 nt, Artificial Sequence
  Description of Artificial Sequence: Synthetic oligonucleotide
gcacaucaggggaguccac

SEQ ID NO: 2045045 - RNA, 19 nt, Artificial Sequence
  Description of Artificial Sequence: Synthetic oligonucleotide
gcgggccaccucagggaag

SEQ ID NO: 2045046 - RNA, 19 nt, Artificial Sequence
  Description of Artificial Sequence: Synthetic oligonucleotide
ggcgcacaucaggggaguc

SEQ ID NO: 2045047 - RNA, 19 nt, Artificial Sequence
  Description of Artificial Sequence: Synthetic oligonucleotide
cccucaacagcagccugaa

SEQ ID NO: 2045048 - RNA, 19 nt, Artificial Sequence
  Description of Artificial Sequence: Synthetic oligonucleotide
cgggguccuaggcccauuc

SEQ ID NO: 2045049 - RNA, 19 nt, Artificial Sequence
  Description of Artificial Sequence: Synthetic oligonucleotide
gcccaucuuuccagagguc

SEQ ID NO: 2045050 - RNA, 19 nt, Artificial Sequence
  Description of Artificial Sequence: Synthetic oligonucleotide
caguugaugugcggugguu

SEQ ID NO: 2045051 - RNA, 19 nt, Artificial Sequence
  Description of Artificial Sequence: Synthetic oligonucleotide
caccccgguccagaagaua

SEQ ID NO: 2045052 - RNA, 19 nt, Artificial Sequence
  Description of Artificial Sequence: Synthetic oligonucleotide
cacggcucucucugaccau

SEQ ID NO: 2045053 - RNA, 19 nt, Artificial Sequence
  Description of Artificial Sequence: Synthetic oligonucleotide
caccucagggaagcccgcu

SEQ ID NO: 2045054 - RNA, 19 nt, Artificial Sequence
  Description of Artificial Sequence: Synthetic oligonucleotide
ggggcuuaggggagcuacu

SEQ ID NO: 2045055 - RNA, 19 nt, Artificial Sequence
  Description of Artificial Sequence: Synthetic oligonucleotide
cgcgugcauugauguuccc

SEQ ID NO: 2045056 - RNA, 19 nt, Artificial Sequence
  Description of Artificial Sequence: Synthetic oligonucleotide
ggguuccagcagccuucga

SEQ ID NO: 2045057 - RNA, 19 nt, Artificial Sequence
  Description of Artificial Sequence: Synthetic oligonucleotide
ggcaccccaaggggaaggu

SEQ ID NO: 2045058 - RNA, 19 nt, Artificial Sequence
  Description of Artificial Sequence: Synthetic oligonucleotide
ggacuggcccuggcuucuc

SEQ ID NO: 2045059 - RNA, 19 nt, Artificial Sequence
  Description of Artificial Sequence: Synthetic oligonucleotide
ccuaggcccauuccugguu

SEQ ID NO: 2045060 - RNA, 19 nt, Artificial Sequence
  Description of Artificial Sequence: Synthetic oligonucleotide
gugcggugguuggagucuu

SEQ ID NO: 2045061 - RNA, 19 nt, Artificial Sequence
  Description of Artificial Sequence: Synthetic oligonucleotide
ggguuggggugcaggucua

SEQ ID NO: 2045062 - RNA, 19 nt, Artificial Sequence
  Description of Artificial Sequence: Synthetic oligonucleotide
cgcagaacugggaggcggu

SEQ ID NO: 2045063 - RNA, 19 nt, Artificial Sequence
  Description of Artificial Sequence: Synthetic oligonucleotide
cugcucuggcggcgcacau

SEQ ID NO: 2045064 - RNA, 19 nt, Artificial Sequence
  Description of Artificial Sequence: Synthetic oligonucleotide
gguuggggugcaggucuau

SEQ ID NO: 2045065 - RNA, 19 nt, Artificial Sequence
  Description of Artificial Sequence: Synthetic oligonucleotide
gcgacucgagguacucuuu

SEQ ID NO: 2045066 - RNA, 19 nt, Artificial Sequence
  Description of Artificial Sequence: Synthetic oligonucleotide
cugguucucggggcuccuu

SEQ ID NO: 2045067 - RNA, 19 nt, Artificial Sequence
  Description of Artificial Sequence: Synthetic oligonucleotide
ccccgggguccuaggccca

SEQ ID NO: 2045068 - RNA, 19 nt, Artificial Sequence
  Description of Artificial Sequence: Synthetic oligonucleotide
gcaccccaaggggaagguu

SEQ ID NO: 2045069 - RNA, 19 nt, Artificial Sequence
  Description of Artificial Sequence: Synthetic oligonucleotide
gcaccccgguccagaagau

SEQ ID NO: 2045070 - RNA, 19 nt, Artificial Sequence
  Description of Artificial Sequence: Synthetic oligonucleotide
cggccccauccaggacugg

SEQ ID NO: 2045071 - RNA, 19 nt, Artificial Sequence
  Description of Artificial Sequence: Synthetic oligonucleotide
cccgggguuccagcagccu

SEQ ID NO: 2045072 - RNA, 19 nt, Artificial Sequence
  Description of Artificial Sequence: Synthetic oligonucleotide
cggcgcacaucaggggagu

SEQ ID NO: 2045073 - RNA, 19 nt, Artificial Sequence
  Description of Artificial Sequence: Synthetic oligonucleotide
ccuucaccccgggguccua

SEQ ID NO: 2045074 - RNA, 19 nt, Artificial Sequence
  Description of Artificial Sequence: Synthetic oligonucleotide
ccgggguccuaggcccauu

SEQ ID NO: 2045075 - RNA, 19 nt, Artificial Sequence
  Description of Artificial Sequence: Synthetic oligonucleotide
ugugauauggggaaggucg

SEQ ID NO: 2045076 - RNA, 19 nt, Artificial Sequence
  Description of Artificial Sequence: Synthetic oligonucleotide
gaaauauauaaagugcugg

SEQ ID NO: 2045077 - RNA, 19 nt, Artificial Sequence
  Description of Artificial Sequence: Synthetic oligonucleotide
uugaccuuuauucaugucc

SEQ ID NO: 2045078 - RNA, 19 nt, Artificial Sequence
  Description of Artificial Sequence: Synthetic oligonucleotide
aguaaagucguugacaagg

SEQ ID NO: 2045079 - RNA, 19 nt, Artificial Sequence
  Description of Artificial Sequence: Synthetic oligonucleotide
aggacuaagagcccuaccc

SEQ ID NO: 2045080 - RNA, 19 nt, Artificial Sequence
  Description of Artificial Sequence: Synthetic oligonucleotide
auggggauaauuuguaccc

SEQ ID NO: 2045081 - RNA, 19 nt, Artificial Sequence
  Description of Artificial Sequence: Synthetic oligonucleotide
acaaucaccagcuucuuuc

SEQ ID NO: 2045082 - RNA, 19 nt, Artificial Sequence
  Description of Artificial Sequence: Synthetic oligonucleotide
uggggaaacaaacucaugc

SEQ ID NO: 2045083 - RNA, 19 nt, Artificial Sequence
  Description of Artificial Sequence: Synthetic oligonucleotide
uuccccacgaggaugaugg

SEQ ID NO: 2045084 - RNA, 19 nt, Artificial Sequence
  Description of Artificial Sequence: Synthetic oligonucleotide
gucgaaaggacuaagagcc

SEQ ID NO: 2045085 - RNA, 19 nt, Artificial Sequence
  Description of Artificial Sequence: Synthetic oligonucleotide
caaccuuugaccuuuauuc

SEQ ID NO: 2045086 - RNA, 19 nt, Artificial Sequence
  Description of Artificial Sequence: Synthetic oligonucleotide
auuuguaccccuuugaaaa

SEQ ID NO: 2045087 - RNA, 19 nt, Artificial Sequence
  Description of Artificial Sequence: Synthetic oligonucleotide
ucaaauaccucccgcaccc

SEQ ID NO: 2045088 - RNA, 19 nt, Artificial Sequence
  Description of Artificial Sequence: Synthetic oligonucleotide
gaagaaagggccuaccagc

SEQ ID NO: 2045089 - RNA, 19 nt, Artificial Sequence
  Description of Artificial Sequence: Synthetic oligonucleotide
aaacacaugaggaugacgu

SEQ ID NO: 2045090 - RNA, 19 nt, Artificial Sequence
  Description of Artificial Sequence: Synthetic oligonucleotide
gauggggauaauuuguacc

SEQ ID NO: 2045091 - RNA, 19 nt, Artificial Sequence
  Description of Artificial Sequence: Synthetic oligonucleotide
aaauuggagagaccuuggg

SEQ ID NO: 2045092 - RNA, 19 nt, Artificial Sequence
  Description of Artificial Sequence: Synthetic oligonucleotide
cuaccuaaagcagaaaucc

SEQ ID NO: 2045093 - RNA, 19 nt, Artificial Sequence
  Description of Artificial Sequence: Synthetic oligonucleotide
cauggugcaaccuuugacc

SEQ ID NO: 2045094 - RNA, 19 nt, Artificial Sequence
  Description of Artificial Sequence: Synthetic oligonucleotide
ugaccuuuauucauguccc

SEQ ID NO: 2045095 - RNA, 19 nt, Artificial Sequence
  Description of Artificial Sequence: Synthetic oligonucleotide
acaaugagaaggcaggucu

SEQ ID NO: 2045096 - RNA, 19 nt, Artificial Sequence
  Description of Artificial Sequence: Synthetic oligonucleotide
gauaauuuguaccccuuug

SEQ ID NO: 2045097 - RNA, 19 nt, Artificial Sequence
  Description of Artificial Sequence: Synthetic oligonucleotide
acaguagggacguagaccu

SEQ ID NO: 2045098 - RNA, 19 nt, Artificial Sequence
  Description of Artificial Sequence: Synthetic oligonucleotide
gaaaauuggagagaccuug

SEQ ID NO: 2045099 - RNA, 19 nt, Artificial Sequence
  Description of Artificial Sequence: Synthetic oligonucleotide
uaaagcagaaaucccaguc

SEQ ID NO: 2045100 - RNA, 19 nt, Artificial Sequence
  Description of Artificial Sequence: Synthetic oligonucleotide
aauuggagagaccuuggga

SEQ ID NO: 2045101 - RNA, 19 nt, Artificial Sequence
  Description of Artificial Sequence: Synthetic oligonucleotide
auucuugcggaccuguagg

SEQ ID NO: 2045102 - RNA, 19 nt, Artificial Sequence
  Description of Artificial Sequence: Synthetic oligonucleotide
aagaaagggccuaccagcc

SEQ ID NO: 2045103 - RNA, 19 nt, Artificial Sequence
  Description of Artificial Sequence: Synthetic oligonucleotide
aauuuguaccccuuugaaa

SEQ ID NO: 2045104 - RNA, 19 nt, Artificial Sequence
  Description of Artificial Sequence: Synthetic oligonucleotide
aaugggacagccccuccgg

SEQ ID NO: 2045105 - RNA, 19 nt, Artificial Sequence
  Description of Artificial Sequence: Synthetic oligonucleotide
auuggagagaccuugggaa

SEQ ID NO: 2045106 - RNA, 19 nt, Artificial Sequence
  Description of Artificial Sequence: Synthetic oligonucleotide
uaccccuuugaaaaggaag

SEQ ID NO: 2045107 - RNA, 19 nt, Artificial Sequence
  Description of Artificial Sequence: Synthetic oligonucleotide
aacucagagaaugggacag

SEQ ID NO: 2045108 - RNA, 19 nt, Artificial Sequence
  Description of Artificial Sequence: Synthetic oligonucleotide
aacugauccuugcugaaga

SEQ ID NO: 2045109 - RNA, 19 nt, Artificial Sequence
  Description of Artificial Sequence: Synthetic oligonucleotide
uggaguccuagaaggaugg

SEQ ID NO: 2045110 - RNA, 19 nt, Artificial Sequence
  Description of Artificial Sequence: Synthetic oligonucleotide
uauucuugcggaccuguag

SEQ ID NO: 2045111 - RNA, 19 nt, Artificial Sequence
  Description of Artificial Sequence: Synthetic oligonucleotide
aagucguugacaaggcuac

SEQ ID NO: 2045112 - RNA, 19 nt, Artificial Sequence
  Description of Artificial Sequence: Synthetic oligonucleotide
ucaagguagccaaaggcac

SEQ ID NO: 2045113 - RNA, 19 nt, Artificial Sequence
  Description of Artificial Sequence: Synthetic oligonucleotide
aaggacuaagagcccuacc

SEQ ID NO: 2045114 - RNA, 19 nt, Artificial Sequence
  Description of Artificial Sequence: Synthetic oligonucleotide
ugaaacuuccgcuccuccg

SEQ ID NO: 2045115 - RNA, 19 nt, Artificial Sequence
  Description of Artificial Sequence: Synthetic oligonucleotide
ugagccagaaauauauaaa

SEQ ID NO: 2045116 - RNA, 19 nt, Artificial Sequence
  Description of Artificial Sequence: Synthetic oligonucleotide
cuucuuucggauugcagcc

SEQ ID NO: 2045117 - RNA, 19 nt, Artificial Sequence
  Description of Artificial Sequence: Synthetic oligonucleotide
uccccaccaaguaaagucg

SEQ ID NO: 2045118 - RNA, 19 nt, Artificial Sequence
  Description of Artificial Sequence: Synthetic oligonucleotide
gccagaaauauauaaagug

SEQ ID NO: 2045119 - RNA, 19 nt, Artificial Sequence
  Description of Artificial Sequence: Synthetic oligonucleotide
uacuaccuaaagcagaaau

SEQ ID NO: 2045120 - RNA, 19 nt, Artificial Sequence
  Description of Artificial Sequence: Synthetic oligonucleotide
aacacaugaggaugacguc

SEQ ID NO: 2045121 - RNA, 19 nt, Artificial Sequence
  Description of Artificial Sequence: Synthetic oligonucleotide
uaauuuguaccccuuugaa

SEQ ID NO: 2045122 - RNA, 19 nt, Artificial Sequence
  Description of Artificial Sequence: Synthetic oligonucleotide
aggucgaaaggacuaagag

SEQ ID NO: 2045123 - RNA, 19 nt, Artificial Sequence
  Description of Artificial Sequence: Synthetic oligonucleotide
ucggauugcagccauggcu

SEQ ID NO: 2045124 - RNA, 19 nt, Artificial Sequence
  Description of Artificial Sequence: Synthetic oligonucleotide
aaaauuggagagaccuugg

SEQ ID NO: 2045125 - RNA, 19 nt, Artificial Sequence
  Description of Artificial Sequence: Synthetic oligonucleotide
cuuggcugagcacucaagg

SEQ ID NO: 2045126 - RNA, 19 nt, Artificial Sequence
  Description of Artificial Sequence: Synthetic oligonucleotide
uuagucuuggcugagcacu

SEQ ID NO: 2045127 - RNA, 19 nt, Artificial Sequence
  Description of Artificial Sequence: Synthetic oligonucleotide
aaacucagagaaugggaca

SEQ ID NO: 2045128 - RNA, 19 nt, Artificial Sequence
  Description of Artificial Sequence: Synthetic oligonucleotide
gaaacucagagaaugggac

SEQ ID NO: 2045129 - RNA, 19 nt, Artificial Sequence
  Description of Artificial Sequence: Synthetic oligonucleotide
gaaacuuccgcuccuccgc

SEQ ID NO: 2045130 - RNA, 19 nt, Artificial Sequence
  Description of Artificial Sequence: Synthetic oligonucleotide
aaccuuugaccuuuauuca

SEQ ID NO: 2045131 - RNA, 19 nt, Artificial Sequence
  Description of Artificial Sequence: Synthetic oligonucleotide
auggcugaaacuuccgcuc

SEQ ID NO: 2045132 - RNA, 19 nt, Artificial Sequence
  Description of Artificial Sequence: Synthetic oligonucleotide
uuucggauugcagccaugg

SEQ ID NO: 2045133 - RNA, 19 nt, Artificial Sequence
  Description of Artificial Sequence: Synthetic oligonucleotide
ugggaaacucagagaaugg

SEQ ID NO: 2045134 - RNA, 19 nt, Artificial Sequence
  Description of Artificial Sequence: Synthetic oligonucleotide
auauggggaaggucgaaag

SEQ ID NO: 2045135 - RNA, 19 nt, Artificial Sequence
  Description of Artificial Sequence: Synthetic oligonucleotide
agagcccuaccccuggacc

SEQ ID NO: 2045136 - RNA, 19 nt, Artificial Sequence
  Description of Artificial Sequence: Synthetic oligonucleotide
ccuuugaaaaggaaggagg

SEQ ID NO: 2045137 - RNA, 19 nt, Artificial Sequence
  Description of Artificial Sequence: Synthetic oligonucleotide
uuauuccccacgaggauga

SEQ ID NO: 2045138 - RNA, 19 nt, Artificial Sequence
  Description of Artificial Sequence: Synthetic oligonucleotide
accaaguaaagucguugac

SEQ ID NO: 2045139 - RNA, 19 nt, Artificial Sequence
  Description of Artificial Sequence: Synthetic oligonucleotide
gaaggagggaaaauuggag

SEQ ID NO: 2045140 - RNA, 19 nt, Artificial Sequence
  Description of Artificial Sequence: Synthetic oligonucleotide
acuaccuaaagcagaaauc

SEQ ID NO: 2045141 - RNA, 19 nt, Artificial Sequence
  Description of Artificial Sequence: Synthetic oligonucleotide
uauaaagugcuggugugug

SEQ ID NO: 2045142 - RNA, 19 nt, Artificial Sequence
  Description of Artificial Sequence: Synthetic oligonucleotide
ucaguguccggguaggaca

SEQ ID NO: 2045143 - RNA, 19 nt, Artificial Sequence
  Description of Artificial Sequence: Synthetic oligonucleotide
uuuauuccccacgaggaug

SEQ ID NO: 2045144 - RNA, 19 nt, Artificial Sequence
  Description of Artificial Sequence: Synthetic oligonucleotide
aaaggacuaagagcccuac

SEQ ID NO: 2045145 - RNA, 19 nt, Artificial Sequence
  Description of Artificial Sequence: Synthetic oligonucleotide
uuuguaccccuuugaaaag

SEQ ID NO: 2045146 - RNA, 19 nt, Artificial Sequence
  Description of Artificial Sequence: Synthetic oligonucleotide
ugggauggggauaauuugu

SEQ ID NO: 2045147 - RNA, 19 nt, Artificial Sequence
  Description of Artificial Sequence: Synthetic oligonucleotide
ucauggugcaaccuuugac

SEQ ID NO: 2045148 - RNA, 19 nt, Artificial Sequence
  Description of Artificial Sequence: Synthetic oligonucleotide
uaccuaaagcagaaauccc

SEQ ID NO: 2045149 - RNA, 19 nt, Artificial Sequence
  Description of Artificial Sequence: Synthetic oligonucleotide
accccuuugaaaaggaagg

SEQ ID NO: 2045150 - RNA, 19 nt, Artificial Sequence
  Description of Artificial Sequence: Synthetic oligonucleotide
agacaguagggacguagac

SEQ ID NO: 2045151 - RNA, 19 nt, Artificial Sequence
  Description of Artificial Sequence: Synthetic oligonucleotide
caaguaaagucguugacaa

SEQ ID NO: 2045152 - RNA, 19 nt, Artificial Sequence
  Description of Artificial Sequence: Synthetic oligonucleotide
gaaacacaugaggaugacg

SEQ ID NO: 2045153 - RNA, 19 nt, Artificial Sequence
  Description of Artificial Sequence: Synthetic oligonucleotide
agaucgaacaggcuccugu

SEQ ID NO: 2045154 - RNA, 19 nt, Artificial Sequence
  Description of Artificial Sequence: Synthetic oligonucleotide
aagagcccuaccccuggac

SEQ ID NO: 2045155 - RNA, 19 nt, Artificial Sequence
  Description of Artificial Sequence: Synthetic oligonucleotide
gaaugggacagccccuccg

SEQ ID NO: 2045156 - RNA, 19 nt, Artificial Sequence
  Description of Artificial Sequence: Synthetic oligonucleotide
gagaccuugggaaacucag

SEQ ID NO: 2045157 - RNA, 19 nt, Artificial Sequence
  Description of Artificial Sequence: Synthetic oligonucleotide
uucucaggaauguuuucca

SEQ ID NO: 2045158 - RNA, 19 nt, Artificial Sequence
  Description of Artificial Sequence: Synthetic oligonucleotide
agggacguagaccucuggg

SEQ ID NO: 2045159 - RNA, 19 nt, Artificial Sequence
  Description of Artificial Sequence: Synthetic oligonucleotide
uuuucauggugcaaccuuu

SEQ ID NO: 2045160 - RNA, 19 nt, Artificial Sequence
  Description of Artificial Sequence: Synthetic oligonucleotide
aaagucguugacaaggcua

SEQ ID NO: 2045161 - RNA, 19 nt, Artificial Sequence
  Description of Artificial Sequence: Synthetic oligonucleotide
uuucauggugcaaccuuug

SEQ ID NO: 2045162 - RNA, 19 nt, Artificial Sequence
  Description of Artificial Sequence: Synthetic oligonucleotide
ggucgaaaggacuaagagc

SEQ ID NO: 2045163 - RNA, 19 nt, Artificial Sequence
  Description of Artificial Sequence: Synthetic oligonucleotide
uuauucauguccccaccaa

SEQ ID NO: 2045164 - RNA, 19 nt, Artificial Sequence
  Description of Artificial Sequence: Synthetic oligonucleotide
aacaggcuccuguuucauc

SEQ ID NO: 2045165 - RNA, 19 nt, Artificial Sequence
  Description of Artificial Sequence: Synthetic oligonucleotide
uuuuauuccccacgaggau

SEQ ID NO: 2045166 - RNA, 19 nt, Artificial Sequence
  Description of Artificial Sequence: Synthetic oligonucleotide
ucgaacaggcuccuguuuc

SEQ ID NO: 2045167 - RNA, 19 nt, Artificial Sequence
  Description of Artificial Sequence: Synthetic oligonucleotide
ucagagaaugggacagccc

SEQ ID NO: 2045168 - RNA, 19 nt, Artificial Sequence
  Description of Artificial Sequence: Synthetic oligonucleotide
agcaggaggagcccugcac

SEQ ID NO: 2045169 - RNA, 19 nt, Artificial Sequence
  Description of Artificial Sequence: Synthetic oligonucleotide
aaauaccucccgcaccccu

SEQ ID NO: 2045170 - RNA, 19 nt, Artificial Sequence
  Description of Artificial Sequence: Synthetic oligonucleotide
cagucccuaccccagaugc

SEQ ID NO: 2045171 - RNA, 19 nt, Artificial Sequence
  Description of Artificial Sequence: Synthetic oligonucleotide
ggaccuguaggccagcccg

SEQ ID NO: 2045172 - RNA, 19 nt, Artificial Sequence
  Description of Artificial Sequence: Synthetic oligonucleotide
ggaagaaagggccuaccag

SEQ ID NO: 2045173 - RNA, 19 nt, Artificial Sequence
  Description of Artificial Sequence: Synthetic oligonucleotide
uaaagucguugacaaggcu

SEQ ID NO: 2045174 - RNA, 19 nt, Artificial Sequence
  Description of Artificial Sequence: Synthetic oligonucleotide
uccuagaaggauggagugg

SEQ ID NO: 2045175 - RNA, 19 nt, Artificial Sequence
  Description of Artificial Sequence: Synthetic oligonucleotide
cugucaggacugucgaugg

SEQ ID NO: 2045176 - RNA, 19 nt, Artificial Sequence
  Description of Artificial Sequence: Synthetic oligonucleotide
gaguccuagaaggauggag

SEQ ID NO: 2045177 - RNA, 19 nt, Artificial Sequence
  Description of Artificial Sequence: Synthetic oligonucleotide
ucuuggcugagcacucaag

SEQ ID NO: 2045178 - RNA, 19 nt, Artificial Sequence
  Description of Artificial Sequence: Synthetic oligonucleotide
auggugcaaccuuugaccu

SEQ ID NO: 2045179 - RNA, 19 nt, Artificial Sequence
  Description of Artificial Sequence: Synthetic oligonucleotide
uuuagucuuggcugagcac

SEQ ID NO: 2045180 - RNA, 19 nt, Artificial Sequence
  Description of Artificial Sequence: Synthetic oligonucleotide
caucucaaauaccucccgc

SEQ ID NO: 2045181 - RNA, 19 nt, Artificial Sequence
  Description of Artificial Sequence: Synthetic oligonucleotide
agaaugggacagccccucc

SEQ ID NO: 2045182 - RNA, 19 nt, Artificial Sequence
  Description of Artificial Sequence: Synthetic oligonucleotide
ugacaaggcuacuaccuaa

SEQ ID NO: 2045183 - RNA, 19 nt, Artificial Sequence
  Description of Artificial Sequence: Synthetic oligonucleotide
gugagccagaaauauauaa

SEQ ID NO: 2045184 - RNA, 19 nt, Artificial Sequence
  Description of Artificial Sequence: Synthetic oligonucleotide
gacgucaguguccggguag

SEQ ID NO: 2045185 - RNA, 19 nt, Artificial Sequence
  Description of Artificial Sequence: Synthetic oligonucleotide
uucauggugcaaccuuuga

SEQ ID NO: 2045186 - RNA, 19 nt, Artificial Sequence
  Description of Artificial Sequence: Synthetic oligonucleotide
cugggguccacuucucagg

SEQ ID NO: 2045187 - RNA, 19 nt, Artificial Sequence
  Description of Artificial Sequence: Synthetic oligonucleotide
aguccuagaaggauggagu

SEQ ID NO: 2045188 - RNA, 19 nt, Artificial Sequence
  Description of Artificial Sequence: Synthetic oligonucleotide
accuaaagcagaaauccca

SEQ ID NO: 2045189 - RNA, 19 nt, Artificial Sequence
  Description of Artificial Sequence: Synthetic oligonucleotide
acaaggcuacuaccuaaag

SEQ ID NO: 2045190 - RNA, 19 nt, Artificial Sequence
  Description of Artificial Sequence: Synthetic oligonucleotide
uucuugcggaccuguaggc

SEQ ID NO: 2045191 - RNA, 19 nt, Artificial Sequence
  Description of Artificial Sequence: Synthetic oligonucleotide
acacaugaggaugacguca

SEQ ID NO: 2045192 - RNA, 19 nt, Artificial Sequence
  Description of Artificial Sequence: Synthetic oligonucleotide
gugggauggggauaauuug

SEQ ID NO: 2045193 - RNA, 19 nt, Artificial Sequence
  Description of Artificial Sequence: Synthetic oligonucleotide
ugcuggugugugauauggg

SEQ ID NO: 2045194 - RNA, 19 nt, Artificial Sequence
  Description of Artificial Sequence: Synthetic oligonucleotide
ugcucaucuugccucagau

SEQ ID NO: 2045195 - RNA, 19 nt, Artificial Sequence
  Description of Artificial Sequence: Synthetic oligonucleotide
cuaagagcccuaccccugg

SEQ ID NO: 2045196 - RNA, 19 nt, Artificial Sequence
  Description of Artificial Sequence: Synthetic oligonucleotide
gagaaacacaugaggauga

SEQ ID NO: 2045197 - RNA, 19 nt, Artificial Sequence
  Description of Artificial Sequence: Synthetic oligonucleotide
guaaagucguugacaaggc

SEQ ID NO: 2045198 - RNA, 19 nt, Artificial Sequence
  Description of Artificial Sequence: Synthetic oligonucleotide
uugacaaggcuacuaccua

SEQ ID NO: 2045199 - RNA, 19 nt, Artificial Sequence
  Description of Artificial Sequence: Synthetic oligonucleotide
cucagagaaugggacagcc

SEQ ID NO: 2045200 - RNA, 19 nt, Artificial Sequence
  Description of Artificial Sequence: Synthetic oligonucleotide
uucauguccccaccaagua

SEQ ID NO: 2045201 - RNA, 19 nt, Artificial Sequence
  Description of Artificial Sequence: Synthetic oligonucleotide
agccauggcugaaacuucc

SEQ ID NO: 2045202 - RNA, 19 nt, Artificial Sequence
  Description of Artificial Sequence: Synthetic oligonucleotide
guccuagaaggauggagug

SEQ ID NO: 2045203 - RNA, 19 nt, Artificial Sequence
  Description of Artificial Sequence: Synthetic oligonucleotide
ucgaaaggacuaagagccc

SEQ ID NO: 2045204 - RNA, 19 nt, Artificial Sequence
  Description of Artificial Sequence: Synthetic oligonucleotide
gaacugauccuugcugaag

SEQ ID NO: 2045205 - RNA, 19 nt, Artificial Sequence
  Description of Artificial Sequence: Synthetic oligonucleotide
gaaggucgaaaggacuaag

SEQ ID NO: 2045206 - RNA, 19 nt, Artificial Sequence
  Description of Artificial Sequence: Synthetic oligonucleotide
ccuaaagcagaaaucccag

SEQ ID NO: 2045207 - RNA, 19 nt, Artificial Sequence
  Description of Artificial Sequence: Synthetic oligonucleotide
gugugugauauggggaagg

SEQ ID NO: 2045208 - RNA, 19 nt, Artificial Sequence
  Description of Artificial Sequence: Synthetic oligonucleotide
gucaggacugucgauggag

SEQ ID NO: 2045209 - RNA, 19 nt, Artificial Sequence
  Description of Artificial Sequence: Synthetic oligonucleotide
aagacaguagggacguaga

SEQ ID NO: 2045210 - RNA, 19 nt, Artificial Sequence
  Description of Artificial Sequence: Synthetic oligonucleotide
auaaagugcugguguguga

SEQ ID NO: 2045211 - RNA, 19 nt, Artificial Sequence
  Description of Artificial Sequence: Synthetic oligonucleotide
aggcacugauccuguuugc

SEQ ID NO: 2045212 - RNA, 19 nt, Artificial Sequence
  Description of Artificial Sequence: Synthetic oligonucleotide
aaggucgaaaggacuaaga

SEQ ID NO: 2045213 - RNA, 19 nt, Artificial Sequence
  Description of Artificial Sequence: Synthetic oligonucleotide
auucauguccccaccaagu

SEQ ID NO: 2045214 - RNA, 19 nt, Artificial Sequence
  Description of Artificial Sequence: Synthetic oligonucleotide
uuuuccaggcugucaggac

SEQ ID NO: 2045215 - RNA, 19 nt, Artificial Sequence
  Description of Artificial Sequence: Synthetic oligonucleotide
gacguagaccucugggaac

SEQ ID NO: 2045216 - RNA, 19 nt, Artificial Sequence
  Description of Artificial Sequence: Synthetic oligonucleotide
uggaccaacgcagcaggag

SEQ ID NO: 2045217 - RNA, 19 nt, Artificial Sequence
  Description of Artificial Sequence: Synthetic oligonucleotide
uuggagagaccuugggaaa

SEQ ID NO: 2045218 - RNA, 19 nt, Artificial Sequence
  Description of Artificial Sequence: Synthetic oligonucleotide
agccagaaauauauaaagu

SEQ ID NO: 2045219 - RNA, 19 nt, Artificial Sequence
  Description of Artificial Sequence: Synthetic oligonucleotide
gggaaacucagagaauggg

SEQ ID NO: 2045220 - RNA, 19 nt, Artificial Sequence
  Description of Artificial Sequence: Synthetic oligonucleotide
gagcacucaagguagccaa

SEQ ID NO: 2045221 - RNA, 19 nt, Artificial Sequence
  Description of Artificial Sequence: Synthetic oligonucleotide
uucggauugcagccauggc

SEQ ID NO: 2045222 - RNA, 19 nt, Artificial Sequence
  Description of Artificial Sequence: Synthetic oligonucleotide
acucagagaaugggacagc

SEQ ID NO: 2045223 - RNA, 19 nt, Artificial Sequence
  Description of Artificial Sequence: Synthetic oligonucleotide
uggugugcucaucuugccu

SEQ ID NO: 2045224 - RNA, 19 nt, Artificial Sequence
  Description of Artificial Sequence: Synthetic oligonucleotide
agggaagaaagggccuacc

SEQ ID NO: 2045225 - RNA, 19 nt, Artificial Sequence
  Description of Artificial Sequence: Synthetic oligonucleotide
cauguccccaccaaguaaa

SEQ ID NO: 2045226 - RNA, 19 nt, Artificial Sequence
  Description of Artificial Sequence: Synthetic oligonucleotide
gaccuuuauucaugucccc

SEQ ID NO: 2045227 - RNA, 19 nt, Artificial Sequence
  Description of Artificial Sequence: Synthetic oligonucleotide
ugugagccagaaauauaua

SEQ ID NO: 2045228 - RNA, 19 nt, Artificial Sequence
  Description of Artificial Sequence: Synthetic oligonucleotide
uagggacguagaccucugg

SEQ ID NO: 2045229 - RNA, 19 nt, Artificial Sequence
  Description of Artificial Sequence: Synthetic oligonucleotide
ugugugauauggggaaggu

SEQ ID NO: 2045230 - RNA, 19 nt, Artificial Sequence
  Description of Artificial Sequence: Synthetic oligonucleotide
ggacuaagagcccuacccc

SEQ ID NO: 2045231 - RNA, 19 nt, Artificial Sequence
  Description of Artificial Sequence: Synthetic oligonucleotide
guaggacagaggccgcagg

SEQ ID NO: 2045232 - RNA, 19 nt, Artificial Sequence
  Description of Artificial Sequence: Synthetic oligonucleotide
aaggauggagugggauggg

SEQ ID NO: 2045233 - RNA, 19 nt, Artificial Sequence
  Description of Artificial Sequence: Synthetic oligonucleotide
cuugcggaccuguaggcca

SEQ ID NO: 2045234 - RNA, 19 nt, Artificial Sequence
  Description of Artificial Sequence: Synthetic oligonucleotide
uuugaccuuuauucauguc

SEQ ID NO: 2045235 - RNA, 19 nt, Artificial Sequence
  Description of Artificial Sequence: Synthetic oligonucleotide
auaccucccgcaccccuuc

SEQ ID NO: 2045236 - RNA, 19 nt, Artificial Sequence
  Description of Artificial Sequence: Synthetic oligonucleotide
caccaaguaaagucguuga

SEQ ID NO: 2045237 - RNA, 19 nt, Artificial Sequence
  Description of Artificial Sequence: Synthetic oligonucleotide
cugugagccagaaauauau

SEQ ID NO: 2045238 - RNA, 19 nt, Artificial Sequence
  Description of Artificial Sequence: Synthetic oligonucleotide
accuuuauucaugucccca

SEQ ID NO: 2045239 - RNA, 19 nt, Artificial Sequence
  Description of Artificial Sequence: Synthetic oligonucleotide
uugcggaccuguaggccag

SEQ ID NO: 2045240 - RNA, 19 nt, Artificial Sequence
  Description of Artificial Sequence: Synthetic oligonucleotide
accuugggaaacucagaga

SEQ ID NO: 2045241 - RNA, 19 nt, Artificial Sequence
  Description of Artificial Sequence: Synthetic oligonucleotide
guugacaaggcuacuaccu

SEQ ID NO: 2045242 - RNA, 19 nt, Artificial Sequence
  Description of Artificial Sequence: Synthetic oligonucleotide
caguguccggguaggacag

SEQ ID NO: 2045243 - RNA, 19 nt, Artificial Sequence
  Description of Artificial Sequence: Synthetic oligonucleotide
ucaugcaguccugggcagg

SEQ ID NO: 2045244 - RNA, 19 nt, Artificial Sequence
  Description of Artificial Sequence: Synthetic oligonucleotide
ccucagaucgaacaggcuc

SEQ ID NO: 2045245 - RNA, 19 nt, Artificial Sequence
  Description of Artificial Sequence: Synthetic oligonucleotide
gacuaagagcccuaccccu

SEQ ID NO: 2045246 - RNA, 19 nt, Artificial Sequence
  Description of Artificial Sequence: Synthetic oligonucleotide
cuggugugugauaugggga

SEQ ID NO: 2045247 - RNA, 19 nt, Artificial Sequence
  Description of Artificial Sequence: Synthetic oligonucleotide
gauauggggaaggucgaaa

SEQ ID NO: 2045248 - RNA, 19 nt, Artificial Sequence
  Description of Artificial Sequence: Synthetic oligonucleotide
uuauucuugcggaccugua

SEQ ID NO: 2045249 - RNA, 19 nt, Artificial Sequence
  Description of Artificial Sequence: Synthetic oligonucleotide
cagaugccuccugugagcc

SEQ ID NO: 2045250 - RNA, 19 nt, Artificial Sequence
  Description of Artificial Sequence: Synthetic oligonucleotide
ggcaggucuugccacaggc

SEQ ID NO: 2045251 - RNA, 19 nt, Artificial Sequence
  Description of Artificial Sequence: Synthetic oligonucleotide
acguagaccucugggaacu

SEQ ID NO: 2045252 - RNA, 19 nt, Artificial Sequence
  Description of Artificial Sequence: Synthetic oligonucleotide
aggauggagugggaugggg

SEQ ID NO: 2045253 - RNA, 19 nt, Artificial Sequence
  Description of Artificial Sequence: Synthetic oligonucleotide
agugcuggugugugauaug

SEQ ID NO: 2045254 - RNA, 19 nt, Artificial Sequence
  Description of Artificial Sequence: Synthetic oligonucleotide
agucccuaccccagaugcc

SEQ ID NO: 2045255 - RNA, 19 nt, Artificial Sequence
  Description of Artificial Sequence: Synthetic oligonucleotide
gcaauguaguucucaaaga

SEQ ID NO: 2045256 - RNA, 19 nt, Artificial Sequence
  Description of Artificial Sequence: Synthetic oligonucleotide
gagcccuaccccuggacca

SEQ ID NO: 2045257 - RNA, 19 nt, Artificial Sequence
  Description of Artificial Sequence: Synthetic oligonucleotide
ggaaacucagagaauggga

SEQ ID NO: 2045258 - RNA, 19 nt, Artificial Sequence
  Description of Artificial Sequence: Synthetic oligonucleotide
uucuuucggauugcagcca

SEQ ID NO: 2045259 - RNA, 19 nt, Artificial Sequence
  Description of Artificial Sequence: Synthetic oligonucleotide
aggcugucaggacugucga

SEQ ID NO: 2045260 - RNA, 19 nt, Artificial Sequence
  Description of Artificial Sequence: Synthetic oligonucleotide
gcugucaggacugucgaug

SEQ ID NO: 2045261 - RNA, 19 nt, Artificial Sequence
  Description of Artificial Sequence: Synthetic oligonucleotide
uccucagaucgaacaggcu

SEQ ID NO: 2045262 - RNA, 19 nt, Artificial Sequence
  Description of Artificial Sequence: Synthetic oligonucleotide
uaagagcccuaccccugga

SEQ ID NO: 2045263 - RNA, 19 nt, Artificial Sequence
  Description of Artificial Sequence: Synthetic oligonucleotide
guagccaaaggcacugauc

SEQ ID NO: 2045264 - RNA, 19 nt, Artificial Sequence
  Description of Artificial Sequence: Synthetic oligonucleotide
ggauggggauaauuuguac

SEQ ID NO: 2045265 - RNA, 19 nt, Artificial Sequence
  Description of Artificial Sequence: Synthetic oligonucleotide
ugcacaggaagggcagggc

SEQ ID NO: 2045266 - RNA, 19 nt, Artificial Sequence
  Description of Artificial Sequence: Synthetic oligonucleotide
cuggggaaacaaacucaug

SEQ ID NO: 2045267 - RNA, 19 nt, Artificial Sequence
  Description of Artificial Sequence: Synthetic oligonucleotide
gagaaugggacagccccuc

SEQ ID NO: 2045268 - RNA, 19 nt, Artificial Sequence
  Description of Artificial Sequence: Synthetic oligonucleotide
aggcuacuaccuaaagcag

SEQ ID NO: 2045269 - RNA, 19 nt, Artificial Sequence
  Description of Artificial Sequence: Synthetic oligonucleotide
acgucaguguccggguagg

SEQ ID NO: 2045270 - RNA, 19 nt, Artificial Sequence
  Description of Artificial Sequence: Synthetic oligonucleotide
auaucccggccuuccucag

SEQ ID NO: 2045271 - RNA, 19 nt, Artificial Sequence
  Description of Artificial Sequence: Synthetic oligonucleotide
ggaaggagggaaaauugga

SEQ ID NO: 2045272 - RNA, 19 nt, Artificial Sequence
  Description of Artificial Sequence: Synthetic oligonucleotide
gacaaggcuacuaccuaaa

SEQ ID NO: 2045273 - RNA, 19 nt, Artificial Sequence
  Description of Artificial Sequence: Synthetic oligonucleotide
aucccggccuuccucagau

SEQ ID NO: 2045274 - RNA, 19 nt, Artificial Sequence
  Description of Artificial Sequence: Synthetic oligonucleotide
uaucccggccuuccucaga

SEQ ID NO: 2045275 - RNA, 19 nt, Artificial Sequence
  Description of Artificial Sequence: Synthetic oligonucleotide
ucagaucgaacaggcuccu

SEQ ID NO: 2045276 - RNA, 19 nt, Artificial Sequence
  Description of Artificial Sequence: Synthetic oligonucleotide
cuuucggauugcagccaug

SEQ ID NO: 2045277 - RNA, 19 nt, Artificial Sequence
  Description of Artificial Sequence: Synthetic oligonucleotide
agaccucugggaacugauc

SEQ ID NO: 2045278 - RNA, 19 nt, Artificial Sequence
  Description of Artificial Sequence: Synthetic oligonucleotide
gggacguagaccucuggga

SEQ ID NO: 2045279 - RNA, 19 nt, Artificial Sequence
  Description of Artificial Sequence: Synthetic oligonucleotide
caccccuucuuuagucuug

SEQ ID NO: 2045280 - RNA, 19 nt, Artificial Sequence
  Description of Artificial Sequence: Synthetic oligonucleotide
ugauauggggaaggucgaa

SEQ ID NO: 2045281 - RNA, 19 nt, Artificial Sequence
  Description of Artificial Sequence: Synthetic oligonucleotide
gucgauggagaaacacaug

SEQ ID NO: 2045282 - RNA, 19 nt, Artificial Sequence
  Description of Artificial Sequence: Synthetic oligonucleotide
cccggccuuccucagaucg

SEQ ID NO: 2045283 - RNA, 19 nt, Artificial Sequence
  Description of Artificial Sequence: Synthetic oligonucleotide
aucgaacaggcuccuguuu

SEQ ID NO: 2045284 - RNA, 19 nt, Artificial Sequence
  Description of Artificial Sequence: Synthetic oligonucleotide
agagaccuugggaaacuca

SEQ ID NO: 2045285 - RNA, 19 nt, Artificial Sequence
  Description of Artificial Sequence: Synthetic oligonucleotide
cggauugcagccauggcug

SEQ ID NO: 2045286 - RNA, 19 nt, Artificial Sequence
  Description of Artificial Sequence: Synthetic oligonucleotide
ggacguagaccucugggaa

SEQ ID NO: 2045287 - RNA, 19 nt, Artificial Sequence
  Description of Artificial Sequence: Synthetic oligonucleotide
guguccggguaggacagag

SEQ ID NO: 2045288 - RNA, 19 nt, Artificial Sequence
  Description of Artificial Sequence: Synthetic oligonucleotide
aggacugucgauggagaaa

SEQ ID NO: 2045289 - RNA, 19 nt, Artificial Sequence
  Description of Artificial Sequence: Synthetic oligonucleotide
guccugggcaggaaggaac

SEQ ID NO: 2045290 - RNA, 19 nt, Artificial Sequence
  Description of Artificial Sequence: Synthetic oligonucleotide
ccaaguaaagucguugaca

SEQ ID NO: 2045291 - RNA, 19 nt, Artificial Sequence
  Description of Artificial Sequence: Synthetic oligonucleotide
ugcaaccuuugaccuuuau

SEQ ID NO: 2045292 - RNA, 19 nt, Artificial Sequence
  Description of Artificial Sequence: Synthetic oligonucleotide
ggagcccugcacaggaagg

SEQ ID NO: 2045293 - RNA, 19 nt, Artificial Sequence
  Description of Artificial Sequence: Synthetic oligonucleotide
gcuacuaccuaaagcagaa

SEQ ID NO: 2045294 - RNA, 19 nt, Artificial Sequence
  Description of Artificial Sequence: Synthetic oligonucleotide
cgaucauagucuucuugcc

SEQ ID NO: 2045295 - RNA, 19 nt, Artificial Sequence
  Description of Artificial Sequence: Synthetic oligonucleotide
uccccacgaggaugauggg

SEQ ID NO: 2045296 - RNA, 19 nt, Artificial Sequence
  Description of Artificial Sequence: Synthetic oligonucleotide
gaaaggacuaagagcccua

SEQ ID NO: 2045297 - RNA, 19 nt, Artificial Sequence
  Description of Artificial Sequence: Synthetic oligonucleotide
auuccccacgaggaugaug

SEQ ID NO: 2045298 - RNA, 19 nt, Artificial Sequence
  Description of Artificial Sequence: Synthetic oligonucleotide
acugauccuguuugccaua

SEQ ID NO: 2045299 - RNA, 19 nt, Artificial Sequence
  Description of Artificial Sequence: Synthetic oligonucleotide
acaugaggaugacgucagu

SEQ ID NO: 2045300 - RNA, 19 nt, Artificial Sequence
  Description of Artificial Sequence: Synthetic oligonucleotide
cguugacaaggcuacuacc

SEQ ID NO: 2045301 - RNA, 19 nt, Artificial Sequence
  Description of Artificial Sequence: Synthetic oligonucleotide
gugauauggggaaggucga

SEQ ID NO: 2045302 - RNA, 19 nt, Artificial Sequence
  Description of Artificial Sequence: Synthetic oligonucleotide
ccaccaaguaaagucguug

SEQ ID NO: 2045303 - RNA, 19 nt, Artificial Sequence
  Description of Artificial Sequence: Synthetic oligonucleotide
gggacagccccuccggcgc

SEQ ID NO: 2045304 - RNA, 19 nt, Artificial Sequence
  Description of Artificial Sequence: Synthetic oligonucleotide
ggcuacuaccuaaagcaga

SEQ ID NO: 2045305 - RNA, 19 nt, Artificial Sequence
  Description of Artificial Sequence: Synthetic oligonucleotide
caggcgaucauagucuucu

SEQ ID NO: 2045306 - RNA, 19 nt, Artificial Sequence
  Description of Artificial Sequence: Synthetic oligonucleotide
ggugugugauauggggaag

SEQ ID NO: 2045307 - RNA, 19 nt, Artificial Sequence
  Description of Artificial Sequence: Synthetic oligonucleotide
gugugauauggggaagguc

SEQ ID NO: 2045308 - RNA, 19 nt, Artificial Sequence
  Description of Artificial Sequence: Synthetic oligonucleotide
caaauaccucccgcacccc

SEQ ID NO: 2045309 - RNA, 19 nt, Artificial Sequence
  Description of Artificial Sequence: Synthetic oligonucleotide
gaucgaacaggcuccuguu

SEQ ID NO: 2045310 - RNA, 19 nt, Artificial Sequence
  Description of Artificial Sequence: Synthetic oligonucleotide
aucccagucccuaccccag

SEQ ID NO: 2045311 - RNA, 19 nt, Artificial Sequence
  Description of Artificial Sequence: Synthetic oligonucleotide
uggugcaaccuuugaccuu

SEQ ID NO: 2045312 - RNA, 19 nt, Artificial Sequence
  Description of Artificial Sequence: Synthetic oligonucleotide
cuuauucuugcggaccugu

SEQ ID NO: 2045313 - RNA, 19 nt, Artificial Sequence
  Description of Artificial Sequence: Synthetic oligonucleotide
ggacagaggccgcaggcga

SEQ ID NO: 2045314 - RNA, 19 nt, Artificial Sequence
  Description of Artificial Sequence: Synthetic oligonucleotide
guagggacguagaccucug

SEQ ID NO: 2045315 - RNA, 19 nt, Artificial Sequence
  Description of Artificial Sequence: Synthetic oligonucleotide
ugucugcaauguaguucuc

SEQ ID NO: 2045316 - RNA, 19 nt, Artificial Sequence
  Description of Artificial Sequence: Synthetic oligonucleotide
agaugccuccugugagcca

SEQ ID NO: 2045317 - RNA, 19 nt, Artificial Sequence
  Description of Artificial Sequence: Synthetic oligonucleotide
aggccgcaggcgaucauag

SEQ ID NO: 2045318 - RNA, 19 nt, Artificial Sequence
  Description of Artificial Sequence: Synthetic oligonucleotide
ucccuaccccagaugccuc

SEQ ID NO: 2045319 - RNA, 19 nt, Artificial Sequence
  Description of Artificial Sequence: Synthetic oligonucleotide
ggcuggggaaacaaacuca

SEQ ID NO: 2045320 - RNA, 19 nt, Artificial Sequence
  Description of Artificial Sequence: Synthetic oligonucleotide
accuguaggccagcccgag

SEQ ID NO: 2045321 - RNA, 19 nt, Artificial Sequence
  Description of Artificial Sequence: Synthetic oligonucleotide
ccggcgcuuauucuugcgg

SEQ ID NO: 2045322 - RNA, 19 nt, Artificial Sequence
  Description of Artificial Sequence: Synthetic oligonucleotide
auguccccaccaaguaaag

SEQ ID NO: 2045323 - RNA, 19 nt, Artificial Sequence
  Description of Artificial Sequence: Synthetic oligonucleotide
ggaacugauccuugcugaa

SEQ ID NO: 2045324 - RNA, 19 nt, Artificial Sequence
  Description of Artificial Sequence: Synthetic oligonucleotide
ugcuugccauccacuucaa

SEQ ID NO: 2045325 - RNA, 19 nt, Artificial Sequence
  Description of Artificial Sequence: Synthetic oligonucleotide
cacuucucaggaauguuuu

SEQ ID NO: 2045326 - RNA, 19 nt, Artificial Sequence
  Description of Artificial Sequence: Synthetic oligonucleotide
ggggauaauuuguaccccu

SEQ ID NO: 2045327 - RNA, 19 nt, Artificial Sequence
  Description of Artificial Sequence: Synthetic oligonucleotide
caggacugucgauggagaa

SEQ ID NO: 2045328 - RNA, 19 nt, Artificial Sequence
  Description of Artificial Sequence: Synthetic oligonucleotide
caugcaguccugggcagga

SEQ ID NO: 2045329 - RNA, 19 nt, Artificial Sequence
  Description of Artificial Sequence: Synthetic oligonucleotide
cuaccccagaugccuccug

SEQ ID NO: 2045330 - RNA, 19 nt, Artificial Sequence
  Description of Artificial Sequence: Synthetic oligonucleotide
ccagcucucuucuggugug

SEQ ID NO: 2045331 - RNA, 19 nt, Artificial Sequence
  Description of Artificial Sequence: Synthetic oligonucleotide
agucguugacaaggcuacu

SEQ ID NO: 2045332 - RNA, 19 nt, Artificial Sequence
  Description of Artificial Sequence: Synthetic oligonucleotide
uaccucccgcaccccuucu

SEQ ID NO: 2045333 - RNA, 19 nt, Artificial Sequence
  Description of Artificial Sequence: Synthetic oligonucleotide
auggagugggauggggaua

SEQ ID NO: 2045334 - RNA, 19 nt, Artificial Sequence
  Description of Artificial Sequence: Synthetic oligonucleotide
gucccuaccccagaugccu

SEQ ID NO: 2045335 - RNA, 19 nt, Artificial Sequence
  Description of Artificial Sequence: Synthetic oligonucleotide
cagcucucuucuggugugc

SEQ ID NO: 2045336 - RNA, 19 nt, Artificial Sequence
  Description of Artificial Sequence: Synthetic oligonucleotide
cauggaguccuagaaggau

SEQ ID NO: 2045337 - RNA, 19 nt, Artificial Sequence
  Description of Artificial Sequence: Synthetic oligonucleotide
ggauaauuuguaccccuuu

SEQ ID NO: 2045338 - RNA, 19 nt, Artificial Sequence
  Description of Artificial Sequence: Synthetic oligonucleotide
cuggaccaacgcagcagga

SEQ ID NO: 2045339 - RNA, 19 nt, Artificial Sequence
  Description of Artificial Sequence: Synthetic oligonucleotide
gacugucgauggagaaaca

SEQ ID NO: 2045340 - RNA, 19 nt, Artificial Sequence
  Description of Artificial Sequence: Synthetic oligonucleotide
guaccccuuugaaaaggaa

SEQ ID NO: 2045341 - RNA, 19 nt, Artificial Sequence
  Description of Artificial Sequence: Synthetic oligonucleotide
ccauaucccggccuuccuc

SEQ ID NO: 2045342 - RNA, 19 nt, Artificial Sequence
  Description of Artificial Sequence: Synthetic oligonucleotide
ggaaggucgaaaggacuaa

SEQ ID NO: 2045343 - RNA, 19 nt, Artificial Sequence
  Description of Artificial Sequence: Synthetic oligonucleotide
gaggccgcaggcgaucaua

SEQ ID NO: 2045344 - RNA, 19 nt, Artificial Sequence
  Description of Artificial Sequence: Synthetic oligonucleotide
ggauugcagccauggcuga

SEQ ID NO: 2045345 - RNA, 19 nt, Artificial Sequence
  Description of Artificial Sequence: Synthetic oligonucleotide
cacuuggggcuggggaaac

SEQ ID NO: 2045346 - RNA, 19 nt, Artificial Sequence
  Description of Artificial Sequence: Synthetic oligonucleotide
acuuggggcuggggaaaca

SEQ ID NO: 2045347 - RNA, 19 nt, Artificial Sequence
  Description of Artificial Sequence: Synthetic oligonucleotide
agcacucaagguagccaaa

SEQ ID NO: 2045348 - RNA, 19 nt, Artificial Sequence
  Description of Artificial Sequence: Synthetic oligonucleotide
caaugagaaggcaggucuu

SEQ ID NO: 2045349 - RNA, 19 nt, Artificial Sequence
  Description of Artificial Sequence: Synthetic oligonucleotide
ggccagcucucuucuggug

SEQ ID NO: 2045350 - RNA, 19 nt, Artificial Sequence
  Description of Artificial Sequence: Synthetic oligonucleotide
ggucuugccacaggcucca

SEQ ID NO: 2045351 - RNA, 19 nt, Artificial Sequence
  Description of Artificial Sequence: Synthetic oligonucleotide
gggauggggauaauuugua

SEQ ID NO: 2045352 - RNA, 19 nt, Artificial Sequence
  Description of Artificial Sequence: Synthetic oligonucleotide
ccccacgaggaugaugggc

SEQ ID NO: 2045353 - RNA, 19 nt, Artificial Sequence
  Description of Artificial Sequence: Synthetic oligonucleotide
ccaacgcagcaggaggagc

SEQ ID NO: 2045354 - RNA, 19 nt, Artificial Sequence
  Description of Artificial Sequence: Synthetic oligonucleotide
gcauggaguccuagaagga

SEQ ID NO: 2045355 - RNA, 19 nt, Artificial Sequence
  Description of Artificial Sequence: Synthetic oligonucleotide
cagaucgaacaggcuccug

SEQ ID NO: 2045356 - RNA, 19 nt, Artificial Sequence
  Description of Artificial Sequence: Synthetic oligonucleotide
cuacuaccuaaagcagaaa

SEQ ID NO: 2045357 - RNA, 19 nt, Artificial Sequence
  Description of Artificial Sequence: Synthetic oligonucleotide
accucccgcaccccuucuu

SEQ ID NO: 2045358 - RNA, 19 nt, Artificial Sequence
  Description of Artificial Sequence: Synthetic oligonucleotide
cccuaccccuggaccaacg

SEQ ID NO: 2045359 - RNA, 19 nt, Artificial Sequence
  Description of Artificial Sequence: Synthetic oligonucleotide
ccagucccuaccccagaug

SEQ ID NO: 2045360 - RNA, 19 nt, Artificial Sequence
  Description of Artificial Sequence: Synthetic oligonucleotide
gccccuccggcgcuuauuc

SEQ ID NO: 2045361 - RNA, 19 nt, Artificial Sequence
  Description of Artificial Sequence: Synthetic oligonucleotide
gaacaggcuccuguuucau

SEQ ID NO: 2045362 - RNA, 19 nt, Artificial Sequence
  Description of Artificial Sequence: Synthetic oligonucleotide
gauccuugcugaagacaau

SEQ ID NO: 2045363 - RNA, 19 nt, Artificial Sequence
  Description of Artificial Sequence: Synthetic oligonucleotide
ccacgaggaugaugggcac

SEQ ID NO: 2045364 - RNA, 19 nt, Artificial Sequence
  Description of Artificial Sequence: Synthetic oligonucleotide
ccugugagccagaaauaua

SEQ ID NO: 2045365 - RNA, 19 nt, Artificial Sequence
  Description of Artificial Sequence: Synthetic oligonucleotide
ccgcaccccuucuuuaguc

SEQ ID NO: 2045366 - RNA, 19 nt, Artificial Sequence
  Description of Artificial Sequence: Synthetic oligonucleotide
ggaaaauuggagagaccuu

SEQ ID NO: 2045367 - RNA, 19 nt, Artificial Sequence
  Description of Artificial Sequence: Synthetic oligonucleotide
cacaaucaccagcuucuuu

SEQ ID NO: 2045368 - RNA, 19 nt, Artificial Sequence
  Description of Artificial Sequence: Synthetic oligonucleotide
cucccgcaccccuucuuua

SEQ ID NO: 2045369 - RNA, 19 nt, Artificial Sequence
  Description of Artificial Sequence: Synthetic oligonucleotide
cagaggccgcaggcgauca

SEQ ID NO: 2045370 - RNA, 19 nt, Artificial Sequence
  Description of Artificial Sequence: Synthetic oligonucleotide
cuucaccucugggguccac

SEQ ID NO: 2045371 - RNA, 19 nt, Artificial Sequence
  Description of Artificial Sequence: Synthetic oligonucleotide
ggugccggaggcugagacu

SEQ ID NO: 2045372 - RNA, 19 nt, Artificial Sequence
  Description of Artificial Sequence: Synthetic oligonucleotide
ccgcaggcgaucauagucu

SEQ ID NO: 2045373 - RNA, 19 nt, Artificial Sequence
  Description of Artificial Sequence: Synthetic oligonucleotide
ggaguccuagaaggaugga

SEQ ID NO: 2045374 - RNA, 19 nt, Artificial Sequence
  Description of Artificial Sequence: Synthetic oligonucleotide
cggaccuguaggccagccc

SEQ ID NO: 2045375 - RNA, 19 nt, Artificial Sequence
  Description of Artificial Sequence: Synthetic oligonucleotide
cggugccggaggcugagac

SEQ ID NO: 2045376 - RNA, 19 nt, Artificial Sequence
  Description of Artificial Sequence: Synthetic oligonucleotide
cuggcagcauggaguccua

SEQ ID NO: 2045377 - RNA, 19 nt, Artificial Sequence
  Description of Artificial Sequence: Synthetic oligonucleotide
gggauaauuuguaccccuu

SEQ ID NO: 2045378 - RNA, 19 nt, Artificial Sequence
  Description of Artificial Sequence: Synthetic oligonucleotide
gcaggcgaucauagucuuc

SEQ ID NO: 2045379 - RNA, 19 nt, Artificial Sequence
  Description of Artificial Sequence: Synthetic oligonucleotide
ccgaguggccaucucaaau

SEQ ID NO: 2045380 - RNA, 19 nt, Artificial Sequence
  Description of Artificial Sequence: Synthetic oligonucleotide
caaaggcacugauccuguu

SEQ ID NO: 2045381 - RNA, 19 nt, Artificial Sequence
  Description of Artificial Sequence: Synthetic oligonucleotide
ggccuuccucagaucgaac

SEQ ID NO: 2045382 - RNA, 19 nt, Artificial Sequence
  Description of Artificial Sequence: Synthetic oligonucleotide
gcaccccuucuuuagucuu

SEQ ID NO: 2045383 - RNA, 19 nt, Artificial Sequence
  Description of Artificial Sequence: Synthetic oligonucleotide
ccggccuuccucagaucga

SEQ ID NO: 2045384 - RNA, 19 nt, Artificial Sequence
  Description of Artificial Sequence: Synthetic oligonucleotide
gccauaucccggccuuccu

SEQ ID NO: 2045385 - RNA, 19 nt, Artificial Sequence
  Description of Artificial Sequence: Synthetic oligonucleotide
caaagacaguagggacgua

SEQ ID NO: 2045386 - RNA, 19 nt, Artificial Sequence
  Description of Artificial Sequence: Synthetic oligonucleotide
caggcuccuguuucaucuu

SEQ ID NO: 2045387 - RNA, 19 nt, Artificial Sequence
  Description of Artificial Sequence: Synthetic oligonucleotide
gcgcggccggugccggagg

SEQ ID NO: 2045388 - RNA, 19 nt, Artificial Sequence
  Description of Artificial Sequence: Synthetic oligonucleotide
ccccaccaaguaaagucgu

SEQ ID NO: 2045389 - RNA, 19 nt, Artificial Sequence
  Description of Artificial Sequence: Synthetic oligonucleotide
gugcaaccuuugaccuuua

SEQ ID NO: 2045390 - RNA, 19 nt, Artificial Sequence
  Description of Artificial Sequence: Synthetic oligonucleotide
cgcaccccuucuuuagucu

SEQ ID NO: 2045391 - RNA, 19 nt, Artificial Sequence
  Description of Artificial Sequence: Synthetic oligonucleotide
ggacagccccuccggcgcu

SEQ ID NO: 2045392 - RNA, 19 nt, Artificial Sequence
  Description of Artificial Sequence: Synthetic oligonucleotide
cugcgcggccggugccgga

SEQ ID NO: 2045393 - RNA, 19 nt, Artificial Sequence
  Description of Artificial Sequence: Synthetic oligonucleotide
ccuguaggccagcccgagu

SEQ ID NO: 2045394 - RNA, 19 nt, Artificial Sequence
  Description of Artificial Sequence: Synthetic oligonucleotide
gacagccccuccggcgcuu

SEQ ID NO: 2045395 - RNA, 19 nt, Artificial Sequence
  Description of Artificial Sequence: Synthetic oligonucleotide
ccucccgcaccccuucuuu

SEQ ID NO: 2045396 - RNA, 19 nt, Artificial Sequence
  Description of Artificial Sequence: Synthetic oligonucleotide
ggccagcccgaguggccau

SEQ ID NO: 2045397 - RNA, 19 nt, Artificial Sequence
  Description of Artificial Sequence: Synthetic oligonucleotide
cgcaggcgaucauagucuu

SEQ ID NO: 2045398 - RNA, 19 nt, Artificial Sequence
  Description of Artificial Sequence: Synthetic oligonucleotide
ggagugggauggggauaau

SEQ ID NO: 2045399 - RNA, 19 nt, Artificial Sequence
  Description of Artificial Sequence: Synthetic oligonucleotide
ccccuccggcgcuuauucu

SEQ ID NO: 2045400 - RNA, 19 nt, Artificial Sequence
  Description of Artificial Sequence: Synthetic oligonucleotide
cuccagcugcgcggccggu

SEQ ID NO: 2045401 - RNA, 19 nt, Artificial Sequence
  Description of Artificial Sequence: Synthetic oligonucleotide
cagccccuccggcgcuuau

SEQ ID NO: 2045402 - RNA, 19 nt, Artificial Sequence
  Description of Artificial Sequence: Synthetic oligonucleotide
gcggccggugccggaggcu

SEQ ID NO: 2045403 - RNA, 19 nt, Artificial Sequence
  Description of Artificial Sequence: Synthetic oligonucleotide
ccggugccggaggcugaga

SEQ ID NO: 2045404 - RNA, 19 nt, Artificial Sequence
  Description of Artificial Sequence: Synthetic oligonucleotide
ucacuuagucuucugaugg

SEQ ID NO: 2045405 - RNA, 19 nt, Artificial Sequence
  Description of Artificial Sequence: Synthetic oligonucleotide
aauaccuucucucacccug

SEQ ID NO: 2045406 - RNA, 19 nt, Artificial Sequence
  Description of Artificial Sequence: Synthetic oligonucleotide
ugcagaggcucauagaugg

SEQ ID NO: 2045407 - RNA, 19 nt, Artificial Sequence
  Description of Artificial Sequence: Synthetic oligonucleotide
aaaacuuggugucccugcc

SEQ ID NO: 2045408 - RNA, 19 nt, Artificial Sequence
  Description of Artificial Sequence: Synthetic oligonucleotide
aaguagaaacaccaggucu

SEQ ID NO: 2045409 - RNA, 19 nt, Artificial Sequence
  Description of Artificial Sequence: Synthetic oligonucleotide
ugugauagagaagagcggg

SEQ ID NO: 2045410 - RNA, 19 nt, Artificial Sequence
  Description of Artificial Sequence: Synthetic oligonucleotide
ugaguccagacauucacgg

SEQ ID NO: 2045411 - RNA, 19 nt, Artificial Sequence
  Description of Artificial Sequence: Synthetic oligonucleotide
ugagcuuguaggcagggag

SEQ ID NO: 2045412 - RNA, 19 nt, Artificial Sequence
  Description of Artificial Sequence: Synthetic oligonucleotide
acauggaaaacuugguguc

SEQ ID NO: 2045413 - RNA, 19 nt, Artificial Sequence
  Description of Artificial Sequence: Synthetic oligonucleotide
cuaaauaccuucucucacc

SEQ ID NO: 2045414 - RNA, 19 nt, Artificial Sequence
  Description of Artificial Sequence: Synthetic oligonucleotide
ugcggaaguagaaacacca

SEQ ID NO: 2045415 - RNA, 19 nt, Artificial Sequence
  Description of Artificial Sequence: Synthetic oligonucleotide
uucugauggaguuugcgcc

SEQ ID NO: 2045416 - RNA, 19 nt, Artificial Sequence
  Description of Artificial Sequence: Synthetic oligonucleotide
ugaggagcaaggcagugag

SEQ ID NO: 2045417 - RNA, 19 nt, Artificial Sequence
  Description of Artificial Sequence: Synthetic oligonucleotide
aaacuuggugucccugccc

SEQ ID NO: 2045418 - RNA, 19 nt, Artificial Sequence
  Description of Artificial Sequence: Synthetic oligonucleotide
uguagugaccaaaacucug

SEQ ID NO: 2045419 - RNA, 19 nt, Artificial Sequence
  Description of Artificial Sequence: Synthetic oligonucleotide
gaaguuguggggccaacgg

SEQ ID NO: 2045420 - RNA, 19 nt, Artificial Sequence
  Description of Artificial Sequence: Synthetic oligonucleotide
cauaguagaagugugccag

SEQ ID NO: 2045421 - RNA, 19 nt, Artificial Sequence
  Description of Artificial Sequence: Synthetic oligonucleotide
aacaacuuuaccaggccuc

SEQ ID NO: 2045422 - RNA, 19 nt, Artificial Sequence
  Description of Artificial Sequence: Synthetic oligonucleotide
caacucuccggcaugacgg

SEQ ID NO: 2045423 - RNA, 19 nt, Artificial Sequence
  Description of Artificial Sequence: Synthetic oligonucleotide
acuuguuguagcaggaccc

SEQ ID NO: 2045424 - RNA, 19 nt, Artificial Sequence
  Description of Artificial Sequence: Synthetic oligonucleotide
ugauaguccagugucacug

SEQ ID NO: 2045425 - RNA, 19 nt, Artificial Sequence
  Description of Artificial Sequence: Synthetic oligonucleotide
uacuuguuguagcaggacc

SEQ ID NO: 2045426 - RNA, 19 nt, Artificial Sequence
  Description of Artificial Sequence: Synthetic oligonucleotide
aaacaacuuuaccaggccu

SEQ ID NO: 2045427 - RNA, 19 nt, Artificial Sequence
  Description of Artificial Sequence: Synthetic oligonucleotide
aaguuguggggccaacggg

SEQ ID NO: 2045428 - RNA, 19 nt, Artificial Sequence
  Description of Artificial Sequence: Synthetic oligonucleotide
uugugauagagaagagcgg

SEQ ID NO: 2045429 - RNA, 19 nt, Artificial Sequence
  Description of Artificial Sequence: Synthetic oligonucleotide
ucugauggaguuugcgccg

SEQ ID NO: 2045430 - RNA, 19 nt, Artificial Sequence
  Description of Artificial Sequence: Synthetic oligonucleotide
aacugguacacggcuacgc

SEQ ID NO: 2045431 - RNA, 19 nt, Artificial Sequence
  Description of Artificial Sequence: Synthetic oligonucleotide
gaugcggugcaccacgggg

SEQ ID NO: 2045432 - RNA, 19 nt, Artificial Sequence
  Description of Artificial Sequence: Synthetic oligonucleotide
uguaaggcuuccagaagag

SEQ ID NO: 2045433 - RNA, 19 nt, Artificial Sequence
  Description of Artificial Sequence: Synthetic oligonucleotide
ugucccugcccaaagaugu

SEQ ID NO: 2045434 - RNA, 19 nt, Artificial Sequence
  Description of Artificial Sequence: Synthetic oligonucleotide
uggccugccauauacaaac

SEQ ID NO: 2045435 - RNA, 19 nt, Artificial Sequence
  Description of Artificial Sequence: Synthetic oligonucleotide
agauguaaggcuuccagaa

SEQ ID NO: 2045436 - RNA, 19 nt, Artificial Sequence
  Description of Artificial Sequence: Synthetic oligonucleotide
acugguacacggcuacgcc

SEQ ID NO: 2045437 - RNA, 19 nt, Artificial Sequence
  Description of Artificial Sequence: Synthetic oligonucleotide
aguccagacauucacggcu

SEQ ID NO: 2045438 - RNA, 19 nt, Artificial Sequence
  Description of Artificial Sequence: Synthetic oligonucleotide
uucacuuagucuucugaug

SEQ ID NO: 2045439 - RNA, 19 nt, Artificial Sequence
  Description of Artificial Sequence: Synthetic oligonucleotide
agggugcggaaguagaaac

SEQ ID NO: 2045440 - RNA, 19 nt, Artificial Sequence
  Description of Artificial Sequence: Synthetic oligonucleotide
agcuguagugaccaaaacu

SEQ ID NO: 2045441 - RNA, 19 nt, Artificial Sequence
  Description of Artificial Sequence: Synthetic oligonucleotide
agacauggaaaacuuggug

SEQ ID NO: 2045442 - RNA, 19 nt, Artificial Sequence
  Description of Artificial Sequence: Synthetic oligonucleotide
gaccaaaacucugacuugg

SEQ ID NO: 2045443 - RNA, 19 nt, Artificial Sequence
  Description of Artificial Sequence: Synthetic oligonucleotide
cuucugauggaguuugcgc

SEQ ID NO: 2045444 - RNA, 19 nt, Artificial Sequence
  Description of Artificial Sequence: Synthetic oligonucleotide
uguacuuguuguagcagga

SEQ ID NO: 2045445 - RNA, 19 nt, Artificial Sequence
  Description of Artificial Sequence: Synthetic oligonucleotide
aagcuguagugaccaaaac

SEQ ID NO: 2045446 - RNA, 19 nt, Artificial Sequence
  Description of Artificial Sequence: Synthetic oligonucleotide
auaguccagugucacugcc

SEQ ID NO: 2045447 - RNA, 19 nt, Artificial Sequence
  Description of Artificial Sequence: Synthetic oligonucleotide
aacaccaggucugaugcag

SEQ ID NO: 2045448 - RNA, 19 nt, Artificial Sequence
  Description of Artificial Sequence: Synthetic oligonucleotide
aguuguggggccaacgggc

SEQ ID NO: 2045449 - RNA, 19 nt, Artificial Sequence
  Description of Artificial Sequence: Synthetic oligonucleotide
gacauucacggcuucguug

SEQ ID NO: 2045450 - RNA, 19 nt, Artificial Sequence
  Description of Artificial Sequence: Synthetic oligonucleotide
aguagaaacaccaggucug

SEQ ID NO: 2045451 - RNA, 19 nt, Artificial Sequence
  Description of Artificial Sequence: Synthetic oligonucleotide
gacauggaaaacuuggugu

SEQ ID NO: 2045452 - RNA, 19 nt, Artificial Sequence
  Description of Artificial Sequence: Synthetic oligonucleotide
aaggcuuccagaagagagg

SEQ ID NO: 2045453 - RNA, 19 nt, Artificial Sequence
  Description of Artificial Sequence: Synthetic oligonucleotide
ucuucugauggaguuugcg

SEQ ID NO: 2045454 - RNA, 19 nt, Artificial Sequence
  Description of Artificial Sequence: Synthetic oligonucleotide
cucguucccaucuggagcc

SEQ ID NO: 2045455 - RNA, 19 nt, Artificial Sequence
  Description of Artificial Sequence: Synthetic oligonucleotide
agugagaaugcugcugccc

SEQ ID NO: 2045456 - RNA, 19 nt, Artificial Sequence
  Description of Artificial Sequence: Synthetic oligonucleotide
aagaccaccuggcacuugu

SEQ ID NO: 2045457 - RNA, 19 nt, Artificial Sequence
  Description of Artificial Sequence: Synthetic oligonucleotide
uggcacuugugauagagaa

SEQ ID NO: 2045458 - RNA, 19 nt, Artificial Sequence
  Description of Artificial Sequence: Synthetic oligonucleotide
gaggggacacguaugaugc

SEQ ID NO: 2045459 - RNA, 19 nt, Artificial Sequence
  Description of Artificial Sequence: Synthetic oligonucleotide
aggccagagaaguuguggg

SEQ ID NO: 2045460 - RNA, 19 nt, Artificial Sequence
  Description of Artificial Sequence: Synthetic oligonucleotide
gaaguagaaacaccagguc

SEQ ID NO: 2045461 - RNA, 19 nt, Artificial Sequence
  Description of Artificial Sequence: Synthetic oligonucleotide
uagauguaaggcuuccaga

SEQ ID NO: 2045462 - RNA, 19 nt, Artificial Sequence
  Description of Artificial Sequence: Synthetic oligonucleotide
guagaagugugccagggca

SEQ ID NO: 2045463 - RNA, 19 nt, Artificial Sequence
  Description of Artificial Sequence: Synthetic oligonucleotide
acuuuaccaggccucguuc

SEQ ID NO: 2045464 - RNA, 19 nt, Artificial Sequence
  Description of Artificial Sequence: Synthetic oligonucleotide
gaagaagcuguagugacca

SEQ ID NO: 2045465 - RNA, 19 nt, Artificial Sequence
  Description of Artificial Sequence: Synthetic oligonucleotide
uuuaccaggccucguuccc

SEQ ID NO: 2045466 - RNA, 19 nt, Artificial Sequence
  Description of Artificial Sequence: Synthetic oligonucleotide
uuugucccuaaauaccuuc

SEQ ID NO: 2045467 - RNA, 19 nt, Artificial Sequence
  Description of Artificial Sequence: Synthetic oligonucleotide
uggcauaguagaagugugc

SEQ ID NO: 2045468 - RNA, 19 nt, Artificial Sequence
  Description of Artificial Sequence: Synthetic oligonucleotide
gagaagagcggggucaucc

SEQ ID NO: 2045469 - RNA, 19 nt, Artificial Sequence
  Description of Artificial Sequence: Synthetic oligonucleotide
ucccuaaauaccuucucuc

SEQ ID NO: 2045470 - RNA, 19 nt, Artificial Sequence
  Description of Artificial Sequence: Synthetic oligonucleotide
cuuuaccaggccucguucc

SEQ ID NO: 2045471 - RNA, 19 nt, Artificial Sequence
  Description of Artificial Sequence: Synthetic oligonucleotide
agagaggcggcaccucagc

SEQ ID NO: 2045472 - RNA, 19 nt, Artificial Sequence
  Description of Artificial Sequence: Synthetic oligonucleotide
uggcccacgugccaaaggc

SEQ ID NO: 2045473 - RNA, 19 nt, Artificial Sequence
  Description of Artificial Sequence: Synthetic oligonucleotide
auguccagcgcguaggcca

SEQ ID NO: 2045474 - RNA, 19 nt, Artificial Sequence
  Description of Artificial Sequence: Synthetic oligonucleotide
caaacugguacacggcuac

SEQ ID NO: 2045475 - RNA, 19 nt, Artificial Sequence
  Description of Artificial Sequence: Synthetic oligonucleotide
acaacuuuaccaggccucg

SEQ ID NO: 2045476 - RNA, 19 nt, Artificial Sequence
  Description of Artificial Sequence: Synthetic oligonucleotide
aagagcggggucauccucg

SEQ ID NO: 2045477 - RNA, 19 nt, Artificial Sequence
  Description of Artificial Sequence: Synthetic oligonucleotide
gucauggccugccauauac

SEQ ID NO: 2045478 - RNA, 19 nt, Artificial Sequence
  Description of Artificial Sequence: Synthetic oligonucleotide
aagaaggcggccgugggca

SEQ ID NO: 2045479 - RNA, 19 nt, Artificial Sequence
  Description of Artificial Sequence: Synthetic oligonucleotide
gcaagugcggcccagcagg

SEQ ID NO: 2045480 - RNA, 19 nt, Artificial Sequence
  Description of Artificial Sequence: Synthetic oligonucleotide
auagagaagagcgggguca

SEQ ID NO: 2045481 - RNA, 19 nt, Artificial Sequence
  Description of Artificial Sequence: Synthetic oligonucleotide
uugggcagugagcuuguag

SEQ ID NO: 2045482 - RNA, 19 nt, Artificial Sequence
  Description of Artificial Sequence: Synthetic oligonucleotide
ggcacugccaaacugguac

SEQ ID NO: 2045483 - RNA, 19 nt, Artificial Sequence
  Description of Artificial Sequence: Synthetic oligonucleotide
agugugccagggcacugcc

SEQ ID NO: 2045484 - RNA, 19 nt, Artificial Sequence
  Description of Artificial Sequence: Synthetic oligonucleotide
ucauccucggcagggagag

SEQ ID NO: 2045485 - RNA, 19 nt, Artificial Sequence
  Description of Artificial Sequence: Synthetic oligonucleotide
auucacggcuucguugugc

SEQ ID NO: 2045486 - RNA, 19 nt, Artificial Sequence
  Description of Artificial Sequence: Synthetic oligonucleotide
acuuagucuucugauggag

SEQ ID NO: 2045487 - RNA, 19 nt, Artificial Sequence
  Description of Artificial Sequence: Synthetic oligonucleotide
ugaccaaaacucugacuug

SEQ ID NO: 2045488 - RNA, 19 nt, Artificial Sequence
  Description of Artificial Sequence: Synthetic oligonucleotide
aacuuuaccaggccucguu

SEQ ID NO: 2045489 - RNA, 19 nt, Artificial Sequence
  Description of Artificial Sequence: Synthetic oligonucleotide
acacguaugaugcggugca

SEQ ID NO: 2045490 - RNA, 19 nt, Artificial Sequence
  Description of Artificial Sequence: Synthetic oligonucleotide
ugauagagaagagcggggu

SEQ ID NO: 2045491 - RNA, 19 nt, Artificial Sequence
  Description of Artificial Sequence: Synthetic oligonucleotide
acguaugaugcggugcacc

SEQ ID NO: 2045492 - RNA, 19 nt, Artificial Sequence
  Description of Artificial Sequence: Synthetic oligonucleotide
ugccauauacaaacaacuu

SEQ ID NO: 2045493 - RNA, 19 nt, Artificial Sequence
  Description of Artificial Sequence: Synthetic oligonucleotide
aagacauggaaaacuuggu

SEQ ID NO: 2045494 - RNA, 19 nt, Artificial Sequence
  Description of Artificial Sequence: Synthetic oligonucleotide
gcuguagugaccaaaacuc

SEQ ID NO: 2045495 - RNA, 19 nt, Artificial Sequence
  Description of Artificial Sequence: Synthetic oligonucleotide
gugaccaaaacucugacuu

SEQ ID NO: 2045496 - RNA, 19 nt, Artificial Sequence
  Description of Artificial Sequence: Synthetic oligonucleotide
ugcccaaagauguggcagc

SEQ ID NO: 2045497 - RNA, 19 nt, Artificial Sequence
  Description of Artificial Sequence: Synthetic oligonucleotide
agugaccaaaacucugacu

SEQ ID NO: 2045498 - RNA, 19 nt, Artificial Sequence
  Description of Artificial Sequence: Synthetic oligonucleotide
uugucccuaaauaccuucu

SEQ ID NO: 2045499 - RNA, 19 nt, Artificial Sequence
  Description of Artificial Sequence: Synthetic oligonucleotide
aaacucugacuuggccugc

SEQ ID NO: 2045500 - RNA, 19 nt, Artificial Sequence
  Description of Artificial Sequence: Synthetic oligonucleotide
gauagagaagagcgggguc

SEQ ID NO: 2045501 - RNA, 19 nt, Artificial Sequence
  Description of Artificial Sequence: Synthetic oligonucleotide
ugugaacacgggcucuggc

SEQ ID NO: 2045502 - RNA, 19 nt, Artificial Sequence
  Description of Artificial Sequence: Synthetic oligonucleotide
cacggugagcagaaagagg

SEQ ID NO: 2045503 - RNA, 19 nt, Artificial Sequence
  Description of Artificial Sequence: Synthetic oligonucleotide
aaauaccuucucucacccu

SEQ ID NO: 2045504 - RNA, 19 nt, Artificial Sequence
  Description of Artificial Sequence: Synthetic oligonucleotide
uagaagugugccagggcac

SEQ ID NO: 2045505 - RNA, 19 nt, Artificial Sequence
  Description of Artificial Sequence: Synthetic oligonucleotide
uccggcaugacgguggaga

SEQ ID NO: 2045506 - RNA, 19 nt, Artificial Sequence
  Description of Artificial Sequence: Synthetic oligonucleotide
cucuccggcaugacggugg

SEQ ID NO: 2045507 - RNA, 19 nt, Artificial Sequence
  Description of Artificial Sequence: Synthetic oligonucleotide
cugguacacggcuacgccc

SEQ ID NO: 2045508 - RNA, 19 nt, Artificial Sequence
  Description of Artificial Sequence: Synthetic oligonucleotide
cacggcuacgcccacguag

SEQ ID NO: 2045509 - RNA, 19 nt, Artificial Sequence
  Description of Artificial Sequence: Synthetic oligonucleotide
agcagaaagaggccagaga

SEQ ID NO: 2045510 - RNA, 19 nt, Artificial Sequence
  Description of Artificial Sequence: Synthetic oligonucleotide
agaaguuguggggccaacg

SEQ ID NO: 2045511 - RNA, 19 nt, Artificial Sequence
  Description of Artificial Sequence: Synthetic oligonucleotide
gacacguaugaugcggugc

SEQ ID NO: 2045512 - RNA, 19 nt, Artificial Sequence
  Description of Artificial Sequence: Synthetic oligonucleotide
ccaacgggcaugcagaggc

SEQ ID NO: 2045513 - RNA, 19 nt, Artificial Sequence
  Description of Artificial Sequence: Synthetic oligonucleotide
caaagauguggcagcugcc

SEQ ID NO: 2045514 - RNA, 19 nt, Artificial Sequence
  Description of Artificial Sequence: Synthetic oligonucleotide
uuggugucccugcccaaag

SEQ ID NO: 2045515 - RNA, 19 nt, Artificial Sequence
  Description of Artificial Sequence: Synthetic oligonucleotide
cauggaaaacuuggugucc

SEQ ID NO: 2045516 - RNA, 19 nt, Artificial Sequence
  Description of Artificial Sequence: Synthetic oligonucleotide
ugucccuaaauaccuucuc

SEQ ID NO: 2045517 - RNA, 19 nt, Artificial Sequence
  Description of Artificial Sequence: Synthetic oligonucleotide
gcagugagaaugcugcugc

SEQ ID NO: 2045518 - RNA, 19 nt, Artificial Sequence
  Description of Artificial Sequence: Synthetic oligonucleotide
uucacggcuucguugugcu

SEQ ID NO: 2045519 - RNA, 19 nt, Artificial Sequence
  Description of Artificial Sequence: Synthetic oligonucleotide
gugauagagaagagcgggg

SEQ ID NO: 2045520 - RNA, 19 nt, Artificial Sequence
  Description of Artificial Sequence: Synthetic oligonucleotide
cuggcuguacuuguuguag

SEQ ID NO: 2045521 - RNA, 19 nt, Artificial Sequence
  Description of Artificial Sequence: Synthetic oligonucleotide
aacgggcaugcagaggcuc

SEQ ID NO: 2045522 - RNA, 19 nt, Artificial Sequence
  Description of Artificial Sequence: Synthetic oligonucleotide
gacaacagguggcugaacu

SEQ ID NO: 2045523 - RNA, 19 nt, Artificial Sequence
  Description of Artificial Sequence: Synthetic oligonucleotide
gcacuugugauagagaaga

SEQ ID NO: 2045524 - RNA, 19 nt, Artificial Sequence
  Description of Artificial Sequence: Synthetic oligonucleotide
ugaugcggugcaccacggg

SEQ ID NO: 2045525 - RNA, 19 nt, Artificial Sequence
  Description of Artificial Sequence: Synthetic oligonucleotide
agccagcauagauguaagg

SEQ ID NO: 2045526 - RNA, 19 nt, Artificial Sequence
  Description of Artificial Sequence: Synthetic oligonucleotide
acugccaaacugguacacg

SEQ ID NO: 2045527 - RNA, 19 nt, Artificial Sequence
  Description of Artificial Sequence: Synthetic oligonucleotide
cacggcuucguugugcugc

SEQ ID NO: 2045528 - RNA, 19 nt, Artificial Sequence
  Description of Artificial Sequence: Synthetic oligonucleotide
accaaaacucugacuuggc

SEQ ID NO: 2045529 - RNA, 19 nt, Artificial Sequence
  Description of Artificial Sequence: Synthetic oligonucleotide
uggcuguacuuguuguagc

SEQ ID NO: 2045530 - RNA, 19 nt, Artificial Sequence
  Description of Artificial Sequence: Synthetic oligonucleotide
cugccauauacaaacaacu

SEQ ID NO: 2045531 - RNA, 19 nt, Artificial Sequence
  Description of Artificial Sequence: Synthetic oligonucleotide
aggccuuugucccuaaaua

SEQ ID NO: 2045532 - RNA, 19 nt, Artificial Sequence
  Description of Artificial Sequence: Synthetic oligonucleotide
aacagggugcggaaguaga

SEQ ID NO: 2045533 - RNA, 19 nt, Artificial Sequence
  Description of Artificial Sequence: Synthetic oligonucleotide
gaguccagacauucacggc

SEQ ID NO: 2045534 - RNA, 19 nt, Artificial Sequence
  Description of Artificial Sequence: Synthetic oligonucleotide
aaacaccaggucugaugca

SEQ ID NO: 2045535 - RNA, 19 nt, Artificial Sequence
  Description of Artificial Sequence: Synthetic oligonucleotide
gaagcuguagugaccaaaa

SEQ ID NO: 2045536 - RNA, 19 nt, Artificial Sequence
  Description of Artificial Sequence: Synthetic oligonucleotide
gcagugagcuuguaggcag

SEQ ID NO: 2045537 - RNA, 19 nt, Artificial Sequence
  Description of Artificial Sequence: Synthetic oligonucleotide
ggcauaguagaagugugcc

SEQ ID NO: 2045538 - RNA, 19 nt, Artificial Sequence
  Description of Artificial Sequence: Synthetic oligonucleotide
gccagcauagauguaaggc

SEQ ID NO: 2045539 - RNA, 19 nt, Artificial Sequence
  Description of Artificial Sequence: Synthetic oligonucleotide
cucucacccugccagcucc

SEQ ID NO: 2045540 - RNA, 19 nt, Artificial Sequence
  Description of Artificial Sequence: Synthetic oligonucleotide
ucauggccugccauauaca

SEQ ID NO: 2045541 - RNA, 19 nt, Artificial Sequence
  Description of Artificial Sequence: Synthetic oligonucleotide
uguccagcgcguaggccag

SEQ ID NO: 2045542 - RNA, 19 nt, Artificial Sequence
  Description of Artificial Sequence: Synthetic oligonucleotide
ccugccauauacaaacaac

SEQ ID NO: 2045543 - RNA, 19 nt, Artificial Sequence
  Description of Artificial Sequence: Synthetic oligonucleotide
auggcauaguagaagugug

SEQ ID NO: 2045544 - RNA, 19 nt, Artificial Sequence
  Description of Artificial Sequence: Synthetic oligonucleotide
cugcccaaagauguggcag

SEQ ID NO: 2045545 - RNA, 19 nt, Artificial Sequence
  Description of Artificial Sequence: Synthetic oligonucleotide
ugccaaaggcuggacaaca

SEQ ID NO: 2045546 - RNA, 19 nt, Artificial Sequence
  Description of Artificial Sequence: Synthetic oligonucleotide
ucacccugccagcuccccg

SEQ ID NO: 2045547 - RNA, 19 nt, Artificial Sequence
  Description of Artificial Sequence: Synthetic oligonucleotide
acccugcuuucacuuaguc

SEQ ID NO: 2045548 - RNA, 19 nt, Artificial Sequence
  Description of Artificial Sequence: Synthetic oligonucleotide
augcggugcaccacggggc

SEQ ID NO: 2045549 - RNA, 19 nt, Artificial Sequence
  Description of Artificial Sequence: Synthetic oligonucleotide
aacucuccggcaugacggu

SEQ ID NO: 2045550 - RNA, 19 nt, Artificial Sequence
  Description of Artificial Sequence: Synthetic oligonucleotide
gaacagggugcggaaguag

SEQ ID NO: 2045551 - RNA, 19 nt, Artificial Sequence
  Description of Artificial Sequence: Synthetic oligonucleotide
ggccuuugucccuaaauac

SEQ ID NO: 2045552 - RNA, 19 nt, Artificial Sequence
  Description of Artificial Sequence: Synthetic oligonucleotide
aacagguggcugaacuucu

SEQ ID NO: 2045553 - RNA, 19 nt, Artificial Sequence
  Description of Artificial Sequence: Synthetic oligonucleotide
agugagcuuguaggcaggg

SEQ ID NO: 2045554 - RNA, 19 nt, Artificial Sequence
  Description of Artificial Sequence: Synthetic oligonucleotide
aacgcagcagccagaagaa

SEQ ID NO: 2045555 - RNA, 19 nt, Artificial Sequence
  Description of Artificial Sequence: Synthetic oligonucleotide
gaacacgggcucuggcugc

SEQ ID NO: 2045556 - RNA, 19 nt, Artificial Sequence
  Description of Artificial Sequence: Synthetic oligonucleotide
ggcaugcagaggcucauag

SEQ ID NO: 2045557 - RNA, 19 nt, Artificial Sequence
  Description of Artificial Sequence: Synthetic oligonucleotide
gccgugggcaggaagaugg

SEQ ID NO: 2045558 - RNA, 19 nt, Artificial Sequence
  Description of Artificial Sequence: Synthetic oligonucleotide
ccuaaauaccuucucucac

SEQ ID NO: 2045559 - RNA, 19 nt, Artificial Sequence
  Description of Artificial Sequence: Synthetic oligonucleotide
aggcuggacaacagguggc

SEQ ID NO: 2045560 - RNA, 19 nt, Artificial Sequence
  Description of Artificial Sequence: Synthetic oligonucleotide
ggcuucguugugcugcugg

SEQ ID NO: 2045561 - RNA, 19 nt, Artificial Sequence
  Description of Artificial Sequence: Synthetic oligonucleotide
agagcggggucauccucgg

SEQ ID NO: 2045562 - RNA, 19 nt, Artificial Sequence
  Description of Artificial Sequence: Synthetic oligonucleotide
gagaggcggcaccucagcc

SEQ ID NO: 2045563 - RNA, 19 nt, Artificial Sequence
  Description of Artificial Sequence: Synthetic oligonucleotide
caccuggcacuugugauag

SEQ ID NO: 2045564 - RNA, 19 nt, Artificial Sequence
  Description of Artificial Sequence: Synthetic oligonucleotide
caagaaggcggccgugggc

SEQ ID NO: 2045565 - RNA, 19 nt, Artificial Sequence
  Description of Artificial Sequence: Synthetic oligonucleotide
agaagagcggggucauccu

SEQ ID NO: 2045566 - RNA, 19 nt, Artificial Sequence
  Description of Artificial Sequence: Synthetic oligonucleotide
accaccuggcacuugugau

SEQ ID NO: 2045567 - RNA, 19 nt, Artificial Sequence
  Description of Artificial Sequence: Synthetic oligonucleotide
agaagcuguagugaccaaa

SEQ ID NO: 2045568 - RNA, 19 nt, Artificial Sequence
  Description of Artificial Sequence: Synthetic oligonucleotide
ugagcagaaagaggccaga

SEQ ID NO: 2045569 - RNA, 19 nt, Artificial Sequence
  Description of Artificial Sequence: Synthetic oligonucleotide
ugggcucaauggcauagua

SEQ ID NO: 2045570 - RNA, 19 nt, Artificial Sequence
  Description of Artificial Sequence: Synthetic oligonucleotide
ugccggggaaccaacucuc

SEQ ID NO: 2045571 - RNA, 19 nt, Artificial Sequence
  Description of Artificial Sequence: Synthetic oligonucleotide
uuccagaagagaggcggca

SEQ ID NO: 2045572 - RNA, 19 nt, Artificial Sequence
  Description of Artificial Sequence: Synthetic oligonucleotide
cacguaguccaggaagaag

SEQ ID NO: 2045573 - RNA, 19 nt, Artificial Sequence
  Description of Artificial Sequence: Synthetic oligonucleotide
gaagagcggggucauccuc

SEQ ID NO: 2045574 - RNA, 19 nt, Artificial Sequence
  Description of Artificial Sequence: Synthetic oligonucleotide
aggggacacguaugaugcg

SEQ ID NO: 2045575 - RNA, 19 nt, Artificial Sequence
  Description of Artificial Sequence: Synthetic oligonucleotide
ggccaaugugcacagcacc

SEQ ID NO: 2045576 - RNA, 19 nt, Artificial Sequence
  Description of Artificial Sequence: Synthetic oligonucleotide
cauggccugccauauacaa

SEQ ID NO: 2045577 - RNA, 19 nt, Artificial Sequence
  Description of Artificial Sequence: Synthetic oligonucleotide
acgggcucuggcugcagag

SEQ ID NO: 2045578 - RNA, 19 nt, Artificial Sequence
  Description of Artificial Sequence: Synthetic oligonucleotide
ccaaaacucugacuuggcc

SEQ ID NO: 2045579 - RNA, 19 nt, Artificial Sequence
  Description of Artificial Sequence: Synthetic oligonucleotide
agcccgguccacugugaac

SEQ ID NO: 2045580 - RNA, 19 nt, Artificial Sequence
  Description of Artificial Sequence: Synthetic oligonucleotide
aaccaacucuccggcauga

SEQ ID NO: 2045581 - RNA, 19 nt, Artificial Sequence
  Description of Artificial Sequence: Synthetic oligonucleotide
ggugcggaaguagaaacac

SEQ ID NO: 2045582 - RNA, 19 nt, Artificial Sequence
  Description of Artificial Sequence: Synthetic oligonucleotide
acaccaggucugaugcagc

SEQ ID NO: 2045583 - RNA, 19 nt, Artificial Sequence
  Description of Artificial Sequence: Synthetic oligonucleotide
cagugagcuuguaggcagg

SEQ ID NO: 2045584 - RNA, 19 nt, Artificial Sequence
  Description of Artificial Sequence: Synthetic oligonucleotide
agaagugugccagggcacu

SEQ ID NO: 2045585 - RNA, 19 nt, Artificial Sequence
  Description of Artificial Sequence: Synthetic oligonucleotide
ggggacacguaugaugcgg

SEQ ID NO: 2045586 - RNA, 19 nt, Artificial Sequence
  Description of Artificial Sequence: Synthetic oligonucleotide
aggccucguucccaucugg

SEQ ID NO: 2045587 - RNA, 19 nt, Artificial Sequence
  Description of Artificial Sequence: Synthetic oligonucleotide
gaccaccuggcacuuguga

SEQ ID NO: 2045588 - RNA, 19 nt, Artificial Sequence
  Description of Artificial Sequence: Synthetic oligonucleotide
ugcggugcaccacggggcu

SEQ ID NO: 2045589 - RNA, 19 nt, Artificial Sequence
  Description of Artificial Sequence: Synthetic oligonucleotide
acugugaacacgggcucug

SEQ ID NO: 2045590 - RNA, 19 nt, Artificial Sequence
  Description of Artificial Sequence: Synthetic oligonucleotide
cacccugccagcuccccgc

SEQ ID NO: 2045591 - RNA, 19 nt, Artificial Sequence
  Description of Artificial Sequence: Synthetic oligonucleotide
uuguagcaggacccagcac

SEQ ID NO: 2045592 - RNA, 19 nt, Artificial Sequence
  Description of Artificial Sequence: Synthetic oligonucleotide
ccaggucugaugcagcggc

SEQ ID NO: 2045593 - RNA, 19 nt, Artificial Sequence
  Description of Artificial Sequence: Synthetic oligonucleotide
gaguuugcgccggaccagc

SEQ ID NO: 2045594 - RNA, 19 nt, Artificial Sequence
  Description of Artificial Sequence: Synthetic oligonucleotide
caccacggggcugaugucc

SEQ ID NO: 2045595 - RNA, 19 nt, Artificial Sequence
  Description of Artificial Sequence: Synthetic oligonucleotide
gauguccagcgcguaggcc

SEQ ID NO: 2045596 - RNA, 19 nt, Artificial Sequence
  Description of Artificial Sequence: Synthetic oligonucleotide
uccagcgcguaggccagcg

SEQ ID NO: 2045597 - RNA, 19 nt, Artificial Sequence
  Description of Artificial Sequence: Synthetic oligonucleotide
acgugccaaaggcuggaca

SEQ ID NO: 2045598 - RNA, 19 nt, Artificial Sequence
  Description of Artificial Sequence: Synthetic oligonucleotide
ccucguucccaucuggagc

SEQ ID NO: 2045599 - RNA, 19 nt, Artificial Sequence
  Description of Artificial Sequence: Synthetic oligonucleotide
guuugcgccggaccagcug

SEQ ID NO: 2045600 - RNA, 19 nt, Artificial Sequence
  Description of Artificial Sequence: Synthetic oligonucleotide
ccaacucuccggcaugacg

SEQ ID NO: 2045601 - RNA, 19 nt, Artificial Sequence
  Description of Artificial Sequence: Synthetic oligonucleotide
uucucucacccugccagcu

SEQ ID NO: 2045602 - RNA, 19 nt, Artificial Sequence
  Description of Artificial Sequence: Synthetic oligonucleotide
gcugcuggaacagggugcg

SEQ ID NO: 2045603 - RNA, 19 nt, Artificial Sequence
  Description of Artificial Sequence: Synthetic oligonucleotide
cacugccucuagcugggcc

SEQ ID NO: 2045604 - RNA, 19 nt, Artificial Sequence
  Description of Artificial Sequence: Synthetic oligonucleotide
gcuacgcccacguagucca

SEQ ID NO: 2045605 - RNA, 19 nt, Artificial Sequence
  Description of Artificial Sequence: Synthetic oligonucleotide
uggacaacagguggcugaa

SEQ ID NO: 2045606 - RNA, 19 nt, Artificial Sequence
  Description of Artificial Sequence: Synthetic oligonucleotide
ucuccggcaugacggugga

SEQ ID NO: 2045607 - RNA, 19 nt, Artificial Sequence
  Description of Artificial Sequence: Synthetic oligonucleotide
guagaaacaccaggucuga

SEQ ID NO: 2045608 - RNA, 19 nt, Artificial Sequence
  Description of Artificial Sequence: Synthetic oligonucleotide
gggccuccgggccugauag

SEQ ID NO: 2045609 - RNA, 19 nt, Artificial Sequence
  Description of Artificial Sequence: Synthetic oligonucleotide
guacuuguuguagcaggac

SEQ ID NO: 2045610 - RNA, 19 nt, Artificial Sequence
  Description of Artificial Sequence: Synthetic oligonucleotide
ggggccaacgggcaugcag

SEQ ID NO: 2045611 - RNA, 19 nt, Artificial Sequence
  Description of Artificial Sequence: Synthetic oligonucleotide
caagugcggcccagcaggc

SEQ ID NO: 2045612 - RNA, 19 nt, Artificial Sequence
  Description of Artificial Sequence: Synthetic oligonucleotide
ucagcccgguccacuguga

SEQ ID NO: 2045613 - RNA, 19 nt, Artificial Sequence
  Description of Artificial Sequence: Synthetic oligonucleotide
aacucugacuuggccugca

SEQ ID NO: 2045614 - RNA, 19 nt, Artificial Sequence
  Description of Artificial Sequence: Synthetic oligonucleotide
ucucucacccugccagcuc

SEQ ID NO: 2045615 - RNA, 19 nt, Artificial Sequence
  Description of Artificial Sequence: Synthetic oligonucleotide
gcugauguccagcgcguag

SEQ ID NO: 2045616 - RNA, 19 nt, Artificial Sequence
  Description of Artificial Sequence: Synthetic oligonucleotide
ggugagcagaaagaggcca

SEQ ID NO: 2045617 - RNA, 19 nt, Artificial Sequence
  Description of Artificial Sequence: Synthetic oligonucleotide
ggcaugacgguggagaaaa

SEQ ID NO: 2045618 - RNA, 19 nt, Artificial Sequence
  Description of Artificial Sequence: Synthetic oligonucleotide
cuuguuguagcaggaccca

SEQ ID NO: 2045619 - RNA, 19 nt, Artificial Sequence
  Description of Artificial Sequence: Synthetic oligonucleotide
ccuggcacuugugauagag

SEQ ID NO: 2045620 - RNA, 19 nt, Artificial Sequence
  Description of Artificial Sequence: Synthetic oligonucleotide
cacuuagucuucugaugga

SEQ ID NO: 2045621 - RNA, 19 nt, Artificial Sequence
  Description of Artificial Sequence: Synthetic oligonucleotide
ccgguagccagcauagaug

SEQ ID NO: 2045622 - RNA, 19 nt, Artificial Sequence
  Description of Artificial Sequence: Synthetic oligonucleotide
cuccuggcaagugcggccc

SEQ ID NO: 2045623 - RNA, 19 nt, Artificial Sequence
  Description of Artificial Sequence: Synthetic oligonucleotide
gugaacacgggcucuggcu

SEQ ID NO: 2045624 - RNA, 19 nt, Artificial Sequence
  Description of Artificial Sequence: Synthetic oligonucleotide
uccagacauucacggcuuc

SEQ ID NO: 2045625 - RNA, 19 nt, Artificial Sequence
  Description of Artificial Sequence: Synthetic oligonucleotide
ggaaaacuuggugucccug

SEQ ID NO: 2045626 - RNA, 19 nt, Artificial Sequence
  Description of Artificial Sequence: Synthetic oligonucleotide
aaagaccaccuggcacuug

SEQ ID NO: 2045627 - RNA, 19 nt, Artificial Sequence
  Description of Artificial Sequence: Synthetic oligonucleotide
gaaggugcgcccaggcgca

SEQ ID NO: 2045628 - RNA, 19 nt, Artificial Sequence
  Description of Artificial Sequence: Synthetic oligonucleotide
gugcggaaguagaaacacc

SEQ ID NO: 2045629 - RNA, 19 nt, Artificial Sequence
  Description of Artificial Sequence: Synthetic oligonucleotide
ucuggcccacgugccaaag

SEQ ID NO: 2045630 - RNA, 19 nt, Artificial Sequence
  Description of Artificial Sequence: Synthetic oligonucleotide
aggccaagaaggcggccgu

SEQ ID NO: 2045631 - RNA, 19 nt, Artificial Sequence
  Description of Artificial Sequence: Synthetic oligonucleotide
agcgcguaggccagcgccg

SEQ ID NO: 2045632 - RNA, 19 nt, Artificial Sequence
  Description of Artificial Sequence: Synthetic oligonucleotide
ggcacuugugauagagaag

SEQ ID NO: 2045633 - RNA, 19 nt, Artificial Sequence
  Description of Artificial Sequence: Synthetic oligonucleotide
gggcucaauggcauaguag

SEQ ID NO: 2045634 - RNA, 19 nt, Artificial Sequence
  Description of Artificial Sequence: Synthetic oligonucleotide
uagagaagagcggggucau

SEQ ID NO: 2045635 - RNA, 19 nt, Artificial Sequence
  Description of Artificial Sequence: Synthetic oligonucleotide
cuguagugaccaaaacucu

SEQ ID NO: 2045636 - RNA, 19 nt, Artificial Sequence
  Description of Artificial Sequence: Synthetic oligonucleotide
caccuccuggcaagugcgg

SEQ ID NO: 2045637 - RNA, 19 nt, Artificial Sequence
  Description of Artificial Sequence: Synthetic oligonucleotide
gcccacggugagcagaaag

SEQ ID NO: 2045638 - RNA, 19 nt, Artificial Sequence
  Description of Artificial Sequence: Synthetic oligonucleotide
ggggucauccucggcaggg

SEQ ID NO: 2045639 - RNA, 19 nt, Artificial Sequence
  Description of Artificial Sequence: Synthetic oligonucleotide
aacacgggcucuggcugca

SEQ ID NO: 2045640 - RNA, 19 nt, Artificial Sequence
  Description of Artificial Sequence: Synthetic oligonucleotide
ccagaagagaggcggcacc

SEQ ID NO: 2045641 - RNA, 19 nt, Artificial Sequence
  Description of Artificial Sequence: Synthetic oligonucleotide
gccauauacaaacaacuuu

SEQ ID NO: 2045642 - RNA, 19 nt, Artificial Sequence
  Description of Artificial Sequence: Synthetic oligonucleotide
ggcaagugcggcccagcag

SEQ ID NO: 2045643 - RNA, 19 nt, Artificial Sequence
  Description of Artificial Sequence: Synthetic oligonucleotide
accaacucuccggcaugac

SEQ ID NO: 2045644 - RNA, 19 nt, Artificial Sequence
  Description of Artificial Sequence: Synthetic oligonucleotide
cccuaaauaccuucucuca

SEQ ID NO: 2045645 - RNA, 19 nt, Artificial Sequence
  Description of Artificial Sequence: Synthetic oligonucleotide
cuggcacuugugauagaga

SEQ ID NO: 2045646 - RNA, 19 nt, Artificial Sequence
  Description of Artificial Sequence: Synthetic oligonucleotide
guaugaugcggugcaccac

SEQ ID NO: 2045647 - RNA, 19 nt, Artificial Sequence
  Description of Artificial Sequence: Synthetic oligonucleotide
acggcuacgcccacguagu

SEQ ID NO: 2045648 - RNA, 19 nt, Artificial Sequence
  Description of Artificial Sequence: Synthetic oligonucleotide
ccugauaguccagugucac

SEQ ID NO: 2045649 - RNA, 19 nt, Artificial Sequence
  Description of Artificial Sequence: Synthetic oligonucleotide
cacugccaaacugguacac

SEQ ID NO: 2045650 - RNA, 19 nt, Artificial Sequence
  Description of Artificial Sequence: Synthetic oligonucleotide
gccucguucccaucuggag

SEQ ID NO: 2045651 - RNA, 19 nt, Artificial Sequence
  Description of Artificial Sequence: Synthetic oligonucleotide
acggcuucguugugcugcu

SEQ ID NO: 2045652 - RNA, 19 nt, Artificial Sequence
  Description of Artificial Sequence: Synthetic oligonucleotide
agggccgccagcaggugag

SEQ ID NO: 2045653 - RNA, 19 nt, Artificial Sequence
  Description of Artificial Sequence: Synthetic oligonucleotide
aaggcggccgugggcagga

SEQ ID NO: 2045654 - RNA, 19 nt, Artificial Sequence
  Description of Artificial Sequence: Synthetic oligonucleotide
ggacacguaugaugcggug

SEQ ID NO: 2045655 - RNA, 19 nt, Artificial Sequence
  Description of Artificial Sequence: Synthetic oligonucleotide
uaccaggccucguucccau

SEQ ID NO: 2045656 - RNA, 19 nt, Artificial Sequence
  Description of Artificial Sequence: Synthetic oligonucleotide
gcugggccaaugugcacag

SEQ ID NO: 2045657 - RNA, 19 nt, Artificial Sequence
  Description of Artificial Sequence: Synthetic oligonucleotide
uagaaacaccaggucugau

SEQ ID NO: 2045658 - RNA, 19 nt, Artificial Sequence
  Description of Artificial Sequence: Synthetic oligonucleotide
caggacccagcacaggaaa

SEQ ID NO: 2045659 - RNA, 19 nt, Artificial Sequence
  Description of Artificial Sequence: Synthetic oligonucleotide
agggagucauggccugcca

SEQ ID NO: 2045660 - RNA, 19 nt, Artificial Sequence
  Description of Artificial Sequence: Synthetic oligonucleotide
uugcgccggaccagcuggc

SEQ ID NO: 2045661 - RNA, 19 nt, Artificial Sequence
  Description of Artificial Sequence: Synthetic oligonucleotide
guacacggcuacgcccacg

SEQ ID NO: 2045662 - RNA, 19 nt, Artificial Sequence
  Description of Artificial Sequence: Synthetic oligonucleotide
cauucacggcuucguugug

SEQ ID NO: 2045663 - RNA, 19 nt, Artificial Sequence
  Description of Artificial Sequence: Synthetic oligonucleotide
ucacggcuucguugugcug

SEQ ID NO: 2045664 - RNA, 19 nt, Artificial Sequence
  Description of Artificial Sequence: Synthetic oligonucleotide
guuguggggccaacgggca

SEQ ID NO: 2045665 - RNA, 19 nt, Artificial Sequence
  Description of Artificial Sequence: Synthetic oligonucleotide
gagaaguuguggggccaac

SEQ ID NO: 2045666 - RNA, 19 nt, Artificial Sequence
  Description of Artificial Sequence: Synthetic oligonucleotide
uuguggggccaacgggcau

SEQ ID NO: 2045667 - RNA, 19 nt, Artificial Sequence
  Description of Artificial Sequence: Synthetic oligonucleotide
cacggggcugauguccagc

SEQ ID NO: 2045668 - RNA, 19 nt, Artificial Sequence
  Description of Artificial Sequence: Synthetic oligonucleotide
ggagucauggccugccaua

SEQ ID NO: 2045669 - RNA, 19 nt, Artificial Sequence
  Description of Artificial Sequence: Synthetic oligonucleotide
cugaggagcaaggcaguga

SEQ ID NO: 2045670 - RNA, 19 nt, Artificial Sequence
  Description of Artificial Sequence: Synthetic oligonucleotide
gccgccagcaggugagucc

SEQ ID NO: 2045671 - RNA, 19 nt, Artificial Sequence
  Description of Artificial Sequence: Synthetic oligonucleotide
acagggugcggaaguagaa

SEQ ID NO: 2045672 - RNA, 19 nt, Artificial Sequence
  Description of Artificial Sequence: Synthetic oligonucleotide
gccaaugugcacagcacca

SEQ ID NO: 2045673 - RNA, 19 nt, Artificial Sequence
  Description of Artificial Sequence: Synthetic oligonucleotide
uucuggcccacgugccaaa

SEQ ID NO: 2045674 - RNA, 19 nt, Artificial Sequence
  Description of Artificial Sequence: Synthetic oligonucleotide
cccacgugccaaaggcugg

SEQ ID NO: 2045675 - RNA, 19 nt, Artificial Sequence
  Description of Artificial Sequence: Synthetic oligonucleotide
ggaaccaacucuccggcau

SEQ ID NO: 2045676 - RNA, 19 nt, Artificial Sequence
  Description of Artificial Sequence: Synthetic oligonucleotide
ggcuacgcccacguagucc

SEQ ID NO: 2045677 - RNA, 19 nt, Artificial Sequence
  Description of Artificial Sequence: Synthetic oligonucleotide
cccacggugagcagaaaga

SEQ ID NO: 2045678 - RNA, 19 nt, Artificial Sequence
  Description of Artificial Sequence: Synthetic oligonucleotide
ggccaacgggcaugcagag

SEQ ID NO: 2045679 - RNA, 19 nt, Artificial Sequence
  Description of Artificial Sequence: Synthetic oligonucleotide
ccagcaggugaguccagac

SEQ ID NO: 2045680 - RNA, 19 nt, Artificial Sequence
  Description of Artificial Sequence: Synthetic oligonucleotide
caggccucguucccaucug

SEQ ID NO: 2045681 - RNA, 19 nt, Artificial Sequence
  Description of Artificial Sequence: Synthetic oligonucleotide
gccgagggcaccuccuggc

SEQ ID NO: 2045682 - RNA, 19 nt, Artificial Sequence
  Description of Artificial Sequence: Synthetic oligonucleotide
ggcucauagaugggccucc

SEQ ID NO: 2045683 - RNA, 19 nt, Artificial Sequence
  Description of Artificial Sequence: Synthetic oligonucleotide
auggccugccauauacaaa

SEQ ID NO: 2045684 - RNA, 19 nt, Artificial Sequence
  Description of Artificial Sequence: Synthetic oligonucleotide
aggugaguccagacauuca

SEQ ID NO: 2045685 - RNA, 19 nt, Artificial Sequence
  Description of Artificial Sequence: Synthetic oligonucleotide
acucuccggcaugacggug

SEQ ID NO: 2045686 - RNA, 19 nt, Artificial Sequence
  Description of Artificial Sequence: Synthetic oligonucleotide
gcccacgugccaaaggcug

SEQ ID NO: 2045687 - RNA, 19 nt, Artificial Sequence
  Description of Artificial Sequence: Synthetic oligonucleotide
agucauggccugccauaua

SEQ ID NO: 2045688 - RNA, 19 nt, Artificial Sequence
  Description of Artificial Sequence: Synthetic oligonucleotide
gcaugcagaggcucauaga

SEQ ID NO: 2045689 - RNA, 19 nt, Artificial Sequence
  Description of Artificial Sequence: Synthetic oligonucleotide
gucuucugauggaguuugc

SEQ ID NO: 2045690 - RNA, 19 nt, Artificial Sequence
  Description of Artificial Sequence: Synthetic oligonucleotide
gggagaggggacacguaug

SEQ ID NO: 2045691 - RNA, 19 nt, Artificial Sequence
  Description of Artificial Sequence: Synthetic oligonucleotide
ccaaguccaggccuuuguc

SEQ ID NO: 2045692 - RNA, 19 nt, Artificial Sequence
  Description of Artificial Sequence: Synthetic oligonucleotide
ggaagauggccugcaccug

SEQ ID NO: 2045693 - RNA, 19 nt, Artificial Sequence
  Description of Artificial Sequence: Synthetic oligonucleotide
accacggggcugaugucca

SEQ ID NO: 2045694 - RNA, 19 nt, Artificial Sequence
  Description of Artificial Sequence: Synthetic oligonucleotide
cacguaugaugcggugcac

SEQ ID NO: 2045695 - RNA, 19 nt, Artificial Sequence
  Description of Artificial Sequence: Synthetic oligonucleotide
cuuggugucccugcccaaa

SEQ ID NO: 2045696 - RNA, 19 nt, Artificial Sequence
  Description of Artificial Sequence: Synthetic oligonucleotide
acgggcaugcagaggcuca

SEQ ID NO: 2045697 - RNA, 19 nt, Artificial Sequence
  Description of Artificial Sequence: Synthetic oligonucleotide
gcucauagaugggccuccg

SEQ ID NO: 2045698 - RNA, 19 nt, Artificial Sequence
  Description of Artificial Sequence: Synthetic oligonucleotide
gcuucguugugcugcugga

SEQ ID NO: 2045699 - RNA, 19 nt, Artificial Sequence
  Description of Artificial Sequence: Synthetic oligonucleotide
ugcggcccagcaggccugg

SEQ ID NO: 2045700 - RNA, 19 nt, Artificial Sequence
  Description of Artificial Sequence: Synthetic oligonucleotide
gagucauggccugccauau

SEQ ID NO: 2045701 - RNA, 19 nt, Artificial Sequence
  Description of Artificial Sequence: Synthetic oligonucleotide
cugcccacggugagcagaa

SEQ ID NO: 2045702 - RNA, 19 nt, Artificial Sequence
  Description of Artificial Sequence: Synthetic oligonucleotide
cuacgcccacguaguccag

SEQ ID NO: 2045703 - RNA, 19 nt, Artificial Sequence
  Description of Artificial Sequence: Synthetic oligonucleotide
guaggccagcgccgagggc

SEQ ID NO: 2045704 - RNA, 19 nt, Artificial Sequence
  Description of Artificial Sequence: Synthetic oligonucleotide
gguccacugugaacacggg

SEQ ID NO: 2045705 - RNA, 19 nt, Artificial Sequence
  Description of Artificial Sequence: Synthetic oligonucleotide
cguaugaugcggugcacca

SEQ ID NO: 2045706 - RNA, 19 nt, Artificial Sequence
  Description of Artificial Sequence: Synthetic oligonucleotide
aaggugcgcccaggcgcag

SEQ ID NO: 2045707 - RNA, 19 nt, Artificial Sequence
  Description of Artificial Sequence: Synthetic oligonucleotide
cgugccaaaggcuggacaa

SEQ ID NO: 2045708 - RNA, 19 nt, Artificial Sequence
  Description of Artificial Sequence: Synthetic oligonucleotide
ccacugugaacacgggcuc

SEQ ID NO: 2045709 - RNA, 19 nt, Artificial Sequence
  Description of Artificial Sequence: Synthetic oligonucleotide
ggugucccugcccaaagau

SEQ ID NO: 2045710 - RNA, 19 nt, Artificial Sequence
  Description of Artificial Sequence: Synthetic oligonucleotide
gucccugcccaaagaugug

SEQ ID NO: 2045711 - RNA, 19 nt, Artificial Sequence
  Description of Artificial Sequence: Synthetic oligonucleotide
cagggugcggaaguagaaa

SEQ ID NO: 2045712 - RNA, 19 nt, Artificial Sequence
  Description of Artificial Sequence: Synthetic oligonucleotide
gagcggggucauccucggc

SEQ ID NO: 2045713 - RNA, 19 nt, Artificial Sequence
  Description of Artificial Sequence: Synthetic oligonucleotide
cagacauucacggcuucgu

SEQ ID NO: 2045714 - RNA, 19 nt, Artificial Sequence
  Description of Artificial Sequence: Synthetic oligonucleotide
cuucguugugcugcuggaa

SEQ ID NO: 2045715 - RNA, 19 nt, Artificial Sequence
  Description of Artificial Sequence: Synthetic oligonucleotide
gggugcggaaguagaaaca

SEQ ID NO: 2045716 - RNA, 19 nt, Artificial Sequence
  Description of Artificial Sequence: Synthetic oligonucleotide
ggcuucuggcccacgugcc

SEQ ID NO: 2045717 - RNA, 19 nt, Artificial Sequence
  Description of Artificial Sequence: Synthetic oligonucleotide
cuuugucccuaaauaccuu

SEQ ID NO: 2045718 - RNA, 19 nt, Artificial Sequence
  Description of Artificial Sequence: Synthetic oligonucleotide
cagcgccgagggcaccucc

SEQ ID NO: 2045719 - RNA, 19 nt, Artificial Sequence
  Description of Artificial Sequence: Synthetic oligonucleotide
cacgugccaaaggcuggac

SEQ ID NO: 2045720 - RNA, 19 nt, Artificial Sequence
  Description of Artificial Sequence: Synthetic oligonucleotide
gccaacgggcaugcagagg

SEQ ID NO: 2045721 - RNA, 19 nt, Artificial Sequence
  Description of Artificial Sequence: Synthetic oligonucleotide
ggugcgcccaggcgcagca

SEQ ID NO: 2045722 - RNA, 19 nt, Artificial Sequence
  Description of Artificial Sequence: Synthetic oligonucleotide
gggaaccaacucuccggca

SEQ ID NO: 2045723 - RNA, 19 nt, Artificial Sequence
  Description of Artificial Sequence: Synthetic oligonucleotide
cggccgguagccagcauag

SEQ ID NO: 2045724 - RNA, 19 nt, Artificial Sequence
  Description of Artificial Sequence: Synthetic oligonucleotide
gccucuagcugggccaaug

SEQ ID NO: 2045725 - RNA, 19 nt, Artificial Sequence
  Description of Artificial Sequence: Synthetic oligonucleotide
ccaaacugguacacggcua

SEQ ID NO: 2045726 - RNA, 19 nt, Artificial Sequence
  Description of Artificial Sequence: Synthetic oligonucleotide
ggcggccgugggcaggaag

SEQ ID NO: 2045727 - RNA, 19 nt, Artificial Sequence
  Description of Artificial Sequence: Synthetic oligonucleotide
cauccucggcagggagagg

SEQ ID NO: 2045728 - RNA, 19 nt, Artificial Sequence
  Description of Artificial Sequence: Synthetic oligonucleotide
agcgccgagggcaccuccu

SEQ ID NO: 2045729 - RNA, 19 nt, Artificial Sequence
  Description of Artificial Sequence: Synthetic oligonucleotide
accuggcacuugugauaga

SEQ ID NO: 2045730 - RNA, 19 nt, Artificial Sequence
  Description of Artificial Sequence: Synthetic oligonucleotide
gccugauaguccaguguca

SEQ ID NO: 2045731 - RNA, 19 nt, Artificial Sequence
  Description of Artificial Sequence: Synthetic oligonucleotide
cagggccgccagcagguga

SEQ ID NO: 2045732 - RNA, 19 nt, Artificial Sequence
  Description of Artificial Sequence: Synthetic oligonucleotide
cacgggcucuggcugcaga

SEQ ID NO: 2045733 - RNA, 19 nt, Artificial Sequence
  Description of Artificial Sequence: Synthetic oligonucleotide
ccugcccaaagauguggca

SEQ ID NO: 2045734 - RNA, 19 nt, Artificial Sequence
  Description of Artificial Sequence: Synthetic oligonucleotide
cagaggcuucuggcccacg

SEQ ID NO: 2045735 - RNA, 19 nt, Artificial Sequence
  Description of Artificial Sequence: Synthetic oligonucleotide
gcggccgugggcaggaaga

SEQ ID NO: 2045736 - RNA, 19 nt, Artificial Sequence
  Description of Artificial Sequence: Synthetic oligonucleotide
acgcagcagccagaagaaa

SEQ ID NO: 2045737 - RNA, 19 nt, Artificial Sequence
  Description of Artificial Sequence: Synthetic oligonucleotide
gagaggggacacguaugau

SEQ ID NO: 2045738 - RNA, 19 nt, Artificial Sequence
  Description of Artificial Sequence: Synthetic oligonucleotide
gcggccgguagccagcaua

SEQ ID NO: 2045739 - RNA, 19 nt, Artificial Sequence
  Description of Artificial Sequence: Synthetic oligonucleotide
ggcaugccagggugggcuc

SEQ ID NO: 2045740 - RNA, 19 nt, Artificial Sequence
  Description of Artificial Sequence: Synthetic oligonucleotide
gcagcggccgguagccagc

SEQ ID NO: 2045741 - RNA, 19 nt, Artificial Sequence
  Description of Artificial Sequence: Synthetic oligonucleotide
gggcaggaagauggccugc

SEQ ID NO: 2045742 - RNA, 19 nt, Artificial Sequence
  Description of Artificial Sequence: Synthetic oligonucleotide
ccgugggcaggaagauggc

SEQ ID NO: 2045743 - RNA, 19 nt, Artificial Sequence
  Description of Artificial Sequence: Synthetic oligonucleotide
ccgguccacugugaacacg

SEQ ID NO: 2045744 - RNA, 19 nt, Artificial Sequence
  Description of Artificial Sequence: Synthetic oligonucleotide
gggcaugccagggugggcu

SEQ ID NO: 2045745 - RNA, 19 nt, Artificial Sequence
  Description of Artificial Sequence: Synthetic oligonucleotide
cccaaagauguggcagcug

SEQ ID NO: 2045746 - RNA, 19 nt, Artificial Sequence
  Description of Artificial Sequence: Synthetic oligonucleotide
acacggcuacgcccacgua

SEQ ID NO: 2045747 - RNA, 19 nt, Artificial Sequence
  Description of Artificial Sequence: Synthetic oligonucleotide
ggagcaaggcagugagaau

SEQ ID NO: 2045748 - RNA, 19 nt, Artificial Sequence
  Description of Artificial Sequence: Synthetic oligonucleotide
cagcccgguccacugugaa

SEQ ID NO: 2045749 - RNA, 19 nt, Artificial Sequence
  Description of Artificial Sequence: Synthetic oligonucleotide
ggccucguucccaucugga

SEQ ID NO: 2045750 - RNA, 19 nt, Artificial Sequence
  Description of Artificial Sequence: Synthetic oligonucleotide
ggacaacagguggcugaac

SEQ ID NO: 2045751 - RNA, 19 nt, Artificial Sequence
  Description of Artificial Sequence: Synthetic oligonucleotide
caacgggcaugcagaggcu

SEQ ID NO: 2045752 - RNA, 19 nt, Artificial Sequence
  Description of Artificial Sequence: Synthetic oligonucleotide
ggccaagaaggcggccgug

SEQ ID NO: 2045753 - RNA, 19 nt, Artificial Sequence
  Description of Artificial Sequence: Synthetic oligonucleotide
gggacacguaugaugcggu

SEQ ID NO: 2045754 - RNA, 19 nt, Artificial Sequence
  Description of Artificial Sequence: Synthetic oligonucleotide
cuccggcaugacgguggag

SEQ ID NO: 2045755 - RNA, 19 nt, Artificial Sequence
  Description of Artificial Sequence: Synthetic oligonucleotide
gggagucauggccugccau

SEQ ID NO: 2045756 - RNA, 19 nt, Artificial Sequence
  Description of Artificial Sequence: Synthetic oligonucleotide
cccgguccacugugaacac

SEQ ID NO: 2045757 - RNA, 19 nt, Artificial Sequence
  Description of Artificial Sequence: Synthetic oligonucleotide
gcaggacccagcacaggaa

SEQ ID NO: 2045758 - RNA, 19 nt, Artificial Sequence
  Description of Artificial Sequence: Synthetic oligonucleotide
ccgcccacccugcuuucac

SEQ ID NO: 2045759 - RNA, 19 nt, Artificial Sequence
  Description of Artificial Sequence: Synthetic oligonucleotide
ugccucuagcugggccaau

SEQ ID NO: 2045760 - RNA, 19 nt, Artificial Sequence
  Description of Artificial Sequence: Synthetic oligonucleotide
caacuuuaccaggccucgu

SEQ ID NO: 2045761 - RNA, 19 nt, Artificial Sequence
  Description of Artificial Sequence: Synthetic oligonucleotide
gggucauccucggcaggga

SEQ ID NO: 2045762 - RNA, 19 nt, Artificial Sequence
  Description of Artificial Sequence: Synthetic oligonucleotide
ccggcaugacgguggagaa

SEQ ID NO: 2045763 - RNA, 19 nt, Artificial Sequence
  Description of Artificial Sequence: Synthetic oligonucleotide
ccgccagcaggugagucca

SEQ ID NO: 2045764 - RNA, 19 nt, Artificial Sequence
  Description of Artificial Sequence: Synthetic oligonucleotide
uggggccaacgggcaugca

SEQ ID NO: 2045765 - RNA, 19 nt, Artificial Sequence
  Description of Artificial Sequence: Synthetic oligonucleotide
gaugggccuccgggccuga

SEQ ID NO: 2045766 - RNA, 19 nt, Artificial Sequence
  Description of Artificial Sequence: Synthetic oligonucleotide
ccacggggcugauguccag

SEQ ID NO: 2045767 - RNA, 19 nt, Artificial Sequence
  Description of Artificial Sequence: Synthetic oligonucleotide
cgccggaccagcuggcuga

SEQ ID NO: 2045768 - RNA, 19 nt, Artificial Sequence
  Description of Artificial Sequence: Synthetic oligonucleotide
agcggccgguagccagcau

SEQ ID NO: 2045769 - RNA, 19 nt, Artificial Sequence
  Description of Artificial Sequence: Synthetic oligonucleotide
gccugcaccugggcaugcc

SEQ ID NO: 2045770 - RNA, 19 nt, Artificial Sequence
  Description of Artificial Sequence: Synthetic oligonucleotide
gggcaccuccuggcaagug

SEQ ID NO: 2045771 - RNA, 19 nt, Artificial Sequence
  Description of Artificial Sequence: Synthetic oligonucleotide
gccggaccagcuggcugag

SEQ ID NO: 2045772 - RNA, 19 nt, Artificial Sequence
  Description of Artificial Sequence: Synthetic oligonucleotide
gcccaaagauguggcagcu

SEQ ID NO: 2045773 - RNA, 19 nt, Artificial Sequence
  Description of Artificial Sequence: Synthetic oligonucleotide
gcaaggcagugagaaugcu

SEQ ID NO: 2045774 - RNA, 19 nt, Artificial Sequence
  Description of Artificial Sequence: Synthetic oligonucleotide
ccacgugccaaaggcugga

SEQ ID NO: 2045775 - RNA, 19 nt, Artificial Sequence
  Description of Artificial Sequence: Synthetic oligonucleotide
ccgagggcaccuccuggca

SEQ ID NO: 2045776 - RNA, 19 nt, Artificial Sequence
  Description of Artificial Sequence: Synthetic oligonucleotide
ccucuagcugggccaaugu

SEQ ID NO: 2045777 - RNA, 19 nt, Artificial Sequence
  Description of Artificial Sequence: Synthetic oligonucleotide
gggugggcucaauggcaua

SEQ ID NO: 2045778 - RNA, 19 nt, Artificial Sequence
  Description of Artificial Sequence: Synthetic oligonucleotide
cagcggccgguagccagca

SEQ ID NO: 2045779 - RNA, 19 nt, Artificial Sequence
  Description of Artificial Sequence: Synthetic oligonucleotide
ccacguaguccaggaagaa

SEQ ID NO: 2045780 - RNA, 19 nt, Artificial Sequence
  Description of Artificial Sequence: Synthetic oligonucleotide
ggcugauguccagcgcgua

SEQ ID NO: 2045781 - RNA, 19 nt, Artificial Sequence
  Description of Artificial Sequence: Synthetic oligonucleotide
gcgcguaggccagcgccga

SEQ ID NO: 2045782 - RNA, 19 nt, Artificial Sequence
  Description of Artificial Sequence: Synthetic oligonucleotide
gcggugcaccacggggcug

SEQ ID NO: 2045783 - RNA, 19 nt, Artificial Sequence
  Description of Artificial Sequence: Synthetic oligonucleotide
cgagggcaccuccuggcaa

SEQ ID NO: 2045784 - RNA, 19 nt, Artificial Sequence
  Description of Artificial Sequence: Synthetic oligonucleotide
gcaccucagcccgguccac

SEQ ID NO: 2045785 - RNA, 19 nt, Artificial Sequence
  Description of Artificial Sequence: Synthetic oligonucleotide
gggcaugcagaggcucaua

SEQ ID NO: 2045786 - RNA, 19 nt, Artificial Sequence
  Description of Artificial Sequence: Synthetic oligonucleotide
cgcguaggccagcgccgag

SEQ ID NO: 2045787 - RNA, 19 nt, Artificial Sequence
  Description of Artificial Sequence: Synthetic oligonucleotide
ggcggcaccucagcccggu

SEQ ID NO: 2045788 - RNA, 19 nt, Artificial Sequence
  Description of Artificial Sequence: Synthetic oligonucleotide
gcggcaccucagcccgguc

SEQ ID NO: 2045789 - RNA, 19 nt, Artificial Sequence
  Description of Artificial Sequence: Synthetic oligonucleotide
gccagcgccgagggcaccu

SEQ ID NO: 2045790 - RNA, 19 nt, Artificial Sequence
  Description of Artificial Sequence: Synthetic oligonucleotide
cuccccgcccacccugcuu

SEQ ID NO: 2045791 - RNA, 19 nt, Artificial Sequence
  Description of Artificial Sequence: Synthetic oligonucleotide
cggcuacgcccacguaguc

SEQ ID NO: 2045792 - RNA, 19 nt, Artificial Sequence
  Description of Artificial Sequence: Synthetic oligonucleotide
ccagcgccgagggcaccuc

SEQ ID NO: 2045793 - RNA, 19 nt, Artificial Sequence
  Description of Artificial Sequence: Synthetic oligonucleotide
ggccuccgggccugauagu

SEQ ID NO: 2045794 - RNA, 19 nt, Artificial Sequence
  Description of Artificial Sequence: Synthetic oligonucleotide
gcugaacuucugggccacu

SEQ ID NO: 2045795 - RNA, 19 nt, Artificial Sequence
  Description of Artificial Sequence: Synthetic oligonucleotide
ccgggccugauaguccagu

SEQ ID NO: 2045796 - RNA, 19 nt, Artificial Sequence
  Description of Artificial Sequence: Synthetic oligonucleotide
aggcggccgugggcaggaa

SEQ ID NO: 2045797 - RNA, 19 nt, Artificial Sequence
  Description of Artificial Sequence: Synthetic oligonucleotide
cggcaugacgguggagaaa

SEQ ID NO: 2045798 - RNA, 19 nt, Artificial Sequence
  Description of Artificial Sequence: Synthetic oligonucleotide
cccgcccacccugcuuuca

SEQ ID NO: 2045799 - RNA, 19 nt, Artificial Sequence
  Description of Artificial Sequence: Synthetic oligonucleotide
gggccgccagcaggugagu

SEQ ID NO: 2045800 - RNA, 19 nt, Artificial Sequence
  Description of Artificial Sequence: Synthetic oligonucleotide
cgggcaugcagaggcucau

SEQ ID NO: 2045801 - RNA, 19 nt, Artificial Sequence
  Description of Artificial Sequence: Synthetic oligonucleotide
uaaauauuaauuaggacgc

SEQ ID NO: 2045802 - RNA, 19 nt, Artificial Sequence
  Description of Artificial Sequence: Synthetic oligonucleotide
aguguugugaguuagcauc

SEQ ID NO: 2045803 - RNA, 19 nt, Artificial Sequence
  Description of Artificial Sequence: Synthetic oligonucleotide
aaggugaaaaucucgggac

SEQ ID NO: 2045804 - RNA, 19 nt, Artificial Sequence
  Description of Artificial Sequence: Synthetic oligonucleotide
aaacccaugaccaaccacc

SEQ ID NO: 2045805 - RNA, 19 nt, Artificial Sequence
  Description of Artificial Sequence: Synthetic oligonucleotide
aaaaucucgggaccggagc

SEQ ID NO: 2045806 - RNA, 19 nt, Artificial Sequence
  Description of Artificial Sequence: Synthetic oligonucleotide
aguuuauucguguucacag

SEQ ID NO: 2045807 - RNA, 19 nt, Artificial Sequence
  Description of Artificial Sequence: Synthetic oligonucleotide
aaaucucgggaccggagcc

SEQ ID NO: 2045808 - RNA, 19 nt, Artificial Sequence
  Description of Artificial Sequence: Synthetic oligonucleotide
uccgaggucagauucaagg

SEQ ID NO: 2045809 - RNA, 19 nt, Artificial Sequence
  Description of Artificial Sequence: Synthetic oligonucleotide
aagucuaauccccaccccg

SEQ ID NO: 2045810 - RNA, 19 nt, Artificial Sequence
  Description of Artificial Sequence: Synthetic oligonucleotide
uuagcaucgccuuauaagu

SEQ ID NO: 2045811 - RNA, 19 nt, Artificial Sequence
  Description of Artificial Sequence: Synthetic oligonucleotide
aaagccuuacaacagacua

SEQ ID NO: 2045812 - RNA, 19 nt, Artificial Sequence
  Description of Artificial Sequence: Synthetic oligonucleotide
guuagcaucgccuuauaag

SEQ ID NO: 2045813 - RNA, 19 nt, Artificial Sequence
  Description of Artificial Sequence: Synthetic oligonucleotide
uccucggccaucaagaucu

SEQ ID NO: 2045814 - RNA, 19 nt, Artificial Sequence
  Description of Artificial Sequence: Synthetic oligonucleotide
agcaucgccuuauaagucc

SEQ ID NO: 2045815 - RNA, 19 nt, Artificial Sequence
  Description of Artificial Sequence: Synthetic oligonucleotide
cacagaacauacuaaggcg

SEQ ID NO: 2045816 - RNA, 19 nt, Artificial Sequence
  Description of Artificial Sequence: Synthetic oligonucleotide
aauauuaauuaggacgcug

SEQ ID NO: 2045817 - RNA, 19 nt, Artificial Sequence
  Description of Artificial Sequence: Synthetic oligonucleotide
aucaagaucuggcagaaga

SEQ ID NO: 2045818 - RNA, 19 nt, Artificial Sequence
  Description of Artificial Sequence: Synthetic oligonucleotide
uauuaauuaggacgcugag

SEQ ID NO: 2045819 - RNA, 19 nt, Artificial Sequence
  Description of Artificial Sequence: Synthetic oligonucleotide
ucaccgaacccauaaauca

SEQ ID NO: 2045820 - RNA, 19 nt, Artificial Sequence
  Description of Artificial Sequence: Synthetic oligonucleotide
aacauacuaaggcgacccc

SEQ ID NO: 2045821 - RNA, 19 nt, Artificial Sequence
  Description of Artificial Sequence: Synthetic oligonucleotide
uuugggauacgcucuggcg

SEQ ID NO: 2045822 - RNA, 19 nt, Artificial Sequence
  Description of Artificial Sequence: Synthetic oligonucleotide
auaaauaauccagauguca

SEQ ID NO: 2045823 - RNA, 19 nt, Artificial Sequence
  Description of Artificial Sequence: Synthetic oligonucleotide
uuauaagucccaguuuggg

SEQ ID NO: 2045824 - RNA, 19 nt, Artificial Sequence
  Description of Artificial Sequence: Synthetic oligonucleotide
gucaugagcgcagagaggg

SEQ ID NO: 2045825 - RNA, 19 nt, Artificial Sequence
  Description of Artificial Sequence: Synthetic oligonucleotide
uugggauacgcucuggcgc

SEQ ID NO: 2045826 - RNA, 19 nt, Artificial Sequence
  Description of Artificial Sequence: Synthetic oligonucleotide
ugcauaaguuaaaauaaau

SEQ ID NO: 2045827 - RNA, 19 nt, Artificial Sequence
  Description of Artificial Sequence: Synthetic oligonucleotide
gacuacagaagugaggggc

SEQ ID NO: 2045828 - RNA, 19 nt, Artificial Sequence
  Description of Artificial Sequence: Synthetic oligonucleotide
agauucaagggcucgagga

SEQ ID NO: 2045829 - RNA, 19 nt, Artificial Sequence
  Description of Artificial Sequence: Synthetic oligonucleotide
accaagucuaauccccacc

SEQ ID NO: 2045830 - RNA, 19 nt, Artificial Sequence
  Description of Artificial Sequence: Synthetic oligonucleotide
gaacauacuaaggcgaccc

SEQ ID NO: 2045831 - RNA, 19 nt, Artificial Sequence
  Description of Artificial Sequence: Synthetic oligonucleotide
cuuauaagucccaguuugg

SEQ ID NO: 2045832 - RNA, 19 nt, Artificial Sequence
  Description of Artificial Sequence: Synthetic oligonucleotide
uauaagucccaguuuggga

SEQ ID NO: 2045833 - RNA, 19 nt, Artificial Sequence
  Description of Artificial Sequence: Synthetic oligonucleotide
ugccccuaaacccaugacc

SEQ ID NO: 2045834 - RNA, 19 nt, Artificial Sequence
  Description of Artificial Sequence: Synthetic oligonucleotide
ucggccaucaagaucuggc

SEQ ID NO: 2045835 - RNA, 19 nt, Artificial Sequence
  Description of Artificial Sequence: Synthetic oligonucleotide
ucugacaauccguggaccc

SEQ ID NO: 2045836 - RNA, 19 nt, Artificial Sequence
  Description of Artificial Sequence: Synthetic oligonucleotide
uugugaguuagcaucgccu

SEQ ID NO: 2045837 - RNA, 19 nt, Artificial Sequence
  Description of Artificial Sequence: Synthetic oligonucleotide
uucaagggcucgaggaccg

SEQ ID NO: 2045838 - RNA, 19 nt, Artificial Sequence
  Description of Artificial Sequence: Synthetic oligonucleotide
auucaagggcucgaggacc

SEQ ID NO: 2045839 - RNA, 19 nt, Artificial Sequence
  Description of Artificial Sequence: Synthetic oligonucleotide
caaccaccaagucuaaucc

SEQ ID NO: 2045840 - RNA, 19 nt, Artificial Sequence
  Description of Artificial Sequence: Synthetic oligonucleotide
gaagacgauggugagcagg

SEQ ID NO: 2045841 - RNA, 19 nt, Artificial Sequence
  Description of Artificial Sequence: Synthetic oligonucleotide
accaccaagucuaaucccc

SEQ ID NO: 2045842 - RNA, 19 nt, Artificial Sequence
  Description of Artificial Sequence: Synthetic oligonucleotide
aagccuuacaacagacuac

SEQ ID NO: 2045843 - RNA, 19 nt, Artificial Sequence
  Description of Artificial Sequence: Synthetic oligonucleotide
ucaccuaggagguuauaca

SEQ ID NO: 2045844 - RNA, 19 nt, Artificial Sequence
  Description of Artificial Sequence: Synthetic oligonucleotide
aguccgaggacuccgaggu

SEQ ID NO: 2045845 - RNA, 19 nt, Artificial Sequence
  Description of Artificial Sequence: Synthetic oligonucleotide
gaagacggaguguugcccc

SEQ ID NO: 2045846 - RNA, 19 nt, Artificial Sequence
  Description of Artificial Sequence: Synthetic oligonucleotide
aaucaaguuuauucguguu

SEQ ID NO: 2045847 - RNA, 19 nt, Artificial Sequence
  Description of Artificial Sequence: Synthetic oligonucleotide
agaacauacuaaggcgacc

SEQ ID NO: 2045848 - RNA, 19 nt, Artificial Sequence
  Description of Artificial Sequence: Synthetic oligonucleotide
auuaggacgcugagaaggc

SEQ ID NO: 2045849 - RNA, 19 nt, Artificial Sequence
  Description of Artificial Sequence: Synthetic oligonucleotide
ugucucaccgaacccauaa

SEQ ID NO: 2045850 - RNA, 19 nt, Artificial Sequence
  Description of Artificial Sequence: Synthetic oligonucleotide
auauuaauuaggacgcuga

SEQ ID NO: 2045851 - RNA, 19 nt, Artificial Sequence
  Description of Artificial Sequence: Synthetic oligonucleotide
aaucucgggaccggagccc

SEQ ID NO: 2045852 - RNA, 19 nt, Artificial Sequence
  Description of Artificial Sequence: Synthetic oligonucleotide
uuauucguguucacagaac

SEQ ID NO: 2045853 - RNA, 19 nt, Artificial Sequence
  Description of Artificial Sequence: Synthetic oligonucleotide
gaaguguggagacgcgcgg

SEQ ID NO: 2045854 - RNA, 19 nt, Artificial Sequence
  Description of Artificial Sequence: Synthetic oligonucleotide
ucucaccgaacccauaaau

SEQ ID NO: 2045855 - RNA, 19 nt, Artificial Sequence
  Description of Artificial Sequence: Synthetic oligonucleotide
gaagcaaccaggaagacau

SEQ ID NO: 2045856 - RNA, 19 nt, Artificial Sequence
  Description of Artificial Sequence: Synthetic oligonucleotide
auuaauuaggacgcugaga

SEQ ID NO: 2045857 - RNA, 19 nt, Artificial Sequence
  Description of Artificial Sequence: Synthetic oligonucleotide
aaguguggagacgcgcggc

SEQ ID NO: 2045858 - RNA, 19 nt, Artificial Sequence
  Description of Artificial Sequence: Synthetic oligonucleotide
ccuuauaagucccaguuug

SEQ ID NO: 2045859 - RNA, 19 nt, Artificial Sequence
  Description of Artificial Sequence: Synthetic oligonucleotide
uucaccuaggagguuauac

SEQ ID NO: 2045860 - RNA, 19 nt, Artificial Sequence
  Description of Artificial Sequence: Synthetic oligonucleotide
aaauauuaauuaggacgcu

SEQ ID NO: 2045861 - RNA, 19 nt, Artificial Sequence
  Description of Artificial Sequence: Synthetic oligonucleotide
caccagauacgccugcugg

SEQ ID NO: 2045862 - RNA, 19 nt, Artificial Sequence
  Description of Artificial Sequence: Synthetic oligonucleotide
ugcgacacaccuuccucgg

SEQ ID NO: 2045863 - RNA, 19 nt, Artificial Sequence
  Description of Artificial Sequence: Synthetic oligonucleotide
acccaagacucccgcagcc

SEQ ID NO: 2045864 - RNA, 19 nt, Artificial Sequence
  Description of Artificial Sequence: Synthetic oligonucleotide
ggaguguugccccuaaacc

SEQ ID NO: 2045865 - RNA, 19 nt, Artificial Sequence
  Description of Artificial Sequence: Synthetic oligonucleotide
acagaacauacuaaggcga

SEQ ID NO: 2045866 - RNA, 19 nt, Artificial Sequence
  Description of Artificial Sequence: Synthetic oligonucleotide
cucaccgaacccauaaauc

SEQ ID NO: 2045867 - RNA, 19 nt, Artificial Sequence
  Description of Artificial Sequence: Synthetic oligonucleotide
ucuaauccccaccccggcc

SEQ ID NO: 2045868 - RNA, 19 nt, Artificial Sequence
  Description of Artificial Sequence: Synthetic oligonucleotide
cuaauccccaccccggccc

SEQ ID NO: 2045869 - RNA, 19 nt, Artificial Sequence
  Description of Artificial Sequence: Synthetic oligonucleotide
gucgaaggugaaaaucucg

SEQ ID NO: 2045870 - RNA, 19 nt, Artificial Sequence
  Description of Artificial Sequence: Synthetic oligonucleotide
uucccaguaggccucgcca

SEQ ID NO: 2045871 - RNA, 19 nt, Artificial Sequence
  Description of Artificial Sequence: Synthetic oligonucleotide
ugugaguuagcaucgccuu

SEQ ID NO: 2045872 - RNA, 19 nt, Artificial Sequence
  Description of Artificial Sequence: Synthetic oligonucleotide
cagaacauacuaaggcgac

SEQ ID NO: 2045873 - RNA, 19 nt, Artificial Sequence
  Description of Artificial Sequence: Synthetic oligonucleotide
cagaugucaguguuacggc

SEQ ID NO: 2045874 - RNA, 19 nt, Artificial Sequence
  Description of Artificial Sequence: Synthetic oligonucleotide
agaugucaguguuacggca

SEQ ID NO: 2045875 - RNA, 19 nt, Artificial Sequence
  Description of Artificial Sequence: Synthetic oligonucleotide
ucagauucaagggcucgag

SEQ ID NO: 2045876 - RNA, 19 nt, Artificial Sequence
  Description of Artificial Sequence: Synthetic oligonucleotide
aagucccaguuugggauac

SEQ ID NO: 2045877 - RNA, 19 nt, Artificial Sequence
  Description of Artificial Sequence: Synthetic oligonucleotide
cucgccaggacccacggug

SEQ ID NO: 2045878 - RNA, 19 nt, Artificial Sequence
  Description of Artificial Sequence: Synthetic oligonucleotide
ucaggugucgcggcgcugg

SEQ ID NO: 2045879 - RNA, 19 nt, Artificial Sequence
  Description of Artificial Sequence: Synthetic oligonucleotide
ucggcugcguuuucggugc

SEQ ID NO: 2045880 - RNA, 19 nt, Artificial Sequence
  Description of Artificial Sequence: Synthetic oligonucleotide
cugcgacacaccuuccucg

SEQ ID NO: 2045881 - RNA, 19 nt, Artificial Sequence
  Description of Artificial Sequence: Synthetic oligonucleotide
uggcgcaccagauacgccu

SEQ ID NO: 2045882 - RNA, 19 nt, Artificial Sequence
  Description of Artificial Sequence: Synthetic oligonucleotide
uugcgcgaguggcacauag

SEQ ID NO: 2045883 - RNA, 19 nt, Artificial Sequence
  Description of Artificial Sequence: Synthetic oligonucleotide
aacagccgcccucugacaa

SEQ ID NO: 2045884 - RNA, 19 nt, Artificial Sequence
  Description of Artificial Sequence: Synthetic oligonucleotide
guguugugaguuagcaucg

SEQ ID NO: 2045885 - RNA, 19 nt, Artificial Sequence
  Description of Artificial Sequence: Synthetic oligonucleotide
agccuuacaacagacuaca

SEQ ID NO: 2045886 - RNA, 19 nt, Artificial Sequence
  Description of Artificial Sequence: Synthetic oligonucleotide
guugugaguuagcaucgcc

SEQ ID NO: 2045887 - RNA, 19 nt, Artificial Sequence
  Description of Artificial Sequence: Synthetic oligonucleotide
ucugcgacacaccuuccuc

SEQ ID NO: 2045888 - RNA, 19 nt, Artificial Sequence
  Description of Artificial Sequence: Synthetic oligonucleotide
ugggauacgcucuggcgca

SEQ ID NO: 2045889 - RNA, 19 nt, Artificial Sequence
  Description of Artificial Sequence: Synthetic oligonucleotide
ggugaaaaucucgggaccg

SEQ ID NO: 2045890 - RNA, 19 nt, Artificial Sequence
  Description of Artificial Sequence: Synthetic oligonucleotide
cuuggcaacguuggguucc

SEQ ID NO: 2045891 - RNA, 19 nt, Artificial Sequence
  Description of Artificial Sequence: Synthetic oligonucleotide
uggaagacggaguguugcc

SEQ ID NO: 2045892 - RNA, 19 nt, Artificial Sequence
  Description of Artificial Sequence: Synthetic oligonucleotide
aggguuucaggugucgcgg

SEQ ID NO: 2045893 - RNA, 19 nt, Artificial Sequence
  Description of Artificial Sequence: Synthetic oligonucleotide
ucgguuggcagcuggcgcc

SEQ ID NO: 2045894 - RNA, 19 nt, Artificial Sequence
  Description of Artificial Sequence: Synthetic oligonucleotide
agacuacagaagugagggg

SEQ ID NO: 2045895 - RNA, 19 nt, Artificial Sequence
  Description of Artificial Sequence: Synthetic oligonucleotide
agaggguuucaggugucgc

SEQ ID NO: 2045896 - RNA, 19 nt, Artificial Sequence
  Description of Artificial Sequence: Synthetic oligonucleotide
ugaguuagcaucgccuuau

SEQ ID NO: 2045897 - RNA, 19 nt, Artificial Sequence
  Description of Artificial Sequence: Synthetic oligonucleotide
guguggacgugguugcgcg

SEQ ID NO: 2045898 - RNA, 19 nt, Artificial Sequence
  Description of Artificial Sequence: Synthetic oligonucleotide
uucagaaggccgcggggug

SEQ ID NO: 2045899 - RNA, 19 nt, Artificial Sequence
  Description of Artificial Sequence: Synthetic oligonucleotide
ugaccgggcgcauucagaa

SEQ ID NO: 2045900 - RNA, 19 nt, Artificial Sequence
  Description of Artificial Sequence: Synthetic oligonucleotide
accacucgaggguagagaa

SEQ ID NO: 2045901 - RNA, 19 nt, Artificial Sequence
  Description of Artificial Sequence: Synthetic oligonucleotide
guuuauucguguucacaga

SEQ ID NO: 2045902 - RNA, 19 nt, Artificial Sequence
  Description of Artificial Sequence: Synthetic oligonucleotide
acgugguugcgcgaguggc

SEQ ID NO: 2045903 - RNA, 19 nt, Artificial Sequence
  Description of Artificial Sequence: Synthetic oligonucleotide
agucuaauccccaccccgg

SEQ ID NO: 2045904 - RNA, 19 nt, Artificial Sequence
  Description of Artificial Sequence: Synthetic oligonucleotide
gaucuggcagaagacgaug

SEQ ID NO: 2045905 - RNA, 19 nt, Artificial Sequence
  Description of Artificial Sequence: Synthetic oligonucleotide
aagggugucccgaaagccu

SEQ ID NO: 2045906 - RNA, 19 nt, Artificial Sequence
  Description of Artificial Sequence: Synthetic oligonucleotide
agcauaguccgaggacucc

SEQ ID NO: 2045907 - RNA, 19 nt, Artificial Sequence
  Description of Artificial Sequence: Synthetic oligonucleotide
uacgcucuggcgcaccaga

SEQ ID NO: 2045908 - RNA, 19 nt, Artificial Sequence
  Description of Artificial Sequence: Synthetic oligonucleotide
ugaaaaucucgggaccgga

SEQ ID NO: 2045909 - RNA, 19 nt, Artificial Sequence
  Description of Artificial Sequence: Synthetic oligonucleotide
cagauucaagggcucgagg

SEQ ID NO: 2045910 - RNA, 19 nt, Artificial Sequence
  Description of Artificial Sequence: Synthetic oligonucleotide
aguguugccccuaaaccca

SEQ ID NO: 2045911 - RNA, 19 nt, Artificial Sequence
  Description of Artificial Sequence: Synthetic oligonucleotide
gacgugguugcgcgagugg

SEQ ID NO: 2045912 - RNA, 19 nt, Artificial Sequence
  Description of Artificial Sequence: Synthetic oligonucleotide
uagcaucgccuuauaaguc

SEQ ID NO: 2045913 - RNA, 19 nt, Artificial Sequence
  Description of Artificial Sequence: Synthetic oligonucleotide
agaagcaaccaggaagaca

SEQ ID NO: 2045914 - RNA, 19 nt, Artificial Sequence
  Description of Artificial Sequence: Synthetic oligonucleotide
ccaagucuaauccccaccc

SEQ ID NO: 2045915 - RNA, 19 nt, Artificial Sequence
  Description of Artificial Sequence: Synthetic oligonucleotide
caagucuaauccccacccc

SEQ ID NO: 2045916 - RNA, 19 nt, Artificial Sequence
  Description of Artificial Sequence: Synthetic oligonucleotide
gucccgaaagccuuacaac

SEQ ID NO: 2045917 - RNA, 19 nt, Artificial Sequence
  Description of Artificial Sequence: Synthetic oligonucleotide
ccuaaacccaugaccaacc

SEQ ID NO: 2045918 - RNA, 19 nt, Artificial Sequence
  Description of Artificial Sequence: Synthetic oligonucleotide
aagacggaguguugccccu

SEQ ID NO: 2045919 - RNA, 19 nt, Artificial Sequence
  Description of Artificial Sequence: Synthetic oligonucleotide
uccagaugucaguguuacg

SEQ ID NO: 2045920 - RNA, 19 nt, Artificial Sequence
  Description of Artificial Sequence: Synthetic oligonucleotide
gacgcugagaaggcuucgg

SEQ ID NO: 2045921 - RNA, 19 nt, Artificial Sequence
  Description of Artificial Sequence: Synthetic oligonucleotide
auaguccgaggacuccgag

SEQ ID NO: 2045922 - RNA, 19 nt, Artificial Sequence
  Description of Artificial Sequence: Synthetic oligonucleotide
cuguaguguugugaguuag

SEQ ID NO: 2045923 - RNA, 19 nt, Artificial Sequence
  Description of Artificial Sequence: Synthetic oligonucleotide
uaguguugugaguuagcau

SEQ ID NO: 2045924 - RNA, 19 nt, Artificial Sequence
  Description of Artificial Sequence: Synthetic oligonucleotide
ccaaccaccaagucuaauc

SEQ ID NO: 2045925 - RNA, 19 nt, Artificial Sequence
  Description of Artificial Sequence: Synthetic oligonucleotide
auucagaaggccgcggggu

SEQ ID NO: 2045926 - RNA, 19 nt, Artificial Sequence
  Description of Artificial Sequence: Synthetic oligonucleotide
uuucaggugucgcggcgcu

SEQ ID NO: 2045927 - RNA, 19 nt, Artificial Sequence
  Description of Artificial Sequence: Synthetic oligonucleotide
gacccaagacucccgcagc

SEQ ID NO: 2045928 - RNA, 19 nt, Artificial Sequence
  Description of Artificial Sequence: Synthetic oligonucleotide
ggacccaagacucccgcag

SEQ ID NO: 2045929 - RNA, 19 nt, Artificial Sequence
  Description of Artificial Sequence: Synthetic oligonucleotide
gagaggguuucaggugucg

SEQ ID NO: 2045930 - RNA, 19 nt, Artificial Sequence
  Description of Artificial Sequence: Synthetic oligonucleotide
uaucccgcaccccugcaua

SEQ ID NO: 2045931 - RNA, 19 nt, Artificial Sequence
  Description of Artificial Sequence: Synthetic oligonucleotide
gaugucaguguuacggcaa

SEQ ID NO: 2045932 - RNA, 19 nt, Artificial Sequence
  Description of Artificial Sequence: Synthetic oligonucleotide
aucgccuuauaagucccag

SEQ ID NO: 2045933 - RNA, 19 nt, Artificial Sequence
  Description of Artificial Sequence: Synthetic oligonucleotide
gcauucagaaggccgcggg

SEQ ID NO: 2045934 - RNA, 19 nt, Artificial Sequence
  Description of Artificial Sequence: Synthetic oligonucleotide
cucgguuggcagcuggcgc

SEQ ID NO: 2045935 - RNA, 19 nt, Artificial Sequence
  Description of Artificial Sequence: Synthetic oligonucleotide
uguugugaguuagcaucgc

SEQ ID NO: 2045936 - RNA, 19 nt, Artificial Sequence
  Description of Artificial Sequence: Synthetic oligonucleotide
uuucggugcccgcgggaag

SEQ ID NO: 2045937 - RNA, 19 nt, Artificial Sequence
  Description of Artificial Sequence: Synthetic oligonucleotide
acuacagaagugaggggcu

SEQ ID NO: 2045938 - RNA, 19 nt, Artificial Sequence
  Description of Artificial Sequence: Synthetic oligonucleotide
acgauggugagcaggagaa

SEQ ID NO: 2045939 - RNA, 19 nt, Artificial Sequence
  Description of Artificial Sequence: Synthetic oligonucleotide
ccgaggucagauucaaggg

SEQ ID NO: 2045940 - RNA, 19 nt, Artificial Sequence
  Description of Artificial Sequence: Synthetic oligonucleotide
uuccucggccaucaagauc

SEQ ID NO: 2045941 - RNA, 19 nt, Artificial Sequence
  Description of Artificial Sequence: Synthetic oligonucleotide
uccuucaccuaggagguua

SEQ ID NO: 2045942 - RNA, 19 nt, Artificial Sequence
  Description of Artificial Sequence: Synthetic oligonucleotide
guugccccuaaacccauga

SEQ ID NO: 2045943 - RNA, 19 nt, Artificial Sequence
  Description of Artificial Sequence: Synthetic oligonucleotide
aacccaugaccaaccacca

SEQ ID NO: 2045944 - RNA, 19 nt, Artificial Sequence
  Description of Artificial Sequence: Synthetic oligonucleotide
guaggccucgccaggaccc

SEQ ID NO: 2045945 - RNA, 19 nt, Artificial Sequence
  Description of Artificial Sequence: Synthetic oligonucleotide
uuuucggugcccgcgggaa

SEQ ID NO: 2045946 - RNA, 19 nt, Artificial Sequence
  Description of Artificial Sequence: Synthetic oligonucleotide
gcucuggcgcaccagauac

SEQ ID NO: 2045947 - RNA, 19 nt, Artificial Sequence
  Description of Artificial Sequence: Synthetic oligonucleotide
gucuaauccccaccccggc

SEQ ID NO: 2045948 - RNA, 19 nt, Artificial Sequence
  Description of Artificial Sequence: Synthetic oligonucleotide
ucgccuuauaagucccagu

SEQ ID NO: 2045949 - RNA, 19 nt, Artificial Sequence
  Description of Artificial Sequence: Synthetic oligonucleotide
ucgguccuucccaguaggc

SEQ ID NO: 2045950 - RNA, 19 nt, Artificial Sequence
  Description of Artificial Sequence: Synthetic oligonucleotide
gggucugcgacacaccuuc

SEQ ID NO: 2045951 - RNA, 19 nt, Artificial Sequence
  Description of Artificial Sequence: Synthetic oligonucleotide
cccugcauaaguuaaaaua

SEQ ID NO: 2045952 - RNA, 19 nt, Artificial Sequence
  Description of Artificial Sequence: Synthetic oligonucleotide
uugccccuaaacccaugac

SEQ ID NO: 2045953 - RNA, 19 nt, Artificial Sequence
  Description of Artificial Sequence: Synthetic oligonucleotide
gguggcguccuccggagcc

SEQ ID NO: 2045954 - RNA, 19 nt, Artificial Sequence
  Description of Artificial Sequence: Synthetic oligonucleotide
ccuaggagguuauacauaa

SEQ ID NO: 2045955 - RNA, 19 nt, Artificial Sequence
  Description of Artificial Sequence: Synthetic oligonucleotide
ucaugagcgcagagagggu

SEQ ID NO: 2045956 - RNA, 19 nt, Artificial Sequence
  Description of Artificial Sequence: Synthetic oligonucleotide
gauacgcucuggcgcacca

SEQ ID NO: 2045957 - RNA, 19 nt, Artificial Sequence
  Description of Artificial Sequence: Synthetic oligonucleotide
aggacccacggugucuugg

SEQ ID NO: 2045958 - RNA, 19 nt, Artificial Sequence
  Description of Artificial Sequence: Synthetic oligonucleotide
caugaccaaccaccaaguc

SEQ ID NO: 2045959 - RNA, 19 nt, Artificial Sequence
  Description of Artificial Sequence: Synthetic oligonucleotide
cucagucaugagcgcagag

SEQ ID NO: 2045960 - RNA, 19 nt, Artificial Sequence
  Description of Artificial Sequence: Synthetic oligonucleotide
gcgaguggcacauaguuua

SEQ ID NO: 2045961 - RNA, 19 nt, Artificial Sequence
  Description of Artificial Sequence: Synthetic oligonucleotide
aauccagaugucaguguua

SEQ ID NO: 2045962 - RNA, 19 nt, Artificial Sequence
  Description of Artificial Sequence: Synthetic oligonucleotide
agauacgccugcugguuuu

SEQ ID NO: 2045963 - RNA, 19 nt, Artificial Sequence
  Description of Artificial Sequence: Synthetic oligonucleotide
uuaggacgcugagaaggcu

SEQ ID NO: 2045964 - RNA, 19 nt, Artificial Sequence
  Description of Artificial Sequence: Synthetic oligonucleotide
caccaagucuaauccccac

SEQ ID NO: 2045965 - RNA, 19 nt, Artificial Sequence
  Description of Artificial Sequence: Synthetic oligonucleotide
uguugccccuaaacccaug

SEQ ID NO: 2045966 - RNA, 19 nt, Artificial Sequence
  Description of Artificial Sequence: Synthetic oligonucleotide
cccgaaagccuuacaacag

SEQ ID NO: 2045967 - RNA, 19 nt, Artificial Sequence
  Description of Artificial Sequence: Synthetic oligonucleotide
acgcugagaaggcuucggu

SEQ ID NO: 2045968 - RNA, 19 nt, Artificial Sequence
  Description of Artificial Sequence: Synthetic oligonucleotide
ggucagauucaagggcucg

SEQ ID NO: 2045969 - RNA, 19 nt, Artificial Sequence
  Description of Artificial Sequence: Synthetic oligonucleotide
ugcgcgaguggcacauagu

SEQ ID NO: 2045970 - RNA, 19 nt, Artificial Sequence
  Description of Artificial Sequence: Synthetic oligonucleotide
gcauaguccgaggacuccg

SEQ ID NO: 2045971 - RNA, 19 nt, Artificial Sequence
  Description of Artificial Sequence: Synthetic oligonucleotide
uggacccaagacucccgca

SEQ ID NO: 2045972 - RNA, 19 nt, Artificial Sequence
  Description of Artificial Sequence: Synthetic oligonucleotide
ucgccaggacccacggugu

SEQ ID NO: 2045973 - RNA, 19 nt, Artificial Sequence
  Description of Artificial Sequence: Synthetic oligonucleotide
uuccgggccaggugugacc

SEQ ID NO: 2045974 - RNA, 19 nt, Artificial Sequence
  Description of Artificial Sequence: Synthetic oligonucleotide
ggacuccgaggucagauuc

SEQ ID NO: 2045975 - RNA, 19 nt, Artificial Sequence
  Description of Artificial Sequence: Synthetic oligonucleotide
guggacgugguugcgcgag

SEQ ID NO: 2045976 - RNA, 19 nt, Artificial Sequence
  Description of Artificial Sequence: Synthetic oligonucleotide
cgaaggugaaaaucucggg

SEQ ID NO: 2045977 - RNA, 19 nt, Artificial Sequence
  Description of Artificial Sequence: Synthetic oligonucleotide
gucccaguuugggauacgc

SEQ ID NO: 2045978 - RNA, 19 nt, Artificial Sequence
  Description of Artificial Sequence: Synthetic oligonucleotide
gaccgggcgcauucagaag

SEQ ID NO: 2045979 - RNA, 19 nt, Artificial Sequence
  Description of Artificial Sequence: Synthetic oligonucleotide
aaggccgcgggguguugcu

SEQ ID NO: 2045980 - RNA, 19 nt, Artificial Sequence
  Description of Artificial Sequence: Synthetic oligonucleotide
auaucccgcaccccugcau

SEQ ID NO: 2045981 - RNA, 19 nt, Artificial Sequence
  Description of Artificial Sequence: Synthetic oligonucleotide
cugguggcguccuccggag

SEQ ID NO: 2045982 - RNA, 19 nt, Artificial Sequence
  Description of Artificial Sequence: Synthetic oligonucleotide
uucggugcccgcgggaagu

SEQ ID NO: 2045983 - RNA, 19 nt, Artificial Sequence
  Description of Artificial Sequence: Synthetic oligonucleotide
agacucccgcagccucucc

SEQ ID NO: 2045984 - RNA, 19 nt, Artificial Sequence
  Description of Artificial Sequence: Synthetic oligonucleotide
agccgguggagggagcggg

SEQ ID NO: 2045985 - RNA, 19 nt, Artificial Sequence
  Description of Artificial Sequence: Synthetic oligonucleotide
ggaagacggaguguugccc

SEQ ID NO: 2045986 - RNA, 19 nt, Artificial Sequence
  Description of Artificial Sequence: Synthetic oligonucleotide
ggcgcauucagaaggccgc

SEQ ID NO: 2045987 - RNA, 19 nt, Artificial Sequence
  Description of Artificial Sequence: Synthetic oligonucleotide
gagcauaguccgaggacuc

SEQ ID NO: 2045988 - RNA, 19 nt, Artificial Sequence
  Description of Artificial Sequence: Synthetic oligonucleotide
ccaacagccgcccucugac

SEQ ID NO: 2045989 - RNA, 19 nt, Artificial Sequence
  Description of Artificial Sequence: Synthetic oligonucleotide
cuacagaagugaggggcug

SEQ ID NO: 2045990 - RNA, 19 nt, Artificial Sequence
  Description of Artificial Sequence: Synthetic oligonucleotide
aggcuucgguccuucccag

SEQ ID NO: 2045991 - RNA, 19 nt, Artificial Sequence
  Description of Artificial Sequence: Synthetic oligonucleotide
uguggacgugguugcgcga

SEQ ID NO: 2045992 - RNA, 19 nt, Artificial Sequence
  Description of Artificial Sequence: Synthetic oligonucleotide
auucguguucacagaacau

SEQ ID NO: 2045993 - RNA, 19 nt, Artificial Sequence
  Description of Artificial Sequence: Synthetic oligonucleotide
gccccuaaacccaugacca

SEQ ID NO: 2045994 - RNA, 19 nt, Artificial Sequence
  Description of Artificial Sequence: Synthetic oligonucleotide
ggagacgcgcggcaggcgc

SEQ ID NO: 2045995 - RNA, 19 nt, Artificial Sequence
  Description of Artificial Sequence: Synthetic oligonucleotide
ccaagggugucccgaaagc

SEQ ID NO: 2045996 - RNA, 19 nt, Artificial Sequence
  Description of Artificial Sequence: Synthetic oligonucleotide
agagaacccuucggcugcg

SEQ ID NO: 2045997 - RNA, 19 nt, Artificial Sequence
  Description of Artificial Sequence: Synthetic oligonucleotide
gggcgcauucagaaggccg

SEQ ID NO: 2045998 - RNA, 19 nt, Artificial Sequence
  Description of Artificial Sequence: Synthetic oligonucleotide
ucucgggaccggagccccg

SEQ ID NO: 2045999 - RNA, 19 nt, Artificial Sequence
  Description of Artificial Sequence: Synthetic oligonucleotide
cauaguccgaggacuccga

SEQ ID NO: 2046000 - RNA, 19 nt, Artificial Sequence
  Description of Artificial Sequence: Synthetic oligonucleotide
gagaagcaaccaggaagac

SEQ ID NO: 2046001 - RNA, 19 nt, Artificial Sequence
  Description of Artificial Sequence: Synthetic oligonucleotide
ggugugaccgggcgcauuc

SEQ ID NO: 2046002 - RNA, 19 nt, Artificial Sequence
  Description of Artificial Sequence: Synthetic oligonucleotide
gaccacucgaggguagaga

SEQ ID NO: 2046003 - RNA, 19 nt, Artificial Sequence
  Description of Artificial Sequence: Synthetic oligonucleotide
ccucuccugagaagcaacc

SEQ ID NO: 2046004 - RNA, 19 nt, Artificial Sequence
  Description of Artificial Sequence: Synthetic oligonucleotide
gcugcguuuucggugcccg

SEQ ID NO: 2046005 - RNA, 19 nt, Artificial Sequence
  Description of Artificial Sequence: Synthetic oligonucleotide
ucaagggcucgaggaccgg

SEQ ID NO: 2046006 - RNA, 19 nt, Artificial Sequence
  Description of Artificial Sequence: Synthetic oligonucleotide
agaucuggcagaagacgau

SEQ ID NO: 2046007 - RNA, 19 nt, Artificial Sequence
  Description of Artificial Sequence: Synthetic oligonucleotide
gccagucaugguguggacg

SEQ ID NO: 2046008 - RNA, 19 nt, Artificial Sequence
  Description of Artificial Sequence: Synthetic oligonucleotide
gaaggccgcgggguguugc

SEQ ID NO: 2046009 - RNA, 19 nt, Artificial Sequence
  Description of Artificial Sequence: Synthetic oligonucleotide
gcgggaaguguggagacgc

SEQ ID NO: 2046010 - RNA, 19 nt, Artificial Sequence
  Description of Artificial Sequence: Synthetic oligonucleotide
accgaacccauaaaucauu

SEQ ID NO: 2046011 - RNA, 19 nt, Artificial Sequence
  Description of Artificial Sequence: Synthetic oligonucleotide
caccuaggagguuauacau

SEQ ID NO: 2046012 - RNA, 19 nt, Artificial Sequence
  Description of Artificial Sequence: Synthetic oligonucleotide
cuggcgcaccagauacgcc

SEQ ID NO: 2046013 - RNA, 19 nt, Artificial Sequence
  Description of Artificial Sequence: Synthetic oligonucleotide
agaacccuucggcugcguu

SEQ ID NO: 2046014 - RNA, 19 nt, Artificial Sequence
  Description of Artificial Sequence: Synthetic oligonucleotide
cuccgaggucagauucaag

SEQ ID NO: 2046015 - RNA, 19 nt, Artificial Sequence
  Description of Artificial Sequence: Synthetic oligonucleotide
uggacgugguugcgcgagu

SEQ ID NO: 2046016 - RNA, 19 nt, Artificial Sequence
  Description of Artificial Sequence: Synthetic oligonucleotide
guuuucggugcccgcggga

SEQ ID NO: 2046017 - RNA, 19 nt, Artificial Sequence
  Description of Artificial Sequence: Synthetic oligonucleotide
gcguuuucggugcccgcgg

SEQ ID NO: 2046018 - RNA, 19 nt, Artificial Sequence
  Description of Artificial Sequence: Synthetic oligonucleotide
gcgccggaccacucgaggg

SEQ ID NO: 2046019 - RNA, 19 nt, Artificial Sequence
  Description of Artificial Sequence: Synthetic oligonucleotide
uggagacgcgcggcaggcg

SEQ ID NO: 2046020 - RNA, 19 nt, Artificial Sequence
  Description of Artificial Sequence: Synthetic oligonucleotide
caucaagaucuggcagaag

SEQ ID NO: 2046021 - RNA, 19 nt, Artificial Sequence
  Description of Artificial Sequence: Synthetic oligonucleotide
cucuuggcaacguuggguu

SEQ ID NO: 2046022 - RNA, 19 nt, Artificial Sequence
  Description of Artificial Sequence: Synthetic oligonucleotide
gguguggacgugguugcgc

SEQ ID NO: 2046023 - RNA, 19 nt, Artificial Sequence
  Description of Artificial Sequence: Synthetic oligonucleotide
accuaggagguuauacaua

SEQ ID NO: 2046024 - RNA, 19 nt, Artificial Sequence
  Description of Artificial Sequence: Synthetic oligonucleotide
cuaggagguuauacauaaa

SEQ ID NO: 2046025 - RNA, 19 nt, Artificial Sequence
  Description of Artificial Sequence: Synthetic oligonucleotide
agucccaguuugggauacg

SEQ ID NO: 2046026 - RNA, 19 nt, Artificial Sequence
  Description of Artificial Sequence: Synthetic oligonucleotide
ugguggcguccuccggagc

SEQ ID NO: 2046027 - RNA, 19 nt, Artificial Sequence
  Description of Artificial Sequence: Synthetic oligonucleotide
acgcgcggcaggcgccacc

SEQ ID NO: 2046028 - RNA, 19 nt, Artificial Sequence
  Description of Artificial Sequence: Synthetic oligonucleotide
cccuaaacccaugaccaac

SEQ ID NO: 2046029 - RNA, 19 nt, Artificial Sequence
  Description of Artificial Sequence: Synthetic oligonucleotide
gacggaguguugccccuaa

SEQ ID NO: 2046030 - RNA, 19 nt, Artificial Sequence
  Description of Artificial Sequence: Synthetic oligonucleotide
cgacacaccuuccucggcc

SEQ ID NO: 2046031 - RNA, 19 nt, Artificial Sequence
  Description of Artificial Sequence: Synthetic oligonucleotide
ggucgaaggugaaaaucuc

SEQ ID NO: 2046032 - RNA, 19 nt, Artificial Sequence
  Description of Artificial Sequence: Synthetic oligonucleotide
gcaucgccuuauaaguccc

SEQ ID NO: 2046033 - RNA, 19 nt, Artificial Sequence
  Description of Artificial Sequence: Synthetic oligonucleotide
ggaguuccgagccggugga

SEQ ID NO: 2046034 - RNA, 19 nt, Artificial Sequence
  Description of Artificial Sequence: Synthetic oligonucleotide
auacgcucuggcgcaccag

SEQ ID NO: 2046035 - RNA, 19 nt, Artificial Sequence
  Description of Artificial Sequence: Synthetic oligonucleotide
gccgcccucugacaauccg

SEQ ID NO: 2046036 - RNA, 19 nt, Artificial Sequence
  Description of Artificial Sequence: Synthetic oligonucleotide
gucucaccgaacccauaaa

SEQ ID NO: 2046037 - RNA, 19 nt, Artificial Sequence
  Description of Artificial Sequence: Synthetic oligonucleotide
caguaggccucgccaggac

SEQ ID NO: 2046038 - RNA, 19 nt, Artificial Sequence
  Description of Artificial Sequence: Synthetic oligonucleotide
caucgccuuauaaguccca

SEQ ID NO: 2046039 - RNA, 19 nt, Artificial Sequence
  Description of Artificial Sequence: Synthetic oligonucleotide
gcaccagauacgccugcug

SEQ ID NO: 2046040 - RNA, 19 nt, Artificial Sequence
  Description of Artificial Sequence: Synthetic oligonucleotide
cggaguguugccccuaaac

SEQ ID NO: 2046041 - RNA, 19 nt, Artificial Sequence
  Description of Artificial Sequence: Synthetic oligonucleotide
gugcccgcgggaagugugg

SEQ ID NO: 2046042 - RNA, 19 nt, Artificial Sequence
  Description of Artificial Sequence: Synthetic oligonucleotide
gaguuagcaucgccuuaua

SEQ ID NO: 2046043 - RNA, 19 nt, Artificial Sequence
  Description of Artificial Sequence: Synthetic oligonucleotide
ucgggaccggagccccgcc

SEQ ID NO: 2046044 - RNA, 19 nt, Artificial Sequence
  Description of Artificial Sequence: Synthetic oligonucleotide
agggugucccgaaagccuu

SEQ ID NO: 2046045 - RNA, 19 nt, Artificial Sequence
  Description of Artificial Sequence: Synthetic oligonucleotide
caccgaacccauaaaucau

SEQ ID NO: 2046046 - RNA, 19 nt, Artificial Sequence
  Description of Artificial Sequence: Synthetic oligonucleotide
cucgggaccggagccccgc

SEQ ID NO: 2046047 - RNA, 19 nt, Artificial Sequence
  Description of Artificial Sequence: Synthetic oligonucleotide
gucugcgacacaccuuccu

SEQ ID NO: 2046048 - RNA, 19 nt, Artificial Sequence
  Description of Artificial Sequence: Synthetic oligonucleotide
cauaucccgcaccccugca

SEQ ID NO: 2046049 - RNA, 19 nt, Artificial Sequence
  Description of Artificial Sequence: Synthetic oligonucleotide
ccagagcauaguccgagga

SEQ ID NO: 2046050 - RNA, 19 nt, Artificial Sequence
  Description of Artificial Sequence: Synthetic oligonucleotide
gaccggagccccgccggag

SEQ ID NO: 2046051 - RNA, 19 nt, Artificial Sequence
  Description of Artificial Sequence: Synthetic oligonucleotide
cagggucugcgacacaccu

SEQ ID NO: 2046052 - RNA, 19 nt, Artificial Sequence
  Description of Artificial Sequence: Synthetic oligonucleotide
ccgaaagccuuacaacaga

SEQ ID NO: 2046053 - RNA, 19 nt, Artificial Sequence
  Description of Artificial Sequence: Synthetic oligonucleotide
augagcgcagagaggguuu

SEQ ID NO: 2046054 - RNA, 19 nt, Artificial Sequence
  Description of Artificial Sequence: Synthetic oligonucleotide
ggcauaucccgcaccccug

SEQ ID NO: 2046055 - RNA, 19 nt, Artificial Sequence
  Description of Artificial Sequence: Synthetic oligonucleotide
cagccgcccucugacaauc

SEQ ID NO: 2046056 - RNA, 19 nt, Artificial Sequence
  Description of Artificial Sequence: Synthetic oligonucleotide
gugaccgggcgcauucaga

SEQ ID NO: 2046057 - RNA, 19 nt, Artificial Sequence
  Description of Artificial Sequence: Synthetic oligonucleotide
gggcauaucccgcaccccu

SEQ ID NO: 2046058 - RNA, 19 nt, Artificial Sequence
  Description of Artificial Sequence: Synthetic oligonucleotide
ucggugcccgcgggaagug

SEQ ID NO: 2046059 - RNA, 19 nt, Artificial Sequence
  Description of Artificial Sequence: Synthetic oligonucleotide
ggacgugguugcgcgagug

SEQ ID NO: 2046060 - RNA, 19 nt, Artificial Sequence
  Description of Artificial Sequence: Synthetic oligonucleotide
ggugcccgcgggaagugug

SEQ ID NO: 2046061 - RNA, 19 nt, Artificial Sequence
  Description of Artificial Sequence: Synthetic oligonucleotide
ugcccgcgggaagugugga

SEQ ID NO: 2046062 - RNA, 19 nt, Artificial Sequence
  Description of Artificial Sequence: Synthetic oligonucleotide
guuggcagcuggcgccgga

SEQ ID NO: 2046063 - RNA, 19 nt, Artificial Sequence
  Description of Artificial Sequence: Synthetic oligonucleotide
acggaguguugccccuaaa

SEQ ID NO: 2046064 - RNA, 19 nt, Artificial Sequence
  Description of Artificial Sequence: Synthetic oligonucleotide
gcgcauucagaaggccgcg

SEQ ID NO: 2046065 - RNA, 19 nt, Artificial Sequence
  Description of Artificial Sequence: Synthetic oligonucleotide
gugucccgaaagccuuaca

SEQ ID NO: 2046066 - RNA, 19 nt, Artificial Sequence
  Description of Artificial Sequence: Synthetic oligonucleotide
ggagccccgccggaguucc

SEQ ID NO: 2046067 - RNA, 19 nt, Artificial Sequence
  Description of Artificial Sequence: Synthetic oligonucleotide
ccacucgaggguagagaac

SEQ ID NO: 2046068 - RNA, 19 nt, Artificial Sequence
  Description of Artificial Sequence: Synthetic oligonucleotide
cgcccucugacaauccgug

SEQ ID NO: 2046069 - RNA, 19 nt, Artificial Sequence
  Description of Artificial Sequence: Synthetic oligonucleotide
gccuuacaacagacuacag

SEQ ID NO: 2046070 - RNA, 19 nt, Artificial Sequence
  Description of Artificial Sequence: Synthetic oligonucleotide
ccaccaagucuaaucccca

SEQ ID NO: 2046071 - RNA, 19 nt, Artificial Sequence
  Description of Artificial Sequence: Synthetic oligonucleotide
gcgacacaccuuccucggc

SEQ ID NO: 2046072 - RNA, 19 nt, Artificial Sequence
  Description of Artificial Sequence: Synthetic oligonucleotide
caggacccacggugucuug

SEQ ID NO: 2046073 - RNA, 19 nt, Artificial Sequence
  Description of Artificial Sequence: Synthetic oligonucleotide
ggauacgcucuggcgcacc

SEQ ID NO: 2046074 - RNA, 19 nt, Artificial Sequence
  Description of Artificial Sequence: Synthetic oligonucleotide
gagcgcagagaggguuuca

SEQ ID NO: 2046075 - RNA, 19 nt, Artificial Sequence
  Description of Artificial Sequence: Synthetic oligonucleotide
ccaggugugaccgggcgca

SEQ ID NO: 2046076 - RNA, 19 nt, Artificial Sequence
  Description of Artificial Sequence: Synthetic oligonucleotide
cccuucggcugcguuuucg

SEQ ID NO: 2046077 - RNA, 19 nt, Artificial Sequence
  Description of Artificial Sequence: Synthetic oligonucleotide
agccccgccggaguuccga

SEQ ID NO: 2046078 - RNA, 19 nt, Artificial Sequence
  Description of Artificial Sequence: Synthetic oligonucleotide
guccgaggacuccgagguc

SEQ ID NO: 2046079 - RNA, 19 nt, Artificial Sequence
  Description of Artificial Sequence: Synthetic oligonucleotide
gcaccccugcauaaguuaa

SEQ ID NO: 2046080 - RNA, 19 nt, Artificial Sequence
  Description of Artificial Sequence: Synthetic oligonucleotide
cguuuucggugcccgcggg

SEQ ID NO: 2046081 - RNA, 19 nt, Artificial Sequence
  Description of Artificial Sequence: Synthetic oligonucleotide
gaccaaccaccaagucuaa

SEQ ID NO: 2046082 - RNA, 19 nt, Artificial Sequence
  Description of Artificial Sequence: Synthetic oligonucleotide
ccgcgggaaguguggagac

SEQ ID NO: 2046083 - RNA, 19 nt, Artificial Sequence
  Description of Artificial Sequence: Synthetic oligonucleotide
gcgcgaguggcacauaguu

SEQ ID NO: 2046084 - RNA, 19 nt, Artificial Sequence
  Description of Artificial Sequence: Synthetic oligonucleotide
cgggaaguguggagacgcg

SEQ ID NO: 2046085 - RNA, 19 nt, Artificial Sequence
  Description of Artificial Sequence: Synthetic oligonucleotide
ggccgcgggguguugcuga

SEQ ID NO: 2046086 - RNA, 19 nt, Artificial Sequence
  Description of Artificial Sequence: Synthetic oligonucleotide
agacggaguguugccccua

SEQ ID NO: 2046087 - RNA, 19 nt, Artificial Sequence
  Description of Artificial Sequence: Synthetic oligonucleotide
gcgcaccagauacgccugc

SEQ ID NO: 2046088 - RNA, 19 nt, Artificial Sequence
  Description of Artificial Sequence: Synthetic oligonucleotide
gcccgcgggaaguguggag

SEQ ID NO: 2046089 - RNA, 19 nt, Artificial Sequence
  Description of Artificial Sequence: Synthetic oligonucleotide
cagaagugaggggcuggaa

SEQ ID NO: 2046090 - RNA, 19 nt, Artificial Sequence
  Description of Artificial Sequence: Synthetic oligonucleotide
acgcucuggcgcaccagau

SEQ ID NO: 2046091 - RNA, 19 nt, Artificial Sequence
  Description of Artificial Sequence: Synthetic oligonucleotide
aggccgcgggguguugcug

SEQ ID NO: 2046092 - RNA, 19 nt, Artificial Sequence
  Description of Artificial Sequence: Synthetic oligonucleotide
gugugaccgggcgcauuca

SEQ ID NO: 2046093 - RNA, 19 nt, Artificial Sequence
  Description of Artificial Sequence: Synthetic oligonucleotide
ccggaccacucgaggguag

SEQ ID NO: 2046094 - RNA, 19 nt, Artificial Sequence
  Description of Artificial Sequence: Synthetic oligonucleotide
cugucucaccgaacccaua

SEQ ID NO: 2046095 - RNA, 19 nt, Artificial Sequence
  Description of Artificial Sequence: Synthetic oligonucleotide
ggucugcgacacaccuucc

SEQ ID NO: 2046096 - RNA, 19 nt, Artificial Sequence
  Description of Artificial Sequence: Synthetic oligonucleotide
ggcugcguuuucggugccc

SEQ ID NO: 2046097 - RNA, 19 nt, Artificial Sequence
  Description of Artificial Sequence: Synthetic oligonucleotide
gcgggguguugcugaagga

SEQ ID NO: 2046098 - RNA, 19 nt, Artificial Sequence
  Description of Artificial Sequence: Synthetic oligonucleotide
aggugugaccgggcgcauu

SEQ ID NO: 2046099 - RNA, 19 nt, Artificial Sequence
  Description of Artificial Sequence: Synthetic oligonucleotide
cccgcgggaaguguggaga

SEQ ID NO: 2046100 - RNA, 19 nt, Artificial Sequence
  Description of Artificial Sequence: Synthetic oligonucleotide
cccgcuccgggagaggguc

SEQ ID NO: 2046101 - RNA, 19 nt, Artificial Sequence
  Description of Artificial Sequence: Synthetic oligonucleotide
gguugcgcgaguggcacau

SEQ ID NO: 2046102 - RNA, 19 nt, Artificial Sequence
  Description of Artificial Sequence: Synthetic oligonucleotide
cgccuuauaagucccaguu

SEQ ID NO: 2046103 - RNA, 19 nt, Artificial Sequence
  Description of Artificial Sequence: Synthetic oligonucleotide
gagccccgccggaguuccg

SEQ ID NO: 2046104 - RNA, 19 nt, Artificial Sequence
  Description of Artificial Sequence: Synthetic oligonucleotide
cuucaccuaggagguuaua

SEQ ID NO: 2046105 - RNA, 19 nt, Artificial Sequence
  Description of Artificial Sequence: Synthetic oligonucleotide
uggcaacguuggguuccuc

SEQ ID NO: 2046106 - RNA, 19 nt, Artificial Sequence
  Description of Artificial Sequence: Synthetic oligonucleotide
ccgcuccgggagagggucg

SEQ ID NO: 2046107 - RNA, 19 nt, Artificial Sequence
  Description of Artificial Sequence: Synthetic oligonucleotide
cgccggaguuccgagccgg

SEQ ID NO: 2046108 - RNA, 19 nt, Artificial Sequence
  Description of Artificial Sequence: Synthetic oligonucleotide
ccgccggaguuccgagccg

SEQ ID NO: 2046109 - RNA, 19 nt, Artificial Sequence
  Description of Artificial Sequence: Synthetic oligonucleotide
ccccgccggaguuccgagc

SEQ ID NO: 2046110 - RNA, 19 nt, Artificial Sequence
  Description of Artificial Sequence: Synthetic oligonucleotide
ccccuaaacccaugaccaa

SEQ ID NO: 2046111 - RNA, 19 nt, Artificial Sequence
  Description of Artificial Sequence: Synthetic oligonucleotide
ggaccggagccccgccgga

SEQ ID NO: 2046112 - RNA, 19 nt, Artificial Sequence
  Description of Artificial Sequence: Synthetic oligonucleotide
gucgcggcgcugguggcgu

SEQ ID NO: 2046113 - RNA, 19 nt, Artificial Sequence
  Description of Artificial Sequence: Synthetic oligonucleotide
gacgcgcggcaggcgccac

SEQ ID NO: 2046114 - RNA, 19 nt, Artificial Sequence
  Description of Artificial Sequence: Synthetic oligonucleotide
gagaacccuucggcugcgu

SEQ ID NO: 2046115 - RNA, 19 nt, Artificial Sequence
  Description of Artificial Sequence: Synthetic oligonucleotide
cgggaccggagccccgccg

SEQ ID NO: 2046116 - RNA, 19 nt, Artificial Sequence
  Description of Artificial Sequence: Synthetic oligonucleotide
ggcaggcgccaccgcccgc

SEQ ID NO: 2046117 - RNA, 19 nt, Artificial Sequence
  Description of Artificial Sequence: Synthetic oligonucleotide
cgggcgcauucagaaggcc

SEQ ID NO: 2046118 - RNA, 19 nt, Artificial Sequence
  Description of Artificial Sequence: Synthetic oligonucleotide
guugcgcgaguggcacaua

SEQ ID NO: 2046119 - RNA, 19 nt, Artificial Sequence
  Description of Artificial Sequence: Synthetic oligonucleotide
ccccugcauaaguuaaaau

SEQ ID NO: 2046120 - RNA, 19 nt, Artificial Sequence
  Description of Artificial Sequence: Synthetic oligonucleotide
ccgcccucugacaauccgu

SEQ ID NO: 2046121 - RNA, 19 nt, Artificial Sequence
  Description of Artificial Sequence: Synthetic oligonucleotide
gcaggcgccaccgcccgcu

SEQ ID NO: 2046122 - RNA, 19 nt, Artificial Sequence
  Description of Artificial Sequence: Synthetic oligonucleotide
ccagauacgccugcugguu

SEQ ID NO: 2046123 - RNA, 19 nt, Artificial Sequence
  Description of Artificial Sequence: Synthetic oligonucleotide
gccgcgggguguugcugaa

SEQ ID NO: 2046124 - RNA, 19 nt, Artificial Sequence
  Description of Artificial Sequence: Synthetic oligonucleotide
cagaaggccgcgggguguu

SEQ ID NO: 2046125 - RNA, 19 nt, Artificial Sequence
  Description of Artificial Sequence: Synthetic oligonucleotide
caggugucgcggcgcuggu

SEQ ID NO: 2046126 - RNA, 19 nt, Artificial Sequence
  Description of Artificial Sequence: Synthetic oligonucleotide
ccggagccagggucugcga

SEQ ID NO: 2046127 - RNA, 19 nt, Artificial Sequence
  Description of Artificial Sequence: Synthetic oligonucleotide
cgcucuggcgcaccagaua

SEQ ID NO: 2046128 - RNA, 19 nt, Artificial Sequence
  Description of Artificial Sequence: Synthetic oligonucleotide
ccccaagggugucccgaaa

SEQ ID NO: 2046129 - RNA, 19 nt, Artificial Sequence
  Description of Artificial Sequence: Synthetic oligonucleotide
cccaagacucccgcagccu

SEQ ID NO: 2046130 - RNA, 19 nt, Artificial Sequence
  Description of Artificial Sequence: Synthetic oligonucleotide
cgcgaguggcacauaguuu

SEQ ID NO: 2046131 - RNA, 19 nt, Artificial Sequence
  Description of Artificial Sequence: Synthetic oligonucleotide
cggcugcguuuucggugcc

SEQ ID NO: 2046132 - RNA, 19 nt, Artificial Sequence
  Description of Artificial Sequence: Synthetic oligonucleotide
cggaccacucgaggguaga

SEQ ID NO: 2046133 - RNA, 19 nt, Artificial Sequence
  Description of Artificial Sequence: Synthetic oligonucleotide
cgccggaccacucgagggu

SEQ ID NO: 2046134 - RNA, 19 nt, Artificial Sequence
  Description of Artificial Sequence: Synthetic oligonucleotide
ccaggacccacggugucuu

SEQ ID NO: 2046135 - RNA, 19 nt, Artificial Sequence
  Description of Artificial Sequence: Synthetic oligonucleotide
ccgcaccccugcauaaguu

SEQ ID NO: 2046136 - RNA, 19 nt, Artificial Sequence
  Description of Artificial Sequence: Synthetic oligonucleotide
caggugugaccgggcgcau

SEQ ID NO: 2046137 - RNA, 19 nt, Artificial Sequence
  Description of Artificial Sequence: Synthetic oligonucleotide
cgcaccagauacgccugcu

SEQ ID NO: 2046138 - RNA, 19 nt, Artificial Sequence
  Description of Artificial Sequence: Synthetic oligonucleotide
gcccgcuccgggagagggu

SEQ ID NO: 2046139 - RNA, 19 nt, Artificial Sequence
  Description of Artificial Sequence: Synthetic oligonucleotide
ccggagccccgccggaguu

SEQ ID NO: 2046140 - RNA, 19 nt, Artificial Sequence
  Description of Artificial Sequence: Synthetic oligonucleotide
cggugcccgcgggaagugu

SEQ ID NO: 2046141 - RNA, 19 nt, Artificial Sequence
  Description of Artificial Sequence: Synthetic oligonucleotide
aaugaagucauuaugguac

SEQ ID NO: 2046142 - RNA, 19 nt, Artificial Sequence
  Description of Artificial Sequence: Synthetic oligonucleotide
aauauggccacauagggcu

SEQ ID NO: 2046143 - RNA, 19 nt, Artificial Sequence
  Description of Artificial Sequence: Synthetic oligonucleotide
guaaaugaagucauuaugg

SEQ ID NO: 2046144 - RNA, 19 nt, Artificial Sequence
  Description of Artificial Sequence: Synthetic oligonucleotide
agcgcaaugggucaaagac

SEQ ID NO: 2046145 - RNA, 19 nt, Artificial Sequence
  Description of Artificial Sequence: Synthetic oligonucleotide
aagcgcagcaaacaaaggg

SEQ ID NO: 2046146 - RNA, 19 nt, Artificial Sequence
  Description of Artificial Sequence: Synthetic oligonucleotide
uguggauucagcaaauaug

SEQ ID NO: 2046147 - RNA, 19 nt, Artificial Sequence
  Description of Artificial Sequence: Synthetic oligonucleotide
aguaaaugaagucauuaug

SEQ ID NO: 2046148 - RNA, 19 nt, Artificial Sequence
  Description of Artificial Sequence: Synthetic oligonucleotide
gucauuaugguacuggaag

SEQ ID NO: 2046149 - RNA, 19 nt, Artificial Sequence
  Description of Artificial Sequence: Synthetic oligonucleotide
agcaaauauggccacauag

SEQ ID NO: 2046150 - RNA, 19 nt, Artificial Sequence
  Description of Artificial Sequence: Synthetic oligonucleotide
aaauauggccacauagggc

SEQ ID NO: 2046151 - RNA, 19 nt, Artificial Sequence
  Description of Artificial Sequence: Synthetic oligonucleotide
aagagauaccacuaguggu

SEQ ID NO: 2046152 - RNA, 19 nt, Artificial Sequence
  Description of Artificial Sequence: Synthetic oligonucleotide
aucauaauggaagccaggc

SEQ ID NO: 2046153 - RNA, 19 nt, Artificial Sequence
  Description of Artificial Sequence: Synthetic oligonucleotide
ucauuaugguacuggaagg

SEQ ID NO: 2046154 - RNA, 19 nt, Artificial Sequence
  Description of Artificial Sequence: Synthetic oligonucleotide
uagaugugcauagagauca

SEQ ID NO: 2046155 - RNA, 19 nt, Artificial Sequence
  Description of Artificial Sequence: Synthetic oligonucleotide
aaccauuuugggcccaucg

SEQ ID NO: 2046156 - RNA, 19 nt, Artificial Sequence
  Description of Artificial Sequence: Synthetic oligonucleotide
guaaccaacaaauugucca

SEQ ID NO: 2046157 - RNA, 19 nt, Artificial Sequence
  Description of Artificial Sequence: Synthetic oligonucleotide
cuucagcacaucauaaugg

SEQ ID NO: 2046158 - RNA, 19 nt, Artificial Sequence
  Description of Artificial Sequence: Synthetic oligonucleotide
ugugucagcaaugugagcu

SEQ ID NO: 2046159 - RNA, 19 nt, Artificial Sequence
  Description of Artificial Sequence: Synthetic oligonucleotide
cauacacauagucagguag

SEQ ID NO: 2046160 - RNA, 19 nt, Artificial Sequence
  Description of Artificial Sequence: Synthetic oligonucleotide
caaagcgcagcaaacaaag

SEQ ID NO: 2046161 - RNA, 19 nt, Artificial Sequence
  Description of Artificial Sequence: Synthetic oligonucleotide
cauucucaggagaaaagcg

SEQ ID NO: 2046162 - RNA, 19 nt, Artificial Sequence
  Description of Artificial Sequence: Synthetic oligonucleotide
acauucucaggagaaaagc

SEQ ID NO: 2046163 - RNA, 19 nt, Artificial Sequence
  Description of Artificial Sequence: Synthetic oligonucleotide
agaaccaguaagccuuucc

SEQ ID NO: 2046164 - RNA, 19 nt, Artificial Sequence
  Description of Artificial Sequence: Synthetic oligonucleotide
aaauuguccaacccagaga

SEQ ID NO: 2046165 - RNA, 19 nt, Artificial Sequence
  Description of Artificial Sequence: Synthetic oligonucleotide
gauaccaccguguccaggc

SEQ ID NO: 2046166 - RNA, 19 nt, Artificial Sequence
  Description of Artificial Sequence: Synthetic oligonucleotide
aaacaugggaaguccaggu

SEQ ID NO: 2046167 - RNA, 19 nt, Artificial Sequence
  Description of Artificial Sequence: Synthetic oligonucleotide
aacggcaugaaggcaaacg

SEQ ID NO: 2046168 - RNA, 19 nt, Artificial Sequence
  Description of Artificial Sequence: Synthetic oligonucleotide
aaggugacuggcuuguuga

SEQ ID NO: 2046169 - RNA, 19 nt, Artificial Sequence
  Description of Artificial Sequence: Synthetic oligonucleotide
acuguugggaccaggauac

SEQ ID NO: 2046170 - RNA, 19 nt, Artificial Sequence
  Description of Artificial Sequence: Synthetic oligonucleotide
ugagcugucuggcaggccc

SEQ ID NO: 2046171 - RNA, 19 nt, Artificial Sequence
  Description of Artificial Sequence: Synthetic oligonucleotide
ggaaaucauacacaucugg

SEQ ID NO: 2046172 - RNA, 19 nt, Artificial Sequence
  Description of Artificial Sequence: Synthetic oligonucleotide
acggcaugaaggcaaacgg

SEQ ID NO: 2046173 - RNA, 19 nt, Artificial Sequence
  Description of Artificial Sequence: Synthetic oligonucleotide
auggucaugagcugucugg

SEQ ID NO: 2046174 - RNA, 19 nt, Artificial Sequence
  Description of Artificial Sequence: Synthetic oligonucleotide
aucuuggccagaucguccc

SEQ ID NO: 2046175 - RNA, 19 nt, Artificial Sequence
  Description of Artificial Sequence: Synthetic oligonucleotide
caaacaaagggcugugacc

SEQ ID NO: 2046176 - RNA, 19 nt, Artificial Sequence
  Description of Artificial Sequence: Synthetic oligonucleotide
ucgagaaccaguaagccuu

SEQ ID NO: 2046177 - RNA, 19 nt, Artificial Sequence
  Description of Artificial Sequence: Synthetic oligonucleotide
gcuggaaccauuuugggcc

SEQ ID NO: 2046178 - RNA, 19 nt, Artificial Sequence
  Description of Artificial Sequence: Synthetic oligonucleotide
aaccaagagauaccacuag

SEQ ID NO: 2046179 - RNA, 19 nt, Artificial Sequence
  Description of Artificial Sequence: Synthetic oligonucleotide
uuugcguguggauucagca

SEQ ID NO: 2046180 - RNA, 19 nt, Artificial Sequence
  Description of Artificial Sequence: Synthetic oligonucleotide
ggauucagcaaauauggcc

SEQ ID NO: 2046181 - RNA, 19 nt, Artificial Sequence
  Description of Artificial Sequence: Synthetic oligonucleotide
uucucaggagaaaagcgca

SEQ ID NO: 2046182 - RNA, 19 nt, Artificial Sequence
  Description of Artificial Sequence: Synthetic oligonucleotide
uccacggcuguauacagcc

SEQ ID NO: 2046183 - RNA, 19 nt, Artificial Sequence
  Description of Artificial Sequence: Synthetic oligonucleotide
cacauagucagguagguca

SEQ ID NO: 2046184 - RNA, 19 nt, Artificial Sequence
  Description of Artificial Sequence: Synthetic oligonucleotide
aaagaccucugggucaggc

SEQ ID NO: 2046185 - RNA, 19 nt, Artificial Sequence
  Description of Artificial Sequence: Synthetic oligonucleotide
uuugggcccaucgagaacc

SEQ ID NO: 2046186 - RNA, 19 nt, Artificial Sequence
  Description of Artificial Sequence: Synthetic oligonucleotide
caaauuguccaacccagag

SEQ ID NO: 2046187 - RNA, 19 nt, Artificial Sequence
  Description of Artificial Sequence: Synthetic oligonucleotide
uagagaucaggcuuccugc

SEQ ID NO: 2046188 - RNA, 19 nt, Artificial Sequence
  Description of Artificial Sequence: Synthetic oligonucleotide
gaaaccaagagauaccacu

SEQ ID NO: 2046189 - RNA, 19 nt, Artificial Sequence
  Description of Artificial Sequence: Synthetic oligonucleotide
agcgcagcaaacaaagggc

SEQ ID NO: 2046190 - RNA, 19 nt, Artificial Sequence
  Description of Artificial Sequence: Synthetic oligonucleotide
gucuccuaggaucucacgg

SEQ ID NO: 2046191 - RNA, 19 nt, Artificial Sequence
  Description of Artificial Sequence: Synthetic oligonucleotide
agagaaaccaagagauacc

SEQ ID NO: 2046192 - RNA, 19 nt, Artificial Sequence
  Description of Artificial Sequence: Synthetic oligonucleotide
gaagcacuccuucauacac

SEQ ID NO: 2046193 - RNA, 19 nt, Artificial Sequence
  Description of Artificial Sequence: Synthetic oligonucleotide
aaggcaaacggguggcguc

SEQ ID NO: 2046194 - RNA, 19 nt, Artificial Sequence
  Description of Artificial Sequence: Synthetic oligonucleotide
uccugucacauucucagga

SEQ ID NO: 2046195 - RNA, 19 nt, Artificial Sequence
  Description of Artificial Sequence: Synthetic oligonucleotide
ugugcauagagaucaggcu

SEQ ID NO: 2046196 - RNA, 19 nt, Artificial Sequence
  Description of Artificial Sequence: Synthetic oligonucleotide
ugucuggcaggcccgaagg

SEQ ID NO: 2046197 - RNA, 19 nt, Artificial Sequence
  Description of Artificial Sequence: Synthetic oligonucleotide
aguaagccuuucccaagcc

SEQ ID NO: 2046198 - RNA, 19 nt, Artificial Sequence
  Description of Artificial Sequence: Synthetic oligonucleotide
agauguucagguaaccaac

SEQ ID NO: 2046199 - RNA, 19 nt, Artificial Sequence
  Description of Artificial Sequence: Synthetic oligonucleotide
uguucagguaaccaacaaa

SEQ ID NO: 2046200 - RNA, 19 nt, Artificial Sequence
  Description of Artificial Sequence: Synthetic oligonucleotide
ugagcucacugacugcccg

SEQ ID NO: 2046201 - RNA, 19 nt, Artificial Sequence
  Description of Artificial Sequence: Synthetic oligonucleotide
cagagaacggcaugaaggc

SEQ ID NO: 2046202 - RNA, 19 nt, Artificial Sequence
  Description of Artificial Sequence: Synthetic oligonucleotide
gagaauucaaagcgcagca

SEQ ID NO: 2046203 - RNA, 19 nt, Artificial Sequence
  Description of Artificial Sequence: Synthetic oligonucleotide
ggcauagucaggcucauag

SEQ ID NO: 2046204 - RNA, 19 nt, Artificial Sequence
  Description of Artificial Sequence: Synthetic oligonucleotide
aaccaguaagccuuuccca

SEQ ID NO: 2046205 - RNA, 19 nt, Artificial Sequence
  Description of Artificial Sequence: Synthetic oligonucleotide
uguggagugcaccaguaaa

SEQ ID NO: 2046206 - RNA, 19 nt, Artificial Sequence
  Description of Artificial Sequence: Synthetic oligonucleotide
gagaaaagcgcaauggguc

SEQ ID NO: 2046207 - RNA, 19 nt, Artificial Sequence
  Description of Artificial Sequence: Synthetic oligonucleotide
uuguccaacccagagagga

SEQ ID NO: 2046208 - RNA, 19 nt, Artificial Sequence
  Description of Artificial Sequence: Synthetic oligonucleotide
agucagguaggucaucuug

SEQ ID NO: 2046209 - RNA, 19 nt, Artificial Sequence
  Description of Artificial Sequence: Synthetic oligonucleotide
aggaggaaaucauacacau

SEQ ID NO: 2046210 - RNA, 19 nt, Artificial Sequence
  Description of Artificial Sequence: Synthetic oligonucleotide
aaccaacaaauuguccaac

SEQ ID NO: 2046211 - RNA, 19 nt, Artificial Sequence
  Description of Artificial Sequence: Synthetic oligonucleotide
uccaacccagagaggaugg

SEQ ID NO: 2046212 - RNA, 19 nt, Artificial Sequence
  Description of Artificial Sequence: Synthetic oligonucleotide
ugucacauucucaggagaa

SEQ ID NO: 2046213 - RNA, 19 nt, Artificial Sequence
  Description of Artificial Sequence: Synthetic oligonucleotide
ugcccaaugcaguuccugg

SEQ ID NO: 2046214 - RNA, 19 nt, Artificial Sequence
  Description of Artificial Sequence: Synthetic oligonucleotide
agagauaccacuaguggug

SEQ ID NO: 2046215 - RNA, 19 nt, Artificial Sequence
  Description of Artificial Sequence: Synthetic oligonucleotide
auucagcaaauauggccac

SEQ ID NO: 2046216 - RNA, 19 nt, Artificial Sequence
  Description of Artificial Sequence: Synthetic oligonucleotide
agaaaagcgcaauggguca

SEQ ID NO: 2046217 - RNA, 19 nt, Artificial Sequence
  Description of Artificial Sequence: Synthetic oligonucleotide
cuggugcucaggauaaagg

SEQ ID NO: 2046218 - RNA, 19 nt, Artificial Sequence
  Description of Artificial Sequence: Synthetic oligonucleotide
ugcguguggauucagcaaa

SEQ ID NO: 2046219 - RNA, 19 nt, Artificial Sequence
  Description of Artificial Sequence: Synthetic oligonucleotide
gaaggauucgaugcgcugc

SEQ ID NO: 2046220 - RNA, 19 nt, Artificial Sequence
  Description of Artificial Sequence: Synthetic oligonucleotide
uaaccaacaaauuguccaa

SEQ ID NO: 2046221 - RNA, 19 nt, Artificial Sequence
  Description of Artificial Sequence: Synthetic oligonucleotide
auacacauagucagguagg

SEQ ID NO: 2046222 - RNA, 19 nt, Artificial Sequence
  Description of Artificial Sequence: Synthetic oligonucleotide
aacaaagggcugugaccac

SEQ ID NO: 2046223 - RNA, 19 nt, Artificial Sequence
  Description of Artificial Sequence: Synthetic oligonucleotide
caucauaauggaagccagg

SEQ ID NO: 2046224 - RNA, 19 nt, Artificial Sequence
  Description of Artificial Sequence: Synthetic oligonucleotide
ucguggccuucaaacaugg

SEQ ID NO: 2046225 - RNA, 19 nt, Artificial Sequence
  Description of Artificial Sequence: Synthetic oligonucleotide
ucaggauaaagggccaugc

SEQ ID NO: 2046226 - RNA, 19 nt, Artificial Sequence
  Description of Artificial Sequence: Synthetic oligonucleotide
agcuuucggugcuggaacc

SEQ ID NO: 2046227 - RNA, 19 nt, Artificial Sequence
  Description of Artificial Sequence: Synthetic oligonucleotide
ugaugaccugaucuguaug

SEQ ID NO: 2046228 - RNA, 19 nt, Artificial Sequence
  Description of Artificial Sequence: Synthetic oligonucleotide
cacauucucaggagaaaag

SEQ ID NO: 2046229 - RNA, 19 nt, Artificial Sequence
  Description of Artificial Sequence: Synthetic oligonucleotide
gcaaauauggccacauagg

SEQ ID NO: 2046230 - RNA, 19 nt, Artificial Sequence
  Description of Artificial Sequence: Synthetic oligonucleotide
acaaagggcugugaccacc

SEQ ID NO: 2046231 - RNA, 19 nt, Artificial Sequence
  Description of Artificial Sequence: Synthetic oligonucleotide
ugaucuguauggucaugag

SEQ ID NO: 2046232 - RNA, 19 nt, Artificial Sequence
  Description of Artificial Sequence: Synthetic oligonucleotide
ggugcuggaaccauuuugg

SEQ ID NO: 2046233 - RNA, 19 nt, Artificial Sequence
  Description of Artificial Sequence: Synthetic oligonucleotide
cugacugcccgguaguagc

SEQ ID NO: 2046234 - RNA, 19 nt, Artificial Sequence
  Description of Artificial Sequence: Synthetic oligonucleotide
aucgagaaccaguaagccu

SEQ ID NO: 2046235 - RNA, 19 nt, Artificial Sequence
  Description of Artificial Sequence: Synthetic oligonucleotide
gaugugcauagagaucagg

SEQ ID NO: 2046236 - RNA, 19 nt, Artificial Sequence
  Description of Artificial Sequence: Synthetic oligonucleotide
acuagugguggugucgugg

SEQ ID NO: 2046237 - RNA, 19 nt, Artificial Sequence
  Description of Artificial Sequence: Synthetic oligonucleotide
accaggauaccaccguguc

SEQ ID NO: 2046238 - RNA, 19 nt, Artificial Sequence
  Description of Artificial Sequence: Synthetic oligonucleotide
ugggaccaggauaccaccg

SEQ ID NO: 2046239 - RNA, 19 nt, Artificial Sequence
  Description of Artificial Sequence: Synthetic oligonucleotide
aaacggguggcguccuguc

SEQ ID NO: 2046240 - RNA, 19 nt, Artificial Sequence
  Description of Artificial Sequence: Synthetic oligonucleotide
caaacaugggaaguccagg

SEQ ID NO: 2046241 - RNA, 19 nt, Artificial Sequence
  Description of Artificial Sequence: Synthetic oligonucleotide
uuugagggauccagggaga

SEQ ID NO: 2046242 - RNA, 19 nt, Artificial Sequence
  Description of Artificial Sequence: Synthetic oligonucleotide
uaggaucucacggaccucc

SEQ ID NO: 2046243 - RNA, 19 nt, Artificial Sequence
  Description of Artificial Sequence: Synthetic oligonucleotide
uggauucagcaaauauggc

SEQ ID NO: 2046244 - RNA, 19 nt, Artificial Sequence
  Description of Artificial Sequence: Synthetic oligonucleotide
uuaugguacuggaaggauu

SEQ ID NO: 2046245 - RNA, 19 nt, Artificial Sequence
  Description of Artificial Sequence: Synthetic oligonucleotide
ugucguggccuucaaacau

SEQ ID NO: 2046246 - RNA, 19 nt, Artificial Sequence
  Description of Artificial Sequence: Synthetic oligonucleotide
cucccuacaucgcugcugg

SEQ ID NO: 2046247 - RNA, 19 nt, Artificial Sequence
  Description of Artificial Sequence: Synthetic oligonucleotide
gauucgaugcgcugcugug

SEQ ID NO: 2046248 - RNA, 19 nt, Artificial Sequence
  Description of Artificial Sequence: Synthetic oligonucleotide
cauaauggaagccaggcgu

SEQ ID NO: 2046249 - RNA, 19 nt, Artificial Sequence
  Description of Artificial Sequence: Synthetic oligonucleotide
ggugucguggccuucaaac

SEQ ID NO: 2046250 - RNA, 19 nt, Artificial Sequence
  Description of Artificial Sequence: Synthetic oligonucleotide
guggccuucaaacauggga

SEQ ID NO: 2046251 - RNA, 19 nt, Artificial Sequence
  Description of Artificial Sequence: Synthetic oligonucleotide
ggcauaggggaacuguugg

SEQ ID NO: 2046252 - RNA, 19 nt, Artificial Sequence
  Description of Artificial Sequence: Synthetic oligonucleotide
caugggaaguccaggugcc

SEQ ID NO: 2046253 - RNA, 19 nt, Artificial Sequence
  Description of Artificial Sequence: Synthetic oligonucleotide
cagggagaauucaaagcgc

SEQ ID NO: 2046254 - RNA, 19 nt, Artificial Sequence
  Description of Artificial Sequence: Synthetic oligonucleotide
accaagagauaccacuagu

SEQ ID NO: 2046255 - RNA, 19 nt, Artificial Sequence
  Description of Artificial Sequence: Synthetic oligonucleotide
auagauguucagguaacca

SEQ ID NO: 2046256 - RNA, 19 nt, Artificial Sequence
  Description of Artificial Sequence: Synthetic oligonucleotide
cucauagauguucagguaa

SEQ ID NO: 2046257 - RNA, 19 nt, Artificial Sequence
  Description of Artificial Sequence: Synthetic oligonucleotide
cuagugguggugucguggc

SEQ ID NO: 2046258 - RNA, 19 nt, Artificial Sequence
  Description of Artificial Sequence: Synthetic oligonucleotide
aaagcgcagcaaacaaagg

SEQ ID NO: 2046259 - RNA, 19 nt, Artificial Sequence
  Description of Artificial Sequence: Synthetic oligonucleotide
ugccugaugaccugaucug

SEQ ID NO: 2046260 - RNA, 19 nt, Artificial Sequence
  Description of Artificial Sequence: Synthetic oligonucleotide
agguaaccaacaaauuguc

SEQ ID NO: 2046261 - RNA, 19 nt, Artificial Sequence
  Description of Artificial Sequence: Synthetic oligonucleotide
aauggaagccaggcgugag

SEQ ID NO: 2046262 - RNA, 19 nt, Artificial Sequence
  Description of Artificial Sequence: Synthetic oligonucleotide
gcuucagcacaucauaaug

SEQ ID NO: 2046263 - RNA, 19 nt, Artificial Sequence
  Description of Artificial Sequence: Synthetic oligonucleotide
augaagucauuaugguacu

SEQ ID NO: 2046264 - RNA, 19 nt, Artificial Sequence
  Description of Artificial Sequence: Synthetic oligonucleotide
gaccugaucuguaugguca

SEQ ID NO: 2046265 - RNA, 19 nt, Artificial Sequence
  Description of Artificial Sequence: Synthetic oligonucleotide
aaaccaagagauaccacua

SEQ ID NO: 2046266 - RNA, 19 nt, Artificial Sequence
  Description of Artificial Sequence: Synthetic oligonucleotide
cuggcggaacacuuggggc

SEQ ID NO: 2046267 - RNA, 19 nt, Artificial Sequence
  Description of Artificial Sequence: Synthetic oligonucleotide
caguaagccuuucccaagc

SEQ ID NO: 2046268 - RNA, 19 nt, Artificial Sequence
  Description of Artificial Sequence: Synthetic oligonucleotide
guacuggaaggauucgaug

SEQ ID NO: 2046269 - RNA, 19 nt, Artificial Sequence
  Description of Artificial Sequence: Synthetic oligonucleotide
cuuugcguguggauucagc

SEQ ID NO: 2046270 - RNA, 19 nt, Artificial Sequence
  Description of Artificial Sequence: Synthetic oligonucleotide
guauacagccuuggcauag

SEQ ID NO: 2046271 - RNA, 19 nt, Artificial Sequence
  Description of Artificial Sequence: Synthetic oligonucleotide
caucgagaaccaguaagcc

SEQ ID NO: 2046272 - RNA, 19 nt, Artificial Sequence
  Description of Artificial Sequence: Synthetic oligonucleotide
aagcgcaaugggucaaaga

SEQ ID NO: 2046273 - RNA, 19 nt, Artificial Sequence
  Description of Artificial Sequence: Synthetic oligonucleotide
agugcaccaguaaaugaag

SEQ ID NO: 2046274 - RNA, 19 nt, Artificial Sequence
  Description of Artificial Sequence: Synthetic oligonucleotide
ggaagcggcggccaugugg

SEQ ID NO: 2046275 - RNA, 19 nt, Artificial Sequence
  Description of Artificial Sequence: Synthetic oligonucleotide
aaagcgcaaugggucaaag

SEQ ID NO: 2046276 - RNA, 19 nt, Artificial Sequence
  Description of Artificial Sequence: Synthetic oligonucleotide
auacagccuuggcauaguc

SEQ ID NO: 2046277 - RNA, 19 nt, Artificial Sequence
  Description of Artificial Sequence: Synthetic oligonucleotide
uugggaccaggauaccacc

SEQ ID NO: 2046278 - RNA, 19 nt, Artificial Sequence
  Description of Artificial Sequence: Synthetic oligonucleotide
ggagaauucaaagcgcagc

SEQ ID NO: 2046279 - RNA, 19 nt, Artificial Sequence
  Description of Artificial Sequence: Synthetic oligonucleotide
accauuuugggcccaucga

SEQ ID NO: 2046280 - RNA, 19 nt, Artificial Sequence
  Description of Artificial Sequence: Synthetic oligonucleotide
agcacuccuucauacacau

SEQ ID NO: 2046281 - RNA, 19 nt, Artificial Sequence
  Description of Artificial Sequence: Synthetic oligonucleotide
gcugugaccaccuucaucu

SEQ ID NO: 2046282 - RNA, 19 nt, Artificial Sequence
  Description of Artificial Sequence: Synthetic oligonucleotide
uccuaggaucucacggacc

SEQ ID NO: 2046283 - RNA, 19 nt, Artificial Sequence
  Description of Artificial Sequence: Synthetic oligonucleotide
ccaucgagaaccaguaagc

SEQ ID NO: 2046284 - RNA, 19 nt, Artificial Sequence
  Description of Artificial Sequence: Synthetic oligonucleotide
caggauaccaccgugucca

SEQ ID NO: 2046285 - RNA, 19 nt, Artificial Sequence
  Description of Artificial Sequence: Synthetic oligonucleotide
uguugggaccaggauacca

SEQ ID NO: 2046286 - RNA, 19 nt, Artificial Sequence
  Description of Artificial Sequence: Synthetic oligonucleotide
cacaaaggugacuggcuug

SEQ ID NO: 2046287 - RNA, 19 nt, Artificial Sequence
  Description of Artificial Sequence: Synthetic oligonucleotide
gauguucagguaaccaaca

SEQ ID NO: 2046288 - RNA, 19 nt, Artificial Sequence
  Description of Artificial Sequence: Synthetic oligonucleotide
uacacauagucagguaggu

SEQ ID NO: 2046289 - RNA, 19 nt, Artificial Sequence
  Description of Artificial Sequence: Synthetic oligonucleotide
guagcgagcggccauccac

SEQ ID NO: 2046290 - RNA, 19 nt, Artificial Sequence
  Description of Artificial Sequence: Synthetic oligonucleotide
ccaagagauaccacuagug

SEQ ID NO: 2046291 - RNA, 19 nt, Artificial Sequence
  Description of Artificial Sequence: Synthetic oligonucleotide
accacuagugguggugucg

SEQ ID NO: 2046292 - RNA, 19 nt, Artificial Sequence
  Description of Artificial Sequence: Synthetic oligonucleotide
uugucucuguggccuaggc

SEQ ID NO: 2046293 - RNA, 19 nt, Artificial Sequence
  Description of Artificial Sequence: Synthetic oligonucleotide
ggcguagaugugcauagag

SEQ ID NO: 2046294 - RNA, 19 nt, Artificial Sequence
  Description of Artificial Sequence: Synthetic oligonucleotide
gcuguauacagccuuggca

SEQ ID NO: 2046295 - RNA, 19 nt, Artificial Sequence
  Description of Artificial Sequence: Synthetic oligonucleotide
uguccaggcucccuaacuu

SEQ ID NO: 2046296 - RNA, 19 nt, Artificial Sequence
  Description of Artificial Sequence: Synthetic oligonucleotide
gagugcaccaguaaaugaa

SEQ ID NO: 2046297 - RNA, 19 nt, Artificial Sequence
  Description of Artificial Sequence: Synthetic oligonucleotide
accaccguguccaggcucc

SEQ ID NO: 2046298 - RNA, 19 nt, Artificial Sequence
  Description of Artificial Sequence: Synthetic oligonucleotide
uuccgcugccugaugaccu

SEQ ID NO: 2046299 - RNA, 19 nt, Artificial Sequence
  Description of Artificial Sequence: Synthetic oligonucleotide
gcaaacaaagggcugugac

SEQ ID NO: 2046300 - RNA, 19 nt, Artificial Sequence
  Description of Artificial Sequence: Synthetic oligonucleotide
ugaccugaucuguaugguc

SEQ ID NO: 2046301 - RNA, 19 nt, Artificial Sequence
  Description of Artificial Sequence: Synthetic oligonucleotide
uggucaugagcugucuggc

SEQ ID NO: 2046302 - RNA, 19 nt, Artificial Sequence
  Description of Artificial Sequence: Synthetic oligonucleotide
gagaacggcaugaaggcaa

SEQ ID NO: 2046303 - RNA, 19 nt, Artificial Sequence
  Description of Artificial Sequence: Synthetic oligonucleotide
auaaagggccaugcaguag

SEQ ID NO: 2046304 - RNA, 19 nt, Artificial Sequence
  Description of Artificial Sequence: Synthetic oligonucleotide
ucacugacugcccgguagu

SEQ ID NO: 2046305 - RNA, 19 nt, Artificial Sequence
  Description of Artificial Sequence: Synthetic oligonucleotide
caugcaguagagaaaccaa

SEQ ID NO: 2046306 - RNA, 19 nt, Artificial Sequence
  Description of Artificial Sequence: Synthetic oligonucleotide
cuguauacagccuuggcau

SEQ ID NO: 2046307 - RNA, 19 nt, Artificial Sequence
  Description of Artificial Sequence: Synthetic oligonucleotide
ucauacacauagucaggua

SEQ ID NO: 2046308 - RNA, 19 nt, Artificial Sequence
  Description of Artificial Sequence: Synthetic oligonucleotide
aggaugggcauaggggaac

SEQ ID NO: 2046309 - RNA, 19 nt, Artificial Sequence
  Description of Artificial Sequence: Synthetic oligonucleotide
guccuggucuccuaggauc

SEQ ID NO: 2046310 - RNA, 19 nt, Artificial Sequence
  Description of Artificial Sequence: Synthetic oligonucleotide
uuuugggcccaucgagaac

SEQ ID NO: 2046311 - RNA, 19 nt, Artificial Sequence
  Description of Artificial Sequence: Synthetic oligonucleotide
aaggaagcggcggccaugu

SEQ ID NO: 2046312 - RNA, 19 nt, Artificial Sequence
  Description of Artificial Sequence: Synthetic oligonucleotide
cauuuugggcccaucgaga

SEQ ID NO: 2046313 - RNA, 19 nt, Artificial Sequence
  Description of Artificial Sequence: Synthetic oligonucleotide
auuaugguacuggaaggau

SEQ ID NO: 2046314 - RNA, 19 nt, Artificial Sequence
  Description of Artificial Sequence: Synthetic oligonucleotide
uagcgagcggccauccaca

SEQ ID NO: 2046315 - RNA, 19 nt, Artificial Sequence
  Description of Artificial Sequence: Synthetic oligonucleotide
gcuggcggaacacuugggg

SEQ ID NO: 2046316 - RNA, 19 nt, Artificial Sequence
  Description of Artificial Sequence: Synthetic oligonucleotide
cccaucgagaaccaguaag

SEQ ID NO: 2046317 - RNA, 19 nt, Artificial Sequence
  Description of Artificial Sequence: Synthetic oligonucleotide
agggcuucagcacaucaua

SEQ ID NO: 2046318 - RNA, 19 nt, Artificial Sequence
  Description of Artificial Sequence: Synthetic oligonucleotide
uucggugcuggaaccauuu

SEQ ID NO: 2046319 - RNA, 19 nt, Artificial Sequence
  Description of Artificial Sequence: Synthetic oligonucleotide
agggagaauucaaagcgca

SEQ ID NO: 2046320 - RNA, 19 nt, Artificial Sequence
  Description of Artificial Sequence: Synthetic oligonucleotide
ugaagucauuaugguacug

SEQ ID NO: 2046321 - RNA, 19 nt, Artificial Sequence
  Description of Artificial Sequence: Synthetic oligonucleotide
gguaggucaucuuggccag

SEQ ID NO: 2046322 - RNA, 19 nt, Artificial Sequence
  Description of Artificial Sequence: Synthetic oligonucleotide
uguauacagccuuggcaua

SEQ ID NO: 2046323 - RNA, 19 nt, Artificial Sequence
  Description of Artificial Sequence: Synthetic oligonucleotide
cauuaugguacuggaagga

SEQ ID NO: 2046324 - RNA, 19 nt, Artificial Sequence
  Description of Artificial Sequence: Synthetic oligonucleotide
uugcguguggauucagcaa

SEQ ID NO: 2046325 - RNA, 19 nt, Artificial Sequence
  Description of Artificial Sequence: Synthetic oligonucleotide
guugggaccaggauaccac

SEQ ID NO: 2046326 - RNA, 19 nt, Artificial Sequence
  Description of Artificial Sequence: Synthetic oligonucleotide
gaagcggcggccaugugga

SEQ ID NO: 2046327 - RNA, 19 nt, Artificial Sequence
  Description of Artificial Sequence: Synthetic oligonucleotide
cagcuuucggugcuggaac

SEQ ID NO: 2046328 - RNA, 19 nt, Artificial Sequence
  Description of Artificial Sequence: Synthetic oligonucleotide
ugguacuggaaggauucga

SEQ ID NO: 2046329 - RNA, 19 nt, Artificial Sequence
  Description of Artificial Sequence: Synthetic oligonucleotide
ugucagcaaugugagcuca

SEQ ID NO: 2046330 - RNA, 19 nt, Artificial Sequence
  Description of Artificial Sequence: Synthetic oligonucleotide
ccuacaucgcugcuggugc

SEQ ID NO: 2046331 - RNA, 19 nt, Artificial Sequence
  Description of Artificial Sequence: Synthetic oligonucleotide
auguucagguaaccaacaa

SEQ ID NO: 2046332 - RNA, 19 nt, Artificial Sequence
  Description of Artificial Sequence: Synthetic oligonucleotide
ccauuuugggcccaucgag

SEQ ID NO: 2046333 - RNA, 19 nt, Artificial Sequence
  Description of Artificial Sequence: Synthetic oligonucleotide
gcaaacugcugcccaaugc

SEQ ID NO: 2046334 - RNA, 19 nt, Artificial Sequence
  Description of Artificial Sequence: Synthetic oligonucleotide
cuggaaggauucgaugcgc

SEQ ID NO: 2046335 - RNA, 19 nt, Artificial Sequence
  Description of Artificial Sequence: Synthetic oligonucleotide
aacggguggcguccuguca

SEQ ID NO: 2046336 - RNA, 19 nt, Artificial Sequence
  Description of Artificial Sequence: Synthetic oligonucleotide
ucccaagccacuggaggag

SEQ ID NO: 2046337 - RNA, 19 nt, Artificial Sequence
  Description of Artificial Sequence: Synthetic oligonucleotide
uaauggaagccaggcguga

SEQ ID NO: 2046338 - RNA, 19 nt, Artificial Sequence
  Description of Artificial Sequence: Synthetic oligonucleotide
ugggcauaggggaacuguu

SEQ ID NO: 2046339 - RNA, 19 nt, Artificial Sequence
  Description of Artificial Sequence: Synthetic oligonucleotide
agugguggugucguggccu

SEQ ID NO: 2046340 - RNA, 19 nt, Artificial Sequence
  Description of Artificial Sequence: Synthetic oligonucleotide
gcacuguuccuguggaggg

SEQ ID NO: 2046341 - RNA, 19 nt, Artificial Sequence
  Description of Artificial Sequence: Synthetic oligonucleotide
ucacggaccuccucccuac

SEQ ID NO: 2046342 - RNA, 19 nt, Artificial Sequence
  Description of Artificial Sequence: Synthetic oligonucleotide
cauaggggaacuguuggga

SEQ ID NO: 2046343 - RNA, 19 nt, Artificial Sequence
  Description of Artificial Sequence: Synthetic oligonucleotide
gguaaccaacaaauugucc

SEQ ID NO: 2046344 - RNA, 19 nt, Artificial Sequence
  Description of Artificial Sequence: Synthetic oligonucleotide
guagaugugcauagagauc

SEQ ID NO: 2046345 - RNA, 19 nt, Artificial Sequence
  Description of Artificial Sequence: Synthetic oligonucleotide
ugacugcccgguaguagcu

SEQ ID NO: 2046346 - RNA, 19 nt, Artificial Sequence
  Description of Artificial Sequence: Synthetic oligonucleotide
cguccugucacauucucag

SEQ ID NO: 2046347 - RNA, 19 nt, Artificial Sequence
  Description of Artificial Sequence: Synthetic oligonucleotide
auaccacuagugguggugu

SEQ ID NO: 2046348 - RNA, 19 nt, Artificial Sequence
  Description of Artificial Sequence: Synthetic oligonucleotide
cugaucuguauggucauga

SEQ ID NO: 2046349 - RNA, 19 nt, Artificial Sequence
  Description of Artificial Sequence: Synthetic oligonucleotide
aaaagcgcaaugggucaaa

SEQ ID NO: 2046350 - RNA, 19 nt, Artificial Sequence
  Description of Artificial Sequence: Synthetic oligonucleotide
guccaacccagagaggaug

SEQ ID NO: 2046351 - RNA, 19 nt, Artificial Sequence
  Description of Artificial Sequence: Synthetic oligonucleotide
augggcauaggggaacugu

SEQ ID NO: 2046352 - RNA, 19 nt, Artificial Sequence
  Description of Artificial Sequence: Synthetic oligonucleotide
caggcccgaaggaagcggc

SEQ ID NO: 2046353 - RNA, 19 nt, Artificial Sequence
  Description of Artificial Sequence: Synthetic oligonucleotide
uguccaacccagagaggau

SEQ ID NO: 2046354 - RNA, 19 nt, Artificial Sequence
  Description of Artificial Sequence: Synthetic oligonucleotide
cgagcggccauccacaaag

SEQ ID NO: 2046355 - RNA, 19 nt, Artificial Sequence
  Description of Artificial Sequence: Synthetic oligonucleotide
aggcgugagcagcuuucgg

SEQ ID NO: 2046356 - RNA, 19 nt, Artificial Sequence
  Description of Artificial Sequence: Synthetic oligonucleotide
uauacagccuuggcauagu

SEQ ID NO: 2046357 - RNA, 19 nt, Artificial Sequence
  Description of Artificial Sequence: Synthetic oligonucleotide
agaauucaaagcgcagcaa

SEQ ID NO: 2046358 - RNA, 19 nt, Artificial Sequence
  Description of Artificial Sequence: Synthetic oligonucleotide
ucgucccacuggaaggagu

SEQ ID NO: 2046359 - RNA, 19 nt, Artificial Sequence
  Description of Artificial Sequence: Synthetic oligonucleotide
cuuccgcugccugaugacc

SEQ ID NO: 2046360 - RNA, 19 nt, Artificial Sequence
  Description of Artificial Sequence: Synthetic oligonucleotide
cugucuggcaggcccgaag

SEQ ID NO: 2046361 - RNA, 19 nt, Artificial Sequence
  Description of Artificial Sequence: Synthetic oligonucleotide
gugucguggccuucaaaca

SEQ ID NO: 2046362 - RNA, 19 nt, Artificial Sequence
  Description of Artificial Sequence: Synthetic oligonucleotide
auucgaugcgcugcugugu

SEQ ID NO: 2046363 - RNA, 19 nt, Artificial Sequence
  Description of Artificial Sequence: Synthetic oligonucleotide
caggcucauagauguucag

SEQ ID NO: 2046364 - RNA, 19 nt, Artificial Sequence
  Description of Artificial Sequence: Synthetic oligonucleotide
ggaaggauucgaugcgcug

SEQ ID NO: 2046365 - RNA, 19 nt, Artificial Sequence
  Description of Artificial Sequence: Synthetic oligonucleotide
augaccugaucuguauggu

SEQ ID NO: 2046366 - RNA, 19 nt, Artificial Sequence
  Description of Artificial Sequence: Synthetic oligonucleotide
gcccaaugcaguuccuggg

SEQ ID NO: 2046367 - RNA, 19 nt, Artificial Sequence
  Description of Artificial Sequence: Synthetic oligonucleotide
acaaauuguccaacccaga

SEQ ID NO: 2046368 - RNA, 19 nt, Artificial Sequence
  Description of Artificial Sequence: Synthetic oligonucleotide
ggaguccuggucuccuagg

SEQ ID NO: 2046369 - RNA, 19 nt, Artificial Sequence
  Description of Artificial Sequence: Synthetic oligonucleotide
agcggccauccacaaaggu

SEQ ID NO: 2046370 - RNA, 19 nt, Artificial Sequence
  Description of Artificial Sequence: Synthetic oligonucleotide
agguagcgagcggccaucc

SEQ ID NO: 2046371 - RNA, 19 nt, Artificial Sequence
  Description of Artificial Sequence: Synthetic oligonucleotide
gugcauagagaucaggcuu

SEQ ID NO: 2046372 - RNA, 19 nt, Artificial Sequence
  Description of Artificial Sequence: Synthetic oligonucleotide
agucauuaugguacuggaa

SEQ ID NO: 2046373 - RNA, 19 nt, Artificial Sequence
  Description of Artificial Sequence: Synthetic oligonucleotide
ggagugcaccaguaaauga

SEQ ID NO: 2046374 - RNA, 19 nt, Artificial Sequence
  Description of Artificial Sequence: Synthetic oligonucleotide
gucguggccuucaaacaug

SEQ ID NO: 2046375 - RNA, 19 nt, Artificial Sequence
  Description of Artificial Sequence: Synthetic oligonucleotide
uuggccagaucgucccacu

SEQ ID NO: 2046376 - RNA, 19 nt, Artificial Sequence
  Description of Artificial Sequence: Synthetic oligonucleotide
uuggggucuccacggcugu

SEQ ID NO: 2046377 - RNA, 19 nt, Artificial Sequence
  Description of Artificial Sequence: Synthetic oligonucleotide
gucuccacggcuguauaca

SEQ ID NO: 2046378 - RNA, 19 nt, Artificial Sequence
  Description of Artificial Sequence: Synthetic oligonucleotide
agggauccagggagaauuc

SEQ ID NO: 2046379 - RNA, 19 nt, Artificial Sequence
  Description of Artificial Sequence: Synthetic oligonucleotide
gagggauccagggagaauu

SEQ ID NO: 2046380 - RNA, 19 nt, Artificial Sequence
  Description of Artificial Sequence: Synthetic oligonucleotide
uccuguggagggcguagau

SEQ ID NO: 2046381 - RNA, 19 nt, Artificial Sequence
  Description of Artificial Sequence: Synthetic oligonucleotide
uugagggauccagggagaa

SEQ ID NO: 2046382 - RNA, 19 nt, Artificial Sequence
  Description of Artificial Sequence: Synthetic oligonucleotide
gaaaagcgcaaugggucaa

SEQ ID NO: 2046383 - RNA, 19 nt, Artificial Sequence
  Description of Artificial Sequence: Synthetic oligonucleotide
aggcucccuaacuucugga

SEQ ID NO: 2046384 - RNA, 19 nt, Artificial Sequence
  Description of Artificial Sequence: Synthetic oligonucleotide
agcaaacaaagggcuguga

SEQ ID NO: 2046385 - RNA, 19 nt, Artificial Sequence
  Description of Artificial Sequence: Synthetic oligonucleotide
ggaagcacuccuucauaca

SEQ ID NO: 2046386 - RNA, 19 nt, Artificial Sequence
  Description of Artificial Sequence: Synthetic oligonucleotide
ugggccccgcagagaacgg

SEQ ID NO: 2046387 - RNA, 19 nt, Artificial Sequence
  Description of Artificial Sequence: Synthetic oligonucleotide
ggcuguauacagccuuggc

SEQ ID NO: 2046388 - RNA, 19 nt, Artificial Sequence
  Description of Artificial Sequence: Synthetic oligonucleotide
gcuggugcucaggauaaag

SEQ ID NO: 2046389 - RNA, 19 nt, Artificial Sequence
  Description of Artificial Sequence: Synthetic oligonucleotide
uccuuugcguguggauuca

SEQ ID NO: 2046390 - RNA, 19 nt, Artificial Sequence
  Description of Artificial Sequence: Synthetic oligonucleotide
gaucaggcuuccugcaggu

SEQ ID NO: 2046391 - RNA, 19 nt, Artificial Sequence
  Description of Artificial Sequence: Synthetic oligonucleotide
ggugacuggcuuguugagc

SEQ ID NO: 2046392 - RNA, 19 nt, Artificial Sequence
  Description of Artificial Sequence: Synthetic oligonucleotide
aagggccaugcaguagaga

SEQ ID NO: 2046393 - RNA, 19 nt, Artificial Sequence
  Description of Artificial Sequence: Synthetic oligonucleotide
agaugugcauagagaucag

SEQ ID NO: 2046394 - RNA, 19 nt, Artificial Sequence
  Description of Artificial Sequence: Synthetic oligonucleotide
caggcgugagcagcuuucg

SEQ ID NO: 2046395 - RNA, 19 nt, Artificial Sequence
  Description of Artificial Sequence: Synthetic oligonucleotide
aggauaccaccguguccag

SEQ ID NO: 2046396 - RNA, 19 nt, Artificial Sequence
  Description of Artificial Sequence: Synthetic oligonucleotide
ccuucaaacaugggaaguc

SEQ ID NO: 2046397 - RNA, 19 nt, Artificial Sequence
  Description of Artificial Sequence: Synthetic oligonucleotide
gggagaauucaaagcgcag

SEQ ID NO: 2046398 - RNA, 19 nt, Artificial Sequence
  Description of Artificial Sequence: Synthetic oligonucleotide
auaccaccguguccaggcu

SEQ ID NO: 2046399 - RNA, 19 nt, Artificial Sequence
  Description of Artificial Sequence: Synthetic oligonucleotide
gagcggccauccacaaagg

SEQ ID NO: 2046400 - RNA, 19 nt, Artificial Sequence
  Description of Artificial Sequence: Synthetic oligonucleotide
ucaggccacacagcacugu

SEQ ID NO: 2046401 - RNA, 19 nt, Artificial Sequence
  Description of Artificial Sequence: Synthetic oligonucleotide
agguggguagaggcggaag

SEQ ID NO: 2046402 - RNA, 19 nt, Artificial Sequence
  Description of Artificial Sequence: Synthetic oligonucleotide
gcucccuaacuucuggauc

SEQ ID NO: 2046403 - RNA, 19 nt, Artificial Sequence
  Description of Artificial Sequence: Synthetic oligonucleotide
acuggaggaggaaaucaua

SEQ ID NO: 2046404 - RNA, 19 nt, Artificial Sequence
  Description of Artificial Sequence: Synthetic oligonucleotide
gcggccauccacaaaggug

SEQ ID NO: 2046405 - RNA, 19 nt, Artificial Sequence
  Description of Artificial Sequence: Synthetic oligonucleotide
cacuguuccuguggagggc

SEQ ID NO: 2046406 - RNA, 19 nt, Artificial Sequence
  Description of Artificial Sequence: Synthetic oligonucleotide
uggugucguggccuucaaa

SEQ ID NO: 2046407 - RNA, 19 nt, Artificial Sequence
  Description of Artificial Sequence: Synthetic oligonucleotide
gagggcguagaugugcaua

SEQ ID NO: 2046408 - RNA, 19 nt, Artificial Sequence
  Description of Artificial Sequence: Synthetic oligonucleotide
cagcaaacaaagggcugug

SEQ ID NO: 2046409 - RNA, 19 nt, Artificial Sequence
  Description of Artificial Sequence: Synthetic oligonucleotide
cagcacuguuccuguggag

SEQ ID NO: 2046410 - RNA, 19 nt, Artificial Sequence
  Description of Artificial Sequence: Synthetic oligonucleotide
acggcuguauacagccuug

SEQ ID NO: 2046411 - RNA, 19 nt, Artificial Sequence
  Description of Artificial Sequence: Synthetic oligonucleotide
uagucagguaggucaucuu

SEQ ID NO: 2046412 - RNA, 19 nt, Artificial Sequence
  Description of Artificial Sequence: Synthetic oligonucleotide
accguguccaggcucccua

SEQ ID NO: 2046413 - RNA, 19 nt, Artificial Sequence
  Description of Artificial Sequence: Synthetic oligonucleotide
cugcccaaugcaguuccug

SEQ ID NO: 2046414 - RNA, 19 nt, Artificial Sequence
  Description of Artificial Sequence: Synthetic oligonucleotide
uacaucgcugcuggugcuc

SEQ ID NO: 2046415 - RNA, 19 nt, Artificial Sequence
  Description of Artificial Sequence: Synthetic oligonucleotide
gcaugaaggcaaacgggug

SEQ ID NO: 2046416 - RNA, 19 nt, Artificial Sequence
  Description of Artificial Sequence: Synthetic oligonucleotide
uccucccuacaucgcugcu

SEQ ID NO: 2046417 - RNA, 19 nt, Artificial Sequence
  Description of Artificial Sequence: Synthetic oligonucleotide
ccaggauaccaccgugucc

SEQ ID NO: 2046418 - RNA, 19 nt, Artificial Sequence
  Description of Artificial Sequence: Synthetic oligonucleotide
aagcggcggccauguggag

SEQ ID NO: 2046419 - RNA, 19 nt, Artificial Sequence
  Description of Artificial Sequence: Synthetic oligonucleotide
ggucuccacggcuguauac

SEQ ID NO: 2046420 - RNA, 19 nt, Artificial Sequence
  Description of Artificial Sequence: Synthetic oligonucleotide
gccagaucgucccacugga

SEQ ID NO: 2046421 - RNA, 19 nt, Artificial Sequence
  Description of Artificial Sequence: Synthetic oligonucleotide
gacugcccgguaguagcug

SEQ ID NO: 2046422 - RNA, 19 nt, Artificial Sequence
  Description of Artificial Sequence: Synthetic oligonucleotide
ugagggauccagggagaau

SEQ ID NO: 2046423 - RNA, 19 nt, Artificial Sequence
  Description of Artificial Sequence: Synthetic oligonucleotide
caaugugagcucacugacu

SEQ ID NO: 2046424 - RNA, 19 nt, Artificial Sequence
  Description of Artificial Sequence: Synthetic oligonucleotide
acggaccuccucccuacau

SEQ ID NO: 2046425 - RNA, 19 nt, Artificial Sequence
  Description of Artificial Sequence: Synthetic oligonucleotide
uggcaaacugcugcccaau

SEQ ID NO: 2046426 - RNA, 19 nt, Artificial Sequence
  Description of Artificial Sequence: Synthetic oligonucleotide
cggaagcacuccuucauac

SEQ ID NO: 2046427 - RNA, 19 nt, Artificial Sequence
  Description of Artificial Sequence: Synthetic oligonucleotide
cugcugugucagcaaugug

SEQ ID NO: 2046428 - RNA, 19 nt, Artificial Sequence
  Description of Artificial Sequence: Synthetic oligonucleotide
cguagaugugcauagagau

SEQ ID NO: 2046429 - RNA, 19 nt, Artificial Sequence
  Description of Artificial Sequence: Synthetic oligonucleotide
agcuggcggaacacuuggg

SEQ ID NO: 2046430 - RNA, 19 nt, Artificial Sequence
  Description of Artificial Sequence: Synthetic oligonucleotide
ggauaccaccguguccagg

SEQ ID NO: 2046431 - RNA, 19 nt, Artificial Sequence
  Description of Artificial Sequence: Synthetic oligonucleotide
ccaguaaaugaagucauua

SEQ ID NO: 2046432 - RNA, 19 nt, Artificial Sequence
  Description of Artificial Sequence: Synthetic oligonucleotide
gggcauaggggaacuguug

SEQ ID NO: 2046433 - RNA, 19 nt, Artificial Sequence
  Description of Artificial Sequence: Synthetic oligonucleotide
cacuagugguggugucgug

SEQ ID NO: 2046434 - RNA, 19 nt, Artificial Sequence
  Description of Artificial Sequence: Synthetic oligonucleotide
uggaaccauuuugggccca

SEQ ID NO: 2046435 - RNA, 19 nt, Artificial Sequence
  Description of Artificial Sequence: Synthetic oligonucleotide
ggcugugaccaccuucauc

SEQ ID NO: 2046436 - RNA, 19 nt, Artificial Sequence
  Description of Artificial Sequence: Synthetic oligonucleotide
ggcgugagcagcuuucggu

SEQ ID NO: 2046437 - RNA, 19 nt, Artificial Sequence
  Description of Artificial Sequence: Synthetic oligonucleotide
accaguaaaugaagucauu

SEQ ID NO: 2046438 - RNA, 19 nt, Artificial Sequence
  Description of Artificial Sequence: Synthetic oligonucleotide
ugccuuccgcugccugaug

SEQ ID NO: 2046439 - RNA, 19 nt, Artificial Sequence
  Description of Artificial Sequence: Synthetic oligonucleotide
ggaggaaaucauacacauc

SEQ ID NO: 2046440 - RNA, 19 nt, Artificial Sequence
  Description of Artificial Sequence: Synthetic oligonucleotide
guguccaggcucccuaacu

SEQ ID NO: 2046441 - RNA, 19 nt, Artificial Sequence
  Description of Artificial Sequence: Synthetic oligonucleotide
gaacggcaugaaggcaaac

SEQ ID NO: 2046442 - RNA, 19 nt, Artificial Sequence
  Description of Artificial Sequence: Synthetic oligonucleotide
ggcccgaaggaagcggcgg

SEQ ID NO: 2046443 - RNA, 19 nt, Artificial Sequence
  Description of Artificial Sequence: Synthetic oligonucleotide
gaaccauuuugggcccauc

SEQ ID NO: 2046444 - RNA, 19 nt, Artificial Sequence
  Description of Artificial Sequence: Synthetic oligonucleotide
agcggcggccauguggagu

SEQ ID NO: 2046445 - RNA, 19 nt, Artificial Sequence
  Description of Artificial Sequence: Synthetic oligonucleotide
cagagaggaugggcauagg

SEQ ID NO: 2046446 - RNA, 19 nt, Artificial Sequence
  Description of Artificial Sequence: Synthetic oligonucleotide
ugggcccaucgagaaccag

SEQ ID NO: 2046447 - RNA, 19 nt, Artificial Sequence
  Description of Artificial Sequence: Synthetic oligonucleotide
ggaacacuuggggcacagg

SEQ ID NO: 2046448 - RNA, 19 nt, Artificial Sequence
  Description of Artificial Sequence: Synthetic oligonucleotide
gcaggcccgaaggaagcgg

SEQ ID NO: 2046449 - RNA, 19 nt, Artificial Sequence
  Description of Artificial Sequence: Synthetic oligonucleotide
cuguauggucaugagcugu

SEQ ID NO: 2046450 - RNA, 19 nt, Artificial Sequence
  Description of Artificial Sequence: Synthetic oligonucleotide
agcgagcggccauccacaa

SEQ ID NO: 2046451 - RNA, 19 nt, Artificial Sequence
  Description of Artificial Sequence: Synthetic oligonucleotide
ggauucgaugcgcugcugu

SEQ ID NO: 2046452 - RNA, 19 nt, Artificial Sequence
  Description of Artificial Sequence: Synthetic oligonucleotide
ccaggcgugagcagcuuuc

SEQ ID NO: 2046453 - RNA, 19 nt, Artificial Sequence
  Description of Artificial Sequence: Synthetic oligonucleotide
ccuaggaucucacggaccu

SEQ ID NO: 2046454 - RNA, 19 nt, Artificial Sequence
  Description of Artificial Sequence: Synthetic oligonucleotide
cgcaaugggucaaagaccu

SEQ ID NO: 2046455 - RNA, 19 nt, Artificial Sequence
  Description of Artificial Sequence: Synthetic oligonucleotide
cccuacaucgcugcuggug

SEQ ID NO: 2046456 - RNA, 19 nt, Artificial Sequence
  Description of Artificial Sequence: Synthetic oligonucleotide
aggauucgaugcgcugcug

SEQ ID NO: 2046457 - RNA, 19 nt, Artificial Sequence
  Description of Artificial Sequence: Synthetic oligonucleotide
ccacuggaaggaguccugg

SEQ ID NO: 2046458 - RNA, 19 nt, Artificial Sequence
  Description of Artificial Sequence: Synthetic oligonucleotide
ugaccaccuucaucucguu

SEQ ID NO: 2046459 - RNA, 19 nt, Artificial Sequence
  Description of Artificial Sequence: Synthetic oligonucleotide
cuguugggaccaggauacc

SEQ ID NO: 2046460 - RNA, 19 nt, Artificial Sequence
  Description of Artificial Sequence: Synthetic oligonucleotide
gguacuggaaggauucgau

SEQ ID NO: 2046461 - RNA, 19 nt, Artificial Sequence
  Description of Artificial Sequence: Synthetic oligonucleotide
cagguagcgagcggccauc

SEQ ID NO: 2046462 - RNA, 19 nt, Artificial Sequence
  Description of Artificial Sequence: Synthetic oligonucleotide
ggcguccugucacauucuc

SEQ ID NO: 2046463 - RNA, 19 nt, Artificial Sequence
  Description of Artificial Sequence: Synthetic oligonucleotide
ggccuaggccacugucucc

SEQ ID NO: 2046464 - RNA, 19 nt, Artificial Sequence
  Description of Artificial Sequence: Synthetic oligonucleotide
gugcaccaguaaaugaagu

SEQ ID NO: 2046465 - RNA, 19 nt, Artificial Sequence
  Description of Artificial Sequence: Synthetic oligonucleotide
gcccgaaggaagcggcggc

SEQ ID NO: 2046466 - RNA, 19 nt, Artificial Sequence
  Description of Artificial Sequence: Synthetic oligonucleotide
gcagcuuucggugcuggaa

SEQ ID NO: 2046467 - RNA, 19 nt, Artificial Sequence
  Description of Artificial Sequence: Synthetic oligonucleotide
cgcagcaaacaaagggcug

SEQ ID NO: 2046468 - RNA, 19 nt, Artificial Sequence
  Description of Artificial Sequence: Synthetic oligonucleotide
ggcuucagcacaucauaau

SEQ ID NO: 2046469 - RNA, 19 nt, Artificial Sequence
  Description of Artificial Sequence: Synthetic oligonucleotide
cugcugcccaaugcaguuc

SEQ ID NO: 2046470 - RNA, 19 nt, Artificial Sequence
  Description of Artificial Sequence: Synthetic oligonucleotide
guggccuaggccacugucu

SEQ ID NO: 2046471 - RNA, 19 nt, Artificial Sequence
  Description of Artificial Sequence: Synthetic oligonucleotide
ucccuacaucgcugcuggu

SEQ ID NO: 2046472 - RNA, 19 nt, Artificial Sequence
  Description of Artificial Sequence: Synthetic oligonucleotide
cacggcuguauacagccuu

SEQ ID NO: 2046473 - RNA, 19 nt, Artificial Sequence
  Description of Artificial Sequence: Synthetic oligonucleotide
cccaagccacuggaggagg

SEQ ID NO: 2046474 - RNA, 19 nt, Artificial Sequence
  Description of Artificial Sequence: Synthetic oligonucleotide
cagcaaauauggccacaua

SEQ ID NO: 2046475 - RNA, 19 nt, Artificial Sequence
  Description of Artificial Sequence: Synthetic oligonucleotide
aggaagcggcggccaugug

SEQ ID NO: 2046476 - RNA, 19 nt, Artificial Sequence
  Description of Artificial Sequence: Synthetic oligonucleotide
ugcuggugcucaggauaaa

SEQ ID NO: 2046477 - RNA, 19 nt, Artificial Sequence
  Description of Artificial Sequence: Synthetic oligonucleotide
ccaacccagagaggauggg

SEQ ID NO: 2046478 - RNA, 19 nt, Artificial Sequence
  Description of Artificial Sequence: Synthetic oligonucleotide
auauggccacauagggcuu

SEQ ID NO: 2046479 - RNA, 19 nt, Artificial Sequence
  Description of Artificial Sequence: Synthetic oligonucleotide
ccucccuacaucgcugcug

SEQ ID NO: 2046480 - RNA, 19 nt, Artificial Sequence
  Description of Artificial Sequence: Synthetic oligonucleotide
cacugucuccuuugcgugu

SEQ ID NO: 2046481 - RNA, 19 nt, Artificial Sequence
  Description of Artificial Sequence: Synthetic oligonucleotide
cacuggaaggaguccuggu

SEQ ID NO: 2046482 - RNA, 19 nt, Artificial Sequence
  Description of Artificial Sequence: Synthetic oligonucleotide
gggaccaggauaccaccgu

SEQ ID NO: 2046483 - RNA, 19 nt, Artificial Sequence
  Description of Artificial Sequence: Synthetic oligonucleotide
ccugaugaccugaucugua

SEQ ID NO: 2046484 - RNA, 19 nt, Artificial Sequence
  Description of Artificial Sequence: Synthetic oligonucleotide
ggcccaucgagaaccagua

SEQ ID NO: 2046485 - RNA, 19 nt, Artificial Sequence
  Description of Artificial Sequence: Synthetic oligonucleotide
cuacaucgcugcuggugcu

SEQ ID NO: 2046486 - RNA, 19 nt, Artificial Sequence
  Description of Artificial Sequence: Synthetic oligonucleotide
gcuuucggugcuggaacca

SEQ ID NO: 2046487 - RNA, 19 nt, Artificial Sequence
  Description of Artificial Sequence: Synthetic oligonucleotide
gccacuggaggaggaaauc

SEQ ID NO: 2046488 - RNA, 19 nt, Artificial Sequence
  Description of Artificial Sequence: Synthetic oligonucleotide
caaacggguggcguccugu

SEQ ID NO: 2046489 - RNA, 19 nt, Artificial Sequence
  Description of Artificial Sequence: Synthetic oligonucleotide
gguagcgagcggccaucca

SEQ ID NO: 2046490 - RNA, 19 nt, Artificial Sequence
  Description of Artificial Sequence: Synthetic oligonucleotide
ggcucccuaacuucuggau

SEQ ID NO: 2046491 - RNA, 19 nt, Artificial Sequence
  Description of Artificial Sequence: Synthetic oligonucleotide
cccgaaggaagcggcggcc

SEQ ID NO: 2046492 - RNA, 19 nt, Artificial Sequence
  Description of Artificial Sequence: Synthetic oligonucleotide
gcaaacggguggcguccug

SEQ ID NO: 2046493 - RNA, 19 nt, Artificial Sequence
  Description of Artificial Sequence: Synthetic oligonucleotide
agucaggcucauagauguu

SEQ ID NO: 2046494 - RNA, 19 nt, Artificial Sequence
  Description of Artificial Sequence: Synthetic oligonucleotide
gccuucaaacaugggaagu

SEQ ID NO: 2046495 - RNA, 19 nt, Artificial Sequence
  Description of Artificial Sequence: Synthetic oligonucleotide
cuguugucucuguggccua

SEQ ID NO: 2046496 - RNA, 19 nt, Artificial Sequence
  Description of Artificial Sequence: Synthetic oligonucleotide
cuuucggugcuggaaccau

SEQ ID NO: 2046497 - RNA, 19 nt, Artificial Sequence
  Description of Artificial Sequence: Synthetic oligonucleotide
gcggaagcacuccuucaua

SEQ ID NO: 2046498 - RNA, 19 nt, Artificial Sequence
  Description of Artificial Sequence: Synthetic oligonucleotide
guggugucguggccuucaa

SEQ ID NO: 2046499 - RNA, 19 nt, Artificial Sequence
  Description of Artificial Sequence: Synthetic oligonucleotide
cggaccuccucccuacauc

SEQ ID NO: 2046500 - RNA, 19 nt, Artificial Sequence
  Description of Artificial Sequence: Synthetic oligonucleotide
ggccccgcagagaacggca

SEQ ID NO: 2046501 - RNA, 19 nt, Artificial Sequence
  Description of Artificial Sequence: Synthetic oligonucleotide
ggguagaggcggaagcacu

SEQ ID NO: 2046502 - RNA, 19 nt, Artificial Sequence
  Description of Artificial Sequence: Synthetic oligonucleotide
gggccaugcaguagagaaa

SEQ ID NO: 2046503 - RNA, 19 nt, Artificial Sequence
  Description of Artificial Sequence: Synthetic oligonucleotide
gcguccugucacauucuca

SEQ ID NO: 2046504 - RNA, 19 nt, Artificial Sequence
  Description of Artificial Sequence: Synthetic oligonucleotide
ccuuugcguguggauucag

SEQ ID NO: 2046505 - RNA, 19 nt, Artificial Sequence
  Description of Artificial Sequence: Synthetic oligonucleotide
ccgguaguagcuguugucu

SEQ ID NO: 2046506 - RNA, 19 nt, Artificial Sequence
  Description of Artificial Sequence: Synthetic oligonucleotide
cacggaccuccucccuaca

SEQ ID NO: 2046507 - RNA, 19 nt, Artificial Sequence
  Description of Artificial Sequence: Synthetic oligonucleotide
caggccacacagcacuguu

SEQ ID NO: 2046508 - RNA, 19 nt, Artificial Sequence
  Description of Artificial Sequence: Synthetic oligonucleotide
gggccccgcagagaacggc

SEQ ID NO: 2046509 - RNA, 19 nt, Artificial Sequence
  Description of Artificial Sequence: Synthetic oligonucleotide
cuaggccacugucuccuuu

SEQ ID NO: 2046510 - RNA, 19 nt, Artificial Sequence
  Description of Artificial Sequence: Synthetic oligonucleotide
ccccgcagagaacggcaug

SEQ ID NO: 2046511 - RNA, 19 nt, Artificial Sequence
  Description of Artificial Sequence: Synthetic oligonucleotide
cacugacugcccgguagua

SEQ ID NO: 2046512 - RNA, 19 nt, Artificial Sequence
  Description of Artificial Sequence: Synthetic oligonucleotide
cguguccaggcucccuaac

SEQ ID NO: 2046513 - RNA, 19 nt, Artificial Sequence
  Description of Artificial Sequence: Synthetic oligonucleotide
gcggccauguggagugcac

SEQ ID NO: 2046514 - RNA, 19 nt, Artificial Sequence
  Description of Artificial Sequence: Synthetic oligonucleotide
cggaacacuuggggcacag

SEQ ID NO: 2046515 - RNA, 19 nt, Artificial Sequence
  Description of Artificial Sequence: Synthetic oligonucleotide
gcccaucgagaaccaguaa

SEQ ID NO: 2046516 - RNA, 19 nt, Artificial Sequence
  Description of Artificial Sequence: Synthetic oligonucleotide
ccacaaaggugacuggcuu

SEQ ID NO: 2046517 - RNA, 19 nt, Artificial Sequence
  Description of Artificial Sequence: Synthetic oligonucleotide
cagguggguagaggcggaa

SEQ ID NO: 2046518 - RNA, 19 nt, Artificial Sequence
  Description of Artificial Sequence: Synthetic oligonucleotide
ggugccuccgcugcuggau

SEQ ID NO: 2046519 - RNA, 19 nt, Artificial Sequence
  Description of Artificial Sequence: Synthetic oligonucleotide
cugccuuccgcugccugau

SEQ ID NO: 2046520 - RNA, 19 nt, Artificial Sequence
  Description of Artificial Sequence: Synthetic oligonucleotide
ccacuagugguggugucgu

SEQ ID NO: 2046521 - RNA, 19 nt, Artificial Sequence
  Description of Artificial Sequence: Synthetic oligonucleotide
ggaaccauuuugggcccau

SEQ ID NO: 2046522 - RNA, 19 nt, Artificial Sequence
  Description of Artificial Sequence: Synthetic oligonucleotide
gguggcguccugucacauu

SEQ ID NO: 2046523 - RNA, 19 nt, Artificial Sequence
  Description of Artificial Sequence: Synthetic oligonucleotide
gcgagcggccauccacaaa

SEQ ID NO: 2046524 - RNA, 19 nt, Artificial Sequence
  Description of Artificial Sequence: Synthetic oligonucleotide
ccuuggggucuccacggcu

SEQ ID NO: 2046525 - RNA, 19 nt, Artificial Sequence
  Description of Artificial Sequence: Synthetic oligonucleotide
ggagggcguagaugugcau

SEQ ID NO: 2046526 - RNA, 19 nt, Artificial Sequence
  Description of Artificial Sequence: Synthetic oligonucleotide
cugcccgguaguagcuguu

SEQ ID NO: 2046527 - RNA, 19 nt, Artificial Sequence
  Description of Artificial Sequence: Synthetic oligonucleotide
gcgcugcugugucagcaau

SEQ ID NO: 2046528 - RNA, 19 nt, Artificial Sequence
  Description of Artificial Sequence: Synthetic oligonucleotide
ccguguccaggcucccuaa

SEQ ID NO: 2046529 - RNA, 19 nt, Artificial Sequence
  Description of Artificial Sequence: Synthetic oligonucleotide
gcguguggauucagcaaau

SEQ ID NO: 2046530 - RNA, 19 nt, Artificial Sequence
  Description of Artificial Sequence: Synthetic oligonucleotide
ggcaaacggguggcguccu

SEQ ID NO: 2046531 - RNA, 19 nt, Artificial Sequence
  Description of Artificial Sequence: Synthetic oligonucleotide
gccaggcgugagcagcuuu

SEQ ID NO: 2046532 - RNA, 19 nt, Artificial Sequence
  Description of Artificial Sequence: Synthetic oligonucleotide
caccguguccaggcucccu

SEQ ID NO: 2046533 - RNA, 19 nt, Artificial Sequence
  Description of Artificial Sequence: Synthetic oligonucleotide
gcugucuggcaggcccgaa

SEQ ID NO: 2046534 - RNA, 19 nt, Artificial Sequence
  Description of Artificial Sequence: Synthetic oligonucleotide
gcacuccuucauacacaua

SEQ ID NO: 2046535 - RNA, 19 nt, Artificial Sequence
  Description of Artificial Sequence: Synthetic oligonucleotide
cggguggcguccugucaca

SEQ ID NO: 2046536 - RNA, 19 nt, Artificial Sequence
  Description of Artificial Sequence: Synthetic oligonucleotide
ccgcagagaacggcaugaa

SEQ ID NO: 2046537 - RNA, 19 nt, Artificial Sequence
  Description of Artificial Sequence: Synthetic oligonucleotide
ccacggcuguauacagccu

SEQ ID NO: 2046538 - RNA, 19 nt, Artificial Sequence
  Description of Artificial Sequence: Synthetic oligonucleotide
gccccgcagagaacggcau

SEQ ID NO: 2046539 - RNA, 19 nt, Artificial Sequence
  Description of Artificial Sequence: Synthetic oligonucleotide
ccuaggccacugucuccuu

SEQ ID NO: 2046540 - RNA, 19 nt, Artificial Sequence
  Description of Artificial Sequence: Synthetic oligonucleotide
ccuccgcugcuggaucuuu

SEQ ID NO: 2046541 - RNA, 19 nt, Artificial Sequence
  Description of Artificial Sequence: Synthetic oligonucleotide
aauaacauaacuuuaagcu

SEQ ID NO: 2046542 - RNA, 19 nt, Artificial Sequence
  Description of Artificial Sequence: Synthetic oligonucleotide
aauaaaucaaacuggaaug

SEQ ID NO: 2046543 - RNA, 19 nt, Artificial Sequence
  Description of Artificial Sequence: Synthetic oligonucleotide
aaauccaacgaauuguacc

SEQ ID NO: 2046544 - RNA, 19 nt, Artificial Sequence
  Description of Artificial Sequence: Synthetic oligonucleotide
aauauaucauaaauaaagc

SEQ ID NO: 2046545 - RNA, 19 nt, Artificial Sequence
  Description of Artificial Sequence: Synthetic oligonucleotide
aaauaaaucaaacuggaau

SEQ ID NO: 2046546 - RNA, 19 nt, Artificial Sequence
  Description of Artificial Sequence: Synthetic oligonucleotide
aaguuuaaaaugcugagug

SEQ ID NO: 2046547 - RNA, 19 nt, Artificial Sequence
  Description of Artificial Sequence: Synthetic oligonucleotide
caagaguuaauacugaugg

SEQ ID NO: 2046548 - RNA, 19 nt, Artificial Sequence
  Description of Artificial Sequence: Synthetic oligonucleotide
uuuaagcugaaauauauca

SEQ ID NO: 2046549 - RNA, 19 nt, Artificial Sequence
  Description of Artificial Sequence: Synthetic oligonucleotide
aacagucuagauuauguac

SEQ ID NO: 2046550 - RNA, 19 nt, Artificial Sequence
  Description of Artificial Sequence: Synthetic oligonucleotide
uggauuuaggcaaagauug

SEQ ID NO: 2046551 - RNA, 19 nt, Artificial Sequence
  Description of Artificial Sequence: Synthetic oligonucleotide
aauguguuaaucuucaaaa

SEQ ID NO: 2046552 - RNA, 19 nt, Artificial Sequence
  Description of Artificial Sequence: Synthetic oligonucleotide
ucuuaauaaaagauucugg

SEQ ID NO: 2046553 - RNA, 19 nt, Artificial Sequence
  Description of Artificial Sequence: Synthetic oligonucleotide
uuugcuaaacccaugaacu

SEQ ID NO: 2046554 - RNA, 19 nt, Artificial Sequence
  Description of Artificial Sequence: Synthetic oligonucleotide
uguugaauaaacucaaggc

SEQ ID NO: 2046555 - RNA, 19 nt, Artificial Sequence
  Description of Artificial Sequence: Synthetic oligonucleotide
uuuacauccacauauaaua

SEQ ID NO: 2046556 - RNA, 19 nt, Artificial Sequence
  Description of Artificial Sequence: Synthetic oligonucleotide
cuagauuauguacauaugg

SEQ ID NO: 2046557 - RNA, 19 nt, Artificial Sequence
  Description of Artificial Sequence: Synthetic oligonucleotide
uauacagagguccagaggu

SEQ ID NO: 2046558 - RNA, 19 nt, Artificial Sequence
  Description of Artificial Sequence: Synthetic oligonucleotide
aaacucaaggcaucaaagg

SEQ ID NO: 2046559 - RNA, 19 nt, Artificial Sequence
  Description of Artificial Sequence: Synthetic oligonucleotide
uguacuguugccucaaagg

SEQ ID NO: 2046560 - RNA, 19 nt, Artificial Sequence
  Description of Artificial Sequence: Synthetic oligonucleotide
uuaagugucaacaauuaaa

SEQ ID NO: 2046561 - RNA, 19 nt, Artificial Sequence
  Description of Artificial Sequence: Synthetic oligonucleotide
uaacauaacuuuaagcuga

SEQ ID NO: 2046562 - RNA, 19 nt, Artificial Sequence
  Description of Artificial Sequence: Synthetic oligonucleotide
gauugagucaaucaucuug

SEQ ID NO: 2046563 - RNA, 19 nt, Artificial Sequence
  Description of Artificial Sequence: Synthetic oligonucleotide
aauccaacgaauuguaccu

SEQ ID NO: 2046564 - RNA, 19 nt, Artificial Sequence
  Description of Artificial Sequence: Synthetic oligonucleotide
ucaaucaucuugcaaaugu

SEQ ID NO: 2046565 - RNA, 19 nt, Artificial Sequence
  Description of Artificial Sequence: Synthetic oligonucleotide
auauaucauaaauaaagca

SEQ ID NO: 2046566 - RNA, 19 nt, Artificial Sequence
  Description of Artificial Sequence: Synthetic oligonucleotide
uaaacucaaggcaucaaag

SEQ ID NO: 2046567 - RNA, 19 nt, Artificial Sequence
  Description of Artificial Sequence: Synthetic oligonucleotide
aaaaccucgagcuuccugu

SEQ ID NO: 2046568 - RNA, 19 nt, Artificial Sequence
  Description of Artificial Sequence: Synthetic oligonucleotide
uagauuauguacauauggc

SEQ ID NO: 2046569 - RNA, 19 nt, Artificial Sequence
  Description of Artificial Sequence: Synthetic oligonucleotide
uccccuucaacacaggagg

SEQ ID NO: 2046570 - RNA, 19 nt, Artificial Sequence
  Description of Artificial Sequence: Synthetic oligonucleotide
aagaguuaauacugauggc

SEQ ID NO: 2046571 - RNA, 19 nt, Artificial Sequence
  Description of Artificial Sequence: Synthetic oligonucleotide
agugucaacaauuaaaaua

SEQ ID NO: 2046572 - RNA, 19 nt, Artificial Sequence
  Description of Artificial Sequence: Synthetic oligonucleotide
aacgaauuguaccucuauc

SEQ ID NO: 2046573 - RNA, 19 nt, Artificial Sequence
  Description of Artificial Sequence: Synthetic oligonucleotide
aaaagugcagaaccuaaca

SEQ ID NO: 2046574 - RNA, 19 nt, Artificial Sequence
  Description of Artificial Sequence: Synthetic oligonucleotide
uuaaaaugcugagugaacc

SEQ ID NO: 2046575 - RNA, 19 nt, Artificial Sequence
  Description of Artificial Sequence: Synthetic oligonucleotide
guugaauaaacucaaggca

SEQ ID NO: 2046576 - RNA, 19 nt, Artificial Sequence
  Description of Artificial Sequence: Synthetic oligonucleotide
agucugacaacuuaagugu

SEQ ID NO: 2046577 - RNA, 19 nt, Artificial Sequence
  Description of Artificial Sequence: Synthetic oligonucleotide
ugagugaaccagcuggugg

SEQ ID NO: 2046578 - RNA, 19 nt, Artificial Sequence
  Description of Artificial Sequence: Synthetic oligonucleotide
uguccuaccaagaggggcg

SEQ ID NO: 2046579 - RNA, 19 nt, Artificial Sequence
  Description of Artificial Sequence: Synthetic oligonucleotide
cuguugaauaaacucaagg

SEQ ID NO: 2046580 - RNA, 19 nt, Artificial Sequence
  Description of Artificial Sequence: Synthetic oligonucleotide
gcuauaaaagugcagaacc

SEQ ID NO: 2046581 - RNA, 19 nt, Artificial Sequence
  Description of Artificial Sequence: Synthetic oligonucleotide
agauuauguacauauggcu

SEQ ID NO: 2046582 - RNA, 19 nt, Artificial Sequence
  Description of Artificial Sequence: Synthetic oligonucleotide
uuuaggcaaagauugaguc

SEQ ID NO: 2046583 - RNA, 19 nt, Artificial Sequence
  Description of Artificial Sequence: Synthetic oligonucleotide
uuauacagagguccagagg

SEQ ID NO: 2046584 - RNA, 19 nt, Artificial Sequence
  Description of Artificial Sequence: Synthetic oligonucleotide
aaaacagucuagauuaugu

SEQ ID NO: 2046585 - RNA, 19 nt, Artificial Sequence
  Description of Artificial Sequence: Synthetic oligonucleotide
ucaaagggaagacacacaa

SEQ ID NO: 2046586 - RNA, 19 nt, Artificial Sequence
  Description of Artificial Sequence: Synthetic oligonucleotide
gaacucaaguuuaaaaugc

SEQ ID NO: 2046587 - RNA, 19 nt, Artificial Sequence
  Description of Artificial Sequence: Synthetic oligonucleotide
uaucccaagaguuaauacu

SEQ ID NO: 2046588 - RNA, 19 nt, Artificial Sequence
  Description of Artificial Sequence: Synthetic oligonucleotide
guacuguugccucaaaggg

SEQ ID NO: 2046589 - RNA, 19 nt, Artificial Sequence
  Description of Artificial Sequence: Synthetic oligonucleotide
cacucugaugguaacagcg

SEQ ID NO: 2046590 - RNA, 19 nt, Artificial Sequence
  Description of Artificial Sequence: Synthetic oligonucleotide
cacaaagccaguaguaucc

SEQ ID NO: 2046591 - RNA, 19 nt, Artificial Sequence
  Description of Artificial Sequence: Synthetic oligonucleotide
acugauggcaagaacacac

SEQ ID NO: 2046592 - RNA, 19 nt, Artificial Sequence
  Description of Artificial Sequence: Synthetic oligonucleotide
auacaaacacacugucugc

SEQ ID NO: 2046593 - RNA, 19 nt, Artificial Sequence
  Description of Artificial Sequence: Synthetic oligonucleotide
aaccuaacaaaacagucua

SEQ ID NO: 2046594 - RNA, 19 nt, Artificial Sequence
  Description of Artificial Sequence: Synthetic oligonucleotide
gaauguucuguguccaggg

SEQ ID NO: 2046595 - RNA, 19 nt, Artificial Sequence
  Description of Artificial Sequence: Synthetic oligonucleotide
aaggaacucaaguuuaaaa

SEQ ID NO: 2046596 - RNA, 19 nt, Artificial Sequence
  Description of Artificial Sequence: Synthetic oligonucleotide
aauuguaccucuaucacau

SEQ ID NO: 2046597 - RNA, 19 nt, Artificial Sequence
  Description of Artificial Sequence: Synthetic oligonucleotide
cagucugacaacuuaagug

SEQ ID NO: 2046598 - RNA, 19 nt, Artificial Sequence
  Description of Artificial Sequence: Synthetic oligonucleotide
aaaaugcugagugaaccag

SEQ ID NO: 2046599 - RNA, 19 nt, Artificial Sequence
  Description of Artificial Sequence: Synthetic oligonucleotide
uuuaaaaugcugagugaac

SEQ ID NO: 2046600 - RNA, 19 nt, Artificial Sequence
  Description of Artificial Sequence: Synthetic oligonucleotide
acgaauuguaccucuauca

SEQ ID NO: 2046601 - RNA, 19 nt, Artificial Sequence
  Description of Artificial Sequence: Synthetic oligonucleotide
cuuguggacgggaacaggg

SEQ ID NO: 2046602 - RNA, 19 nt, Artificial Sequence
  Description of Artificial Sequence: Synthetic oligonucleotide
ucuaucacauguacuguug

SEQ ID NO: 2046603 - RNA, 19 nt, Artificial Sequence
  Description of Artificial Sequence: Synthetic oligonucleotide
aaagugcagaaccuaacaa

SEQ ID NO: 2046604 - RNA, 19 nt, Artificial Sequence
  Description of Artificial Sequence: Synthetic oligonucleotide
aaucccaaacugccugggc

SEQ ID NO: 2046605 - RNA, 19 nt, Artificial Sequence
  Description of Artificial Sequence: Synthetic oligonucleotide
uuaagcugaaauauaucau

SEQ ID NO: 2046606 - RNA, 19 nt, Artificial Sequence
  Description of Artificial Sequence: Synthetic oligonucleotide
agcucaaagccccuccugc

SEQ ID NO: 2046607 - RNA, 19 nt, Artificial Sequence
  Description of Artificial Sequence: Synthetic oligonucleotide
uaacuuuaagcugaaauau

SEQ ID NO: 2046608 - RNA, 19 nt, Artificial Sequence
  Description of Artificial Sequence: Synthetic oligonucleotide
agaaccuaacaaaacaguc

SEQ ID NO: 2046609 - RNA, 19 nt, Artificial Sequence
  Description of Artificial Sequence: Synthetic oligonucleotide
aaaugcugagugaaccagc

SEQ ID NO: 2046610 - RNA, 19 nt, Artificial Sequence
  Description of Artificial Sequence: Synthetic oligonucleotide
uguacacgguuccugauac

SEQ ID NO: 2046611 - RNA, 19 nt, Artificial Sequence
  Description of Artificial Sequence: Synthetic oligonucleotide
aaggagaccgagcagugca

SEQ ID NO: 2046612 - RNA, 19 nt, Artificial Sequence
  Description of Artificial Sequence: Synthetic oligonucleotide
gacaacuuaagugucaaca

SEQ ID NO: 2046613 - RNA, 19 nt, Artificial Sequence
  Description of Artificial Sequence: Synthetic oligonucleotide
cuuuuguccuaccaagagg

SEQ ID NO: 2046614 - RNA, 19 nt, Artificial Sequence
  Description of Artificial Sequence: Synthetic oligonucleotide
gauuauguacauauggcuc

SEQ ID NO: 2046615 - RNA, 19 nt, Artificial Sequence
  Description of Artificial Sequence: Synthetic oligonucleotide
guuugcuaaacccaugaac

SEQ ID NO: 2046616 - RNA, 19 nt, Artificial Sequence
  Description of Artificial Sequence: Synthetic oligonucleotide
accagguccacaguuauac

SEQ ID NO: 2046617 - RNA, 19 nt, Artificial Sequence
  Description of Artificial Sequence: Synthetic oligonucleotide
ucaaaggaacucaaguuua

SEQ ID NO: 2046618 - RNA, 19 nt, Artificial Sequence
  Description of Artificial Sequence: Synthetic oligonucleotide
acacaaagccaguaguauc

SEQ ID NO: 2046619 - RNA, 19 nt, Artificial Sequence
  Description of Artificial Sequence: Synthetic oligonucleotide
aucaaaggaacucaaguuu

SEQ ID NO: 2046620 - RNA, 19 nt, Artificial Sequence
  Description of Artificial Sequence: Synthetic oligonucleotide
ugaauaaacucaaggcauc

SEQ ID NO: 2046621 - RNA, 19 nt, Artificial Sequence
  Description of Artificial Sequence: Synthetic oligonucleotide
ugccguugggcccagaaug

SEQ ID NO: 2046622 - RNA, 19 nt, Artificial Sequence
  Description of Artificial Sequence: Synthetic oligonucleotide
uucuggguuugcuaaaccc

SEQ ID NO: 2046623 - RNA, 19 nt, Artificial Sequence
  Description of Artificial Sequence: Synthetic oligonucleotide
ggaacucaaguuuaaaaug

SEQ ID NO: 2046624 - RNA, 19 nt, Artificial Sequence
  Description of Artificial Sequence: Synthetic oligonucleotide
agcagacacgucucaaccc

SEQ ID NO: 2046625 - RNA, 19 nt, Artificial Sequence
  Description of Artificial Sequence: Synthetic oligonucleotide
auagcugcugauacgacac

SEQ ID NO: 2046626 - RNA, 19 nt, Artificial Sequence
  Description of Artificial Sequence: Synthetic oligonucleotide
uaaaagugcagaaccuaac

SEQ ID NO: 2046627 - RNA, 19 nt, Artificial Sequence
  Description of Artificial Sequence: Synthetic oligonucleotide
aaacccaugaacuguugaa

SEQ ID NO: 2046628 - RNA, 19 nt, Artificial Sequence
  Description of Artificial Sequence: Synthetic oligonucleotide
augucuacagucugacaac

SEQ ID NO: 2046629 - RNA, 19 nt, Artificial Sequence
  Description of Artificial Sequence: Synthetic oligonucleotide
ucugcaagagcagacacgu

SEQ ID NO: 2046630 - RNA, 19 nt, Artificial Sequence
  Description of Artificial Sequence: Synthetic oligonucleotide
aacagcgaggugauacucc

SEQ ID NO: 2046631 - RNA, 19 nt, Artificial Sequence
  Description of Artificial Sequence: Synthetic oligonucleotide
guuauacagagguccagag

SEQ ID NO: 2046632 - RNA, 19 nt, Artificial Sequence
  Description of Artificial Sequence: Synthetic oligonucleotide
uuacauccacauauaauaa

SEQ ID NO: 2046633 - RNA, 19 nt, Artificial Sequence
  Description of Artificial Sequence: Synthetic oligonucleotide
ugauacaaacacacugucu

SEQ ID NO: 2046634 - RNA, 19 nt, Artificial Sequence
  Description of Artificial Sequence: Synthetic oligonucleotide
ucuacagucugacaacuua

SEQ ID NO: 2046635 - RNA, 19 nt, Artificial Sequence
  Description of Artificial Sequence: Synthetic oligonucleotide
aacagggccuaguguacac

SEQ ID NO: 2046636 - RNA, 19 nt, Artificial Sequence
  Description of Artificial Sequence: Synthetic oligonucleotide
auaaacucaaggcaucaaa

SEQ ID NO: 2046637 - RNA, 19 nt, Artificial Sequence
  Description of Artificial Sequence: Synthetic oligonucleotide
caugaacuguugaauaaac

SEQ ID NO: 2046638 - RNA, 19 nt, Artificial Sequence
  Description of Artificial Sequence: Synthetic oligonucleotide
ucugacaacuuaaguguca

SEQ ID NO: 2046639 - RNA, 19 nt, Artificial Sequence
  Description of Artificial Sequence: Synthetic oligonucleotide
cuuccuguacacucgcugg

SEQ ID NO: 2046640 - RNA, 19 nt, Artificial Sequence
  Description of Artificial Sequence: Synthetic oligonucleotide
ugauggcaagaacacacug

SEQ ID NO: 2046641 - RNA, 19 nt, Artificial Sequence
  Description of Artificial Sequence: Synthetic oligonucleotide
uaaacccaugaacuguuga

SEQ ID NO: 2046642 - RNA, 19 nt, Artificial Sequence
  Description of Artificial Sequence: Synthetic oligonucleotide
gagugaaccagcugguggc

SEQ ID NO: 2046643 - RNA, 19 nt, Artificial Sequence
  Description of Artificial Sequence: Synthetic oligonucleotide
agcagcacaggugaugggc

SEQ ID NO: 2046644 - RNA, 19 nt, Artificial Sequence
  Description of Artificial Sequence: Synthetic oligonucleotide
uacauccacauauaauaac

SEQ ID NO: 2046645 - RNA, 19 nt, Artificial Sequence
  Description of Artificial Sequence: Synthetic oligonucleotide
aauaggcuauaaaagugca

SEQ ID NO: 2046646 - RNA, 19 nt, Artificial Sequence
  Description of Artificial Sequence: Synthetic oligonucleotide
aaacagucuagauuaugua

SEQ ID NO: 2046647 - RNA, 19 nt, Artificial Sequence
  Description of Artificial Sequence: Synthetic oligonucleotide
uaucacauguacuguugcc

SEQ ID NO: 2046648 - RNA, 19 nt, Artificial Sequence
  Description of Artificial Sequence: Synthetic oligonucleotide
ggcgcacacacucugaugg

SEQ ID NO: 2046649 - RNA, 19 nt, Artificial Sequence
  Description of Artificial Sequence: Synthetic oligonucleotide
auguacauauggcucagcu

SEQ ID NO: 2046650 - RNA, 19 nt, Artificial Sequence
  Description of Artificial Sequence: Synthetic oligonucleotide
uuggggagcucaaagcccc

SEQ ID NO: 2046651 - RNA, 19 nt, Artificial Sequence
  Description of Artificial Sequence: Synthetic oligonucleotide
cagguccacaguuauacag

SEQ ID NO: 2046652 - RNA, 19 nt, Artificial Sequence
  Description of Artificial Sequence: Synthetic oligonucleotide
caugucuacagucugacaa

SEQ ID NO: 2046653 - RNA, 19 nt, Artificial Sequence
  Description of Artificial Sequence: Synthetic oligonucleotide
acaacuuaagugucaacaa

SEQ ID NO: 2046654 - RNA, 19 nt, Artificial Sequence
  Description of Artificial Sequence: Synthetic oligonucleotide
uguggacgggaacagggcc

SEQ ID NO: 2046655 - RNA, 19 nt, Artificial Sequence
  Description of Artificial Sequence: Synthetic oligonucleotide
acccuuuuguccuaccaag

SEQ ID NO: 2046656 - RNA, 19 nt, Artificial Sequence
  Description of Artificial Sequence: Synthetic oligonucleotide
cuuuaagcugaaauauauc

SEQ ID NO: 2046657 - RNA, 19 nt, Artificial Sequence
  Description of Artificial Sequence: Synthetic oligonucleotide
agaacacacugugaaguac

SEQ ID NO: 2046658 - RNA, 19 nt, Artificial Sequence
  Description of Artificial Sequence: Synthetic oligonucleotide
uggauagcugcugauacga

SEQ ID NO: 2046659 - RNA, 19 nt, Artificial Sequence
  Description of Artificial Sequence: Synthetic oligonucleotide
aagggucggggcuggcucc

SEQ ID NO: 2046660 - RNA, 19 nt, Artificial Sequence
  Description of Artificial Sequence: Synthetic oligonucleotide
ugagucaaucaucuugcaa

SEQ ID NO: 2046661 - RNA, 19 nt, Artificial Sequence
  Description of Artificial Sequence: Synthetic oligonucleotide
acuuuaagcugaaauauau

SEQ ID NO: 2046662 - RNA, 19 nt, Artificial Sequence
  Description of Artificial Sequence: Synthetic oligonucleotide
ucaucuugcaaauguguua

SEQ ID NO: 2046663 - RNA, 19 nt, Artificial Sequence
  Description of Artificial Sequence: Synthetic oligonucleotide
acagucuagauuauguaca

SEQ ID NO: 2046664 - RNA, 19 nt, Artificial Sequence
  Description of Artificial Sequence: Synthetic oligonucleotide
ugcugauacgacacaggcc

SEQ ID NO: 2046665 - RNA, 19 nt, Artificial Sequence
  Description of Artificial Sequence: Synthetic oligonucleotide
aacuguugaauaaacucaa

SEQ ID NO: 2046666 - RNA, 19 nt, Artificial Sequence
  Description of Artificial Sequence: Synthetic oligonucleotide
uacaaagggcuguuuaaaa

SEQ ID NO: 2046667 - RNA, 19 nt, Artificial Sequence
  Description of Artificial Sequence: Synthetic oligonucleotide
aaccucgagcuuccuguac

SEQ ID NO: 2046668 - RNA, 19 nt, Artificial Sequence
  Description of Artificial Sequence: Synthetic oligonucleotide
acucgcuggauuuaggcaa

SEQ ID NO: 2046669 - RNA, 19 nt, Artificial Sequence
  Description of Artificial Sequence: Synthetic oligonucleotide
agcaugucuacagucugac

SEQ ID NO: 2046670 - RNA, 19 nt, Artificial Sequence
  Description of Artificial Sequence: Synthetic oligonucleotide
aagcugaaauauaucauaa

SEQ ID NO: 2046671 - RNA, 19 nt, Artificial Sequence
  Description of Artificial Sequence: Synthetic oligonucleotide
ucccucaaucccaaacugc

SEQ ID NO: 2046672 - RNA, 19 nt, Artificial Sequence
  Description of Artificial Sequence: Synthetic oligonucleotide
guuaauacugauggcaaga

SEQ ID NO: 2046673 - RNA, 19 nt, Artificial Sequence
  Description of Artificial Sequence: Synthetic oligonucleotide
ucuugcaaauguguuaauc

SEQ ID NO: 2046674 - RNA, 19 nt, Artificial Sequence
  Description of Artificial Sequence: Synthetic oligonucleotide
aagaacacacugugaagua

SEQ ID NO: 2046675 - RNA, 19 nt, Artificial Sequence
  Description of Artificial Sequence: Synthetic oligonucleotide
aacucaaguuuaaaaugcu

SEQ ID NO: 2046676 - RNA, 19 nt, Artificial Sequence
  Description of Artificial Sequence: Synthetic oligonucleotide
acagucugacaacuuaagu

SEQ ID NO: 2046677 - RNA, 19 nt, Artificial Sequence
  Description of Artificial Sequence: Synthetic oligonucleotide
cuugcaaauguguuaaucu

SEQ ID NO: 2046678 - RNA, 19 nt, Artificial Sequence
  Description of Artificial Sequence: Synthetic oligonucleotide
uugcaaauguguuaaucuu

SEQ ID NO: 2046679 - RNA, 19 nt, Artificial Sequence
  Description of Artificial Sequence: Synthetic oligonucleotide
uuaauacugauggcaagaa

SEQ ID NO: 2046680 - RNA, 19 nt, Artificial Sequence
  Description of Artificial Sequence: Synthetic oligonucleotide
uguaccucuaucacaugua

SEQ ID NO: 2046681 - RNA, 19 nt, Artificial Sequence
  Description of Artificial Sequence: Synthetic oligonucleotide
caaacacacugucugcaag

SEQ ID NO: 2046682 - RNA, 19 nt, Artificial Sequence
  Description of Artificial Sequence: Synthetic oligonucleotide
uccaacgaauuguaccucu

SEQ ID NO: 2046683 - RNA, 19 nt, Artificial Sequence
  Description of Artificial Sequence: Synthetic oligonucleotide
guaucccaagaguuaauac

SEQ ID NO: 2046684 - RNA, 19 nt, Artificial Sequence
  Description of Artificial Sequence: Synthetic oligonucleotide
acacugugaaguacaaagg

SEQ ID NO: 2046685 - RNA, 19 nt, Artificial Sequence
  Description of Artificial Sequence: Synthetic oligonucleotide
uauggcucagcuuguggac

SEQ ID NO: 2046686 - RNA, 19 nt, Artificial Sequence
  Description of Artificial Sequence: Synthetic oligonucleotide
cugauacaaacacacuguc

SEQ ID NO: 2046687 - RNA, 19 nt, Artificial Sequence
  Description of Artificial Sequence: Synthetic oligonucleotide
aaagccaguaguaucccaa

SEQ ID NO: 2046688 - RNA, 19 nt, Artificial Sequence
  Description of Artificial Sequence: Synthetic oligonucleotide
aucuauauuuacauccaca

SEQ ID NO: 2046689 - RNA, 19 nt, Artificial Sequence
  Description of Artificial Sequence: Synthetic oligonucleotide
agucaaucaucuugcaaau

SEQ ID NO: 2046690 - RNA, 19 nt, Artificial Sequence
  Description of Artificial Sequence: Synthetic oligonucleotide
uuguccuaccaagaggggc

SEQ ID NO: 2046691 - RNA, 19 nt, Artificial Sequence
  Description of Artificial Sequence: Synthetic oligonucleotide
cuggauagcugcugauacg

SEQ ID NO: 2046692 - RNA, 19 nt, Artificial Sequence
  Description of Artificial Sequence: Synthetic oligonucleotide
aacuggaaugaaauaaaua

SEQ ID NO: 2046693 - RNA, 19 nt, Artificial Sequence
  Description of Artificial Sequence: Synthetic oligonucleotide
aucacauguacuguugccu

SEQ ID NO: 2046694 - RNA, 19 nt, Artificial Sequence
  Description of Artificial Sequence: Synthetic oligonucleotide
uacagagguccagaggugc

SEQ ID NO: 2046695 - RNA, 19 nt, Artificial Sequence
  Description of Artificial Sequence: Synthetic oligonucleotide
gaauaaacucaaggcauca

SEQ ID NO: 2046696 - RNA, 19 nt, Artificial Sequence
  Description of Artificial Sequence: Synthetic oligonucleotide
auuuaggcaaagauugagu

SEQ ID NO: 2046697 - RNA, 19 nt, Artificial Sequence
  Description of Artificial Sequence: Synthetic oligonucleotide
gguaacagcgaggugauac

SEQ ID NO: 2046698 - RNA, 19 nt, Artificial Sequence
  Description of Artificial Sequence: Synthetic oligonucleotide
agugcagaaccuaacaaaa

SEQ ID NO: 2046699 - RNA, 19 nt, Artificial Sequence
  Description of Artificial Sequence: Synthetic oligonucleotide
cucaaagccccuccugccg

SEQ ID NO: 2046700 - RNA, 19 nt, Artificial Sequence
  Description of Artificial Sequence: Synthetic oligonucleotide
uaaaagauucuggguuugc

SEQ ID NO: 2046701 - RNA, 19 nt, Artificial Sequence
  Description of Artificial Sequence: Synthetic oligonucleotide
cagggccuaguguacacgg

SEQ ID NO: 2046702 - RNA, 19 nt, Artificial Sequence
  Description of Artificial Sequence: Synthetic oligonucleotide
guaccucuaucacauguac

SEQ ID NO: 2046703 - RNA, 19 nt, Artificial Sequence
  Description of Artificial Sequence: Synthetic oligonucleotide
uuguggacgggaacagggc

SEQ ID NO: 2046704 - RNA, 19 nt, Artificial Sequence
  Description of Artificial Sequence: Synthetic oligonucleotide
ugcuguagggcuucugcac

SEQ ID NO: 2046705 - RNA, 19 nt, Artificial Sequence
  Description of Artificial Sequence: Synthetic oligonucleotide
uguacauauggcucagcuu

SEQ ID NO: 2046706 - RNA, 19 nt, Artificial Sequence
  Description of Artificial Sequence: Synthetic oligonucleotide
gaugggcgcacacacucug

SEQ ID NO: 2046707 - RNA, 19 nt, Artificial Sequence
  Description of Artificial Sequence: Synthetic oligonucleotide
acacgucucaacccagcuc

SEQ ID NO: 2046708 - RNA, 19 nt, Artificial Sequence
  Description of Artificial Sequence: Synthetic oligonucleotide
aacccaugaacuguugaau

SEQ ID NO: 2046709 - RNA, 19 nt, Artificial Sequence
  Description of Artificial Sequence: Synthetic oligonucleotide
uguugccucaaagggaaga

SEQ ID NO: 2046710 - RNA, 19 nt, Artificial Sequence
  Description of Artificial Sequence: Synthetic oligonucleotide
gcugauacgacacaggccu

SEQ ID NO: 2046711 - RNA, 19 nt, Artificial Sequence
  Description of Artificial Sequence: Synthetic oligonucleotide
auccacauauaauaacaua

SEQ ID NO: 2046712 - RNA, 19 nt, Artificial Sequence
  Description of Artificial Sequence: Synthetic oligonucleotide
uaccucuaucacauguacu

SEQ ID NO: 2046713 - RNA, 19 nt, Artificial Sequence
  Description of Artificial Sequence: Synthetic oligonucleotide
aaaggaacucaaguuuaaa

SEQ ID NO: 2046714 - RNA, 19 nt, Artificial Sequence
  Description of Artificial Sequence: Synthetic oligonucleotide
acagcgaggugauacuccu

SEQ ID NO: 2046715 - RNA, 19 nt, Artificial Sequence
  Description of Artificial Sequence: Synthetic oligonucleotide
ugcagcaugcugcuggaua

SEQ ID NO: 2046716 - RNA, 19 nt, Artificial Sequence
  Description of Artificial Sequence: Synthetic oligonucleotide
agcugaaauauaucauaaa

SEQ ID NO: 2046717 - RNA, 19 nt, Artificial Sequence
  Description of Artificial Sequence: Synthetic oligonucleotide
gaaccuaacaaaacagucu

SEQ ID NO: 2046718 - RNA, 19 nt, Artificial Sequence
  Description of Artificial Sequence: Synthetic oligonucleotide
ugucuacagucugacaacu

SEQ ID NO: 2046719 - RNA, 19 nt, Artificial Sequence
  Description of Artificial Sequence: Synthetic oligonucleotide
aacuuuaagcugaaauaua

SEQ ID NO: 2046720 - RNA, 19 nt, Artificial Sequence
  Description of Artificial Sequence: Synthetic oligonucleotide
uuccuguacacucgcugga

SEQ ID NO: 2046721 - RNA, 19 nt, Artificial Sequence
  Description of Artificial Sequence: Synthetic oligonucleotide
ucaaagccccuccugccgu

SEQ ID NO: 2046722 - RNA, 19 nt, Artificial Sequence
  Description of Artificial Sequence: Synthetic oligonucleotide
gauucuggguuugcuaaac

SEQ ID NO: 2046723 - RNA, 19 nt, Artificial Sequence
  Description of Artificial Sequence: Synthetic oligonucleotide
ucaaggcaucaaaggaacu

SEQ ID NO: 2046724 - RNA, 19 nt, Artificial Sequence
  Description of Artificial Sequence: Synthetic oligonucleotide
cugugaaguacaaagggcu

SEQ ID NO: 2046725 - RNA, 19 nt, Artificial Sequence
  Description of Artificial Sequence: Synthetic oligonucleotide
ggcaagaacacacugugaa

SEQ ID NO: 2046726 - RNA, 19 nt, Artificial Sequence
  Description of Artificial Sequence: Synthetic oligonucleotide
gugaugggcgcacacacuc

SEQ ID NO: 2046727 - RNA, 19 nt, Artificial Sequence
  Description of Artificial Sequence: Synthetic oligonucleotide
ggucuuugagcucuucacc

SEQ ID NO: 2046728 - RNA, 19 nt, Artificial Sequence
  Description of Artificial Sequence: Synthetic oligonucleotide
agucaacacacugggcgac

SEQ ID NO: 2046729 - RNA, 19 nt, Artificial Sequence
  Description of Artificial Sequence: Synthetic oligonucleotide
gguccacaguuauacagag

SEQ ID NO: 2046730 - RNA, 19 nt, Artificial Sequence
  Description of Artificial Sequence: Synthetic oligonucleotide
auaggcuauaaaagugcag

SEQ ID NO: 2046731 - RNA, 19 nt, Artificial Sequence
  Description of Artificial Sequence: Synthetic oligonucleotide
uugagucaaucaucuugca

SEQ ID NO: 2046732 - RNA, 19 nt, Artificial Sequence
  Description of Artificial Sequence: Synthetic oligonucleotide
cuaguguacacgguuccug

SEQ ID NO: 2046733 - RNA, 19 nt, Artificial Sequence
  Description of Artificial Sequence: Synthetic oligonucleotide
uggguuugcuaaacccaug

SEQ ID NO: 2046734 - RNA, 19 nt, Artificial Sequence
  Description of Artificial Sequence: Synthetic oligonucleotide
accucgagcuuccuguaca

SEQ ID NO: 2046735 - RNA, 19 nt, Artificial Sequence
  Description of Artificial Sequence: Synthetic oligonucleotide
acucaaggcaucaaaggaa

SEQ ID NO: 2046736 - RNA, 19 nt, Artificial Sequence
  Description of Artificial Sequence: Synthetic oligonucleotide
augaacuguugaauaaacu

SEQ ID NO: 2046737 - RNA, 19 nt, Artificial Sequence
  Description of Artificial Sequence: Synthetic oligonucleotide
cugcacagucaacacacug

SEQ ID NO: 2046738 - RNA, 19 nt, Artificial Sequence
  Description of Artificial Sequence: Synthetic oligonucleotide
cuaaacccaugaacuguug

SEQ ID NO: 2046739 - RNA, 19 nt, Artificial Sequence
  Description of Artificial Sequence: Synthetic oligonucleotide
gcuggauagcugcugauac

SEQ ID NO: 2046740 - RNA, 19 nt, Artificial Sequence
  Description of Artificial Sequence: Synthetic oligonucleotide
ugauacgacacaggccucu

SEQ ID NO: 2046741 - RNA, 19 nt, Artificial Sequence
  Description of Artificial Sequence: Synthetic oligonucleotide
ccaagaguuaauacugaug

SEQ ID NO: 2046742 - RNA, 19 nt, Artificial Sequence
  Description of Artificial Sequence: Synthetic oligonucleotide
agccguuggggucuuugag

SEQ ID NO: 2046743 - RNA, 19 nt, Artificial Sequence
  Description of Artificial Sequence: Synthetic oligonucleotide
gucucaacccagcucuccc

SEQ ID NO: 2046744 - RNA, 19 nt, Artificial Sequence
  Description of Artificial Sequence: Synthetic oligonucleotide
uccagaggugcuguagggc

SEQ ID NO: 2046745 - RNA, 19 nt, Artificial Sequence
  Description of Artificial Sequence: Synthetic oligonucleotide
aguaguaucccaagaguua

SEQ ID NO: 2046746 - RNA, 19 nt, Artificial Sequence
  Description of Artificial Sequence: Synthetic oligonucleotide
acuguugaauaaacucaag

SEQ ID NO: 2046747 - RNA, 19 nt, Artificial Sequence
  Description of Artificial Sequence: Synthetic oligonucleotide
guaguaucccaagaguuaa

SEQ ID NO: 2046748 - RNA, 19 nt, Artificial Sequence
  Description of Artificial Sequence: Synthetic oligonucleotide
ugauacuccuggccacgug

SEQ ID NO: 2046749 - RNA, 19 nt, Artificial Sequence
  Description of Artificial Sequence: Synthetic oligonucleotide
agacacgucucaacccagc

SEQ ID NO: 2046750 - RNA, 19 nt, Artificial Sequence
  Description of Artificial Sequence: Synthetic oligonucleotide
ugaugguaacagcgaggug

SEQ ID NO: 2046751 - RNA, 19 nt, Artificial Sequence
  Description of Artificial Sequence: Synthetic oligonucleotide
cuacagucugacaacuuaa

SEQ ID NO: 2046752 - RNA, 19 nt, Artificial Sequence
  Description of Artificial Sequence: Synthetic oligonucleotide
aacauaacuuuaagcugaa

SEQ ID NO: 2046753 - RNA, 19 nt, Artificial Sequence
  Description of Artificial Sequence: Synthetic oligonucleotide
acaguuauacagaggucca

SEQ ID NO: 2046754 - RNA, 19 nt, Artificial Sequence
  Description of Artificial Sequence: Synthetic oligonucleotide
agaccgagcagugcaaacu

SEQ ID NO: 2046755 - RNA, 19 nt, Artificial Sequence
  Description of Artificial Sequence: Synthetic oligonucleotide
ugacaacuuaagugucaac

SEQ ID NO: 2046756 - RNA, 19 nt, Artificial Sequence
  Description of Artificial Sequence: Synthetic oligonucleotide
cagaauguucuguguccag

SEQ ID NO: 2046757 - RNA, 19 nt, Artificial Sequence
  Description of Artificial Sequence: Synthetic oligonucleotide
uacugauggcaagaacaca

SEQ ID NO: 2046758 - RNA, 19 nt, Artificial Sequence
  Description of Artificial Sequence: Synthetic oligonucleotide
ugaaguacaaagggcuguu

SEQ ID NO: 2046759 - RNA, 19 nt, Artificial Sequence
  Description of Artificial Sequence: Synthetic oligonucleotide
ucugcacagucaacacacu

SEQ ID NO: 2046760 - RNA, 19 nt, Artificial Sequence
  Description of Artificial Sequence: Synthetic oligonucleotide
gagcuuccuguacacucgc

SEQ ID NO: 2046761 - RNA, 19 nt, Artificial Sequence
  Description of Artificial Sequence: Synthetic oligonucleotide
aagccccuccugccguugg

SEQ ID NO: 2046762 - RNA, 19 nt, Artificial Sequence
  Description of Artificial Sequence: Synthetic oligonucleotide
guugccucaaagggaagac

SEQ ID NO: 2046763 - RNA, 19 nt, Artificial Sequence
  Description of Artificial Sequence: Synthetic oligonucleotide
cacacugggcgacuccacc

SEQ ID NO: 2046764 - RNA, 19 nt, Artificial Sequence
  Description of Artificial Sequence: Synthetic oligonucleotide
uuccuucaagggucggggc

SEQ ID NO: 2046765 - RNA, 19 nt, Artificial Sequence
  Description of Artificial Sequence: Synthetic oligonucleotide
gagaccgagcagugcaaac

SEQ ID NO: 2046766 - RNA, 19 nt, Artificial Sequence
  Description of Artificial Sequence: Synthetic oligonucleotide
auuguaccucuaucacaug

SEQ ID NO: 2046767 - RNA, 19 nt, Artificial Sequence
  Description of Artificial Sequence: Synthetic oligonucleotide
agccaguaguaucccaaga

SEQ ID NO: 2046768 - RNA, 19 nt, Artificial Sequence
  Description of Artificial Sequence: Synthetic oligonucleotide
ugaugggcgcacacacucu

SEQ ID NO: 2046769 - RNA, 19 nt, Artificial Sequence
  Description of Artificial Sequence: Synthetic oligonucleotide
gcaaauguguuaaucuuca

SEQ ID NO: 2046770 - RNA, 19 nt, Artificial Sequence
  Description of Artificial Sequence: Synthetic oligonucleotide
uauguacauauggcucagc

SEQ ID NO: 2046771 - RNA, 19 nt, Artificial Sequence
  Description of Artificial Sequence: Synthetic oligonucleotide
ccaaaucuauauuuacauc

SEQ ID NO: 2046772 - RNA, 19 nt, Artificial Sequence
  Description of Artificial Sequence: Synthetic oligonucleotide
aaaccucgagcuuccugua

SEQ ID NO: 2046773 - RNA, 19 nt, Artificial Sequence
  Description of Artificial Sequence: Synthetic oligonucleotide
auccaacgaauuguaccuc

SEQ ID NO: 2046774 - RNA, 19 nt, Artificial Sequence
  Description of Artificial Sequence: Synthetic oligonucleotide
aucaucuugcaaauguguu

SEQ ID NO: 2046775 - RNA, 19 nt, Artificial Sequence
  Description of Artificial Sequence: Synthetic oligonucleotide
cacgucucaacccagcucu

SEQ ID NO: 2046776 - RNA, 19 nt, Artificial Sequence
  Description of Artificial Sequence: Synthetic oligonucleotide
gcaucaaaggaacucaagu

SEQ ID NO: 2046777 - RNA, 19 nt, Artificial Sequence
  Description of Artificial Sequence: Synthetic oligonucleotide
caucaaaggaacucaaguu

SEQ ID NO: 2046778 - RNA, 19 nt, Artificial Sequence
  Description of Artificial Sequence: Synthetic oligonucleotide
ggggcaaggagaccgagca

SEQ ID NO: 2046779 - RNA, 19 nt, Artificial Sequence
  Description of Artificial Sequence: Synthetic oligonucleotide
aacacacugugaaguacaa

SEQ ID NO: 2046780 - RNA, 19 nt, Artificial Sequence
  Description of Artificial Sequence: Synthetic oligonucleotide
guacacucgcuggauuuag

SEQ ID NO: 2046781 - RNA, 19 nt, Artificial Sequence
  Description of Artificial Sequence: Synthetic oligonucleotide
accuaacaaaacagucuag

SEQ ID NO: 2046782 - RNA, 19 nt, Artificial Sequence
  Description of Artificial Sequence: Synthetic oligonucleotide
cagcucuccccuucaacac

SEQ ID NO: 2046783 - RNA, 19 nt, Artificial Sequence
  Description of Artificial Sequence: Synthetic oligonucleotide
ggguuugcuaaacccauga

SEQ ID NO: 2046784 - RNA, 19 nt, Artificial Sequence
  Description of Artificial Sequence: Synthetic oligonucleotide
cuggauuuaggcaaagauu

SEQ ID NO: 2046785 - RNA, 19 nt, Artificial Sequence
  Description of Artificial Sequence: Synthetic oligonucleotide
cagaaccuaacaaaacagu

SEQ ID NO: 2046786 - RNA, 19 nt, Artificial Sequence
  Description of Artificial Sequence: Synthetic oligonucleotide
aguguacacgguuccugau

SEQ ID NO: 2046787 - RNA, 19 nt, Artificial Sequence
  Description of Artificial Sequence: Synthetic oligonucleotide
caguuauacagagguccag

SEQ ID NO: 2046788 - RNA, 19 nt, Artificial Sequence
  Description of Artificial Sequence: Synthetic oligonucleotide
acucugaugguaacagcga

SEQ ID NO: 2046789 - RNA, 19 nt, Artificial Sequence
  Description of Artificial Sequence: Synthetic oligonucleotide
cagacacgucucaacccag

SEQ ID NO: 2046790 - RNA, 19 nt, Artificial Sequence
  Description of Artificial Sequence: Synthetic oligonucleotide
uguacacucgcuggauuua

SEQ ID NO: 2046791 - RNA, 19 nt, Artificial Sequence
  Description of Artificial Sequence: Synthetic oligonucleotide
ccucaaagggaagacacac

SEQ ID NO: 2046792 - RNA, 19 nt, Artificial Sequence
  Description of Artificial Sequence: Synthetic oligonucleotide
gagcagcacaggugauggg

SEQ ID NO: 2046793 - RNA, 19 nt, Artificial Sequence
  Description of Artificial Sequence: Synthetic oligonucleotide
agcuuguggacgggaacag

SEQ ID NO: 2046794 - RNA, 19 nt, Artificial Sequence
  Description of Artificial Sequence: Synthetic oligonucleotide
guacaaagggcuguuuaaa

SEQ ID NO: 2046795 - RNA, 19 nt, Artificial Sequence
  Description of Artificial Sequence: Synthetic oligonucleotide
cagucaacacacugggcga

SEQ ID NO: 2046796 - RNA, 19 nt, Artificial Sequence
  Description of Artificial Sequence: Synthetic oligonucleotide
ggugauacuccuggccacg

SEQ ID NO: 2046797 - RNA, 19 nt, Artificial Sequence
  Description of Artificial Sequence: Synthetic oligonucleotide
ugggcgcacacacucugau

SEQ ID NO: 2046798 - RNA, 19 nt, Artificial Sequence
  Description of Artificial Sequence: Synthetic oligonucleotide
caacacacugggcgacucc

SEQ ID NO: 2046799 - RNA, 19 nt, Artificial Sequence
  Description of Artificial Sequence: Synthetic oligonucleotide
cuaccaagaggggcggggc

SEQ ID NO: 2046800 - RNA, 19 nt, Artificial Sequence
  Description of Artificial Sequence: Synthetic oligonucleotide
caggccucuuuccuucaag

SEQ ID NO: 2046801 - RNA, 19 nt, Artificial Sequence
  Description of Artificial Sequence: Synthetic oligonucleotide
cgaauuguaccucuaucac

SEQ ID NO: 2046802 - RNA, 19 nt, Artificial Sequence
  Description of Artificial Sequence: Synthetic oligonucleotide
cagcacaggugaugggcgc

SEQ ID NO: 2046803 - RNA, 19 nt, Artificial Sequence
  Description of Artificial Sequence: Synthetic oligonucleotide
agguccagaggugcuguag

SEQ ID NO: 2046804 - RNA, 19 nt, Artificial Sequence
  Description of Artificial Sequence: Synthetic oligonucleotide
gccguuggggucuuugagc

SEQ ID NO: 2046805 - RNA, 19 nt, Artificial Sequence
  Description of Artificial Sequence: Synthetic oligonucleotide
acacacaaagccaguagua

SEQ ID NO: 2046806 - RNA, 19 nt, Artificial Sequence
  Description of Artificial Sequence: Synthetic oligonucleotide
ccuaacaaaacagucuaga

SEQ ID NO: 2046807 - RNA, 19 nt, Artificial Sequence
  Description of Artificial Sequence: Synthetic oligonucleotide
acauauggcucagcuugug

SEQ ID NO: 2046808 - RNA, 19 nt, Artificial Sequence
  Description of Artificial Sequence: Synthetic oligonucleotide
gaagcgggcuuuggggagc

SEQ ID NO: 2046809 - RNA, 19 nt, Artificial Sequence
  Description of Artificial Sequence: Synthetic oligonucleotide
cugaugguaacagcgaggu

SEQ ID NO: 2046810 - RNA, 19 nt, Artificial Sequence
  Description of Artificial Sequence: Synthetic oligonucleotide
ggaagcgggcuuuggggag

SEQ ID NO: 2046811 - RNA, 19 nt, Artificial Sequence
  Description of Artificial Sequence: Synthetic oligonucleotide
ucaacacacugggcgacuc

SEQ ID NO: 2046812 - RNA, 19 nt, Artificial Sequence
  Description of Artificial Sequence: Synthetic oligonucleotide
guaacagcgaggugauacu

SEQ ID NO: 2046813 - RNA, 19 nt, Artificial Sequence
  Description of Artificial Sequence: Synthetic oligonucleotide
agauugagucaaucaucuu

SEQ ID NO: 2046814 - RNA, 19 nt, Artificial Sequence
  Description of Artificial Sequence: Synthetic oligonucleotide
cacauguacuguugccuca

SEQ ID NO: 2046815 - RNA, 19 nt, Artificial Sequence
  Description of Artificial Sequence: Synthetic oligonucleotide
caaggagaccgagcagugc

SEQ ID NO: 2046816 - RNA, 19 nt, Artificial Sequence
  Description of Artificial Sequence: Synthetic oligonucleotide
auacagagguccagaggug

SEQ ID NO: 2046817 - RNA, 19 nt, Artificial Sequence
  Description of Artificial Sequence: Synthetic oligonucleotide
caguaguaucccaagaguu

SEQ ID NO: 2046818 - RNA, 19 nt, Artificial Sequence
  Description of Artificial Sequence: Synthetic oligonucleotide
caucccucaaucccaaacu

SEQ ID NO: 2046819 - RNA, 19 nt, Artificial Sequence
  Description of Artificial Sequence: Synthetic oligonucleotide
ucaagggucggggcuggcu

SEQ ID NO: 2046820 - RNA, 19 nt, Artificial Sequence
  Description of Artificial Sequence: Synthetic oligonucleotide
gccuaguguacacgguucc

SEQ ID NO: 2046821 - RNA, 19 nt, Artificial Sequence
  Description of Artificial Sequence: Synthetic oligonucleotide
gaacagggccuaguguaca

SEQ ID NO: 2046822 - RNA, 19 nt, Artificial Sequence
  Description of Artificial Sequence: Synthetic oligonucleotide
cugacaacuuaagugucaa

SEQ ID NO: 2046823 - RNA, 19 nt, Artificial Sequence
  Description of Artificial Sequence: Synthetic oligonucleotide
gcucaaagccccuccugcc

SEQ ID NO: 2046824 - RNA, 19 nt, Artificial Sequence
  Description of Artificial Sequence: Synthetic oligonucleotide
cuucaagggucggggcugg

SEQ ID NO: 2046825 - RNA, 19 nt, Artificial Sequence
  Description of Artificial Sequence: Synthetic oligonucleotide
accgagcagugcaaacuuc

SEQ ID NO: 2046826 - RNA, 19 nt, Artificial Sequence
  Description of Artificial Sequence: Synthetic oligonucleotide
caacuuaagugucaacaau

SEQ ID NO: 2046827 - RNA, 19 nt, Artificial Sequence
  Description of Artificial Sequence: Synthetic oligonucleotide
cacgugguacuuggggagc

SEQ ID NO: 2046828 - RNA, 19 nt, Artificial Sequence
  Description of Artificial Sequence: Synthetic oligonucleotide
agugaaccagcugguggcu

SEQ ID NO: 2046829 - RNA, 19 nt, Artificial Sequence
  Description of Artificial Sequence: Synthetic oligonucleotide
cgagcuuccuguacacucg

SEQ ID NO: 2046830 - RNA, 19 nt, Artificial Sequence
  Description of Artificial Sequence: Synthetic oligonucleotide
ucuucacccuuuuguccua

SEQ ID NO: 2046831 - RNA, 19 nt, Artificial Sequence
  Description of Artificial Sequence: Synthetic oligonucleotide
gcuuuggggagcagcacag

SEQ ID NO: 2046832 - RNA, 19 nt, Artificial Sequence
  Description of Artificial Sequence: Synthetic oligonucleotide
caagagcagacacgucuca

SEQ ID NO: 2046833 - RNA, 19 nt, Artificial Sequence
  Description of Artificial Sequence: Synthetic oligonucleotide
augguaacagcgaggugau

SEQ ID NO: 2046834 - RNA, 19 nt, Artificial Sequence
  Description of Artificial Sequence: Synthetic oligonucleotide
guguacacgguuccugaua

SEQ ID NO: 2046835 - RNA, 19 nt, Artificial Sequence
  Description of Artificial Sequence: Synthetic oligonucleotide
gagccguuggggucuuuga

SEQ ID NO: 2046836 - RNA, 19 nt, Artificial Sequence
  Description of Artificial Sequence: Synthetic oligonucleotide
ccugauacaaacacacugu

SEQ ID NO: 2046837 - RNA, 19 nt, Artificial Sequence
  Description of Artificial Sequence: Synthetic oligonucleotide
ggcaaagauugagucaauc

SEQ ID NO: 2046838 - RNA, 19 nt, Artificial Sequence
  Description of Artificial Sequence: Synthetic oligonucleotide
gcuguagggcuucugcaca

SEQ ID NO: 2046839 - RNA, 19 nt, Artificial Sequence
  Description of Artificial Sequence: Synthetic oligonucleotide
guccuaccaagaggggcgg

SEQ ID NO: 2046840 - RNA, 19 nt, Artificial Sequence
  Description of Artificial Sequence: Synthetic oligonucleotide
gugaaguacaaagggcugu

SEQ ID NO: 2046841 - RNA, 19 nt, Artificial Sequence
  Description of Artificial Sequence: Synthetic oligonucleotide
uccuaccaagaggggcggg

SEQ ID NO: 2046842 - RNA, 19 nt, Artificial Sequence
  Description of Artificial Sequence: Synthetic oligonucleotide
cacccuuuuguccuaccaa

SEQ ID NO: 2046843 - RNA, 19 nt, Artificial Sequence
  Description of Artificial Sequence: Synthetic oligonucleotide
cugauacgacacaggccuc

SEQ ID NO: 2046844 - RNA, 19 nt, Artificial Sequence
  Description of Artificial Sequence: Synthetic oligonucleotide
gccacgugguacuugggga

SEQ ID NO: 2046845 - RNA, 19 nt, Artificial Sequence
  Description of Artificial Sequence: Synthetic oligonucleotide
gcccagaauguucuguguc

SEQ ID NO: 2046846 - RNA, 19 nt, Artificial Sequence
  Description of Artificial Sequence: Synthetic oligonucleotide
cacugggcgacuccaccuc

SEQ ID NO: 2046847 - RNA, 19 nt, Artificial Sequence
  Description of Artificial Sequence: Synthetic oligonucleotide
agucuagauuauguacaua

SEQ ID NO: 2046848 - RNA, 19 nt, Artificial Sequence
  Description of Artificial Sequence: Synthetic oligonucleotide
uacuccuggccacguggua

SEQ ID NO: 2046849 - RNA, 19 nt, Artificial Sequence
  Description of Artificial Sequence: Synthetic oligonucleotide
cccuucaacacaggagggg

SEQ ID NO: 2046850 - RNA, 19 nt, Artificial Sequence
  Description of Artificial Sequence: Synthetic oligonucleotide
cuggguuugcuaaacccau

SEQ ID NO: 2046851 - RNA, 19 nt, Artificial Sequence
  Description of Artificial Sequence: Synthetic oligonucleotide
cucuaucacauguacuguu

SEQ ID NO: 2046852 - RNA, 19 nt, Artificial Sequence
  Description of Artificial Sequence: Synthetic oligonucleotide
gguuugcuaaacccaugaa

SEQ ID NO: 2046853 - RNA, 19 nt, Artificial Sequence
  Description of Artificial Sequence: Synthetic oligonucleotide
ggaacagggccuaguguac

SEQ ID NO: 2046854 - RNA, 19 nt, Artificial Sequence
  Description of Artificial Sequence: Synthetic oligonucleotide
gaccgagcagugcaaacuu

SEQ ID NO: 2046855 - RNA, 19 nt, Artificial Sequence
  Description of Artificial Sequence: Synthetic oligonucleotide
auacgacacaggccucuuu

SEQ ID NO: 2046856 - RNA, 19 nt, Artificial Sequence
  Description of Artificial Sequence: Synthetic oligonucleotide
acacacugugaaguacaaa

SEQ ID NO: 2046857 - RNA, 19 nt, Artificial Sequence
  Description of Artificial Sequence: Synthetic oligonucleotide
uggacgggaacagggccua

SEQ ID NO: 2046858 - RNA, 19 nt, Artificial Sequence
  Description of Artificial Sequence: Synthetic oligonucleotide
gcuuguggacgggaacagg

SEQ ID NO: 2046859 - RNA, 19 nt, Artificial Sequence
  Description of Artificial Sequence: Synthetic oligonucleotide
accaagaggggcggggcaa

SEQ ID NO: 2046860 - RNA, 19 nt, Artificial Sequence
  Description of Artificial Sequence: Synthetic oligonucleotide
ggcaaggagaccgagcagu

SEQ ID NO: 2046861 - RNA, 19 nt, Artificial Sequence
  Description of Artificial Sequence: Synthetic oligonucleotide
guacacgguuccugauaca

SEQ ID NO: 2046862 - RNA, 19 nt, Artificial Sequence
  Description of Artificial Sequence: Synthetic oligonucleotide
acgugguacuuggggagcu

SEQ ID NO: 2046863 - RNA, 19 nt, Artificial Sequence
  Description of Artificial Sequence: Synthetic oligonucleotide
aggcaucaaaggaacucaa

SEQ ID NO: 2046864 - RNA, 19 nt, Artificial Sequence
  Description of Artificial Sequence: Synthetic oligonucleotide
cccaugaacuguugaauaa

SEQ ID NO: 2046865 - RNA, 19 nt, Artificial Sequence
  Description of Artificial Sequence: Synthetic oligonucleotide
cugcaagagcagacacguc

SEQ ID NO: 2046866 - RNA, 19 nt, Artificial Sequence
  Description of Artificial Sequence: Synthetic oligonucleotide
cuguacacucgcuggauuu

SEQ ID NO: 2046867 - RNA, 19 nt, Artificial Sequence
  Description of Artificial Sequence: Synthetic oligonucleotide
caacgaauuguaccucuau

SEQ ID NO: 2046868 - RNA, 19 nt, Artificial Sequence
  Description of Artificial Sequence: Synthetic oligonucleotide
ggagccguuggggucuuug

SEQ ID NO: 2046869 - RNA, 19 nt, Artificial Sequence
  Description of Artificial Sequence: Synthetic oligonucleotide
gggcaaggagaccgagcag

SEQ ID NO: 2046870 - RNA, 19 nt, Artificial Sequence
  Description of Artificial Sequence: Synthetic oligonucleotide
ccucgagcuuccuguacac

SEQ ID NO: 2046871 - RNA, 19 nt, Artificial Sequence
  Description of Artificial Sequence: Synthetic oligonucleotide
ccuucaagggucggggcug

SEQ ID NO: 2046872 - RNA, 19 nt, Artificial Sequence
  Description of Artificial Sequence: Synthetic oligonucleotide
gcgaggugauacuccuggc

SEQ ID NO: 2046873 - RNA, 19 nt, Artificial Sequence
  Description of Artificial Sequence: Synthetic oligonucleotide
acgucucaacccagcucuc

SEQ ID NO: 2046874 - RNA, 19 nt, Artificial Sequence
  Description of Artificial Sequence: Synthetic oligonucleotide
ccaguaguaucccaagagu

SEQ ID NO: 2046875 - RNA, 19 nt, Artificial Sequence
  Description of Artificial Sequence: Synthetic oligonucleotide
gggcgcacacacucugaug

SEQ ID NO: 2046876 - RNA, 19 nt, Artificial Sequence
  Description of Artificial Sequence: Synthetic oligonucleotide
ggccuaguguacacgguuc

SEQ ID NO: 2046877 - RNA, 19 nt, Artificial Sequence
  Description of Artificial Sequence: Synthetic oligonucleotide
cucaacccagcucuccccu

SEQ ID NO: 2046878 - RNA, 19 nt, Artificial Sequence
  Description of Artificial Sequence: Synthetic oligonucleotide
uucaagggucggggcuggc

SEQ ID NO: 2046879 - RNA, 19 nt, Artificial Sequence
  Description of Artificial Sequence: Synthetic oligonucleotide
ggauagcugcugauacgac

SEQ ID NO: 2046880 - RNA, 19 nt, Artificial Sequence
  Description of Artificial Sequence: Synthetic oligonucleotide
gcaugucuacagucugaca

SEQ ID NO: 2046881 - RNA, 19 nt, Artificial Sequence
  Description of Artificial Sequence: Synthetic oligonucleotide
agggccuaguguacacggu

SEQ ID NO: 2046882 - RNA, 19 nt, Artificial Sequence
  Description of Artificial Sequence: Synthetic oligonucleotide
aggagaccgagcagugcaa

SEQ ID NO: 2046883 - RNA, 19 nt, Artificial Sequence
  Description of Artificial Sequence: Synthetic oligonucleotide
gaaguacaaagggcuguuu

SEQ ID NO: 2046884 - RNA, 19 nt, Artificial Sequence
  Description of Artificial Sequence: Synthetic oligonucleotide
gcgggcuuuggggagcagc

SEQ ID NO: 2046885 - RNA, 19 nt, Artificial Sequence
  Description of Artificial Sequence: Synthetic oligonucleotide
gacgggaacagggccuagu

SEQ ID NO: 2046886 - RNA, 19 nt, Artificial Sequence
  Description of Artificial Sequence: Synthetic oligonucleotide
ggucggggcuggcuccugc

SEQ ID NO: 2046887 - RNA, 19 nt, Artificial Sequence
  Description of Artificial Sequence: Synthetic oligonucleotide
gauacgacacaggccucuu

SEQ ID NO: 2046888 - RNA, 19 nt, Artificial Sequence
  Description of Artificial Sequence: Synthetic oligonucleotide
ccguuggggucuuugagcu

SEQ ID NO: 2046889 - RNA, 19 nt, Artificial Sequence
  Description of Artificial Sequence: Synthetic oligonucleotide
gcuaaacccaugaacuguu

SEQ ID NO: 2046890 - RNA, 19 nt, Artificial Sequence
  Description of Artificial Sequence: Synthetic oligonucleotide
ugguaacagcgaggugaua

SEQ ID NO: 2046891 - RNA, 19 nt, Artificial Sequence
  Description of Artificial Sequence: Synthetic oligonucleotide
ggagaccgagcagugcaaa

SEQ ID NO: 2046892 - RNA, 19 nt, Artificial Sequence
  Description of Artificial Sequence: Synthetic oligonucleotide
gucaacacacugggcgacu

SEQ ID NO: 2046893 - RNA, 19 nt, Artificial Sequence
  Description of Artificial Sequence: Synthetic oligonucleotide
ccaacgaauuguaccucua

SEQ ID NO: 2046894 - RNA, 19 nt, Artificial Sequence
  Description of Artificial Sequence: Synthetic oligonucleotide
gugauacuccuggccacgu

SEQ ID NO: 2046895 - RNA, 19 nt, Artificial Sequence
  Description of Artificial Sequence: Synthetic oligonucleotide
ccaagaggggcggggcaag

SEQ ID NO: 2046896 - RNA, 19 nt, Artificial Sequence
  Description of Artificial Sequence: Synthetic oligonucleotide
ccagguccacaguuauaca

SEQ ID NO: 2046897 - RNA, 19 nt, Artificial Sequence
  Description of Artificial Sequence: Synthetic oligonucleotide
cgucucaacccagcucucc

SEQ ID NO: 2046898 - RNA, 19 nt, Artificial Sequence
  Description of Artificial Sequence: Synthetic oligonucleotide
gggccuaguguacacgguu

SEQ ID NO: 2046899 - RNA, 19 nt, Artificial Sequence
  Description of Artificial Sequence: Synthetic oligonucleotide
cccagggcucaggaagcgg

SEQ ID NO: 2046900 - RNA, 19 nt, Artificial Sequence
  Description of Artificial Sequence: Synthetic oligonucleotide
gucuacagucugacaacuu

SEQ ID NO: 2046901 - RNA, 19 nt, Artificial Sequence
  Description of Artificial Sequence: Synthetic oligonucleotide
ccucaaucccaaacugccu

SEQ ID NO: 2046902 - RNA, 19 nt, Artificial Sequence
  Description of Artificial Sequence: Synthetic oligonucleotide
gcggggcaaggagaccgag

SEQ ID NO: 2046903 - RNA, 19 nt, Artificial Sequence
  Description of Artificial Sequence: Synthetic oligonucleotide
cucgagcuuccuguacacu

SEQ ID NO: 2046904 - RNA, 19 nt, Artificial Sequence
  Description of Artificial Sequence: Synthetic oligonucleotide
cugccguugggcccagaau

SEQ ID NO: 2046905 - RNA, 19 nt, Artificial Sequence
  Description of Artificial Sequence: Synthetic oligonucleotide
ccugccguugggcccagaa

SEQ ID NO: 2046906 - RNA, 19 nt, Artificial Sequence
  Description of Artificial Sequence: Synthetic oligonucleotide
agcgggcuuuggggagcag

SEQ ID NO: 2046907 - RNA, 19 nt, Artificial Sequence
  Description of Artificial Sequence: Synthetic oligonucleotide
ggacgggaacagggccuag

SEQ ID NO: 2046908 - RNA, 19 nt, Artificial Sequence
  Description of Artificial Sequence: Synthetic oligonucleotide
gccguugggcccagaaugu

SEQ ID NO: 2046909 - RNA, 19 nt, Artificial Sequence
  Description of Artificial Sequence: Synthetic oligonucleotide
caaagccccuccugccguu

SEQ ID NO: 2046910 - RNA, 19 nt, Artificial Sequence
  Description of Artificial Sequence: Synthetic oligonucleotide
gcgcacacacucugauggu

SEQ ID NO: 2046911 - RNA, 19 nt, Artificial Sequence
  Description of Artificial Sequence: Synthetic oligonucleotide
ccuaguguacacgguuccu

SEQ ID NO: 2046912 - RNA, 19 nt, Artificial Sequence
  Description of Artificial Sequence: Synthetic oligonucleotide
ggcggggcaaggagaccga

SEQ ID NO: 2046913 - RNA, 19 nt, Artificial Sequence
  Description of Artificial Sequence: Synthetic oligonucleotide
ggcucaggaagcgggcuuu

SEQ ID NO: 2046914 - RNA, 19 nt, Artificial Sequence
  Description of Artificial Sequence: Synthetic oligonucleotide
uccugccguugggcccaga

SEQ ID NO: 2046915 - RNA, 19 nt, Artificial Sequence
  Description of Artificial Sequence: Synthetic oligonucleotide
ccuguacacucgcuggauu

SEQ ID NO: 2046916 - RNA, 19 nt, Artificial Sequence
  Description of Artificial Sequence: Synthetic oligonucleotide
cuccugccguugggcccag

SEQ ID NO: 2046917 - RNA, 19 nt, Artificial Sequence
  Description of Artificial Sequence: Synthetic oligonucleotide
cgcuggauuuaggcaaaga

SEQ ID NO: 2046918 - RNA, 19 nt, Artificial Sequence
  Description of Artificial Sequence: Synthetic oligonucleotide
cgcacacacucugauggua

SEQ ID NO: 2046919 - RNA, 19 nt, Artificial Sequence
  Description of Artificial Sequence: Synthetic oligonucleotide
gggucggggcuggcuccug

SEQ ID NO: 2046920 - RNA, 19 nt, Artificial Sequence
  Description of Artificial Sequence: Synthetic oligonucleotide
ccguugggcccagaauguu

SEQ ID NO: 2046921 - RNA, 19 nt, Artificial Sequence
  Description of Artificial Sequence: Synthetic oligonucleotide
gggagccguuggggucuuu

SEQ ID NO: 2046922 - RNA, 19 nt, Artificial Sequence
  Description of Artificial Sequence: Synthetic oligonucleotide
auguaugugagucagaucc

SEQ ID NO: 2046923 - RNA, 19 nt, Artificial Sequence
  Description of Artificial Sequence: Synthetic oligonucleotide
auuaauaauaauuugucug

SEQ ID NO: 2046924 - RNA, 19 nt, Artificial Sequence
  Description of Artificial Sequence: Synthetic oligonucleotide
uaaagguuaaccaaggacc

SEQ ID NO: 2046925 - RNA, 19 nt, Artificial Sequence
  Description of Artificial Sequence: Synthetic oligonucleotide
uaaccaaggaccaaaauag

SEQ ID NO: 2046926 - RNA, 19 nt, Artificial Sequence
  Description of Artificial Sequence: Synthetic oligonucleotide
auaagaaugauguuacacg

SEQ ID NO: 2046927 - RNA, 19 nt, Artificial Sequence
  Description of Artificial Sequence: Synthetic oligonucleotide
uaaaucaggaaccagaauc

SEQ ID NO: 2046928 - RNA, 19 nt, Artificial Sequence
  Description of Artificial Sequence: Synthetic oligonucleotide
aguccuuuuacuuacacag

SEQ ID NO: 2046929 - RNA, 19 nt, Artificial Sequence
  Description of Artificial Sequence: Synthetic oligonucleotide
ucuaaucucuugaauaagg

SEQ ID NO: 2046930 - RNA, 19 nt, Artificial Sequence
  Description of Artificial Sequence: Synthetic oligonucleotide
augcuauuaaaucaggaac

SEQ ID NO: 2046931 - RNA, 19 nt, Artificial Sequence
  Description of Artificial Sequence: Synthetic oligonucleotide
uauuaaaucaggaaccaga

SEQ ID NO: 2046932 - RNA, 19 nt, Artificial Sequence
  Description of Artificial Sequence: Synthetic oligonucleotide
ucuacuaaauaccaggcga

SEQ ID NO: 2046933 - RNA, 19 nt, Artificial Sequence
  Description of Artificial Sequence: Synthetic oligonucleotide
aauaauuugucugucaaga

SEQ ID NO: 2046934 - RNA, 19 nt, Artificial Sequence
  Description of Artificial Sequence: Synthetic oligonucleotide
aaaucaggaaccagaaucc

SEQ ID NO: 2046935 - RNA, 19 nt, Artificial Sequence
  Description of Artificial Sequence: Synthetic oligonucleotide
ugugcuuucagguuaaaug

SEQ ID NO: 2046936 - RNA, 19 nt, Artificial Sequence
  Description of Artificial Sequence: Synthetic oligonucleotide
auagugaagaauccugacc

SEQ ID NO: 2046937 - RNA, 19 nt, Artificial Sequence
  Description of Artificial Sequence: Synthetic oligonucleotide
ugcuauuaaaucaggaacc

SEQ ID NO: 2046938 - RNA, 19 nt, Artificial Sequence
  Description of Artificial Sequence: Synthetic oligonucleotide
ugcucuauucaacaggacg

SEQ ID NO: 2046939 - RNA, 19 nt, Artificial Sequence
  Description of Artificial Sequence: Synthetic oligonucleotide
aaguaguccuuuuacuuac

SEQ ID NO: 2046940 - RNA, 19 nt, Artificial Sequence
  Description of Artificial Sequence: Synthetic oligonucleotide
agaaauuaauaauaauuug

SEQ ID NO: 2046941 - RNA, 19 nt, Artificial Sequence
  Description of Artificial Sequence: Synthetic oligonucleotide
aaugcuauuaaaucaggaa

SEQ ID NO: 2046942 - RNA, 19 nt, Artificial Sequence
  Description of Artificial Sequence: Synthetic oligonucleotide
agaaacauaugccuuuugg

SEQ ID NO: 2046943 - RNA, 19 nt, Artificial Sequence
  Description of Artificial Sequence: Synthetic oligonucleotide
uucuuaaagguuaaccaag

SEQ ID NO: 2046944 - RNA, 19 nt, Artificial Sequence
  Description of Artificial Sequence: Synthetic oligonucleotide
uguuuggcauagaagacgg

SEQ ID NO: 2046945 - RNA, 19 nt, Artificial Sequence
  Description of Artificial Sequence: Synthetic oligonucleotide
aauaauaauuugucuguca

SEQ ID NO: 2046946 - RNA, 19 nt, Artificial Sequence
  Description of Artificial Sequence: Synthetic oligonucleotide
aagcuuauggagugggagc

SEQ ID NO: 2046947 - RNA, 19 nt, Artificial Sequence
  Description of Artificial Sequence: Synthetic oligonucleotide
accaaaauagugaagaauc

SEQ ID NO: 2046948 - RNA, 19 nt, Artificial Sequence
  Description of Artificial Sequence: Synthetic oligonucleotide
aacauaugccuuuuggucu

SEQ ID NO: 2046949 - RNA, 19 nt, Artificial Sequence
  Description of Artificial Sequence: Synthetic oligonucleotide
uuacuuacacagauaagag

SEQ ID NO: 2046950 - RNA, 19 nt, Artificial Sequence
  Description of Artificial Sequence: Synthetic oligonucleotide
acuuacacagauaagagag

SEQ ID NO: 2046951 - RNA, 19 nt, Artificial Sequence
  Description of Artificial Sequence: Synthetic oligonucleotide
aauaagggcucuucuggac

SEQ ID NO: 2046952 - RNA, 19 nt, Artificial Sequence
  Description of Artificial Sequence: Synthetic oligonucleotide
aaucucuugaauaagggcu

SEQ ID NO: 2046953 - RNA, 19 nt, Artificial Sequence
  Description of Artificial Sequence: Synthetic oligonucleotide
uuagcaagaauccuuggcu

SEQ ID NO: 2046954 - RNA, 19 nt, Artificial Sequence
  Description of Artificial Sequence: Synthetic oligonucleotide
ugaauguuuggcauagaag

SEQ ID NO: 2046955 - RNA, 19 nt, Artificial Sequence
  Description of Artificial Sequence: Synthetic oligonucleotide
uuugcucuauucaacagga

SEQ ID NO: 2046956 - RNA, 19 nt, Artificial Sequence
  Description of Artificial Sequence: Synthetic oligonucleotide
uuucguuacucucuaacug

SEQ ID NO: 2046957 - RNA, 19 nt, Artificial Sequence
  Description of Artificial Sequence: Synthetic oligonucleotide
uaagaaugauguuacacgu

SEQ ID NO: 2046958 - RNA, 19 nt, Artificial Sequence
  Description of Artificial Sequence: Synthetic oligonucleotide
ugaguucucccuuuggagg

SEQ ID NO: 2046959 - RNA, 19 nt, Artificial Sequence
  Description of Artificial Sequence: Synthetic oligonucleotide
ucugaagagggagaaaccg

SEQ ID NO: 2046960 - RNA, 19 nt, Artificial Sequence
  Description of Artificial Sequence: Synthetic oligonucleotide
uuucuacuaaauaccaggc

SEQ ID NO: 2046961 - RNA, 19 nt, Artificial Sequence
  Description of Artificial Sequence: Synthetic oligonucleotide
uucuacuaaauaccaggcg

SEQ ID NO: 2046962 - RNA, 19 nt, Artificial Sequence
  Description of Artificial Sequence: Synthetic oligonucleotide
uguuacacguauuggaagc

SEQ ID NO: 2046963 - RNA, 19 nt, Artificial Sequence
  Description of Artificial Sequence: Synthetic oligonucleotide
ugucaagaaacauaugccu

SEQ ID NO: 2046964 - RNA, 19 nt, Artificial Sequence
  Description of Artificial Sequence: Synthetic oligonucleotide
gaauagauaagaaugaugu

SEQ ID NO: 2046965 - RNA, 19 nt, Artificial Sequence
  Description of Artificial Sequence: Synthetic oligonucleotide
gauaagaaugauguuacac

SEQ ID NO: 2046966 - RNA, 19 nt, Artificial Sequence
  Description of Artificial Sequence: Synthetic oligonucleotide
uugguugaaauguauguga

SEQ ID NO: 2046967 - RNA, 19 nt, Artificial Sequence
  Description of Artificial Sequence: Synthetic oligonucleotide
aauguuuggcauagaagac

SEQ ID NO: 2046968 - RNA, 19 nt, Artificial Sequence
  Description of Artificial Sequence: Synthetic oligonucleotide
ugucugucaagaaacauau

SEQ ID NO: 2046969 - RNA, 19 nt, Artificial Sequence
  Description of Artificial Sequence: Synthetic oligonucleotide
uaaucucuugaauaagggc

SEQ ID NO: 2046970 - RNA, 19 nt, Artificial Sequence
  Description of Artificial Sequence: Synthetic oligonucleotide
gugauugcuuucuuaaagg

SEQ ID NO: 2046971 - RNA, 19 nt, Artificial Sequence
  Description of Artificial Sequence: Synthetic oligonucleotide
uccgaugcauuuaagcugc

SEQ ID NO: 2046972 - RNA, 19 nt, Artificial Sequence
  Description of Artificial Sequence: Synthetic oligonucleotide
aauguaugugagucagauc

SEQ ID NO: 2046973 - RNA, 19 nt, Artificial Sequence
  Description of Artificial Sequence: Synthetic oligonucleotide
guuugcucuauucaacagg

SEQ ID NO: 2046974 - RNA, 19 nt, Artificial Sequence
  Description of Artificial Sequence: Synthetic oligonucleotide
uuacacagauaagagagcc

SEQ ID NO: 2046975 - RNA, 19 nt, Artificial Sequence
  Description of Artificial Sequence: Synthetic oligonucleotide
cugucaagaaacauaugcc

SEQ ID NO: 2046976 - RNA, 19 nt, Artificial Sequence
  Description of Artificial Sequence: Synthetic oligonucleotide
acagauaagagagcccucc

SEQ ID NO: 2046977 - RNA, 19 nt, Artificial Sequence
  Description of Artificial Sequence: Synthetic oligonucleotide
ugugagucagauccagagg

SEQ ID NO: 2046978 - RNA, 19 nt, Artificial Sequence
  Description of Artificial Sequence: Synthetic oligonucleotide
uaacugaauuugcugaaug

SEQ ID NO: 2046979 - RNA, 19 nt, Artificial Sequence
  Description of Artificial Sequence: Synthetic oligonucleotide
aaucaggaaccagaauccc

SEQ ID NO: 2046980 - RNA, 19 nt, Artificial Sequence
  Description of Artificial Sequence: Synthetic oligonucleotide
ucuuucguuacucucuaac

SEQ ID NO: 2046981 - RNA, 19 nt, Artificial Sequence
  Description of Artificial Sequence: Synthetic oligonucleotide
guugaaauguaugugaguc

SEQ ID NO: 2046982 - RNA, 19 nt, Artificial Sequence
  Description of Artificial Sequence: Synthetic oligonucleotide
aagaauccuuggcucaggg

SEQ ID NO: 2046983 - RNA, 19 nt, Artificial Sequence
  Description of Artificial Sequence: Synthetic oligonucleotide
auagauaagaaugauguua

SEQ ID NO: 2046984 - RNA, 19 nt, Artificial Sequence
  Description of Artificial Sequence: Synthetic oligonucleotide
ugguugaaauguaugugag

SEQ ID NO: 2046985 - RNA, 19 nt, Artificial Sequence
  Description of Artificial Sequence: Synthetic oligonucleotide
agaauucaguucuccaggg

SEQ ID NO: 2046986 - RNA, 19 nt, Artificial Sequence
  Description of Artificial Sequence: Synthetic oligonucleotide
gguaaauucgguucugggg

SEQ ID NO: 2046987 - RNA, 19 nt, Artificial Sequence
  Description of Artificial Sequence: Synthetic oligonucleotide
uuuuacuuacacagauaag

SEQ ID NO: 2046988 - RNA, 19 nt, Artificial Sequence
  Description of Artificial Sequence: Synthetic oligonucleotide
cuagguguagguaaugcug

SEQ ID NO: 2046989 - RNA, 19 nt, Artificial Sequence
  Description of Artificial Sequence: Synthetic oligonucleotide
agaaugauguuacacguau

SEQ ID NO: 2046990 - RNA, 19 nt, Artificial Sequence
  Description of Artificial Sequence: Synthetic oligonucleotide
ugucaaguaguccuuuuac

SEQ ID NO: 2046991 - RNA, 19 nt, Artificial Sequence
  Description of Artificial Sequence: Synthetic oligonucleotide
ugugauggagcggauagag

SEQ ID NO: 2046992 - RNA, 19 nt, Artificial Sequence
  Description of Artificial Sequence: Synthetic oligonucleotide
uucguuacucucuaacuga

SEQ ID NO: 2046993 - RNA, 19 nt, Artificial Sequence
  Description of Artificial Sequence: Synthetic oligonucleotide
caucuguuagcaagaaucc

SEQ ID NO: 2046994 - RNA, 19 nt, Artificial Sequence
  Description of Artificial Sequence: Synthetic oligonucleotide
ugaucagacucugaggaag

SEQ ID NO: 2046995 - RNA, 19 nt, Artificial Sequence
  Description of Artificial Sequence: Synthetic oligonucleotide
ucagguuaaaugcuauuaa

SEQ ID NO: 2046996 - RNA, 19 nt, Artificial Sequence
  Description of Artificial Sequence: Synthetic oligonucleotide
uuccgaugcauuuaagcug

SEQ ID NO: 2046997 - RNA, 19 nt, Artificial Sequence
  Description of Artificial Sequence: Synthetic oligonucleotide
guacugaucagacucugag

SEQ ID NO: 2046998 - RNA, 19 nt, Artificial Sequence
  Description of Artificial Sequence: Synthetic oligonucleotide
uccuuuuacuuacacagau

SEQ ID NO: 2046999 - RNA, 19 nt, Artificial Sequence
  Description of Artificial Sequence: Synthetic oligonucleotide
uaguuggaucaucaaaggc

SEQ ID NO: 2047000 - RNA, 19 nt, Artificial Sequence
  Description of Artificial Sequence: Synthetic oligonucleotide
guuagcaagaauccuuggc

SEQ ID NO: 2047001 - RNA, 19 nt, Artificial Sequence
  Description of Artificial Sequence: Synthetic oligonucleotide
aguuggaucaucaaaggcu

SEQ ID NO: 2047002 - RNA, 19 nt, Artificial Sequence
  Description of Artificial Sequence: Synthetic oligonucleotide
guucccauuaguuggauca

SEQ ID NO: 2047003 - RNA, 19 nt, Artificial Sequence
  Description of Artificial Sequence: Synthetic oligonucleotide
ugugaguucucccuuugga

SEQ ID NO: 2047004 - RNA, 19 nt, Artificial Sequence
  Description of Artificial Sequence: Synthetic oligonucleotide
aaauagugaagaauccuga

SEQ ID NO: 2047005 - RNA, 19 nt, Artificial Sequence
  Description of Artificial Sequence: Synthetic oligonucleotide
aaauaccaggcgaacagag

SEQ ID NO: 2047006 - RNA, 19 nt, Artificial Sequence
  Description of Artificial Sequence: Synthetic oligonucleotide
aaaccgucacuccagaauu

SEQ ID NO: 2047007 - RNA, 19 nt, Artificial Sequence
  Description of Artificial Sequence: Synthetic oligonucleotide
aagacggaaggacugaaua

SEQ ID NO: 2047008 - RNA, 19 nt, Artificial Sequence
  Description of Artificial Sequence: Synthetic oligonucleotide
uaaguuucucuugccaacg

SEQ ID NO: 2047009 - RNA, 19 nt, Artificial Sequence
  Description of Artificial Sequence: Synthetic oligonucleotide
ugugaguccacaguggcug

SEQ ID NO: 2047010 - RNA, 19 nt, Artificial Sequence
  Description of Artificial Sequence: Synthetic oligonucleotide
aggaccaaaauagugaaga

SEQ ID NO: 2047011 - RNA, 19 nt, Artificial Sequence
  Description of Artificial Sequence: Synthetic oligonucleotide
gguuaaaugcuauuaaauc

SEQ ID NO: 2047012 - RNA, 19 nt, Artificial Sequence
  Description of Artificial Sequence: Synthetic oligonucleotide
uuggagguaaauucgguuc

SEQ ID NO: 2047013 - RNA, 19 nt, Artificial Sequence
  Description of Artificial Sequence: Synthetic oligonucleotide
uacugaucagacucugagg

SEQ ID NO: 2047014 - RNA, 19 nt, Artificial Sequence
  Description of Artificial Sequence: Synthetic oligonucleotide
ugauugcuuucuuaaaggu

SEQ ID NO: 2047015 - RNA, 19 nt, Artificial Sequence
  Description of Artificial Sequence: Synthetic oligonucleotide
auaagagagcccucccugg

SEQ ID NO: 2047016 - RNA, 19 nt, Artificial Sequence
  Description of Artificial Sequence: Synthetic oligonucleotide
uacuuacacagauaagaga

SEQ ID NO: 2047017 - RNA, 19 nt, Artificial Sequence
  Description of Artificial Sequence: Synthetic oligonucleotide
gagcucagugguuauggcg

SEQ ID NO: 2047018 - RNA, 19 nt, Artificial Sequence
  Description of Artificial Sequence: Synthetic oligonucleotide
cucacacacacacacacac

SEQ ID NO: 2047019 - RNA, 19 nt, Artificial Sequence
  Description of Artificial Sequence: Synthetic oligonucleotide
ggugauugcuuucuuaaag

SEQ ID NO: 2047020 - RNA, 19 nt, Artificial Sequence
  Description of Artificial Sequence: Synthetic oligonucleotide
uguuugcucuauucaacag

SEQ ID NO: 2047021 - RNA, 19 nt, Artificial Sequence
  Description of Artificial Sequence: Synthetic oligonucleotide
gaauucaguucuccagggg

SEQ ID NO: 2047022 - RNA, 19 nt, Artificial Sequence
  Description of Artificial Sequence: Synthetic oligonucleotide
aacaggacguugaaggcag

SEQ ID NO: 2047023 - RNA, 19 nt, Artificial Sequence
  Description of Artificial Sequence: Synthetic oligonucleotide
aguaaguuucucuugccaa

SEQ ID NO: 2047024 - RNA, 19 nt, Artificial Sequence
  Description of Artificial Sequence: Synthetic oligonucleotide
agacggaaggacugaauag

SEQ ID NO: 2047025 - RNA, 19 nt, Artificial Sequence
  Description of Artificial Sequence: Synthetic oligonucleotide
cacacacacacacacacac

SEQ ID NO: 2047026 - RNA, 19 nt, Artificial Sequence
  Description of Artificial Sequence: Synthetic oligonucleotide
ucccuuuggagguaaauuc

SEQ ID NO: 2047027 - RNA, 19 nt, Artificial Sequence
  Description of Artificial Sequence: Synthetic oligonucleotide
cuuacacagauaagagagc

SEQ ID NO: 2047028 - RNA, 19 nt, Artificial Sequence
  Description of Artificial Sequence: Synthetic oligonucleotide
aaccagaauccccggaaug

SEQ ID NO: 2047029 - RNA, 19 nt, Artificial Sequence
  Description of Artificial Sequence: Synthetic oligonucleotide
aauccugaccaguuccugu

SEQ ID NO: 2047030 - RNA, 19 nt, Artificial Sequence
  Description of Artificial Sequence: Synthetic oligonucleotide
ucaacaggacguugaaggc

SEQ ID NO: 2047031 - RNA, 19 nt, Artificial Sequence
  Description of Artificial Sequence: Synthetic oligonucleotide
acugaauagauaagaauga

SEQ ID NO: 2047032 - RNA, 19 nt, Artificial Sequence
  Description of Artificial Sequence: Synthetic oligonucleotide
uuucaguaggcauuccagu

SEQ ID NO: 2047033 - RNA, 19 nt, Artificial Sequence
  Description of Artificial Sequence: Synthetic oligonucleotide
guaaauucgguucuggggu

SEQ ID NO: 2047034 - RNA, 19 nt, Artificial Sequence
  Description of Artificial Sequence: Synthetic oligonucleotide
ucuuguugugaguucuccc

SEQ ID NO: 2047035 - RNA, 19 nt, Artificial Sequence
  Description of Artificial Sequence: Synthetic oligonucleotide
uugaaggcagaguaagcac

SEQ ID NO: 2047036 - RNA, 19 nt, Artificial Sequence
  Description of Artificial Sequence: Synthetic oligonucleotide
caugugaguccacaguggc

SEQ ID NO: 2047037 - RNA, 19 nt, Artificial Sequence
  Description of Artificial Sequence: Synthetic oligonucleotide
ucaguaggcauuccaguaa

SEQ ID NO: 2047038 - RNA, 19 nt, Artificial Sequence
  Description of Artificial Sequence: Synthetic oligonucleotide
cucuaacugaauuugcuga

SEQ ID NO: 2047039 - RNA, 19 nt, Artificial Sequence
  Description of Artificial Sequence: Synthetic oligonucleotide
acacagauaagagagcccu

SEQ ID NO: 2047040 - RNA, 19 nt, Artificial Sequence
  Description of Artificial Sequence: Synthetic oligonucleotide
agugguuauggcgacaugu

SEQ ID NO: 2047041 - RNA, 19 nt, Artificial Sequence
  Description of Artificial Sequence: Synthetic oligonucleotide
acacacacguuucuuguug

SEQ ID NO: 2047042 - RNA, 19 nt, Artificial Sequence
  Description of Artificial Sequence: Synthetic oligonucleotide
agaggaucugaagagggag

SEQ ID NO: 2047043 - RNA, 19 nt, Artificial Sequence
  Description of Artificial Sequence: Synthetic oligonucleotide
uucagguuaaaugcuauua

SEQ ID NO: 2047044 - RNA, 19 nt, Artificial Sequence
  Description of Artificial Sequence: Synthetic oligonucleotide
uucuaaucucuugaauaag

SEQ ID NO: 2047045 - RNA, 19 nt, Artificial Sequence
  Description of Artificial Sequence: Synthetic oligonucleotide
ugcuuucagguuaaaugcu

SEQ ID NO: 2047046 - RNA, 19 nt, Artificial Sequence
  Description of Artificial Sequence: Synthetic oligonucleotide
auaccaggcgaacagagua

SEQ ID NO: 2047047 - RNA, 19 nt, Artificial Sequence
  Description of Artificial Sequence: Synthetic oligonucleotide
guaaguuucucuugccaac

SEQ ID NO: 2047048 - RNA, 19 nt, Artificial Sequence
  Description of Artificial Sequence: Synthetic oligonucleotide
uugugaguucucccuuugg

SEQ ID NO: 2047049 - RNA, 19 nt, Artificial Sequence
  Description of Artificial Sequence: Synthetic oligonucleotide
uuuuguucauggugauugc

SEQ ID NO: 2047050 - RNA, 19 nt, Artificial Sequence
  Description of Artificial Sequence: Synthetic oligonucleotide
aucaucaaaggcuuccgau

SEQ ID NO: 2047051 - RNA, 19 nt, Artificial Sequence
  Description of Artificial Sequence: Synthetic oligonucleotide
uguaugugagucagaucca

SEQ ID NO: 2047052 - RNA, 19 nt, Artificial Sequence
  Description of Artificial Sequence: Synthetic oligonucleotide
uuuggagguaaauucgguu

SEQ ID NO: 2047053 - RNA, 19 nt, Artificial Sequence
  Description of Artificial Sequence: Synthetic oligonucleotide
uaauaauaauuugucuguc

SEQ ID NO: 2047054 - RNA, 19 nt, Artificial Sequence
  Description of Artificial Sequence: Synthetic oligonucleotide
auccugaccaguuccuguc

SEQ ID NO: 2047055 - RNA, 19 nt, Artificial Sequence
  Description of Artificial Sequence: Synthetic oligonucleotide
uucaguaggcauuccagua

SEQ ID NO: 2047056 - RNA, 19 nt, Artificial Sequence
  Description of Artificial Sequence: Synthetic oligonucleotide
uaaauucgguucuggggug

SEQ ID NO: 2047057 - RNA, 19 nt, Artificial Sequence
  Description of Artificial Sequence: Synthetic oligonucleotide
ugguuauggcgacauguga

SEQ ID NO: 2047058 - RNA, 19 nt, Artificial Sequence
  Description of Artificial Sequence: Synthetic oligonucleotide
gaucagacucugaggaagg

SEQ ID NO: 2047059 - RNA, 19 nt, Artificial Sequence
  Description of Artificial Sequence: Synthetic oligonucleotide
cacccugacuuucaguagg

SEQ ID NO: 2047060 - RNA, 19 nt, Artificial Sequence
  Description of Artificial Sequence: Synthetic oligonucleotide
ggcgucaucuguuagcaag

SEQ ID NO: 2047061 - RNA, 19 nt, Artificial Sequence
  Description of Artificial Sequence: Synthetic oligonucleotide
auaauuugucugucaagaa

SEQ ID NO: 2047062 - RNA, 19 nt, Artificial Sequence
  Description of Artificial Sequence: Synthetic oligonucleotide
guugaaggcagaguaagca

SEQ ID NO: 2047063 - RNA, 19 nt, Artificial Sequence
  Description of Artificial Sequence: Synthetic oligonucleotide
ugggcuuugguuucccuac

SEQ ID NO: 2047064 - RNA, 19 nt, Artificial Sequence
  Description of Artificial Sequence: Synthetic oligonucleotide
uguucauggugauugcuuu

SEQ ID NO: 2047065 - RNA, 19 nt, Artificial Sequence
  Description of Artificial Sequence: Synthetic oligonucleotide
agcaagaauccuuggcuca

SEQ ID NO: 2047066 - RNA, 19 nt, Artificial Sequence
  Description of Artificial Sequence: Synthetic oligonucleotide
acuaaauaccaggcgaaca

SEQ ID NO: 2047067 - RNA, 19 nt, Artificial Sequence
  Description of Artificial Sequence: Synthetic oligonucleotide
gaauaagggcucuucugga

SEQ ID NO: 2047068 - RNA, 19 nt, Artificial Sequence
  Description of Artificial Sequence: Synthetic oligonucleotide
gaaggcagaguaagcaccc

SEQ ID NO: 2047069 - RNA, 19 nt, Artificial Sequence
  Description of Artificial Sequence: Synthetic oligonucleotide
acguugaaggcagaguaag

SEQ ID NO: 2047070 - RNA, 19 nt, Artificial Sequence
  Description of Artificial Sequence: Synthetic oligonucleotide
uaugugagucagauccaga

SEQ ID NO: 2047071 - RNA, 19 nt, Artificial Sequence
  Description of Artificial Sequence: Synthetic oligonucleotide
uuguucauggugauugcuu

SEQ ID NO: 2047072 - RNA, 19 nt, Artificial Sequence
  Description of Artificial Sequence: Synthetic oligonucleotide
ucuauucaacaggacguug

SEQ ID NO: 2047073 - RNA, 19 nt, Artificial Sequence
  Description of Artificial Sequence: Synthetic oligonucleotide
ccaaaauagugaagaaucc

SEQ ID NO: 2047074 - RNA, 19 nt, Artificial Sequence
  Description of Artificial Sequence: Synthetic oligonucleotide
uagcaagaauccuuggcuc

SEQ ID NO: 2047075 - RNA, 19 nt, Artificial Sequence
  Description of Artificial Sequence: Synthetic oligonucleotide
agguuaaaugcuauuaaau

SEQ ID NO: 2047076 - RNA, 19 nt, Artificial Sequence
  Description of Artificial Sequence: Synthetic oligonucleotide
aaguuucucuugccaacgu

SEQ ID NO: 2047077 - RNA, 19 nt, Artificial Sequence
  Description of Artificial Sequence: Synthetic oligonucleotide
gaagaauccugaccaguuc

SEQ ID NO: 2047078 - RNA, 19 nt, Artificial Sequence
  Description of Artificial Sequence: Synthetic oligonucleotide
uaaauaccaggcgaacaga

SEQ ID NO: 2047079 - RNA, 19 nt, Artificial Sequence
  Description of Artificial Sequence: Synthetic oligonucleotide
uauuggaagccacggccac

SEQ ID NO: 2047080 - RNA, 19 nt, Artificial Sequence
  Description of Artificial Sequence: Synthetic oligonucleotide
uuucucuugccaacguuua

SEQ ID NO: 2047081 - RNA, 19 nt, Artificial Sequence
  Description of Artificial Sequence: Synthetic oligonucleotide
auggagugggagcucagug

SEQ ID NO: 2047082 - RNA, 19 nt, Artificial Sequence
  Description of Artificial Sequence: Synthetic oligonucleotide
cacguauuggaagccacgg

SEQ ID NO: 2047083 - RNA, 19 nt, Artificial Sequence
  Description of Artificial Sequence: Synthetic oligonucleotide
uucuuguugugaguucucc

SEQ ID NO: 2047084 - RNA, 19 nt, Artificial Sequence
  Description of Artificial Sequence: Synthetic oligonucleotide
cagaauccccggaauggcg

SEQ ID NO: 2047085 - RNA, 19 nt, Artificial Sequence
  Description of Artificial Sequence: Synthetic oligonucleotide
gacggaaggacugaauaga

SEQ ID NO: 2047086 - RNA, 19 nt, Artificial Sequence
  Description of Artificial Sequence: Synthetic oligonucleotide
gguuauggcgacaugugag

SEQ ID NO: 2047087 - RNA, 19 nt, Artificial Sequence
  Description of Artificial Sequence: Synthetic oligonucleotide
caguaggcauuccaguaag

SEQ ID NO: 2047088 - RNA, 19 nt, Artificial Sequence
  Description of Artificial Sequence: Synthetic oligonucleotide
ucuugaauaagggcucuuc

SEQ ID NO: 2047089 - RNA, 19 nt, Artificial Sequence
  Description of Artificial Sequence: Synthetic oligonucleotide
acauugguugaaauguaug

SEQ ID NO: 2047090 - RNA, 19 nt, Artificial Sequence
  Description of Artificial Sequence: Synthetic oligonucleotide
accagcaugguucccauua

SEQ ID NO: 2047091 - RNA, 19 nt, Artificial Sequence
  Description of Artificial Sequence: Synthetic oligonucleotide
gcuuccgaugcauuuaagc

SEQ ID NO: 2047092 - RNA, 19 nt, Artificial Sequence
  Description of Artificial Sequence: Synthetic oligonucleotide
ucguuacucucuaacugaa

SEQ ID NO: 2047093 - RNA, 19 nt, Artificial Sequence
  Description of Artificial Sequence: Synthetic oligonucleotide
aauccccggaauggcgacc

SEQ ID NO: 2047094 - RNA, 19 nt, Artificial Sequence
  Description of Artificial Sequence: Synthetic oligonucleotide
gcgaacagaguacugauca

SEQ ID NO: 2047095 - RNA, 19 nt, Artificial Sequence
  Description of Artificial Sequence: Synthetic oligonucleotide
agauaagaaugauguuaca

SEQ ID NO: 2047096 - RNA, 19 nt, Artificial Sequence
  Description of Artificial Sequence: Synthetic oligonucleotide
ucacacacacacacacaca

SEQ ID NO: 2047097 - RNA, 19 nt, Artificial Sequence
  Description of Artificial Sequence: Synthetic oligonucleotide
ucccacucagaguacuggc

SEQ ID NO: 2047098 - RNA, 19 nt, Artificial Sequence
  Description of Artificial Sequence: Synthetic oligonucleotide
aauaccaggcgaacagagu

SEQ ID NO: 2047099 - RNA, 19 nt, Artificial Sequence
  Description of Artificial Sequence: Synthetic oligonucleotide
guaugugagucagauccag

SEQ ID NO: 2047100 - RNA, 19 nt, Artificial Sequence
  Description of Artificial Sequence: Synthetic oligonucleotide
caaggaccaaaauagugaa

SEQ ID NO: 2047101 - RNA, 19 nt, Artificial Sequence
  Description of Artificial Sequence: Synthetic oligonucleotide
ugaccaguuccugucaagu

SEQ ID NO: 2047102 - RNA, 19 nt, Artificial Sequence
  Description of Artificial Sequence: Synthetic oligonucleotide
augccuuuuggucuuucgu

SEQ ID NO: 2047103 - RNA, 19 nt, Artificial Sequence
  Description of Artificial Sequence: Synthetic oligonucleotide
cuuccgaugcauuuaagcu

SEQ ID NO: 2047104 - RNA, 19 nt, Artificial Sequence
  Description of Artificial Sequence: Synthetic oligonucleotide
guuacacguauuggaagcc

SEQ ID NO: 2047105 - RNA, 19 nt, Artificial Sequence
  Description of Artificial Sequence: Synthetic oligonucleotide
gacaagggacuucuaaucu

SEQ ID NO: 2047106 - RNA, 19 nt, Artificial Sequence
  Description of Artificial Sequence: Synthetic oligonucleotide
guaguccuuuuacuuacac

SEQ ID NO: 2047107 - RNA, 19 nt, Artificial Sequence
  Description of Artificial Sequence: Synthetic oligonucleotide
uuacacguauuggaagcca

SEQ ID NO: 2047108 - RNA, 19 nt, Artificial Sequence
  Description of Artificial Sequence: Synthetic oligonucleotide
cuuaaagguuaaccaagga

SEQ ID NO: 2047109 - RNA, 19 nt, Artificial Sequence
  Description of Artificial Sequence: Synthetic oligonucleotide
uaccaggcgaacagaguac

SEQ ID NO: 2047110 - RNA, 19 nt, Artificial Sequence
  Description of Artificial Sequence: Synthetic oligonucleotide
cuacuaaauaccaggcgaa

SEQ ID NO: 2047111 - RNA, 19 nt, Artificial Sequence
  Description of Artificial Sequence: Synthetic oligonucleotide
uugccaacguuuauuucua

SEQ ID NO: 2047112 - RNA, 19 nt, Artificial Sequence
  Description of Artificial Sequence: Synthetic oligonucleotide
agcucagugguuauggcga

SEQ ID NO: 2047113 - RNA, 19 nt, Artificial Sequence
  Description of Artificial Sequence: Synthetic oligonucleotide
uuauggagugggagcucag

SEQ ID NO: 2047114 - RNA, 19 nt, Artificial Sequence
  Description of Artificial Sequence: Synthetic oligonucleotide
gaaaccgucacuccagaau

SEQ ID NO: 2047115 - RNA, 19 nt, Artificial Sequence
  Description of Artificial Sequence: Synthetic oligonucleotide
ugacuuucaguaggcauuc

SEQ ID NO: 2047116 - RNA, 19 nt, Artificial Sequence
  Description of Artificial Sequence: Synthetic oligonucleotide
ggaaggaaugcugucucgg

SEQ ID NO: 2047117 - RNA, 19 nt, Artificial Sequence
  Description of Artificial Sequence: Synthetic oligonucleotide
cacuagcugugcuuucagg

SEQ ID NO: 2047118 - RNA, 19 nt, Artificial Sequence
  Description of Artificial Sequence: Synthetic oligonucleotide
cccuuuggagguaaauucg

SEQ ID NO: 2047119 - RNA, 19 nt, Artificial Sequence
  Description of Artificial Sequence: Synthetic oligonucleotide
guugugaguucucccuuug

SEQ ID NO: 2047120 - RNA, 19 nt, Artificial Sequence
  Description of Artificial Sequence: Synthetic oligonucleotide
cagauaagagagcccuccc

SEQ ID NO: 2047121 - RNA, 19 nt, Artificial Sequence
  Description of Artificial Sequence: Synthetic oligonucleotide
ucagauccagaggaucuga

SEQ ID NO: 2047122 - RNA, 19 nt, Artificial Sequence
  Description of Artificial Sequence: Synthetic oligonucleotide
cuggaccucccacucagag

SEQ ID NO: 2047123 - RNA, 19 nt, Artificial Sequence
  Description of Artificial Sequence: Synthetic oligonucleotide
guuacucucuaacugaauu

SEQ ID NO: 2047124 - RNA, 19 nt, Artificial Sequence
  Description of Artificial Sequence: Synthetic oligonucleotide
acacacacacacacguuuc

SEQ ID NO: 2047125 - RNA, 19 nt, Artificial Sequence
  Description of Artificial Sequence: Synthetic oligonucleotide
ugagggguuuccuguacaa

SEQ ID NO: 2047126 - RNA, 19 nt, Artificial Sequence
  Description of Artificial Sequence: Synthetic oligonucleotide
cauagaagacggaaggacu

SEQ ID NO: 2047127 - RNA, 19 nt, Artificial Sequence
  Description of Artificial Sequence: Synthetic oligonucleotide
aaauucgguucuggggugu

SEQ ID NO: 2047128 - RNA, 19 nt, Artificial Sequence
  Description of Artificial Sequence: Synthetic oligonucleotide
uagaagacggaaggacuga

SEQ ID NO: 2047129 - RNA, 19 nt, Artificial Sequence
  Description of Artificial Sequence: Synthetic oligonucleotide
ucucuugccaacguuuauu

SEQ ID NO: 2047130 - RNA, 19 nt, Artificial Sequence
  Description of Artificial Sequence: Synthetic oligonucleotide
aagaaugauguuacacgua

SEQ ID NO: 2047131 - RNA, 19 nt, Artificial Sequence
  Description of Artificial Sequence: Synthetic oligonucleotide
uguggucuggugucccggc

SEQ ID NO: 2047132 - RNA, 19 nt, Artificial Sequence
  Description of Artificial Sequence: Synthetic oligonucleotide
guaaugcuggcugaagcca

SEQ ID NO: 2047133 - RNA, 19 nt, Artificial Sequence
  Description of Artificial Sequence: Synthetic oligonucleotide
agaguacuggcgucaucug

SEQ ID NO: 2047134 - RNA, 19 nt, Artificial Sequence
  Description of Artificial Sequence: Synthetic oligonucleotide
agguuaaccaaggaccaaa

SEQ ID NO: 2047135 - RNA, 19 nt, Artificial Sequence
  Description of Artificial Sequence: Synthetic oligonucleotide
cuuucguuacucucuaacu

SEQ ID NO: 2047136 - RNA, 19 nt, Artificial Sequence
  Description of Artificial Sequence: Synthetic oligonucleotide
uguugugaguucucccuuu

SEQ ID NO: 2047137 - RNA, 19 nt, Artificial Sequence
  Description of Artificial Sequence: Synthetic oligonucleotide
gaguacugaucagacucug

SEQ ID NO: 2047138 - RNA, 19 nt, Artificial Sequence
  Description of Artificial Sequence: Synthetic oligonucleotide
uuauggcgacaugugaguc

SEQ ID NO: 2047139 - RNA, 19 nt, Artificial Sequence
  Description of Artificial Sequence: Synthetic oligonucleotide
aguuucucuugccaacguu

SEQ ID NO: 2047140 - RNA, 19 nt, Artificial Sequence
  Description of Artificial Sequence: Synthetic oligonucleotide
gaauccugaccaguuccug

SEQ ID NO: 2047141 - RNA, 19 nt, Artificial Sequence
  Description of Artificial Sequence: Synthetic oligonucleotide
cucccacucagaguacugg

SEQ ID NO: 2047142 - RNA, 19 nt, Artificial Sequence
  Description of Artificial Sequence: Synthetic oligonucleotide
aggcgaacagaguacugau

SEQ ID NO: 2047143 - RNA, 19 nt, Artificial Sequence
  Description of Artificial Sequence: Synthetic oligonucleotide
gggagcucagugguuaugg

SEQ ID NO: 2047144 - RNA, 19 nt, Artificial Sequence
  Description of Artificial Sequence: Synthetic oligonucleotide
agccacggccacuagcugu

SEQ ID NO: 2047145 - RNA, 19 nt, Artificial Sequence
  Description of Artificial Sequence: Synthetic oligonucleotide
gcauagaagacggaaggac

SEQ ID NO: 2047146 - RNA, 19 nt, Artificial Sequence
  Description of Artificial Sequence: Synthetic oligonucleotide
guuauggcgacaugugagu

SEQ ID NO: 2047147 - RNA, 19 nt, Artificial Sequence
  Description of Artificial Sequence: Synthetic oligonucleotide
acacacacacacacacacg

SEQ ID NO: 2047148 - RNA, 19 nt, Artificial Sequence
  Description of Artificial Sequence: Synthetic oligonucleotide
ucuggugucccggcuaggu

SEQ ID NO: 2047149 - RNA, 19 nt, Artificial Sequence
  Description of Artificial Sequence: Synthetic oligonucleotide
uugcucuauucaacaggac

SEQ ID NO: 2047150 - RNA, 19 nt, Artificial Sequence
  Description of Artificial Sequence: Synthetic oligonucleotide
gaagccacggccacuagcu

SEQ ID NO: 2047151 - RNA, 19 nt, Artificial Sequence
  Description of Artificial Sequence: Synthetic oligonucleotide
ggaccucccacucagagua

SEQ ID NO: 2047152 - RNA, 19 nt, Artificial Sequence
  Description of Artificial Sequence: Synthetic oligonucleotide
ggaaugcugucucgguggg

SEQ ID NO: 2047153 - RNA, 19 nt, Artificial Sequence
  Description of Artificial Sequence: Synthetic oligonucleotide
gucaaguaguccuuuuacu

SEQ ID NO: 2047154 - RNA, 19 nt, Artificial Sequence
  Description of Artificial Sequence: Synthetic oligonucleotide
gaauccccggaauggcgac

SEQ ID NO: 2047155 - RNA, 19 nt, Artificial Sequence
  Description of Artificial Sequence: Synthetic oligonucleotide
cacacacacacacacacgu

SEQ ID NO: 2047156 - RNA, 19 nt, Artificial Sequence
  Description of Artificial Sequence: Synthetic oligonucleotide
gagaaaccgucacuccaga

SEQ ID NO: 2047157 - RNA, 19 nt, Artificial Sequence
  Description of Artificial Sequence: Synthetic oligonucleotide
guucauggugauugcuuuc

SEQ ID NO: 2047158 - RNA, 19 nt, Artificial Sequence
  Description of Artificial Sequence: Synthetic oligonucleotide
uauggagugggagcucagu

SEQ ID NO: 2047159 - RNA, 19 nt, Artificial Sequence
  Description of Artificial Sequence: Synthetic oligonucleotide
agaguacugaucagacucu

SEQ ID NO: 2047160 - RNA, 19 nt, Artificial Sequence
  Description of Artificial Sequence: Synthetic oligonucleotide
ugucccggcuagguguagg

SEQ ID NO: 2047161 - RNA, 19 nt, Artificial Sequence
  Description of Artificial Sequence: Synthetic oligonucleotide
aaggcuuccgaugcauuua

SEQ ID NO: 2047162 - RNA, 19 nt, Artificial Sequence
  Description of Artificial Sequence: Synthetic oligonucleotide
caagaauccuuggcucagg

SEQ ID NO: 2047163 - RNA, 19 nt, Artificial Sequence
  Description of Artificial Sequence: Synthetic oligonucleotide
aagccacggccacuagcug

SEQ ID NO: 2047164 - RNA, 19 nt, Artificial Sequence
  Description of Artificial Sequence: Synthetic oligonucleotide
gcuauuaaaucaggaacca

SEQ ID NO: 2047165 - RNA, 19 nt, Artificial Sequence
  Description of Artificial Sequence: Synthetic oligonucleotide
agaauccccggaauggcga

SEQ ID NO: 2047166 - RNA, 19 nt, Artificial Sequence
  Description of Artificial Sequence: Synthetic oligonucleotide
aguacuggcgucaucuguu

SEQ ID NO: 2047167 - RNA, 19 nt, Artificial Sequence
  Description of Artificial Sequence: Synthetic oligonucleotide
cuuauggagugggagcuca

SEQ ID NO: 2047168 - RNA, 19 nt, Artificial Sequence
  Description of Artificial Sequence: Synthetic oligonucleotide
aagguuaaccaaggaccaa

SEQ ID NO: 2047169 - RNA, 19 nt, Artificial Sequence
  Description of Artificial Sequence: Synthetic oligonucleotide
agaaaccgucacuccagaa

SEQ ID NO: 2047170 - RNA, 19 nt, Artificial Sequence
  Description of Artificial Sequence: Synthetic oligonucleotide
gaaggaaugcugucucggu

SEQ ID NO: 2047171 - RNA, 19 nt, Artificial Sequence
  Description of Artificial Sequence: Synthetic oligonucleotide
gggagaaaccgucacucca

SEQ ID NO: 2047172 - RNA, 19 nt, Artificial Sequence
  Description of Artificial Sequence: Synthetic oligonucleotide
agugggagcucagugguua

SEQ ID NO: 2047173 - RNA, 19 nt, Artificial Sequence
  Description of Artificial Sequence: Synthetic oligonucleotide
agcaugguucccauuaguu

SEQ ID NO: 2047174 - RNA, 19 nt, Artificial Sequence
  Description of Artificial Sequence: Synthetic oligonucleotide
uuccugucaaguaguccuu

SEQ ID NO: 2047175 - RNA, 19 nt, Artificial Sequence
  Description of Artificial Sequence: Synthetic oligonucleotide
cacucagaguacuggcguc

SEQ ID NO: 2047176 - RNA, 19 nt, Artificial Sequence
  Description of Artificial Sequence: Synthetic oligonucleotide
cauuuaagcugcaaagcuu

SEQ ID NO: 2047177 - RNA, 19 nt, Artificial Sequence
  Description of Artificial Sequence: Synthetic oligonucleotide
aggcuuccgaugcauuuaa

SEQ ID NO: 2047178 - RNA, 19 nt, Artificial Sequence
  Description of Artificial Sequence: Synthetic oligonucleotide
cccucacacacacacacac

SEQ ID NO: 2047179 - RNA, 19 nt, Artificial Sequence
  Description of Artificial Sequence: Synthetic oligonucleotide
cacagauaagagagcccuc

SEQ ID NO: 2047180 - RNA, 19 nt, Artificial Sequence
  Description of Artificial Sequence: Synthetic oligonucleotide
cauggugauugcuuucuua

SEQ ID NO: 2047181 - RNA, 19 nt, Artificial Sequence
  Description of Artificial Sequence: Synthetic oligonucleotide
ggaaccagaauccccggaa

SEQ ID NO: 2047182 - RNA, 19 nt, Artificial Sequence
  Description of Artificial Sequence: Synthetic oligonucleotide
ugcuuucuuaaagguuaac

SEQ ID NO: 2047183 - RNA, 19 nt, Artificial Sequence
  Description of Artificial Sequence: Synthetic oligonucleotide
cugacuuucaguaggcauu

SEQ ID NO: 2047184 - RNA, 19 nt, Artificial Sequence
  Description of Artificial Sequence: Synthetic oligonucleotide
ucagaguacuggcgucauc

SEQ ID NO: 2047185 - RNA, 19 nt, Artificial Sequence
  Description of Artificial Sequence: Synthetic oligonucleotide
ugccaacguuuauuucuac

SEQ ID NO: 2047186 - RNA, 19 nt, Artificial Sequence
  Description of Artificial Sequence: Synthetic oligonucleotide
agagagcccucccuggcuu

SEQ ID NO: 2047187 - RNA, 19 nt, Artificial Sequence
  Description of Artificial Sequence: Synthetic oligonucleotide
ucuggaccucccacucaga

SEQ ID NO: 2047188 - RNA, 19 nt, Artificial Sequence
  Description of Artificial Sequence: Synthetic oligonucleotide
aguacugaucagacucuga

SEQ ID NO: 2047189 - RNA, 19 nt, Artificial Sequence
  Description of Artificial Sequence: Synthetic oligonucleotide
gcgacaugugaguccacag

SEQ ID NO: 2047190 - RNA, 19 nt, Artificial Sequence
  Description of Artificial Sequence: Synthetic oligonucleotide
gaguacuggcgucaucugu

SEQ ID NO: 2047191 - RNA, 19 nt, Artificial Sequence
  Description of Artificial Sequence: Synthetic oligonucleotide
gaccaguuccugucaagua

SEQ ID NO: 2047192 - RNA, 19 nt, Artificial Sequence
  Description of Artificial Sequence: Synthetic oligonucleotide
gacguugaaggcagaguaa

SEQ ID NO: 2047193 - RNA, 19 nt, Artificial Sequence
  Description of Artificial Sequence: Synthetic oligonucleotide
agaagacggaaggacugaa

SEQ ID NO: 2047194 - RNA, 19 nt, Artificial Sequence
  Description of Artificial Sequence: Synthetic oligonucleotide
guguggucuggugucccgg

SEQ ID NO: 2047195 - RNA, 19 nt, Artificial Sequence
  Description of Artificial Sequence: Synthetic oligonucleotide
ccuuuuggucuuucguuac

SEQ ID NO: 2047196 - RNA, 19 nt, Artificial Sequence
  Description of Artificial Sequence: Synthetic oligonucleotide
gacauugguugaaauguau

SEQ ID NO: 2047197 - RNA, 19 nt, Artificial Sequence
  Description of Artificial Sequence: Synthetic oligonucleotide
gguguggucuggugucccg

SEQ ID NO: 2047198 - RNA, 19 nt, Artificial Sequence
  Description of Artificial Sequence: Synthetic oligonucleotide
acuggauggaggggacaag

SEQ ID NO: 2047199 - RNA, 19 nt, Artificial Sequence
  Description of Artificial Sequence: Synthetic oligonucleotide
gggaaaggcucucaaggaa

SEQ ID NO: 2047200 - RNA, 19 nt, Artificial Sequence
  Description of Artificial Sequence: Synthetic oligonucleotide
ggucuggugucccggcuag

SEQ ID NO: 2047201 - RNA, 19 nt, Artificial Sequence
  Description of Artificial Sequence: Synthetic oligonucleotide
gcaagaauccuuggcucag

SEQ ID NO: 2047202 - RNA, 19 nt, Artificial Sequence
  Description of Artificial Sequence: Synthetic oligonucleotide
acggaaggacugaauagau

SEQ ID NO: 2047203 - RNA, 19 nt, Artificial Sequence
  Description of Artificial Sequence: Synthetic oligonucleotide
uggaagccacggccacuag

SEQ ID NO: 2047204 - RNA, 19 nt, Artificial Sequence
  Description of Artificial Sequence: Synthetic oligonucleotide
uggcuugacauugguugaa

SEQ ID NO: 2047205 - RNA, 19 nt, Artificial Sequence
  Description of Artificial Sequence: Synthetic oligonucleotide
ggagcucagugguuauggc

SEQ ID NO: 2047206 - RNA, 19 nt, Artificial Sequence
  Description of Artificial Sequence: Synthetic oligonucleotide
guuaaccaaggaccaaaau

SEQ ID NO: 2047207 - RNA, 19 nt, Artificial Sequence
  Description of Artificial Sequence: Synthetic oligonucleotide
uuccuacaccagcaugguu

SEQ ID NO: 2047208 - RNA, 19 nt, Artificial Sequence
  Description of Artificial Sequence: Synthetic oligonucleotide
cuggugucccggcuaggug

SEQ ID NO: 2047209 - RNA, 19 nt, Artificial Sequence
  Description of Artificial Sequence: Synthetic oligonucleotide
gcucuauucaacaggacgu

SEQ ID NO: 2047210 - RNA, 19 nt, Artificial Sequence
  Description of Artificial Sequence: Synthetic oligonucleotide
ugggagcucagugguuaug

SEQ ID NO: 2047211 - RNA, 19 nt, Artificial Sequence
  Description of Artificial Sequence: Synthetic oligonucleotide
cugucaaguaguccuuuua

SEQ ID NO: 2047212 - RNA, 19 nt, Artificial Sequence
  Description of Artificial Sequence: Synthetic oligonucleotide
ugguguggucugguguccc

SEQ ID NO: 2047213 - RNA, 19 nt, Artificial Sequence
  Description of Artificial Sequence: Synthetic oligonucleotide
caggggacuccacccuggg

SEQ ID NO: 2047214 - RNA, 19 nt, Artificial Sequence
  Description of Artificial Sequence: Synthetic oligonucleotide
gcagaguaagcacccugac

SEQ ID NO: 2047215 - RNA, 19 nt, Artificial Sequence
  Description of Artificial Sequence: Synthetic oligonucleotide
aguaggcauuccaguaagu

SEQ ID NO: 2047216 - RNA, 19 nt, Artificial Sequence
  Description of Artificial Sequence: Synthetic oligonucleotide
acacacacacacacacaca

SEQ ID NO: 2047217 - RNA, 19 nt, Artificial Sequence
  Description of Artificial Sequence: Synthetic oligonucleotide
aauucgguucugggguguu

SEQ ID NO: 2047218 - RNA, 19 nt, Artificial Sequence
  Description of Artificial Sequence: Synthetic oligonucleotide
guccuuuuacuuacacaga

SEQ ID NO: 2047219 - RNA, 19 nt, Artificial Sequence
  Description of Artificial Sequence: Synthetic oligonucleotide
gguuucccuacagaaauua

SEQ ID NO: 2047220 - RNA, 19 nt, Artificial Sequence
  Description of Artificial Sequence: Synthetic oligonucleotide
gguugaaauguaugugagu

SEQ ID NO: 2047221 - RNA, 19 nt, Artificial Sequence
  Description of Artificial Sequence: Synthetic oligonucleotide
ggcagaguaagcacccuga

SEQ ID NO: 2047222 - RNA, 19 nt, Artificial Sequence
  Description of Artificial Sequence: Synthetic oligonucleotide
cacacacacacacacguuu

SEQ ID NO: 2047223 - RNA, 19 nt, Artificial Sequence
  Description of Artificial Sequence: Synthetic oligonucleotide
cugaagccaggagggcccg

SEQ ID NO: 2047224 - RNA, 19 nt, Artificial Sequence
  Description of Artificial Sequence: Synthetic oligonucleotide
cguugaaggcagaguaagc

SEQ ID NO: 2047225 - RNA, 19 nt, Artificial Sequence
  Description of Artificial Sequence: Synthetic oligonucleotide
acacacacacacguuucuu

SEQ ID NO: 2047226 - RNA, 19 nt, Artificial Sequence
  Description of Artificial Sequence: Synthetic oligonucleotide
guaggcauuccaguaaguu

SEQ ID NO: 2047227 - RNA, 19 nt, Artificial Sequence
  Description of Artificial Sequence: Synthetic oligonucleotide
ccagaauccccggaauggc

SEQ ID NO: 2047228 - RNA, 19 nt, Artificial Sequence
  Description of Artificial Sequence: Synthetic oligonucleotide
cucuugccaacguuuauuu

SEQ ID NO: 2047229 - RNA, 19 nt, Artificial Sequence
  Description of Artificial Sequence: Synthetic oligonucleotide
gccuuuuggucuuucguua

SEQ ID NO: 2047230 - RNA, 19 nt, Artificial Sequence
  Description of Artificial Sequence: Synthetic oligonucleotide
gguucccauuaguuggauc

SEQ ID NO: 2047231 - RNA, 19 nt, Artificial Sequence
  Description of Artificial Sequence: Synthetic oligonucleotide
gcuagguguagguaaugcu

SEQ ID NO: 2047232 - RNA, 19 nt, Artificial Sequence
  Description of Artificial Sequence: Synthetic oligonucleotide
uucucccuuuggagguaaa

SEQ ID NO: 2047233 - RNA, 19 nt, Artificial Sequence
  Description of Artificial Sequence: Synthetic oligonucleotide
uccugucaaguaguccuuu

SEQ ID NO: 2047234 - RNA, 19 nt, Artificial Sequence
  Description of Artificial Sequence: Synthetic oligonucleotide
ucggugggcuuugguuucc

SEQ ID NO: 2047235 - RNA, 19 nt, Artificial Sequence
  Description of Artificial Sequence: Synthetic oligonucleotide
guacuggcgucaucuguua

SEQ ID NO: 2047236 - RNA, 19 nt, Artificial Sequence
  Description of Artificial Sequence: Synthetic oligonucleotide
ggucuuucguuacucucua

SEQ ID NO: 2047237 - RNA, 19 nt, Artificial Sequence
  Description of Artificial Sequence: Synthetic oligonucleotide
gucucggugggcuuugguu

SEQ ID NO: 2047238 - RNA, 19 nt, Artificial Sequence
  Description of Artificial Sequence: Synthetic oligonucleotide
caaggaacuuuucucuguu

SEQ ID NO: 2047239 - RNA, 19 nt, Artificial Sequence
  Description of Artificial Sequence: Synthetic oligonucleotide
cagugguuauggcgacaug

SEQ ID NO: 2047240 - RNA, 19 nt, Artificial Sequence
  Description of Artificial Sequence: Synthetic oligonucleotide
uggcgucaucuguuagcaa

SEQ ID NO: 2047241 - RNA, 19 nt, Artificial Sequence
  Description of Artificial Sequence: Synthetic oligonucleotide
gaagacggaaggacugaau

SEQ ID NO: 2047242 - RNA, 19 nt, Artificial Sequence
  Description of Artificial Sequence: Synthetic oligonucleotide
gcuuucagguuaaaugcua

SEQ ID NO: 2047243 - RNA, 19 nt, Artificial Sequence
  Description of Artificial Sequence: Synthetic oligonucleotide
cacacacacacacguuucu

SEQ ID NO: 2047244 - RNA, 19 nt, Artificial Sequence
  Description of Artificial Sequence: Synthetic oligonucleotide
cccuacagaaauuaauaau

SEQ ID NO: 2047245 - RNA, 19 nt, Artificial Sequence
  Description of Artificial Sequence: Synthetic oligonucleotide
ugguucccauuaguuggau

SEQ ID NO: 2047246 - RNA, 19 nt, Artificial Sequence
  Description of Artificial Sequence: Synthetic oligonucleotide
ccacuagcugugcuuucag

SEQ ID NO: 2047247 - RNA, 19 nt, Artificial Sequence
  Description of Artificial Sequence: Synthetic oligonucleotide
gcucagugguuauggcgac

SEQ ID NO: 2047248 - RNA, 19 nt, Artificial Sequence
  Description of Artificial Sequence: Synthetic oligonucleotide
gaaugauguuacacguauu

SEQ ID NO: 2047249 - RNA, 19 nt, Artificial Sequence
  Description of Artificial Sequence: Synthetic oligonucleotide
ggcgacaugugaguccaca

SEQ ID NO: 2047250 - RNA, 19 nt, Artificial Sequence
  Description of Artificial Sequence: Synthetic oligonucleotide
gucuuucguuacucucuaa

SEQ ID NO: 2047251 - RNA, 19 nt, Artificial Sequence
  Description of Artificial Sequence: Synthetic oligonucleotide
ccuuuuacuuacacagaua

SEQ ID NO: 2047252 - RNA, 19 nt, Artificial Sequence
  Description of Artificial Sequence: Synthetic oligonucleotide
acacacacacacacacguu

SEQ ID NO: 2047253 - RNA, 19 nt, Artificial Sequence
  Description of Artificial Sequence: Synthetic oligonucleotide
guuccuacaccagcauggu

SEQ ID NO: 2047254 - RNA, 19 nt, Artificial Sequence
  Description of Artificial Sequence: Synthetic oligonucleotide
cugugauggagcggauaga

SEQ ID NO: 2047255 - RNA, 19 nt, Artificial Sequence
  Description of Artificial Sequence: Synthetic oligonucleotide
agagcccucccuggcuuga

SEQ ID NO: 2047256 - RNA, 19 nt, Artificial Sequence
  Description of Artificial Sequence: Synthetic oligonucleotide
gcgucaucuguuagcaaga

SEQ ID NO: 2047257 - RNA, 19 nt, Artificial Sequence
  Description of Artificial Sequence: Synthetic oligonucleotide
aguucucccuuuggaggua

SEQ ID NO: 2047258 - RNA, 19 nt, Artificial Sequence
  Description of Artificial Sequence: Synthetic oligonucleotide
gucuggugucccggcuagg

SEQ ID NO: 2047259 - RNA, 19 nt, Artificial Sequence
  Description of Artificial Sequence: Synthetic oligonucleotide
cccggcuagguguagguaa

SEQ ID NO: 2047260 - RNA, 19 nt, Artificial Sequence
  Description of Artificial Sequence: Synthetic oligonucleotide
ccauuaguuggaucaucaa

SEQ ID NO: 2047261 - RNA, 19 nt, Artificial Sequence
  Description of Artificial Sequence: Synthetic oligonucleotide
cucagugguuauggcgaca

SEQ ID NO: 2047262 - RNA, 19 nt, Artificial Sequence
  Description of Artificial Sequence: Synthetic oligonucleotide
cugucucggugggcuuugg

SEQ ID NO: 2047263 - RNA, 19 nt, Artificial Sequence
  Description of Artificial Sequence: Synthetic oligonucleotide
ucccggcuagguguaggua

SEQ ID NO: 2047264 - RNA, 19 nt, Artificial Sequence
  Description of Artificial Sequence: Synthetic oligonucleotide
uggcgacaugugaguccac

SEQ ID NO: 2047265 - RNA, 19 nt, Artificial Sequence
  Description of Artificial Sequence: Synthetic oligonucleotide
cagcaugguucccauuagu

SEQ ID NO: 2047266 - RNA, 19 nt, Artificial Sequence
  Description of Artificial Sequence: Synthetic oligonucleotide
gaccucccacucagaguac

SEQ ID NO: 2047267 - RNA, 19 nt, Artificial Sequence
  Description of Artificial Sequence: Synthetic oligonucleotide
ccugacuuucaguaggcau

SEQ ID NO: 2047268 - RNA, 19 nt, Artificial Sequence
  Description of Artificial Sequence: Synthetic oligonucleotide
ccaguuccugucaaguagu

SEQ ID NO: 2047269 - RNA, 19 nt, Artificial Sequence
  Description of Artificial Sequence: Synthetic oligonucleotide
ggcuuccgaugcauuuaag

SEQ ID NO: 2047270 - RNA, 19 nt, Artificial Sequence
  Description of Artificial Sequence: Synthetic oligonucleotide
ccucacacacacacacaca

SEQ ID NO: 2047271 - RNA, 19 nt, Artificial Sequence
  Description of Artificial Sequence: Synthetic oligonucleotide
gucccggcuagguguaggu

SEQ ID NO: 2047272 - RNA, 19 nt, Artificial Sequence
  Description of Artificial Sequence: Synthetic oligonucleotide
gggacuccacccuggggaa

SEQ ID NO: 2047273 - RNA, 19 nt, Artificial Sequence
  Description of Artificial Sequence: Synthetic oligonucleotide
cucuauucaacaggacguu

SEQ ID NO: 2047274 - RNA, 19 nt, Artificial Sequence
  Description of Artificial Sequence: Synthetic oligonucleotide
gggcuuugguuucccuaca

SEQ ID NO: 2047275 - RNA, 19 nt, Artificial Sequence
  Description of Artificial Sequence: Synthetic oligonucleotide
cgugagggguuuccuguac

SEQ ID NO: 2047276 - RNA, 19 nt, Artificial Sequence
  Description of Artificial Sequence: Synthetic oligonucleotide
gcugucucggugggcuuug

SEQ ID NO: 2047277 - RNA, 19 nt, Artificial Sequence
  Description of Artificial Sequence: Synthetic oligonucleotide
gcuuauggagugggagcuc

SEQ ID NO: 2047278 - RNA, 19 nt, Artificial Sequence
  Description of Artificial Sequence: Synthetic oligonucleotide
ccacucagaguacuggcgu

SEQ ID NO: 2047279 - RNA, 19 nt, Artificial Sequence
  Description of Artificial Sequence: Synthetic oligonucleotide
cugugcuuucagguuaaau

SEQ ID NO: 2047280 - RNA, 19 nt, Artificial Sequence
  Description of Artificial Sequence: Synthetic oligonucleotide
agggcccgugagggguuuc

SEQ ID NO: 2047281 - RNA, 19 nt, Artificial Sequence
  Description of Artificial Sequence: Synthetic oligonucleotide
gugucccggcuagguguag

SEQ ID NO: 2047282 - RNA, 19 nt, Artificial Sequence
  Description of Artificial Sequence: Synthetic oligonucleotide
cgucacuccagaauucagu

SEQ ID NO: 2047283 - RNA, 19 nt, Artificial Sequence
  Description of Artificial Sequence: Synthetic oligonucleotide
gggcccgugagggguuucc

SEQ ID NO: 2047284 - RNA, 19 nt, Artificial Sequence
  Description of Artificial Sequence: Synthetic oligonucleotide
gugggagcucagugguuau

SEQ ID NO: 2047285 - RNA, 19 nt, Artificial Sequence
  Description of Artificial Sequence: Synthetic oligonucleotide
uccccggaauggcgaccuu

SEQ ID NO: 2047286 - RNA, 19 nt, Artificial Sequence
  Description of Artificial Sequence: Synthetic oligonucleotide
cucagaguacuggcgucau

SEQ ID NO: 2047287 - RNA, 19 nt, Artificial Sequence
  Description of Artificial Sequence: Synthetic oligonucleotide
cggaaggacugaauagaua

SEQ ID NO: 2047288 - RNA, 19 nt, Artificial Sequence
  Description of Artificial Sequence: Synthetic oligonucleotide
ccccucacacacacacaca

SEQ ID NO: 2047289 - RNA, 19 nt, Artificial Sequence
  Description of Artificial Sequence: Synthetic oligonucleotide
cgacaugugaguccacagu

SEQ ID NO: 2047290 - RNA, 19 nt, Artificial Sequence
  Description of Artificial Sequence: Synthetic oligonucleotide
aggggacaagggacuucua

SEQ ID NO: 2047291 - RNA, 19 nt, Artificial Sequence
  Description of Artificial Sequence: Synthetic oligonucleotide
cccugacuuucaguaggca

SEQ ID NO: 2047292 - RNA, 19 nt, Artificial Sequence
  Description of Artificial Sequence: Synthetic oligonucleotide
cccggaauggcgaccuuuu

SEQ ID NO: 2047293 - RNA, 19 nt, Artificial Sequence
  Description of Artificial Sequence: Synthetic oligonucleotide
ccggcuagguguagguaau

SEQ ID NO: 2047294 - RNA, 19 nt, Artificial Sequence
  Description of Artificial Sequence: Synthetic oligonucleotide
cggcuagguguagguaaug

SEQ ID NO: 2047295 - RNA, 19 nt, Artificial Sequence
  Description of Artificial Sequence: Synthetic oligonucleotide
ggcccgugagggguuuccu

SEQ ID NO: 2047296 - RNA, 19 nt, Artificial Sequence
  Description of Artificial Sequence: Synthetic oligonucleotide
cccucccuggcuugacauu

SEQ ID NO: 2047297 - RNA, 19 nt, Artificial Sequence
  Description of Artificial Sequence: Synthetic oligonucleotide
ccccggaauggcgaccuuu

SEQ ID NO: 2047298 - RNA, 19 nt, Artificial Sequence
  Description of Artificial Sequence: Synthetic oligonucleotide
aacuccuuacugcagagcc

SEQ ID NO: 2047299 - RNA, 19 nt, Artificial Sequence
  Description of Artificial Sequence: Synthetic oligonucleotide
aauaggcacaaacucugcc

SEQ ID NO: 2047300 - RNA, 19 nt, Artificial Sequence
  Description of Artificial Sequence: Synthetic oligonucleotide
uaaugccugauacaggucg

SEQ ID NO: 2047301 - RNA, 19 nt, Artificial Sequence
  Description of Artificial Sequence: Synthetic oligonucleotide
ucagauguuguuuagcaag

SEQ ID NO: 2047302 - RNA, 19 nt, Artificial Sequence
  Description of Artificial Sequence: Synthetic oligonucleotide
aguccauagccacacaucc

SEQ ID NO: 2047303 - RNA, 19 nt, Artificial Sequence
  Description of Artificial Sequence: Synthetic oligonucleotide
aaagccaaguggucaaccc

SEQ ID NO: 2047304 - RNA, 19 nt, Artificial Sequence
  Description of Artificial Sequence: Synthetic oligonucleotide
aaugguuucagucgucgag

SEQ ID NO: 2047305 - RNA, 19 nt, Artificial Sequence
  Description of Artificial Sequence: Synthetic oligonucleotide
ucugcgagaguccauagcc

SEQ ID NO: 2047306 - RNA, 19 nt, Artificial Sequence
  Description of Artificial Sequence: Synthetic oligonucleotide
ugcggguuucauaagaccg

SEQ ID NO: 2047307 - RNA, 19 nt, Artificial Sequence
  Description of Artificial Sequence: Synthetic oligonucleotide
aaugccaacagugcucugc

SEQ ID NO: 2047308 - RNA, 19 nt, Artificial Sequence
  Description of Artificial Sequence: Synthetic oligonucleotide
uugauuucauccaaagcca

SEQ ID NO: 2047309 - RNA, 19 nt, Artificial Sequence
  Description of Artificial Sequence: Synthetic oligonucleotide
aagccaaguggucaacccc

SEQ ID NO: 2047310 - RNA, 19 nt, Artificial Sequence
  Description of Artificial Sequence: Synthetic oligonucleotide
ugagcaauaggcacaaacu

SEQ ID NO: 2047311 - RNA, 19 nt, Artificial Sequence
  Description of Artificial Sequence: Synthetic oligonucleotide
uacagcuugaguucacugg

SEQ ID NO: 2047312 - RNA, 19 nt, Artificial Sequence
  Description of Artificial Sequence: Synthetic oligonucleotide
uaucagauguuguuuagca

SEQ ID NO: 2047313 - RNA, 19 nt, Artificial Sequence
  Description of Artificial Sequence: Synthetic oligonucleotide
ucugucaggacaccuggcg

SEQ ID NO: 2047314 - RNA, 19 nt, Artificial Sequence
  Description of Artificial Sequence: Synthetic oligonucleotide
aucgucuccccucuuaggc

SEQ ID NO: 2047315 - RNA, 19 nt, Artificial Sequence
  Description of Artificial Sequence: Synthetic oligonucleotide
uuuguagguagcacugccg

SEQ ID NO: 2047316 - RNA, 19 nt, Artificial Sequence
  Description of Artificial Sequence: Synthetic oligonucleotide
auaaggguuuccaagaguc

SEQ ID NO: 2047317 - RNA, 19 nt, Artificial Sequence
  Description of Artificial Sequence: Synthetic oligonucleotide
accuaugcgcccuagcccc

SEQ ID NO: 2047318 - RNA, 19 nt, Artificial Sequence
  Description of Artificial Sequence: Synthetic oligonucleotide
uuuagcaagaugucuccag

SEQ ID NO: 2047319 - RNA, 19 nt, Artificial Sequence
  Description of Artificial Sequence: Synthetic oligonucleotide
cacacggucagugagacgg

SEQ ID NO: 2047320 - RNA, 19 nt, Artificial Sequence
  Description of Artificial Sequence: Synthetic oligonucleotide
gaugggaucauccgaauuc

SEQ ID NO: 2047321 - RNA, 19 nt, Artificial Sequence
  Description of Artificial Sequence: Synthetic oligonucleotide
gugaguagcagggagacgg

SEQ ID NO: 2047322 - RNA, 19 nt, Artificial Sequence
  Description of Artificial Sequence: Synthetic oligonucleotide
guuguuagcugccagcaag

SEQ ID NO: 2047323 - RNA, 19 nt, Artificial Sequence
  Description of Artificial Sequence: Synthetic oligonucleotide
uguagagaaaucucuggac

SEQ ID NO: 2047324 - RNA, 19 nt, Artificial Sequence
  Description of Artificial Sequence: Synthetic oligonucleotide
aucacacaguucuucaggg

SEQ ID NO: 2047325 - RNA, 19 nt, Artificial Sequence
  Description of Artificial Sequence: Synthetic oligonucleotide
cuucacuuccucuauggcc

SEQ ID NO: 2047326 - RNA, 19 nt, Artificial Sequence
  Description of Artificial Sequence: Synthetic oligonucleotide
cauguuuuggaagaacucc

SEQ ID NO: 2047327 - RNA, 19 nt, Artificial Sequence
  Description of Artificial Sequence: Synthetic oligonucleotide
uuagcaagaugucuccagc

SEQ ID NO: 2047328 - RNA, 19 nt, Artificial Sequence
  Description of Artificial Sequence: Synthetic oligonucleotide
auguuguuuagcaagaugu

SEQ ID NO: 2047329 - RNA, 19 nt, Artificial Sequence
  Description of Artificial Sequence: Synthetic oligonucleotide
ucagugagacggcagagca

SEQ ID NO: 2047330 - RNA, 19 nt, Artificial Sequence
  Description of Artificial Sequence: Synthetic oligonucleotide
caccaaaugguuucagucg

SEQ ID NO: 2047331 - RNA, 19 nt, Artificial Sequence
  Description of Artificial Sequence: Synthetic oligonucleotide
uccauaaggguuuccaaga

SEQ ID NO: 2047332 - RNA, 19 nt, Artificial Sequence
  Description of Artificial Sequence: Synthetic oligonucleotide
auccauaaggguuuccaag

SEQ ID NO: 2047333 - RNA, 19 nt, Artificial Sequence
  Description of Artificial Sequence: Synthetic oligonucleotide
uuguuagcugccagcaagg

SEQ ID NO: 2047334 - RNA, 19 nt, Artificial Sequence
  Description of Artificial Sequence: Synthetic oligonucleotide
caugaaagccccucuacag

SEQ ID NO: 2047335 - RNA, 19 nt, Artificial Sequence
  Description of Artificial Sequence: Synthetic oligonucleotide
ugaccuaugcgcccuagcc

SEQ ID NO: 2047336 - RNA, 19 nt, Artificial Sequence
  Description of Artificial Sequence: Synthetic oligonucleotide
gguguugcgaguuuuguag

SEQ ID NO: 2047337 - RNA, 19 nt, Artificial Sequence
  Description of Artificial Sequence: Synthetic oligonucleotide
ucgagcaauggccugaccu

SEQ ID NO: 2047338 - RNA, 19 nt, Artificial Sequence
  Description of Artificial Sequence: Synthetic oligonucleotide
gaucauccgaauuccacug

SEQ ID NO: 2047339 - RNA, 19 nt, Artificial Sequence
  Description of Artificial Sequence: Synthetic oligonucleotide
agagaaaucucuggacacc

SEQ ID NO: 2047340 - RNA, 19 nt, Artificial Sequence
  Description of Artificial Sequence: Synthetic oligonucleotide
ucauaagaccggcagcagc

SEQ ID NO: 2047341 - RNA, 19 nt, Artificial Sequence
  Description of Artificial Sequence: Synthetic oligonucleotide
uuccggaguggucacaucc

SEQ ID NO: 2047342 - RNA, 19 nt, Artificial Sequence
  Description of Artificial Sequence: Synthetic oligonucleotide
uuguagguagcacugccga

SEQ ID NO: 2047343 - RNA, 19 nt, Artificial Sequence
  Description of Artificial Sequence: Synthetic oligonucleotide
ucagucgucgagcaauggc

SEQ ID NO: 2047344 - RNA, 19 nt, Artificial Sequence
  Description of Artificial Sequence: Synthetic oligonucleotide
augguuucagucgucgagc

SEQ ID NO: 2047345 - RNA, 19 nt, Artificial Sequence
  Description of Artificial Sequence: Synthetic oligonucleotide
aguggucacauccaguccu

SEQ ID NO: 2047346 - RNA, 19 nt, Artificial Sequence
  Description of Artificial Sequence: Synthetic oligonucleotide
accuucaugagucgugcgg

SEQ ID NO: 2047347 - RNA, 19 nt, Artificial Sequence
  Description of Artificial Sequence: Synthetic oligonucleotide
gagcaauaggcacaaacuc

SEQ ID NO: 2047348 - RNA, 19 nt, Artificial Sequence
  Description of Artificial Sequence: Synthetic oligonucleotide
agugagacggcagagcaag

SEQ ID NO: 2047349 - RNA, 19 nt, Artificial Sequence
  Description of Artificial Sequence: Synthetic oligonucleotide
caggauaccacaaugaagu

SEQ ID NO: 2047350 - RNA, 19 nt, Artificial Sequence
  Description of Artificial Sequence: Synthetic oligonucleotide
gguuucauaagaccggcag

SEQ ID NO: 2047351 - RNA, 19 nt, Artificial Sequence
  Description of Artificial Sequence: Synthetic oligonucleotide
uugcgaguuuuguagguag

SEQ ID NO: 2047352 - RNA, 19 nt, Artificial Sequence
  Description of Artificial Sequence: Synthetic oligonucleotide
ggagacggcaaguucagcg

SEQ ID NO: 2047353 - RNA, 19 nt, Artificial Sequence
  Description of Artificial Sequence: Synthetic oligonucleotide
cagucgucgagcaauggcc

SEQ ID NO: 2047354 - RNA, 19 nt, Artificial Sequence
  Description of Artificial Sequence: Synthetic oligonucleotide
augggaucauccgaauucc

SEQ ID NO: 2047355 - RNA, 19 nt, Artificial Sequence
  Description of Artificial Sequence: Synthetic oligonucleotide
guuaaugccugauacaggu

SEQ ID NO: 2047356 - RNA, 19 nt, Artificial Sequence
  Description of Artificial Sequence: Synthetic oligonucleotide
aagaccggcagcagcaaac

SEQ ID NO: 2047357 - RNA, 19 nt, Artificial Sequence
  Description of Artificial Sequence: Synthetic oligonucleotide
aucauccgaauuccacugc

SEQ ID NO: 2047358 - RNA, 19 nt, Artificial Sequence
  Description of Artificial Sequence: Synthetic oligonucleotide
uggcguguagcccacccgg

SEQ ID NO: 2047359 - RNA, 19 nt, Artificial Sequence
  Description of Artificial Sequence: Synthetic oligonucleotide
uguuguuuagcaagauguc

SEQ ID NO: 2047360 - RNA, 19 nt, Artificial Sequence
  Description of Artificial Sequence: Synthetic oligonucleotide
acagucugcggccuuggcg

SEQ ID NO: 2047361 - RNA, 19 nt, Artificial Sequence
  Description of Artificial Sequence: Synthetic oligonucleotide
aaacgggccagugacgaag

SEQ ID NO: 2047362 - RNA, 19 nt, Artificial Sequence
  Description of Artificial Sequence: Synthetic oligonucleotide
aaguuguuagcugccagca

SEQ ID NO: 2047363 - RNA, 19 nt, Artificial Sequence
  Description of Artificial Sequence: Synthetic oligonucleotide
agugacgaagaccuucaug

SEQ ID NO: 2047364 - RNA, 19 nt, Artificial Sequence
  Description of Artificial Sequence: Synthetic oligonucleotide
ucaggguuagcagugggug

SEQ ID NO: 2047365 - RNA, 19 nt, Artificial Sequence
  Description of Artificial Sequence: Synthetic oligonucleotide
caaaugguuucagucgucg

SEQ ID NO: 2047366 - RNA, 19 nt, Artificial Sequence
  Description of Artificial Sequence: Synthetic oligonucleotide
guuucauaagaccggcagc

SEQ ID NO: 2047367 - RNA, 19 nt, Artificial Sequence
  Description of Artificial Sequence: Synthetic oligonucleotide
uaaggguuuccaagagucc

SEQ ID NO: 2047368 - RNA, 19 nt, Artificial Sequence
  Description of Artificial Sequence: Synthetic oligonucleotide
agaccuucaugagucgugc

SEQ ID NO: 2047369 - RNA, 19 nt, Artificial Sequence
  Description of Artificial Sequence: Synthetic oligonucleotide
agucgugcggguuucauaa

SEQ ID NO: 2047370 - RNA, 19 nt, Artificial Sequence
  Description of Artificial Sequence: Synthetic oligonucleotide
aggguuagcaguggguggc

SEQ ID NO: 2047371 - RNA, 19 nt, Artificial Sequence
  Description of Artificial Sequence: Synthetic oligonucleotide
aaaugguuucagucgucga

SEQ ID NO: 2047372 - RNA, 19 nt, Artificial Sequence
  Description of Artificial Sequence: Synthetic oligonucleotide
ugucaggacaccuggcgug

SEQ ID NO: 2047373 - RNA, 19 nt, Artificial Sequence
  Description of Artificial Sequence: Synthetic oligonucleotide
ucauccgaauuccacugcu

SEQ ID NO: 2047374 - RNA, 19 nt, Artificial Sequence
  Description of Artificial Sequence: Synthetic oligonucleotide
uugaugaagacagcugugu

SEQ ID NO: 2047375 - RNA, 19 nt, Artificial Sequence
  Description of Artificial Sequence: Synthetic oligonucleotide
aguuuuguagguagcacug

SEQ ID NO: 2047376 - RNA, 19 nt, Artificial Sequence
  Description of Artificial Sequence: Synthetic oligonucleotide
ugauuucauccaaagccaa

SEQ ID NO: 2047377 - RNA, 19 nt, Artificial Sequence
  Description of Artificial Sequence: Synthetic oligonucleotide
acaaacucugccuggaauu

SEQ ID NO: 2047378 - RNA, 19 nt, Artificial Sequence
  Description of Artificial Sequence: Synthetic oligonucleotide
cacgcuuuccuccaguuuc

SEQ ID NO: 2047379 - RNA, 19 nt, Artificial Sequence
  Description of Artificial Sequence: Synthetic oligonucleotide
uugaguucacugggcaucg

SEQ ID NO: 2047380 - RNA, 19 nt, Artificial Sequence
  Description of Artificial Sequence: Synthetic oligonucleotide
agccacacauccauaaggg

SEQ ID NO: 2047381 - RNA, 19 nt, Artificial Sequence
  Description of Artificial Sequence: Synthetic oligonucleotide
aguuucuuucuggggaugg

SEQ ID NO: 2047382 - RNA, 19 nt, Artificial Sequence
  Description of Artificial Sequence: Synthetic oligonucleotide
uuucagucgucgagcaaug

SEQ ID NO: 2047383 - RNA, 19 nt, Artificial Sequence
  Description of Artificial Sequence: Synthetic oligonucleotide
guagcaggugucaaggagc

SEQ ID NO: 2047384 - RNA, 19 nt, Artificial Sequence
  Description of Artificial Sequence: Synthetic oligonucleotide
cugguagcaggugucaagg

SEQ ID NO: 2047385 - RNA, 19 nt, Artificial Sequence
  Description of Artificial Sequence: Synthetic oligonucleotide
uagcaggugucaaggagca

SEQ ID NO: 2047386 - RNA, 19 nt, Artificial Sequence
  Description of Artificial Sequence: Synthetic oligonucleotide
aaaucucuggacaccaaau

SEQ ID NO: 2047387 - RNA, 19 nt, Artificial Sequence
  Description of Artificial Sequence: Synthetic oligonucleotide
agagcagccaugcccucgg

SEQ ID NO: 2047388 - RNA, 19 nt, Artificial Sequence
  Description of Artificial Sequence: Synthetic oligonucleotide
agcaauaggcacaaacucu

SEQ ID NO: 2047389 - RNA, 19 nt, Artificial Sequence
  Description of Artificial Sequence: Synthetic oligonucleotide
gaccuaugcgcccuagccc

SEQ ID NO: 2047390 - RNA, 19 nt, Artificial Sequence
  Description of Artificial Sequence: Synthetic oligonucleotide
uaggccagccagcaaguug

SEQ ID NO: 2047391 - RNA, 19 nt, Artificial Sequence
  Description of Artificial Sequence: Synthetic oligonucleotide
cacaaugccaacagugcuc

SEQ ID NO: 2047392 - RNA, 19 nt, Artificial Sequence
  Description of Artificial Sequence: Synthetic oligonucleotide
ugcgagaguccauagccac

SEQ ID NO: 2047393 - RNA, 19 nt, Artificial Sequence
  Description of Artificial Sequence: Synthetic oligonucleotide
gaaaucucuggacaccaaa

SEQ ID NO: 2047394 - RNA, 19 nt, Artificial Sequence
  Description of Artificial Sequence: Synthetic oligonucleotide
ucgugcggguuucauaaga

SEQ ID NO: 2047395 - RNA, 19 nt, Artificial Sequence
  Description of Artificial Sequence: Synthetic oligonucleotide
uguugcgaguuuuguaggu

SEQ ID NO: 2047396 - RNA, 19 nt, Artificial Sequence
  Description of Artificial Sequence: Synthetic oligonucleotide
agucugacucugcagccag

SEQ ID NO: 2047397 - RNA, 19 nt, Artificial Sequence
  Description of Artificial Sequence: Synthetic oligonucleotide
guuagcugccagcaaggcc

SEQ ID NO: 2047398 - RNA, 19 nt, Artificial Sequence
  Description of Artificial Sequence: Synthetic oligonucleotide
agcaggauaccacaaugaa

SEQ ID NO: 2047399 - RNA, 19 nt, Artificial Sequence
  Description of Artificial Sequence: Synthetic oligonucleotide
guguagagaaaucucugga

SEQ ID NO: 2047400 - RNA, 19 nt, Artificial Sequence
  Description of Artificial Sequence: Synthetic oligonucleotide
uggggaugggaucauccga

SEQ ID NO: 2047401 - RNA, 19 nt, Artificial Sequence
  Description of Artificial Sequence: Synthetic oligonucleotide
ugacucugagguuggcucc

SEQ ID NO: 2047402 - RNA, 19 nt, Artificial Sequence
  Description of Artificial Sequence: Synthetic oligonucleotide
aggauaccacaaugaaguc

SEQ ID NO: 2047403 - RNA, 19 nt, Artificial Sequence
  Description of Artificial Sequence: Synthetic oligonucleotide
uagguagcacugccgaugu

SEQ ID NO: 2047404 - RNA, 19 nt, Artificial Sequence
  Description of Artificial Sequence: Synthetic oligonucleotide
gguagcaggugucaaggag

SEQ ID NO: 2047405 - RNA, 19 nt, Artificial Sequence
  Description of Artificial Sequence: Synthetic oligonucleotide
ugcgaguuuuguagguagc

SEQ ID NO: 2047406 - RNA, 19 nt, Artificial Sequence
  Description of Artificial Sequence: Synthetic oligonucleotide
ucuccucugcugauguuga

SEQ ID NO: 2047407 - RNA, 19 nt, Artificial Sequence
  Description of Artificial Sequence: Synthetic oligonucleotide
agagcaagccaugggcccc

SEQ ID NO: 2047408 - RNA, 19 nt, Artificial Sequence
  Description of Artificial Sequence: Synthetic oligonucleotide
auggccugaccuaugcgcc

SEQ ID NO: 2047409 - RNA, 19 nt, Artificial Sequence
  Description of Artificial Sequence: Synthetic oligonucleotide
guguugcgaguuuuguagg

SEQ ID NO: 2047410 - RNA, 19 nt, Artificial Sequence
  Description of Artificial Sequence: Synthetic oligonucleotide
aagaccuucaugagucgug

SEQ ID NO: 2047411 - RNA, 19 nt, Artificial Sequence
  Description of Artificial Sequence: Synthetic oligonucleotide
cuccuuacugcagagcccc

SEQ ID NO: 2047412 - RNA, 19 nt, Artificial Sequence
  Description of Artificial Sequence: Synthetic oligonucleotide
agcgguggcaucugucagg

SEQ ID NO: 2047413 - RNA, 19 nt, Artificial Sequence
  Description of Artificial Sequence: Synthetic oligonucleotide
cuugaguucacugggcauc

SEQ ID NO: 2047414 - RNA, 19 nt, Artificial Sequence
  Description of Artificial Sequence: Synthetic oligonucleotide
gaguuuuguagguagcacu

SEQ ID NO: 2047415 - RNA, 19 nt, Artificial Sequence
  Description of Artificial Sequence: Synthetic oligonucleotide
caauaggcacaaacucugc

SEQ ID NO: 2047416 - RNA, 19 nt, Artificial Sequence
  Description of Artificial Sequence: Synthetic oligonucleotide
guagguagcacugccgaug

SEQ ID NO: 2047417 - RNA, 19 nt, Artificial Sequence
  Description of Artificial Sequence: Synthetic oligonucleotide
uuccucuauggccucuggc

SEQ ID NO: 2047418 - RNA, 19 nt, Artificial Sequence
  Description of Artificial Sequence: Synthetic oligonucleotide
guuuaccacaucuccucug

SEQ ID NO: 2047419 - RNA, 19 nt, Artificial Sequence
  Description of Artificial Sequence: Synthetic oligonucleotide
ugauagggugcugaugacu

SEQ ID NO: 2047420 - RNA, 19 nt, Artificial Sequence
  Description of Artificial Sequence: Synthetic oligonucleotide
uccagaaguuucuggucca

SEQ ID NO: 2047421 - RNA, 19 nt, Artificial Sequence
  Description of Artificial Sequence: Synthetic oligonucleotide
gcaggugucaaggagcagg

SEQ ID NO: 2047422 - RNA, 19 nt, Artificial Sequence
  Description of Artificial Sequence: Synthetic oligonucleotide
uuggcgagagcagccaugc

SEQ ID NO: 2047423 - RNA, 19 nt, Artificial Sequence
  Description of Artificial Sequence: Synthetic oligonucleotide
uuaaugccugauacagguc

SEQ ID NO: 2047424 - RNA, 19 nt, Artificial Sequence
  Description of Artificial Sequence: Synthetic oligonucleotide
acaccuggcguguagccca

SEQ ID NO: 2047425 - RNA, 19 nt, Artificial Sequence
  Description of Artificial Sequence: Synthetic oligonucleotide
gagaaaucucuggacacca

SEQ ID NO: 2047426 - RNA, 19 nt, Artificial Sequence
  Description of Artificial Sequence: Synthetic oligonucleotide
ggaguggucacauccaguc

SEQ ID NO: 2047427 - RNA, 19 nt, Artificial Sequence
  Description of Artificial Sequence: Synthetic oligonucleotide
uccgaauuccacugcucca

SEQ ID NO: 2047428 - RNA, 19 nt, Artificial Sequence
  Description of Artificial Sequence: Synthetic oligonucleotide
ugguuucagucgucgagca

SEQ ID NO: 2047429 - RNA, 19 nt, Artificial Sequence
  Description of Artificial Sequence: Synthetic oligonucleotide
aucagauguuguuuagcaa

SEQ ID NO: 2047430 - RNA, 19 nt, Artificial Sequence
  Description of Artificial Sequence: Synthetic oligonucleotide
caggguuagcagugggugg

SEQ ID NO: 2047431 - RNA, 19 nt, Artificial Sequence
  Description of Artificial Sequence: Synthetic oligonucleotide
ggcgagagcagccaugccc

SEQ ID NO: 2047432 - RNA, 19 nt, Artificial Sequence
  Description of Artificial Sequence: Synthetic oligonucleotide
ugaguagcagggagacggc

SEQ ID NO: 2047433 - RNA, 19 nt, Artificial Sequence
  Description of Artificial Sequence: Synthetic oligonucleotide
acuccuuacugcagagccc

SEQ ID NO: 2047434 - RNA, 19 nt, Artificial Sequence
  Description of Artificial Sequence: Synthetic oligonucleotide
ucgucuccccucuuaggcc

SEQ ID NO: 2047435 - RNA, 19 nt, Artificial Sequence
  Description of Artificial Sequence: Synthetic oligonucleotide
uggugaguagcagggagac

SEQ ID NO: 2047436 - RNA, 19 nt, Artificial Sequence
  Description of Artificial Sequence: Synthetic oligonucleotide
caugguguugcgaguuuug

SEQ ID NO: 2047437 - RNA, 19 nt, Artificial Sequence
  Description of Artificial Sequence: Synthetic oligonucleotide
uccggaguggucacaucca

SEQ ID NO: 2047438 - RNA, 19 nt, Artificial Sequence
  Description of Artificial Sequence: Synthetic oligonucleotide
caaugaagucugacucugc

SEQ ID NO: 2047439 - RNA, 19 nt, Artificial Sequence
  Description of Artificial Sequence: Synthetic oligonucleotide
caaggagcaggauaccaca

SEQ ID NO: 2047440 - RNA, 19 nt, Artificial Sequence
  Description of Artificial Sequence: Synthetic oligonucleotide
ucaugagucgugcggguuu

SEQ ID NO: 2047441 - RNA, 19 nt, Artificial Sequence
  Description of Artificial Sequence: Synthetic oligonucleotide
gaccuucaugagucgugcg

SEQ ID NO: 2047442 - RNA, 19 nt, Artificial Sequence
  Description of Artificial Sequence: Synthetic oligonucleotide
cagggagacggcaaguuca

SEQ ID NO: 2047443 - RNA, 19 nt, Artificial Sequence
  Description of Artificial Sequence: Synthetic oligonucleotide
aggacaccuggcguguagc

SEQ ID NO: 2047444 - RNA, 19 nt, Artificial Sequence
  Description of Artificial Sequence: Synthetic oligonucleotide
ggggaaacgggccagugac

SEQ ID NO: 2047445 - RNA, 19 nt, Artificial Sequence
  Description of Artificial Sequence: Synthetic oligonucleotide
cagauguuguuuagcaaga

SEQ ID NO: 2047446 - RNA, 19 nt, Artificial Sequence
  Description of Artificial Sequence: Synthetic oligonucleotide
cugauacaggucguccugg

SEQ ID NO: 2047447 - RNA, 19 nt, Artificial Sequence
  Description of Artificial Sequence: Synthetic oligonucleotide
ucuacagcuugaguucacu

SEQ ID NO: 2047448 - RNA, 19 nt, Artificial Sequence
  Description of Artificial Sequence: Synthetic oligonucleotide
uguuagcugccagcaaggc

SEQ ID NO: 2047449 - RNA, 19 nt, Artificial Sequence
  Description of Artificial Sequence: Synthetic oligonucleotide
ugauacaggucguccuggu

SEQ ID NO: 2047450 - RNA, 19 nt, Artificial Sequence
  Description of Artificial Sequence: Synthetic oligonucleotide
aguucacugggcaucgucu

SEQ ID NO: 2047451 - RNA, 19 nt, Artificial Sequence
  Description of Artificial Sequence: Synthetic oligonucleotide
ugcaagcugaccacugguu

SEQ ID NO: 2047452 - RNA, 19 nt, Artificial Sequence
  Description of Artificial Sequence: Synthetic oligonucleotide
cagucugcggccuuggcga

SEQ ID NO: 2047453 - RNA, 19 nt, Artificial Sequence
  Description of Artificial Sequence: Synthetic oligonucleotide
gugcggguuucauaagacc

SEQ ID NO: 2047454 - RNA, 19 nt, Artificial Sequence
  Description of Artificial Sequence: Synthetic oligonucleotide
aaugccugauacaggucgu

SEQ ID NO: 2047455 - RNA, 19 nt, Artificial Sequence
  Description of Artificial Sequence: Synthetic oligonucleotide
caucgucuccccucuuagg

SEQ ID NO: 2047456 - RNA, 19 nt, Artificial Sequence
  Description of Artificial Sequence: Synthetic oligonucleotide
gacgaagaccuucaugagu

SEQ ID NO: 2047457 - RNA, 19 nt, Artificial Sequence
  Description of Artificial Sequence: Synthetic oligonucleotide
uggaauucugcugcuuccu

SEQ ID NO: 2047458 - RNA, 19 nt, Artificial Sequence
  Description of Artificial Sequence: Synthetic oligonucleotide
ucacugggcaucgucuccc

SEQ ID NO: 2047459 - RNA, 19 nt, Artificial Sequence
  Description of Artificial Sequence: Synthetic oligonucleotide
caauggccugaccuaugcg

SEQ ID NO: 2047460 - RNA, 19 nt, Artificial Sequence
  Description of Artificial Sequence: Synthetic oligonucleotide
ugggaucauccgaauucca

SEQ ID NO: 2047461 - RNA, 19 nt, Artificial Sequence
  Description of Artificial Sequence: Synthetic oligonucleotide
cauccaaagccaagugguc

SEQ ID NO: 2047462 - RNA, 19 nt, Artificial Sequence
  Description of Artificial Sequence: Synthetic oligonucleotide
gaguucacugggcaucguc

SEQ ID NO: 2047463 - RNA, 19 nt, Artificial Sequence
  Description of Artificial Sequence: Synthetic oligonucleotide
cuuggaggcagugguuccg

SEQ ID NO: 2047464 - RNA, 19 nt, Artificial Sequence
  Description of Artificial Sequence: Synthetic oligonucleotide
uucagucgucgagcaaugg

SEQ ID NO: 2047465 - RNA, 19 nt, Artificial Sequence
  Description of Artificial Sequence: Synthetic oligonucleotide
ucugcggccuuggcgagag

SEQ ID NO: 2047466 - RNA, 19 nt, Artificial Sequence
  Description of Artificial Sequence: Synthetic oligonucleotide
uccacacggucagugagac

SEQ ID NO: 2047467 - RNA, 19 nt, Artificial Sequence
  Description of Artificial Sequence: Synthetic oligonucleotide
cuuggcgagagcagccaug

SEQ ID NO: 2047468 - RNA, 19 nt, Artificial Sequence
  Description of Artificial Sequence: Synthetic oligonucleotide
ugccugauacaggucgucc

SEQ ID NO: 2047469 - RNA, 19 nt, Artificial Sequence
  Description of Artificial Sequence: Synthetic oligonucleotide
aacagugcucugcgagagu

SEQ ID NO: 2047470 - RNA, 19 nt, Artificial Sequence
  Description of Artificial Sequence: Synthetic oligonucleotide
uuaccacaucuccucugcu

SEQ ID NO: 2047471 - RNA, 19 nt, Artificial Sequence
  Description of Artificial Sequence: Synthetic oligonucleotide
cguguagagaaaucucugg

SEQ ID NO: 2047472 - RNA, 19 nt, Artificial Sequence
  Description of Artificial Sequence: Synthetic oligonucleotide
gguuaaugccugauacagg

SEQ ID NO: 2047473 - RNA, 19 nt, Artificial Sequence
  Description of Artificial Sequence: Synthetic oligonucleotide
gacucugcagccagcugag

SEQ ID NO: 2047474 - RNA, 19 nt, Artificial Sequence
  Description of Artificial Sequence: Synthetic oligonucleotide
agacggcaaguucagcggu

SEQ ID NO: 2047475 - RNA, 19 nt, Artificial Sequence
  Description of Artificial Sequence: Synthetic oligonucleotide
ugggcaucgucuccccucu

SEQ ID NO: 2047476 - RNA, 19 nt, Artificial Sequence
  Description of Artificial Sequence: Synthetic oligonucleotide
guuguuuagcaagaugucu

SEQ ID NO: 2047477 - RNA, 19 nt, Artificial Sequence
  Description of Artificial Sequence: Synthetic oligonucleotide
cucugcgagaguccauagc

SEQ ID NO: 2047478 - RNA, 19 nt, Artificial Sequence
  Description of Artificial Sequence: Synthetic oligonucleotide
uaccacaaugaagucugac

SEQ ID NO: 2047479 - RNA, 19 nt, Artificial Sequence
  Description of Artificial Sequence: Synthetic oligonucleotide
caguucuucaggguuagca

SEQ ID NO: 2047480 - RNA, 19 nt, Artificial Sequence
  Description of Artificial Sequence: Synthetic oligonucleotide
uacaggucguccugguuua

SEQ ID NO: 2047481 - RNA, 19 nt, Artificial Sequence
  Description of Artificial Sequence: Synthetic oligonucleotide
ugcggccuuggcgagagca

SEQ ID NO: 2047482 - RNA, 19 nt, Artificial Sequence
  Description of Artificial Sequence: Synthetic oligonucleotide
uagcacugccgaugugggg

SEQ ID NO: 2047483 - RNA, 19 nt, Artificial Sequence
  Description of Artificial Sequence: Synthetic oligonucleotide
uaagaccggcagcagcaaa

SEQ ID NO: 2047484 - RNA, 19 nt, Artificial Sequence
  Description of Artificial Sequence: Synthetic oligonucleotide
gaguccauagccacacauc

SEQ ID NO: 2047485 - RNA, 19 nt, Artificial Sequence
  Description of Artificial Sequence: Synthetic oligonucleotide
uguagguagcacugccgau

SEQ ID NO: 2047486 - RNA, 19 nt, Artificial Sequence
  Description of Artificial Sequence: Synthetic oligonucleotide
caguccugcugcugcaagc

SEQ ID NO: 2047487 - RNA, 19 nt, Artificial Sequence
  Description of Artificial Sequence: Synthetic oligonucleotide
gacaccuggcguguagccc

SEQ ID NO: 2047488 - RNA, 19 nt, Artificial Sequence
  Description of Artificial Sequence: Synthetic oligonucleotide
gcaaguuguuagcugccag

SEQ ID NO: 2047489 - RNA, 19 nt, Artificial Sequence
  Description of Artificial Sequence: Synthetic oligonucleotide
cagccagcugagcaauagg

SEQ ID NO: 2047490 - RNA, 19 nt, Artificial Sequence
  Description of Artificial Sequence: Synthetic oligonucleotide
ugguagcaggugucaagga

SEQ ID NO: 2047491 - RNA, 19 nt, Artificial Sequence
  Description of Artificial Sequence: Synthetic oligonucleotide
uggacaccaaaugguuuca

SEQ ID NO: 2047492 - RNA, 19 nt, Artificial Sequence
  Description of Artificial Sequence: Synthetic oligonucleotide
aguccugcugcugcaagcu

SEQ ID NO: 2047493 - RNA, 19 nt, Artificial Sequence
  Description of Artificial Sequence: Synthetic oligonucleotide
gcaauggccugaccuaugc

SEQ ID NO: 2047494 - RNA, 19 nt, Artificial Sequence
  Description of Artificial Sequence: Synthetic oligonucleotide
cauccgaauuccacugcuc

SEQ ID NO: 2047495 - RNA, 19 nt, Artificial Sequence
  Description of Artificial Sequence: Synthetic oligonucleotide
aagcugaccacugguuaau

SEQ ID NO: 2047496 - RNA, 19 nt, Artificial Sequence
  Description of Artificial Sequence: Synthetic oligonucleotide
gcagcaaacacgagccagg

SEQ ID NO: 2047497 - RNA, 19 nt, Artificial Sequence
  Description of Artificial Sequence: Synthetic oligonucleotide
aggcagugguuccggagug

SEQ ID NO: 2047498 - RNA, 19 nt, Artificial Sequence
  Description of Artificial Sequence: Synthetic oligonucleotide
cacaguucuucaggguuag

SEQ ID NO: 2047499 - RNA, 19 nt, Artificial Sequence
  Description of Artificial Sequence: Synthetic oligonucleotide
aguuguuagcugccagcaa

SEQ ID NO: 2047500 - RNA, 19 nt, Artificial Sequence
  Description of Artificial Sequence: Synthetic oligonucleotide
uuccacugcuccacuucac

SEQ ID NO: 2047501 - RNA, 19 nt, Artificial Sequence
  Description of Artificial Sequence: Synthetic oligonucleotide
ucgucgagcaauggccuga

SEQ ID NO: 2047502 - RNA, 19 nt, Artificial Sequence
  Description of Artificial Sequence: Synthetic oligonucleotide
cuggcguguagcccacccg

SEQ ID NO: 2047503 - RNA, 19 nt, Artificial Sequence
  Description of Artificial Sequence: Synthetic oligonucleotide
ccuucaugagucgugcggg

SEQ ID NO: 2047504 - RNA, 19 nt, Artificial Sequence
  Description of Artificial Sequence: Synthetic oligonucleotide
cugauagggugcugaugac

SEQ ID NO: 2047505 - RNA, 19 nt, Artificial Sequence
  Description of Artificial Sequence: Synthetic oligonucleotide
cugaccuaugcgcccuagc

SEQ ID NO: 2047506 - RNA, 19 nt, Artificial Sequence
  Description of Artificial Sequence: Synthetic oligonucleotide
uggcgccccguguagagaa

SEQ ID NO: 2047507 - RNA, 19 nt, Artificial Sequence
  Description of Artificial Sequence: Synthetic oligonucleotide
uggccugaccuaugcgccc

SEQ ID NO: 2047508 - RNA, 19 nt, Artificial Sequence
  Description of Artificial Sequence: Synthetic oligonucleotide
agcaaguuguuagcugcca

SEQ ID NO: 2047509 - RNA, 19 nt, Artificial Sequence
  Description of Artificial Sequence: Synthetic oligonucleotide
aaggagcaggauaccacaa

SEQ ID NO: 2047510 - RNA, 19 nt, Artificial Sequence
  Description of Artificial Sequence: Synthetic oligonucleotide
ugcucugcgagaguccaua

SEQ ID NO: 2047511 - RNA, 19 nt, Artificial Sequence
  Description of Artificial Sequence: Synthetic oligonucleotide
cauccauaaggguuuccaa

SEQ ID NO: 2047512 - RNA, 19 nt, Artificial Sequence
  Description of Artificial Sequence: Synthetic oligonucleotide
cagugcucugcgagagucc

SEQ ID NO: 2047513 - RNA, 19 nt, Artificial Sequence
  Description of Artificial Sequence: Synthetic oligonucleotide
agcccaugaaagccccucu

SEQ ID NO: 2047514 - RNA, 19 nt, Artificial Sequence
  Description of Artificial Sequence: Synthetic oligonucleotide
ggaggcagugguuccggag

SEQ ID NO: 2047515 - RNA, 19 nt, Artificial Sequence
  Description of Artificial Sequence: Synthetic oligonucleotide
augccugauacaggucguc

SEQ ID NO: 2047516 - RNA, 19 nt, Artificial Sequence
  Description of Artificial Sequence: Synthetic oligonucleotide
gacggcaaguucagcggug

SEQ ID NO: 2047517 - RNA, 19 nt, Artificial Sequence
  Description of Artificial Sequence: Synthetic oligonucleotide
caggugucaaggagcagga

SEQ ID NO: 2047518 - RNA, 19 nt, Artificial Sequence
  Description of Artificial Sequence: Synthetic oligonucleotide
agucgucgagcaauggccu

SEQ ID NO: 2047519 - RNA, 19 nt, Artificial Sequence
  Description of Artificial Sequence: Synthetic oligonucleotide
ggaucauccgaauuccacu

SEQ ID NO: 2047520 - RNA, 19 nt, Artificial Sequence
  Description of Artificial Sequence: Synthetic oligonucleotide
gcggguuucauaagaccgg

SEQ ID NO: 2047521 - RNA, 19 nt, Artificial Sequence
  Description of Artificial Sequence: Synthetic oligonucleotide
agggagacggcaaguucag

SEQ ID NO: 2047522 - RNA, 19 nt, Artificial Sequence
  Description of Artificial Sequence: Synthetic oligonucleotide
uagcccacccggaucccac

SEQ ID NO: 2047523 - RNA, 19 nt, Artificial Sequence
  Description of Artificial Sequence: Synthetic oligonucleotide
aacgggccagugacgaaga

SEQ ID NO: 2047524 - RNA, 19 nt, Artificial Sequence
  Description of Artificial Sequence: Synthetic oligonucleotide
caggacaccuggcguguag

SEQ ID NO: 2047525 - RNA, 19 nt, Artificial Sequence
  Description of Artificial Sequence: Synthetic oligonucleotide
ggaaacgggccagugacga

SEQ ID NO: 2047526 - RNA, 19 nt, Artificial Sequence
  Description of Artificial Sequence: Synthetic oligonucleotide
gucgucgagcaauggccug

SEQ ID NO: 2047527 - RNA, 19 nt, Artificial Sequence
  Description of Artificial Sequence: Synthetic oligonucleotide
cauaaggguuuccaagagu

SEQ ID NO: 2047528 - RNA, 19 nt, Artificial Sequence
  Description of Artificial Sequence: Synthetic oligonucleotide
cugguuuaccacaucuccu

SEQ ID NO: 2047529 - RNA, 19 nt, Artificial Sequence
  Description of Artificial Sequence: Synthetic oligonucleotide
ccugauacaggucguccug

SEQ ID NO: 2047530 - RNA, 19 nt, Artificial Sequence
  Description of Artificial Sequence: Synthetic oligonucleotide
gaugacucugagguuggcu

SEQ ID NO: 2047531 - RNA, 19 nt, Artificial Sequence
  Description of Artificial Sequence: Synthetic oligonucleotide
agaccggcagcagcaaaca

SEQ ID NO: 2047532 - RNA, 19 nt, Artificial Sequence
  Description of Artificial Sequence: Synthetic oligonucleotide
cacugauagggugcugaug

SEQ ID NO: 2047533 - RNA, 19 nt, Artificial Sequence
  Description of Artificial Sequence: Synthetic oligonucleotide
acacggucagugagacggc

SEQ ID NO: 2047534 - RNA, 19 nt, Artificial Sequence
  Description of Artificial Sequence: Synthetic oligonucleotide
agcccacccggaucccacg

SEQ ID NO: 2047535 - RNA, 19 nt, Artificial Sequence
  Description of Artificial Sequence: Synthetic oligonucleotide
ugaugacucugagguuggc

SEQ ID NO: 2047536 - RNA, 19 nt, Artificial Sequence
  Description of Artificial Sequence: Synthetic oligonucleotide
agucugcggccuuggcgag

SEQ ID NO: 2047537 - RNA, 19 nt, Artificial Sequence
  Description of Artificial Sequence: Synthetic oligonucleotide
cugcgagaguccauagcca

SEQ ID NO: 2047538 - RNA, 19 nt, Artificial Sequence
  Description of Artificial Sequence: Synthetic oligonucleotide
acugccgauguggggcagg

SEQ ID NO: 2047539 - RNA, 19 nt, Artificial Sequence
  Description of Artificial Sequence: Synthetic oligonucleotide
gucgugcggguuucauaag

SEQ ID NO: 2047540 - RNA, 19 nt, Artificial Sequence
  Description of Artificial Sequence: Synthetic oligonucleotide
gaucccacgcuucuugauu

SEQ ID NO: 2047541 - RNA, 19 nt, Artificial Sequence
  Description of Artificial Sequence: Synthetic oligonucleotide
gauguggggcaggaucaca

SEQ ID NO: 2047542 - RNA, 19 nt, Artificial Sequence
  Description of Artificial Sequence: Synthetic oligonucleotide
caugagucgugcggguuuc

SEQ ID NO: 2047543 - RNA, 19 nt, Artificial Sequence
  Description of Artificial Sequence: Synthetic oligonucleotide
uaugcgcccuagccccaca

SEQ ID NO: 2047544 - RNA, 19 nt, Artificial Sequence
  Description of Artificial Sequence: Synthetic oligonucleotide
ggacaccuggcguguagcc

SEQ ID NO: 2047545 - RNA, 19 nt, Artificial Sequence
  Description of Artificial Sequence: Synthetic oligonucleotide
uucaugagucgugcggguu

SEQ ID NO: 2047546 - RNA, 19 nt, Artificial Sequence
  Description of Artificial Sequence: Synthetic oligonucleotide
gccgccguucuucacuucc

SEQ ID NO: 2047547 - RNA, 19 nt, Artificial Sequence
  Description of Artificial Sequence: Synthetic oligonucleotide
acggucagugagacggcag

SEQ ID NO: 2047548 - RNA, 19 nt, Artificial Sequence
  Description of Artificial Sequence: Synthetic oligonucleotide
cacugggcaucgucucccc

SEQ ID NO: 2047549 - RNA, 19 nt, Artificial Sequence
  Description of Artificial Sequence: Synthetic oligonucleotide
gagucgugcggguuucaua

SEQ ID NO: 2047550 - RNA, 19 nt, Artificial Sequence
  Description of Artificial Sequence: Synthetic oligonucleotide
uggcgagagcagccaugcc

SEQ ID NO: 2047551 - RNA, 19 nt, Artificial Sequence
  Description of Artificial Sequence: Synthetic oligonucleotide
gcgcccuagccccacaaug

SEQ ID NO: 2047552 - RNA, 19 nt, Artificial Sequence
  Description of Artificial Sequence: Synthetic oligonucleotide
cacauccauaaggguuucc

SEQ ID NO: 2047553 - RNA, 19 nt, Artificial Sequence
  Description of Artificial Sequence: Synthetic oligonucleotide
ugagucgugcggguuucau

SEQ ID NO: 2047554 - RNA, 19 nt, Artificial Sequence
  Description of Artificial Sequence: Synthetic oligonucleotide
gggccagugacgaagaccu

SEQ ID NO: 2047555 - RNA, 19 nt, Artificial Sequence
  Description of Artificial Sequence: Synthetic oligonucleotide
gaaacgggccagugacgaa

SEQ ID NO: 2047556 - RNA, 19 nt, Artificial Sequence
  Description of Artificial Sequence: Synthetic oligonucleotide
ucccacgcuucuugauuuc

SEQ ID NO: 2047557 - RNA, 19 nt, Artificial Sequence
  Description of Artificial Sequence: Synthetic oligonucleotide
guugcgaguuuuguaggua

SEQ ID NO: 2047558 - RNA, 19 nt, Artificial Sequence
  Description of Artificial Sequence: Synthetic oligonucleotide
ucccagccgccguucuuca

SEQ ID NO: 2047559 - RNA, 19 nt, Artificial Sequence
  Description of Artificial Sequence: Synthetic oligonucleotide
gugguuccggaguggucac

SEQ ID NO: 2047560 - RNA, 19 nt, Artificial Sequence
  Description of Artificial Sequence: Synthetic oligonucleotide
ugcgcccuagccccacaau

SEQ ID NO: 2047561 - RNA, 19 nt, Artificial Sequence
  Description of Artificial Sequence: Synthetic oligonucleotide
ccgaauuccacugcuccac

SEQ ID NO: 2047562 - RNA, 19 nt, Artificial Sequence
  Description of Artificial Sequence: Synthetic oligonucleotide
agcaauggccugaccuaug

SEQ ID NO: 2047563 - RNA, 19 nt, Artificial Sequence
  Description of Artificial Sequence: Synthetic oligonucleotide
gguuuccaagagucccagc

SEQ ID NO: 2047564 - RNA, 19 nt, Artificial Sequence
  Description of Artificial Sequence: Synthetic oligonucleotide
gagaguccauagccacaca

SEQ ID NO: 2047565 - RNA, 19 nt, Artificial Sequence
  Description of Artificial Sequence: Synthetic oligonucleotide
uguagcccacccggauccc

SEQ ID NO: 2047566 - RNA, 19 nt, Artificial Sequence
  Description of Artificial Sequence: Synthetic oligonucleotide
agaaaucucuggacaccaa

SEQ ID NO: 2047567 - RNA, 19 nt, Artificial Sequence
  Description of Artificial Sequence: Synthetic oligonucleotide
gcccuagccccacaaugcc

SEQ ID NO: 2047568 - RNA, 19 nt, Artificial Sequence
  Description of Artificial Sequence: Synthetic oligonucleotide
ccaugaaagccccucuaca

SEQ ID NO: 2047569 - RNA, 19 nt, Artificial Sequence
  Description of Artificial Sequence: Synthetic oligonucleotide
gggaaacgggccagugacg

SEQ ID NO: 2047570 - RNA, 19 nt, Artificial Sequence
  Description of Artificial Sequence: Synthetic oligonucleotide
ccagugacgaagaccuuca

SEQ ID NO: 2047571 - RNA, 19 nt, Artificial Sequence
  Description of Artificial Sequence: Synthetic oligonucleotide
ggcuuggaggcagugguuc

SEQ ID NO: 2047572 - RNA, 19 nt, Artificial Sequence
  Description of Artificial Sequence: Synthetic oligonucleotide
ccaagagucccagccgccg

SEQ ID NO: 2047573 - RNA, 19 nt, Artificial Sequence
  Description of Artificial Sequence: Synthetic oligonucleotide
cgugcggguuucauaagac

SEQ ID NO: 2047574 - RNA, 19 nt, Artificial Sequence
  Description of Artificial Sequence: Synthetic oligonucleotide
ggacaccaaaugguuucag

SEQ ID NO: 2047575 - RNA, 19 nt, Artificial Sequence
  Description of Artificial Sequence: Synthetic oligonucleotide
gcucugcgagaguccauag

SEQ ID NO: 2047576 - RNA, 19 nt, Artificial Sequence
  Description of Artificial Sequence: Synthetic oligonucleotide
gauacaggucguccugguu

SEQ ID NO: 2047577 - RNA, 19 nt, Artificial Sequence
  Description of Artificial Sequence: Synthetic oligonucleotide
uggcaucugucaggacacc

SEQ ID NO: 2047578 - RNA, 19 nt, Artificial Sequence
  Description of Artificial Sequence: Synthetic oligonucleotide
gcgaguuuuguagguagca

SEQ ID NO: 2047579 - RNA, 19 nt, Artificial Sequence
  Description of Artificial Sequence: Synthetic oligonucleotide
acgcuuuccuccaguuucu

SEQ ID NO: 2047580 - RNA, 19 nt, Artificial Sequence
  Description of Artificial Sequence: Synthetic oligonucleotide
gcagggagacggcaaguuc

SEQ ID NO: 2047581 - RNA, 19 nt, Artificial Sequence
  Description of Artificial Sequence: Synthetic oligonucleotide
cagugguuccggagugguc

SEQ ID NO: 2047582 - RNA, 19 nt, Artificial Sequence
  Description of Artificial Sequence: Synthetic oligonucleotide
cgcccuagccccacaaugc

SEQ ID NO: 2047583 - RNA, 19 nt, Artificial Sequence
  Description of Artificial Sequence: Synthetic oligonucleotide
agguagcacugccgaugug

SEQ ID NO: 2047584 - RNA, 19 nt, Artificial Sequence
  Description of Artificial Sequence: Synthetic oligonucleotide
guccacacggucagugaga

SEQ ID NO: 2047585 - RNA, 19 nt, Artificial Sequence
  Description of Artificial Sequence: Synthetic oligonucleotide
ccaaaugguuucagucguc

SEQ ID NO: 2047586 - RNA, 19 nt, Artificial Sequence
  Description of Artificial Sequence: Synthetic oligonucleotide
cacccggaucccacgcuuc

SEQ ID NO: 2047587 - RNA, 19 nt, Artificial Sequence
  Description of Artificial Sequence: Synthetic oligonucleotide
gucgagcaauggccugacc

SEQ ID NO: 2047588 - RNA, 19 nt, Artificial Sequence
  Description of Artificial Sequence: Synthetic oligonucleotide
ccuggcguguagcccaccc

SEQ ID NO: 2047589 - RNA, 19 nt, Artificial Sequence
  Description of Artificial Sequence: Synthetic oligonucleotide
ugaguucacugggcaucgu

SEQ ID NO: 2047590 - RNA, 19 nt, Artificial Sequence
  Description of Artificial Sequence: Synthetic oligonucleotide
ggggaugggaucauccgaa

SEQ ID NO: 2047591 - RNA, 19 nt, Artificial Sequence
  Description of Artificial Sequence: Synthetic oligonucleotide
caaugccaacagugcucug

SEQ ID NO: 2047592 - RNA, 19 nt, Artificial Sequence
  Description of Artificial Sequence: Synthetic oligonucleotide
cgagaguccauagccacac

SEQ ID NO: 2047593 - RNA, 19 nt, Artificial Sequence
  Description of Artificial Sequence: Synthetic oligonucleotide
agccgccguucuucacuuc

SEQ ID NO: 2047594 - RNA, 19 nt, Artificial Sequence
  Description of Artificial Sequence: Synthetic oligonucleotide
ggcagugguuccggagugg

SEQ ID NO: 2047595 - RNA, 19 nt, Artificial Sequence
  Description of Artificial Sequence: Synthetic oligonucleotide
cugucaggacaccuggcgu

SEQ ID NO: 2047596 - RNA, 19 nt, Artificial Sequence
  Description of Artificial Sequence: Synthetic oligonucleotide
ccccguguagagaaaucuc

SEQ ID NO: 2047597 - RNA, 19 nt, Artificial Sequence
  Description of Artificial Sequence: Synthetic oligonucleotide
ccggaucccacgcuucuug

SEQ ID NO: 2047598 - RNA, 19 nt, Artificial Sequence
  Description of Artificial Sequence: Synthetic oligonucleotide
cagugagacggcagagcaa

SEQ ID NO: 2047599 - RNA, 19 nt, Artificial Sequence
  Description of Artificial Sequence: Synthetic oligonucleotide
ccggaguggucacauccag

SEQ ID NO: 2047600 - RNA, 19 nt, Artificial Sequence
  Description of Artificial Sequence: Synthetic oligonucleotide
guuccggaguggucacauc

SEQ ID NO: 2047601 - RNA, 19 nt, Artificial Sequence
  Description of Artificial Sequence: Synthetic oligonucleotide
augcgcccuagccccacaa

SEQ ID NO: 2047602 - RNA, 19 nt, Artificial Sequence
  Description of Artificial Sequence: Synthetic oligonucleotide
cugcaagcugaccacuggu

SEQ ID NO: 2047603 - RNA, 19 nt, Artificial Sequence
  Description of Artificial Sequence: Synthetic oligonucleotide
cgaguuuuguagguagcac

SEQ ID NO: 2047604 - RNA, 19 nt, Artificial Sequence
  Description of Artificial Sequence: Synthetic oligonucleotide
gcggcagguggugaguagc

SEQ ID NO: 2047605 - RNA, 19 nt, Artificial Sequence
  Description of Artificial Sequence: Synthetic oligonucleotide
ggcggcagguggugaguag

SEQ ID NO: 2047606 - RNA, 19 nt, Artificial Sequence
  Description of Artificial Sequence: Synthetic oligonucleotide
cuaugcgcccuagccccac

SEQ ID NO: 2047607 - RNA, 19 nt, Artificial Sequence
  Description of Artificial Sequence: Synthetic oligonucleotide
ccacacauccauaaggguu

SEQ ID NO: 2047608 - RNA, 19 nt, Artificial Sequence
  Description of Artificial Sequence: Synthetic oligonucleotide
cccguguagagaaaucucu

SEQ ID NO: 2047609 - RNA, 19 nt, Artificial Sequence
  Description of Artificial Sequence: Synthetic oligonucleotide
ccaguccugcugcugcaag

SEQ ID NO: 2047610 - RNA, 19 nt, Artificial Sequence
  Description of Artificial Sequence: Synthetic oligonucleotide
accuggcguguagcccacc

SEQ ID NO: 2047611 - RNA, 19 nt, Artificial Sequence
  Description of Artificial Sequence: Synthetic oligonucleotide
caccuggcguguagcccac

SEQ ID NO: 2047612 - RNA, 19 nt, Artificial Sequence
  Description of Artificial Sequence: Synthetic oligonucleotide
cggguuucauaagaccggc

SEQ ID NO: 2047613 - RNA, 19 nt, Artificial Sequence
  Description of Artificial Sequence: Synthetic oligonucleotide
gguuucagucgucgagcaa

SEQ ID NO: 2047614 - RNA, 19 nt, Artificial Sequence
  Description of Artificial Sequence: Synthetic oligonucleotide
cuauggccucuggcagccg

SEQ ID NO: 2047615 - RNA, 19 nt, Artificial Sequence
  Description of Artificial Sequence: Synthetic oligonucleotide
cacggucagugagacggca

SEQ ID NO: 2047616 - RNA, 19 nt, Artificial Sequence
  Description of Artificial Sequence: Synthetic oligonucleotide
cccacugauagggugcuga

SEQ ID NO: 2047617 - RNA, 19 nt, Artificial Sequence
  Description of Artificial Sequence: Synthetic oligonucleotide
gccugauacaggucguccu

SEQ ID NO: 2047618 - RNA, 19 nt, Artificial Sequence
  Description of Artificial Sequence: Synthetic oligonucleotide
ggcaucgucuccccucuua

SEQ ID NO: 2047619 - RNA, 19 nt, Artificial Sequence
  Description of Artificial Sequence: Synthetic oligonucleotide
guagcccacccggauccca

SEQ ID NO: 2047620 - RNA, 19 nt, Artificial Sequence
  Description of Artificial Sequence: Synthetic oligonucleotide
augagucgugcggguuuca

SEQ ID NO: 2047621 - RNA, 19 nt, Artificial Sequence
  Description of Artificial Sequence: Synthetic oligonucleotide
ccagaaguuucugguccac

SEQ ID NO: 2047622 - RNA, 19 nt, Artificial Sequence
  Description of Artificial Sequence: Synthetic oligonucleotide
gucaggacaccuggcgugu

SEQ ID NO: 2047623 - RNA, 19 nt, Artificial Sequence
  Description of Artificial Sequence: Synthetic oligonucleotide
cguguagcccacccggauc

SEQ ID NO: 2047624 - RNA, 19 nt, Artificial Sequence
  Description of Artificial Sequence: Synthetic oligonucleotide
ggguuucauaagaccggca

SEQ ID NO: 2047625 - RNA, 19 nt, Artificial Sequence
  Description of Artificial Sequence: Synthetic oligonucleotide
cucuuaggccagccagcaa

SEQ ID NO: 2047626 - RNA, 19 nt, Artificial Sequence
  Description of Artificial Sequence: Synthetic oligonucleotide
ccacacggucagugagacg

SEQ ID NO: 2047627 - RNA, 19 nt, Artificial Sequence
  Description of Artificial Sequence: Synthetic oligonucleotide
ggaugggaucauccgaauu

SEQ ID NO: 2047628 - RNA, 19 nt, Artificial Sequence
  Description of Artificial Sequence: Synthetic oligonucleotide
gcccacccggaucccacgc

SEQ ID NO: 2047629 - RNA, 19 nt, Artificial Sequence
  Description of Artificial Sequence: Synthetic oligonucleotide
gggcuggcgccccguguag

SEQ ID NO: 2047630 - RNA, 19 nt, Artificial Sequence
  Description of Artificial Sequence: Synthetic oligonucleotide
gcacugccgauguggggca

SEQ ID NO: 2047631 - RNA, 19 nt, Artificial Sequence
  Description of Artificial Sequence: Synthetic oligonucleotide
cugccgauguggggcagga

SEQ ID NO: 2047632 - RNA, 19 nt, Artificial Sequence
  Description of Artificial Sequence: Synthetic oligonucleotide
cgucuccccucuuaggcca

SEQ ID NO: 2047633 - RNA, 19 nt, Artificial Sequence
  Description of Artificial Sequence: Synthetic oligonucleotide
gggagacggcaaguucagc

SEQ ID NO: 2047634 - RNA, 19 nt, Artificial Sequence
  Description of Artificial Sequence: Synthetic oligonucleotide
gaaagccccucuacagcuu

SEQ ID NO: 2047635 - RNA, 19 nt, Artificial Sequence
  Description of Artificial Sequence: Synthetic oligonucleotide
gccccguguagagaaaucu

SEQ ID NO: 2047636 - RNA, 19 nt, Artificial Sequence
  Description of Artificial Sequence: Synthetic oligonucleotide
cacugccgauguggggcag

SEQ ID NO: 2047637 - RNA, 19 nt, Artificial Sequence
  Description of Artificial Sequence: Synthetic oligonucleotide
gcgagaguccauagccaca

SEQ ID NO: 2047638 - RNA, 19 nt, Artificial Sequence
  Description of Artificial Sequence: Synthetic oligonucleotide
ggcaucugucaggacaccu

SEQ ID NO: 2047639 - RNA, 19 nt, Artificial Sequence
  Description of Artificial Sequence: Synthetic oligonucleotide
ugccgauguggggcaggau

SEQ ID NO: 2047640 - RNA, 19 nt, Artificial Sequence
  Description of Artificial Sequence: Synthetic oligonucleotide
ccugaccuaugcgcccuag

SEQ ID NO: 2047641 - RNA, 19 nt, Artificial Sequence
  Description of Artificial Sequence: Synthetic oligonucleotide
ggaucccacgcuucuugau

SEQ ID NO: 2047642 - RNA, 19 nt, Artificial Sequence
  Description of Artificial Sequence: Synthetic oligonucleotide
gguuccggaguggucacau

SEQ ID NO: 2047643 - RNA, 19 nt, Artificial Sequence
  Description of Artificial Sequence: Synthetic oligonucleotide
cuggcgccccguguagaga

SEQ ID NO: 2047644 - RNA, 19 nt, Artificial Sequence
  Description of Artificial Sequence: Synthetic oligonucleotide
ggguggcuuggaggcagug

SEQ ID NO: 2047645 - RNA, 19 nt, Artificial Sequence
  Description of Artificial Sequence: Synthetic oligonucleotide
ggcguguagcccacccgga

SEQ ID NO: 2047646 - RNA, 19 nt, Artificial Sequence
  Description of Artificial Sequence: Synthetic oligonucleotide
gggaugggaucauccgaau

SEQ ID NO: 2047647 - RNA, 19 nt, Artificial Sequence
  Description of Artificial Sequence: Synthetic oligonucleotide
gucugcggccuuggcgaga

SEQ ID NO: 2047648 - RNA, 19 nt, Artificial Sequence
  Description of Artificial Sequence: Synthetic oligonucleotide
agccggcggcaggugguga

SEQ ID NO: 2047649 - RNA, 19 nt, Artificial Sequence
  Description of Artificial Sequence: Synthetic oligonucleotide
cccacgcuucuugauuuca

SEQ ID NO: 2047650 - RNA, 19 nt, Artificial Sequence
  Description of Artificial Sequence: Synthetic oligonucleotide
cgccguucuucacuuccuc

SEQ ID NO: 2047651 - RNA, 19 nt, Artificial Sequence
  Description of Artificial Sequence: Synthetic oligonucleotide
cugcggccuuggcgagagc

SEQ ID NO: 2047652 - RNA, 19 nt, Artificial Sequence
  Description of Artificial Sequence: Synthetic oligonucleotide
cggcaaguucagcgguggc

SEQ ID NO: 2047653 - RNA, 19 nt, Artificial Sequence
  Description of Artificial Sequence: Synthetic oligonucleotide
cagccgccguucuucacuu

SEQ ID NO: 2047654 - RNA, 19 nt, Artificial Sequence
  Description of Artificial Sequence: Synthetic oligonucleotide
cagugacgaagaccuucau

SEQ ID NO: 2047655 - RNA, 19 nt, Artificial Sequence
  Description of Artificial Sequence: Synthetic oligonucleotide
ccuaugcgcccuagcccca

SEQ ID NO: 2047656 - RNA, 19 nt, Artificial Sequence
  Description of Artificial Sequence: Synthetic oligonucleotide
cuccucugcugauguugau

SEQ ID NO: 2047657 - RNA, 19 nt, Artificial Sequence
  Description of Artificial Sequence: Synthetic oligonucleotide
cgucgagcaauggccugac

SEQ ID NO: 2047658 - RNA, 19 nt, Artificial Sequence
  Description of Artificial Sequence: Synthetic oligonucleotide
cgauguggggcaggaucac

SEQ ID NO: 2047659 - RNA, 19 nt, Artificial Sequence
  Description of Artificial Sequence: Synthetic oligonucleotide
cgccccguguagagaaauc

SEQ ID NO: 2047660 - RNA, 19 nt, Artificial Sequence
  Description of Artificial Sequence: Synthetic oligonucleotide
cggaucccacgcuucuuga

SEQ ID NO: 2047661 - RNA, 19 nt, Artificial Sequence
  Description of Artificial Sequence: Synthetic oligonucleotide
gcguguagcccacccggau

SEQ ID NO: 2047662 - RNA, 19 nt, Artificial Sequence
  Description of Artificial Sequence: Synthetic oligonucleotide
gccccucuacagcuugagu

SEQ ID NO: 2047663 - RNA, 19 nt, Artificial Sequence
  Description of Artificial Sequence: Synthetic oligonucleotide
ggccugaccuaugcgcccu

SEQ ID NO: 2047664 - RNA, 19 nt, Artificial Sequence
  Description of Artificial Sequence: Synthetic oligonucleotide
ccacugauagggugcugau

SEQ ID NO: 2047665 - RNA, 19 nt, Artificial Sequence
  Description of Artificial Sequence: Synthetic oligonucleotide
ggguuagcaguggguggcu

SEQ ID NO: 2047666 - RNA, 19 nt, Artificial Sequence
  Description of Artificial Sequence: Synthetic oligonucleotide
ccccugguagcagguguca

SEQ ID NO: 2047667 - RNA, 19 nt, Artificial Sequence
  Description of Artificial Sequence: Synthetic oligonucleotide
cggcagcagcaaacacgag

SEQ ID NO: 2047668 - RNA, 19 nt, Artificial Sequence
  Description of Artificial Sequence: Synthetic oligonucleotide
cggaguggucacauccagu

SEQ ID NO: 2047669 - RNA, 19 nt, Artificial Sequence
  Description of Artificial Sequence: Synthetic oligonucleotide
ccgccguucuucacuuccu

SEQ ID NO: 2047670 - RNA, 19 nt, Artificial Sequence
  Description of Artificial Sequence: Synthetic oligonucleotide
gugcucugcgagaguccau

SEQ ID NO: 2047671 - RNA, 19 nt, Artificial Sequence
  Description of Artificial Sequence: Synthetic oligonucleotide
ccaugguguugcgaguuuu

SEQ ID NO: 2047672 - RNA, 19 nt, Artificial Sequence
  Description of Artificial Sequence: Synthetic oligonucleotide
ccacugguuaaugccugau

SEQ ID NO: 2047673 - RNA, 19 nt, Artificial Sequence
  Description of Artificial Sequence: Synthetic oligonucleotide
gccugaccuaugcgcccua

SEQ ID NO: 2047674 - RNA, 19 nt, Artificial Sequence
  Description of Artificial Sequence: Synthetic oligonucleotide
gcgccccguguagagaaau

SEQ ID NO: 2047675 - RNA, 19 nt, Artificial Sequence
  Description of Artificial Sequence: Synthetic oligonucleotide
ggcgccccguguagagaaa

SEQ ID NO: 2047676 - RNA, 19 nt, Artificial Sequence
  Description of Artificial Sequence: Synthetic oligonucleotide
ccacgcuuuccuccaguuu

SEQ ID NO: 2047677 - RNA, 19 nt, Artificial Sequence
  Description of Artificial Sequence: Synthetic oligonucleotide
ccacccggaucccacgcuu

SEQ ID NO: 2047678 - RNA, 19 nt, Artificial Sequence
  Description of Artificial Sequence: Synthetic oligonucleotide
cccacccggaucccacgcu

SEQ ID NO: 2047679 - RNA, 19 nt, Artificial Sequence
  Description of Artificial Sequence: Synthetic oligonucleotide
gggcaucgucuccccucuu

SEQ ID NO: 2047680 - RNA, 19 nt, Artificial Sequence
  Description of Artificial Sequence: Synthetic oligonucleotide
ccggcggcagguggugagu

SEQ ID NO: 2047681 - RNA, 19 nt, Artificial Sequence
  Description of Artificial Sequence: Synthetic oligonucleotide
cggcggcagguggugagua

SEQ ID NO: 2047682 - RNA, 19 nt, Artificial Sequence
  Description of Artificial Sequence: Synthetic oligonucleotide
aagagcaaagacuauagag

SEQ ID NO: 2047683 - RNA, 19 nt, Artificial Sequence
  Description of Artificial Sequence: Synthetic oligonucleotide
agaggugucaucuguaucc

SEQ ID NO: 2047684 - RNA, 19 nt, Artificial Sequence
  Description of Artificial Sequence: Synthetic oligonucleotide
ucagucaucagccacaaug

SEQ ID NO: 2047685 - RNA, 19 nt, Artificial Sequence
  Description of Artificial Sequence: Synthetic oligonucleotide
aauaguggccaccuguccc

SEQ ID NO: 2047686 - RNA, 19 nt, Artificial Sequence
  Description of Artificial Sequence: Synthetic oligonucleotide
aaauggagacauuuaaguc

SEQ ID NO: 2047687 - RNA, 19 nt, Artificial Sequence
  Description of Artificial Sequence: Synthetic oligonucleotide
agacauuuaagucagagga

SEQ ID NO: 2047688 - RNA, 19 nt, Artificial Sequence
  Description of Artificial Sequence: Synthetic oligonucleotide
gaaacaacagccuguaagg

SEQ ID NO: 2047689 - RNA, 19 nt, Artificial Sequence
  Description of Artificial Sequence: Synthetic oligonucleotide
uuaaacggaauccagcuca

SEQ ID NO: 2047690 - RNA, 19 nt, Artificial Sequence
  Description of Artificial Sequence: Synthetic oligonucleotide
aacggaauccagcucaugg

SEQ ID NO: 2047691 - RNA, 19 nt, Artificial Sequence
  Description of Artificial Sequence: Synthetic oligonucleotide
agaaguauacaaccugugc

SEQ ID NO: 2047692 - RNA, 19 nt, Artificial Sequence
  Description of Artificial Sequence: Synthetic oligonucleotide
aaguagucaagucggcugc

SEQ ID NO: 2047693 - RNA, 19 nt, Artificial Sequence
  Description of Artificial Sequence: Synthetic oligonucleotide
uauagugcacucuggacgg

SEQ ID NO: 2047694 - RNA, 19 nt, Artificial Sequence
  Description of Artificial Sequence: Synthetic oligonucleotide
cuauagugcacucuggacg

SEQ ID NO: 2047695 - RNA, 19 nt, Artificial Sequence
  Description of Artificial Sequence: Synthetic oligonucleotide
agcagauuuggacauggcc

SEQ ID NO: 2047696 - RNA, 19 nt, Artificial Sequence
  Description of Artificial Sequence: Synthetic oligonucleotide
uucuacauugcuuauuagc

SEQ ID NO: 2047697 - RNA, 19 nt, Artificial Sequence
  Description of Artificial Sequence: Synthetic oligonucleotide
ucuuaugcauuucugagaa

SEQ ID NO: 2047698 - RNA, 19 nt, Artificial Sequence
  Description of Artificial Sequence: Synthetic oligonucleotide
uucugagaaguauacaacc

SEQ ID NO: 2047699 - RNA, 19 nt, Artificial Sequence
  Description of Artificial Sequence: Synthetic oligonucleotide
uugcuuauuagcauugggc

SEQ ID NO: 2047700 - RNA, 19 nt, Artificial Sequence
  Description of Artificial Sequence: Synthetic oligonucleotide
agagcaaagacuauagagg

SEQ ID NO: 2047701 - RNA, 19 nt, Artificial Sequence
  Description of Artificial Sequence: Synthetic oligonucleotide
ugcuuauuagcauugggca

SEQ ID NO: 2047702 - RNA, 19 nt, Artificial Sequence
  Description of Artificial Sequence: Synthetic oligonucleotide
agcucauggucccaaaccc

SEQ ID NO: 2047703 - RNA, 19 nt, Artificial Sequence
  Description of Artificial Sequence: Synthetic oligonucleotide
ucuuaaacggaauccagcu

SEQ ID NO: 2047704 - RNA, 19 nt, Artificial Sequence
  Description of Artificial Sequence: Synthetic oligonucleotide
gagacauuuaagucagagg

SEQ ID NO: 2047705 - RNA, 19 nt, Artificial Sequence
  Description of Artificial Sequence: Synthetic oligonucleotide
cuaagagcaaagacuauag

SEQ ID NO: 2047706 - RNA, 19 nt, Artificial Sequence
  Description of Artificial Sequence: Synthetic oligonucleotide
ugagaaguauacaaccugu

SEQ ID NO: 2047707 - RNA, 19 nt, Artificial Sequence
  Description of Artificial Sequence: Synthetic oligonucleotide
gacacuauagugcacucug

SEQ ID NO: 2047708 - RNA, 19 nt, Artificial Sequence
  Description of Artificial Sequence: Synthetic oligonucleotide
uucaaucacugucuuuugg

SEQ ID NO: 2047709 - RNA, 19 nt, Artificial Sequence
  Description of Artificial Sequence: Synthetic oligonucleotide
acuauagugcacucuggac

SEQ ID NO: 2047710 - RNA, 19 nt, Artificial Sequence
  Description of Artificial Sequence: Synthetic oligonucleotide
uccagggauaucuucacag

SEQ ID NO: 2047711 - RNA, 19 nt, Artificial Sequence
  Description of Artificial Sequence: Synthetic oligonucleotide
uguucuuggccucaaaguc

SEQ ID NO: 2047712 - RNA, 19 nt, Artificial Sequence
  Description of Artificial Sequence: Synthetic oligonucleotide
auugcuuauuagcauuggg

SEQ ID NO: 2047713 - RNA, 19 nt, Artificial Sequence
  Description of Artificial Sequence: Synthetic oligonucleotide
cuuauuagcauugggcagg

SEQ ID NO: 2047714 - RNA, 19 nt, Artificial Sequence
  Description of Artificial Sequence: Synthetic oligonucleotide
auccaugccugcuaagagc

SEQ ID NO: 2047715 - RNA, 19 nt, Artificial Sequence
  Description of Artificial Sequence: Synthetic oligonucleotide
gaaauggagacauuuaagu

SEQ ID NO: 2047716 - RNA, 19 nt, Artificial Sequence
  Description of Artificial Sequence: Synthetic oligonucleotide
uuggagaguaaguccaggg

SEQ ID NO: 2047717 - RNA, 19 nt, Artificial Sequence
  Description of Artificial Sequence: Synthetic oligonucleotide
agaguuguuuguucuuggc

SEQ ID NO: 2047718 - RNA, 19 nt, Artificial Sequence
  Description of Artificial Sequence: Synthetic oligonucleotide
uucauagcugugucuaggg

SEQ ID NO: 2047719 - RNA, 19 nt, Artificial Sequence
  Description of Artificial Sequence: Synthetic oligonucleotide
aguaaguccagggauaucu

SEQ ID NO: 2047720 - RNA, 19 nt, Artificial Sequence
  Description of Artificial Sequence: Synthetic oligonucleotide
uuuucagggguucaaucac

SEQ ID NO: 2047721 - RNA, 19 nt, Artificial Sequence
  Description of Artificial Sequence: Synthetic oligonucleotide
ugguugaaggcauccaucc

SEQ ID NO: 2047722 - RNA, 19 nt, Artificial Sequence
  Description of Artificial Sequence: Synthetic oligonucleotide
agaucuuaugcauuucuga

SEQ ID NO: 2047723 - RNA, 19 nt, Artificial Sequence
  Description of Artificial Sequence: Synthetic oligonucleotide
cuugguuugcucuuccagc

SEQ ID NO: 2047724 - RNA, 19 nt, Artificial Sequence
  Description of Artificial Sequence: Synthetic oligonucleotide
aucuuaaacggaauccagc

SEQ ID NO: 2047725 - RNA, 19 nt, Artificial Sequence
  Description of Artificial Sequence: Synthetic oligonucleotide
ucaaagucuucccguacag

SEQ ID NO: 2047726 - RNA, 19 nt, Artificial Sequence
  Description of Artificial Sequence: Synthetic oligonucleotide
uccaugccugcuaagagca

SEQ ID NO: 2047727 - RNA, 19 nt, Artificial Sequence
  Description of Artificial Sequence: Synthetic oligonucleotide
uggcaagguagaauagugg

SEQ ID NO: 2047728 - RNA, 19 nt, Artificial Sequence
  Description of Artificial Sequence: Synthetic oligonucleotide
uguaaggaucccaguauca

SEQ ID NO: 2047729 - RNA, 19 nt, Artificial Sequence
  Description of Artificial Sequence: Synthetic oligonucleotide
agucuucccguacaggccg

SEQ ID NO: 2047730 - RNA, 19 nt, Artificial Sequence
  Description of Artificial Sequence: Synthetic oligonucleotide
auuuaagucagaggacugg

SEQ ID NO: 2047731 - RNA, 19 nt, Artificial Sequence
  Description of Artificial Sequence: Synthetic oligonucleotide
cagaggacuggcaagguag

SEQ ID NO: 2047732 - RNA, 19 nt, Artificial Sequence
  Description of Artificial Sequence: Synthetic oligonucleotide
uggcuggucaagcugcugg

SEQ ID NO: 2047733 - RNA, 19 nt, Artificial Sequence
  Description of Artificial Sequence: Synthetic oligonucleotide
gcuggaaguagucaagucg

SEQ ID NO: 2047734 - RNA, 19 nt, Artificial Sequence
  Description of Artificial Sequence: Synthetic oligonucleotide
uuuaagucagaggacuggc

SEQ ID NO: 2047735 - RNA, 19 nt, Artificial Sequence
  Description of Artificial Sequence: Synthetic oligonucleotide
acauuuaagucagaggacu

SEQ ID NO: 2047736 - RNA, 19 nt, Artificial Sequence
  Description of Artificial Sequence: Synthetic oligonucleotide
aagacuauagaggugucau

SEQ ID NO: 2047737 - RNA, 19 nt, Artificial Sequence
  Description of Artificial Sequence: Synthetic oligonucleotide
acaacagccuguaaggauc

SEQ ID NO: 2047738 - RNA, 19 nt, Artificial Sequence
  Description of Artificial Sequence: Synthetic oligonucleotide
aucaggcucaaggaaaugg

SEQ ID NO: 2047739 - RNA, 19 nt, Artificial Sequence
  Description of Artificial Sequence: Synthetic oligonucleotide
aagucuucccguacaggcc

SEQ ID NO: 2047740 - RNA, 19 nt, Artificial Sequence
  Description of Artificial Sequence: Synthetic oligonucleotide
gcauccauccguuucauag

SEQ ID NO: 2047741 - RNA, 19 nt, Artificial Sequence
  Description of Artificial Sequence: Synthetic oligonucleotide
uggguuggagaguaagucc

SEQ ID NO: 2047742 - RNA, 19 nt, Artificial Sequence
  Description of Artificial Sequence: Synthetic oligonucleotide
aucuguaucccaaggaguc

SEQ ID NO: 2047743 - RNA, 19 nt, Artificial Sequence
  Description of Artificial Sequence: Synthetic oligonucleotide
aggaaauggagacauuuaa

SEQ ID NO: 2047744 - RNA, 19 nt, Artificial Sequence
  Description of Artificial Sequence: Synthetic oligonucleotide
agaaccguggcaucucguc

SEQ ID NO: 2047745 - RNA, 19 nt, Artificial Sequence
  Description of Artificial Sequence: Synthetic oligonucleotide
uggagaguaaguccaggga

SEQ ID NO: 2047746 - RNA, 19 nt, Artificial Sequence
  Description of Artificial Sequence: Synthetic oligonucleotide
cauacucccucucaaaguc

SEQ ID NO: 2047747 - RNA, 19 nt, Artificial Sequence
  Description of Artificial Sequence: Synthetic oligonucleotide
uugggaacaaucuguuucu

SEQ ID NO: 2047748 - RNA, 19 nt, Artificial Sequence
  Description of Artificial Sequence: Synthetic oligonucleotide
uguucagaaaguccugguc

SEQ ID NO: 2047749 - RNA, 19 nt, Artificial Sequence
  Description of Artificial Sequence: Synthetic oligonucleotide
gaucuuaaacggaauccag

SEQ ID NO: 2047750 - RNA, 19 nt, Artificial Sequence
  Description of Artificial Sequence: Synthetic oligonucleotide
aucuuaugcauuucugaga

SEQ ID NO: 2047751 - RNA, 19 nt, Artificial Sequence
  Description of Artificial Sequence: Synthetic oligonucleotide
aguuuugggaacaaucugu

SEQ ID NO: 2047752 - RNA, 19 nt, Artificial Sequence
  Description of Artificial Sequence: Synthetic oligonucleotide
uuaagucagaggacuggca

SEQ ID NO: 2047753 - RNA, 19 nt, Artificial Sequence
  Description of Artificial Sequence: Synthetic oligonucleotide
aagaucuuaugcauuucug

SEQ ID NO: 2047754 - RNA, 19 nt, Artificial Sequence
  Description of Artificial Sequence: Synthetic oligonucleotide
aguccagggauaucuucac

SEQ ID NO: 2047755 - RNA, 19 nt, Artificial Sequence
  Description of Artificial Sequence: Synthetic oligonucleotide
auagaaccguggcaucucg

SEQ ID NO: 2047756 - RNA, 19 nt, Artificial Sequence
  Description of Artificial Sequence: Synthetic oligonucleotide
cuggcaagguagaauagug

SEQ ID NO: 2047757 - RNA, 19 nt, Artificial Sequence
  Description of Artificial Sequence: Synthetic oligonucleotide
cccaguaucaggcucaagg

SEQ ID NO: 2047758 - RNA, 19 nt, Artificial Sequence
  Description of Artificial Sequence: Synthetic oligonucleotide
uucagggguucaaucacug

SEQ ID NO: 2047759 - RNA, 19 nt, Artificial Sequence
  Description of Artificial Sequence: Synthetic oligonucleotide
agcucacuuaguuuggccu

SEQ ID NO: 2047760 - RNA, 19 nt, Artificial Sequence
  Description of Artificial Sequence: Synthetic oligonucleotide
aaagacuauagagguguca

SEQ ID NO: 2047761 - RNA, 19 nt, Artificial Sequence
  Description of Artificial Sequence: Synthetic oligonucleotide
auggagacauuuaagucag

SEQ ID NO: 2047762 - RNA, 19 nt, Artificial Sequence
  Description of Artificial Sequence: Synthetic oligonucleotide
uuucuacauugcuuauuag

SEQ ID NO: 2047763 - RNA, 19 nt, Artificial Sequence
  Description of Artificial Sequence: Synthetic oligonucleotide
ucauagcugugucuagggc

SEQ ID NO: 2047764 - RNA, 19 nt, Artificial Sequence
  Description of Artificial Sequence: Synthetic oligonucleotide
acaaccugugcccggauca

SEQ ID NO: 2047765 - RNA, 19 nt, Artificial Sequence
  Description of Artificial Sequence: Synthetic oligonucleotide
ugguccuguucacacagug

SEQ ID NO: 2047766 - RNA, 19 nt, Artificial Sequence
  Description of Artificial Sequence: Synthetic oligonucleotide
aagucggcugccauagaac

SEQ ID NO: 2047767 - RNA, 19 nt, Artificial Sequence
  Description of Artificial Sequence: Synthetic oligonucleotide
uuauuagcauugggcaggg

SEQ ID NO: 2047768 - RNA, 19 nt, Artificial Sequence
  Description of Artificial Sequence: Synthetic oligonucleotide
caaucuguuucuugggcug

SEQ ID NO: 2047769 - RNA, 19 nt, Artificial Sequence
  Description of Artificial Sequence: Synthetic oligonucleotide
cauuuaagucagaggacug

SEQ ID NO: 2047770 - RNA, 19 nt, Artificial Sequence
  Description of Artificial Sequence: Synthetic oligonucleotide
aaccguggcaucucgucca

SEQ ID NO: 2047771 - RNA, 19 nt, Artificial Sequence
  Description of Artificial Sequence: Synthetic oligonucleotide
uuuccauacucccucucaa

SEQ ID NO: 2047772 - RNA, 19 nt, Artificial Sequence
  Description of Artificial Sequence: Synthetic oligonucleotide
uauagaggugucaucugua

SEQ ID NO: 2047773 - RNA, 19 nt, Artificial Sequence
  Description of Artificial Sequence: Synthetic oligonucleotide
agacuauagaggugucauc

SEQ ID NO: 2047774 - RNA, 19 nt, Artificial Sequence
  Description of Artificial Sequence: Synthetic oligonucleotide
agaauaguggccaccuguc

SEQ ID NO: 2047775 - RNA, 19 nt, Artificial Sequence
  Description of Artificial Sequence: Synthetic oligonucleotide
aucgguacuuuucuucaug

SEQ ID NO: 2047776 - RNA, 19 nt, Artificial Sequence
  Description of Artificial Sequence: Synthetic oligonucleotide
gaauaguggccaccugucc

SEQ ID NO: 2047777 - RNA, 19 nt, Artificial Sequence
  Description of Artificial Sequence: Synthetic oligonucleotide
ucggcaucgguacuuuucu

SEQ ID NO: 2047778 - RNA, 19 nt, Artificial Sequence
  Description of Artificial Sequence: Synthetic oligonucleotide
guaaggaucccaguaucag

SEQ ID NO: 2047779 - RNA, 19 nt, Artificial Sequence
  Description of Artificial Sequence: Synthetic oligonucleotide
ucgguacuuuucuucaugu

SEQ ID NO: 2047780 - RNA, 19 nt, Artificial Sequence
  Description of Artificial Sequence: Synthetic oligonucleotide
cauccauccguuucauagc

SEQ ID NO: 2047781 - RNA, 19 nt, Artificial Sequence
  Description of Artificial Sequence: Synthetic oligonucleotide
ucacacaguggguuggaga

SEQ ID NO: 2047782 - RNA, 19 nt, Artificial Sequence
  Description of Artificial Sequence: Synthetic oligonucleotide
cauggucccaaacccacgc

SEQ ID NO: 2047783 - RNA, 19 nt, Artificial Sequence
  Description of Artificial Sequence: Synthetic oligonucleotide
aauacacugccaaacuuuu

SEQ ID NO: 2047784 - RNA, 19 nt, Artificial Sequence
  Description of Artificial Sequence: Synthetic oligonucleotide
gacauuuaagucagaggac

SEQ ID NO: 2047785 - RNA, 19 nt, Artificial Sequence
  Description of Artificial Sequence: Synthetic oligonucleotide
uaugcauuucugagaagua

SEQ ID NO: 2047786 - RNA, 19 nt, Artificial Sequence
  Description of Artificial Sequence: Synthetic oligonucleotide
ugugucuagggcugucacc

SEQ ID NO: 2047787 - RNA, 19 nt, Artificial Sequence
  Description of Artificial Sequence: Synthetic oligonucleotide
ugaggcucgggaauacacu

SEQ ID NO: 2047788 - RNA, 19 nt, Artificial Sequence
  Description of Artificial Sequence: Synthetic oligonucleotide
gaaccguggcaucucgucc

SEQ ID NO: 2047789 - RNA, 19 nt, Artificial Sequence
  Description of Artificial Sequence: Synthetic oligonucleotide
ugcccgaucuuaaacggaa

SEQ ID NO: 2047790 - RNA, 19 nt, Artificial Sequence
  Description of Artificial Sequence: Synthetic oligonucleotide
auccauccguuucauagcu

SEQ ID NO: 2047791 - RNA, 19 nt, Artificial Sequence
  Description of Artificial Sequence: Synthetic oligonucleotide
gagaaguauacaaccugug

SEQ ID NO: 2047792 - RNA, 19 nt, Artificial Sequence
  Description of Artificial Sequence: Synthetic oligonucleotide
ggagacauuuaagucagag

SEQ ID NO: 2047793 - RNA, 19 nt, Artificial Sequence
  Description of Artificial Sequence: Synthetic oligonucleotide
auuuggacauggccagguc

SEQ ID NO: 2047794 - RNA, 19 nt, Artificial Sequence
  Description of Artificial Sequence: Synthetic oligonucleotide
ugccauagaaccguggcau

SEQ ID NO: 2047795 - RNA, 19 nt, Artificial Sequence
  Description of Artificial Sequence: Synthetic oligonucleotide
ggaaauggagacauuuaag

SEQ ID NO: 2047796 - RNA, 19 nt, Artificial Sequence
  Description of Artificial Sequence: Synthetic oligonucleotide
guauacaaccugugcccgg

SEQ ID NO: 2047797 - RNA, 19 nt, Artificial Sequence
  Description of Artificial Sequence: Synthetic oligonucleotide
gacuauagaggugucaucu

SEQ ID NO: 2047798 - RNA, 19 nt, Artificial Sequence
  Description of Artificial Sequence: Synthetic oligonucleotide
uauacaaccugugcccgga

SEQ ID NO: 2047799 - RNA, 19 nt, Artificial Sequence
  Description of Artificial Sequence: Synthetic oligonucleotide
gucaagucggcugccauag

SEQ ID NO: 2047800 - RNA, 19 nt, Artificial Sequence
  Description of Artificial Sequence: Synthetic oligonucleotide
cuccuguagucuugcaagg

SEQ ID NO: 2047801 - RNA, 19 nt, Artificial Sequence
  Description of Artificial Sequence: Synthetic oligonucleotide
auagaggugucaucuguau

SEQ ID NO: 2047802 - RNA, 19 nt, Artificial Sequence
  Description of Artificial Sequence: Synthetic oligonucleotide
uccguuucauagcuguguc

SEQ ID NO: 2047803 - RNA, 19 nt, Artificial Sequence
  Description of Artificial Sequence: Synthetic oligonucleotide
gcuuauuagcauugggcag

SEQ ID NO: 2047804 - RNA, 19 nt, Artificial Sequence
  Description of Artificial Sequence: Synthetic oligonucleotide
cugcuaagagcaaagacua

SEQ ID NO: 2047805 - RNA, 19 nt, Artificial Sequence
  Description of Artificial Sequence: Synthetic oligonucleotide
guuucauagcugugucuag

SEQ ID NO: 2047806 - RNA, 19 nt, Artificial Sequence
  Description of Artificial Sequence: Synthetic oligonucleotide
cuuaaacggaauccagcuc

SEQ ID NO: 2047807 - RNA, 19 nt, Artificial Sequence
  Description of Artificial Sequence: Synthetic oligonucleotide
agggauaucuucacagcag

SEQ ID NO: 2047808 - RNA, 19 nt, Artificial Sequence
  Description of Artificial Sequence: Synthetic oligonucleotide
ggcugcccgaucuuaaacg

SEQ ID NO: 2047809 - RNA, 19 nt, Artificial Sequence
  Description of Artificial Sequence: Synthetic oligonucleotide
caacuggcaggccacuggg

SEQ ID NO: 2047810 - RNA, 19 nt, Artificial Sequence
  Description of Artificial Sequence: Synthetic oligonucleotide
aguagucaagucggcugcc

SEQ ID NO: 2047811 - RNA, 19 nt, Artificial Sequence
  Description of Artificial Sequence: Synthetic oligonucleotide
caacagccuguaaggaucc

SEQ ID NO: 2047812 - RNA, 19 nt, Artificial Sequence
  Description of Artificial Sequence: Synthetic oligonucleotide
uacucccucucaaagucuc

SEQ ID NO: 2047813 - RNA, 19 nt, Artificial Sequence
  Description of Artificial Sequence: Synthetic oligonucleotide
acggaauccagcucauggu

SEQ ID NO: 2047814 - RNA, 19 nt, Artificial Sequence
  Description of Artificial Sequence: Synthetic oligonucleotide
cuguaaggaucccaguauc

SEQ ID NO: 2047815 - RNA, 19 nt, Artificial Sequence
  Description of Artificial Sequence: Synthetic oligonucleotide
cagccuguaaggaucccag

SEQ ID NO: 2047816 - RNA, 19 nt, Artificial Sequence
  Description of Artificial Sequence: Synthetic oligonucleotide
gucaucuguaucccaagga

SEQ ID NO: 2047817 - RNA, 19 nt, Artificial Sequence
  Description of Artificial Sequence: Synthetic oligonucleotide
uagaggugucaucuguauc

SEQ ID NO: 2047818 - RNA, 19 nt, Artificial Sequence
  Description of Artificial Sequence: Synthetic oligonucleotide
cauugcuuauuagcauugg

SEQ ID NO: 2047819 - RNA, 19 nt, Artificial Sequence
  Description of Artificial Sequence: Synthetic oligonucleotide
caucugaguggccuggcug

SEQ ID NO: 2047820 - RNA, 19 nt, Artificial Sequence
  Description of Artificial Sequence: Synthetic oligonucleotide
cugguugaaggcauccauc

SEQ ID NO: 2047821 - RNA, 19 nt, Artificial Sequence
  Description of Artificial Sequence: Synthetic oligonucleotide
cuguuucuugggcugcccg

SEQ ID NO: 2047822 - RNA, 19 nt, Artificial Sequence
  Description of Artificial Sequence: Synthetic oligonucleotide
guugaaggcauccauccgu

SEQ ID NO: 2047823 - RNA, 19 nt, Artificial Sequence
  Description of Artificial Sequence: Synthetic oligonucleotide
cucacuuaguuuggccucg

SEQ ID NO: 2047824 - RNA, 19 nt, Artificial Sequence
  Description of Artificial Sequence: Synthetic oligonucleotide
ccuccuguagucuugcaag

SEQ ID NO: 2047825 - RNA, 19 nt, Artificial Sequence
  Description of Artificial Sequence: Synthetic oligonucleotide
acuggcaagguagaauagu

SEQ ID NO: 2047826 - RNA, 19 nt, Artificial Sequence
  Description of Artificial Sequence: Synthetic oligonucleotide
gcugcccgaucuuaaacgg

SEQ ID NO: 2047827 - RNA, 19 nt, Artificial Sequence
  Description of Artificial Sequence: Synthetic oligonucleotide
gugucuagggcugucacca

SEQ ID NO: 2047828 - RNA, 19 nt, Artificial Sequence
  Description of Artificial Sequence: Synthetic oligonucleotide
gaggcccaugaauccaugc

SEQ ID NO: 2047829 - RNA, 19 nt, Artificial Sequence
  Description of Artificial Sequence: Synthetic oligonucleotide
gcugucaccauguucagaa

SEQ ID NO: 2047830 - RNA, 19 nt, Artificial Sequence
  Description of Artificial Sequence: Synthetic oligonucleotide
uucccguacaggccgcagc

SEQ ID NO: 2047831 - RNA, 19 nt, Artificial Sequence
  Description of Artificial Sequence: Synthetic oligonucleotide
caaagucuucccguacagg

SEQ ID NO: 2047832 - RNA, 19 nt, Artificial Sequence
  Description of Artificial Sequence: Synthetic oligonucleotide
cuuaugcauuucugagaag

SEQ ID NO: 2047833 - RNA, 19 nt, Artificial Sequence
  Description of Artificial Sequence: Synthetic oligonucleotide
uaaacggaauccagcucau

SEQ ID NO: 2047834 - RNA, 19 nt, Artificial Sequence
  Description of Artificial Sequence: Synthetic oligonucleotide
guuguuuguucuuggccuc

SEQ ID NO: 2047835 - RNA, 19 nt, Artificial Sequence
  Description of Artificial Sequence: Synthetic oligonucleotide
ucggcugccauagaaccgu

SEQ ID NO: 2047836 - RNA, 19 nt, Artificial Sequence
  Description of Artificial Sequence: Synthetic oligonucleotide
cauagcugugucuagggcu

SEQ ID NO: 2047837 - RNA, 19 nt, Artificial Sequence
  Description of Artificial Sequence: Synthetic oligonucleotide
cagggauaucuucacagca

SEQ ID NO: 2047838 - RNA, 19 nt, Artificial Sequence
  Description of Artificial Sequence: Synthetic oligonucleotide
cuuuccauacucccucuca

SEQ ID NO: 2047839 - RNA, 19 nt, Artificial Sequence
  Description of Artificial Sequence: Synthetic oligonucleotide
gguugaaggcauccauccg

SEQ ID NO: 2047840 - RNA, 19 nt, Artificial Sequence
  Description of Artificial Sequence: Synthetic oligonucleotide
gucuugcaaggccugcucc

SEQ ID NO: 2047841 - RNA, 19 nt, Artificial Sequence
  Description of Artificial Sequence: Synthetic oligonucleotide
cuugcaaggccugcucccg

SEQ ID NO: 2047842 - RNA, 19 nt, Artificial Sequence
  Description of Artificial Sequence: Synthetic oligonucleotide
gaucccaguaucaggcuca

SEQ ID NO: 2047843 - RNA, 19 nt, Artificial Sequence
  Description of Artificial Sequence: Synthetic oligonucleotide
agucucucuccacaguuuu

SEQ ID NO: 2047844 - RNA, 19 nt, Artificial Sequence
  Description of Artificial Sequence: Synthetic oligonucleotide
uuuggaucugguucaccuu

SEQ ID NO: 2047845 - RNA, 19 nt, Artificial Sequence
  Description of Artificial Sequence: Synthetic oligonucleotide
cucguccaagaguuguuug

SEQ ID NO: 2047846 - RNA, 19 nt, Artificial Sequence
  Description of Artificial Sequence: Synthetic oligonucleotide
gaggugucaucuguauccc

SEQ ID NO: 2047847 - RNA, 19 nt, Artificial Sequence
  Description of Artificial Sequence: Synthetic oligonucleotide
cacucuggacgguucuggg

SEQ ID NO: 2047848 - RNA, 19 nt, Artificial Sequence
  Description of Artificial Sequence: Synthetic oligonucleotide
uuccauacucccucucaaa

SEQ ID NO: 2047849 - RNA, 19 nt, Artificial Sequence
  Description of Artificial Sequence: Synthetic oligonucleotide
auccguuucauagcugugu

SEQ ID NO: 2047850 - RNA, 19 nt, Artificial Sequence
  Description of Artificial Sequence: Synthetic oligonucleotide
cacuauagugcacucugga

SEQ ID NO: 2047851 - RNA, 19 nt, Artificial Sequence
  Description of Artificial Sequence: Synthetic oligonucleotide
guggguuggagaguaaguc

SEQ ID NO: 2047852 - RNA, 19 nt, Artificial Sequence
  Description of Artificial Sequence: Synthetic oligonucleotide
cuguaucccaaggagucug

SEQ ID NO: 2047853 - RNA, 19 nt, Artificial Sequence
  Description of Artificial Sequence: Synthetic oligonucleotide
agaguaaguccagggauau

SEQ ID NO: 2047854 - RNA, 19 nt, Artificial Sequence
  Description of Artificial Sequence: Synthetic oligonucleotide
agggguucaaucacugucu

SEQ ID NO: 2047855 - RNA, 19 nt, Artificial Sequence
  Description of Artificial Sequence: Synthetic oligonucleotide
uccauccguuucauagcug

SEQ ID NO: 2047856 - RNA, 19 nt, Artificial Sequence
  Description of Artificial Sequence: Synthetic oligonucleotide
uacaaccugugcccggauc

SEQ ID NO: 2047857 - RNA, 19 nt, Artificial Sequence
  Description of Artificial Sequence: Synthetic oligonucleotide
ucccucucaaagucucucu

SEQ ID NO: 2047858 - RNA, 19 nt, Artificial Sequence
  Description of Artificial Sequence: Synthetic oligonucleotide
gcuccugcuggccagacac

SEQ ID NO: 2047859 - RNA, 19 nt, Artificial Sequence
  Description of Artificial Sequence: Synthetic oligonucleotide
ucagggguucaaucacugu

SEQ ID NO: 2047860 - RNA, 19 nt, Artificial Sequence
  Description of Artificial Sequence: Synthetic oligonucleotide
ccuguagucuugcaaggcc

SEQ ID NO: 2047861 - RNA, 19 nt, Artificial Sequence
  Description of Artificial Sequence: Synthetic oligonucleotide
gacuggcaagguagaauag

SEQ ID NO: 2047862 - RNA, 19 nt, Artificial Sequence
  Description of Artificial Sequence: Synthetic oligonucleotide
ucgggaauacacugccaaa

SEQ ID NO: 2047863 - RNA, 19 nt, Artificial Sequence
  Description of Artificial Sequence: Synthetic oligonucleotide
guuuucccgcucucgcugc

SEQ ID NO: 2047864 - RNA, 19 nt, Artificial Sequence
  Description of Artificial Sequence: Synthetic oligonucleotide
guagaauaguggccaccug

SEQ ID NO: 2047865 - RNA, 19 nt, Artificial Sequence
  Description of Artificial Sequence: Synthetic oligonucleotide
ccgaucuuaaacggaaucc

SEQ ID NO: 2047866 - RNA, 19 nt, Artificial Sequence
  Description of Artificial Sequence: Synthetic oligonucleotide
auugggcaggggaaacaac

SEQ ID NO: 2047867 - RNA, 19 nt, Artificial Sequence
  Description of Artificial Sequence: Synthetic oligonucleotide
agauuuggacauggccagg

SEQ ID NO: 2047868 - RNA, 19 nt, Artificial Sequence
  Description of Artificial Sequence: Synthetic oligonucleotide
agcaaagacuauagaggug

SEQ ID NO: 2047869 - RNA, 19 nt, Artificial Sequence
  Description of Artificial Sequence: Synthetic oligonucleotide
gacaggggcucagucauca

SEQ ID NO: 2047870 - RNA, 19 nt, Artificial Sequence
  Description of Artificial Sequence: Synthetic oligonucleotide
ugcuaagagcaaagacuau

SEQ ID NO: 2047871 - RNA, 19 nt, Artificial Sequence
  Description of Artificial Sequence: Synthetic oligonucleotide
ggcaucgguacuuuucuuc

SEQ ID NO: 2047872 - RNA, 19 nt, Artificial Sequence
  Description of Artificial Sequence: Synthetic oligonucleotide
caaagacuauagagguguc

SEQ ID NO: 2047873 - RNA, 19 nt, Artificial Sequence
  Description of Artificial Sequence: Synthetic oligonucleotide
cucgggaauacacugccaa

SEQ ID NO: 2047874 - RNA, 19 nt, Artificial Sequence
  Description of Artificial Sequence: Synthetic oligonucleotide
uagaaccguggcaucucgu

SEQ ID NO: 2047875 - RNA, 19 nt, Artificial Sequence
  Description of Artificial Sequence: Synthetic oligonucleotide
gcaaagacuauagaggugu

SEQ ID NO: 2047876 - RNA, 19 nt, Artificial Sequence
  Description of Artificial Sequence: Synthetic oligonucleotide
ggcucgggaauacacugcc

SEQ ID NO: 2047877 - RNA, 19 nt, Artificial Sequence
  Description of Artificial Sequence: Synthetic oligonucleotide
ggacuggcaagguagaaua

SEQ ID NO: 2047878 - RNA, 19 nt, Artificial Sequence
  Description of Artificial Sequence: Synthetic oligonucleotide
aaacggaauccagcucaug

SEQ ID NO: 2047879 - RNA, 19 nt, Artificial Sequence
  Description of Artificial Sequence: Synthetic oligonucleotide
gcaagguagaauaguggcc

SEQ ID NO: 2047880 - RNA, 19 nt, Artificial Sequence
  Description of Artificial Sequence: Synthetic oligonucleotide
cucucgcugcucaucugag

SEQ ID NO: 2047881 - RNA, 19 nt, Artificial Sequence
  Description of Artificial Sequence: Synthetic oligonucleotide
uccccaacuggcaggccac

SEQ ID NO: 2047882 - RNA, 19 nt, Artificial Sequence
  Description of Artificial Sequence: Synthetic oligonucleotide
agugcacucuggacgguuc

SEQ ID NO: 2047883 - RNA, 19 nt, Artificial Sequence
  Description of Artificial Sequence: Synthetic oligonucleotide
cugugucuagggcugucac

SEQ ID NO: 2047884 - RNA, 19 nt, Artificial Sequence
  Description of Artificial Sequence: Synthetic oligonucleotide
aguggguuggagaguaagu

SEQ ID NO: 2047885 - RNA, 19 nt, Artificial Sequence
  Description of Artificial Sequence: Synthetic oligonucleotide
uaucaggcucaaggaaaug

SEQ ID NO: 2047886 - RNA, 19 nt, Artificial Sequence
  Description of Artificial Sequence: Synthetic oligonucleotide
cuauagaggugucaucugu

SEQ ID NO: 2047887 - RNA, 19 nt, Artificial Sequence
  Description of Artificial Sequence: Synthetic oligonucleotide
gcauuucugagaaguauac

SEQ ID NO: 2047888 - RNA, 19 nt, Artificial Sequence
  Description of Artificial Sequence: Synthetic oligonucleotide
agacacuauagugcacucu

SEQ ID NO: 2047889 - RNA, 19 nt, Artificial Sequence
  Description of Artificial Sequence: Synthetic oligonucleotide
cuuuuggaucugguucacc

SEQ ID NO: 2047890 - RNA, 19 nt, Artificial Sequence
  Description of Artificial Sequence: Synthetic oligonucleotide
caagucggcugccauagaa

SEQ ID NO: 2047891 - RNA, 19 nt, Artificial Sequence
  Description of Artificial Sequence: Synthetic oligonucleotide
cauccguuucauagcugug

SEQ ID NO: 2047892 - RNA, 19 nt, Artificial Sequence
  Description of Artificial Sequence: Synthetic oligonucleotide
uguugaggcucgggaauac

SEQ ID NO: 2047893 - RNA, 19 nt, Artificial Sequence
  Description of Artificial Sequence: Synthetic oligonucleotide
ccagggauaucuucacagc

SEQ ID NO: 2047894 - RNA, 19 nt, Artificial Sequence
  Description of Artificial Sequence: Synthetic oligonucleotide
cauagaaccguggcaucuc

SEQ ID NO: 2047895 - RNA, 19 nt, Artificial Sequence
  Description of Artificial Sequence: Synthetic oligonucleotide
gcaucgguacuuuucuuca

SEQ ID NO: 2047896 - RNA, 19 nt, Artificial Sequence
  Description of Artificial Sequence: Synthetic oligonucleotide
ucuggacgguucugggagu

SEQ ID NO: 2047897 - RNA, 19 nt, Artificial Sequence
  Description of Artificial Sequence: Synthetic oligonucleotide
gccugcuaagagcaaagac

SEQ ID NO: 2047898 - RNA, 19 nt, Artificial Sequence
  Description of Artificial Sequence: Synthetic oligonucleotide
gauuuggacauggccaggu

SEQ ID NO: 2047899 - RNA, 19 nt, Artificial Sequence
  Description of Artificial Sequence: Synthetic oligonucleotide
uauuagcauugggcagggg

SEQ ID NO: 2047900 - RNA, 19 nt, Artificial Sequence
  Description of Artificial Sequence: Synthetic oligonucleotide
caucuguaucccaaggagu

SEQ ID NO: 2047901 - RNA, 19 nt, Artificial Sequence
  Description of Artificial Sequence: Synthetic oligonucleotide
agaaaguccugguccuguu

SEQ ID NO: 2047902 - RNA, 19 nt, Artificial Sequence
  Description of Artificial Sequence: Synthetic oligonucleotide
cagcagauuuggacauggc

SEQ ID NO: 2047903 - RNA, 19 nt, Artificial Sequence
  Description of Artificial Sequence: Synthetic oligonucleotide
ggagaguaaguccagggau

SEQ ID NO: 2047904 - RNA, 19 nt, Artificial Sequence
  Description of Artificial Sequence: Synthetic oligonucleotide
ucucguccaagaguuguuu

SEQ ID NO: 2047905 - RNA, 19 nt, Artificial Sequence
  Description of Artificial Sequence: Synthetic oligonucleotide
ugccugcuaagagcaaaga

SEQ ID NO: 2047906 - RNA, 19 nt, Artificial Sequence
  Description of Artificial Sequence: Synthetic oligonucleotide
ugcugggugaggucuccaa

SEQ ID NO: 2047907 - RNA, 19 nt, Artificial Sequence
  Description of Artificial Sequence: Synthetic oligonucleotide
ucaagucggcugccauaga

SEQ ID NO: 2047908 - RNA, 19 nt, Artificial Sequence
  Description of Artificial Sequence: Synthetic oligonucleotide
aagucucucuccacaguuu

SEQ ID NO: 2047909 - RNA, 19 nt, Artificial Sequence
  Description of Artificial Sequence: Synthetic oligonucleotide
ugcacucuggacgguucug

SEQ ID NO: 2047910 - RNA, 19 nt, Artificial Sequence
  Description of Artificial Sequence: Synthetic oligonucleotide
gucggcaucgguacuuuuc

SEQ ID NO: 2047911 - RNA, 19 nt, Artificial Sequence
  Description of Artificial Sequence: Synthetic oligonucleotide
cacaauggagagggcucgg

SEQ ID NO: 2047912 - RNA, 19 nt, Artificial Sequence
  Description of Artificial Sequence: Synthetic oligonucleotide
uccacaguuuugggaacaa

SEQ ID NO: 2047913 - RNA, 19 nt, Artificial Sequence
  Description of Artificial Sequence: Synthetic oligonucleotide
gggcaggggaaacaacagc

SEQ ID NO: 2047914 - RNA, 19 nt, Artificial Sequence
  Description of Artificial Sequence: Synthetic oligonucleotide
uagcauugggcaggggaaa

SEQ ID NO: 2047915 - RNA, 19 nt, Artificial Sequence
  Description of Artificial Sequence: Synthetic oligonucleotide
cuacauugcuuauuagcau

SEQ ID NO: 2047916 - RNA, 19 nt, Artificial Sequence
  Description of Artificial Sequence: Synthetic oligonucleotide
gcucacuuaguuuggccuc

SEQ ID NO: 2047917 - RNA, 19 nt, Artificial Sequence
  Description of Artificial Sequence: Synthetic oligonucleotide
ccaguaucaggcucaagga

SEQ ID NO: 2047918 - RNA, 19 nt, Artificial Sequence
  Description of Artificial Sequence: Synthetic oligonucleotide
ggaucccaguaucaggcuc

SEQ ID NO: 2047919 - RNA, 19 nt, Artificial Sequence
  Description of Artificial Sequence: Synthetic oligonucleotide
ugaggucuccaaagaucuu

SEQ ID NO: 2047920 - RNA, 19 nt, Artificial Sequence
  Description of Artificial Sequence: Synthetic oligonucleotide
ugggcugcccgaucuuaaa

SEQ ID NO: 2047921 - RNA, 19 nt, Artificial Sequence
  Description of Artificial Sequence: Synthetic oligonucleotide
gccaggucggcaucgguac

SEQ ID NO: 2047922 - RNA, 19 nt, Artificial Sequence
  Description of Artificial Sequence: Synthetic oligonucleotide
cucccucucaaagucucuc

SEQ ID NO: 2047923 - RNA, 19 nt, Artificial Sequence
  Description of Artificial Sequence: Synthetic oligonucleotide
auacucccucucaaagucu

SEQ ID NO: 2047924 - RNA, 19 nt, Artificial Sequence
  Description of Artificial Sequence: Synthetic oligonucleotide
gguagaauaguggccaccu

SEQ ID NO: 2047925 - RNA, 19 nt, Artificial Sequence
  Description of Artificial Sequence: Synthetic oligonucleotide
cucccgccguuucacugcc

SEQ ID NO: 2047926 - RNA, 19 nt, Artificial Sequence
  Description of Artificial Sequence: Synthetic oligonucleotide
cauguugaggcucgggaau

SEQ ID NO: 2047927 - RNA, 19 nt, Artificial Sequence
  Description of Artificial Sequence: Synthetic oligonucleotide
caugccugcuaagagcaaa

SEQ ID NO: 2047928 - RNA, 19 nt, Artificial Sequence
  Description of Artificial Sequence: Synthetic oligonucleotide
uccagcucauggucccaaa

SEQ ID NO: 2047929 - RNA, 19 nt, Artificial Sequence
  Description of Artificial Sequence: Synthetic oligonucleotide
aacuggcaggccacuggga

SEQ ID NO: 2047930 - RNA, 19 nt, Artificial Sequence
  Description of Artificial Sequence: Synthetic oligonucleotide
ugagggacaggggcucagu

SEQ ID NO: 2047931 - RNA, 19 nt, Artificial Sequence
  Description of Artificial Sequence: Synthetic oligonucleotide
guggccaccuguccccaac

SEQ ID NO: 2047932 - RNA, 19 nt, Artificial Sequence
  Description of Artificial Sequence: Synthetic oligonucleotide
cccaugaauccaugccugc

SEQ ID NO: 2047933 - RNA, 19 nt, Artificial Sequence
  Description of Artificial Sequence: Synthetic oligonucleotide
auguugaggcucgggaaua

SEQ ID NO: 2047934 - RNA, 19 nt, Artificial Sequence
  Description of Artificial Sequence: Synthetic oligonucleotide
cacaguggguuggagagua

SEQ ID NO: 2047935 - RNA, 19 nt, Artificial Sequence
  Description of Artificial Sequence: Synthetic oligonucleotide
ggccugguggagcuuggcc

SEQ ID NO: 2047936 - RNA, 19 nt, Artificial Sequence
  Description of Artificial Sequence: Synthetic oligonucleotide
ucacuuaguuuggccucgu

SEQ ID NO: 2047937 - RNA, 19 nt, Artificial Sequence
  Description of Artificial Sequence: Synthetic oligonucleotide
gccuguaaggaucccagua

SEQ ID NO: 2047938 - RNA, 19 nt, Artificial Sequence
  Description of Artificial Sequence: Synthetic oligonucleotide
guuuugggaacaaucuguu

SEQ ID NO: 2047939 - RNA, 19 nt, Artificial Sequence
  Description of Artificial Sequence: Synthetic oligonucleotide
gcucucgcugcucaucuga

SEQ ID NO: 2047940 - RNA, 19 nt, Artificial Sequence
  Description of Artificial Sequence: Synthetic oligonucleotide
cugcccgaucuuaaacgga

SEQ ID NO: 2047941 - RNA, 19 nt, Artificial Sequence
  Description of Artificial Sequence: Synthetic oligonucleotide
ggagcucacuuaguuuggc

SEQ ID NO: 2047942 - RNA, 19 nt, Artificial Sequence
  Description of Artificial Sequence: Synthetic oligonucleotide
gcucccgccguuucacugc

SEQ ID NO: 2047943 - RNA, 19 nt, Artificial Sequence
  Description of Artificial Sequence: Synthetic oligonucleotide
gcccaugaauccaugccug

SEQ ID NO: 2047944 - RNA, 19 nt, Artificial Sequence
  Description of Artificial Sequence: Synthetic oligonucleotide
agggcucggagcucacuua

SEQ ID NO: 2047945 - RNA, 19 nt, Artificial Sequence
  Description of Artificial Sequence: Synthetic oligonucleotide
auacaaccugugcccggau

SEQ ID NO: 2047946 - RNA, 19 nt, Artificial Sequence
  Description of Artificial Sequence: Synthetic oligonucleotide
guaucaggcucaaggaaau

SEQ ID NO: 2047947 - RNA, 19 nt, Artificial Sequence
  Description of Artificial Sequence: Synthetic oligonucleotide
gaguaaguccagggauauc

SEQ ID NO: 2047948 - RNA, 19 nt, Artificial Sequence
  Description of Artificial Sequence: Synthetic oligonucleotide
guugaggcucgggaauaca

SEQ ID NO: 2047949 - RNA, 19 nt, Artificial Sequence
  Description of Artificial Sequence: Synthetic oligonucleotide
cuccacaguuuugggaaca

SEQ ID NO: 2047950 - RNA, 19 nt, Artificial Sequence
  Description of Artificial Sequence: Synthetic oligonucleotide
guggagcuuggccagcacu

SEQ ID NO: 2047951 - RNA, 19 nt, Artificial Sequence
  Description of Artificial Sequence: Synthetic oligonucleotide
caaagcugggcuggaagua

SEQ ID NO: 2047952 - RNA, 19 nt, Artificial Sequence
  Description of Artificial Sequence: Synthetic oligonucleotide
gccgcagcucuucucgggc

SEQ ID NO: 2047953 - RNA, 19 nt, Artificial Sequence
  Description of Artificial Sequence: Synthetic oligonucleotide
cuucccguacaggccgcag

SEQ ID NO: 2047954 - RNA, 19 nt, Artificial Sequence
  Description of Artificial Sequence: Synthetic oligonucleotide
ccguuucacugccauguug

SEQ ID NO: 2047955 - RNA, 19 nt, Artificial Sequence
  Description of Artificial Sequence: Synthetic oligonucleotide
ggcaucucguccaagaguu

SEQ ID NO: 2047956 - RNA, 19 nt, Artificial Sequence
  Description of Artificial Sequence: Synthetic oligonucleotide
aaaaggccccugggguuuu

SEQ ID NO: 2047957 - RNA, 19 nt, Artificial Sequence
  Description of Artificial Sequence: Synthetic oligonucleotide
cgaucuuaaacggaaucca

SEQ ID NO: 2047958 - RNA, 19 nt, Artificial Sequence
  Description of Artificial Sequence: Synthetic oligonucleotide
ggcugccauagaaccgugg

SEQ ID NO: 2047959 - RNA, 19 nt, Artificial Sequence
  Description of Artificial Sequence: Synthetic oligonucleotide
ucccaguaucaggcucaag

SEQ ID NO: 2047960 - RNA, 19 nt, Artificial Sequence
  Description of Artificial Sequence: Synthetic oligonucleotide
cccucucaaagucucucuc

SEQ ID NO: 2047961 - RNA, 19 nt, Artificial Sequence
  Description of Artificial Sequence: Synthetic oligonucleotide
ccucguuuucccgcucucg

SEQ ID NO: 2047962 - RNA, 19 nt, Artificial Sequence
  Description of Artificial Sequence: Synthetic oligonucleotide
ggaaguagucaagucggcu

SEQ ID NO: 2047963 - RNA, 19 nt, Artificial Sequence
  Description of Artificial Sequence: Synthetic oligonucleotide
auagugcacucuggacggu

SEQ ID NO: 2047964 - RNA, 19 nt, Artificial Sequence
  Description of Artificial Sequence: Synthetic oligonucleotide
ggagagggcucggagcuca

SEQ ID NO: 2047965 - RNA, 19 nt, Artificial Sequence
  Description of Artificial Sequence: Synthetic oligonucleotide
aucucguccaagaguuguu

SEQ ID NO: 2047966 - RNA, 19 nt, Artificial Sequence
  Description of Artificial Sequence: Synthetic oligonucleotide
uuucccgcucucgcugcuc

SEQ ID NO: 2047967 - RNA, 19 nt, Artificial Sequence
  Description of Artificial Sequence: Synthetic oligonucleotide
uggacgguucugggaguaa

SEQ ID NO: 2047968 - RNA, 19 nt, Artificial Sequence
  Description of Artificial Sequence: Synthetic oligonucleotide
gcuuuccauacucccucuc

SEQ ID NO: 2047969 - RNA, 19 nt, Artificial Sequence
  Description of Artificial Sequence: Synthetic oligonucleotide
acucccucucaaagucucu

SEQ ID NO: 2047970 - RNA, 19 nt, Artificial Sequence
  Description of Artificial Sequence: Synthetic oligonucleotide
cagccacaauggagagggc

SEQ ID NO: 2047971 - RNA, 19 nt, Artificial Sequence
  Description of Artificial Sequence: Synthetic oligonucleotide
gccuccuguagucuugcaa

SEQ ID NO: 2047972 - RNA, 19 nt, Artificial Sequence
  Description of Artificial Sequence: Synthetic oligonucleotide
agccuccuguagucuugca

SEQ ID NO: 2047973 - RNA, 19 nt, Artificial Sequence
  Description of Artificial Sequence: Synthetic oligonucleotide
gcucaaggaaauggagaca

SEQ ID NO: 2047974 - RNA, 19 nt, Artificial Sequence
  Description of Artificial Sequence: Synthetic oligonucleotide
cggagcucacuuaguuugg

SEQ ID NO: 2047975 - RNA, 19 nt, Artificial Sequence
  Description of Artificial Sequence: Synthetic oligonucleotide
gcucauggucccaaaccca

SEQ ID NO: 2047976 - RNA, 19 nt, Artificial Sequence
  Description of Artificial Sequence: Synthetic oligonucleotide
ggggaaacaacagccugua

SEQ ID NO: 2047977 - RNA, 19 nt, Artificial Sequence
  Description of Artificial Sequence: Synthetic oligonucleotide
cagaaaguccugguccugu

SEQ ID NO: 2047978 - RNA, 19 nt, Artificial Sequence
  Description of Artificial Sequence: Synthetic oligonucleotide
uggagagggcucggagcuc

SEQ ID NO: 2047979 - RNA, 19 nt, Artificial Sequence
  Description of Artificial Sequence: Synthetic oligonucleotide
gcgcuugguuugcucuucc

SEQ ID NO: 2047980 - RNA, 19 nt, Artificial Sequence
  Description of Artificial Sequence: Synthetic oligonucleotide
cucggagcucacuuaguuu

SEQ ID NO: 2047981 - RNA, 19 nt, Artificial Sequence
  Description of Artificial Sequence: Synthetic oligonucleotide
cguuucauagcugugucua

SEQ ID NO: 2047982 - RNA, 19 nt, Artificial Sequence
  Description of Artificial Sequence: Synthetic oligonucleotide
cugccauguugaggcucgg

SEQ ID NO: 2047983 - RNA, 19 nt, Artificial Sequence
  Description of Artificial Sequence: Synthetic oligonucleotide
aucccaguaucaggcucaa

SEQ ID NO: 2047984 - RNA, 19 nt, Artificial Sequence
  Description of Artificial Sequence: Synthetic oligonucleotide
aguggccaccuguccccaa

SEQ ID NO: 2047985 - RNA, 19 nt, Artificial Sequence
  Description of Artificial Sequence: Synthetic oligonucleotide
gcugggcuggaaguaguca

SEQ ID NO: 2047986 - RNA, 19 nt, Artificial Sequence
  Description of Artificial Sequence: Synthetic oligonucleotide
ccuguaaggaucccaguau

SEQ ID NO: 2047987 - RNA, 19 nt, Artificial Sequence
  Description of Artificial Sequence: Synthetic oligonucleotide
cugaguggccuggcugguc

SEQ ID NO: 2047988 - RNA, 19 nt, Artificial Sequence
  Description of Artificial Sequence: Synthetic oligonucleotide
ucccgccguuucacugcca

SEQ ID NO: 2047989 - RNA, 19 nt, Artificial Sequence
  Description of Artificial Sequence: Synthetic oligonucleotide
caucgguacuuuucuucau

SEQ ID NO: 2047990 - RNA, 19 nt, Artificial Sequence
  Description of Artificial Sequence: Synthetic oligonucleotide
ggccagucuucuccuuuuc

SEQ ID NO: 2047991 - RNA, 19 nt, Artificial Sequence
  Description of Artificial Sequence: Synthetic oligonucleotide
cgguacuuuucuucauguc

SEQ ID NO: 2047992 - RNA, 19 nt, Artificial Sequence
  Description of Artificial Sequence: Synthetic oligonucleotide
ggaggcccaugaauccaug

SEQ ID NO: 2047993 - RNA, 19 nt, Artificial Sequence
  Description of Artificial Sequence: Synthetic oligonucleotide
ggacgguucugggaguaaa

SEQ ID NO: 2047994 - RNA, 19 nt, Artificial Sequence
  Description of Artificial Sequence: Synthetic oligonucleotide
aggucggcaucgguacuuu

SEQ ID NO: 2047995 - RNA, 19 nt, Artificial Sequence
  Description of Artificial Sequence: Synthetic oligonucleotide
gugcccggaucagggacuc

SEQ ID NO: 2047996 - RNA, 19 nt, Artificial Sequence
  Description of Artificial Sequence: Synthetic oligonucleotide
gagagggcucggagcucac

SEQ ID NO: 2047997 - RNA, 19 nt, Artificial Sequence
  Description of Artificial Sequence: Synthetic oligonucleotide
gcucggagcucacuuaguu

SEQ ID NO: 2047998 - RNA, 19 nt, Artificial Sequence
  Description of Artificial Sequence: Synthetic oligonucleotide
cuggacgguucugggagua

SEQ ID NO: 2047999 - RNA, 19 nt, Artificial Sequence
  Description of Artificial Sequence: Synthetic oligonucleotide
gcaucucguccaagaguug

SEQ ID NO: 2048000 - RNA, 19 nt, Artificial Sequence
  Description of Artificial Sequence: Synthetic oligonucleotide
ggcgcuugguuugcucuuc

SEQ ID NO: 2048001 - RNA, 19 nt, Artificial Sequence
  Description of Artificial Sequence: Synthetic oligonucleotide
ggauaucuucacagcagau

SEQ ID NO: 2048002 - RNA, 19 nt, Artificial Sequence
  Description of Artificial Sequence: Synthetic oligonucleotide
gcucagucaucagccacaa

SEQ ID NO: 2048003 - RNA, 19 nt, Artificial Sequence
  Description of Artificial Sequence: Synthetic oligonucleotide
gccucguuuucccgcucuc

SEQ ID NO: 2048004 - RNA, 19 nt, Artificial Sequence
  Description of Artificial Sequence: Synthetic oligonucleotide
gccagacacuauagugcac

SEQ ID NO: 2048005 - RNA, 19 nt, Artificial Sequence
  Description of Artificial Sequence: Synthetic oligonucleotide
ugcccggaucagggacuca

SEQ ID NO: 2048006 - RNA, 19 nt, Artificial Sequence
  Description of Artificial Sequence: Synthetic oligonucleotide
ggccaggucggcaucggua

SEQ ID NO: 2048007 - RNA, 19 nt, Artificial Sequence
  Description of Artificial Sequence: Synthetic oligonucleotide
cccaaggagucugaggacu

SEQ ID NO: 2048008 - RNA, 19 nt, Artificial Sequence
  Description of Artificial Sequence: Synthetic oligonucleotide
gcccggaucagggacucaa

SEQ ID NO: 2048009 - RNA, 19 nt, Artificial Sequence
  Description of Artificial Sequence: Synthetic oligonucleotide
ggcauccauccguuucaua

SEQ ID NO: 2048010 - RNA, 19 nt, Artificial Sequence
  Description of Artificial Sequence: Synthetic oligonucleotide
gcucgggaauacacugcca

SEQ ID NO: 2048011 - RNA, 19 nt, Artificial Sequence
  Description of Artificial Sequence: Synthetic oligonucleotide
aggccugcucccgccguuu

SEQ ID NO: 2048012 - RNA, 19 nt, Artificial Sequence
  Description of Artificial Sequence: Synthetic oligonucleotide
ccugugcccggaucaggga

SEQ ID NO: 2048013 - RNA, 19 nt, Artificial Sequence
  Description of Artificial Sequence: Synthetic oligonucleotide
caaggccugcucccgccgu

SEQ ID NO: 2048014 - RNA, 19 nt, Artificial Sequence
  Description of Artificial Sequence: Synthetic oligonucleotide
ggccucguuuucccgcucu

SEQ ID NO: 2048015 - RNA, 19 nt, Artificial Sequence
  Description of Artificial Sequence: Synthetic oligonucleotide
ccguacaggccgcagcucu

SEQ ID NO: 2048016 - RNA, 19 nt, Artificial Sequence
  Description of Artificial Sequence: Synthetic oligonucleotide
ccguuucauagcugugucu

SEQ ID NO: 2048017 - RNA, 19 nt, Artificial Sequence
  Description of Artificial Sequence: Synthetic oligonucleotide
ccaugaauccaugccugcu

SEQ ID NO: 2048018 - RNA, 19 nt, Artificial Sequence
  Description of Artificial Sequence: Synthetic oligonucleotide
caggucggcaucgguacuu

SEQ ID NO: 2048019 - RNA, 19 nt, Artificial Sequence
  Description of Artificial Sequence: Synthetic oligonucleotide
cgccguuucacugccaugu

SEQ ID NO: 2048020 - RNA, 19 nt, Artificial Sequence
  Description of Artificial Sequence: Synthetic oligonucleotide
gggaggcccaugaauccau

SEQ ID NO: 2048021 - RNA, 19 nt, Artificial Sequence
  Description of Artificial Sequence: Synthetic oligonucleotide
cccggaucagggacucaaa

SEQ ID NO: 2048022 - RNA, 19 nt, Artificial Sequence
  Description of Artificial Sequence: Synthetic oligonucleotide
cucagucaucagccacaau

SEQ ID NO: 2048023 - RNA, 19 nt, Artificial Sequence
  Description of Artificial Sequence: Synthetic oligonucleotide
cgcucucgcugcucaucug

SEQ ID NO: 2048024 - RNA, 19 nt, Artificial Sequence
  Description of Artificial Sequence: Synthetic oligonucleotide
ccaugccugcuaagagcaa

SEQ ID NO: 2048025 - RNA, 19 nt, Artificial Sequence
  Description of Artificial Sequence: Synthetic oligonucleotide
cccguacaggccgcagcuc

SEQ ID NO: 2048026 - RNA, 19 nt, Artificial Sequence
  Description of Artificial Sequence: Synthetic oligonucleotide
cggcugccauagaaccgug

SEQ ID NO: 2048027 - RNA, 19 nt, Artificial Sequence
  Description of Artificial Sequence: Synthetic oligonucleotide
ggcucggagcucacuuagu

SEQ ID NO: 2048028 - RNA, 19 nt, Artificial Sequence
  Description of Artificial Sequence: Synthetic oligonucleotide
ccguggcaucucguccaag

SEQ ID NO: 2048029 - RNA, 19 nt, Artificial Sequence
  Description of Artificial Sequence: Synthetic oligonucleotide
gccguuucacugccauguu

SEQ ID NO: 2048030 - RNA, 19 nt, Artificial Sequence
  Description of Artificial Sequence: Synthetic oligonucleotide
ggucggcaucgguacuuuu

SEQ ID NO: 2048031 - RNA, 19 nt, Artificial Sequence
  Description of Artificial Sequence: Synthetic oligonucleotide
cccgccguuucacugccau

SEQ ID NO: 2048032 - RNA, 19 nt, Artificial Sequence
  Description of Artificial Sequence: Synthetic oligonucleotide
gcccgaucuuaaacggaau

SEQ ID NO: 2048033 - RNA, 19 nt, Artificial Sequence
  Description of Artificial Sequence: Synthetic oligonucleotide
ccaggucggcaucgguacu

SEQ ID NO: 2048034 - RNA, 19 nt, Artificial Sequence
  Description of Artificial Sequence: Synthetic oligonucleotide
cucgggccugguggagcuu

SEQ ID NO: 2048035 - RNA, 19 nt, Artificial Sequence
  Description of Artificial Sequence: Synthetic oligonucleotide
cggcaucgguacuuuucuu

SEQ ID NO: 2048036 - RNA, 19 nt, Artificial Sequence
  Description of Artificial Sequence: Synthetic oligonucleotide
ccccaacuggcaggccacu

SEQ ID NO: 2048037 - RNA, 19 nt, Artificial Sequence
  Description of Artificial Sequence: Synthetic oligonucleotide
aaaaguauguauuagcaca

SEQ ID NO: 2048038 - RNA, 19 nt, Artificial Sequence
  Description of Artificial Sequence: Synthetic oligonucleotide
ugacagaucauaaucagcg

SEQ ID NO: 2048039 - RNA, 19 nt, Artificial Sequence
  Description of Artificial Sequence: Synthetic oligonucleotide
uauguauuagcacagggag

SEQ ID NO: 2048040 - RNA, 19 nt, Artificial Sequence
  Description of Artificial Sequence: Synthetic oligonucleotide
agaagaacuucugagaacc

SEQ ID NO: 2048041 - RNA, 19 nt, Artificial Sequence
  Description of Artificial Sequence: Synthetic oligonucleotide
aacaaugccacugagcaag

SEQ ID NO: 2048042 - RNA, 19 nt, Artificial Sequence
  Description of Artificial Sequence: Synthetic oligonucleotide
aaagaagaacuucugagaa

SEQ ID NO: 2048043 - RNA, 19 nt, Artificial Sequence
  Description of Artificial Sequence: Synthetic oligonucleotide
ucagucaugcccaaggccc

SEQ ID NO: 2048044 - RNA, 19 nt, Artificial Sequence
  Description of Artificial Sequence: Synthetic oligonucleotide
uuauucuagggauagcacc

SEQ ID NO: 2048045 - RNA, 19 nt, Artificial Sequence
  Description of Artificial Sequence: Synthetic oligonucleotide
uauucuagggauagcaccc

SEQ ID NO: 2048046 - RNA, 19 nt, Artificial Sequence
  Description of Artificial Sequence: Synthetic oligonucleotide
aguauguauuagcacaggg

SEQ ID NO: 2048047 - RNA, 19 nt, Artificial Sequence
  Description of Artificial Sequence: Synthetic oligonucleotide
aaaucugacauaggucagc

SEQ ID NO: 2048048 - RNA, 19 nt, Artificial Sequence
  Description of Artificial Sequence: Synthetic oligonucleotide
gacaguaucaguccuaaga

SEQ ID NO: 2048049 - RNA, 19 nt, Artificial Sequence
  Description of Artificial Sequence: Synthetic oligonucleotide
guuacuuccacauaguucu

SEQ ID NO: 2048050 - RNA, 19 nt, Artificial Sequence
  Description of Artificial Sequence: Synthetic oligonucleotide
uggauagaaacaaugccac

SEQ ID NO: 2048051 - RNA, 19 nt, Artificial Sequence
  Description of Artificial Sequence: Synthetic oligonucleotide
uaagagcacgaauacauca

SEQ ID NO: 2048052 - RNA, 19 nt, Artificial Sequence
  Description of Artificial Sequence: Synthetic oligonucleotide
ugugcuacugagaucaccu

SEQ ID NO: 2048053 - RNA, 19 nt, Artificial Sequence
  Description of Artificial Sequence: Synthetic oligonucleotide
aaaguauguauuagcacag

SEQ ID NO: 2048054 - RNA, 19 nt, Artificial Sequence
  Description of Artificial Sequence: Synthetic oligonucleotide
auguggguacaguagacac

SEQ ID NO: 2048055 - RNA, 19 nt, Artificial Sequence
  Description of Artificial Sequence: Synthetic oligonucleotide
cucuuuacgaagaugggug

SEQ ID NO: 2048056 - RNA, 19 nt, Artificial Sequence
  Description of Artificial Sequence: Synthetic oligonucleotide
uaguucuuggcaucuaucc

SEQ ID NO: 2048057 - RNA, 19 nt, Artificial Sequence
  Description of Artificial Sequence: Synthetic oligonucleotide
ucugcauaccacuuccggg

SEQ ID NO: 2048058 - RNA, 19 nt, Artificial Sequence
  Description of Artificial Sequence: Synthetic oligonucleotide
aucuuguguauuuucagug

SEQ ID NO: 2048059 - RNA, 19 nt, Artificial Sequence
  Description of Artificial Sequence: Synthetic oligonucleotide
uccucagucaugcccaagg

SEQ ID NO: 2048060 - RNA, 19 nt, Artificial Sequence
  Description of Artificial Sequence: Synthetic oligonucleotide
aagaaguugaggggaaagg

SEQ ID NO: 2048061 - RNA, 19 nt, Artificial Sequence
  Description of Artificial Sequence: Synthetic oligonucleotide
gaaugcaugacaguaucag

SEQ ID NO: 2048062 - RNA, 19 nt, Artificial Sequence
  Description of Artificial Sequence: Synthetic oligonucleotide
agguuaaggauguggguac

SEQ ID NO: 2048063 - RNA, 19 nt, Artificial Sequence
  Description of Artificial Sequence: Synthetic oligonucleotide
uuuauucuagggauagcac

SEQ ID NO: 2048064 - RNA, 19 nt, Artificial Sequence
  Description of Artificial Sequence: Synthetic oligonucleotide
ucuugauacaacucuuucu

SEQ ID NO: 2048065 - RNA, 19 nt, Artificial Sequence
  Description of Artificial Sequence: Synthetic oligonucleotide
uuauacuucucuuuacgaa

SEQ ID NO: 2048066 - RNA, 19 nt, Artificial Sequence
  Description of Artificial Sequence: Synthetic oligonucleotide
aguuuuauucuagggauag

SEQ ID NO: 2048067 - RNA, 19 nt, Artificial Sequence
  Description of Artificial Sequence: Synthetic oligonucleotide
auaaucagcguuauacuuc

SEQ ID NO: 2048068 - RNA, 19 nt, Artificial Sequence
  Description of Artificial Sequence: Synthetic oligonucleotide
agagacaugaaggcuaggg

SEQ ID NO: 2048069 - RNA, 19 nt, Artificial Sequence
  Description of Artificial Sequence: Synthetic oligonucleotide
agaaguugaggggaaaggg

SEQ ID NO: 2048070 - RNA, 19 nt, Artificial Sequence
  Description of Artificial Sequence: Synthetic oligonucleotide
uguauuagcacagggagua

SEQ ID NO: 2048071 - RNA, 19 nt, Artificial Sequence
  Description of Artificial Sequence: Synthetic oligonucleotide
agaaacaaugccacugagc

SEQ ID NO: 2048072 - RNA, 19 nt, Artificial Sequence
  Description of Artificial Sequence: Synthetic oligonucleotide
agcagcaggaccaaauggc

SEQ ID NO: 2048073 - RNA, 19 nt, Artificial Sequence
  Description of Artificial Sequence: Synthetic oligonucleotide
ucauaaucagcguuauacu

SEQ ID NO: 2048074 - RNA, 19 nt, Artificial Sequence
  Description of Artificial Sequence: Synthetic oligonucleotide
cauaggucagcacagccag

SEQ ID NO: 2048075 - RNA, 19 nt, Artificial Sequence
  Description of Artificial Sequence: Synthetic oligonucleotide
guugcaugcggccaggcag

SEQ ID NO: 2048076 - RNA, 19 nt, Artificial Sequence
  Description of Artificial Sequence: Synthetic oligonucleotide
uugccgagcugacagauca

SEQ ID NO: 2048077 - RNA, 19 nt, Artificial Sequence
  Description of Artificial Sequence: Synthetic oligonucleotide
uucucuuuacgaagauggg

SEQ ID NO: 2048078 - RNA, 19 nt, Artificial Sequence
  Description of Artificial Sequence: Synthetic oligonucleotide
cuccucgucagucucaggg

SEQ ID NO: 2048079 - RNA, 19 nt, Artificial Sequence
  Description of Artificial Sequence: Synthetic oligonucleotide
gaggggaaagggcauagcc

SEQ ID NO: 2048080 - RNA, 19 nt, Artificial Sequence
  Description of Artificial Sequence: Synthetic oligonucleotide
ucugauuugugcucgccac

SEQ ID NO: 2048081 - RNA, 19 nt, Artificial Sequence
  Description of Artificial Sequence: Synthetic oligonucleotide
aguggugcggcuguaaauc

SEQ ID NO: 2048082 - RNA, 19 nt, Artificial Sequence
  Description of Artificial Sequence: Synthetic oligonucleotide
acgaagaugggugaugauc

SEQ ID NO: 2048083 - RNA, 19 nt, Artificial Sequence
  Description of Artificial Sequence: Synthetic oligonucleotide
caaaggggcaucuggaaug

SEQ ID NO: 2048084 - RNA, 19 nt, Artificial Sequence
  Description of Artificial Sequence: Synthetic oligonucleotide
ugcagcuucccacugggca

SEQ ID NO: 2048085 - RNA, 19 nt, Artificial Sequence
  Description of Artificial Sequence: Synthetic oligonucleotide
aucauucuucuucauccuc

SEQ ID NO: 2048086 - RNA, 19 nt, Artificial Sequence
  Description of Artificial Sequence: Synthetic oligonucleotide
ugaucuucugugcuacuga

SEQ ID NO: 2048087 - RNA, 19 nt, Artificial Sequence
  Description of Artificial Sequence: Synthetic oligonucleotide
gagcugacagaucauaauc

SEQ ID NO: 2048088 - RNA, 19 nt, Artificial Sequence
  Description of Artificial Sequence: Synthetic oligonucleotide
gaaaguagagguuaaggau

SEQ ID NO: 2048089 - RNA, 19 nt, Artificial Sequence
  Description of Artificial Sequence: Synthetic oligonucleotide
aaacaaaggcauccaggga

SEQ ID NO: 2048090 - RNA, 19 nt, Artificial Sequence
  Description of Artificial Sequence: Synthetic oligonucleotide
caaagaagaacuucugaga

SEQ ID NO: 2048091 - RNA, 19 nt, Artificial Sequence
  Description of Artificial Sequence: Synthetic oligonucleotide
aagaugggugaugaucuuc

SEQ ID NO: 2048092 - RNA, 19 nt, Artificial Sequence
  Description of Artificial Sequence: Synthetic oligonucleotide
gacauaggucagcacagcc

SEQ ID NO: 2048093 - RNA, 19 nt, Artificial Sequence
  Description of Artificial Sequence: Synthetic oligonucleotide
aaggguuaggcacucccga

SEQ ID NO: 2048094 - RNA, 19 nt, Artificial Sequence
  Description of Artificial Sequence: Synthetic oligonucleotide
agcagaagagcuccauggg

SEQ ID NO: 2048095 - RNA, 19 nt, Artificial Sequence
  Description of Artificial Sequence: Synthetic oligonucleotide
aucagcguuauacuucucu

SEQ ID NO: 2048096 - RNA, 19 nt, Artificial Sequence
  Description of Artificial Sequence: Synthetic oligonucleotide
uuguguauuuucaguggug

SEQ ID NO: 2048097 - RNA, 19 nt, Artificial Sequence
  Description of Artificial Sequence: Synthetic oligonucleotide
aaguauguauuagcacagg

SEQ ID NO: 2048098 - RNA, 19 nt, Artificial Sequence
  Description of Artificial Sequence: Synthetic oligonucleotide
gaagaaguugaggggaaag

SEQ ID NO: 2048099 - RNA, 19 nt, Artificial Sequence
  Description of Artificial Sequence: Synthetic oligonucleotide
ugcuacugagaucaccucu

SEQ ID NO: 2048100 - RNA, 19 nt, Artificial Sequence
  Description of Artificial Sequence: Synthetic oligonucleotide
guuauacuucucuuuacga

SEQ ID NO: 2048101 - RNA, 19 nt, Artificial Sequence
  Description of Artificial Sequence: Synthetic oligonucleotide
guacaguagacacagaggu

SEQ ID NO: 2048102 - RNA, 19 nt, Artificial Sequence
  Description of Artificial Sequence: Synthetic oligonucleotide
agcacgaauacaucauucu

SEQ ID NO: 2048103 - RNA, 19 nt, Artificial Sequence
  Description of Artificial Sequence: Synthetic oligonucleotide
aggguaucugcuccuugcc

SEQ ID NO: 2048104 - RNA, 19 nt, Artificial Sequence
  Description of Artificial Sequence: Synthetic oligonucleotide
agaaucugguuccgucgcc

SEQ ID NO: 2048105 - RNA, 19 nt, Artificial Sequence
  Description of Artificial Sequence: Synthetic oligonucleotide
auagccucugcauaccacu

SEQ ID NO: 2048106 - RNA, 19 nt, Artificial Sequence
  Description of Artificial Sequence: Synthetic oligonucleotide
ugaaggcuaggguaucugc

SEQ ID NO: 2048107 - RNA, 19 nt, Artificial Sequence
  Description of Artificial Sequence: Synthetic oligonucleotide
aaggauugcugaucuugug

SEQ ID NO: 2048108 - RNA, 19 nt, Artificial Sequence
  Description of Artificial Sequence: Synthetic oligonucleotide
aggauugcugaucuugugu

SEQ ID NO: 2048109 - RNA, 19 nt, Artificial Sequence
  Description of Artificial Sequence: Synthetic oligonucleotide
ucuuuacgaagauggguga

SEQ ID NO: 2048110 - RNA, 19 nt, Artificial Sequence
  Description of Artificial Sequence: Synthetic oligonucleotide
uuuacgaagaugggugaug

SEQ ID NO: 2048111 - RNA, 19 nt, Artificial Sequence
  Description of Artificial Sequence: Synthetic oligonucleotide
gaguaguuucucuuccagc

SEQ ID NO: 2048112 - RNA, 19 nt, Artificial Sequence
  Description of Artificial Sequence: Synthetic oligonucleotide
guggauagaaacaaugcca

SEQ ID NO: 2048113 - RNA, 19 nt, Artificial Sequence
  Description of Artificial Sequence: Synthetic oligonucleotide
ugguucgaagggcaggcag

SEQ ID NO: 2048114 - RNA, 19 nt, Artificial Sequence
  Description of Artificial Sequence: Synthetic oligonucleotide
guguaaauaguuuuauucu

SEQ ID NO: 2048115 - RNA, 19 nt, Artificial Sequence
  Description of Artificial Sequence: Synthetic oligonucleotide
ucgaagggcaggcagaguu

SEQ ID NO: 2048116 - RNA, 19 nt, Artificial Sequence
  Description of Artificial Sequence: Synthetic oligonucleotide
uugcaugcggccaggcagg

SEQ ID NO: 2048117 - RNA, 19 nt, Artificial Sequence
  Description of Artificial Sequence: Synthetic oligonucleotide
ugagaucaccucuccagug

SEQ ID NO: 2048118 - RNA, 19 nt, Artificial Sequence
  Description of Artificial Sequence: Synthetic oligonucleotide
gagguggcaccucagcucc

SEQ ID NO: 2048119 - RNA, 19 nt, Artificial Sequence
  Description of Artificial Sequence: Synthetic oligonucleotide
uaaggauguggguacagua

SEQ ID NO: 2048120 - RNA, 19 nt, Artificial Sequence
  Description of Artificial Sequence: Synthetic oligonucleotide
uuacgaagaugggugauga

SEQ ID NO: 2048121 - RNA, 19 nt, Artificial Sequence
  Description of Artificial Sequence: Synthetic oligonucleotide
ggguacaguagacacagag

SEQ ID NO: 2048122 - RNA, 19 nt, Artificial Sequence
  Description of Artificial Sequence: Synthetic oligonucleotide
aagggcauagccucugcau

SEQ ID NO: 2048123 - RNA, 19 nt, Artificial Sequence
  Description of Artificial Sequence: Synthetic oligonucleotide
acagaucauaaucagcguu

SEQ ID NO: 2048124 - RNA, 19 nt, Artificial Sequence
  Description of Artificial Sequence: Synthetic oligonucleotide
guguauuuucaguggugcg

SEQ ID NO: 2048125 - RNA, 19 nt, Artificial Sequence
  Description of Artificial Sequence: Synthetic oligonucleotide
agacuguccagguccacag

SEQ ID NO: 2048126 - RNA, 19 nt, Artificial Sequence
  Description of Artificial Sequence: Synthetic oligonucleotide
uguagccgcuccauguacc

SEQ ID NO: 2048127 - RNA, 19 nt, Artificial Sequence
  Description of Artificial Sequence: Synthetic oligonucleotide
uccaacaauggggagacaa

SEQ ID NO: 2048128 - RNA, 19 nt, Artificial Sequence
  Description of Artificial Sequence: Synthetic oligonucleotide
cucccgagccucuugauac

SEQ ID NO: 2048129 - RNA, 19 nt, Artificial Sequence
  Description of Artificial Sequence: Synthetic oligonucleotide
agcccagcagaagagcucc

SEQ ID NO: 2048130 - RNA, 19 nt, Artificial Sequence
  Description of Artificial Sequence: Synthetic oligonucleotide
ggcuguaaaucugacauag

SEQ ID NO: 2048131 - RNA, 19 nt, Artificial Sequence
  Description of Artificial Sequence: Synthetic oligonucleotide
aaguagagguuaaggaugu

SEQ ID NO: 2048132 - RNA, 19 nt, Artificial Sequence
  Description of Artificial Sequence: Synthetic oligonucleotide
ugccaaggauugcugaucu

SEQ ID NO: 2048133 - RNA, 19 nt, Artificial Sequence
  Description of Artificial Sequence: Synthetic oligonucleotide
gacagaaucugguuccguc

SEQ ID NO: 2048134 - RNA, 19 nt, Artificial Sequence
  Description of Artificial Sequence: Synthetic oligonucleotide
cucugcauaccacuuccgg

SEQ ID NO: 2048135 - RNA, 19 nt, Artificial Sequence
  Description of Artificial Sequence: Synthetic oligonucleotide
uccugaagggcucugccaa

SEQ ID NO: 2048136 - RNA, 19 nt, Artificial Sequence
  Description of Artificial Sequence: Synthetic oligonucleotide
gaaucugguuccgucgccg

SEQ ID NO: 2048137 - RNA, 19 nt, Artificial Sequence
  Description of Artificial Sequence: Synthetic oligonucleotide
uuugugcucgccacacagc

SEQ ID NO: 2048138 - RNA, 19 nt, Artificial Sequence
  Description of Artificial Sequence: Synthetic oligonucleotide
guauuuucaguggugcggc

SEQ ID NO: 2048139 - RNA, 19 nt, Artificial Sequence
  Description of Artificial Sequence: Synthetic oligonucleotide
gaaggguuaggcacucccg

SEQ ID NO: 2048140 - RNA, 19 nt, Artificial Sequence
  Description of Artificial Sequence: Synthetic oligonucleotide
agcguuauacuucucuuua

SEQ ID NO: 2048141 - RNA, 19 nt, Artificial Sequence
  Description of Artificial Sequence: Synthetic oligonucleotide
gguugugcagcccacgaag

SEQ ID NO: 2048142 - RNA, 19 nt, Artificial Sequence
  Description of Artificial Sequence: Synthetic oligonucleotide
auucuagggauagcacccc

SEQ ID NO: 2048143 - RNA, 19 nt, Artificial Sequence
  Description of Artificial Sequence: Synthetic oligonucleotide
uugcccgguggauagaaac

SEQ ID NO: 2048144 - RNA, 19 nt, Artificial Sequence
  Description of Artificial Sequence: Synthetic oligonucleotide
gguacaguagacacagagg

SEQ ID NO: 2048145 - RNA, 19 nt, Artificial Sequence
  Description of Artificial Sequence: Synthetic oligonucleotide
gaacuucugagaacccagg

SEQ ID NO: 2048146 - RNA, 19 nt, Artificial Sequence
  Description of Artificial Sequence: Synthetic oligonucleotide
guauguauuagcacaggga

SEQ ID NO: 2048147 - RNA, 19 nt, Artificial Sequence
  Description of Artificial Sequence: Synthetic oligonucleotide
acuuccggguuacuuccac

SEQ ID NO: 2048148 - RNA, 19 nt, Artificial Sequence
  Description of Artificial Sequence: Synthetic oligonucleotide
acugagcaaggcauagccc

SEQ ID NO: 2048149 - RNA, 19 nt, Artificial Sequence
  Description of Artificial Sequence: Synthetic oligonucleotide
agagguuaaggaugugggu

SEQ ID NO: 2048150 - RNA, 19 nt, Artificial Sequence
  Description of Artificial Sequence: Synthetic oligonucleotide
guucuuggcaucuauccaa

SEQ ID NO: 2048151 - RNA, 19 nt, Artificial Sequence
  Description of Artificial Sequence: Synthetic oligonucleotide
cuaagagcacgaauacauc

SEQ ID NO: 2048152 - RNA, 19 nt, Artificial Sequence
  Description of Artificial Sequence: Synthetic oligonucleotide
aguccuaagagcacgaaua

SEQ ID NO: 2048153 - RNA, 19 nt, Artificial Sequence
  Description of Artificial Sequence: Synthetic oligonucleotide
uauuagcacagggaguagu

SEQ ID NO: 2048154 - RNA, 19 nt, Artificial Sequence
  Description of Artificial Sequence: Synthetic oligonucleotide
auaguucuuggcaucuauc

SEQ ID NO: 2048155 - RNA, 19 nt, Artificial Sequence
  Description of Artificial Sequence: Synthetic oligonucleotide
cugaucuuguguauuuuca

SEQ ID NO: 2048156 - RNA, 19 nt, Artificial Sequence
  Description of Artificial Sequence: Synthetic oligonucleotide
uaguuuuauucuagggaua

SEQ ID NO: 2048157 - RNA, 19 nt, Artificial Sequence
  Description of Artificial Sequence: Synthetic oligonucleotide
auguaccggcguugcaugc

SEQ ID NO: 2048158 - RNA, 19 nt, Artificial Sequence
  Description of Artificial Sequence: Synthetic oligonucleotide
acaaaggggcaucuggaau

SEQ ID NO: 2048159 - RNA, 19 nt, Artificial Sequence
  Description of Artificial Sequence: Synthetic oligonucleotide
cuguaaaucugacauaggu

SEQ ID NO: 2048160 - RNA, 19 nt, Artificial Sequence
  Description of Artificial Sequence: Synthetic oligonucleotide
aggggcauugccaaagaag

SEQ ID NO: 2048161 - RNA, 19 nt, Artificial Sequence
  Description of Artificial Sequence: Synthetic oligonucleotide
uguaccggcguugcaugcg

SEQ ID NO: 2048162 - RNA, 19 nt, Artificial Sequence
  Description of Artificial Sequence: Synthetic oligonucleotide
ugcuccaacaauggggaga

SEQ ID NO: 2048163 - RNA, 19 nt, Artificial Sequence
  Description of Artificial Sequence: Synthetic oligonucleotide
gugcucgccacacagcagc

SEQ ID NO: 2048164 - RNA, 19 nt, Artificial Sequence
  Description of Artificial Sequence: Synthetic oligonucleotide
auacaacucuuucucuagu

SEQ ID NO: 2048165 - RNA, 19 nt, Artificial Sequence
  Description of Artificial Sequence: Synthetic oligonucleotide
uuaaggauguggguacagu

SEQ ID NO: 2048166 - RNA, 19 nt, Artificial Sequence
  Description of Artificial Sequence: Synthetic oligonucleotide
ucagcguuauacuucucuu

SEQ ID NO: 2048167 - RNA, 19 nt, Artificial Sequence
  Description of Artificial Sequence: Synthetic oligonucleotide
cuggugucggcuguggagg

SEQ ID NO: 2048168 - RNA, 19 nt, Artificial Sequence
  Description of Artificial Sequence: Synthetic oligonucleotide
cagcacagacagaaucugg

SEQ ID NO: 2048169 - RNA, 19 nt, Artificial Sequence
  Description of Artificial Sequence: Synthetic oligonucleotide
aagagcacgaauacaucau

SEQ ID NO: 2048170 - RNA, 19 nt, Artificial Sequence
  Description of Artificial Sequence: Synthetic oligonucleotide
cuuugccugcagcagcagg

SEQ ID NO: 2048171 - RNA, 19 nt, Artificial Sequence
  Description of Artificial Sequence: Synthetic oligonucleotide
cauguaccggcguugcaug

SEQ ID NO: 2048172 - RNA, 19 nt, Artificial Sequence
  Description of Artificial Sequence: Synthetic oligonucleotide
uaguguaaauaguuuuauu

SEQ ID NO: 2048173 - RNA, 19 nt, Artificial Sequence
  Description of Artificial Sequence: Synthetic oligonucleotide
accggcguugcaugcggcc

SEQ ID NO: 2048174 - RNA, 19 nt, Artificial Sequence
  Description of Artificial Sequence: Synthetic oligonucleotide
ugcccgguggauagaaaca

SEQ ID NO: 2048175 - RNA, 19 nt, Artificial Sequence
  Description of Artificial Sequence: Synthetic oligonucleotide
ucugccaaggauugcugau

SEQ ID NO: 2048176 - RNA, 19 nt, Artificial Sequence
  Description of Artificial Sequence: Synthetic oligonucleotide
ggaguaguuucucuuccag

SEQ ID NO: 2048177 - RNA, 19 nt, Artificial Sequence
  Description of Artificial Sequence: Synthetic oligonucleotide
uccucgucagucucagggc

SEQ ID NO: 2048178 - RNA, 19 nt, Artificial Sequence
  Description of Artificial Sequence: Synthetic oligonucleotide
gagguuaaggaugugggua

SEQ ID NO: 2048179 - RNA, 19 nt, Artificial Sequence
  Description of Artificial Sequence: Synthetic oligonucleotide
aucugacauaggucagcac

SEQ ID NO: 2048180 - RNA, 19 nt, Artificial Sequence
  Description of Artificial Sequence: Synthetic oligonucleotide
uuccggguuacuuccacau

SEQ ID NO: 2048181 - RNA, 19 nt, Artificial Sequence
  Description of Artificial Sequence: Synthetic oligonucleotide
agggauagcaccccauuuu

SEQ ID NO: 2048182 - RNA, 19 nt, Artificial Sequence
  Description of Artificial Sequence: Synthetic oligonucleotide
guugugcagcccacgaagg

SEQ ID NO: 2048183 - RNA, 19 nt, Artificial Sequence
  Description of Artificial Sequence: Synthetic oligonucleotide
ugagaacccaggcgcugag

SEQ ID NO: 2048184 - RNA, 19 nt, Artificial Sequence
  Description of Artificial Sequence: Synthetic oligonucleotide
uucuagggauagcacccca

SEQ ID NO: 2048185 - RNA, 19 nt, Artificial Sequence
  Description of Artificial Sequence: Synthetic oligonucleotide
uuuuggcugcuccaacaau

SEQ ID NO: 2048186 - RNA, 19 nt, Artificial Sequence
  Description of Artificial Sequence: Synthetic oligonucleotide
ucaguggugcggcuguaaa

SEQ ID NO: 2048187 - RNA, 19 nt, Artificial Sequence
  Description of Artificial Sequence: Synthetic oligonucleotide
cguuauacuucucuuuacg

SEQ ID NO: 2048188 - RNA, 19 nt, Artificial Sequence
  Description of Artificial Sequence: Synthetic oligonucleotide
gauguggguacaguagaca

SEQ ID NO: 2048189 - RNA, 19 nt, Artificial Sequence
  Description of Artificial Sequence: Synthetic oligonucleotide
ucucuaguucuuccucacu

SEQ ID NO: 2048190 - RNA, 19 nt, Artificial Sequence
  Description of Artificial Sequence: Synthetic oligonucleotide
ucuagggauagcaccccau

SEQ ID NO: 2048191 - RNA, 19 nt, Artificial Sequence
  Description of Artificial Sequence: Synthetic oligonucleotide
aggguuaggcacucccgag

SEQ ID NO: 2048192 - RNA, 19 nt, Artificial Sequence
  Description of Artificial Sequence: Synthetic oligonucleotide
uccuaagagcacgaauaca

SEQ ID NO: 2048193 - RNA, 19 nt, Artificial Sequence
  Description of Artificial Sequence: Synthetic oligonucleotide
uggcugcuagcccugccag

SEQ ID NO: 2048194 - RNA, 19 nt, Artificial Sequence
  Description of Artificial Sequence: Synthetic oligonucleotide
cagaucauaaucagcguua

SEQ ID NO: 2048195 - RNA, 19 nt, Artificial Sequence
  Description of Artificial Sequence: Synthetic oligonucleotide
guaucugcuccuugccgag

SEQ ID NO: 2048196 - RNA, 19 nt, Artificial Sequence
  Description of Artificial Sequence: Synthetic oligonucleotide
agaugggugaugaucuucu

SEQ ID NO: 2048197 - RNA, 19 nt, Artificial Sequence
  Description of Artificial Sequence: Synthetic oligonucleotide
cuacugagaucaccucucc

SEQ ID NO: 2048198 - RNA, 19 nt, Artificial Sequence
  Description of Artificial Sequence: Synthetic oligonucleotide
ugugcucgccacacagcag

SEQ ID NO: 2048199 - RNA, 19 nt, Artificial Sequence
  Description of Artificial Sequence: Synthetic oligonucleotide
gguuaggcacucccgagcc

SEQ ID NO: 2048200 - RNA, 19 nt, Artificial Sequence
  Description of Artificial Sequence: Synthetic oligonucleotide
agccucugcauaccacuuc

SEQ ID NO: 2048201 - RNA, 19 nt, Artificial Sequence
  Description of Artificial Sequence: Synthetic oligonucleotide
cauagccucugcauaccac

SEQ ID NO: 2048202 - RNA, 19 nt, Artificial Sequence
  Description of Artificial Sequence: Synthetic oligonucleotide
gaugggugaugaucuucug

SEQ ID NO: 2048203 - RNA, 19 nt, Artificial Sequence
  Description of Artificial Sequence: Synthetic oligonucleotide
ugcggcuguaaaucugaca

SEQ ID NO: 2048204 - RNA, 19 nt, Artificial Sequence
  Description of Artificial Sequence: Synthetic oligonucleotide
guuaaggauguggguacag

SEQ ID NO: 2048205 - RNA, 19 nt, Artificial Sequence
  Description of Artificial Sequence: Synthetic oligonucleotide
uuaggcacucccgagccuc

SEQ ID NO: 2048206 - RNA, 19 nt, Artificial Sequence
  Description of Artificial Sequence: Synthetic oligonucleotide
gacaaaggggcaucuggaa

SEQ ID NO: 2048207 - RNA, 19 nt, Artificial Sequence
  Description of Artificial Sequence: Synthetic oligonucleotide
uagggauagcaccccauuu

SEQ ID NO: 2048208 - RNA, 19 nt, Artificial Sequence
  Description of Artificial Sequence: Synthetic oligonucleotide
ggcauugccaaagaagaac

SEQ ID NO: 2048209 - RNA, 19 nt, Artificial Sequence
  Description of Artificial Sequence: Synthetic oligonucleotide
gagcacgaauacaucauuc

SEQ ID NO: 2048210 - RNA, 19 nt, Artificial Sequence
  Description of Artificial Sequence: Synthetic oligonucleotide
uggugcggcuguaaaucug

SEQ ID NO: 2048211 - RNA, 19 nt, Artificial Sequence
  Description of Artificial Sequence: Synthetic oligonucleotide
ggggaaagggcauagccuc

SEQ ID NO: 2048212 - RNA, 19 nt, Artificial Sequence
  Description of Artificial Sequence: Synthetic oligonucleotide
acagccagacuguccaggu

SEQ ID NO: 2048213 - RNA, 19 nt, Artificial Sequence
  Description of Artificial Sequence: Synthetic oligonucleotide
ugcuagcccugccagcaca

SEQ ID NO: 2048214 - RNA, 19 nt, Artificial Sequence
  Description of Artificial Sequence: Synthetic oligonucleotide
agagcacgaauacaucauu

SEQ ID NO: 2048215 - RNA, 19 nt, Artificial Sequence
  Description of Artificial Sequence: Synthetic oligonucleotide
caucccggggaaaguagag

SEQ ID NO: 2048216 - RNA, 19 nt, Artificial Sequence
  Description of Artificial Sequence: Synthetic oligonucleotide
cagucaugcccaaggcccg

SEQ ID NO: 2048217 - RNA, 19 nt, Artificial Sequence
  Description of Artificial Sequence: Synthetic oligonucleotide
guaccggcguugcaugcgg

SEQ ID NO: 2048218 - RNA, 19 nt, Artificial Sequence
  Description of Artificial Sequence: Synthetic oligonucleotide
gagacaugaaggcuagggu

SEQ ID NO: 2048219 - RNA, 19 nt, Artificial Sequence
  Description of Artificial Sequence: Synthetic oligonucleotide
uagcccugccagcacagac

SEQ ID NO: 2048220 - RNA, 19 nt, Artificial Sequence
  Description of Artificial Sequence: Synthetic oligonucleotide
cauagcccaccauggcugc

SEQ ID NO: 2048221 - RNA, 19 nt, Artificial Sequence
  Description of Artificial Sequence: Synthetic oligonucleotide
gguaucugcuccuugccga

SEQ ID NO: 2048222 - RNA, 19 nt, Artificial Sequence
  Description of Artificial Sequence: Synthetic oligonucleotide
guucgaagggcaggcagag

SEQ ID NO: 2048223 - RNA, 19 nt, Artificial Sequence
  Description of Artificial Sequence: Synthetic oligonucleotide
ccggguuacuuccacauag

SEQ ID NO: 2048224 - RNA, 19 nt, Artificial Sequence
  Description of Artificial Sequence: Synthetic oligonucleotide
cauaccacuuccggguuac

SEQ ID NO: 2048225 - RNA, 19 nt, Artificial Sequence
  Description of Artificial Sequence: Synthetic oligonucleotide
ggggcauugccaaagaaga

SEQ ID NO: 2048226 - RNA, 19 nt, Artificial Sequence
  Description of Artificial Sequence: Synthetic oligonucleotide
ucgccgguacggcuccucg

SEQ ID NO: 2048227 - RNA, 19 nt, Artificial Sequence
  Description of Artificial Sequence: Synthetic oligonucleotide
aucuggaaugcaugacagu

SEQ ID NO: 2048228 - RNA, 19 nt, Artificial Sequence
  Description of Artificial Sequence: Synthetic oligonucleotide
ucugagaacccaggcgcug

SEQ ID NO: 2048229 - RNA, 19 nt, Artificial Sequence
  Description of Artificial Sequence: Synthetic oligonucleotide
gguuacuuccacauaguuc

SEQ ID NO: 2048230 - RNA, 19 nt, Artificial Sequence
  Description of Artificial Sequence: Synthetic oligonucleotide
aucccggggaaaguagagg

SEQ ID NO: 2048231 - RNA, 19 nt, Artificial Sequence
  Description of Artificial Sequence: Synthetic oligonucleotide
gugucggcuguggaggugg

SEQ ID NO: 2048232 - RNA, 19 nt, Artificial Sequence
  Description of Artificial Sequence: Synthetic oligonucleotide
uauuuucaguggugcggcu

SEQ ID NO: 2048233 - RNA, 19 nt, Artificial Sequence
  Description of Artificial Sequence: Synthetic oligonucleotide
ggguaucugcuccuugccg

SEQ ID NO: 2048234 - RNA, 19 nt, Artificial Sequence
  Description of Artificial Sequence: Synthetic oligonucleotide
ucucugauuugugcucgcc

SEQ ID NO: 2048235 - RNA, 19 nt, Artificial Sequence
  Description of Artificial Sequence: Synthetic oligonucleotide
acaugaaggcuaggguauc

SEQ ID NO: 2048236 - RNA, 19 nt, Artificial Sequence
  Description of Artificial Sequence: Synthetic oligonucleotide
agagguugugcagcccacg

SEQ ID NO: 2048237 - RNA, 19 nt, Artificial Sequence
  Description of Artificial Sequence: Synthetic oligonucleotide
agcaaggcauagcccacca

SEQ ID NO: 2048238 - RNA, 19 nt, Artificial Sequence
  Description of Artificial Sequence: Synthetic oligonucleotide
cagcccacgaaggugggcc

SEQ ID NO: 2048239 - RNA, 19 nt, Artificial Sequence
  Description of Artificial Sequence: Synthetic oligonucleotide
agggcauagccucugcaua

SEQ ID NO: 2048240 - RNA, 19 nt, Artificial Sequence
  Description of Artificial Sequence: Synthetic oligonucleotide
auguauuagcacagggagu

SEQ ID NO: 2048241 - RNA, 19 nt, Artificial Sequence
  Description of Artificial Sequence: Synthetic oligonucleotide
aggggaaagggcauagccu

SEQ ID NO: 2048242 - RNA, 19 nt, Artificial Sequence
  Description of Artificial Sequence: Synthetic oligonucleotide
cuuguguauuuucaguggu

SEQ ID NO: 2048243 - RNA, 19 nt, Artificial Sequence
  Description of Artificial Sequence: Synthetic oligonucleotide
cugagagagaaggguuagg

SEQ ID NO: 2048244 - RNA, 19 nt, Artificial Sequence
  Description of Artificial Sequence: Synthetic oligonucleotide
ccgguggauagaaacaaug

SEQ ID NO: 2048245 - RNA, 19 nt, Artificial Sequence
  Description of Artificial Sequence: Synthetic oligonucleotide
cuaggguaucugcuccuug

SEQ ID NO: 2048246 - RNA, 19 nt, Artificial Sequence
  Description of Artificial Sequence: Synthetic oligonucleotide
gguuccgucgccgguacgg

SEQ ID NO: 2048247 - RNA, 19 nt, Artificial Sequence
  Description of Artificial Sequence: Synthetic oligonucleotide
augaaggcuaggguaucug

SEQ ID NO: 2048248 - RNA, 19 nt, Artificial Sequence
  Description of Artificial Sequence: Synthetic oligonucleotide
gcuggugucggcuguggag

SEQ ID NO: 2048249 - RNA, 19 nt, Artificial Sequence
  Description of Artificial Sequence: Synthetic oligonucleotide
guccacagacggcagcccc

SEQ ID NO: 2048250 - RNA, 19 nt, Artificial Sequence
  Description of Artificial Sequence: Synthetic oligonucleotide
gccucugcauaccacuucc

SEQ ID NO: 2048251 - RNA, 19 nt, Artificial Sequence
  Description of Artificial Sequence: Synthetic oligonucleotide
cugugcuacugagaucacc

SEQ ID NO: 2048252 - RNA, 19 nt, Artificial Sequence
  Description of Artificial Sequence: Synthetic oligonucleotide
gcugaucuuguguauuuuc

SEQ ID NO: 2048253 - RNA, 19 nt, Artificial Sequence
  Description of Artificial Sequence: Synthetic oligonucleotide
guaucaguccuaagagcac

SEQ ID NO: 2048254 - RNA, 19 nt, Artificial Sequence
  Description of Artificial Sequence: Synthetic oligonucleotide
auuagcacagggaguaguu

SEQ ID NO: 2048255 - RNA, 19 nt, Artificial Sequence
  Description of Artificial Sequence: Synthetic oligonucleotide
uacggcuccucgucagucu

SEQ ID NO: 2048256 - RNA, 19 nt, Artificial Sequence
  Description of Artificial Sequence: Synthetic oligonucleotide
uccgucgccgguacggcuc

SEQ ID NO: 2048257 - RNA, 19 nt, Artificial Sequence
  Description of Artificial Sequence: Synthetic oligonucleotide
cucugauuugugcucgcca

SEQ ID NO: 2048258 - RNA, 19 nt, Artificial Sequence
  Description of Artificial Sequence: Synthetic oligonucleotide
gacaugaaggcuaggguau

SEQ ID NO: 2048259 - RNA, 19 nt, Artificial Sequence
  Description of Artificial Sequence: Synthetic oligonucleotide
cugcauaccacuuccgggu

SEQ ID NO: 2048260 - RNA, 19 nt, Artificial Sequence
  Description of Artificial Sequence: Synthetic oligonucleotide
cuguagccgcuccauguac

SEQ ID NO: 2048261 - RNA, 19 nt, Artificial Sequence
  Description of Artificial Sequence: Synthetic oligonucleotide
cuccagugcugguucgaag

SEQ ID NO: 2048262 - RNA, 19 nt, Artificial Sequence
  Description of Artificial Sequence: Synthetic oligonucleotide
ggauugcugaucuugugua

SEQ ID NO: 2048263 - RNA, 19 nt, Artificial Sequence
  Description of Artificial Sequence: Synthetic oligonucleotide
gcggcuguaaaucugacau

SEQ ID NO: 2048264 - RNA, 19 nt, Artificial Sequence
  Description of Artificial Sequence: Synthetic oligonucleotide
aaucagcguuauacuucuc

SEQ ID NO: 2048265 - RNA, 19 nt, Artificial Sequence
  Description of Artificial Sequence: Synthetic oligonucleotide
ugaggggaaagggcauagc

SEQ ID NO: 2048266 - RNA, 19 nt, Artificial Sequence
  Description of Artificial Sequence: Synthetic oligonucleotide
gugaugaucuucugugcua

SEQ ID NO: 2048267 - RNA, 19 nt, Artificial Sequence
  Description of Artificial Sequence: Synthetic oligonucleotide
agcacagggaguaguuucu

SEQ ID NO: 2048268 - RNA, 19 nt, Artificial Sequence
  Description of Artificial Sequence: Synthetic oligonucleotide
cucucugauuugugcucgc

SEQ ID NO: 2048269 - RNA, 19 nt, Artificial Sequence
  Description of Artificial Sequence: Synthetic oligonucleotide
ugcauaccacuuccggguu

SEQ ID NO: 2048270 - RNA, 19 nt, Artificial Sequence
  Description of Artificial Sequence: Synthetic oligonucleotide
guauuagcacagggaguag

SEQ ID NO: 2048271 - RNA, 19 nt, Artificial Sequence
  Description of Artificial Sequence: Synthetic oligonucleotide
gggguugcccgguggauag

SEQ ID NO: 2048272 - RNA, 19 nt, Artificial Sequence
  Description of Artificial Sequence: Synthetic oligonucleotide
ccuaagagcacgaauacau

SEQ ID NO: 2048273 - RNA, 19 nt, Artificial Sequence
  Description of Artificial Sequence: Synthetic oligonucleotide
gaaggcuaggguaucugcu

SEQ ID NO: 2048274 - RNA, 19 nt, Artificial Sequence
  Description of Artificial Sequence: Synthetic oligonucleotide
ucugguuccgucgccggua

SEQ ID NO: 2048275 - RNA, 19 nt, Artificial Sequence
  Description of Artificial Sequence: Synthetic oligonucleotide
ggagguggcaccucagcuc

SEQ ID NO: 2048276 - RNA, 19 nt, Artificial Sequence
  Description of Artificial Sequence: Synthetic oligonucleotide
cccaccauggcugcuagcc

SEQ ID NO: 2048277 - RNA, 19 nt, Artificial Sequence
  Description of Artificial Sequence: Synthetic oligonucleotide
caugacaguaucaguccua

SEQ ID NO: 2048278 - RNA, 19 nt, Artificial Sequence
  Description of Artificial Sequence: Synthetic oligonucleotide
ucgucagucucagggccug

SEQ ID NO: 2048279 - RNA, 19 nt, Artificial Sequence
  Description of Artificial Sequence: Synthetic oligonucleotide
cagugcugguucgaagggc

SEQ ID NO: 2048280 - RNA, 19 nt, Artificial Sequence
  Description of Artificial Sequence: Synthetic oligonucleotide
ucugugcuacugagaucac

SEQ ID NO: 2048281 - RNA, 19 nt, Artificial Sequence
  Description of Artificial Sequence: Synthetic oligonucleotide
uacgaagaugggugaugau

SEQ ID NO: 2048282 - RNA, 19 nt, Artificial Sequence
  Description of Artificial Sequence: Synthetic oligonucleotide
ggugaugaucuucugugcu

SEQ ID NO: 2048283 - RNA, 19 nt, Artificial Sequence
  Description of Artificial Sequence: Synthetic oligonucleotide
agucaugcccaaggcccgg

SEQ ID NO: 2048284 - RNA, 19 nt, Artificial Sequence
  Description of Artificial Sequence: Synthetic oligonucleotide
gcuccaacaauggggagac

SEQ ID NO: 2048285 - RNA, 19 nt, Artificial Sequence
  Description of Artificial Sequence: Synthetic oligonucleotide
ggcaccucagcuccauccc

SEQ ID NO: 2048286 - RNA, 19 nt, Artificial Sequence
  Description of Artificial Sequence: Synthetic oligonucleotide
cugauuugugcucgccaca

SEQ ID NO: 2048287 - RNA, 19 nt, Artificial Sequence
  Description of Artificial Sequence: Synthetic oligonucleotide
cuugccgagcugacagauc

SEQ ID NO: 2048288 - RNA, 19 nt, Artificial Sequence
  Description of Artificial Sequence: Synthetic oligonucleotide
gcuguaaaucugacauagg

SEQ ID NO: 2048289 - RNA, 19 nt, Artificial Sequence
  Description of Artificial Sequence: Synthetic oligonucleotide
gcugagagagaaggguuag

SEQ ID NO: 2048290 - RNA, 19 nt, Artificial Sequence
  Description of Artificial Sequence: Synthetic oligonucleotide
acucccgagccucuugaua

SEQ ID NO: 2048291 - RNA, 19 nt, Artificial Sequence
  Description of Artificial Sequence: Synthetic oligonucleotide
uggggagacaaaggggcau

SEQ ID NO: 2048292 - RNA, 19 nt, Artificial Sequence
  Description of Artificial Sequence: Synthetic oligonucleotide
uccuugccgagcugacaga

SEQ ID NO: 2048293 - RNA, 19 nt, Artificial Sequence
  Description of Artificial Sequence: Synthetic oligonucleotide
uccggguuacuuccacaua

SEQ ID NO: 2048294 - RNA, 19 nt, Artificial Sequence
  Description of Artificial Sequence: Synthetic oligonucleotide
ucaguccuaagagcacgaa

SEQ ID NO: 2048295 - RNA, 19 nt, Artificial Sequence
  Description of Artificial Sequence: Synthetic oligonucleotide
ugccacugagcaaggcaua

SEQ ID NO: 2048296 - RNA, 19 nt, Artificial Sequence
  Description of Artificial Sequence: Synthetic oligonucleotide
gcagagacaugaaggcuag

SEQ ID NO: 2048297 - RNA, 19 nt, Artificial Sequence
  Description of Artificial Sequence: Synthetic oligonucleotide
cugccaaggauugcugauc

SEQ ID NO: 2048298 - RNA, 19 nt, Artificial Sequence
  Description of Artificial Sequence: Synthetic oligonucleotide
gcuacugagaucaccucuc

SEQ ID NO: 2048299 - RNA, 19 nt, Artificial Sequence
  Description of Artificial Sequence: Synthetic oligonucleotide
aucugguuccgucgccggu

SEQ ID NO: 2048300 - RNA, 19 nt, Artificial Sequence
  Description of Artificial Sequence: Synthetic oligonucleotide
ucuccagugcugguucgaa

SEQ ID NO: 2048301 - RNA, 19 nt, Artificial Sequence
  Description of Artificial Sequence: Synthetic oligonucleotide
ugguuccgucgccgguacg

SEQ ID NO: 2048302 - RNA, 19 nt, Artificial Sequence
  Description of Artificial Sequence: Synthetic oligonucleotide
aguagagguuaaggaugug

SEQ ID NO: 2048303 - RNA, 19 nt, Artificial Sequence
  Description of Artificial Sequence: Synthetic oligonucleotide
gcguuauacuucucuuuac

SEQ ID NO: 2048304 - RNA, 19 nt, Artificial Sequence
  Description of Artificial Sequence: Synthetic oligonucleotide
cagcccagcagaagagcuc

SEQ ID NO: 2048305 - RNA, 19 nt, Artificial Sequence
  Description of Artificial Sequence: Synthetic oligonucleotide
uucaguggugcggcuguaa

SEQ ID NO: 2048306 - RNA, 19 nt, Artificial Sequence
  Description of Artificial Sequence: Synthetic oligonucleotide
uggugucggcuguggaggu

SEQ ID NO: 2048307 - RNA, 19 nt, Artificial Sequence
  Description of Artificial Sequence: Synthetic oligonucleotide
ugucggcuguggagguggc

SEQ ID NO: 2048308 - RNA, 19 nt, Artificial Sequence
  Description of Artificial Sequence: Synthetic oligonucleotide
cauccuccucagucaugcc

SEQ ID NO: 2048309 - RNA, 19 nt, Artificial Sequence
  Description of Artificial Sequence: Synthetic oligonucleotide
uggguacaguagacacaga

SEQ ID NO: 2048310 - RNA, 19 nt, Artificial Sequence
  Description of Artificial Sequence: Synthetic oligonucleotide
ugcugaucuuguguauuuu

SEQ ID NO: 2048311 - RNA, 19 nt, Artificial Sequence
  Description of Artificial Sequence: Synthetic oligonucleotide
ggggcaucuggaaugcaug

SEQ ID NO: 2048312 - RNA, 19 nt, Artificial Sequence
  Description of Artificial Sequence: Synthetic oligonucleotide
cuuccggguuacuuccaca

SEQ ID NO: 2048313 - RNA, 19 nt, Artificial Sequence
  Description of Artificial Sequence: Synthetic oligonucleotide
caucauucuucuucauccu

SEQ ID NO: 2048314 - RNA, 19 nt, Artificial Sequence
  Description of Artificial Sequence: Synthetic oligonucleotide
aggaagaaguugaggggaa

SEQ ID NO: 2048315 - RNA, 19 nt, Artificial Sequence
  Description of Artificial Sequence: Synthetic oligonucleotide
uaccggcguugcaugcggc

SEQ ID NO: 2048316 - RNA, 19 nt, Artificial Sequence
  Description of Artificial Sequence: Synthetic oligonucleotide
gugcuacugagaucaccuc

SEQ ID NO: 2048317 - RNA, 19 nt, Artificial Sequence
  Description of Artificial Sequence: Synthetic oligonucleotide
cauaguucuuggcaucuau

SEQ ID NO: 2048318 - RNA, 19 nt, Artificial Sequence
  Description of Artificial Sequence: Synthetic oligonucleotide
cugguuccgucgccgguac

SEQ ID NO: 2048319 - RNA, 19 nt, Artificial Sequence
  Description of Artificial Sequence: Synthetic oligonucleotide
cacgaaggugggccugcag

SEQ ID NO: 2048320 - RNA, 19 nt, Artificial Sequence
  Description of Artificial Sequence: Synthetic oligonucleotide
ggugcggcuguaaaucuga

SEQ ID NO: 2048321 - RNA, 19 nt, Artificial Sequence
  Description of Artificial Sequence: Synthetic oligonucleotide
gccacugagcaaggcauag

SEQ ID NO: 2048322 - RNA, 19 nt, Artificial Sequence
  Description of Artificial Sequence: Synthetic oligonucleotide
gggaguaguuucucuucca

SEQ ID NO: 2048323 - RNA, 19 nt, Artificial Sequence
  Description of Artificial Sequence: Synthetic oligonucleotide
gggcaucuggaaugcauga

SEQ ID NO: 2048324 - RNA, 19 nt, Artificial Sequence
  Description of Artificial Sequence: Synthetic oligonucleotide
gucaugcccaaggcccggg

SEQ ID NO: 2048325 - RNA, 19 nt, Artificial Sequence
  Description of Artificial Sequence: Synthetic oligonucleotide
gcauugccaaagaagaacu

SEQ ID NO: 2048326 - RNA, 19 nt, Artificial Sequence
  Description of Artificial Sequence: Synthetic oligonucleotide
ggcauagcccaccauggcu

SEQ ID NO: 2048327 - RNA, 19 nt, Artificial Sequence
  Description of Artificial Sequence: Synthetic oligonucleotide
cucgccacacagcagcugu

SEQ ID NO: 2048328 - RNA, 19 nt, Artificial Sequence
  Description of Artificial Sequence: Synthetic oligonucleotide
ccucugcauaccacuuccg

SEQ ID NO: 2048329 - RNA, 19 nt, Artificial Sequence
  Description of Artificial Sequence: Synthetic oligonucleotide
cagagacaugaaggcuagg

SEQ ID NO: 2048330 - RNA, 19 nt, Artificial Sequence
  Description of Artificial Sequence: Synthetic oligonucleotide
gguucgaagggcaggcaga

SEQ ID NO: 2048331 - RNA, 19 nt, Artificial Sequence
  Description of Artificial Sequence: Synthetic oligonucleotide
guuccgucgccgguacggc

SEQ ID NO: 2048332 - RNA, 19 nt, Artificial Sequence
  Description of Artificial Sequence: Synthetic oligonucleotide
gcugcuagcccugccagca

SEQ ID NO: 2048333 - RNA, 19 nt, Artificial Sequence
  Description of Artificial Sequence: Synthetic oligonucleotide
cagcuguagccgcuccaug

SEQ ID NO: 2048334 - RNA, 19 nt, Artificial Sequence
  Description of Artificial Sequence: Synthetic oligonucleotide
ugccgagcugacagaucau

SEQ ID NO: 2048335 - RNA, 19 nt, Artificial Sequence
  Description of Artificial Sequence: Synthetic oligonucleotide
uucgaagggcaggcagagu

SEQ ID NO: 2048336 - RNA, 19 nt, Artificial Sequence
  Description of Artificial Sequence: Synthetic oligonucleotide
guacggcuccucgucaguc

SEQ ID NO: 2048337 - RNA, 19 nt, Artificial Sequence
  Description of Artificial Sequence: Synthetic oligonucleotide
ggauagaaacaaugccacu

SEQ ID NO: 2048338 - RNA, 19 nt, Artificial Sequence
  Description of Artificial Sequence: Synthetic oligonucleotide
cugagaacccaggcgcuga

SEQ ID NO: 2048339 - RNA, 19 nt, Artificial Sequence
  Description of Artificial Sequence: Synthetic oligonucleotide
cagcaggaccaaauggcua

SEQ ID NO: 2048340 - RNA, 19 nt, Artificial Sequence
  Description of Artificial Sequence: Synthetic oligonucleotide
gaagaugggugaugaucuu

SEQ ID NO: 2048341 - RNA, 19 nt, Artificial Sequence
  Description of Artificial Sequence: Synthetic oligonucleotide
uagcccaccauggcugcua

SEQ ID NO: 2048342 - RNA, 19 nt, Artificial Sequence
  Description of Artificial Sequence: Synthetic oligonucleotide
guggugcggcuguaaaucu

SEQ ID NO: 2048343 - RNA, 19 nt, Artificial Sequence
  Description of Artificial Sequence: Synthetic oligonucleotide
cacagggaguaguuucucu

SEQ ID NO: 2048344 - RNA, 19 nt, Artificial Sequence
  Description of Artificial Sequence: Synthetic oligonucleotide
ugcaugcggccaggcagga

SEQ ID NO: 2048345 - RNA, 19 nt, Artificial Sequence
  Description of Artificial Sequence: Synthetic oligonucleotide
gucagcacagccagacugu

SEQ ID NO: 2048346 - RNA, 19 nt, Artificial Sequence
  Description of Artificial Sequence: Synthetic oligonucleotide
cugcuagcccugccagcac

SEQ ID NO: 2048347 - RNA, 19 nt, Artificial Sequence
  Description of Artificial Sequence: Synthetic oligonucleotide
ccaccauggcugcuagccc

SEQ ID NO: 2048348 - RNA, 19 nt, Artificial Sequence
  Description of Artificial Sequence: Synthetic oligonucleotide
ggcacucccgagccucuug

SEQ ID NO: 2048349 - RNA, 19 nt, Artificial Sequence
  Description of Artificial Sequence: Synthetic oligonucleotide
cuagggauagcaccccauu

SEQ ID NO: 2048350 - RNA, 19 nt, Artificial Sequence
  Description of Artificial Sequence: Synthetic oligonucleotide
gccgguacggcuccucguc

SEQ ID NO: 2048351 - RNA, 19 nt, Artificial Sequence
  Description of Artificial Sequence: Synthetic oligonucleotide
cauugccaaagaagaacuu

SEQ ID NO: 2048352 - RNA, 19 nt, Artificial Sequence
  Description of Artificial Sequence: Synthetic oligonucleotide
uuucaguggugcggcugua

SEQ ID NO: 2048353 - RNA, 19 nt, Artificial Sequence
  Description of Artificial Sequence: Synthetic oligonucleotide
caguccuaagagcacgaau

SEQ ID NO: 2048354 - RNA, 19 nt, Artificial Sequence
  Description of Artificial Sequence: Synthetic oligonucleotide
cagcguuauacuucucuuu

SEQ ID NO: 2048355 - RNA, 19 nt, Artificial Sequence
  Description of Artificial Sequence: Synthetic oligonucleotide
gcacgaauacaucauucuu

SEQ ID NO: 2048356 - RNA, 19 nt, Artificial Sequence
  Description of Artificial Sequence: Synthetic oligonucleotide
cuuuacgaagaugggugau

SEQ ID NO: 2048357 - RNA, 19 nt, Artificial Sequence
  Description of Artificial Sequence: Synthetic oligonucleotide
caugaaggcuaggguaucu

SEQ ID NO: 2048358 - RNA, 19 nt, Artificial Sequence
  Description of Artificial Sequence: Synthetic oligonucleotide
auagcccaccauggcugcu

SEQ ID NO: 2048359 - RNA, 19 nt, Artificial Sequence
  Description of Artificial Sequence: Synthetic oligonucleotide
cucgucagucucagggccu

SEQ ID NO: 2048360 - RNA, 19 nt, Artificial Sequence
  Description of Artificial Sequence: Synthetic oligonucleotide
gcacucccgagccucuuga

SEQ ID NO: 2048361 - RNA, 19 nt, Artificial Sequence
  Description of Artificial Sequence: Synthetic oligonucleotide
guuaggcacucccgagccu

SEQ ID NO: 2048362 - RNA, 19 nt, Artificial Sequence
  Description of Artificial Sequence: Synthetic oligonucleotide
ggcguugcaugcggccagg

SEQ ID NO: 2048363 - RNA, 19 nt, Artificial Sequence
  Description of Artificial Sequence: Synthetic oligonucleotide
gugcggcuguaaaucugac

SEQ ID NO: 2048364 - RNA, 19 nt, Artificial Sequence
  Description of Artificial Sequence: Synthetic oligonucleotide
ccgagcugacagaucauaa

SEQ ID NO: 2048365 - RNA, 19 nt, Artificial Sequence
  Description of Artificial Sequence: Synthetic oligonucleotide
gccgcuccauguaccggcg

SEQ ID NO: 2048366 - RNA, 19 nt, Artificial Sequence
  Description of Artificial Sequence: Synthetic oligonucleotide
gcccgguggauagaaacaa

SEQ ID NO: 2048367 - RNA, 19 nt, Artificial Sequence
  Description of Artificial Sequence: Synthetic oligonucleotide
auaccacuuccggguuacu

SEQ ID NO: 2048368 - RNA, 19 nt, Artificial Sequence
  Description of Artificial Sequence: Synthetic oligonucleotide
ccaggcgcugagagagaag

SEQ ID NO: 2048369 - RNA, 19 nt, Artificial Sequence
  Description of Artificial Sequence: Synthetic oligonucleotide
caguggugcggcuguaaau

SEQ ID NO: 2048370 - RNA, 19 nt, Artificial Sequence
  Description of Artificial Sequence: Synthetic oligonucleotide
ggugucggcuguggaggug

SEQ ID NO: 2048371 - RNA, 19 nt, Artificial Sequence
  Description of Artificial Sequence: Synthetic oligonucleotide
cgagccucuugauacaacu

SEQ ID NO: 2048372 - RNA, 19 nt, Artificial Sequence
  Description of Artificial Sequence: Synthetic oligonucleotide
cugguucgaagggcaggca

SEQ ID NO: 2048373 - RNA, 19 nt, Artificial Sequence
  Description of Artificial Sequence: Synthetic oligonucleotide
gggcauugccaaagaagaa

SEQ ID NO: 2048374 - RNA, 19 nt, Artificial Sequence
  Description of Artificial Sequence: Synthetic oligonucleotide
guugcccgguggauagaaa

SEQ ID NO: 2048375 - RNA, 19 nt, Artificial Sequence
  Description of Artificial Sequence: Synthetic oligonucleotide
gucagucucagggccugcu

SEQ ID NO: 2048376 - RNA, 19 nt, Artificial Sequence
  Description of Artificial Sequence: Synthetic oligonucleotide
ccggggaaaguagagguua

SEQ ID NO: 2048377 - RNA, 19 nt, Artificial Sequence
  Description of Artificial Sequence: Synthetic oligonucleotide
cgguacggcuccucgucag

SEQ ID NO: 2048378 - RNA, 19 nt, Artificial Sequence
  Description of Artificial Sequence: Synthetic oligonucleotide
gcacagggaguaguuucuc

SEQ ID NO: 2048379 - RNA, 19 nt, Artificial Sequence
  Description of Artificial Sequence: Synthetic oligonucleotide
gcauaccacuuccggguua

SEQ ID NO: 2048380 - RNA, 19 nt, Artificial Sequence
  Description of Artificial Sequence: Synthetic oligonucleotide
cuagcccugccagcacaga

SEQ ID NO: 2048381 - RNA, 19 nt, Artificial Sequence
  Description of Artificial Sequence: Synthetic oligonucleotide
ggcuaggguaucugcuccu

SEQ ID NO: 2048382 - RNA, 19 nt, Artificial Sequence
  Description of Artificial Sequence: Synthetic oligonucleotide
gccgagcugacagaucaua

SEQ ID NO: 2048383 - RNA, 19 nt, Artificial Sequence
  Description of Artificial Sequence: Synthetic oligonucleotide
gucggcuguggagguggca

SEQ ID NO: 2048384 - RNA, 19 nt, Artificial Sequence
  Description of Artificial Sequence: Synthetic oligonucleotide
gguacggcuccucgucagu

SEQ ID NO: 2048385 - RNA, 19 nt, Artificial Sequence
  Description of Artificial Sequence: Synthetic oligonucleotide
cgccacacagcagcuguag

SEQ ID NO: 2048386 - RNA, 19 nt, Artificial Sequence
  Description of Artificial Sequence: Synthetic oligonucleotide
gucgccgguacggcuccuc

SEQ ID NO: 2048387 - RNA, 19 nt, Artificial Sequence
  Description of Artificial Sequence: Synthetic oligonucleotide
ccgucgccgguacggcucc

SEQ ID NO: 2048388 - RNA, 19 nt, Artificial Sequence
  Description of Artificial Sequence: Synthetic oligonucleotide
cgcugagagagaaggguua

SEQ ID NO: 2048389 - RNA, 19 nt, Artificial Sequence
  Description of Artificial Sequence: Synthetic oligonucleotide
gcuccuugccgagcugaca

SEQ ID NO: 2048390 - RNA, 19 nt, Artificial Sequence
  Description of Artificial Sequence: Synthetic oligonucleotide
gggaaagggcauagccucu

SEQ ID NO: 2048391 - RNA, 19 nt, Artificial Sequence
  Description of Artificial Sequence: Synthetic oligonucleotide
ccauguaccggcguugcau

SEQ ID NO: 2048392 - RNA, 19 nt, Artificial Sequence
  Description of Artificial Sequence: Synthetic oligonucleotide
cggcguugcaugcggccag

SEQ ID NO: 2048393 - RNA, 19 nt, Artificial Sequence
  Description of Artificial Sequence: Synthetic oligonucleotide
cgagcugacagaucauaau

SEQ ID NO: 2048394 - RNA, 19 nt, Artificial Sequence
  Description of Artificial Sequence: Synthetic oligonucleotide
agguggcaccucagcucca

SEQ ID NO: 2048395 - RNA, 19 nt, Artificial Sequence
  Description of Artificial Sequence: Synthetic oligonucleotide
gcccaccauggcugcuagc

SEQ ID NO: 2048396 - RNA, 19 nt, Artificial Sequence
  Description of Artificial Sequence: Synthetic oligonucleotide
gggcucugccaaggauugc

SEQ ID NO: 2048397 - RNA, 19 nt, Artificial Sequence
  Description of Artificial Sequence: Synthetic oligonucleotide
gccucuugauacaacucuu

SEQ ID NO: 2048398 - RNA, 19 nt, Artificial Sequence
  Description of Artificial Sequence: Synthetic oligonucleotide
gcguugcaugcggccaggc

SEQ ID NO: 2048399 - RNA, 19 nt, Artificial Sequence
  Description of Artificial Sequence: Synthetic oligonucleotide
cuccaacaauggggagaca

SEQ ID NO: 2048400 - RNA, 19 nt, Artificial Sequence
  Description of Artificial Sequence: Synthetic oligonucleotide
aggcacucccgagccucuu

SEQ ID NO: 2048401 - RNA, 19 nt, Artificial Sequence
  Description of Artificial Sequence: Synthetic oligonucleotide
ccgguacggcuccucguca

SEQ ID NO: 2048402 - RNA, 19 nt, Artificial Sequence
  Description of Artificial Sequence: Synthetic oligonucleotide
cacucccgagccucuugau

SEQ ID NO: 2048403 - RNA, 19 nt, Artificial Sequence
  Description of Artificial Sequence: Synthetic oligonucleotide
gcgcugagagagaaggguu

SEQ ID NO: 2048404 - RNA, 19 nt, Artificial Sequence
  Description of Artificial Sequence: Synthetic oligonucleotide
ccggcguugcaugcggcca

SEQ ID NO: 2048405 - RNA, 19 nt, Artificial Sequence
  Description of Artificial Sequence: Synthetic oligonucleotide
cccaggcgcugagagagaa

SEQ ID NO: 2048406 - RNA, 19 nt, Artificial Sequence
  Description of Artificial Sequence: Synthetic oligonucleotide
gguggcaccucagcuccau

SEQ ID NO: 2048407 - RNA, 19 nt, Artificial Sequence
  Description of Artificial Sequence: Synthetic oligonucleotide
cccgggugcuugggguccg

SEQ ID NO: 2048408 - RNA, 19 nt, Artificial Sequence
  Description of Artificial Sequence: Synthetic oligonucleotide
cccgagccucuugauacaa

SEQ ID NO: 2048409 - RNA, 19 nt, Artificial Sequence
  Description of Artificial Sequence: Synthetic oligonucleotide
ccuugccgagcugacagau

SEQ ID NO: 2048410 - RNA, 19 nt, Artificial Sequence
  Description of Artificial Sequence: Synthetic oligonucleotide
gcuaggguaucugcuccuu

SEQ ID NO: 2048411 - RNA, 19 nt, Artificial Sequence
  Description of Artificial Sequence: Synthetic oligonucleotide
cggcuguaaaucugacaua

SEQ ID NO: 2048412 - RNA, 19 nt, Artificial Sequence
  Description of Artificial Sequence: Synthetic oligonucleotide
cccgguggauagaaacaau

SEQ ID NO: 2048413 - RNA, 19 nt, Artificial Sequence
  Description of Artificial Sequence: Synthetic oligonucleotide
ggguugcccgguggauaga

SEQ ID NO: 2048414 - RNA, 19 nt, Artificial Sequence
  Description of Artificial Sequence: Synthetic oligonucleotide
cagcuccaucccggggaaa

SEQ ID NO: 2048415 - RNA, 19 nt, Artificial Sequence
  Description of Artificial Sequence: Synthetic oligonucleotide
gcaugcggccaggcaggaa

SEQ ID NO: 2048416 - RNA, 19 nt, Artificial Sequence
  Description of Artificial Sequence: Synthetic oligonucleotide
cgggugcuugggguccgag

SEQ ID NO: 2048417 - RNA, 19 nt, Artificial Sequence
  Description of Artificial Sequence: Synthetic oligonucleotide
cgcuccauguaccggcguu

SEQ ID NO: 2048418 - RNA, 19 nt, Artificial Sequence
  Description of Artificial Sequence: Synthetic oligonucleotide
ccgcuccauguaccggcgu

SEQ ID NO: 2048419 - RNA, 19 nt, Artificial Sequence
  Description of Artificial Sequence: Synthetic oligonucleotide
ucuaauauuagucuucuca

SEQ ID NO: 2048420 - RNA, 19 nt, Artificial Sequence
  Description of Artificial Sequence: Synthetic oligonucleotide
aaaacgucugaucuccacc

SEQ ID NO: 2048421 - RNA, 19 nt, Artificial Sequence
  Description of Artificial Sequence: Synthetic oligonucleotide
aauauuagucuucucauau

SEQ ID NO: 2048422 - RNA, 19 nt, Artificial Sequence
  Description of Artificial Sequence: Synthetic oligonucleotide
guauaaauaagagaaagug

SEQ ID NO: 2048423 - RNA, 19 nt, Artificial Sequence
  Description of Artificial Sequence: Synthetic oligonucleotide
auaagcugaaacucaaagg

SEQ ID NO: 2048424 - RNA, 19 nt, Artificial Sequence
  Description of Artificial Sequence: Synthetic oligonucleotide
acaagauuuagaucggcac

SEQ ID NO: 2048425 - RNA, 19 nt, Artificial Sequence
  Description of Artificial Sequence: Synthetic oligonucleotide
caugugaaaacaagaaccg

SEQ ID NO: 2048426 - RNA, 19 nt, Artificial Sequence
  Description of Artificial Sequence: Synthetic oligonucleotide
auaccucagaaucugcucc

SEQ ID NO: 2048427 - RNA, 19 nt, Artificial Sequence
  Description of Artificial Sequence: Synthetic oligonucleotide
guuacaaucaguucccaag

SEQ ID NO: 2048428 - RNA, 19 nt, Artificial Sequence
  Description of Artificial Sequence: Synthetic oligonucleotide
uuuagaucggcacugcuga

SEQ ID NO: 2048429 - RNA, 19 nt, Artificial Sequence
  Description of Artificial Sequence: Synthetic oligonucleotide
agcugcaaggcccugaccc

SEQ ID NO: 2048430 - RNA, 19 nt, Artificial Sequence
  Description of Artificial Sequence: Synthetic oligonucleotide
aaauaagagaaaguguucu

SEQ ID NO: 2048431 - RNA, 19 nt, Artificial Sequence
  Description of Artificial Sequence: Synthetic oligonucleotide
aacaccuuccagcagcgcg

SEQ ID NO: 2048432 - RNA, 19 nt, Artificial Sequence
  Description of Artificial Sequence: Synthetic oligonucleotide
uguauaaauaagagaaagu

SEQ ID NO: 2048433 - RNA, 19 nt, Artificial Sequence
  Description of Artificial Sequence: Synthetic oligonucleotide
uacaccugcacgacgagcg

SEQ ID NO: 2048434 - RNA, 19 nt, Artificial Sequence
  Description of Artificial Sequence: Synthetic oligonucleotide
uguaaaacgucugaucucc

SEQ ID NO: 2048435 - RNA, 19 nt, Artificial Sequence
  Description of Artificial Sequence: Synthetic oligonucleotide
aauugaggcacuggugucc

SEQ ID NO: 2048436 - RNA, 19 nt, Artificial Sequence
  Description of Artificial Sequence: Synthetic oligonucleotide
ucuucuuguacaauacuga

SEQ ID NO: 2048437 - RNA, 19 nt, Artificial Sequence
  Description of Artificial Sequence: Synthetic oligonucleotide
cauaagcugaaacucaaag

SEQ ID NO: 2048438 - RNA, 19 nt, Artificial Sequence
  Description of Artificial Sequence: Synthetic oligonucleotide
ucugacacuguuacaauca

SEQ ID NO: 2048439 - RNA, 19 nt, Artificial Sequence
  Description of Artificial Sequence: Synthetic oligonucleotide
agcugaaacucaaaggucc

SEQ ID NO: 2048440 - RNA, 19 nt, Artificial Sequence
  Description of Artificial Sequence: Synthetic oligonucleotide
ucguuggcgacacagaugu

SEQ ID NO: 2048441 - RNA, 19 nt, Artificial Sequence
  Description of Artificial Sequence: Synthetic oligonucleotide
uccgagacuuccaaugugg

SEQ ID NO: 2048442 - RNA, 19 nt, Artificial Sequence
  Description of Artificial Sequence: Synthetic oligonucleotide
auacugaauucuuccaugg

SEQ ID NO: 2048443 - RNA, 19 nt, Artificial Sequence
  Description of Artificial Sequence: Synthetic oligonucleotide
ugugaaaacaagaaccguu

SEQ ID NO: 2048444 - RNA, 19 nt, Artificial Sequence
  Description of Artificial Sequence: Synthetic oligonucleotide
acugguguccugcaggugg

SEQ ID NO: 2048445 - RNA, 19 nt, Artificial Sequence
  Description of Artificial Sequence: Synthetic oligonucleotide
agcugugcagcccagucgc

SEQ ID NO: 2048446 - RNA, 19 nt, Artificial Sequence
  Description of Artificial Sequence: Synthetic oligonucleotide
uccaccucuaauauuaguc

SEQ ID NO: 2048447 - RNA, 19 nt, Artificial Sequence
  Description of Artificial Sequence: Synthetic oligonucleotide
uuccaaauuccacaacaag

SEQ ID NO: 2048448 - RNA, 19 nt, Artificial Sequence
  Description of Artificial Sequence: Synthetic oligonucleotide
ucgugguccaaucggaggg

SEQ ID NO: 2048449 - RNA, 19 nt, Artificial Sequence
  Description of Artificial Sequence: Synthetic oligonucleotide
uuuguauaaauaagagaaa

SEQ ID NO: 2048450 - RNA, 19 nt, Artificial Sequence
  Description of Artificial Sequence: Synthetic oligonucleotide
aagauuuagaucggcacug

SEQ ID NO: 2048451 - RNA, 19 nt, Artificial Sequence
  Description of Artificial Sequence: Synthetic oligonucleotide
ucuucaugaacuuguaaaa

SEQ ID NO: 2048452 - RNA, 19 nt, Artificial Sequence
  Description of Artificial Sequence: Synthetic oligonucleotide
ugagugugaaaauuuauuu

SEQ ID NO: 2048453 - RNA, 19 nt, Artificial Sequence
  Description of Artificial Sequence: Synthetic oligonucleotide
ugaaaacaagaaccguucc

SEQ ID NO: 2048454 - RNA, 19 nt, Artificial Sequence
  Description of Artificial Sequence: Synthetic oligonucleotide
aaccguuccaaauuccaca

SEQ ID NO: 2048455 - RNA, 19 nt, Artificial Sequence
  Description of Artificial Sequence: Synthetic oligonucleotide
aaagaggggcucuccacuc

SEQ ID NO: 2048456 - RNA, 19 nt, Artificial Sequence
  Description of Artificial Sequence: Synthetic oligonucleotide
aacaagaaccguuccaaau

SEQ ID NO: 2048457 - RNA, 19 nt, Artificial Sequence
  Description of Artificial Sequence: Synthetic oligonucleotide
cuugcugucauuuccccag

SEQ ID NO: 2048458 - RNA, 19 nt, Artificial Sequence
  Description of Artificial Sequence: Synthetic oligonucleotide
uucucuggcacuugcaggc

SEQ ID NO: 2048459 - RNA, 19 nt, Artificial Sequence
  Description of Artificial Sequence: Synthetic oligonucleotide
gagacuuccaaugugggac

SEQ ID NO: 2048460 - RNA, 19 nt, Artificial Sequence
  Description of Artificial Sequence: Synthetic oligonucleotide
uguaguagggcuggaauug

SEQ ID NO: 2048461 - RNA, 19 nt, Artificial Sequence
  Description of Artificial Sequence: Synthetic oligonucleotide
aauaagagaaaguguucua

SEQ ID NO: 2048462 - RNA, 19 nt, Artificial Sequence
  Description of Artificial Sequence: Synthetic oligonucleotide
uacugaauucuuccauggg

SEQ ID NO: 2048463 - RNA, 19 nt, Artificial Sequence
  Description of Artificial Sequence: Synthetic oligonucleotide
uugagugugaaaauuuauu

SEQ ID NO: 2048464 - RNA, 19 nt, Artificial Sequence
  Description of Artificial Sequence: Synthetic oligonucleotide
uuugagugugaaaauuuau

SEQ ID NO: 2048465 - RNA, 19 nt, Artificial Sequence
  Description of Artificial Sequence: Synthetic oligonucleotide
gaacacguggaugagccgg

SEQ ID NO: 2048466 - RNA, 19 nt, Artificial Sequence
  Description of Artificial Sequence: Synthetic oligonucleotide
cuugcaggcacugggagcg

SEQ ID NO: 2048467 - RNA, 19 nt, Artificial Sequence
  Description of Artificial Sequence: Synthetic oligonucleotide
cagaaucugcuccugacag

SEQ ID NO: 2048468 - RNA, 19 nt, Artificial Sequence
  Description of Artificial Sequence: Synthetic oligonucleotide
aagaaccguuccaaauucc

SEQ ID NO: 2048469 - RNA, 19 nt, Artificial Sequence
  Description of Artificial Sequence: Synthetic oligonucleotide
aguucugacacuguuacaa

SEQ ID NO: 2048470 - RNA, 19 nt, Artificial Sequence
  Description of Artificial Sequence: Synthetic oligonucleotide
cacaugugaaaacaagaac

SEQ ID NO: 2048471 - RNA, 19 nt, Artificial Sequence
  Description of Artificial Sequence: Synthetic oligonucleotide
ucagaaucugcuccugaca

SEQ ID NO: 2048472 - RNA, 19 nt, Artificial Sequence
  Description of Artificial Sequence: Synthetic oligonucleotide
ugcacgacgagcgccagcg

SEQ ID NO: 2048473 - RNA, 19 nt, Artificial Sequence
  Description of Artificial Sequence: Synthetic oligonucleotide
accagcagaacacagggaa

SEQ ID NO: 2048474 - RNA, 19 nt, Artificial Sequence
  Description of Artificial Sequence: Synthetic oligonucleotide
cacaccaggucucagcugc

SEQ ID NO: 2048475 - RNA, 19 nt, Artificial Sequence
  Description of Artificial Sequence: Synthetic oligonucleotide
cuuguaaaacgucugaucu

SEQ ID NO: 2048476 - RNA, 19 nt, Artificial Sequence
  Description of Artificial Sequence: Synthetic oligonucleotide
ugaucuccaccucuaauau

SEQ ID NO: 2048477 - RNA, 19 nt, Artificial Sequence
  Description of Artificial Sequence: Synthetic oligonucleotide
gagcgcaacaccuuccagc

SEQ ID NO: 2048478 - RNA, 19 nt, Artificial Sequence
  Description of Artificial Sequence: Synthetic oligonucleotide
aacaagauuuagaucggca

SEQ ID NO: 2048479 - RNA, 19 nt, Artificial Sequence
  Description of Artificial Sequence: Synthetic oligonucleotide
guuggcgacacagauguag

SEQ ID NO: 2048480 - RNA, 19 nt, Artificial Sequence
  Description of Artificial Sequence: Synthetic oligonucleotide
augaauaccucagaaucug

SEQ ID NO: 2048481 - RNA, 19 nt, Artificial Sequence
  Description of Artificial Sequence: Synthetic oligonucleotide
uggcauaagcugaaacuca

SEQ ID NO: 2048482 - RNA, 19 nt, Artificial Sequence
  Description of Artificial Sequence: Synthetic oligonucleotide
ugaauaccucagaaucugc

SEQ ID NO: 2048483 - RNA, 19 nt, Artificial Sequence
  Description of Artificial Sequence: Synthetic oligonucleotide
acaagaaccguuccaaauu

SEQ ID NO: 2048484 - RNA, 19 nt, Artificial Sequence
  Description of Artificial Sequence: Synthetic oligonucleotide
uucuuguacaauacugaau

SEQ ID NO: 2048485 - RNA, 19 nt, Artificial Sequence
  Description of Artificial Sequence: Synthetic oligonucleotide
cucacaugugaaaacaaga

SEQ ID NO: 2048486 - RNA, 19 nt, Artificial Sequence
  Description of Artificial Sequence: Synthetic oligonucleotide
aaucggaggggccccgggg

SEQ ID NO: 2048487 - RNA, 19 nt, Artificial Sequence
  Description of Artificial Sequence: Synthetic oligonucleotide
agcgccagcggguacgcgc

SEQ ID NO: 2048488 - RNA, 19 nt, Artificial Sequence
  Description of Artificial Sequence: Synthetic oligonucleotide
gagaaaguguucuaacuua

SEQ ID NO: 2048489 - RNA, 19 nt, Artificial Sequence
  Description of Artificial Sequence: Synthetic oligonucleotide
gaaacucaaagguccugug

SEQ ID NO: 2048490 - RNA, 19 nt, Artificial Sequence
  Description of Artificial Sequence: Synthetic oligonucleotide
uaauauuagucuucucaua

SEQ ID NO: 2048491 - RNA, 19 nt, Artificial Sequence
  Description of Artificial Sequence: Synthetic oligonucleotide
agaaucugcuccugacagg

SEQ ID NO: 2048492 - RNA, 19 nt, Artificial Sequence
  Description of Artificial Sequence: Synthetic oligonucleotide
gaacuuguaaaacgucuga

SEQ ID NO: 2048493 - RNA, 19 nt, Artificial Sequence
  Description of Artificial Sequence: Synthetic oligonucleotide
ugucauuuccccaguccug

SEQ ID NO: 2048494 - RNA, 19 nt, Artificial Sequence
  Description of Artificial Sequence: Synthetic oligonucleotide
uagucauccucguuggcga

SEQ ID NO: 2048495 - RNA, 19 nt, Artificial Sequence
  Description of Artificial Sequence: Synthetic oligonucleotide
acaggccgcaauuuucuuc

SEQ ID NO: 2048496 - RNA, 19 nt, Artificial Sequence
  Description of Artificial Sequence: Synthetic oligonucleotide
uuccuggccguucugaguc

SEQ ID NO: 2048497 - RNA, 19 nt, Artificial Sequence
  Description of Artificial Sequence: Synthetic oligonucleotide
uaaaacgucugaucuccac

SEQ ID NO: 2048498 - RNA, 19 nt, Artificial Sequence
  Description of Artificial Sequence: Synthetic oligonucleotide
ugacaggccgcaauuuucu

SEQ ID NO: 2048499 - RNA, 19 nt, Artificial Sequence
  Description of Artificial Sequence: Synthetic oligonucleotide
aaacaagaaccguuccaaa

SEQ ID NO: 2048500 - RNA, 19 nt, Artificial Sequence
  Description of Artificial Sequence: Synthetic oligonucleotide
augaacuuguaaaacgucu

SEQ ID NO: 2048501 - RNA, 19 nt, Artificial Sequence
  Description of Artificial Sequence: Synthetic oligonucleotide
agauuuagaucggcacugc

SEQ ID NO: 2048502 - RNA, 19 nt, Artificial Sequence
  Description of Artificial Sequence: Synthetic oligonucleotide
caugaacuuguaaaacguc

SEQ ID NO: 2048503 - RNA, 19 nt, Artificial Sequence
  Description of Artificial Sequence: Synthetic oligonucleotide
caagaaccguuccaaauuc

SEQ ID NO: 2048504 - RNA, 19 nt, Artificial Sequence
  Description of Artificial Sequence: Synthetic oligonucleotide
aacgucugaucuccaccuc

SEQ ID NO: 2048505 - RNA, 19 nt, Artificial Sequence
  Description of Artificial Sequence: Synthetic oligonucleotide
agcgcaacaccuuccagca

SEQ ID NO: 2048506 - RNA, 19 nt, Artificial Sequence
  Description of Artificial Sequence: Synthetic oligonucleotide
uuguaaaacgucugaucuc

SEQ ID NO: 2048507 - RNA, 19 nt, Artificial Sequence
  Description of Artificial Sequence: Synthetic oligonucleotide
uucugacacuguuacaauc

SEQ ID NO: 2048508 - RNA, 19 nt, Artificial Sequence
  Description of Artificial Sequence: Synthetic oligonucleotide
auuuagaucggcacugcug

SEQ ID NO: 2048509 - RNA, 19 nt, Artificial Sequence
  Description of Artificial Sequence: Synthetic oligonucleotide
aauuccacaacaagauuua

SEQ ID NO: 2048510 - RNA, 19 nt, Artificial Sequence
  Description of Artificial Sequence: Synthetic oligonucleotide
gucauuuccccaguccugg

SEQ ID NO: 2048511 - RNA, 19 nt, Artificial Sequence
  Description of Artificial Sequence: Synthetic oligonucleotide
agaucggcacugcugagca

SEQ ID NO: 2048512 - RNA, 19 nt, Artificial Sequence
  Description of Artificial Sequence: Synthetic oligonucleotide
accucuaauauuagucuuc

SEQ ID NO: 2048513 - RNA, 19 nt, Artificial Sequence
  Description of Artificial Sequence: Synthetic oligonucleotide
agaccugcagguuuccugu

SEQ ID NO: 2048514 - RNA, 19 nt, Artificial Sequence
  Description of Artificial Sequence: Synthetic oligonucleotide
acaacaagauuuagaucgg

SEQ ID NO: 2048515 - RNA, 19 nt, Artificial Sequence
  Description of Artificial Sequence: Synthetic oligonucleotide
gaauucuuccaugggaguc

SEQ ID NO: 2048516 - RNA, 19 nt, Artificial Sequence
  Description of Artificial Sequence: Synthetic oligonucleotide
uguuacaaucaguucccaa

SEQ ID NO: 2048517 - RNA, 19 nt, Artificial Sequence
  Description of Artificial Sequence: Synthetic oligonucleotide
cuuguacaauacugaauuc

SEQ ID NO: 2048518 - RNA, 19 nt, Artificial Sequence
  Description of Artificial Sequence: Synthetic oligonucleotide
cucgugguccaaucggagg

SEQ ID NO: 2048519 - RNA, 19 nt, Artificial Sequence
  Description of Artificial Sequence: Synthetic oligonucleotide
caugggagucuccugaguc

SEQ ID NO: 2048520 - RNA, 19 nt, Artificial Sequence
  Description of Artificial Sequence: Synthetic oligonucleotide
gugaaaacaagaaccguuc

SEQ ID NO: 2048521 - RNA, 19 nt, Artificial Sequence
  Description of Artificial Sequence: Synthetic oligonucleotide
ugcuggcauaagcugaaac

SEQ ID NO: 2048522 - RNA, 19 nt, Artificial Sequence
  Description of Artificial Sequence: Synthetic oligonucleotide
uuggcgacacagauguagu

SEQ ID NO: 2048523 - RNA, 19 nt, Artificial Sequence
  Description of Artificial Sequence: Synthetic oligonucleotide
caugcuaaccagugcuggc

SEQ ID NO: 2048524 - RNA, 19 nt, Artificial Sequence
  Description of Artificial Sequence: Synthetic oligonucleotide
ucugaucuccaccucuaau

SEQ ID NO: 2048525 - RNA, 19 nt, Artificial Sequence
  Description of Artificial Sequence: Synthetic oligonucleotide
ucugggcgugaucaagacc

SEQ ID NO: 2048526 - RNA, 19 nt, Artificial Sequence
  Description of Artificial Sequence: Synthetic oligonucleotide
guguccugcagguggagag

SEQ ID NO: 2048527 - RNA, 19 nt, Artificial Sequence
  Description of Artificial Sequence: Synthetic oligonucleotide
ucucucugcuuguaguccu

SEQ ID NO: 2048528 - RNA, 19 nt, Artificial Sequence
  Description of Artificial Sequence: Synthetic oligonucleotide
cuaauauuagucuucucau

SEQ ID NO: 2048529 - RNA, 19 nt, Artificial Sequence
  Description of Artificial Sequence: Synthetic oligonucleotide
ucuccaccucuaauauuag

SEQ ID NO: 2048530 - RNA, 19 nt, Artificial Sequence
  Description of Artificial Sequence: Synthetic oligonucleotide
gcgacacagauguaguagg

SEQ ID NO: 2048531 - RNA, 19 nt, Artificial Sequence
  Description of Artificial Sequence: Synthetic oligonucleotide
gaauugaggcacugguguc

SEQ ID NO: 2048532 - RNA, 19 nt, Artificial Sequence
  Description of Artificial Sequence: Synthetic oligonucleotide
caggcgaacacguggauga

SEQ ID NO: 2048533 - RNA, 19 nt, Artificial Sequence
  Description of Artificial Sequence: Synthetic oligonucleotide
cugcucgugguccaaucgg

SEQ ID NO: 2048534 - RNA, 19 nt, Artificial Sequence
  Description of Artificial Sequence: Synthetic oligonucleotide
cugggcgugaucaagaccu

SEQ ID NO: 2048535 - RNA, 19 nt, Artificial Sequence
  Description of Artificial Sequence: Synthetic oligonucleotide
auauuagucuucucauauu

SEQ ID NO: 2048536 - RNA, 19 nt, Artificial Sequence
  Description of Artificial Sequence: Synthetic oligonucleotide
uccggggcggcaacggccg

SEQ ID NO: 2048537 - RNA, 19 nt, Artificial Sequence
  Description of Artificial Sequence: Synthetic oligonucleotide
ugcagguuuccuguaguca

SEQ ID NO: 2048538 - RNA, 19 nt, Artificial Sequence
  Description of Artificial Sequence: Synthetic oligonucleotide
aucaguucccaagucugag

SEQ ID NO: 2048539 - RNA, 19 nt, Artificial Sequence
  Description of Artificial Sequence: Synthetic oligonucleotide
gagcaugcuaaccagugcu

SEQ ID NO: 2048540 - RNA, 19 nt, Artificial Sequence
  Description of Artificial Sequence: Synthetic oligonucleotide
uuagaucggcacugcugag

SEQ ID NO: 2048541 - RNA, 19 nt, Artificial Sequence
  Description of Artificial Sequence: Synthetic oligonucleotide
gauguaguagggcuggaau

SEQ ID NO: 2048542 - RNA, 19 nt, Artificial Sequence
  Description of Artificial Sequence: Synthetic oligonucleotide
cacgacgagcgccagcggg

SEQ ID NO: 2048543 - RNA, 19 nt, Artificial Sequence
  Description of Artificial Sequence: Synthetic oligonucleotide
acuuacaucugggucuucu

SEQ ID NO: 2048544 - RNA, 19 nt, Artificial Sequence
  Description of Artificial Sequence: Synthetic oligonucleotide
aucggcacugcugagcaug

SEQ ID NO: 2048545 - RNA, 19 nt, Artificial Sequence
  Description of Artificial Sequence: Synthetic oligonucleotide
ugcuuguaguccugcagaa

SEQ ID NO: 2048546 - RNA, 19 nt, Artificial Sequence
  Description of Artificial Sequence: Synthetic oligonucleotide
ucuccacuccaugaauacc

SEQ ID NO: 2048547 - RNA, 19 nt, Artificial Sequence
  Description of Artificial Sequence: Synthetic oligonucleotide
gccgcaauuuucuucauga

SEQ ID NO: 2048548 - RNA, 19 nt, Artificial Sequence
  Description of Artificial Sequence: Synthetic oligonucleotide
agcggguacgcgcagcugu

SEQ ID NO: 2048549 - RNA, 19 nt, Artificial Sequence
  Description of Artificial Sequence: Synthetic oligonucleotide
augggagucuccugagucu

SEQ ID NO: 2048550 - RNA, 19 nt, Artificial Sequence
  Description of Artificial Sequence: Synthetic oligonucleotide
uaccucagaaucugcuccu

SEQ ID NO: 2048551 - RNA, 19 nt, Artificial Sequence
  Description of Artificial Sequence: Synthetic oligonucleotide
agacuuccaaugugggaca

SEQ ID NO: 2048552 - RNA, 19 nt, Artificial Sequence
  Description of Artificial Sequence: Synthetic oligonucleotide
ggaauugaggcacuggugu

SEQ ID NO: 2048553 - RNA, 19 nt, Artificial Sequence
  Description of Artificial Sequence: Synthetic oligonucleotide
acgucugaucuccaccucu

SEQ ID NO: 2048554 - RNA, 19 nt, Artificial Sequence
  Description of Artificial Sequence: Synthetic oligonucleotide
ucgagcgggcaguacaccu

SEQ ID NO: 2048555 - RNA, 19 nt, Artificial Sequence
  Description of Artificial Sequence: Synthetic oligonucleotide
ucaaagguccuguggccuc

SEQ ID NO: 2048556 - RNA, 19 nt, Artificial Sequence
  Description of Artificial Sequence: Synthetic oligonucleotide
cagucgccaguucugacac

SEQ ID NO: 2048557 - RNA, 19 nt, Artificial Sequence
  Description of Artificial Sequence: Synthetic oligonucleotide
caacaagauuuagaucggc

SEQ ID NO: 2048558 - RNA, 19 nt, Artificial Sequence
  Description of Artificial Sequence: Synthetic oligonucleotide
caggccgcaauuuucuuca

SEQ ID NO: 2048559 - RNA, 19 nt, Artificial Sequence
  Description of Artificial Sequence: Synthetic oligonucleotide
ggcgcaggcgaacacgugg

SEQ ID NO: 2048560 - RNA, 19 nt, Artificial Sequence
  Description of Artificial Sequence: Synthetic oligonucleotide
gaaccguuccaaauuccac

SEQ ID NO: 2048561 - RNA, 19 nt, Artificial Sequence
  Description of Artificial Sequence: Synthetic oligonucleotide
aguacaccugcacgacgag

SEQ ID NO: 2048562 - RNA, 19 nt, Artificial Sequence
  Description of Artificial Sequence: Synthetic oligonucleotide
gacaguccugcaccggcgc

SEQ ID NO: 2048563 - RNA, 19 nt, Artificial Sequence
  Description of Artificial Sequence: Synthetic oligonucleotide
guacgcgcagcugucacag

SEQ ID NO: 2048564 - RNA, 19 nt, Artificial Sequence
  Description of Artificial Sequence: Synthetic oligonucleotide
ugggagcgcaacaccuucc

SEQ ID NO: 2048565 - RNA, 19 nt, Artificial Sequence
  Description of Artificial Sequence: Synthetic oligonucleotide
cucguuggcgacacagaug

SEQ ID NO: 2048566 - RNA, 19 nt, Artificial Sequence
  Description of Artificial Sequence: Synthetic oligonucleotide
caggucaaccccuucucuc

SEQ ID NO: 2048567 - RNA, 19 nt, Artificial Sequence
  Description of Artificial Sequence: Synthetic oligonucleotide
guacaauacugaauucuuc

SEQ ID NO: 2048568 - RNA, 19 nt, Artificial Sequence
  Description of Artificial Sequence: Synthetic oligonucleotide
cacuugcaggcacugggag

SEQ ID NO: 2048569 - RNA, 19 nt, Artificial Sequence
  Description of Artificial Sequence: Synthetic oligonucleotide
gucuccugagucucaggcc

SEQ ID NO: 2048570 - RNA, 19 nt, Artificial Sequence
  Description of Artificial Sequence: Synthetic oligonucleotide
accaggucucagcugcaag

SEQ ID NO: 2048571 - RNA, 19 nt, Artificial Sequence
  Description of Artificial Sequence: Synthetic oligonucleotide
ccaggucucagcugcaagg

SEQ ID NO: 2048572 - RNA, 19 nt, Artificial Sequence
  Description of Artificial Sequence: Synthetic oligonucleotide
gucgccaguucugacacug

SEQ ID NO: 2048573 - RNA, 19 nt, Artificial Sequence
  Description of Artificial Sequence: Synthetic oligonucleotide
uccucguuggcgacacaga

SEQ ID NO: 2048574 - RNA, 19 nt, Artificial Sequence
  Description of Artificial Sequence: Synthetic oligonucleotide
caagauuuagaucggcacu

SEQ ID NO: 2048575 - RNA, 19 nt, Artificial Sequence
  Description of Artificial Sequence: Synthetic oligonucleotide
acaguccugcaccggcgcg

SEQ ID NO: 2048576 - RNA, 19 nt, Artificial Sequence
  Description of Artificial Sequence: Synthetic oligonucleotide
accggcgcgucgcggaggc

SEQ ID NO: 2048577 - RNA, 19 nt, Artificial Sequence
  Description of Artificial Sequence: Synthetic oligonucleotide
ggcgacacagauguaguag

SEQ ID NO: 2048578 - RNA, 19 nt, Artificial Sequence
  Description of Artificial Sequence: Synthetic oligonucleotide
gcugucauuuccccagucc

SEQ ID NO: 2048579 - RNA, 19 nt, Artificial Sequence
  Description of Artificial Sequence: Synthetic oligonucleotide
ugguccaaucggaggggcc

SEQ ID NO: 2048580 - RNA, 19 nt, Artificial Sequence
  Description of Artificial Sequence: Synthetic oligonucleotide
cagggaaagcaggugcucc

SEQ ID NO: 2048581 - RNA, 19 nt, Artificial Sequence
  Description of Artificial Sequence: Synthetic oligonucleotide
caggucucagcugcaaggc

SEQ ID NO: 2048582 - RNA, 19 nt, Artificial Sequence
  Description of Artificial Sequence: Synthetic oligonucleotide
guuuccgcagccggggcgg

SEQ ID NO: 2048583 - RNA, 19 nt, Artificial Sequence
  Description of Artificial Sequence: Synthetic oligonucleotide
uccggcacgccgcccagcc

SEQ ID NO: 2048584 - RNA, 19 nt, Artificial Sequence
  Description of Artificial Sequence: Synthetic oligonucleotide
ucggcacugcugagcaugc

SEQ ID NO: 2048585 - RNA, 19 nt, Artificial Sequence
  Description of Artificial Sequence: Synthetic oligonucleotide
augcuaaccagugcuggca

SEQ ID NO: 2048586 - RNA, 19 nt, Artificial Sequence
  Description of Artificial Sequence: Synthetic oligonucleotide
gcucacaugugaaaacaag

SEQ ID NO: 2048587 - RNA, 19 nt, Artificial Sequence
  Description of Artificial Sequence: Synthetic oligonucleotide
gcgaacacguggaugagcc

SEQ ID NO: 2048588 - RNA, 19 nt, Artificial Sequence
  Description of Artificial Sequence: Synthetic oligonucleotide
cuccgagacuuccaaugug

SEQ ID NO: 2048589 - RNA, 19 nt, Artificial Sequence
  Description of Artificial Sequence: Synthetic oligonucleotide
gauuuagaucggcacugcu

SEQ ID NO: 2048590 - RNA, 19 nt, Artificial Sequence
  Description of Artificial Sequence: Synthetic oligonucleotide
gaucaagaccugcagguuu

SEQ ID NO: 2048591 - RNA, 19 nt, Artificial Sequence
  Description of Artificial Sequence: Synthetic oligonucleotide
cucugggcgugaucaagac

SEQ ID NO: 2048592 - RNA, 19 nt, Artificial Sequence
  Description of Artificial Sequence: Synthetic oligonucleotide
ucacagcgcggcuccgggg

SEQ ID NO: 2048593 - RNA, 19 nt, Artificial Sequence
  Description of Artificial Sequence: Synthetic oligonucleotide
gcaugcuaaccagugcugg

SEQ ID NO: 2048594 - RNA, 19 nt, Artificial Sequence
  Description of Artificial Sequence: Synthetic oligonucleotide
ggcaacggccggcagggcg

SEQ ID NO: 2048595 - RNA, 19 nt, Artificial Sequence
  Description of Artificial Sequence: Synthetic oligonucleotide
gacuuccaaugugggacag

SEQ ID NO: 2048596 - RNA, 19 nt, Artificial Sequence
  Description of Artificial Sequence: Synthetic oligonucleotide
aacacguggaugagccggu

SEQ ID NO: 2048597 - RNA, 19 nt, Artificial Sequence
  Description of Artificial Sequence: Synthetic oligonucleotide
cuggaauugaggcacuggu

SEQ ID NO: 2048598 - RNA, 19 nt, Artificial Sequence
  Description of Artificial Sequence: Synthetic oligonucleotide
gucaaccccuucucucugc

SEQ ID NO: 2048599 - RNA, 19 nt, Artificial Sequence
  Description of Artificial Sequence: Synthetic oligonucleotide
acgagcgccagcggguacg

SEQ ID NO: 2048600 - RNA, 19 nt, Artificial Sequence
  Description of Artificial Sequence: Synthetic oligonucleotide
cugaaacucaaagguccug

SEQ ID NO: 2048601 - RNA, 19 nt, Artificial Sequence
  Description of Artificial Sequence: Synthetic oligonucleotide
cugcagguuuccuguaguc

SEQ ID NO: 2048602 - RNA, 19 nt, Artificial Sequence
  Description of Artificial Sequence: Synthetic oligonucleotide
uuccuguagucauccucgu

SEQ ID NO: 2048603 - RNA, 19 nt, Artificial Sequence
  Description of Artificial Sequence: Synthetic oligonucleotide
cugcucacaugugaaaaca

SEQ ID NO: 2048604 - RNA, 19 nt, Artificial Sequence
  Description of Artificial Sequence: Synthetic oligonucleotide
ggagccuucgagcgggcag

SEQ ID NO: 2048605 - RNA, 19 nt, Artificial Sequence
  Description of Artificial Sequence: Synthetic oligonucleotide
ugcugucauuuccccaguc

SEQ ID NO: 2048606 - RNA, 19 nt, Artificial Sequence
  Description of Artificial Sequence: Synthetic oligonucleotide
gcaguacaccugcacgacg

SEQ ID NO: 2048607 - RNA, 19 nt, Artificial Sequence
  Description of Artificial Sequence: Synthetic oligonucleotide
agcaugcuaaccagugcug

SEQ ID NO: 2048608 - RNA, 19 nt, Artificial Sequence
  Description of Artificial Sequence: Synthetic oligonucleotide
cuaaccagugcuggcauaa

SEQ ID NO: 2048609 - RNA, 19 nt, Artificial Sequence
  Description of Artificial Sequence: Synthetic oligonucleotide
ugaucaagaccugcagguu

SEQ ID NO: 2048610 - RNA, 19 nt, Artificial Sequence
  Description of Artificial Sequence: Synthetic oligonucleotide
cugggagcgcaacaccuuc

SEQ ID NO: 2048611 - RNA, 19 nt, Artificial Sequence
  Description of Artificial Sequence: Synthetic oligonucleotide
ccaaauuccacaacaagau

SEQ ID NO: 2048612 - RNA, 19 nt, Artificial Sequence
  Description of Artificial Sequence: Synthetic oligonucleotide
ugggcgugaucaagaccug

SEQ ID NO: 2048613 - RNA, 19 nt, Artificial Sequence
  Description of Artificial Sequence: Synthetic oligonucleotide
gguccaaucggaggggccc

SEQ ID NO: 2048614 - RNA, 19 nt, Artificial Sequence
  Description of Artificial Sequence: Synthetic oligonucleotide
gcuggaauugaggcacugg

SEQ ID NO: 2048615 - RNA, 19 nt, Artificial Sequence
  Description of Artificial Sequence: Synthetic oligonucleotide
guacaccugcacgacgagc

SEQ ID NO: 2048616 - RNA, 19 nt, Artificial Sequence
  Description of Artificial Sequence: Synthetic oligonucleotide
uccaaucggaggggccccg

SEQ ID NO: 2048617 - RNA, 19 nt, Artificial Sequence
  Description of Artificial Sequence: Synthetic oligonucleotide
agauguaguagggcuggaa

SEQ ID NO: 2048618 - RNA, 19 nt, Artificial Sequence
  Description of Artificial Sequence: Synthetic oligonucleotide
uucgagcgggcaguacacc

SEQ ID NO: 2048619 - RNA, 19 nt, Artificial Sequence
  Description of Artificial Sequence: Synthetic oligonucleotide
agugcuggcauaagcugaa

SEQ ID NO: 2048620 - RNA, 19 nt, Artificial Sequence
  Description of Artificial Sequence: Synthetic oligonucleotide
cuuccaaugugggacaggu

SEQ ID NO: 2048621 - RNA, 19 nt, Artificial Sequence
  Description of Artificial Sequence: Synthetic oligonucleotide
ccgagacuuccaauguggg

SEQ ID NO: 2048622 - RNA, 19 nt, Artificial Sequence
  Description of Artificial Sequence: Synthetic oligonucleotide
ugacccuguuccuggccgu

SEQ ID NO: 2048623 - RNA, 19 nt, Artificial Sequence
  Description of Artificial Sequence: Synthetic oligonucleotide
uggcgacacagauguagua

SEQ ID NO: 2048624 - RNA, 19 nt, Artificial Sequence
  Description of Artificial Sequence: Synthetic oligonucleotide
aacuuacaucugggucuuc

SEQ ID NO: 2048625 - RNA, 19 nt, Artificial Sequence
  Description of Artificial Sequence: Synthetic oligonucleotide
caaugugggacagguaaaa

SEQ ID NO: 2048626 - RNA, 19 nt, Artificial Sequence
  Description of Artificial Sequence: Synthetic oligonucleotide
uuccaaugugggacaggua

SEQ ID NO: 2048627 - RNA, 19 nt, Artificial Sequence
  Description of Artificial Sequence: Synthetic oligonucleotide
ccugcucgugguccaaucg

SEQ ID NO: 2048628 - RNA, 19 nt, Artificial Sequence
  Description of Artificial Sequence: Synthetic oligonucleotide
gggcaguacaccugcacga

SEQ ID NO: 2048629 - RNA, 19 nt, Artificial Sequence
  Description of Artificial Sequence: Synthetic oligonucleotide
agcgcgucccgcgguuucc

SEQ ID NO: 2048630 - RNA, 19 nt, Artificial Sequence
  Description of Artificial Sequence: Synthetic oligonucleotide
gccguucugagucucuuuc

SEQ ID NO: 2048631 - RNA, 19 nt, Artificial Sequence
  Description of Artificial Sequence: Synthetic oligonucleotide
guaguagggcuggaauuga

SEQ ID NO: 2048632 - RNA, 19 nt, Artificial Sequence
  Description of Artificial Sequence: Synthetic oligonucleotide
uccugagucucaggccagc

SEQ ID NO: 2048633 - RNA, 19 nt, Artificial Sequence
  Description of Artificial Sequence: Synthetic oligonucleotide
ccacaacaagauuuagauc

SEQ ID NO: 2048634 - RNA, 19 nt, Artificial Sequence
  Description of Artificial Sequence: Synthetic oligonucleotide
ggcggcaacggccggcagg

SEQ ID NO: 2048635 - RNA, 19 nt, Artificial Sequence
  Description of Artificial Sequence: Synthetic oligonucleotide
gggucuucuuguacaauac

SEQ ID NO: 2048636 - RNA, 19 nt, Artificial Sequence
  Description of Artificial Sequence: Synthetic oligonucleotide
cgacacagauguaguaggg

SEQ ID NO: 2048637 - RNA, 19 nt, Artificial Sequence
  Description of Artificial Sequence: Synthetic oligonucleotide
caggugcuccaggucaacc

SEQ ID NO: 2048638 - RNA, 19 nt, Artificial Sequence
  Description of Artificial Sequence: Synthetic oligonucleotide
agcucugcucacaugugaa

SEQ ID NO: 2048639 - RNA, 19 nt, Artificial Sequence
  Description of Artificial Sequence: Synthetic oligonucleotide
ucgccaguucugacacugu

SEQ ID NO: 2048640 - RNA, 19 nt, Artificial Sequence
  Description of Artificial Sequence: Synthetic oligonucleotide
gcccugacccuguuccugg

SEQ ID NO: 2048641 - RNA, 19 nt, Artificial Sequence
  Description of Artificial Sequence: Synthetic oligonucleotide
ggcacugggagcgcaacac

SEQ ID NO: 2048642 - RNA, 19 nt, Artificial Sequence
  Description of Artificial Sequence: Synthetic oligonucleotide
ggucaaccccuucucucug

SEQ ID NO: 2048643 - RNA, 19 nt, Artificial Sequence
  Description of Artificial Sequence: Synthetic oligonucleotide
ggaucuccgagacuuccaa

SEQ ID NO: 2048644 - RNA, 19 nt, Artificial Sequence
  Description of Artificial Sequence: Synthetic oligonucleotide
ggagcgcaacaccuuccag

SEQ ID NO: 2048645 - RNA, 19 nt, Artificial Sequence
  Description of Artificial Sequence: Synthetic oligonucleotide
gcggcaacggccggcaggg

SEQ ID NO: 2048646 - RNA, 19 nt, Artificial Sequence
  Description of Artificial Sequence: Synthetic oligonucleotide
guaaaacgucugaucucca

SEQ ID NO: 2048647 - RNA, 19 nt, Artificial Sequence
  Description of Artificial Sequence: Synthetic oligonucleotide
ggcauaagcugaaacucaa

SEQ ID NO: 2048648 - RNA, 19 nt, Artificial Sequence
  Description of Artificial Sequence: Synthetic oligonucleotide
ggccgcaauuuucuucaug

SEQ ID NO: 2048649 - RNA, 19 nt, Artificial Sequence
  Description of Artificial Sequence: Synthetic oligonucleotide
cacugggagcgcaacaccu

SEQ ID NO: 2048650 - RNA, 19 nt, Artificial Sequence
  Description of Artificial Sequence: Synthetic oligonucleotide
ggggcucuccacuccauga

SEQ ID NO: 2048651 - RNA, 19 nt, Artificial Sequence
  Description of Artificial Sequence: Synthetic oligonucleotide
guucugacacuguuacaau

SEQ ID NO: 2048652 - RNA, 19 nt, Artificial Sequence
  Description of Artificial Sequence: Synthetic oligonucleotide
aacggccggcagggcgucc

SEQ ID NO: 2048653 - RNA, 19 nt, Artificial Sequence
  Description of Artificial Sequence: Synthetic oligonucleotide
uccuggccguucugagucu

SEQ ID NO: 2048654 - RNA, 19 nt, Artificial Sequence
  Description of Artificial Sequence: Synthetic oligonucleotide
uccugacaggccgcaauuu

SEQ ID NO: 2048655 - RNA, 19 nt, Artificial Sequence
  Description of Artificial Sequence: Synthetic oligonucleotide
gcacugggagcgcaacacc

SEQ ID NO: 2048656 - RNA, 19 nt, Artificial Sequence
  Description of Artificial Sequence: Synthetic oligonucleotide
uacgcgcagcugucacagc

SEQ ID NO: 2048657 - RNA, 19 nt, Artificial Sequence
  Description of Artificial Sequence: Synthetic oligonucleotide
cugggaucuccgagacuuc

SEQ ID NO: 2048658 - RNA, 19 nt, Artificial Sequence
  Description of Artificial Sequence: Synthetic oligonucleotide
ggcgugaucaagaccugca

SEQ ID NO: 2048659 - RNA, 19 nt, Artificial Sequence
  Description of Artificial Sequence: Synthetic oligonucleotide
ggucuucuuguacaauacu

SEQ ID NO: 2048660 - RNA, 19 nt, Artificial Sequence
  Description of Artificial Sequence: Synthetic oligonucleotide
acccuguuccuggccguuc

SEQ ID NO: 2048661 - RNA, 19 nt, Artificial Sequence
  Description of Artificial Sequence: Synthetic oligonucleotide
gaucuccaccucuaauauu

SEQ ID NO: 2048662 - RNA, 19 nt, Artificial Sequence
  Description of Artificial Sequence: Synthetic oligonucleotide
guccaaucggaggggcccc

SEQ ID NO: 2048663 - RNA, 19 nt, Artificial Sequence
  Description of Artificial Sequence: Synthetic oligonucleotide
acggccggcagggcguccg

SEQ ID NO: 2048664 - RNA, 19 nt, Artificial Sequence
  Description of Artificial Sequence: Synthetic oligonucleotide
caccagcagaacacaggga

SEQ ID NO: 2048665 - RNA, 19 nt, Artificial Sequence
  Description of Artificial Sequence: Synthetic oligonucleotide
ggcucugggcgugaucaag

SEQ ID NO: 2048666 - RNA, 19 nt, Artificial Sequence
  Description of Artificial Sequence: Synthetic oligonucleotide
gucugaucuccaccucuaa

SEQ ID NO: 2048667 - RNA, 19 nt, Artificial Sequence
  Description of Artificial Sequence: Synthetic oligonucleotide
cguucugagucucuuucuc

SEQ ID NO: 2048668 - RNA, 19 nt, Artificial Sequence
  Description of Artificial Sequence: Synthetic oligonucleotide
gcgguuuccgcagccgggg

SEQ ID NO: 2048669 - RNA, 19 nt, Artificial Sequence
  Description of Artificial Sequence: Synthetic oligonucleotide
ccuucgagcgggcaguaca

SEQ ID NO: 2048670 - RNA, 19 nt, Artificial Sequence
  Description of Artificial Sequence: Synthetic oligonucleotide
caccucuaauauuagucuu

SEQ ID NO: 2048671 - RNA, 19 nt, Artificial Sequence
  Description of Artificial Sequence: Synthetic oligonucleotide
gaucuccgagacuuccaau

SEQ ID NO: 2048672 - RNA, 19 nt, Artificial Sequence
  Description of Artificial Sequence: Synthetic oligonucleotide
ccagucgccaguucugaca

SEQ ID NO: 2048673 - RNA, 19 nt, Artificial Sequence
  Description of Artificial Sequence: Synthetic oligonucleotide
ccaccucuaauauuagucu

SEQ ID NO: 2048674 - RNA, 19 nt, Artificial Sequence
  Description of Artificial Sequence: Synthetic oligonucleotide
agucgccaguucugacacu

SEQ ID NO: 2048675 - RNA, 19 nt, Artificial Sequence
  Description of Artificial Sequence: Synthetic oligonucleotide
ggcaguacaccugcacgac

SEQ ID NO: 2048676 - RNA, 19 nt, Artificial Sequence
  Description of Artificial Sequence: Synthetic oligonucleotide
gggagcgcaacaccuucca

SEQ ID NO: 2048677 - RNA, 19 nt, Artificial Sequence
  Description of Artificial Sequence: Synthetic oligonucleotide
cucaaagguccuguggccu

SEQ ID NO: 2048678 - RNA, 19 nt, Artificial Sequence
  Description of Artificial Sequence: Synthetic oligonucleotide
gcggaggcccagcagcacc

SEQ ID NO: 2048679 - RNA, 19 nt, Artificial Sequence
  Description of Artificial Sequence: Synthetic oligonucleotide
cugcacgacgagcgccagc

SEQ ID NO: 2048680 - RNA, 19 nt, Artificial Sequence
  Description of Artificial Sequence: Synthetic oligonucleotide
gguacgcgcagcugucaca

SEQ ID NO: 2048681 - RNA, 19 nt, Artificial Sequence
  Description of Artificial Sequence: Synthetic oligonucleotide
gacgagcgccagcggguac

SEQ ID NO: 2048682 - RNA, 19 nt, Artificial Sequence
  Description of Artificial Sequence: Synthetic oligonucleotide
uggagcugugcagcccagu

SEQ ID NO: 2048683 - RNA, 19 nt, Artificial Sequence
  Description of Artificial Sequence: Synthetic oligonucleotide
ggaggcgccuccuugcugu

SEQ ID NO: 2048684 - RNA, 19 nt, Artificial Sequence
  Description of Artificial Sequence: Synthetic oligonucleotide
guuccuggccguucugagu

SEQ ID NO: 2048685 - RNA, 19 nt, Artificial Sequence
  Description of Artificial Sequence: Synthetic oligonucleotide
gcugggaucuccgagacuu

SEQ ID NO: 2048686 - RNA, 19 nt, Artificial Sequence
  Description of Artificial Sequence: Synthetic oligonucleotide
caacaccuuccagcagcgc

SEQ ID NO: 2048687 - RNA, 19 nt, Artificial Sequence
  Description of Artificial Sequence: Synthetic oligonucleotide
cuguuacaaucaguuccca

SEQ ID NO: 2048688 - RNA, 19 nt, Artificial Sequence
  Description of Artificial Sequence: Synthetic oligonucleotide
cuuacaucugggucuucuu

SEQ ID NO: 2048689 - RNA, 19 nt, Artificial Sequence
  Description of Artificial Sequence: Synthetic oligonucleotide
ggguacgcgcagcugucac

SEQ ID NO: 2048690 - RNA, 19 nt, Artificial Sequence
  Description of Artificial Sequence: Synthetic oligonucleotide
gucauccucguuggcgaca

SEQ ID NO: 2048691 - RNA, 19 nt, Artificial Sequence
  Description of Artificial Sequence: Synthetic oligonucleotide
cuccaccucuaauauuagu

SEQ ID NO: 2048692 - RNA, 19 nt, Artificial Sequence
  Description of Artificial Sequence: Synthetic oligonucleotide
gcgggcaguacaccugcac

SEQ ID NO: 2048693 - RNA, 19 nt, Artificial Sequence
  Description of Artificial Sequence: Synthetic oligonucleotide
gcgggcgcaggcgaacacg

SEQ ID NO: 2048694 - RNA, 19 nt, Artificial Sequence
  Description of Artificial Sequence: Synthetic oligonucleotide
agcagcgcgucccgcgguu

SEQ ID NO: 2048695 - RNA, 19 nt, Artificial Sequence
  Description of Artificial Sequence: Synthetic oligonucleotide
cgaacacguggaugagccg

SEQ ID NO: 2048696 - RNA, 19 nt, Artificial Sequence
  Description of Artificial Sequence: Synthetic oligonucleotide
gggcgugaucaagaccugc

SEQ ID NO: 2048697 - RNA, 19 nt, Artificial Sequence
  Description of Artificial Sequence: Synthetic oligonucleotide
gcucugcucacaugugaaa

SEQ ID NO: 2048698 - RNA, 19 nt, Artificial Sequence
  Description of Artificial Sequence: Synthetic oligonucleotide
gcucugggcgugaucaaga

SEQ ID NO: 2048699 - RNA, 19 nt, Artificial Sequence
  Description of Artificial Sequence: Synthetic oligonucleotide
ggcuggaauugaggcacug

SEQ ID NO: 2048700 - RNA, 19 nt, Artificial Sequence
  Description of Artificial Sequence: Synthetic oligonucleotide
cacugguguccugcaggug

SEQ ID NO: 2048701 - RNA, 19 nt, Artificial Sequence
  Description of Artificial Sequence: Synthetic oligonucleotide
aggcucugggcgugaucaa

SEQ ID NO: 2048702 - RNA, 19 nt, Artificial Sequence
  Description of Artificial Sequence: Synthetic oligonucleotide
ccuucucucugcuuguagu

SEQ ID NO: 2048703 - RNA, 19 nt, Artificial Sequence
  Description of Artificial Sequence: Synthetic oligonucleotide
ccgcgguuuccgcagccgg

SEQ ID NO: 2048704 - RNA, 19 nt, Artificial Sequence
  Description of Artificial Sequence: Synthetic oligonucleotide
agaaggcucugggcgugau

SEQ ID NO: 2048705 - RNA, 19 nt, Artificial Sequence
  Description of Artificial Sequence: Synthetic oligonucleotide
gaggcgccuccuugcuguc

SEQ ID NO: 2048706 - RNA, 19 nt, Artificial Sequence
  Description of Artificial Sequence: Synthetic oligonucleotide
ggcccugacccuguuccug

SEQ ID NO: 2048707 - RNA, 19 nt, Artificial Sequence
  Description of Artificial Sequence: Synthetic oligonucleotide
uccccaguccugggagccu

SEQ ID NO: 2048708 - RNA, 19 nt, Artificial Sequence
  Description of Artificial Sequence: Synthetic oligonucleotide
aggccgcaauuuucuucau

SEQ ID NO: 2048709 - RNA, 19 nt, Artificial Sequence
  Description of Artificial Sequence: Synthetic oligonucleotide
gcucuccacuccaugaaua

SEQ ID NO: 2048710 - RNA, 19 nt, Artificial Sequence
  Description of Artificial Sequence: Synthetic oligonucleotide
gcacuugcaggcacuggga

SEQ ID NO: 2048711 - RNA, 19 nt, Artificial Sequence
  Description of Artificial Sequence: Synthetic oligonucleotide
cagcgcgucccgcgguuuc

SEQ ID NO: 2048712 - RNA, 19 nt, Artificial Sequence
  Description of Artificial Sequence: Synthetic oligonucleotide
cgagacuuccaauguggga

SEQ ID NO: 2048713 - RNA, 19 nt, Artificial Sequence
  Description of Artificial Sequence: Synthetic oligonucleotide
acaccaggucucagcugca

SEQ ID NO: 2048714 - RNA, 19 nt, Artificial Sequence
  Description of Artificial Sequence: Synthetic oligonucleotide
gggaucuccgagacuucca

SEQ ID NO: 2048715 - RNA, 19 nt, Artificial Sequence
  Description of Artificial Sequence: Synthetic oligonucleotide
cgugguccaaucggagggg

SEQ ID NO: 2048716 - RNA, 19 nt, Artificial Sequence
  Description of Artificial Sequence: Synthetic oligonucleotide
cugcaccggcgcgucgcgg

SEQ ID NO: 2048717 - RNA, 19 nt, Artificial Sequence
  Description of Artificial Sequence: Synthetic oligonucleotide
cgucccgcgguuuccgcag

SEQ ID NO: 2048718 - RNA, 19 nt, Artificial Sequence
  Description of Artificial Sequence: Synthetic oligonucleotide
gcacgacgagcgccagcgg

SEQ ID NO: 2048719 - RNA, 19 nt, Artificial Sequence
  Description of Artificial Sequence: Synthetic oligonucleotide
gccugcucgugguccaauc

SEQ ID NO: 2048720 - RNA, 19 nt, Artificial Sequence
  Description of Artificial Sequence: Synthetic oligonucleotide
gcugcaaggcccugacccu

SEQ ID NO: 2048721 - RNA, 19 nt, Artificial Sequence
  Description of Artificial Sequence: Synthetic oligonucleotide
caccggcgcgucgcggagg

SEQ ID NO: 2048722 - RNA, 19 nt, Artificial Sequence
  Description of Artificial Sequence: Synthetic oligonucleotide
cagauguaguagggcugga

SEQ ID NO: 2048723 - RNA, 19 nt, Artificial Sequence
  Description of Artificial Sequence: Synthetic oligonucleotide
cuccugacaggccgcaauu

SEQ ID NO: 2048724 - RNA, 19 nt, Artificial Sequence
  Description of Artificial Sequence: Synthetic oligonucleotide
ccgcaauuuucuucaugaa

SEQ ID NO: 2048725 - RNA, 19 nt, Artificial Sequence
  Description of Artificial Sequence: Synthetic oligonucleotide
aggcgccuccuugcuguca

SEQ ID NO: 2048726 - RNA, 19 nt, Artificial Sequence
  Description of Artificial Sequence: Synthetic oligonucleotide
gcaccggcgcgucgcggag

SEQ ID NO: 2048727 - RNA, 19 nt, Artificial Sequence
  Description of Artificial Sequence: Synthetic oligonucleotide
gcgcaggcgaacacgugga

SEQ ID NO: 2048728 - RNA, 19 nt, Artificial Sequence
  Description of Artificial Sequence: Synthetic oligonucleotide
gcuccugacaggccgcaau

SEQ ID NO: 2048729 - RNA, 19 nt, Artificial Sequence
  Description of Artificial Sequence: Synthetic oligonucleotide
agcgggcaguacaccugca

SEQ ID NO: 2048730 - RNA, 19 nt, Artificial Sequence
  Description of Artificial Sequence: Synthetic oligonucleotide
gccggcagggcguccggca

SEQ ID NO: 2048731 - RNA, 19 nt, Artificial Sequence
  Description of Artificial Sequence: Synthetic oligonucleotide
caccaggucucagcugcaa

SEQ ID NO: 2048732 - RNA, 19 nt, Artificial Sequence
  Description of Artificial Sequence: Synthetic oligonucleotide
gcguccggcacgccgccca

SEQ ID NO: 2048733 - RNA, 19 nt, Artificial Sequence
  Description of Artificial Sequence: Synthetic oligonucleotide
gcgucccgcgguuuccgca

SEQ ID NO: 2048734 - RNA, 19 nt, Artificial Sequence
  Description of Artificial Sequence: Synthetic oligonucleotide
ggcgggcgcaggcgaacac

SEQ ID NO: 2048735 - RNA, 19 nt, Artificial Sequence
  Description of Artificial Sequence: Synthetic oligonucleotide
cccgcgguuuccgcagccg

SEQ ID NO: 2048736 - RNA, 19 nt, Artificial Sequence
  Description of Artificial Sequence: Synthetic oligonucleotide
cuggccguucugagucucu

SEQ ID NO: 2048737 - RNA, 19 nt, Artificial Sequence
  Description of Artificial Sequence: Synthetic oligonucleotide
caacggccggcagggcguc

SEQ ID NO: 2048738 - RNA, 19 nt, Artificial Sequence
  Description of Artificial Sequence: Synthetic oligonucleotide
gcgcgucccgcgguuuccg

SEQ ID NO: 2048739 - RNA, 19 nt, Artificial Sequence
  Description of Artificial Sequence: Synthetic oligonucleotide
gccagcggguacgcgcagc

SEQ ID NO: 2048740 - RNA, 19 nt, Artificial Sequence
  Description of Artificial Sequence: Synthetic oligonucleotide
ccggcagggcguccggcac

SEQ ID NO: 2048741 - RNA, 19 nt, Artificial Sequence
  Description of Artificial Sequence: Synthetic oligonucleotide
gccggggcgggcgcaggcg

SEQ ID NO: 2048742 - RNA, 19 nt, Artificial Sequence
  Description of Artificial Sequence: Synthetic oligonucleotide
agccuucgagcgggcagua

SEQ ID NO: 2048743 - RNA, 19 nt, Artificial Sequence
  Description of Artificial Sequence: Synthetic oligonucleotide
ggcgccuccuugcugucau

SEQ ID NO: 2048744 - RNA, 19 nt, Artificial Sequence
  Description of Artificial Sequence: Synthetic oligonucleotide
gggcguccggcacgccgcc

SEQ ID NO: 2048745 - RNA, 19 nt, Artificial Sequence
  Description of Artificial Sequence: Synthetic oligonucleotide
caguccugcaccggcgcgu

SEQ ID NO: 2048746 - RNA, 19 nt, Artificial Sequence
  Description of Artificial Sequence: Synthetic oligonucleotide
gcaacggccggcagggcgu

SEQ ID NO: 2048747 - RNA, 19 nt, Artificial Sequence
  Description of Artificial Sequence: Synthetic oligonucleotide
cauccucguuggcgacaca

SEQ ID NO: 2048748 - RNA, 19 nt, Artificial Sequence
  Description of Artificial Sequence: Synthetic oligonucleotide
gcgucgcggaggcccagca

SEQ ID NO: 2048749 - RNA, 19 nt, Artificial Sequence
  Description of Artificial Sequence: Synthetic oligonucleotide
cgucugaucuccaccucua

SEQ ID NO: 2048750 - RNA, 19 nt, Artificial Sequence
  Description of Artificial Sequence: Synthetic oligonucleotide
ccguucugagucucuuucu

SEQ ID NO: 2048751 - RNA, 19 nt, Artificial Sequence
  Description of Artificial Sequence: Synthetic oligonucleotide
ggggcggcaacggccggca

SEQ ID NO: 2048752 - RNA, 19 nt, Artificial Sequence
  Description of Artificial Sequence: Synthetic oligonucleotide
gcgccagcggguacgcgca

SEQ ID NO: 2048753 - RNA, 19 nt, Artificial Sequence
  Description of Artificial Sequence: Synthetic oligonucleotide
gggcgcaggcgaacacgug

SEQ ID NO: 2048754 - RNA, 19 nt, Artificial Sequence
  Description of Artificial Sequence: Synthetic oligonucleotide
cccaguccugggagccuuc

SEQ ID NO: 2048755 - RNA, 19 nt, Artificial Sequence
  Description of Artificial Sequence: Synthetic oligonucleotide
gggcggcaacggccggcag

SEQ ID NO: 2048756 - RNA, 19 nt, Artificial Sequence
  Description of Artificial Sequence: Synthetic oligonucleotide
caaccccuucucucugcuu

SEQ ID NO: 2048757 - RNA, 19 nt, Artificial Sequence
  Description of Artificial Sequence: Synthetic oligonucleotide
gccuucgagcgggcaguac

SEQ ID NO: 2048758 - RNA, 19 nt, Artificial Sequence
  Description of Artificial Sequence: Synthetic oligonucleotide
ccagcggguacgcgcagcu

SEQ ID NO: 2048759 - RNA, 19 nt, Artificial Sequence
  Description of Artificial Sequence: Synthetic oligonucleotide
ggcugggaucuccgagacu

SEQ ID NO: 2048760 - RNA, 19 nt, Artificial Sequence
  Description of Artificial Sequence: Synthetic oligonucleotide
ggccggcagggcguccggc

SEQ ID NO: 2048761 - RNA, 19 nt, Artificial Sequence
  Description of Artificial Sequence: Synthetic oligonucleotide
cgagcgccagcggguacgc

SEQ ID NO: 2048762 - RNA, 19 nt, Artificial Sequence
  Description of Artificial Sequence: Synthetic oligonucleotide
cgcgucccgcgguuuccgc

SEQ ID NO: 2048763 - RNA, 19 nt, Artificial Sequence
  Description of Artificial Sequence: Synthetic oligonucleotide
gggcgggcgcaggcgaaca

SEQ ID NO: 2048764 - RNA, 19 nt, Artificial Sequence
  Description of Artificial Sequence: Synthetic oligonucleotide
ggcgcgucgcggaggccca

SEQ ID NO: 2048765 - RNA, 19 nt, Artificial Sequence
  Description of Artificial Sequence: Synthetic oligonucleotide
cagcagcgcgucccgcggu

SEQ ID NO: 2048766 - RNA, 19 nt, Artificial Sequence
  Description of Artificial Sequence: Synthetic oligonucleotide
ggcguccggcacgccgccc

SEQ ID NO: 2048767 - RNA, 19 nt, Artificial Sequence
  Description of Artificial Sequence: Synthetic oligonucleotide
ccggggcggcaacggccgg

SEQ ID NO: 2048768 - RNA, 19 nt, Artificial Sequence
  Description of Artificial Sequence: Synthetic oligonucleotide
cgggcgcaggcgaacacgu

SEQ ID NO: 2048769 - RNA, 19 nt, Artificial Sequence
  Description of Artificial Sequence: Synthetic oligonucleotide
ccgcagccggggcgggcgc

SEQ ID NO: 2048770 - RNA, 19 nt, Artificial Sequence
  Description of Artificial Sequence: Synthetic oligonucleotide
cgcgucgcggaggcccagc

SEQ ID NO: 2048771 - RNA, 19 nt, Artificial Sequence
  Description of Artificial Sequence: Synthetic oligonucleotide
cgcggaggcccagcagcac

SEQ ID NO: 2048772 - RNA, 19 nt, Artificial Sequence
  Description of Artificial Sequence: Synthetic oligonucleotide
cggccggcagggcguccgg

SEQ ID NO: 2048773 - RNA, 19 nt, Artificial Sequence
  Description of Artificial Sequence: Synthetic oligonucleotide
gcagggcguccggcacgcc

SEQ ID NO: 2048774 - RNA, 19 nt, Artificial Sequence
  Description of Artificial Sequence: Synthetic oligonucleotide
cgccaguucugacacuguu

SEQ ID NO: 2048775 - RNA, 19 nt, Artificial Sequence
  Description of Artificial Sequence: Synthetic oligonucleotide
gcgcgucgcggaggcccag

SEQ ID NO: 2048776 - RNA, 19 nt, Artificial Sequence
  Description of Artificial Sequence: Synthetic oligonucleotide
cggguacgcgcagcuguca

SEQ ID NO: 2048777 - RNA, 19 nt, Artificial Sequence
  Description of Artificial Sequence: Synthetic oligonucleotide
cguuggcgacacagaugua

SEQ ID NO: 2048778 - RNA, 19 nt, Artificial Sequence
  Description of Artificial Sequence: Synthetic oligonucleotide
cgacgagcgccagcgggua

SEQ ID NO: 2048779 - RNA, 19 nt, Artificial Sequence
  Description of Artificial Sequence: Synthetic oligonucleotide
ccggcgcgucgcggaggcc

SEQ ID NO: 2048780 - RNA, 19 nt, Artificial Sequence
  Description of Artificial Sequence: Synthetic oligonucleotide
cggcaacggccggcagggc

SEQ ID NO: 2048781 - RNA, 19 nt, Artificial Sequence
  Description of Artificial Sequence: Synthetic oligonucleotide
cgcaggcgaacacguggau

SEQ ID NO: 2048782 - RNA, 19 nt, Artificial Sequence
  Description of Artificial Sequence: Synthetic oligonucleotide
gcagcgcgucccgcgguuu

SEQ ID NO: 2048783 - RNA, 19 nt, Artificial Sequence
  Description of Artificial Sequence: Synthetic oligonucleotide
cggggcgggcgcaggcgaa

SEQ ID NO: 2048784 - RNA, 19 nt, Artificial Sequence
  Description of Artificial Sequence: Synthetic oligonucleotide
ccccaguccugggagccuu

SEQ ID NO: 2048785 - RNA, 19 nt, Artificial Sequence
  Description of Artificial Sequence: Synthetic oligonucleotide
ccggcacgccgcccagccu

SEQ ID NO: 2048786 - RNA, 19 nt, Artificial Sequence
  Description of Artificial Sequence: Synthetic oligonucleotide
cgccgcccagccugcucgu

SEQ ID NO: 2048787 - RNA, 19 nt, Artificial Sequence
  Description of Artificial Sequence: Synthetic oligonucleotide
uuuauauuuagacaugucc

SEQ ID NO: 2048788 - RNA, 19 nt, Artificial Sequence
  Description of Artificial Sequence: Synthetic oligonucleotide
aaauuagcaaaucuucccg

SEQ ID NO: 2048789 - RNA, 19 nt, Artificial Sequence
  Description of Artificial Sequence: Synthetic oligonucleotide
aacuguaacaucuguuucc

SEQ ID NO: 2048790 - RNA, 19 nt, Artificial Sequence
  Description of Artificial Sequence: Synthetic oligonucleotide
agaauuuuccuuuccaacc

SEQ ID NO: 2048791 - RNA, 19 nt, Artificial Sequence
  Description of Artificial Sequence: Synthetic oligonucleotide
ucaaacuaaaauuucauac

SEQ ID NO: 2048792 - RNA, 19 nt, Artificial Sequence
  Description of Artificial Sequence: Synthetic oligonucleotide
auuuauauggcacagggca

SEQ ID NO: 2048793 - RNA, 19 nt, Artificial Sequence
  Description of Artificial Sequence: Synthetic oligonucleotide
ucuccauucaauaugcuag

SEQ ID NO: 2048794 - RNA, 19 nt, Artificial Sequence
  Description of Artificial Sequence: Synthetic oligonucleotide
acuaaauucuucuauccac

SEQ ID NO: 2048795 - RNA, 19 nt, Artificial Sequence
  Description of Artificial Sequence: Synthetic oligonucleotide
uuauucaguaaaauuagca

SEQ ID NO: 2048796 - RNA, 19 nt, Artificial Sequence
  Description of Artificial Sequence: Synthetic oligonucleotide
cucucuauuaccuucaaag

SEQ ID NO: 2048797 - RNA, 19 nt, Artificial Sequence
  Description of Artificial Sequence: Synthetic oligonucleotide
aagcuccuuauuuucaagc

SEQ ID NO: 2048798 - RNA, 19 nt, Artificial Sequence
  Description of Artificial Sequence: Synthetic oligonucleotide
ucaaucauuaacuguaaca

SEQ ID NO: 2048799 - RNA, 19 nt, Artificial Sequence
  Description of Artificial Sequence: Synthetic oligonucleotide
acacuaaauucuucuaucc

SEQ ID NO: 2048800 - RNA, 19 nt, Artificial Sequence
  Description of Artificial Sequence: Synthetic oligonucleotide
gaauggacacaucuuaggg

SEQ ID NO: 2048801 - RNA, 19 nt, Artificial Sequence
  Description of Artificial Sequence: Synthetic oligonucleotide
uggacaguaauucucgaag

SEQ ID NO: 2048802 - RNA, 19 nt, Artificial Sequence
  Description of Artificial Sequence: Synthetic oligonucleotide
uuagacauguccuucacgu

SEQ ID NO: 2048803 - RNA, 19 nt, Artificial Sequence
  Description of Artificial Sequence: Synthetic oligonucleotide
acuaaaauuucauacacua

SEQ ID NO: 2048804 - RNA, 19 nt, Artificial Sequence
  Description of Artificial Sequence: Synthetic oligonucleotide
uauucaguaaaauuagcaa

SEQ ID NO: 2048805 - RNA, 19 nt, Artificial Sequence
  Description of Artificial Sequence: Synthetic oligonucleotide
ucuauuaccuucaaagcau

SEQ ID NO: 2048806 - RNA, 19 nt, Artificial Sequence
  Description of Artificial Sequence: Synthetic oligonucleotide
agacauguccuucacgucg

SEQ ID NO: 2048807 - RNA, 19 nt, Artificial Sequence
  Description of Artificial Sequence: Synthetic oligonucleotide
aauuuauauggcacagggc

SEQ ID NO: 2048808 - RNA, 19 nt, Artificial Sequence
  Description of Artificial Sequence: Synthetic oligonucleotide
cuucaaagcauuaacacca

SEQ ID NO: 2048809 - RNA, 19 nt, Artificial Sequence
  Description of Artificial Sequence: Synthetic oligonucleotide
uuagcaaauauaauuucaa

SEQ ID NO: 2048810 - RNA, 19 nt, Artificial Sequence
  Description of Artificial Sequence: Synthetic oligonucleotide
ugaauggacacaucuuagg

SEQ ID NO: 2048811 - RNA, 19 nt, Artificial Sequence
  Description of Artificial Sequence: Synthetic oligonucleotide
uagucaaucauuaacugua

SEQ ID NO: 2048812 - RNA, 19 nt, Artificial Sequence
  Description of Artificial Sequence: Synthetic oligonucleotide
agagacucacugcugaugg

SEQ ID NO: 2048813 - RNA, 19 nt, Artificial Sequence
  Description of Artificial Sequence: Synthetic oligonucleotide
auccucuugauacugcucg

SEQ ID NO: 2048814 - RNA, 19 nt, Artificial Sequence
  Description of Artificial Sequence: Synthetic oligonucleotide
aauggacacaucuuaggga

SEQ ID NO: 2048815 - RNA, 19 nt, Artificial Sequence
  Description of Artificial Sequence: Synthetic oligonucleotide
ugagguuuauauuuagaca

SEQ ID NO: 2048816 - RNA, 19 nt, Artificial Sequence
  Description of Artificial Sequence: Synthetic oligonucleotide
aucaacacugaaucaaguc

SEQ ID NO: 2048817 - RNA, 19 nt, Artificial Sequence
  Description of Artificial Sequence: Synthetic oligonucleotide
cuuuccaaccugaagagac

SEQ ID NO: 2048818 - RNA, 19 nt, Artificial Sequence
  Description of Artificial Sequence: Synthetic oligonucleotide
aaucucugcagagugggac

SEQ ID NO: 2048819 - RNA, 19 nt, Artificial Sequence
  Description of Artificial Sequence: Synthetic oligonucleotide
gaucgugcagcucauagug

SEQ ID NO: 2048820 - RNA, 19 nt, Artificial Sequence
  Description of Artificial Sequence: Synthetic oligonucleotide
auucaguaaaauuagcaaa

SEQ ID NO: 2048821 - RNA, 19 nt, Artificial Sequence
  Description of Artificial Sequence: Synthetic oligonucleotide
uguaacaucuguuuccggu

SEQ ID NO: 2048822 - RNA, 19 nt, Artificial Sequence
  Description of Artificial Sequence: Synthetic oligonucleotide
uuaacuguaacaucuguuu

SEQ ID NO: 2048823 - RNA, 19 nt, Artificial Sequence
  Description of Artificial Sequence: Synthetic oligonucleotide
uuuagacauguccuucacg

SEQ ID NO: 2048824 - RNA, 19 nt, Artificial Sequence
  Description of Artificial Sequence: Synthetic oligonucleotide
uaugcuagcucucuauuac

SEQ ID NO: 2048825 - RNA, 19 nt, Artificial Sequence
  Description of Artificial Sequence: Synthetic oligonucleotide
ucuaaucuggguauucucu

SEQ ID NO: 2048826 - RNA, 19 nt, Artificial Sequence
  Description of Artificial Sequence: Synthetic oligonucleotide
aagugaagaacuuccuucu

SEQ ID NO: 2048827 - RNA, 19 nt, Artificial Sequence
  Description of Artificial Sequence: Synthetic oligonucleotide
aauuagcaaaucuucccga

SEQ ID NO: 2048828 - RNA, 19 nt, Artificial Sequence
  Description of Artificial Sequence: Synthetic oligonucleotide
aucauuaacuguaacaucu

SEQ ID NO: 2048829 - RNA, 19 nt, Artificial Sequence
  Description of Artificial Sequence: Synthetic oligonucleotide
ugaucaacacugaaucaag

SEQ ID NO: 2048830 - RNA, 19 nt, Artificial Sequence
  Description of Artificial Sequence: Synthetic oligonucleotide
aacugauuaucauccaccu

SEQ ID NO: 2048831 - RNA, 19 nt, Artificial Sequence
  Description of Artificial Sequence: Synthetic oligonucleotide
uuucaaacuaaaauuucau

SEQ ID NO: 2048832 - RNA, 19 nt, Artificial Sequence
  Description of Artificial Sequence: Synthetic oligonucleotide
uucucgaucgugcagcuca

SEQ ID NO: 2048833 - RNA, 19 nt, Artificial Sequence
  Description of Artificial Sequence: Synthetic oligonucleotide
ucuauccacugcaagagac

SEQ ID NO: 2048834 - RNA, 19 nt, Artificial Sequence
  Description of Artificial Sequence: Synthetic oligonucleotide
acaucuuagggagagacag

SEQ ID NO: 2048835 - RNA, 19 nt, Artificial Sequence
  Description of Artificial Sequence: Synthetic oligonucleotide
cuggguauucucuugagac

SEQ ID NO: 2048836 - RNA, 19 nt, Artificial Sequence
  Description of Artificial Sequence: Synthetic oligonucleotide
cugauuaucauccaccuga

SEQ ID NO: 2048837 - RNA, 19 nt, Artificial Sequence
  Description of Artificial Sequence: Synthetic oligonucleotide
caguaauucucgaagcucc

SEQ ID NO: 2048838 - RNA, 19 nt, Artificial Sequence
  Description of Artificial Sequence: Synthetic oligonucleotide
aauuccgaauugcuagcuc

SEQ ID NO: 2048839 - RNA, 19 nt, Artificial Sequence
  Description of Artificial Sequence: Synthetic oligonucleotide
uccaccaacgacucggccg

SEQ ID NO: 2048840 - RNA, 19 nt, Artificial Sequence
  Description of Artificial Sequence: Synthetic oligonucleotide
ucuguguguggcaauuccg

SEQ ID NO: 2048841 - RNA, 19 nt, Artificial Sequence
  Description of Artificial Sequence: Synthetic oligonucleotide
auuauucaguaaaauuagc

SEQ ID NO: 2048842 - RNA, 19 nt, Artificial Sequence
  Description of Artificial Sequence: Synthetic oligonucleotide
uuagacacauuauucagua

SEQ ID NO: 2048843 - RNA, 19 nt, Artificial Sequence
  Description of Artificial Sequence: Synthetic oligonucleotide
ugacuuucaaucucugcag

SEQ ID NO: 2048844 - RNA, 19 nt, Artificial Sequence
  Description of Artificial Sequence: Synthetic oligonucleotide
ugaagagacucacugcuga

SEQ ID NO: 2048845 - RNA, 19 nt, Artificial Sequence
  Description of Artificial Sequence: Synthetic oligonucleotide
agacacauuauucaguaaa

SEQ ID NO: 2048846 - RNA, 19 nt, Artificial Sequence
  Description of Artificial Sequence: Synthetic oligonucleotide
uccugaaucuugcaaaacu

SEQ ID NO: 2048847 - RNA, 19 nt, Artificial Sequence
  Description of Artificial Sequence: Synthetic oligonucleotide
ucuugagacagcagaaugu

SEQ ID NO: 2048848 - RNA, 19 nt, Artificial Sequence
  Description of Artificial Sequence: Synthetic oligonucleotide
ugcaaaacugauuaucauc

SEQ ID NO: 2048849 - RNA, 19 nt, Artificial Sequence
  Description of Artificial Sequence: Synthetic oligonucleotide
ucaugaugaguuccaaagc

SEQ ID NO: 2048850 - RNA, 19 nt, Artificial Sequence
  Description of Artificial Sequence: Synthetic oligonucleotide
gagacauuaacaucuucac

SEQ ID NO: 2048851 - RNA, 19 nt, Artificial Sequence
  Description of Artificial Sequence: Synthetic oligonucleotide
cucugaucaacacugaauc

SEQ ID NO: 2048852 - RNA, 19 nt, Artificial Sequence
  Description of Artificial Sequence: Synthetic oligonucleotide
cucauaguggccgaggacg

SEQ ID NO: 2048853 - RNA, 19 nt, Artificial Sequence
  Description of Artificial Sequence: Synthetic oligonucleotide
auuagcaaaucuucccgag

SEQ ID NO: 2048854 - RNA, 19 nt, Artificial Sequence
  Description of Artificial Sequence: Synthetic oligonucleotide
ugaagaacuuccuucucca

SEQ ID NO: 2048855 - RNA, 19 nt, Artificial Sequence
  Description of Artificial Sequence: Synthetic oligonucleotide
uauuuagacauguccuuca

SEQ ID NO: 2048856 - RNA, 19 nt, Artificial Sequence
  Description of Artificial Sequence: Synthetic oligonucleotide
ugcagagugggacugguga

SEQ ID NO: 2048857 - RNA, 19 nt, Artificial Sequence
  Description of Artificial Sequence: Synthetic oligonucleotide
auuuagacauguccuucac

SEQ ID NO: 2048858 - RNA, 19 nt, Artificial Sequence
  Description of Artificial Sequence: Synthetic oligonucleotide
aagagacauuaacaucuuc

SEQ ID NO: 2048859 - RNA, 19 nt, Artificial Sequence
  Description of Artificial Sequence: Synthetic oligonucleotide
ucaguuauuugaugggcug

SEQ ID NO: 2048860 - RNA, 19 nt, Artificial Sequence
  Description of Artificial Sequence: Synthetic oligonucleotide
ugcugcaagucucuaaucu

SEQ ID NO: 2048861 - RNA, 19 nt, Artificial Sequence
  Description of Artificial Sequence: Synthetic oligonucleotide
ucuucacacaaagugaaga

SEQ ID NO: 2048862 - RNA, 19 nt, Artificial Sequence
  Description of Artificial Sequence: Synthetic oligonucleotide
cuuagggagagacagucac

SEQ ID NO: 2048863 - RNA, 19 nt, Artificial Sequence
  Description of Artificial Sequence: Synthetic oligonucleotide
aucuucucgaucgugcagc

SEQ ID NO: 2048864 - RNA, 19 nt, Artificial Sequence
  Description of Artificial Sequence: Synthetic oligonucleotide
auucgcucagcccuucccc

SEQ ID NO: 2048865 - RNA, 19 nt, Artificial Sequence
  Description of Artificial Sequence: Synthetic oligonucleotide
cugcaagucucuaaucugg

SEQ ID NO: 2048866 - RNA, 19 nt, Artificial Sequence
  Description of Artificial Sequence: Synthetic oligonucleotide
ugaaucuugcaaaacugau

SEQ ID NO: 2048867 - RNA, 19 nt, Artificial Sequence
  Description of Artificial Sequence: Synthetic oligonucleotide
uucaguuauuugaugggcu

SEQ ID NO: 2048868 - RNA, 19 nt, Artificial Sequence
  Description of Artificial Sequence: Synthetic oligonucleotide
ggcaauuccgaauugcuag

SEQ ID NO: 2048869 - RNA, 19 nt, Artificial Sequence
  Description of Artificial Sequence: Synthetic oligonucleotide
cuugcaaaacugauuauca

SEQ ID NO: 2048870 - RNA, 19 nt, Artificial Sequence
  Description of Artificial Sequence: Synthetic oligonucleotide
uuuauauggcacagggcac

SEQ ID NO: 2048871 - RNA, 19 nt, Artificial Sequence
  Description of Artificial Sequence: Synthetic oligonucleotide
aagucucuaaucuggguau

SEQ ID NO: 2048872 - RNA, 19 nt, Artificial Sequence
  Description of Artificial Sequence: Synthetic oligonucleotide
aggacacuugaauggacac

SEQ ID NO: 2048873 - RNA, 19 nt, Artificial Sequence
  Description of Artificial Sequence: Synthetic oligonucleotide
aacugcuuuucucaucacu

SEQ ID NO: 2048874 - RNA, 19 nt, Artificial Sequence
  Description of Artificial Sequence: Synthetic oligonucleotide
ucauuaacuguaacaucug

SEQ ID NO: 2048875 - RNA, 19 nt, Artificial Sequence
  Description of Artificial Sequence: Synthetic oligonucleotide
agcuuucagaacugguucg

SEQ ID NO: 2048876 - RNA, 19 nt, Artificial Sequence
  Description of Artificial Sequence: Synthetic oligonucleotide
uuauuugaugggcugggaa

SEQ ID NO: 2048877 - RNA, 19 nt, Artificial Sequence
  Description of Artificial Sequence: Synthetic oligonucleotide
acuguaacaucuguuuccg

SEQ ID NO: 2048878 - RNA, 19 nt, Artificial Sequence
  Description of Artificial Sequence: Synthetic oligonucleotide
ugugagguuuauauuuaga

SEQ ID NO: 2048879 - RNA, 19 nt, Artificial Sequence
  Description of Artificial Sequence: Synthetic oligonucleotide
uucaaacuaaaauuucaua

SEQ ID NO: 2048880 - RNA, 19 nt, Artificial Sequence
  Description of Artificial Sequence: Synthetic oligonucleotide
auuccgaauugcuagcuca

SEQ ID NO: 2048881 - RNA, 19 nt, Artificial Sequence
  Description of Artificial Sequence: Synthetic oligonucleotide
aucuuagggagagacaguc

SEQ ID NO: 2048882 - RNA, 19 nt, Artificial Sequence
  Description of Artificial Sequence: Synthetic oligonucleotide
agagacauuaacaucuuca

SEQ ID NO: 2048883 - RNA, 19 nt, Artificial Sequence
  Description of Artificial Sequence: Synthetic oligonucleotide
ucaagucugcagcaggaca

SEQ ID NO: 2048884 - RNA, 19 nt, Artificial Sequence
  Description of Artificial Sequence: Synthetic oligonucleotide
aauaugcuagcucucuauu

SEQ ID NO: 2048885 - RNA, 19 nt, Artificial Sequence
  Description of Artificial Sequence: Synthetic oligonucleotide
ucuugcaaaacugauuauc

SEQ ID NO: 2048886 - RNA, 19 nt, Artificial Sequence
  Description of Artificial Sequence: Synthetic oligonucleotide
augcuagcucucuauuacc

SEQ ID NO: 2048887 - RNA, 19 nt, Artificial Sequence
  Description of Artificial Sequence: Synthetic oligonucleotide
uccuuuccaaccugaagag

SEQ ID NO: 2048888 - RNA, 19 nt, Artificial Sequence
  Description of Artificial Sequence: Synthetic oligonucleotide
ugaugaguuccaaagcauc

SEQ ID NO: 2048889 - RNA, 19 nt, Artificial Sequence
  Description of Artificial Sequence: Synthetic oligonucleotide
auacacuaaauucuucuau

SEQ ID NO: 2048890 - RNA, 19 nt, Artificial Sequence
  Description of Artificial Sequence: Synthetic oligonucleotide
ugaguuccaaagcauccug

SEQ ID NO: 2048891 - RNA, 19 nt, Artificial Sequence
  Description of Artificial Sequence: Synthetic oligonucleotide
acaguaauucucgaagcuc

SEQ ID NO: 2048892 - RNA, 19 nt, Artificial Sequence
  Description of Artificial Sequence: Synthetic oligonucleotide
uguguggcaauuccgaauu

SEQ ID NO: 2048893 - RNA, 19 nt, Artificial Sequence
  Description of Artificial Sequence: Synthetic oligonucleotide
acugguucgguauccacug

SEQ ID NO: 2048894 - RNA, 19 nt, Artificial Sequence
  Description of Artificial Sequence: Synthetic oligonucleotide
ugguccaccaacgacucgg

SEQ ID NO: 2048895 - RNA, 19 nt, Artificial Sequence
  Description of Artificial Sequence: Synthetic oligonucleotide
acugcaagagacauuaaca

SEQ ID NO: 2048896 - RNA, 19 nt, Artificial Sequence
  Description of Artificial Sequence: Synthetic oligonucleotide
acuggugagcuuucagaac

SEQ ID NO: 2048897 - RNA, 19 nt, Artificial Sequence
  Description of Artificial Sequence: Synthetic oligonucleotide
uaacuguaacaucuguuuc

SEQ ID NO: 2048898 - RNA, 19 nt, Artificial Sequence
  Description of Artificial Sequence: Synthetic oligonucleotide
ucugaucaacacugaauca

SEQ ID NO: 2048899 - RNA, 19 nt, Artificial Sequence
  Description of Artificial Sequence: Synthetic oligonucleotide
cuucuauccacugcaagag

SEQ ID NO: 2048900 - RNA, 19 nt, Artificial Sequence
  Description of Artificial Sequence: Synthetic oligonucleotide
aguuauuugaugggcuggg

SEQ ID NO: 2048901 - RNA, 19 nt, Artificial Sequence
  Description of Artificial Sequence: Synthetic oligonucleotide
aacuaaaauuucauacacu

SEQ ID NO: 2048902 - RNA, 19 nt, Artificial Sequence
  Description of Artificial Sequence: Synthetic oligonucleotide
uucagaacugguucgguau

SEQ ID NO: 2048903 - RNA, 19 nt, Artificial Sequence
  Description of Artificial Sequence: Synthetic oligonucleotide
aauugcuagcucaucccuc

SEQ ID NO: 2048904 - RNA, 19 nt, Artificial Sequence
  Description of Artificial Sequence: Synthetic oligonucleotide
agaauuuauauggcacagg

SEQ ID NO: 2048905 - RNA, 19 nt, Artificial Sequence
  Description of Artificial Sequence: Synthetic oligonucleotide
aauucucgaagcuccuuau

SEQ ID NO: 2048906 - RNA, 19 nt, Artificial Sequence
  Description of Artificial Sequence: Synthetic oligonucleotide
auugcuagcucaucccucu

SEQ ID NO: 2048907 - RNA, 19 nt, Artificial Sequence
  Description of Artificial Sequence: Synthetic oligonucleotide
gaagcuccuuauuuucaag

SEQ ID NO: 2048908 - RNA, 19 nt, Artificial Sequence
  Description of Artificial Sequence: Synthetic oligonucleotide
agacucacugcugauggac

SEQ ID NO: 2048909 - RNA, 19 nt, Artificial Sequence
  Description of Artificial Sequence: Synthetic oligonucleotide
agacauuaacaucuucaca

SEQ ID NO: 2048910 - RNA, 19 nt, Artificial Sequence
  Description of Artificial Sequence: Synthetic oligonucleotide
uuggcgucggucaggaucu

SEQ ID NO: 2048911 - RNA, 19 nt, Artificial Sequence
  Description of Artificial Sequence: Synthetic oligonucleotide
aaacccacagcucucuguu

SEQ ID NO: 2048912 - RNA, 19 nt, Artificial Sequence
  Description of Artificial Sequence: Synthetic oligonucleotide
uacuugcucaugaugaguu

SEQ ID NO: 2048913 - RNA, 19 nt, Artificial Sequence
  Description of Artificial Sequence: Synthetic oligonucleotide
cuagcucucuauuaccuuc

SEQ ID NO: 2048914 - RNA, 19 nt, Artificial Sequence
  Description of Artificial Sequence: Synthetic oligonucleotide
aucgugcucgcgcagccgc

SEQ ID NO: 2048915 - RNA, 19 nt, Artificial Sequence
  Description of Artificial Sequence: Synthetic oligonucleotide
caagcucuaguugagcuag

SEQ ID NO: 2048916 - RNA, 19 nt, Artificial Sequence
  Description of Artificial Sequence: Synthetic oligonucleotide
cuugcucaugaugaguucc

SEQ ID NO: 2048917 - RNA, 19 nt, Artificial Sequence
  Description of Artificial Sequence: Synthetic oligonucleotide
uaacaucuguuuccgguac

SEQ ID NO: 2048918 - RNA, 19 nt, Artificial Sequence
  Description of Artificial Sequence: Synthetic oligonucleotide
ugaaucaagucugcagcag

SEQ ID NO: 2048919 - RNA, 19 nt, Artificial Sequence
  Description of Artificial Sequence: Synthetic oligonucleotide
uguccuucacgucgggugc

SEQ ID NO: 2048920 - RNA, 19 nt, Artificial Sequence
  Description of Artificial Sequence: Synthetic oligonucleotide
cuugagacagcagaaugug

SEQ ID NO: 2048921 - RNA, 19 nt, Artificial Sequence
  Description of Artificial Sequence: Synthetic oligonucleotide
uucacacaaagugaagaac

SEQ ID NO: 2048922 - RNA, 19 nt, Artificial Sequence
  Description of Artificial Sequence: Synthetic oligonucleotide
uucaauaugcuagcucucu

SEQ ID NO: 2048923 - RNA, 19 nt, Artificial Sequence
  Description of Artificial Sequence: Synthetic oligonucleotide
uguggcaauuccgaauugc

SEQ ID NO: 2048924 - RNA, 19 nt, Artificial Sequence
  Description of Artificial Sequence: Synthetic oligonucleotide
augugagguuuauauuuag

SEQ ID NO: 2048925 - RNA, 19 nt, Artificial Sequence
  Description of Artificial Sequence: Synthetic oligonucleotide
cacagauucugucaaucug

SEQ ID NO: 2048926 - RNA, 19 nt, Artificial Sequence
  Description of Artificial Sequence: Synthetic oligonucleotide
uucuccauucaauaugcua

SEQ ID NO: 2048927 - RNA, 19 nt, Artificial Sequence
  Description of Artificial Sequence: Synthetic oligonucleotide
ugucgggccaucugcagcc

SEQ ID NO: 2048928 - RNA, 19 nt, Artificial Sequence
  Description of Artificial Sequence: Synthetic oligonucleotide
cuccauucaauaugcuagc

SEQ ID NO: 2048929 - RNA, 19 nt, Artificial Sequence
  Description of Artificial Sequence: Synthetic oligonucleotide
auacugcucgggcagcacg

SEQ ID NO: 2048930 - RNA, 19 nt, Artificial Sequence
  Description of Artificial Sequence: Synthetic oligonucleotide
cagaauuuauauggcacag

SEQ ID NO: 2048931 - RNA, 19 nt, Artificial Sequence
  Description of Artificial Sequence: Synthetic oligonucleotide
cuucacgucgggugcaucc

SEQ ID NO: 2048932 - RNA, 19 nt, Artificial Sequence
  Description of Artificial Sequence: Synthetic oligonucleotide
ugcugauggacaguaauuc

SEQ ID NO: 2048933 - RNA, 19 nt, Artificial Sequence
  Description of Artificial Sequence: Synthetic oligonucleotide
ccuucaaagcauuaacacc

SEQ ID NO: 2048934 - RNA, 19 nt, Artificial Sequence
  Description of Artificial Sequence: Synthetic oligonucleotide
acugcugauggacaguaau

SEQ ID NO: 2048935 - RNA, 19 nt, Artificial Sequence
  Description of Artificial Sequence: Synthetic oligonucleotide
guucaguuauuugaugggc

SEQ ID NO: 2048936 - RNA, 19 nt, Artificial Sequence
  Description of Artificial Sequence: Synthetic oligonucleotide
agcauuaacaccaggcaga

SEQ ID NO: 2048937 - RNA, 19 nt, Artificial Sequence
  Description of Artificial Sequence: Synthetic oligonucleotide
uaacaucuucacacaaagu

SEQ ID NO: 2048938 - RNA, 19 nt, Artificial Sequence
  Description of Artificial Sequence: Synthetic oligonucleotide
uuugaugggcugggaagcg

SEQ ID NO: 2048939 - RNA, 19 nt, Artificial Sequence
  Description of Artificial Sequence: Synthetic oligonucleotide
uuuccaaccugaagagacu

SEQ ID NO: 2048940 - RNA, 19 nt, Artificial Sequence
  Description of Artificial Sequence: Synthetic oligonucleotide
acagauucugucaaucuga

SEQ ID NO: 2048941 - RNA, 19 nt, Artificial Sequence
  Description of Artificial Sequence: Synthetic oligonucleotide
ucagcgauucgcucagccc

SEQ ID NO: 2048942 - RNA, 19 nt, Artificial Sequence
  Description of Artificial Sequence: Synthetic oligonucleotide
uuaacaccaggcagaauuu

SEQ ID NO: 2048943 - RNA, 19 nt, Artificial Sequence
  Description of Artificial Sequence: Synthetic oligonucleotide
cuugaauggacacaucuua

SEQ ID NO: 2048944 - RNA, 19 nt, Artificial Sequence
  Description of Artificial Sequence: Synthetic oligonucleotide
caggcagaauuuauauggc

SEQ ID NO: 2048945 - RNA, 19 nt, Artificial Sequence
  Description of Artificial Sequence: Synthetic oligonucleotide
ugguaugugugugugugug

SEQ ID NO: 2048946 - RNA, 19 nt, Artificial Sequence
  Description of Artificial Sequence: Synthetic oligonucleotide
gaaagcugguaugugugug

SEQ ID NO: 2048947 - RNA, 19 nt, Artificial Sequence
  Description of Artificial Sequence: Synthetic oligonucleotide
uugagacagcagaauguga

SEQ ID NO: 2048948 - RNA, 19 nt, Artificial Sequence
  Description of Artificial Sequence: Synthetic oligonucleotide
ucuuagggagagacaguca

SEQ ID NO: 2048949 - RNA, 19 nt, Artificial Sequence
  Description of Artificial Sequence: Synthetic oligonucleotide
auuaccuucaaagcauuaa

SEQ ID NO: 2048950 - RNA, 19 nt, Artificial Sequence
  Description of Artificial Sequence: Synthetic oligonucleotide
aucccucugaucaacacug

SEQ ID NO: 2048951 - RNA, 19 nt, Artificial Sequence
  Description of Artificial Sequence: Synthetic oligonucleotide
acugauuaucauccaccug

SEQ ID NO: 2048952 - RNA, 19 nt, Artificial Sequence
  Description of Artificial Sequence: Synthetic oligonucleotide
gauucgcucagcccuuccc

SEQ ID NO: 2048953 - RNA, 19 nt, Artificial Sequence
  Description of Artificial Sequence: Synthetic oligonucleotide
uuagggagagacagucacu

SEQ ID NO: 2048954 - RNA, 19 nt, Artificial Sequence
  Description of Artificial Sequence: Synthetic oligonucleotide
ugguucgguauccacugcu

SEQ ID NO: 2048955 - RNA, 19 nt, Artificial Sequence
  Description of Artificial Sequence: Synthetic oligonucleotide
aggcagaauuuauauggca

SEQ ID NO: 2048956 - RNA, 19 nt, Artificial Sequence
  Description of Artificial Sequence: Synthetic oligonucleotide
uagcucucuauuaccuuca

SEQ ID NO: 2048957 - RNA, 19 nt, Artificial Sequence
  Description of Artificial Sequence: Synthetic oligonucleotide
gugugugugugucugugug

SEQ ID NO: 2048958 - RNA, 19 nt, Artificial Sequence
  Description of Artificial Sequence: Synthetic oligonucleotide
cagaaugugagguuuauau

SEQ ID NO: 2048959 - RNA, 19 nt, Artificial Sequence
  Description of Artificial Sequence: Synthetic oligonucleotide
guaugugugugugugugug

SEQ ID NO: 2048960 - RNA, 19 nt, Artificial Sequence
  Description of Artificial Sequence: Synthetic oligonucleotide
uugucgggccaucugcagc

SEQ ID NO: 2048961 - RNA, 19 nt, Artificial Sequence
  Description of Artificial Sequence: Synthetic oligonucleotide
uuucagaacugguucggua

SEQ ID NO: 2048962 - RNA, 19 nt, Artificial Sequence
  Description of Artificial Sequence: Synthetic oligonucleotide
ucaauaugcuagcucucua

SEQ ID NO: 2048963 - RNA, 19 nt, Artificial Sequence
  Description of Artificial Sequence: Synthetic oligonucleotide
ugugugugucugugugugg

SEQ ID NO: 2048964 - RNA, 19 nt, Artificial Sequence
  Description of Artificial Sequence: Synthetic oligonucleotide
ggacaguaauucucgaagc

SEQ ID NO: 2048965 - RNA, 19 nt, Artificial Sequence
  Description of Artificial Sequence: Synthetic oligonucleotide
auaugcuagcucucuauua

SEQ ID NO: 2048966 - RNA, 19 nt, Artificial Sequence
  Description of Artificial Sequence: Synthetic oligonucleotide
ucucuaaucuggguauucu

SEQ ID NO: 2048967 - RNA, 19 nt, Artificial Sequence
  Description of Artificial Sequence: Synthetic oligonucleotide
cagauucugucaaucugac

SEQ ID NO: 2048968 - RNA, 19 nt, Artificial Sequence
  Description of Artificial Sequence: Synthetic oligonucleotide
caguuauuugaugggcugg

SEQ ID NO: 2048969 - RNA, 19 nt, Artificial Sequence
  Description of Artificial Sequence: Synthetic oligonucleotide
cucuaaucuggguauucuc

SEQ ID NO: 2048970 - RNA, 19 nt, Artificial Sequence
  Description of Artificial Sequence: Synthetic oligonucleotide
aagcgggauccacagaauu

SEQ ID NO: 2048971 - RNA, 19 nt, Artificial Sequence
  Description of Artificial Sequence: Synthetic oligonucleotide
uauuaccuucaaagcauua

SEQ ID NO: 2048972 - RNA, 19 nt, Artificial Sequence
  Description of Artificial Sequence: Synthetic oligonucleotide
ugcuagcucaucccucuga

SEQ ID NO: 2048973 - RNA, 19 nt, Artificial Sequence
  Description of Artificial Sequence: Synthetic oligonucleotide
ucaagcucuaguugagcua

SEQ ID NO: 2048974 - RNA, 19 nt, Artificial Sequence
  Description of Artificial Sequence: Synthetic oligonucleotide
ugugugugugucugugugu

SEQ ID NO: 2048975 - RNA, 19 nt, Artificial Sequence
  Description of Artificial Sequence: Synthetic oligonucleotide
cucagcgauucgcucagcc

SEQ ID NO: 2048976 - RNA, 19 nt, Artificial Sequence
  Description of Artificial Sequence: Synthetic oligonucleotide
gucaaucauuaacuguaac

SEQ ID NO: 2048977 - RNA, 19 nt, Artificial Sequence
  Description of Artificial Sequence: Synthetic oligonucleotide
uccaaccugaagagacuca

SEQ ID NO: 2048978 - RNA, 19 nt, Artificial Sequence
  Description of Artificial Sequence: Synthetic oligonucleotide
aucuggguauucucuugag

SEQ ID NO: 2048979 - RNA, 19 nt, Artificial Sequence
  Description of Artificial Sequence: Synthetic oligonucleotide
auggacaguaauucucgaa

SEQ ID NO: 2048980 - RNA, 19 nt, Artificial Sequence
  Description of Artificial Sequence: Synthetic oligonucleotide
ucaucccucugaucaacac

SEQ ID NO: 2048981 - RNA, 19 nt, Artificial Sequence
  Description of Artificial Sequence: Synthetic oligonucleotide
cugaagagacucacugcug

SEQ ID NO: 2048982 - RNA, 19 nt, Artificial Sequence
  Description of Artificial Sequence: Synthetic oligonucleotide
auucugucaaucugacuuu

SEQ ID NO: 2048983 - RNA, 19 nt, Artificial Sequence
  Description of Artificial Sequence: Synthetic oligonucleotide
uaugugugugugugugugu

SEQ ID NO: 2048984 - RNA, 19 nt, Artificial Sequence
  Description of Artificial Sequence: Synthetic oligonucleotide
gcagaauuuauauggcaca

SEQ ID NO: 2048985 - RNA, 19 nt, Artificial Sequence
  Description of Artificial Sequence: Synthetic oligonucleotide
cugaucaacacugaaucaa

SEQ ID NO: 2048986 - RNA, 19 nt, Artificial Sequence
  Description of Artificial Sequence: Synthetic oligonucleotide
uggcaauuccgaauugcua

SEQ ID NO: 2048987 - RNA, 19 nt, Artificial Sequence
  Description of Artificial Sequence: Synthetic oligonucleotide
uucgguauccacugcuuuu

SEQ ID NO: 2048988 - RNA, 19 nt, Artificial Sequence
  Description of Artificial Sequence: Synthetic oligonucleotide
gauggacaguaauucucga

SEQ ID NO: 2048989 - RNA, 19 nt, Artificial Sequence
  Description of Artificial Sequence: Synthetic oligonucleotide
aacuuccuucuccauucaa

SEQ ID NO: 2048990 - RNA, 19 nt, Artificial Sequence
  Description of Artificial Sequence: Synthetic oligonucleotide
augugugugugugugugug

SEQ ID NO: 2048991 - RNA, 19 nt, Artificial Sequence
  Description of Artificial Sequence: Synthetic oligonucleotide
gugcagcucauaguggccg

SEQ ID NO: 2048992 - RNA, 19 nt, Artificial Sequence
  Description of Artificial Sequence: Synthetic oligonucleotide
ugugugugugugucugugu

SEQ ID NO: 2048993 - RNA, 19 nt, Artificial Sequence
  Description of Artificial Sequence: Synthetic oligonucleotide
gaauugcuagcucaucccu

SEQ ID NO: 2048994 - RNA, 19 nt, Artificial Sequence
  Description of Artificial Sequence: Synthetic oligonucleotide
gaacugguucgguauccac

SEQ ID NO: 2048995 - RNA, 19 nt, Artificial Sequence
  Description of Artificial Sequence: Synthetic oligonucleotide
guauucucuugagacagca

SEQ ID NO: 2048996 - RNA, 19 nt, Artificial Sequence
  Description of Artificial Sequence: Synthetic oligonucleotide
agguuuauauuuagacaug

SEQ ID NO: 2048997 - RNA, 19 nt, Artificial Sequence
  Description of Artificial Sequence: Synthetic oligonucleotide
ugugugugugugugugucu

SEQ ID NO: 2048998 - RNA, 19 nt, Artificial Sequence
  Description of Artificial Sequence: Synthetic oligonucleotide
uuccgaauugcuagcucau

SEQ ID NO: 2048999 - RNA, 19 nt, Artificial Sequence
  Description of Artificial Sequence: Synthetic oligonucleotide
gugugugugucugugugug

SEQ ID NO: 2049000 - RNA, 19 nt, Artificial Sequence
  Description of Artificial Sequence: Synthetic oligonucleotide
uauauggcacagggcacug

SEQ ID NO: 2049001 - RNA, 19 nt, Artificial Sequence
  Description of Artificial Sequence: Synthetic oligonucleotide
uuccaaccugaagagacuc

SEQ ID NO: 2049002 - RNA, 19 nt, Artificial Sequence
  Description of Artificial Sequence: Synthetic oligonucleotide
gugugugucuguguguggc

SEQ ID NO: 2049003 - RNA, 19 nt, Artificial Sequence
  Description of Artificial Sequence: Synthetic oligonucleotide
ugugugugugugugugugu

SEQ ID NO: 2049004 - RNA, 19 nt, Artificial Sequence
  Description of Artificial Sequence: Synthetic oligonucleotide
uagacacauuauucaguaa

SEQ ID NO: 2049005 - RNA, 19 nt, Artificial Sequence
  Description of Artificial Sequence: Synthetic oligonucleotide
uaguggccgaggacgcccg

SEQ ID NO: 2049006 - RNA, 19 nt, Artificial Sequence
  Description of Artificial Sequence: Synthetic oligonucleotide
aagcauccugguguuccuc

SEQ ID NO: 2049007 - RNA, 19 nt, Artificial Sequence
  Description of Artificial Sequence: Synthetic oligonucleotide
cuauccacugcaagagaca

SEQ ID NO: 2049008 - RNA, 19 nt, Artificial Sequence
  Description of Artificial Sequence: Synthetic oligonucleotide
uagacauguccuucacguc

SEQ ID NO: 2049009 - RNA, 19 nt, Artificial Sequence
  Description of Artificial Sequence: Synthetic oligonucleotide
cagaacugguucgguaucc

SEQ ID NO: 2049010 - RNA, 19 nt, Artificial Sequence
  Description of Artificial Sequence: Synthetic oligonucleotide
gcaauuccgaauugcuagc

SEQ ID NO: 2049011 - RNA, 19 nt, Artificial Sequence
  Description of Artificial Sequence: Synthetic oligonucleotide
gcugguaugugugugugug

SEQ ID NO: 2049012 - RNA, 19 nt, Artificial Sequence
  Description of Artificial Sequence: Synthetic oligonucleotide
agugggacuggugagcuuu

SEQ ID NO: 2049013 - RNA, 19 nt, Artificial Sequence
  Description of Artificial Sequence: Synthetic oligonucleotide
gacugguccaccaacgacu

SEQ ID NO: 2049014 - RNA, 19 nt, Artificial Sequence
  Description of Artificial Sequence: Synthetic oligonucleotide
ucccgcaucgccgccaccc

SEQ ID NO: 2049015 - RNA, 19 nt, Artificial Sequence
  Description of Artificial Sequence: Synthetic oligonucleotide
gugugugugugugugucug

SEQ ID NO: 2049016 - RNA, 19 nt, Artificial Sequence
  Description of Artificial Sequence: Synthetic oligonucleotide
uucugucaaucugacuuuc

SEQ ID NO: 2049017 - RNA, 19 nt, Artificial Sequence
  Description of Artificial Sequence: Synthetic oligonucleotide
ugugugugugugugucugu

SEQ ID NO: 2049018 - RNA, 19 nt, Artificial Sequence
  Description of Artificial Sequence: Synthetic oligonucleotide
uccuuauuuucaagcucua

SEQ ID NO: 2049019 - RNA, 19 nt, Artificial Sequence
  Description of Artificial Sequence: Synthetic oligonucleotide
gucgggugcauccucuuga

SEQ ID NO: 2049020 - RNA, 19 nt, Artificial Sequence
  Description of Artificial Sequence: Synthetic oligonucleotide
acuuccuucuccauucaau

SEQ ID NO: 2049021 - RNA, 19 nt, Artificial Sequence
  Description of Artificial Sequence: Synthetic oligonucleotide
agagugggacuggugagcu

SEQ ID NO: 2049022 - RNA, 19 nt, Artificial Sequence
  Description of Artificial Sequence: Synthetic oligonucleotide
aucuucacacaaagugaag

SEQ ID NO: 2049023 - RNA, 19 nt, Artificial Sequence
  Description of Artificial Sequence: Synthetic oligonucleotide
aucuugcaaaacugauuau

SEQ ID NO: 2049024 - RNA, 19 nt, Artificial Sequence
  Description of Artificial Sequence: Synthetic oligonucleotide
cagagugggacuggugagc

SEQ ID NO: 2049025 - RNA, 19 nt, Artificial Sequence
  Description of Artificial Sequence: Synthetic oligonucleotide
aucgugcagcucauagugg

SEQ ID NO: 2049026 - RNA, 19 nt, Artificial Sequence
  Description of Artificial Sequence: Synthetic oligonucleotide
aguaauucucgaagcuccu

SEQ ID NO: 2049027 - RNA, 19 nt, Artificial Sequence
  Description of Artificial Sequence: Synthetic oligonucleotide
ugcagcucauaguggccga

SEQ ID NO: 2049028 - RNA, 19 nt, Artificial Sequence
  Description of Artificial Sequence: Synthetic oligonucleotide
cuguuuccgguacuugcuc

SEQ ID NO: 2049029 - RNA, 19 nt, Artificial Sequence
  Description of Artificial Sequence: Synthetic oligonucleotide
uuuccgguacuugcucaug

SEQ ID NO: 2049030 - RNA, 19 nt, Artificial Sequence
  Description of Artificial Sequence: Synthetic oligonucleotide
cgaauugcuagcucauccc

SEQ ID NO: 2049031 - RNA, 19 nt, Artificial Sequence
  Description of Artificial Sequence: Synthetic oligonucleotide
uugcuagcucaucccucug

SEQ ID NO: 2049032 - RNA, 19 nt, Artificial Sequence
  Description of Artificial Sequence: Synthetic oligonucleotide
auucucgaagcuccuuauu

SEQ ID NO: 2049033 - RNA, 19 nt, Artificial Sequence
  Description of Artificial Sequence: Synthetic oligonucleotide
cauuaacuguaacaucugu

SEQ ID NO: 2049034 - RNA, 19 nt, Artificial Sequence
  Description of Artificial Sequence: Synthetic oligonucleotide
ucccucugaucaacacuga

SEQ ID NO: 2049035 - RNA, 19 nt, Artificial Sequence
  Description of Artificial Sequence: Synthetic oligonucleotide
uccgguacuugcucaugau

SEQ ID NO: 2049036 - RNA, 19 nt, Artificial Sequence
  Description of Artificial Sequence: Synthetic oligonucleotide
gaggacgcccgcccggccc

SEQ ID NO: 2049037 - RNA, 19 nt, Artificial Sequence
  Description of Artificial Sequence: Synthetic oligonucleotide
gugugugugugugucugug

SEQ ID NO: 2049038 - RNA, 19 nt, Artificial Sequence
  Description of Artificial Sequence: Synthetic oligonucleotide
cacaucuuagggagagaca

SEQ ID NO: 2049039 - RNA, 19 nt, Artificial Sequence
  Description of Artificial Sequence: Synthetic oligonucleotide
gguuuauauuuagacaugu

SEQ ID NO: 2049040 - RNA, 19 nt, Artificial Sequence
  Description of Artificial Sequence: Synthetic oligonucleotide
cugguguuccuccaaggaa

SEQ ID NO: 2049041 - RNA, 19 nt, Artificial Sequence
  Description of Artificial Sequence: Synthetic oligonucleotide
agucaaucauuaacuguaa

SEQ ID NO: 2049042 - RNA, 19 nt, Artificial Sequence
  Description of Artificial Sequence: Synthetic oligonucleotide
gaacuuccuucuccauuca

SEQ ID NO: 2049043 - RNA, 19 nt, Artificial Sequence
  Description of Artificial Sequence: Synthetic oligonucleotide
gacucacugcugauggaca

SEQ ID NO: 2049044 - RNA, 19 nt, Artificial Sequence
  Description of Artificial Sequence: Synthetic oligonucleotide
uucacgucgggugcauccu

SEQ ID NO: 2049045 - RNA, 19 nt, Artificial Sequence
  Description of Artificial Sequence: Synthetic oligonucleotide
agaacugguucgguaucca

SEQ ID NO: 2049046 - RNA, 19 nt, Artificial Sequence
  Description of Artificial Sequence: Synthetic oligonucleotide
ugcagcgcggccgacuggu

SEQ ID NO: 2049047 - RNA, 19 nt, Artificial Sequence
  Description of Artificial Sequence: Synthetic oligonucleotide
gggauccacagaauuuucc

SEQ ID NO: 2049048 - RNA, 19 nt, Artificial Sequence
  Description of Artificial Sequence: Synthetic oligonucleotide
gaucaacacugaaucaagu

SEQ ID NO: 2049049 - RNA, 19 nt, Artificial Sequence
  Description of Artificial Sequence: Synthetic oligonucleotide
ccaccaacgacucggccgc

SEQ ID NO: 2049050 - RNA, 19 nt, Artificial Sequence
  Description of Artificial Sequence: Synthetic oligonucleotide
guguguguguguguguguc

SEQ ID NO: 2049051 - RNA, 19 nt, Artificial Sequence
  Description of Artificial Sequence: Synthetic oligonucleotide
aggacgcccgcccggcccg

SEQ ID NO: 2049052 - RNA, 19 nt, Artificial Sequence
  Description of Artificial Sequence: Synthetic oligonucleotide
agcugguaugugugugugu

SEQ ID NO: 2049053 - RNA, 19 nt, Artificial Sequence
  Description of Artificial Sequence: Synthetic oligonucleotide
aguggccgaggacgcccgc

SEQ ID NO: 2049054 - RNA, 19 nt, Artificial Sequence
  Description of Artificial Sequence: Synthetic oligonucleotide
caauaugcuagcucucuau

SEQ ID NO: 2049055 - RNA, 19 nt, Artificial Sequence
  Description of Artificial Sequence: Synthetic oligonucleotide
acacugaaucaagucugca

SEQ ID NO: 2049056 - RNA, 19 nt, Artificial Sequence
  Description of Artificial Sequence: Synthetic oligonucleotide
aacgacucggccgccgcau

SEQ ID NO: 2049057 - RNA, 19 nt, Artificial Sequence
  Description of Artificial Sequence: Synthetic oligonucleotide
ucgggccaucugcagccag

SEQ ID NO: 2049058 - RNA, 19 nt, Artificial Sequence
  Description of Artificial Sequence: Synthetic oligonucleotide
gagacucacugcugaugga

SEQ ID NO: 2049059 - RNA, 19 nt, Artificial Sequence
  Description of Artificial Sequence: Synthetic oligonucleotide
cacugaaagcugguaugug

SEQ ID NO: 2049060 - RNA, 19 nt, Artificial Sequence
  Description of Artificial Sequence: Synthetic oligonucleotide
gggacuggugagcuuucag

SEQ ID NO: 2049061 - RNA, 19 nt, Artificial Sequence
  Description of Artificial Sequence: Synthetic oligonucleotide
cagcucauaguggccgagg

SEQ ID NO: 2049062 - RNA, 19 nt, Artificial Sequence
  Description of Artificial Sequence: Synthetic oligonucleotide
agcagcgucuuggcgucgg

SEQ ID NO: 2049063 - RNA, 19 nt, Artificial Sequence
  Description of Artificial Sequence: Synthetic oligonucleotide
gcuagccucagcgauucgc

SEQ ID NO: 2049064 - RNA, 19 nt, Artificial Sequence
  Description of Artificial Sequence: Synthetic oligonucleotide
uccgaauugcuagcucauc

SEQ ID NO: 2049065 - RNA, 19 nt, Artificial Sequence
  Description of Artificial Sequence: Synthetic oligonucleotide
ugucuguguguggcaauuc

SEQ ID NO: 2049066 - RNA, 19 nt, Artificial Sequence
  Description of Artificial Sequence: Synthetic oligonucleotide
cugguucgguauccacugc

SEQ ID NO: 2049067 - RNA, 19 nt, Artificial Sequence
  Description of Artificial Sequence: Synthetic oligonucleotide
guguggcaauuccgaauug

SEQ ID NO: 2049068 - RNA, 19 nt, Artificial Sequence
  Description of Artificial Sequence: Synthetic oligonucleotide
agcagaaugugagguuuau

SEQ ID NO: 2049069 - RNA, 19 nt, Artificial Sequence
  Description of Artificial Sequence: Synthetic oligonucleotide
cucaucccucugaucaaca

SEQ ID NO: 2049070 - RNA, 19 nt, Artificial Sequence
  Description of Artificial Sequence: Synthetic oligonucleotide
cauaguggccgaggacgcc

SEQ ID NO: 2049071 - RNA, 19 nt, Artificial Sequence
  Description of Artificial Sequence: Synthetic oligonucleotide
acacuugaauggacacauc

SEQ ID NO: 2049072 - RNA, 19 nt, Artificial Sequence
  Description of Artificial Sequence: Synthetic oligonucleotide
accaacgacucggccgccg

SEQ ID NO: 2049073 - RNA, 19 nt, Artificial Sequence
  Description of Artificial Sequence: Synthetic oligonucleotide
cagcgauucgcucagcccu

SEQ ID NO: 2049074 - RNA, 19 nt, Artificial Sequence
  Description of Artificial Sequence: Synthetic oligonucleotide
cuaaucuggguauucucuu

SEQ ID NO: 2049075 - RNA, 19 nt, Artificial Sequence
  Description of Artificial Sequence: Synthetic oligonucleotide
cuagccucagcgauucgcu

SEQ ID NO: 2049076 - RNA, 19 nt, Artificial Sequence
  Description of Artificial Sequence: Synthetic oligonucleotide
gggagagacagucacuccu

SEQ ID NO: 2049077 - RNA, 19 nt, Artificial Sequence
  Description of Artificial Sequence: Synthetic oligonucleotide
ggugcagcgcggccgacug

SEQ ID NO: 2049078 - RNA, 19 nt, Artificial Sequence
  Description of Artificial Sequence: Synthetic oligonucleotide
ccuuauuuucaagcucuag

SEQ ID NO: 2049079 - RNA, 19 nt, Artificial Sequence
  Description of Artificial Sequence: Synthetic oligonucleotide
cagcgcggccgacuggucc

SEQ ID NO: 2049080 - RNA, 19 nt, Artificial Sequence
  Description of Artificial Sequence: Synthetic oligonucleotide
gcaaaucuucccgagaagu

SEQ ID NO: 2049081 - RNA, 19 nt, Artificial Sequence
  Description of Artificial Sequence: Synthetic oligonucleotide
acaccaggcagaauuuaua

SEQ ID NO: 2049082 - RNA, 19 nt, Artificial Sequence
  Description of Artificial Sequence: Synthetic oligonucleotide
agcucucuauuaccuucaa

SEQ ID NO: 2049083 - RNA, 19 nt, Artificial Sequence
  Description of Artificial Sequence: Synthetic oligonucleotide
agcgggauccacagaauuu

SEQ ID NO: 2049084 - RNA, 19 nt, Artificial Sequence
  Description of Artificial Sequence: Synthetic oligonucleotide
cucggccgccgcaucgugc

SEQ ID NO: 2049085 - RNA, 19 nt, Artificial Sequence
  Description of Artificial Sequence: Synthetic oligonucleotide
ccaaggaaacccacagcuc

SEQ ID NO: 2049086 - RNA, 19 nt, Artificial Sequence
  Description of Artificial Sequence: Synthetic oligonucleotide
gccagcauucagaaguuca

SEQ ID NO: 2049087 - RNA, 19 nt, Artificial Sequence
  Description of Artificial Sequence: Synthetic oligonucleotide
cugguccaccaacgacucg

SEQ ID NO: 2049088 - RNA, 19 nt, Artificial Sequence
  Description of Artificial Sequence: Synthetic oligonucleotide
gacagcagaaugugagguu

SEQ ID NO: 2049089 - RNA, 19 nt, Artificial Sequence
  Description of Artificial Sequence: Synthetic oligonucleotide
cugcagagugggacuggug

SEQ ID NO: 2049090 - RNA, 19 nt, Artificial Sequence
  Description of Artificial Sequence: Synthetic oligonucleotide
gccucagcgauucgcucag

SEQ ID NO: 2049091 - RNA, 19 nt, Artificial Sequence
  Description of Artificial Sequence: Synthetic oligonucleotide
ccucuugauacugcucggg

SEQ ID NO: 2049092 - RNA, 19 nt, Artificial Sequence
  Description of Artificial Sequence: Synthetic oligonucleotide
guggcaauuccgaauugcu

SEQ ID NO: 2049093 - RNA, 19 nt, Artificial Sequence
  Description of Artificial Sequence: Synthetic oligonucleotide
caucccucugaucaacacu

SEQ ID NO: 2049094 - RNA, 19 nt, Artificial Sequence
  Description of Artificial Sequence: Synthetic oligonucleotide
gccgacugguccaccaacg

SEQ ID NO: 2049095 - RNA, 19 nt, Artificial Sequence
  Description of Artificial Sequence: Synthetic oligonucleotide
gcugauggacaguaauucu

SEQ ID NO: 2049096 - RNA, 19 nt, Artificial Sequence
  Description of Artificial Sequence: Synthetic oligonucleotide
agcucuaguugagcuaguu

SEQ ID NO: 2049097 - RNA, 19 nt, Artificial Sequence
  Description of Artificial Sequence: Synthetic oligonucleotide
cuauuaccuucaaagcauu

SEQ ID NO: 2049098 - RNA, 19 nt, Artificial Sequence
  Description of Artificial Sequence: Synthetic oligonucleotide
ccgguacuugcucaugaug

SEQ ID NO: 2049099 - RNA, 19 nt, Artificial Sequence
  Description of Artificial Sequence: Synthetic oligonucleotide
ggacacuugaauggacaca

SEQ ID NO: 2049100 - RNA, 19 nt, Artificial Sequence
  Description of Artificial Sequence: Synthetic oligonucleotide
agucucuaaucuggguauu

SEQ ID NO: 2049101 - RNA, 19 nt, Artificial Sequence
  Description of Artificial Sequence: Synthetic oligonucleotide
aagcucuaguugagcuagu

SEQ ID NO: 2049102 - RNA, 19 nt, Artificial Sequence
  Description of Artificial Sequence: Synthetic oligonucleotide
guuuccgguacuugcucau

SEQ ID NO: 2049103 - RNA, 19 nt, Artificial Sequence
  Description of Artificial Sequence: Synthetic oligonucleotide
cugcugauggacaguaauu

SEQ ID NO: 2049104 - RNA, 19 nt, Artificial Sequence
  Description of Artificial Sequence: Synthetic oligonucleotide
caucuuagggagagacagu

SEQ ID NO: 2049105 - RNA, 19 nt, Artificial Sequence
  Description of Artificial Sequence: Synthetic oligonucleotide
caauuccgaauugcuagcu

SEQ ID NO: 2049106 - RNA, 19 nt, Artificial Sequence
  Description of Artificial Sequence: Synthetic oligonucleotide
guucgguauccacugcuuu

SEQ ID NO: 2049107 - RNA, 19 nt, Artificial Sequence
  Description of Artificial Sequence: Synthetic oligonucleotide
caucgccgccacccgccgg

SEQ ID NO: 2049108 - RNA, 19 nt, Artificial Sequence
  Description of Artificial Sequence: Synthetic oligonucleotide
gcgucuuggcgucggucag

SEQ ID NO: 2049109 - RNA, 19 nt, Artificial Sequence
  Description of Artificial Sequence: Synthetic oligonucleotide
ggccgacugguccaccaac

SEQ ID NO: 2049110 - RNA, 19 nt, Artificial Sequence
  Description of Artificial Sequence: Synthetic oligonucleotide
cagcagaaugugagguuua

SEQ ID NO: 2049111 - RNA, 19 nt, Artificial Sequence
  Description of Artificial Sequence: Synthetic oligonucleotide
gguaugugugugugugugu

SEQ ID NO: 2049112 - RNA, 19 nt, Artificial Sequence
  Description of Artificial Sequence: Synthetic oligonucleotide
gcucaucccucugaucaac

SEQ ID NO: 2049113 - RNA, 19 nt, Artificial Sequence
  Description of Artificial Sequence: Synthetic oligonucleotide
ccacagcucucuguuuucc

SEQ ID NO: 2049114 - RNA, 19 nt, Artificial Sequence
  Description of Artificial Sequence: Synthetic oligonucleotide
guggccgaggacgcccgcc

SEQ ID NO: 2049115 - RNA, 19 nt, Artificial Sequence
  Description of Artificial Sequence: Synthetic oligonucleotide
gcucucuauuaccuucaaa

SEQ ID NO: 2049116 - RNA, 19 nt, Artificial Sequence
  Description of Artificial Sequence: Synthetic oligonucleotide
gguccaccaacgacucggc

SEQ ID NO: 2049117 - RNA, 19 nt, Artificial Sequence
  Description of Artificial Sequence: Synthetic oligonucleotide
cugguaugugugugugugu

SEQ ID NO: 2049118 - RNA, 19 nt, Artificial Sequence
  Description of Artificial Sequence: Synthetic oligonucleotide
gccgcaucgugcucgcgca

SEQ ID NO: 2049119 - RNA, 19 nt, Artificial Sequence
  Description of Artificial Sequence: Synthetic oligonucleotide
gggcacugaaagcugguau

SEQ ID NO: 2049120 - RNA, 19 nt, Artificial Sequence
  Description of Artificial Sequence: Synthetic oligonucleotide
cgacugguccaccaacgac

SEQ ID NO: 2049121 - RNA, 19 nt, Artificial Sequence
  Description of Artificial Sequence: Synthetic oligonucleotide
acgucgggugcauccucuu

SEQ ID NO: 2049122 - RNA, 19 nt, Artificial Sequence
  Description of Artificial Sequence: Synthetic oligonucleotide
ccuugucgggccaucugca

SEQ ID NO: 2049123 - RNA, 19 nt, Artificial Sequence
  Description of Artificial Sequence: Synthetic oligonucleotide
gcuagcucaucccucugau

SEQ ID NO: 2049124 - RNA, 19 nt, Artificial Sequence
  Description of Artificial Sequence: Synthetic oligonucleotide
gcacugaaagcugguaugu

SEQ ID NO: 2049125 - RNA, 19 nt, Artificial Sequence
  Description of Artificial Sequence: Synthetic oligonucleotide
gaagcgggauccacagaau

SEQ ID NO: 2049126 - RNA, 19 nt, Artificial Sequence
  Description of Artificial Sequence: Synthetic oligonucleotide
cagcgucuuggcgucgguc

SEQ ID NO: 2049127 - RNA, 19 nt, Artificial Sequence
  Description of Artificial Sequence: Synthetic oligonucleotide
agcgauucgcucagcccuu

SEQ ID NO: 2049128 - RNA, 19 nt, Artificial Sequence
  Description of Artificial Sequence: Synthetic oligonucleotide
cacgucgggugcauccucu

SEQ ID NO: 2049129 - RNA, 19 nt, Artificial Sequence
  Description of Artificial Sequence: Synthetic oligonucleotide
guccuucacgucgggugca

SEQ ID NO: 2049130 - RNA, 19 nt, Artificial Sequence
  Description of Artificial Sequence: Synthetic oligonucleotide
cgcaucgccgccacccgcc

SEQ ID NO: 2049131 - RNA, 19 nt, Artificial Sequence
  Description of Artificial Sequence: Synthetic oligonucleotide
gcucuaguugagcuaguuu

SEQ ID NO: 2049132 - RNA, 19 nt, Artificial Sequence
  Description of Artificial Sequence: Synthetic oligonucleotide
cgccgcaucgugcucgcgc

SEQ ID NO: 2049133 - RNA, 19 nt, Artificial Sequence
  Description of Artificial Sequence: Synthetic oligonucleotide
cgggauccacagaauuuuc

SEQ ID NO: 2049134 - RNA, 19 nt, Artificial Sequence
  Description of Artificial Sequence: Synthetic oligonucleotide
gcuagcucucuauuaccuu

SEQ ID NO: 2049135 - RNA, 19 nt, Artificial Sequence
  Description of Artificial Sequence: Synthetic oligonucleotide
gcagaaugugagguuuaua

SEQ ID NO: 2049136 - RNA, 19 nt, Artificial Sequence
  Description of Artificial Sequence: Synthetic oligonucleotide
cccgcaucgccgccacccg

SEQ ID NO: 2049137 - RNA, 19 nt, Artificial Sequence
  Description of Artificial Sequence: Synthetic oligonucleotide
ccgcuagccucagcgauuc

SEQ ID NO: 2049138 - RNA, 19 nt, Artificial Sequence
  Description of Artificial Sequence: Synthetic oligonucleotide
cagcagcgucuuggcgucg

SEQ ID NO: 2049139 - RNA, 19 nt, Artificial Sequence
  Description of Artificial Sequence: Synthetic oligonucleotide
gacucggccgccgcaucgu

SEQ ID NO: 2049140 - RNA, 19 nt, Artificial Sequence
  Description of Artificial Sequence: Synthetic oligonucleotide
gcgucggucaggaucuucu

SEQ ID NO: 2049141 - RNA, 19 nt, Artificial Sequence
  Description of Artificial Sequence: Synthetic oligonucleotide
gcgggauccacagaauuuu

SEQ ID NO: 2049142 - RNA, 19 nt, Artificial Sequence
  Description of Artificial Sequence: Synthetic oligonucleotide
gcggccgacugguccacca

SEQ ID NO: 2049143 - RNA, 19 nt, Artificial Sequence
  Description of Artificial Sequence: Synthetic oligonucleotide
cagccagcauucagaaguu

SEQ ID NO: 2049144 - RNA, 19 nt, Artificial Sequence
  Description of Artificial Sequence: Synthetic oligonucleotide
ggcccgcuagccucagcga

SEQ ID NO: 2049145 - RNA, 19 nt, Artificial Sequence
  Description of Artificial Sequence: Synthetic oligonucleotide
caccaacgacucggccgcc

SEQ ID NO: 2049146 - RNA, 19 nt, Artificial Sequence
  Description of Artificial Sequence: Synthetic oligonucleotide
cucccgcaucgccgccacc

SEQ ID NO: 2049147 - RNA, 19 nt, Artificial Sequence
  Description of Artificial Sequence: Synthetic oligonucleotide
gccgccacccgccggugca

SEQ ID NO: 2049148 - RNA, 19 nt, Artificial Sequence
  Description of Artificial Sequence: Synthetic oligonucleotide
cgauucgcucagcccuucc

SEQ ID NO: 2049149 - RNA, 19 nt, Artificial Sequence
  Description of Artificial Sequence: Synthetic oligonucleotide
cgucggucaggaucuucuc

SEQ ID NO: 2049150 - RNA, 19 nt, Artificial Sequence
  Description of Artificial Sequence: Synthetic oligonucleotide
cgcaucgugcucgcgcagc

SEQ ID NO: 2049151 - RNA, 19 nt, Artificial Sequence
  Description of Artificial Sequence: Synthetic oligonucleotide
gccgccgcaucgugcucgc

SEQ ID NO: 2049152 - RNA, 19 nt, Artificial Sequence
  Description of Artificial Sequence: Synthetic oligonucleotide
cgucgggugcauccucuug

SEQ ID NO: 2049153 - RNA, 19 nt, Artificial Sequence
  Description of Artificial Sequence: Synthetic oligonucleotide
gagugggacuggugagcuu

SEQ ID NO: 2049154 - RNA, 19 nt, Artificial Sequence
  Description of Artificial Sequence: Synthetic oligonucleotide
ccgcaucgccgccacccgc

SEQ ID NO: 2049155 - RNA, 19 nt, Artificial Sequence
  Description of Artificial Sequence: Synthetic oligonucleotide
gucgggccaucugcagcca

SEQ ID NO: 2049156 - RNA, 19 nt, Artificial Sequence
  Description of Artificial Sequence: Synthetic oligonucleotide
gguucgguauccacugcuu

SEQ ID NO: 2049157 - RNA, 19 nt, Artificial Sequence
  Description of Artificial Sequence: Synthetic oligonucleotide
ggcgucggucaggaucuuc

SEQ ID NO: 2049158 - RNA, 19 nt, Artificial Sequence
  Description of Artificial Sequence: Synthetic oligonucleotide
ccaccugaacugcuuuucu

SEQ ID NO: 2049159 - RNA, 19 nt, Artificial Sequence
  Description of Artificial Sequence: Synthetic oligonucleotide
ccgaggacgcccgcccggc

SEQ ID NO: 2049160 - RNA, 19 nt, Artificial Sequence
  Description of Artificial Sequence: Synthetic oligonucleotide
gcccgcuagccucagcgau

SEQ ID NO: 2049161 - RNA, 19 nt, Artificial Sequence
  Description of Artificial Sequence: Synthetic oligonucleotide
cauuaacaccaggcagaau

SEQ ID NO: 2049162 - RNA, 19 nt, Artificial Sequence
  Description of Artificial Sequence: Synthetic oligonucleotide
ccgcaucgugcucgcgcag

SEQ ID NO: 2049163 - RNA, 19 nt, Artificial Sequence
  Description of Artificial Sequence: Synthetic oligonucleotide
gcgauucgcucagcccuuc

SEQ ID NO: 2049164 - RNA, 19 nt, Artificial Sequence
  Description of Artificial Sequence: Synthetic oligonucleotide
acccgccggugcagcgcgg

SEQ ID NO: 2049165 - RNA, 19 nt, Artificial Sequence
  Description of Artificial Sequence: Synthetic oligonucleotide
ggcgcccgccucccgcauc

SEQ ID NO: 2049166 - RNA, 19 nt, Artificial Sequence
  Description of Artificial Sequence: Synthetic oligonucleotide
uggcgucggucaggaucuu

SEQ ID NO: 2049167 - RNA, 19 nt, Artificial Sequence
  Description of Artificial Sequence: Synthetic oligonucleotide
cgcuagccucagcgauucg

SEQ ID NO: 2049168 - RNA, 19 nt, Artificial Sequence
  Description of Artificial Sequence: Synthetic oligonucleotide
cgaggacgcccgcccggcc

SEQ ID NO: 2049169 - RNA, 19 nt, Artificial Sequence
  Description of Artificial Sequence: Synthetic oligonucleotide
cgugcucgcgcagccgcuc

SEQ ID NO: 2049170 - RNA, 19 nt, Artificial Sequence
  Description of Artificial Sequence: Synthetic oligonucleotide
gcagcgucuuggcgucggu

SEQ ID NO: 2049171 - RNA, 19 nt, Artificial Sequence
  Description of Artificial Sequence: Synthetic oligonucleotide
cccgcuagccucagcgauu

SEQ ID NO: 2049172 - RNA, 19 nt, Artificial Sequence
  Description of Artificial Sequence: Synthetic oligonucleotide
cgcccgcccggcccgcuag

SEQ ID NO: 2049173 - RNA, 19 nt, Artificial Sequence
  Description of Artificial Sequence: Synthetic oligonucleotide
ccggcccgcuagccucagc

SEQ ID NO: 2049174 - RNA, 19 nt, Artificial Sequence
  Description of Artificial Sequence: Synthetic oligonucleotide
gcagcgcggccgacugguc

SEQ ID NO: 2049175 - RNA, 19 nt, Artificial Sequence
  Description of Artificial Sequence: Synthetic oligonucleotide
cgccgccacccgccggugc

SEQ ID NO: 2049176 - RNA, 19 nt, Artificial Sequence
  Description of Artificial Sequence: Synthetic oligonucleotide
ccgccgcaucgugcucgcg

SEQ ID NO: 2049177 - RNA, 19 nt, Artificial Sequence
  Description of Artificial Sequence: Synthetic oligonucleotide
cgccucccgcaucgccgcc

SEQ ID NO: 2049178 - RNA, 19 nt, Artificial Sequence
  Description of Artificial Sequence: Synthetic oligonucleotide
cggccgacugguccaccaa

SEQ ID NO: 2049179 - RNA, 19 nt, Artificial Sequence
  Description of Artificial Sequence: Synthetic oligonucleotide
cgcggccgacugguccacc

SEQ ID NO: 2049180 - RNA, 19 nt, Artificial Sequence
  Description of Artificial Sequence: Synthetic oligonucleotide
ccggugcagcgcggccgac

SEQ ID NO: 2049181 - RNA, 19 nt, Artificial Sequence
  Description of Artificial Sequence: Synthetic oligonucleotide
ccucuccuugucgggccau

SEQ ID NO: 2049182 - RNA, 19 nt, Artificial Sequence
  Description of Artificial Sequence: Synthetic oligonucleotide
cggugcagcgcggccgacu

SEQ ID NO: 2049183 - RNA, 19 nt, Artificial Sequence
  Description of Artificial Sequence: Synthetic oligonucleotide
cggcgcccgccucccgcau

SEQ ID NO: 2049184 - RNA, 19 nt, Artificial Sequence
  Description of Artificial Sequence: Synthetic oligonucleotide
aacaagguaauuuucaaag

SEQ ID NO: 2049185 - RNA, 19 nt, Artificial Sequence
  Description of Artificial Sequence: Synthetic oligonucleotide
aaauauaccuccuucuggg

SEQ ID NO: 2049186 - RNA, 19 nt, Artificial Sequence
  Description of Artificial Sequence: Synthetic oligonucleotide
aaguccauauccuuaagcg

SEQ ID NO: 2049187 - RNA, 19 nt, Artificial Sequence
  Description of Artificial Sequence: Synthetic oligonucleotide
aacaacagcacucuaauga

SEQ ID NO: 2049188 - RNA, 19 nt, Artificial Sequence
  Description of Artificial Sequence: Synthetic oligonucleotide
aagacuguaguccaugauc

SEQ ID NO: 2049189 - RNA, 19 nt, Artificial Sequence
  Description of Artificial Sequence: Synthetic oligonucleotide
ugaguuauggcucugacuc

SEQ ID NO: 2049190 - RNA, 19 nt, Artificial Sequence
  Description of Artificial Sequence: Synthetic oligonucleotide
uuuaaccuuuuccuuaucg

SEQ ID NO: 2049191 - RNA, 19 nt, Artificial Sequence
  Description of Artificial Sequence: Synthetic oligonucleotide
accaauauauacuuucugg

SEQ ID NO: 2049192 - RNA, 19 nt, Artificial Sequence
  Description of Artificial Sequence: Synthetic oligonucleotide
ucuuaggcaaagauguugg

SEQ ID NO: 2049193 - RNA, 19 nt, Artificial Sequence
  Description of Artificial Sequence: Synthetic oligonucleotide
uugggagucaacaacagca

SEQ ID NO: 2049194 - RNA, 19 nt, Artificial Sequence
  Description of Artificial Sequence: Synthetic oligonucleotide
aaauccaagaaucgcuuag

SEQ ID NO: 2049195 - RNA, 19 nt, Artificial Sequence
  Description of Artificial Sequence: Synthetic oligonucleotide
uauccuuaagcguaggcag

SEQ ID NO: 2049196 - RNA, 19 nt, Artificial Sequence
  Description of Artificial Sequence: Synthetic oligonucleotide
guaauuuucaaagaucaag

SEQ ID NO: 2049197 - RNA, 19 nt, Artificial Sequence
  Description of Artificial Sequence: Synthetic oligonucleotide
uucaacauaaagcagcaau

SEQ ID NO: 2049198 - RNA, 19 nt, Artificial Sequence
  Description of Artificial Sequence: Synthetic oligonucleotide
acucucagaacccaccacc

SEQ ID NO: 2049199 - RNA, 19 nt, Artificial Sequence
  Description of Artificial Sequence: Synthetic oligonucleotide
uagacaucgaugaaggacu

SEQ ID NO: 2049200 - RNA, 19 nt, Artificial Sequence
  Description of Artificial Sequence: Synthetic oligonucleotide
guugaggaaguccauaucc

SEQ ID NO: 2049201 - RNA, 19 nt, Artificial Sequence
  Description of Artificial Sequence: Synthetic oligonucleotide
agccuauccaccaagaugg

SEQ ID NO: 2049202 - RNA, 19 nt, Artificial Sequence
  Description of Artificial Sequence: Synthetic oligonucleotide
aauccaagaaucgcuuagc

SEQ ID NO: 2049203 - RNA, 19 nt, Artificial Sequence
  Description of Artificial Sequence: Synthetic oligonucleotide
accuucaacauaaagcagc

SEQ ID NO: 2049204 - RNA, 19 nt, Artificial Sequence
  Description of Artificial Sequence: Synthetic oligonucleotide
caaagaucaaggcacuugg

SEQ ID NO: 2049205 - RNA, 19 nt, Artificial Sequence
  Description of Artificial Sequence: Synthetic oligonucleotide
aagaucaaggcacuuggga

SEQ ID NO: 2049206 - RNA, 19 nt, Artificial Sequence
  Description of Artificial Sequence: Synthetic oligonucleotide
aagcaagagggcuuacugg

SEQ ID NO: 2049207 - RNA, 19 nt, Artificial Sequence
  Description of Artificial Sequence: Synthetic oligonucleotide
aagccuauccaccaagaug

SEQ ID NO: 2049208 - RNA, 19 nt, Artificial Sequence
  Description of Artificial Sequence: Synthetic oligonucleotide
ucaacauaaagcagcaauc

SEQ ID NO: 2049209 - RNA, 19 nt, Artificial Sequence
  Description of Artificial Sequence: Synthetic oligonucleotide
aaugauuuggauggaagga

SEQ ID NO: 2049210 - RNA, 19 nt, Artificial Sequence
  Description of Artificial Sequence: Synthetic oligonucleotide
aauauaccuccuucugggg

SEQ ID NO: 2049211 - RNA, 19 nt, Artificial Sequence
  Description of Artificial Sequence: Synthetic oligonucleotide
aagugaagaugacagagaa

SEQ ID NO: 2049212 - RNA, 19 nt, Artificial Sequence
  Description of Artificial Sequence: Synthetic oligonucleotide
ugaauguagccuccaaugc

SEQ ID NO: 2049213 - RNA, 19 nt, Artificial Sequence
  Description of Artificial Sequence: Synthetic oligonucleotide
uuaaccuuuuccuuaucgc

SEQ ID NO: 2049214 - RNA, 19 nt, Artificial Sequence
  Description of Artificial Sequence: Synthetic oligonucleotide
aggcccauaaaauauaccu

SEQ ID NO: 2049215 - RNA, 19 nt, Artificial Sequence
  Description of Artificial Sequence: Synthetic oligonucleotide
agaucaaggcacuugggag

SEQ ID NO: 2049216 - RNA, 19 nt, Artificial Sequence
  Description of Artificial Sequence: Synthetic oligonucleotide
gucagaaugucaaugaggc

SEQ ID NO: 2049217 - RNA, 19 nt, Artificial Sequence
  Description of Artificial Sequence: Synthetic oligonucleotide
ucagcuaucuuuggaaggg

SEQ ID NO: 2049218 - RNA, 19 nt, Artificial Sequence
  Description of Artificial Sequence: Synthetic oligonucleotide
ugugucagaaugucaauga

SEQ ID NO: 2049219 - RNA, 19 nt, Artificial Sequence
  Description of Artificial Sequence: Synthetic oligonucleotide
aaugaauguagccuccaau

SEQ ID NO: 2049220 - RNA, 19 nt, Artificial Sequence
  Description of Artificial Sequence: Synthetic oligonucleotide
gaauguagccuccaaugcc

SEQ ID NO: 2049221 - RNA, 19 nt, Artificial Sequence
  Description of Artificial Sequence: Synthetic oligonucleotide
cuaucuuuggaagggaucc

SEQ ID NO: 2049222 - RNA, 19 nt, Artificial Sequence
  Description of Artificial Sequence: Synthetic oligonucleotide
aaucgcuuagcguacugcu

SEQ ID NO: 2049223 - RNA, 19 nt, Artificial Sequence
  Description of Artificial Sequence: Synthetic oligonucleotide
gaagcaagagggcuuacug

SEQ ID NO: 2049224 - RNA, 19 nt, Artificial Sequence
  Description of Artificial Sequence: Synthetic oligonucleotide
ugauuuggauggaaggagc

SEQ ID NO: 2049225 - RNA, 19 nt, Artificial Sequence
  Description of Artificial Sequence: Synthetic oligonucleotide
uccacuguccaucuuguca

SEQ ID NO: 2049226 - RNA, 19 nt, Artificial Sequence
  Description of Artificial Sequence: Synthetic oligonucleotide
ucaacaacagcacucuaau

SEQ ID NO: 2049227 - RNA, 19 nt, Artificial Sequence
  Description of Artificial Sequence: Synthetic oligonucleotide
uagcguacugcucaggaug

SEQ ID NO: 2049228 - RNA, 19 nt, Artificial Sequence
  Description of Artificial Sequence: Synthetic oligonucleotide
gaaaagccuauccaccaag

SEQ ID NO: 2049229 - RNA, 19 nt, Artificial Sequence
  Description of Artificial Sequence: Synthetic oligonucleotide
aagagggcuuacugggagc

SEQ ID NO: 2049230 - RNA, 19 nt, Artificial Sequence
  Description of Artificial Sequence: Synthetic oligonucleotide
aaucaccacggagucaggc

SEQ ID NO: 2049231 - RNA, 19 nt, Artificial Sequence
  Description of Artificial Sequence: Synthetic oligonucleotide
acauuagcagugaaagugc

SEQ ID NO: 2049232 - RNA, 19 nt, Artificial Sequence
  Description of Artificial Sequence: Synthetic oligonucleotide
guaggaaaagccuauccac

SEQ ID NO: 2049233 - RNA, 19 nt, Artificial Sequence
  Description of Artificial Sequence: Synthetic oligonucleotide
cuaggaacuccacaucucg

SEQ ID NO: 2049234 - RNA, 19 nt, Artificial Sequence
  Description of Artificial Sequence: Synthetic oligonucleotide
uaggcaaagauguuggcaa

SEQ ID NO: 2049235 - RNA, 19 nt, Artificial Sequence
  Description of Artificial Sequence: Synthetic oligonucleotide
uaaccuuuuccuuaucgcu

SEQ ID NO: 2049236 - RNA, 19 nt, Artificial Sequence
  Description of Artificial Sequence: Synthetic oligonucleotide
aagacucucagaacccacc

SEQ ID NO: 2049237 - RNA, 19 nt, Artificial Sequence
  Description of Artificial Sequence: Synthetic oligonucleotide
uacuuucugguucuuguug

SEQ ID NO: 2049238 - RNA, 19 nt, Artificial Sequence
  Description of Artificial Sequence: Synthetic oligonucleotide
agguaauuuucaaagauca

SEQ ID NO: 2049239 - RNA, 19 nt, Artificial Sequence
  Description of Artificial Sequence: Synthetic oligonucleotide
gacucaaacucuccugggg

SEQ ID NO: 2049240 - RNA, 19 nt, Artificial Sequence
  Description of Artificial Sequence: Synthetic oligonucleotide
ugcacuaggaacuccacau

SEQ ID NO: 2049241 - RNA, 19 nt, Artificial Sequence
  Description of Artificial Sequence: Synthetic oligonucleotide
uccagaaauauuuucuuuu

SEQ ID NO: 2049242 - RNA, 19 nt, Artificial Sequence
  Description of Artificial Sequence: Synthetic oligonucleotide
auccaagaaucgcuuagcg

SEQ ID NO: 2049243 - RNA, 19 nt, Artificial Sequence
  Description of Artificial Sequence: Synthetic oligonucleotide
ucgaugaaggacucaaacu

SEQ ID NO: 2049244 - RNA, 19 nt, Artificial Sequence
  Description of Artificial Sequence: Synthetic oligonucleotide
agugaguuauggcucugac

SEQ ID NO: 2049245 - RNA, 19 nt, Artificial Sequence
  Description of Artificial Sequence: Synthetic oligonucleotide
uuagcaaggaagagaagua

SEQ ID NO: 2049246 - RNA, 19 nt, Artificial Sequence
  Description of Artificial Sequence: Synthetic oligonucleotide
cagguuacaguccccaucc

SEQ ID NO: 2049247 - RNA, 19 nt, Artificial Sequence
  Description of Artificial Sequence: Synthetic oligonucleotide
gaauuuagcaaggaagaga

SEQ ID NO: 2049248 - RNA, 19 nt, Artificial Sequence
  Description of Artificial Sequence: Synthetic oligonucleotide
ucaaagaucaaggcacuug

SEQ ID NO: 2049249 - RNA, 19 nt, Artificial Sequence
  Description of Artificial Sequence: Synthetic oligonucleotide
agauguuggcaaugaaauc

SEQ ID NO: 2049250 - RNA, 19 nt, Artificial Sequence
  Description of Artificial Sequence: Synthetic oligonucleotide
uagaaacaagguaauuuuc

SEQ ID NO: 2049251 - RNA, 19 nt, Artificial Sequence
  Description of Artificial Sequence: Synthetic oligonucleotide
aguagagaucucugcuccc

SEQ ID NO: 2049252 - RNA, 19 nt, Artificial Sequence
  Description of Artificial Sequence: Synthetic oligonucleotide
uauccaccaagauggaaug

SEQ ID NO: 2049253 - RNA, 19 nt, Artificial Sequence
  Description of Artificial Sequence: Synthetic oligonucleotide
cugggagacacauuagcag

SEQ ID NO: 2049254 - RNA, 19 nt, Artificial Sequence
  Description of Artificial Sequence: Synthetic oligonucleotide
ugcuugacgguuuucgcug

SEQ ID NO: 2049255 - RNA, 19 nt, Artificial Sequence
  Description of Artificial Sequence: Synthetic oligonucleotide
uuaggcaaagauguuggca

SEQ ID NO: 2049256 - RNA, 19 nt, Artificial Sequence
  Description of Artificial Sequence: Synthetic oligonucleotide
aguguguuucucugguagg

SEQ ID NO: 2049257 - RNA, 19 nt, Artificial Sequence
  Description of Artificial Sequence: Synthetic oligonucleotide
ucucugguaggaaaagccu

SEQ ID NO: 2049258 - RNA, 19 nt, Artificial Sequence
  Description of Artificial Sequence: Synthetic oligonucleotide
gucaaugaggcccauaaaa

SEQ ID NO: 2049259 - RNA, 19 nt, Artificial Sequence
  Description of Artificial Sequence: Synthetic oligonucleotide
uccauauccuuaagcguag

SEQ ID NO: 2049260 - RNA, 19 nt, Artificial Sequence
  Description of Artificial Sequence: Synthetic oligonucleotide
agaaacaagguaauuuuca

SEQ ID NO: 2049261 - RNA, 19 nt, Artificial Sequence
  Description of Artificial Sequence: Synthetic oligonucleotide
aaggacaguguguuucucu

SEQ ID NO: 2049262 - RNA, 19 nt, Artificial Sequence
  Description of Artificial Sequence: Synthetic oligonucleotide
ucgcuuagcguacugcuca

SEQ ID NO: 2049263 - RNA, 19 nt, Artificial Sequence
  Description of Artificial Sequence: Synthetic oligonucleotide
augauuuggauggaaggag

SEQ ID NO: 2049264 - RNA, 19 nt, Artificial Sequence
  Description of Artificial Sequence: Synthetic oligonucleotide
acaagguaauuuucaaaga

SEQ ID NO: 2049265 - RNA, 19 nt, Artificial Sequence
  Description of Artificial Sequence: Synthetic oligonucleotide
aggaagagaaguaguggcc

SEQ ID NO: 2049266 - RNA, 19 nt, Artificial Sequence
  Description of Artificial Sequence: Synthetic oligonucleotide
uggacaguagagaucucug

SEQ ID NO: 2049267 - RNA, 19 nt, Artificial Sequence
  Description of Artificial Sequence: Synthetic oligonucleotide
ugggaaugaauguagccuc

SEQ ID NO: 2049268 - RNA, 19 nt, Artificial Sequence
  Description of Artificial Sequence: Synthetic oligonucleotide
accaagauggaaugauuug

SEQ ID NO: 2049269 - RNA, 19 nt, Artificial Sequence
  Description of Artificial Sequence: Synthetic oligonucleotide
cagugaaagugcuggagcc

SEQ ID NO: 2049270 - RNA, 19 nt, Artificial Sequence
  Description of Artificial Sequence: Synthetic oligonucleotide
uccaaugcccucaggggag

SEQ ID NO: 2049271 - RNA, 19 nt, Artificial Sequence
  Description of Artificial Sequence: Synthetic oligonucleotide
ugaggcccauaaaauauac

SEQ ID NO: 2049272 - RNA, 19 nt, Artificial Sequence
  Description of Artificial Sequence: Synthetic oligonucleotide
augucaaugaggcccauaa

SEQ ID NO: 2049273 - RNA, 19 nt, Artificial Sequence
  Description of Artificial Sequence: Synthetic oligonucleotide
auauccuuaagcguaggca

SEQ ID NO: 2049274 - RNA, 19 nt, Artificial Sequence
  Description of Artificial Sequence: Synthetic oligonucleotide
caguagagaucucugcucc

SEQ ID NO: 2049275 - RNA, 19 nt, Artificial Sequence
  Description of Artificial Sequence: Synthetic oligonucleotide
aaagaucaaggcacuuggg

SEQ ID NO: 2049276 - RNA, 19 nt, Artificial Sequence
  Description of Artificial Sequence: Synthetic oligonucleotide
ucuuuaaccuuuuccuuau

SEQ ID NO: 2049277 - RNA, 19 nt, Artificial Sequence
  Description of Artificial Sequence: Synthetic oligonucleotide
caguguguuucucugguag

SEQ ID NO: 2049278 - RNA, 19 nt, Artificial Sequence
  Description of Artificial Sequence: Synthetic oligonucleotide
ucugguaggaaaagccuau

SEQ ID NO: 2049279 - RNA, 19 nt, Artificial Sequence
  Description of Artificial Sequence: Synthetic oligonucleotide
aaagccuauccaccaagau

SEQ ID NO: 2049280 - RNA, 19 nt, Artificial Sequence
  Description of Artificial Sequence: Synthetic oligonucleotide
acagagaaggccaucuguc

SEQ ID NO: 2049281 - RNA, 19 nt, Artificial Sequence
  Description of Artificial Sequence: Synthetic oligonucleotide
agcacucuaaugaagcaag

SEQ ID NO: 2049282 - RNA, 19 nt, Artificial Sequence
  Description of Artificial Sequence: Synthetic oligonucleotide
acaacagcacucuaaugaa

SEQ ID NO: 2049283 - RNA, 19 nt, Artificial Sequence
  Description of Artificial Sequence: Synthetic oligonucleotide
uaaugaagcaagagggcuu

SEQ ID NO: 2049284 - RNA, 19 nt, Artificial Sequence
  Description of Artificial Sequence: Synthetic oligonucleotide
uccaagaaucgcuuagcgu

SEQ ID NO: 2049285 - RNA, 19 nt, Artificial Sequence
  Description of Artificial Sequence: Synthetic oligonucleotide
uuuucgcugcaugagcugc

SEQ ID NO: 2049286 - RNA, 19 nt, Artificial Sequence
  Description of Artificial Sequence: Synthetic oligonucleotide
cauauccuuaagcguaggc

SEQ ID NO: 2049287 - RNA, 19 nt, Artificial Sequence
  Description of Artificial Sequence: Synthetic oligonucleotide
ugacucguccucccgcacg

SEQ ID NO: 2049288 - RNA, 19 nt, Artificial Sequence
  Description of Artificial Sequence: Synthetic oligonucleotide
cagcagaagacuguagucc

SEQ ID NO: 2049289 - RNA, 19 nt, Artificial Sequence
  Description of Artificial Sequence: Synthetic oligonucleotide
ugccauaggagcccaccag

SEQ ID NO: 2049290 - RNA, 19 nt, Artificial Sequence
  Description of Artificial Sequence: Synthetic oligonucleotide
gagucaggcaggcucuuag

SEQ ID NO: 2049291 - RNA, 19 nt, Artificial Sequence
  Description of Artificial Sequence: Synthetic oligonucleotide
agaacccaccaccuucaac

SEQ ID NO: 2049292 - RNA, 19 nt, Artificial Sequence
  Description of Artificial Sequence: Synthetic oligonucleotide
gggaagaaaggacagugug

SEQ ID NO: 2049293 - RNA, 19 nt, Artificial Sequence
  Description of Artificial Sequence: Synthetic oligonucleotide
uaagacucucagaacccac

SEQ ID NO: 2049294 - RNA, 19 nt, Artificial Sequence
  Description of Artificial Sequence: Synthetic oligonucleotide
gauuucauagaaacaaggu

SEQ ID NO: 2049295 - RNA, 19 nt, Artificial Sequence
  Description of Artificial Sequence: Synthetic oligonucleotide
ugggagucaacaacagcac

SEQ ID NO: 2049296 - RNA, 19 nt, Artificial Sequence
  Description of Artificial Sequence: Synthetic oligonucleotide
gugucagaaugucaaugag

SEQ ID NO: 2049297 - RNA, 19 nt, Artificial Sequence
  Description of Artificial Sequence: Synthetic oligonucleotide
guagagaucucugcucccg

SEQ ID NO: 2049298 - RNA, 19 nt, Artificial Sequence
  Description of Artificial Sequence: Synthetic oligonucleotide
aacggacgcgggaagaaag

SEQ ID NO: 2049299 - RNA, 19 nt, Artificial Sequence
  Description of Artificial Sequence: Synthetic oligonucleotide
aaugaagcaagagggcuua

SEQ ID NO: 2049300 - RNA, 19 nt, Artificial Sequence
  Description of Artificial Sequence: Synthetic oligonucleotide
caugcuugacgguuuucgc

SEQ ID NO: 2049301 - RNA, 19 nt, Artificial Sequence
  Description of Artificial Sequence: Synthetic oligonucleotide
caagaaucgcuuagcguac

SEQ ID NO: 2049302 - RNA, 19 nt, Artificial Sequence
  Description of Artificial Sequence: Synthetic oligonucleotide
gaagagaaguaguggccac

SEQ ID NO: 2049303 - RNA, 19 nt, Artificial Sequence
  Description of Artificial Sequence: Synthetic oligonucleotide
cuuuggaagggauccggug

SEQ ID NO: 2049304 - RNA, 19 nt, Artificial Sequence
  Description of Artificial Sequence: Synthetic oligonucleotide
cccuaagacucucagaacc

SEQ ID NO: 2049305 - RNA, 19 nt, Artificial Sequence
  Description of Artificial Sequence: Synthetic oligonucleotide
uaucuuuggaagggauccg

SEQ ID NO: 2049306 - RNA, 19 nt, Artificial Sequence
  Description of Artificial Sequence: Synthetic oligonucleotide
acguccacuguccaucuug

SEQ ID NO: 2049307 - RNA, 19 nt, Artificial Sequence
  Description of Artificial Sequence: Synthetic oligonucleotide
caagagggcuuacugggag

SEQ ID NO: 2049308 - RNA, 19 nt, Artificial Sequence
  Description of Artificial Sequence: Synthetic oligonucleotide
gacucguccucccgcacgg

SEQ ID NO: 2049309 - RNA, 19 nt, Artificial Sequence
  Description of Artificial Sequence: Synthetic oligonucleotide
uguugaggaaguccauauc

SEQ ID NO: 2049310 - RNA, 19 nt, Artificial Sequence
  Description of Artificial Sequence: Synthetic oligonucleotide
cuuaggcaaagauguuggc

SEQ ID NO: 2049311 - RNA, 19 nt, Artificial Sequence
  Description of Artificial Sequence: Synthetic oligonucleotide
ucuuuggaagggauccggu

SEQ ID NO: 2049312 - RNA, 19 nt, Artificial Sequence
  Description of Artificial Sequence: Synthetic oligonucleotide
ugcaugagcugcuuucuuc

SEQ ID NO: 2049313 - RNA, 19 nt, Artificial Sequence
  Description of Artificial Sequence: Synthetic oligonucleotide
aaaggacaguguguuucuc

SEQ ID NO: 2049314 - RNA, 19 nt, Artificial Sequence
  Description of Artificial Sequence: Synthetic oligonucleotide
agucaggcaggcucuuagg

SEQ ID NO: 2049315 - RNA, 19 nt, Artificial Sequence
  Description of Artificial Sequence: Synthetic oligonucleotide
gguaggaaaagccuaucca

SEQ ID NO: 2049316 - RNA, 19 nt, Artificial Sequence
  Description of Artificial Sequence: Synthetic oligonucleotide
cacucuaaugaagcaagag

SEQ ID NO: 2049317 - RNA, 19 nt, Artificial Sequence
  Description of Artificial Sequence: Synthetic oligonucleotide
augcuugacgguuuucgcu

SEQ ID NO: 2049318 - RNA, 19 nt, Artificial Sequence
  Description of Artificial Sequence: Synthetic oligonucleotide
guuacaguccccaucccac

SEQ ID NO: 2049319 - RNA, 19 nt, Artificial Sequence
  Description of Artificial Sequence: Synthetic oligonucleotide
ugacgguuuucgcugcaug

SEQ ID NO: 2049320 - RNA, 19 nt, Artificial Sequence
  Description of Artificial Sequence: Synthetic oligonucleotide
ggaaugauuuggauggaag

SEQ ID NO: 2049321 - RNA, 19 nt, Artificial Sequence
  Description of Artificial Sequence: Synthetic oligonucleotide
aucaaggcacuugggaguc

SEQ ID NO: 2049322 - RNA, 19 nt, Artificial Sequence
  Description of Artificial Sequence: Synthetic oligonucleotide
ugacagagaaggccaucug

SEQ ID NO: 2049323 - RNA, 19 nt, Artificial Sequence
  Description of Artificial Sequence: Synthetic oligonucleotide
ggugggaaugaauguagcc

SEQ ID NO: 2049324 - RNA, 19 nt, Artificial Sequence
  Description of Artificial Sequence: Synthetic oligonucleotide
gaaucgcuuagcguacugc

SEQ ID NO: 2049325 - RNA, 19 nt, Artificial Sequence
  Description of Artificial Sequence: Synthetic oligonucleotide
uuauggcucugacuccucu

SEQ ID NO: 2049326 - RNA, 19 nt, Artificial Sequence
  Description of Artificial Sequence: Synthetic oligonucleotide
gacgguuuucgcugcauga

SEQ ID NO: 2049327 - RNA, 19 nt, Artificial Sequence
  Description of Artificial Sequence: Synthetic oligonucleotide
cacggagucaggcaggcuc

SEQ ID NO: 2049328 - RNA, 19 nt, Artificial Sequence
  Description of Artificial Sequence: Synthetic oligonucleotide
ucugacucguccucccgca

SEQ ID NO: 2049329 - RNA, 19 nt, Artificial Sequence
  Description of Artificial Sequence: Synthetic oligonucleotide
agcagugaaagugcuggag

SEQ ID NO: 2049330 - RNA, 19 nt, Artificial Sequence
  Description of Artificial Sequence: Synthetic oligonucleotide
aagagaaguaguggccaca

SEQ ID NO: 2049331 - RNA, 19 nt, Artificial Sequence
  Description of Artificial Sequence: Synthetic oligonucleotide
aguuauggcucugacuccu

SEQ ID NO: 2049332 - RNA, 19 nt, Artificial Sequence
  Description of Artificial Sequence: Synthetic oligonucleotide
guuccccuaagacucucag

SEQ ID NO: 2049333 - RNA, 19 nt, Artificial Sequence
  Description of Artificial Sequence: Synthetic oligonucleotide
aucaccacggagucaggca

SEQ ID NO: 2049334 - RNA, 19 nt, Artificial Sequence
  Description of Artificial Sequence: Synthetic oligonucleotide
guuucucugguaggaaaag

SEQ ID NO: 2049335 - RNA, 19 nt, Artificial Sequence
  Description of Artificial Sequence: Synthetic oligonucleotide
uccaccaagauggaaugau

SEQ ID NO: 2049336 - RNA, 19 nt, Artificial Sequence
  Description of Artificial Sequence: Synthetic oligonucleotide
auggacaguagagaucucu

SEQ ID NO: 2049337 - RNA, 19 nt, Artificial Sequence
  Description of Artificial Sequence: Synthetic oligonucleotide
acuaggaacuccacaucuc

SEQ ID NO: 2049338 - RNA, 19 nt, Artificial Sequence
  Description of Artificial Sequence: Synthetic oligonucleotide
cuuagcguacugcucagga

SEQ ID NO: 2049339 - RNA, 19 nt, Artificial Sequence
  Description of Artificial Sequence: Synthetic oligonucleotide
gacgcgggaagaaaggaca

SEQ ID NO: 2049340 - RNA, 19 nt, Artificial Sequence
  Description of Artificial Sequence: Synthetic oligonucleotide
acaucgaugaaggacucaa

SEQ ID NO: 2049341 - RNA, 19 nt, Artificial Sequence
  Description of Artificial Sequence: Synthetic oligonucleotide
guaggcagcucuuuaaccu

SEQ ID NO: 2049342 - RNA, 19 nt, Artificial Sequence
  Description of Artificial Sequence: Synthetic oligonucleotide
ucccgaagauggcaaacaa

SEQ ID NO: 2049343 - RNA, 19 nt, Artificial Sequence
  Description of Artificial Sequence: Synthetic oligonucleotide
ucguggaugcccagcagaa

SEQ ID NO: 2049344 - RNA, 19 nt, Artificial Sequence
  Description of Artificial Sequence: Synthetic oligonucleotide
aaaacggacgcgggaagaa

SEQ ID NO: 2049345 - RNA, 19 nt, Artificial Sequence
  Description of Artificial Sequence: Synthetic oligonucleotide
cucuuuaaccuuuuccuua

SEQ ID NO: 2049346 - RNA, 19 nt, Artificial Sequence
  Description of Artificial Sequence: Synthetic oligonucleotide
ccggauggcauagacaucg

SEQ ID NO: 2049347 - RNA, 19 nt, Artificial Sequence
  Description of Artificial Sequence: Synthetic oligonucleotide
agguuacaguccccauccc

SEQ ID NO: 2049348 - RNA, 19 nt, Artificial Sequence
  Description of Artificial Sequence: Synthetic oligonucleotide
ugucaaugaggcccauaaa

SEQ ID NO: 2049349 - RNA, 19 nt, Artificial Sequence
  Description of Artificial Sequence: Synthetic oligonucleotide
uuagcguacugcucaggau

SEQ ID NO: 2049350 - RNA, 19 nt, Artificial Sequence
  Description of Artificial Sequence: Synthetic oligonucleotide
caagguaauuuucaaagau

SEQ ID NO: 2049351 - RNA, 19 nt, Artificial Sequence
  Description of Artificial Sequence: Synthetic oligonucleotide
ccaagaaucgcuuagcgua

SEQ ID NO: 2049352 - RNA, 19 nt, Artificial Sequence
  Description of Artificial Sequence: Synthetic oligonucleotide
augucguggaugcccagca

SEQ ID NO: 2049353 - RNA, 19 nt, Artificial Sequence
  Description of Artificial Sequence: Synthetic oligonucleotide
gaugucguggaugcccagc

SEQ ID NO: 2049354 - RNA, 19 nt, Artificial Sequence
  Description of Artificial Sequence: Synthetic oligonucleotide
gaagaaaggacaguguguu

SEQ ID NO: 2049355 - RNA, 19 nt, Artificial Sequence
  Description of Artificial Sequence: Synthetic oligonucleotide
agcguacugcucaggaugg

SEQ ID NO: 2049356 - RNA, 19 nt, Artificial Sequence
  Description of Artificial Sequence: Synthetic oligonucleotide
aggauggacaguagagauc

SEQ ID NO: 2049357 - RNA, 19 nt, Artificial Sequence
  Description of Artificial Sequence: Synthetic oligonucleotide
cuauccaccaagauggaau

SEQ ID NO: 2049358 - RNA, 19 nt, Artificial Sequence
  Description of Artificial Sequence: Synthetic oligonucleotide
uuaagcguaggcagcucuu

SEQ ID NO: 2049359 - RNA, 19 nt, Artificial Sequence
  Description of Artificial Sequence: Synthetic oligonucleotide
agggcuuacugggagccgg

SEQ ID NO: 2049360 - RNA, 19 nt, Artificial Sequence
  Description of Artificial Sequence: Synthetic oligonucleotide
uuacaguccccaucccacu

SEQ ID NO: 2049361 - RNA, 19 nt, Artificial Sequence
  Description of Artificial Sequence: Synthetic oligonucleotide
acucugacucguccucccg

SEQ ID NO: 2049362 - RNA, 19 nt, Artificial Sequence
  Description of Artificial Sequence: Synthetic oligonucleotide
ugucguggaugcccagcag

SEQ ID NO: 2049363 - RNA, 19 nt, Artificial Sequence
  Description of Artificial Sequence: Synthetic oligonucleotide
agauggcaaacaacccuac

SEQ ID NO: 2049364 - RNA, 19 nt, Artificial Sequence
  Description of Artificial Sequence: Synthetic oligonucleotide
acgguuuucgcugcaugag

SEQ ID NO: 2049365 - RNA, 19 nt, Artificial Sequence
  Description of Artificial Sequence: Synthetic oligonucleotide
gaagggauccggugaguga

SEQ ID NO: 2049366 - RNA, 19 nt, Artificial Sequence
  Description of Artificial Sequence: Synthetic oligonucleotide
ucagcacuccggauggcau

SEQ ID NO: 2049367 - RNA, 19 nt, Artificial Sequence
  Description of Artificial Sequence: Synthetic oligonucleotide
uuucgcugcaugagcugcu

SEQ ID NO: 2049368 - RNA, 19 nt, Artificial Sequence
  Description of Artificial Sequence: Synthetic oligonucleotide
gacaguguguuucucuggu

SEQ ID NO: 2049369 - RNA, 19 nt, Artificial Sequence
  Description of Artificial Sequence: Synthetic oligonucleotide
accacggagucaggcaggc

SEQ ID NO: 2049370 - RNA, 19 nt, Artificial Sequence
  Description of Artificial Sequence: Synthetic oligonucleotide
ucccgccccaugcuugacg

SEQ ID NO: 2049371 - RNA, 19 nt, Artificial Sequence
  Description of Artificial Sequence: Synthetic oligonucleotide
uacaguccccaucccacuc

SEQ ID NO: 2049372 - RNA, 19 nt, Artificial Sequence
  Description of Artificial Sequence: Synthetic oligonucleotide
gaggcccauaaaauauacc

SEQ ID NO: 2049373 - RNA, 19 nt, Artificial Sequence
  Description of Artificial Sequence: Synthetic oligonucleotide
uuccccuaagacucucaga

SEQ ID NO: 2049374 - RNA, 19 nt, Artificial Sequence
  Description of Artificial Sequence: Synthetic oligonucleotide
uggaaugauuuggauggaa

SEQ ID NO: 2049375 - RNA, 19 nt, Artificial Sequence
  Description of Artificial Sequence: Synthetic oligonucleotide
gacucucagaacccaccac

SEQ ID NO: 2049376 - RNA, 19 nt, Artificial Sequence
  Description of Artificial Sequence: Synthetic oligonucleotide
aacccaccaccuucaacau

SEQ ID NO: 2049377 - RNA, 19 nt, Artificial Sequence
  Description of Artificial Sequence: Synthetic oligonucleotide
agagcaggagguccagcca

SEQ ID NO: 2049378 - RNA, 19 nt, Artificial Sequence
  Description of Artificial Sequence: Synthetic oligonucleotide
gucccugggagacacauua

SEQ ID NO: 2049379 - RNA, 19 nt, Artificial Sequence
  Description of Artificial Sequence: Synthetic oligonucleotide
agugaaagugcuggagcca

SEQ ID NO: 2049380 - RNA, 19 nt, Artificial Sequence
  Description of Artificial Sequence: Synthetic oligonucleotide
uugucaggucccgaagaug

SEQ ID NO: 2049381 - RNA, 19 nt, Artificial Sequence
  Description of Artificial Sequence: Synthetic oligonucleotide
gugaaagugcuggagccac

SEQ ID NO: 2049382 - RNA, 19 nt, Artificial Sequence
  Description of Artificial Sequence: Synthetic oligonucleotide
ggacucaaacucuccuggg

SEQ ID NO: 2049383 - RNA, 19 nt, Artificial Sequence
  Description of Artificial Sequence: Synthetic oligonucleotide
agcguaggcagcucuuuaa

SEQ ID NO: 2049384 - RNA, 19 nt, Artificial Sequence
  Description of Artificial Sequence: Synthetic oligonucleotide
gucaacaacagcacucuaa

SEQ ID NO: 2049385 - RNA, 19 nt, Artificial Sequence
  Description of Artificial Sequence: Synthetic oligonucleotide
cuccggauggcauagacau

SEQ ID NO: 2049386 - RNA, 19 nt, Artificial Sequence
  Description of Artificial Sequence: Synthetic oligonucleotide
ggcucuuaggcaaagaugu

SEQ ID NO: 2049387 - RNA, 19 nt, Artificial Sequence
  Description of Artificial Sequence: Synthetic oligonucleotide
ggacaguguguuucucugg

SEQ ID NO: 2049388 - RNA, 19 nt, Artificial Sequence
  Description of Artificial Sequence: Synthetic oligonucleotide
agcacuccggauggcauag

SEQ ID NO: 2049389 - RNA, 19 nt, Artificial Sequence
  Description of Artificial Sequence: Synthetic oligonucleotide
cuccaaugcccucagggga

SEQ ID NO: 2049390 - RNA, 19 nt, Artificial Sequence
  Description of Artificial Sequence: Synthetic oligonucleotide
gucguggaugcccagcaga

SEQ ID NO: 2049391 - RNA, 19 nt, Artificial Sequence
  Description of Artificial Sequence: Synthetic oligonucleotide
aagcguaggcagcucuuua

SEQ ID NO: 2049392 - RNA, 19 nt, Artificial Sequence
  Description of Artificial Sequence: Synthetic oligonucleotide
agagaaguaguggccacau

SEQ ID NO: 2049393 - RNA, 19 nt, Artificial Sequence
  Description of Artificial Sequence: Synthetic oligonucleotide
gauccggugagugaguuau

SEQ ID NO: 2049394 - RNA, 19 nt, Artificial Sequence
  Description of Artificial Sequence: Synthetic oligonucleotide
ugcucccgccccaugcuug

SEQ ID NO: 2049395 - RNA, 19 nt, Artificial Sequence
  Description of Artificial Sequence: Synthetic oligonucleotide
aguaguggccacauccagu

SEQ ID NO: 2049396 - RNA, 19 nt, Artificial Sequence
  Description of Artificial Sequence: Synthetic oligonucleotide
ggcaaugaaauccaagaau

SEQ ID NO: 2049397 - RNA, 19 nt, Artificial Sequence
  Description of Artificial Sequence: Synthetic oligonucleotide
cuguccaucuugucagguc

SEQ ID NO: 2049398 - RNA, 19 nt, Artificial Sequence
  Description of Artificial Sequence: Synthetic oligonucleotide
cacucugacucguccuccc

SEQ ID NO: 2049399 - RNA, 19 nt, Artificial Sequence
  Description of Artificial Sequence: Synthetic oligonucleotide
gugggaaugaauguagccu

SEQ ID NO: 2049400 - RNA, 19 nt, Artificial Sequence
  Description of Artificial Sequence: Synthetic oligonucleotide
ggauggacaguagagaucu

SEQ ID NO: 2049401 - RNA, 19 nt, Artificial Sequence
  Description of Artificial Sequence: Synthetic oligonucleotide
uggagccacguccacuguc

SEQ ID NO: 2049402 - RNA, 19 nt, Artificial Sequence
  Description of Artificial Sequence: Synthetic oligonucleotide
cagcaaucaccacggaguc

SEQ ID NO: 2049403 - RNA, 19 nt, Artificial Sequence
  Description of Artificial Sequence: Synthetic oligonucleotide
ugggagccgggagagcggg

SEQ ID NO: 2049404 - RNA, 19 nt, Artificial Sequence
  Description of Artificial Sequence: Synthetic oligonucleotide
ggugagugaguuauggcuc

SEQ ID NO: 2049405 - RNA, 19 nt, Artificial Sequence
  Description of Artificial Sequence: Synthetic oligonucleotide
uagcagugaaagugcugga

SEQ ID NO: 2049406 - RNA, 19 nt, Artificial Sequence
  Description of Artificial Sequence: Synthetic oligonucleotide
cacuccggauggcauagac

SEQ ID NO: 2049407 - RNA, 19 nt, Artificial Sequence
  Description of Artificial Sequence: Synthetic oligonucleotide
agguccagccagguuacag

SEQ ID NO: 2049408 - RNA, 19 nt, Artificial Sequence
  Description of Artificial Sequence: Synthetic oligonucleotide
agacaucgaugaaggacuc

SEQ ID NO: 2049409 - RNA, 19 nt, Artificial Sequence
  Description of Artificial Sequence: Synthetic oligonucleotide
guccccaucccacucugac

SEQ ID NO: 2049410 - RNA, 19 nt, Artificial Sequence
  Description of Artificial Sequence: Synthetic oligonucleotide
gcacuugggagucaacaac

SEQ ID NO: 2049411 - RNA, 19 nt, Artificial Sequence
  Description of Artificial Sequence: Synthetic oligonucleotide
agacacauuagcagugaaa

SEQ ID NO: 2049412 - RNA, 19 nt, Artificial Sequence
  Description of Artificial Sequence: Synthetic oligonucleotide
aaacggacgcgggaagaaa

SEQ ID NO: 2049413 - RNA, 19 nt, Artificial Sequence
  Description of Artificial Sequence: Synthetic oligonucleotide
ugaugucguggaugcccag

SEQ ID NO: 2049414 - RNA, 19 nt, Artificial Sequence
  Description of Artificial Sequence: Synthetic oligonucleotide
caggcaggcucuuaggcaa

SEQ ID NO: 2049415 - RNA, 19 nt, Artificial Sequence
  Description of Artificial Sequence: Synthetic oligonucleotide
cucugguaggaaaagccua

SEQ ID NO: 2049416 - RNA, 19 nt, Artificial Sequence
  Description of Artificial Sequence: Synthetic oligonucleotide
gagacacauuagcagugaa

SEQ ID NO: 2049417 - RNA, 19 nt, Artificial Sequence
  Description of Artificial Sequence: Synthetic oligonucleotide
cucaggggaggugccauag

SEQ ID NO: 2049418 - RNA, 19 nt, Artificial Sequence
  Description of Artificial Sequence: Synthetic oligonucleotide
gaugacagagaaggccauc

SEQ ID NO: 2049419 - RNA, 19 nt, Artificial Sequence
  Description of Artificial Sequence: Synthetic oligonucleotide
uccccaucccacucugacu

SEQ ID NO: 2049420 - RNA, 19 nt, Artificial Sequence
  Description of Artificial Sequence: Synthetic oligonucleotide
caccacggagucaggcagg

SEQ ID NO: 2049421 - RNA, 19 nt, Artificial Sequence
  Description of Artificial Sequence: Synthetic oligonucleotide
aaugucaaugaggcccaua

SEQ ID NO: 2049422 - RNA, 19 nt, Artificial Sequence
  Description of Artificial Sequence: Synthetic oligonucleotide
gguuacaguccccauccca

SEQ ID NO: 2049423 - RNA, 19 nt, Artificial Sequence
  Description of Artificial Sequence: Synthetic oligonucleotide
gagucaacaacagcacucu

SEQ ID NO: 2049424 - RNA, 19 nt, Artificial Sequence
  Description of Artificial Sequence: Synthetic oligonucleotide
gcgggaagaaaggacagug

SEQ ID NO: 2049425 - RNA, 19 nt, Artificial Sequence
  Description of Artificial Sequence: Synthetic oligonucleotide
acggacgcgggaagaaagg

SEQ ID NO: 2049426 - RNA, 19 nt, Artificial Sequence
  Description of Artificial Sequence: Synthetic oligonucleotide
cuaagacucucagaaccca

SEQ ID NO: 2049427 - RNA, 19 nt, Artificial Sequence
  Description of Artificial Sequence: Synthetic oligonucleotide
cacuaggaacuccacaucu

SEQ ID NO: 2049428 - RNA, 19 nt, Artificial Sequence
  Description of Artificial Sequence: Synthetic oligonucleotide
ccaauauauacuuucuggu

SEQ ID NO: 2049429 - RNA, 19 nt, Artificial Sequence
  Description of Artificial Sequence: Synthetic oligonucleotide
cauagacaucgaugaagga

SEQ ID NO: 2049430 - RNA, 19 nt, Artificial Sequence
  Description of Artificial Sequence: Synthetic oligonucleotide
cuuuaaccuuuuccuuauc

SEQ ID NO: 2049431 - RNA, 19 nt, Artificial Sequence
  Description of Artificial Sequence: Synthetic oligonucleotide
caggggaggugccauagga

SEQ ID NO: 2049432 - RNA, 19 nt, Artificial Sequence
  Description of Artificial Sequence: Synthetic oligonucleotide
auacugugucagaauguca

SEQ ID NO: 2049433 - RNA, 19 nt, Artificial Sequence
  Description of Artificial Sequence: Synthetic oligonucleotide
guaguggccacauccaguu

SEQ ID NO: 2049434 - RNA, 19 nt, Artificial Sequence
  Description of Artificial Sequence: Synthetic oligonucleotide
cucguccucccgcacgggc

SEQ ID NO: 2049435 - RNA, 19 nt, Artificial Sequence
  Description of Artificial Sequence: Synthetic oligonucleotide
ccggugggaaugaauguag

SEQ ID NO: 2049436 - RNA, 19 nt, Artificial Sequence
  Description of Artificial Sequence: Synthetic oligonucleotide
ccuucaacauaaagcagca

SEQ ID NO: 2049437 - RNA, 19 nt, Artificial Sequence
  Description of Artificial Sequence: Synthetic oligonucleotide
gagaaguaguggccacauc

SEQ ID NO: 2049438 - RNA, 19 nt, Artificial Sequence
  Description of Artificial Sequence: Synthetic oligonucleotide
cuuaagcguaggcagcucu

SEQ ID NO: 2049439 - RNA, 19 nt, Artificial Sequence
  Description of Artificial Sequence: Synthetic oligonucleotide
uguagccuccaaugcccuc

SEQ ID NO: 2049440 - RNA, 19 nt, Artificial Sequence
  Description of Artificial Sequence: Synthetic oligonucleotide
caaucaccacggagucagg

SEQ ID NO: 2049441 - RNA, 19 nt, Artificial Sequence
  Description of Artificial Sequence: Synthetic oligonucleotide
uaagcguaggcagcucuuu

SEQ ID NO: 2049442 - RNA, 19 nt, Artificial Sequence
  Description of Artificial Sequence: Synthetic oligonucleotide
augaagcaagagggcuuac

SEQ ID NO: 2049443 - RNA, 19 nt, Artificial Sequence
  Description of Artificial Sequence: Synthetic oligonucleotide
cauuagcagugaaagugcu

SEQ ID NO: 2049444 - RNA, 19 nt, Artificial Sequence
  Description of Artificial Sequence: Synthetic oligonucleotide
cccugggagacacauuagc

SEQ ID NO: 2049445 - RNA, 19 nt, Artificial Sequence
  Description of Artificial Sequence: Synthetic oligonucleotide
cguaggcagcucuuuaacc

SEQ ID NO: 2049446 - RNA, 19 nt, Artificial Sequence
  Description of Artificial Sequence: Synthetic oligonucleotide
gggugggaagugaagauga

SEQ ID NO: 2049447 - RNA, 19 nt, Artificial Sequence
  Description of Artificial Sequence: Synthetic oligonucleotide
gggagacacauuagcagug

SEQ ID NO: 2049448 - RNA, 19 nt, Artificial Sequence
  Description of Artificial Sequence: Synthetic oligonucleotide
gcagcaaucaccacggagu

SEQ ID NO: 2049449 - RNA, 19 nt, Artificial Sequence
  Description of Artificial Sequence: Synthetic oligonucleotide
gagggcuuacugggagccg

SEQ ID NO: 2049450 - RNA, 19 nt, Artificial Sequence
  Description of Artificial Sequence: Synthetic oligonucleotide
aacucuccuggggcccagg

SEQ ID NO: 2049451 - RNA, 19 nt, Artificial Sequence
  Description of Artificial Sequence: Synthetic oligonucleotide
uccggauggcauagacauc

SEQ ID NO: 2049452 - RNA, 19 nt, Artificial Sequence
  Description of Artificial Sequence: Synthetic oligonucleotide
cacgggccccucuuccucc

SEQ ID NO: 2049453 - RNA, 19 nt, Artificial Sequence
  Description of Artificial Sequence: Synthetic oligonucleotide
gggccggugggaaugaaug

SEQ ID NO: 2049454 - RNA, 19 nt, Artificial Sequence
  Description of Artificial Sequence: Synthetic oligonucleotide
cugcacuaggaacuccaca

SEQ ID NO: 2049455 - RNA, 19 nt, Artificial Sequence
  Description of Artificial Sequence: Synthetic oligonucleotide
agcuaucuuuggaagggau

SEQ ID NO: 2049456 - RNA, 19 nt, Artificial Sequence
  Description of Artificial Sequence: Synthetic oligonucleotide
aaacucuccuggggcccag

SEQ ID NO: 2049457 - RNA, 19 nt, Artificial Sequence
  Description of Artificial Sequence: Synthetic oligonucleotide
caccaagauggaaugauuu

SEQ ID NO: 2049458 - RNA, 19 nt, Artificial Sequence
  Description of Artificial Sequence: Synthetic oligonucleotide
acuccggauggcauagaca

SEQ ID NO: 2049459 - RNA, 19 nt, Artificial Sequence
  Description of Artificial Sequence: Synthetic oligonucleotide
ggugccauaggagcccacc

SEQ ID NO: 2049460 - RNA, 19 nt, Artificial Sequence
  Description of Artificial Sequence: Synthetic oligonucleotide
acgcgggaagaaaggacag

SEQ ID NO: 2049461 - RNA, 19 nt, Artificial Sequence
  Description of Artificial Sequence: Synthetic oligonucleotide
agucaacaacagcacucua

SEQ ID NO: 2049462 - RNA, 19 nt, Artificial Sequence
  Description of Artificial Sequence: Synthetic oligonucleotide
gucccgaagauggcaaaca

SEQ ID NO: 2049463 - RNA, 19 nt, Artificial Sequence
  Description of Artificial Sequence: Synthetic oligonucleotide
ggaggugccauaggagccc

SEQ ID NO: 2049464 - RNA, 19 nt, Artificial Sequence
  Description of Artificial Sequence: Synthetic oligonucleotide
gacaucgaugaaggacuca

SEQ ID NO: 2049465 - RNA, 19 nt, Artificial Sequence
  Description of Artificial Sequence: Synthetic oligonucleotide
ggagccugcagccugaauu

SEQ ID NO: 2049466 - RNA, 19 nt, Artificial Sequence
  Description of Artificial Sequence: Synthetic oligonucleotide
augaggcccauaaaauaua

SEQ ID NO: 2049467 - RNA, 19 nt, Artificial Sequence
  Description of Artificial Sequence: Synthetic oligonucleotide
gcuaucuuuggaagggauc

SEQ ID NO: 2049468 - RNA, 19 nt, Artificial Sequence
  Description of Artificial Sequence: Synthetic oligonucleotide
gggaagugaagaugacaga

SEQ ID NO: 2049469 - RNA, 19 nt, Artificial Sequence
  Description of Artificial Sequence: Synthetic oligonucleotide
cugguaggaaaagccuauc

SEQ ID NO: 2049470 - RNA, 19 nt, Artificial Sequence
  Description of Artificial Sequence: Synthetic oligonucleotide
auggaaugauuuggaugga

SEQ ID NO: 2049471 - RNA, 19 nt, Artificial Sequence
  Description of Artificial Sequence: Synthetic oligonucleotide
ggcucagagccccggauga

SEQ ID NO: 2049472 - RNA, 19 nt, Artificial Sequence
  Description of Artificial Sequence: Synthetic oligonucleotide
gaaggagccugcagccuga

SEQ ID NO: 2049473 - RNA, 19 nt, Artificial Sequence
  Description of Artificial Sequence: Synthetic oligonucleotide
ugcccagcagaagacugua

SEQ ID NO: 2049474 - RNA, 19 nt, Artificial Sequence
  Description of Artificial Sequence: Synthetic oligonucleotide
gcucaggauggacaguaga

SEQ ID NO: 2049475 - RNA, 19 nt, Artificial Sequence
  Description of Artificial Sequence: Synthetic oligonucleotide
agcaaucaccacggaguca

SEQ ID NO: 2049476 - RNA, 19 nt, Artificial Sequence
  Description of Artificial Sequence: Synthetic oligonucleotide
uaguggccacauccaguuc

SEQ ID NO: 2049477 - RNA, 19 nt, Artificial Sequence
  Description of Artificial Sequence: Synthetic oligonucleotide
uugacgguuuucgcugcau

SEQ ID NO: 2049478 - RNA, 19 nt, Artificial Sequence
  Description of Artificial Sequence: Synthetic oligonucleotide
gcguaggcagcucuuuaac

SEQ ID NO: 2049479 - RNA, 19 nt, Artificial Sequence
  Description of Artificial Sequence: Synthetic oligonucleotide
cccgccccaugcuugacgg

SEQ ID NO: 2049480 - RNA, 19 nt, Artificial Sequence
  Description of Artificial Sequence: Synthetic oligonucleotide
ccagguuacaguccccauc

SEQ ID NO: 2049481 - RNA, 19 nt, Artificial Sequence
  Description of Artificial Sequence: Synthetic oligonucleotide
gcuugacgguuuucgcugc

SEQ ID NO: 2049482 - RNA, 19 nt, Artificial Sequence
  Description of Artificial Sequence: Synthetic oligonucleotide
gagccgggagagcgggcag

SEQ ID NO: 2049483 - RNA, 19 nt, Artificial Sequence
  Description of Artificial Sequence: Synthetic oligonucleotide
acggagucaggcaggcucu

SEQ ID NO: 2049484 - RNA, 19 nt, Artificial Sequence
  Description of Artificial Sequence: Synthetic oligonucleotide
caccagagcaggaggucca

SEQ ID NO: 2049485 - RNA, 19 nt, Artificial Sequence
  Description of Artificial Sequence: Synthetic oligonucleotide
caucccacucugacucguc

SEQ ID NO: 2049486 - RNA, 19 nt, Artificial Sequence
  Description of Artificial Sequence: Synthetic oligonucleotide
caggucccgaagauggcaa

SEQ ID NO: 2049487 - RNA, 19 nt, Artificial Sequence
  Description of Artificial Sequence: Synthetic oligonucleotide
gcaugagcugcuuucuucu

SEQ ID NO: 2049488 - RNA, 19 nt, Artificial Sequence
  Description of Artificial Sequence: Synthetic oligonucleotide
gccugaauuuagcaaggaa

SEQ ID NO: 2049489 - RNA, 19 nt, Artificial Sequence
  Description of Artificial Sequence: Synthetic oligonucleotide
cugcucaggauggacagua

SEQ ID NO: 2049490 - RNA, 19 nt, Artificial Sequence
  Description of Artificial Sequence: Synthetic oligonucleotide
ggcaucauacugugucaga

SEQ ID NO: 2049491 - RNA, 19 nt, Artificial Sequence
  Description of Artificial Sequence: Synthetic oligonucleotide
cuccagaaauauuuucuuu

SEQ ID NO: 2049492 - RNA, 19 nt, Artificial Sequence
  Description of Artificial Sequence: Synthetic oligonucleotide
augcccagcagaagacugu

SEQ ID NO: 2049493 - RNA, 19 nt, Artificial Sequence
  Description of Artificial Sequence: Synthetic oligonucleotide
ucaaggcacuugggaguca

SEQ ID NO: 2049494 - RNA, 19 nt, Artificial Sequence
  Description of Artificial Sequence: Synthetic oligonucleotide
ccggugagugaguuauggc

SEQ ID NO: 2049495 - RNA, 19 nt, Artificial Sequence
  Description of Artificial Sequence: Synthetic oligonucleotide
aggucccgaagauggcaaa

SEQ ID NO: 2049496 - RNA, 19 nt, Artificial Sequence
  Description of Artificial Sequence: Synthetic oligonucleotide
acugcucaggauggacagu

SEQ ID NO: 2049497 - RNA, 19 nt, Artificial Sequence
  Description of Artificial Sequence: Synthetic oligonucleotide
cuugucaggucccgaagau

SEQ ID NO: 2049498 - RNA, 19 nt, Artificial Sequence
  Description of Artificial Sequence: Synthetic oligonucleotide
cugacucguccucccgcac

SEQ ID NO: 2049499 - RNA, 19 nt, Artificial Sequence
  Description of Artificial Sequence: Synthetic oligonucleotide
gguuuucgcugcaugagcu

SEQ ID NO: 2049500 - RNA, 19 nt, Artificial Sequence
  Description of Artificial Sequence: Synthetic oligonucleotide
auguagccuccaaugcccu

SEQ ID NO: 2049501 - RNA, 19 nt, Artificial Sequence
  Description of Artificial Sequence: Synthetic oligonucleotide
cuugacgguuuucgcugca

SEQ ID NO: 2049502 - RNA, 19 nt, Artificial Sequence
  Description of Artificial Sequence: Synthetic oligonucleotide
ggacgcgggaagaaaggac

SEQ ID NO: 2049503 - RNA, 19 nt, Artificial Sequence
  Description of Artificial Sequence: Synthetic oligonucleotide
ccccucagcacuccggaug

SEQ ID NO: 2049504 - RNA, 19 nt, Artificial Sequence
  Description of Artificial Sequence: Synthetic oligonucleotide
agccacguccacuguccau

SEQ ID NO: 2049505 - RNA, 19 nt, Artificial Sequence
  Description of Artificial Sequence: Synthetic oligonucleotide
gccugcagccugaauuuag

SEQ ID NO: 2049506 - RNA, 19 nt, Artificial Sequence
  Description of Artificial Sequence: Synthetic oligonucleotide
ucgcugcaugagcugcuuu

SEQ ID NO: 2049507 - RNA, 19 nt, Artificial Sequence
  Description of Artificial Sequence: Synthetic oligonucleotide
cgguuuucgcugcaugagc

SEQ ID NO: 2049508 - RNA, 19 nt, Artificial Sequence
  Description of Artificial Sequence: Synthetic oligonucleotide
gguucuuguugaggaaguc

SEQ ID NO: 2049509 - RNA, 19 nt, Artificial Sequence
  Description of Artificial Sequence: Synthetic oligonucleotide
gcuuagcguacugcucagg

SEQ ID NO: 2049510 - RNA, 19 nt, Artificial Sequence
  Description of Artificial Sequence: Synthetic oligonucleotide
ggucccgaagauggcaaac

SEQ ID NO: 2049511 - RNA, 19 nt, Artificial Sequence
  Description of Artificial Sequence: Synthetic oligonucleotide
gaggugccauaggagccca

SEQ ID NO: 2049512 - RNA, 19 nt, Artificial Sequence
  Description of Artificial Sequence: Synthetic oligonucleotide
cagcugcacuaggaacucc

SEQ ID NO: 2049513 - RNA, 19 nt, Artificial Sequence
  Description of Artificial Sequence: Synthetic oligonucleotide
gccccggaugaugucgugg

SEQ ID NO: 2049514 - RNA, 19 nt, Artificial Sequence
  Description of Artificial Sequence: Synthetic oligonucleotide
cagagccccggaugauguc

SEQ ID NO: 2049515 - RNA, 19 nt, Artificial Sequence
  Description of Artificial Sequence: Synthetic oligonucleotide
agccccggaugaugucgug

SEQ ID NO: 2049516 - RNA, 19 nt, Artificial Sequence
  Description of Artificial Sequence: Synthetic oligonucleotide
ccauauccuuaagcguagg

SEQ ID NO: 2049517 - RNA, 19 nt, Artificial Sequence
  Description of Artificial Sequence: Synthetic oligonucleotide
ccccuaagacucucagaac

SEQ ID NO: 2049518 - RNA, 19 nt, Artificial Sequence
  Description of Artificial Sequence: Synthetic oligonucleotide
cgcugcaugagcugcuuuc

SEQ ID NO: 2049519 - RNA, 19 nt, Artificial Sequence
  Description of Artificial Sequence: Synthetic oligonucleotide
gacuguaguccaugaucuu

SEQ ID NO: 2049520 - RNA, 19 nt, Artificial Sequence
  Description of Artificial Sequence: Synthetic oligonucleotide
ucccgcacgggccccucuu

SEQ ID NO: 2049521 - RNA, 19 nt, Artificial Sequence
  Description of Artificial Sequence: Synthetic oligonucleotide
caaacucuccuggggccca

SEQ ID NO: 2049522 - RNA, 19 nt, Artificial Sequence
  Description of Artificial Sequence: Synthetic oligonucleotide
cccaucccacucugacucg

SEQ ID NO: 2049523 - RNA, 19 nt, Artificial Sequence
  Description of Artificial Sequence: Synthetic oligonucleotide
gccaucugucccugggaga

SEQ ID NO: 2049524 - RNA, 19 nt, Artificial Sequence
  Description of Artificial Sequence: Synthetic oligonucleotide
cggugagugaguuauggcu

SEQ ID NO: 2049525 - RNA, 19 nt, Artificial Sequence
  Description of Artificial Sequence: Synthetic oligonucleotide
aggugccauaggagcccac

SEQ ID NO: 2049526 - RNA, 19 nt, Artificial Sequence
  Description of Artificial Sequence: Synthetic oligonucleotide
gcacucuaaugaagcaaga

SEQ ID NO: 2049527 - RNA, 19 nt, Artificial Sequence
  Description of Artificial Sequence: Synthetic oligonucleotide
cagcacuccggauggcaua

SEQ ID NO: 2049528 - RNA, 19 nt, Artificial Sequence
  Description of Artificial Sequence: Synthetic oligonucleotide
agggauccggugagugagu

SEQ ID NO: 2049529 - RNA, 19 nt, Artificial Sequence
  Description of Artificial Sequence: Synthetic oligonucleotide
ccaaugcccucaggggagg

SEQ ID NO: 2049530 - RNA, 19 nt, Artificial Sequence
  Description of Artificial Sequence: Synthetic oligonucleotide
ggccacauccaguuccccu

SEQ ID NO: 2049531 - RNA, 19 nt, Artificial Sequence
  Description of Artificial Sequence: Synthetic oligonucleotide
auccggugagugaguuaug

SEQ ID NO: 2049532 - RNA, 19 nt, Artificial Sequence
  Description of Artificial Sequence: Synthetic oligonucleotide
ggaacuccacaucucgcuu

SEQ ID NO: 2049533 - RNA, 19 nt, Artificial Sequence
  Description of Artificial Sequence: Synthetic oligonucleotide
ccaggggccggugggaaug

SEQ ID NO: 2049534 - RNA, 19 nt, Artificial Sequence
  Description of Artificial Sequence: Synthetic oligonucleotide
gccggugggaaugaaugua

SEQ ID NO: 2049535 - RNA, 19 nt, Artificial Sequence
  Description of Artificial Sequence: Synthetic oligonucleotide
agccugcagccugaauuua

SEQ ID NO: 2049536 - RNA, 19 nt, Artificial Sequence
  Description of Artificial Sequence: Synthetic oligonucleotide
ccauaaaauauaccuccuu

SEQ ID NO: 2049537 - RNA, 19 nt, Artificial Sequence
  Description of Artificial Sequence: Synthetic oligonucleotide
cgcuuagcguacugcucag

SEQ ID NO: 2049538 - RNA, 19 nt, Artificial Sequence
  Description of Artificial Sequence: Synthetic oligonucleotide
cugucccugggagacacau

SEQ ID NO: 2049539 - RNA, 19 nt, Artificial Sequence
  Description of Artificial Sequence: Synthetic oligonucleotide
gcugcaugagcugcuuucu

SEQ ID NO: 2049540 - RNA, 19 nt, Artificial Sequence
  Description of Artificial Sequence: Synthetic oligonucleotide
ccgcacgggccccucuucc

SEQ ID NO: 2049541 - RNA, 19 nt, Artificial Sequence
  Description of Artificial Sequence: Synthetic oligonucleotide
ggauccggugagugaguua

SEQ ID NO: 2049542 - RNA, 19 nt, Artificial Sequence
  Description of Artificial Sequence: Synthetic oligonucleotide
ggccggugggaaugaaugu

SEQ ID NO: 2049543 - RNA, 19 nt, Artificial Sequence
  Description of Artificial Sequence: Synthetic oligonucleotide
cguccucccgcacgggccc

SEQ ID NO: 2049544 - RNA, 19 nt, Artificial Sequence
  Description of Artificial Sequence: Synthetic oligonucleotide
ccuuaagcguaggcagcuc

SEQ ID NO: 2049545 - RNA, 19 nt, Artificial Sequence
  Description of Artificial Sequence: Synthetic oligonucleotide
gcaggcucuuaggcaaaga

SEQ ID NO: 2049546 - RNA, 19 nt, Artificial Sequence
  Description of Artificial Sequence: Synthetic oligonucleotide
ccuauccaccaagauggaa

SEQ ID NO: 2049547 - RNA, 19 nt, Artificial Sequence
  Description of Artificial Sequence: Synthetic oligonucleotide
ggcuuacugggagccggga

SEQ ID NO: 2049548 - RNA, 19 nt, Artificial Sequence
  Description of Artificial Sequence: Synthetic oligonucleotide
cugcaugagcugcuuucuu

SEQ ID NO: 2049549 - RNA, 19 nt, Artificial Sequence
  Description of Artificial Sequence: Synthetic oligonucleotide
ccaccaagauggaaugauu

SEQ ID NO: 2049550 - RNA, 19 nt, Artificial Sequence
  Description of Artificial Sequence: Synthetic oligonucleotide
gccuauccaccaagaugga

SEQ ID NO: 2049551 - RNA, 19 nt, Artificial Sequence
  Description of Artificial Sequence: Synthetic oligonucleotide
caggggccggugggaauga

SEQ ID NO: 2049552 - RNA, 19 nt, Artificial Sequence
  Description of Artificial Sequence: Synthetic oligonucleotide
ggagucaggcaggcucuua

SEQ ID NO: 2049553 - RNA, 19 nt, Artificial Sequence
  Description of Artificial Sequence: Synthetic oligonucleotide
gccagguuacaguccccau

SEQ ID NO: 2049554 - RNA, 19 nt, Artificial Sequence
  Description of Artificial Sequence: Synthetic oligonucleotide
gcguacugcucaggaugga

SEQ ID NO: 2049555 - RNA, 19 nt, Artificial Sequence
  Description of Artificial Sequence: Synthetic oligonucleotide
cggacgcgggaagaaagga

SEQ ID NO: 2049556 - RNA, 19 nt, Artificial Sequence
  Description of Artificial Sequence: Synthetic oligonucleotide
cccgcacgggccccucuuc

SEQ ID NO: 2049557 - RNA, 19 nt, Artificial Sequence
  Description of Artificial Sequence: Synthetic oligonucleotide
caaugcccucaggggaggu

SEQ ID NO: 2049558 - RNA, 19 nt, Artificial Sequence
  Description of Artificial Sequence: Synthetic oligonucleotide
gggauccggugagugaguu

SEQ ID NO: 2049559 - RNA, 19 nt, Artificial Sequence
  Description of Artificial Sequence: Synthetic oligonucleotide
cugcucccgccccaugcuu

SEQ ID NO: 2049560 - RNA, 19 nt, Artificial Sequence
  Description of Artificial Sequence: Synthetic oligonucleotide
ggggccggugggaaugaau

SEQ ID NO: 2049561 - RNA, 19 nt, Artificial Sequence
  Description of Artificial Sequence: Synthetic oligonucleotide
ccaucccacucugacucgu

SEQ ID NO: 2049562 - RNA, 19 nt, Artificial Sequence
  Description of Artificial Sequence: Synthetic oligonucleotide
gccccaugcuugacgguuu

SEQ ID NO: 2049563 - RNA, 19 nt, Artificial Sequence
  Description of Artificial Sequence: Synthetic oligonucleotide
cgcacgggccccucuuccu

SEQ ID NO: 2049564 - RNA, 19 nt, Artificial Sequence
  Description of Artificial Sequence: Synthetic oligonucleotide
cccucaggggaggugccau

SEQ ID NO: 2049565 - RNA, 19 nt, Artificial Sequence
  Description of Artificial Sequence: Synthetic oligonucleotide
ccccaugcuugacgguuuu

SEQ ID NO: 2049566 - RNA, 19 nt, Artificial Sequence
  Description of Artificial Sequence: Synthetic oligonucleotide
cgccccaugcuugacgguu

SEQ ID NO: 2049567 - RNA, 19 nt, Artificial Sequence
  Description of Artificial Sequence: Synthetic oligonucleotide
cccaggggccggugggaau

SEQ ID NO: 2049568 - RNA, 19 nt, Artificial Sequence
  Description of Artificial Sequence: Synthetic oligonucleotide
ccgccccaugcuugacggu

SEQ ID NO: 2049569 - RNA, 19 nt, Artificial Sequence
  Description of Artificial Sequence: Synthetic oligonucleotide
ccacggagucaggcaggcu

SEQ ID NO: 2049570 - RNA, 19 nt, Artificial Sequence
  Description of Artificial Sequence: Synthetic oligonucleotide
ucuuuaauaagcaagggcg

SEQ ID NO: 2049571 - RNA, 19 nt, Artificial Sequence
  Description of Artificial Sequence: Synthetic oligonucleotide
aguauuugcaaucaugcgc

SEQ ID NO: 2049572 - RNA, 19 nt, Artificial Sequence
  Description of Artificial Sequence: Synthetic oligonucleotide
ugucauaucuuuaauaagc

SEQ ID NO: 2049573 - RNA, 19 nt, Artificial Sequence
  Description of Artificial Sequence: Synthetic oligonucleotide
uugacuaugauccaggccu

SEQ ID NO: 2049574 - RNA, 19 nt, Artificial Sequence
  Description of Artificial Sequence: Synthetic oligonucleotide
uucaaaguuuacuagauug

SEQ ID NO: 2049575 - RNA, 19 nt, Artificial Sequence
  Description of Artificial Sequence: Synthetic oligonucleotide
aucuuuaauaagcaagggc

SEQ ID NO: 2049576 - RNA, 19 nt, Artificial Sequence
  Description of Artificial Sequence: Synthetic oligonucleotide
ugaacuguugcaaagcacc

SEQ ID NO: 2049577 - RNA, 19 nt, Artificial Sequence
  Description of Artificial Sequence: Synthetic oligonucleotide
ugaauuucauuaaaucucc

SEQ ID NO: 2049578 - RNA, 19 nt, Artificial Sequence
  Description of Artificial Sequence: Synthetic oligonucleotide
aaaagcugaacacgcuugc

SEQ ID NO: 2049579 - RNA, 19 nt, Artificial Sequence
  Description of Artificial Sequence: Synthetic oligonucleotide
aaaugugugguagauuagc

SEQ ID NO: 2049580 - RNA, 19 nt, Artificial Sequence
  Description of Artificial Sequence: Synthetic oligonucleotide
ugugugguagauuagcucc

SEQ ID NO: 2049581 - RNA, 19 nt, Artificial Sequence
  Description of Artificial Sequence: Synthetic oligonucleotide
acuagauugucaaugaacg

SEQ ID NO: 2049582 - RNA, 19 nt, Artificial Sequence
  Description of Artificial Sequence: Synthetic oligonucleotide
ucugagauuuguuugacga

SEQ ID NO: 2049583 - RNA, 19 nt, Artificial Sequence
  Description of Artificial Sequence: Synthetic oligonucleotide
uuucaaaagcugaacacgc

SEQ ID NO: 2049584 - RNA, 19 nt, Artificial Sequence
  Description of Artificial Sequence: Synthetic oligonucleotide
auuagguuugagcaccacc

SEQ ID NO: 2049585 - RNA, 19 nt, Artificial Sequence
  Description of Artificial Sequence: Synthetic oligonucleotide
uuagguuugagcaccaccu

SEQ ID NO: 2049586 - RNA, 19 nt, Artificial Sequence
  Description of Artificial Sequence: Synthetic oligonucleotide
ucaucaguucaaaaguucc

SEQ ID NO: 2049587 - RNA, 19 nt, Artificial Sequence
  Description of Artificial Sequence: Synthetic oligonucleotide
aucauuagguuugagcacc

SEQ ID NO: 2049588 - RNA, 19 nt, Artificial Sequence
  Description of Artificial Sequence: Synthetic oligonucleotide
uuuacuagauugucaauga

SEQ ID NO: 2049589 - RNA, 19 nt, Artificial Sequence
  Description of Artificial Sequence: Synthetic oligonucleotide
aaauuaugccuuccaaaug

SEQ ID NO: 2049590 - RNA, 19 nt, Artificial Sequence
  Description of Artificial Sequence: Synthetic oligonucleotide
ucaucagagccacggaucg

SEQ ID NO: 2049591 - RNA, 19 nt, Artificial Sequence
  Description of Artificial Sequence: Synthetic oligonucleotide
auuagaacuucuuaaacuu

SEQ ID NO: 2049592 - RNA, 19 nt, Artificial Sequence
  Description of Artificial Sequence: Synthetic oligonucleotide
uaaaauuaugccuuccaaa

SEQ ID NO: 2049593 - RNA, 19 nt, Artificial Sequence
  Description of Artificial Sequence: Synthetic oligonucleotide
aguuuagcugcugucagcc

SEQ ID NO: 2049594 - RNA, 19 nt, Artificial Sequence
  Description of Artificial Sequence: Synthetic oligonucleotide
uacuagauugucaaugaac

SEQ ID NO: 2049595 - RNA, 19 nt, Artificial Sequence
  Description of Artificial Sequence: Synthetic oligonucleotide
auaggugugguccaugcag

SEQ ID NO: 2049596 - RNA, 19 nt, Artificial Sequence
  Description of Artificial Sequence: Synthetic oligonucleotide
aaugaacgucuuguuaccc

SEQ ID NO: 2049597 - RNA, 19 nt, Artificial Sequence
  Description of Artificial Sequence: Synthetic oligonucleotide
auacugaaacaucauuagg

SEQ ID NO: 2049598 - RNA, 19 nt, Artificial Sequence
  Description of Artificial Sequence: Synthetic oligonucleotide
uuuucaaaguuuacuagau

SEQ ID NO: 2049599 - RNA, 19 nt, Artificial Sequence
  Description of Artificial Sequence: Synthetic oligonucleotide
uguucuggcaguauuugca

SEQ ID NO: 2049600 - RNA, 19 nt, Artificial Sequence
  Description of Artificial Sequence: Synthetic oligonucleotide
guagaccuuaaacaaaacc

SEQ ID NO: 2049601 - RNA, 19 nt, Artificial Sequence
  Description of Artificial Sequence: Synthetic oligonucleotide
agaguucccagucauaugu

SEQ ID NO: 2049602 - RNA, 19 nt, Artificial Sequence
  Description of Artificial Sequence: Synthetic oligonucleotide
agucgaauugcucucgcgg

SEQ ID NO: 2049603 - RNA, 19 nt, Artificial Sequence
  Description of Artificial Sequence: Synthetic oligonucleotide
ucuccucaggaacaaaucc

SEQ ID NO: 2049604 - RNA, 19 nt, Artificial Sequence
  Description of Artificial Sequence: Synthetic oligonucleotide
uuugcaaucaugcgcauuu

SEQ ID NO: 2049605 - RNA, 19 nt, Artificial Sequence
  Description of Artificial Sequence: Synthetic oligonucleotide
uuuuguacuccuugcagug

SEQ ID NO: 2049606 - RNA, 19 nt, Artificial Sequence
  Description of Artificial Sequence: Synthetic oligonucleotide
ugccaaucggcucacggcg

SEQ ID NO: 2049607 - RNA, 19 nt, Artificial Sequence
  Description of Artificial Sequence: Synthetic oligonucleotide
caaaaguuccuacuguccc

SEQ ID NO: 2049608 - RNA, 19 nt, Artificial Sequence
  Description of Artificial Sequence: Synthetic oligonucleotide
uuuagcugcugucagccug

SEQ ID NO: 2049609 - RNA, 19 nt, Artificial Sequence
  Description of Artificial Sequence: Synthetic oligonucleotide
ucauauguugucaucuggu

SEQ ID NO: 2049610 - RNA, 19 nt, Artificial Sequence
  Description of Artificial Sequence: Synthetic oligonucleotide
guuuacuagauugucaaug

SEQ ID NO: 2049611 - RNA, 19 nt, Artificial Sequence
  Description of Artificial Sequence: Synthetic oligonucleotide
augcaguagaccuuaaaca

SEQ ID NO: 2049612 - RNA, 19 nt, Artificial Sequence
  Description of Artificial Sequence: Synthetic oligonucleotide
acuguugcaaagcaccuug

SEQ ID NO: 2049613 - RNA, 19 nt, Artificial Sequence
  Description of Artificial Sequence: Synthetic oligonucleotide
acuccuugcagugagccgc

SEQ ID NO: 2049614 - RNA, 19 nt, Artificial Sequence
  Description of Artificial Sequence: Synthetic oligonucleotide
agcucaucaguucaaaagu

SEQ ID NO: 2049615 - RNA, 19 nt, Artificial Sequence
  Description of Artificial Sequence: Synthetic oligonucleotide
uaucuuuaauaagcaaggg

SEQ ID NO: 2049616 - RNA, 19 nt, Artificial Sequence
  Description of Artificial Sequence: Synthetic oligonucleotide
ugguaugccaagucuuucg

SEQ ID NO: 2049617 - RNA, 19 nt, Artificial Sequence
  Description of Artificial Sequence: Synthetic oligonucleotide
ugguagauuagcuccagcu

SEQ ID NO: 2049618 - RNA, 19 nt, Artificial Sequence
  Description of Artificial Sequence: Synthetic oligonucleotide
uucaaacucugcauuagaa

SEQ ID NO: 2049619 - RNA, 19 nt, Artificial Sequence
  Description of Artificial Sequence: Synthetic oligonucleotide
acggcgacauuacugaguc

SEQ ID NO: 2049620 - RNA, 19 nt, Artificial Sequence
  Description of Artificial Sequence: Synthetic oligonucleotide
uaauaagcaagggcgauga

SEQ ID NO: 2049621 - RNA, 19 nt, Artificial Sequence
  Description of Artificial Sequence: Synthetic oligonucleotide
guaaaugucauaucuuuaa

SEQ ID NO: 2049622 - RNA, 19 nt, Artificial Sequence
  Description of Artificial Sequence: Synthetic oligonucleotide
uuugcuuggcaguuucucc

SEQ ID NO: 2049623 - RNA, 19 nt, Artificial Sequence
  Description of Artificial Sequence: Synthetic oligonucleotide
aguaccgcacuguucuggc

SEQ ID NO: 2049624 - RNA, 19 nt, Artificial Sequence
  Description of Artificial Sequence: Synthetic oligonucleotide
agugagucgaauugcucuc

SEQ ID NO: 2049625 - RNA, 19 nt, Artificial Sequence
  Description of Artificial Sequence: Synthetic oligonucleotide
augucauaucuuuaauaag

SEQ ID NO: 2049626 - RNA, 19 nt, Artificial Sequence
  Description of Artificial Sequence: Synthetic oligonucleotide
uuucgagcucaucaguuca

SEQ ID NO: 2049627 - RNA, 19 nt, Artificial Sequence
  Description of Artificial Sequence: Synthetic oligonucleotide
guagauuagcuccagcuca

SEQ ID NO: 2049628 - RNA, 19 nt, Artificial Sequence
  Description of Artificial Sequence: Synthetic oligonucleotide
gucauauguugucaucugg

SEQ ID NO: 2049629 - RNA, 19 nt, Artificial Sequence
  Description of Artificial Sequence: Synthetic oligonucleotide
uuaauggugagcgucguaa

SEQ ID NO: 2049630 - RNA, 19 nt, Artificial Sequence
  Description of Artificial Sequence: Synthetic oligonucleotide
aaaguuccuacugucccag

SEQ ID NO: 2049631 - RNA, 19 nt, Artificial Sequence
  Description of Artificial Sequence: Synthetic oligonucleotide
augugugguagauuagcuc

SEQ ID NO: 2049632 - RNA, 19 nt, Artificial Sequence
  Description of Artificial Sequence: Synthetic oligonucleotide
uaugauccaggccuucccc

SEQ ID NO: 2049633 - RNA, 19 nt, Artificial Sequence
  Description of Artificial Sequence: Synthetic oligonucleotide
agugccaaucggcucacgg

SEQ ID NO: 2049634 - RNA, 19 nt, Artificial Sequence
  Description of Artificial Sequence: Synthetic oligonucleotide
ucuuguuaccccucaugag

SEQ ID NO: 2049635 - RNA, 19 nt, Artificial Sequence
  Description of Artificial Sequence: Synthetic oligonucleotide
aauccaaguuugcuguggu

SEQ ID NO: 2049636 - RNA, 19 nt, Artificial Sequence
  Description of Artificial Sequence: Synthetic oligonucleotide
uucugagauuuguuugacg

SEQ ID NO: 2049637 - RNA, 19 nt, Artificial Sequence
  Description of Artificial Sequence: Synthetic oligonucleotide
caaaagcugaacacgcuug

SEQ ID NO: 2049638 - RNA, 19 nt, Artificial Sequence
  Description of Artificial Sequence: Synthetic oligonucleotide
agucuuucgagcucaucag

SEQ ID NO: 2049639 - RNA, 19 nt, Artificial Sequence
  Description of Artificial Sequence: Synthetic oligonucleotide
uguugaacuguugcaaagc

SEQ ID NO: 2049640 - RNA, 19 nt, Artificial Sequence
  Description of Artificial Sequence: Synthetic oligonucleotide
aggaacaaauccaaguuug

SEQ ID NO: 2049641 - RNA, 19 nt, Artificial Sequence
  Description of Artificial Sequence: Synthetic oligonucleotide
caugcacacaguugaagag

SEQ ID NO: 2049642 - RNA, 19 nt, Artificial Sequence
  Description of Artificial Sequence: Synthetic oligonucleotide
ugagauuuguuugacgauc

SEQ ID NO: 2049643 - RNA, 19 nt, Artificial Sequence
  Description of Artificial Sequence: Synthetic oligonucleotide
cagguuagugccaaucggc

SEQ ID NO: 2049644 - RNA, 19 nt, Artificial Sequence
  Description of Artificial Sequence: Synthetic oligonucleotide
guuccuacugucccagugg

SEQ ID NO: 2049645 - RNA, 19 nt, Artificial Sequence
  Description of Artificial Sequence: Synthetic oligonucleotide
ucaaaagcugaacacgcuu

SEQ ID NO: 2049646 - RNA, 19 nt, Artificial Sequence
  Description of Artificial Sequence: Synthetic oligonucleotide
ugaguaaaugucauaucuu

SEQ ID NO: 2049647 - RNA, 19 nt, Artificial Sequence
  Description of Artificial Sequence: Synthetic oligonucleotide
caguauuugcaaucaugcg

SEQ ID NO: 2049648 - RNA, 19 nt, Artificial Sequence
  Description of Artificial Sequence: Synthetic oligonucleotide
uguugcaaagcaccuugug

SEQ ID NO: 2049649 - RNA, 19 nt, Artificial Sequence
  Description of Artificial Sequence: Synthetic oligonucleotide
guuucucccagguuagugc

SEQ ID NO: 2049650 - RNA, 19 nt, Artificial Sequence
  Description of Artificial Sequence: Synthetic oligonucleotide
aaacaggcguccauuaaug

SEQ ID NO: 2049651 - RNA, 19 nt, Artificial Sequence
  Description of Artificial Sequence: Synthetic oligonucleotide
uaccgcacuguucuggcag

SEQ ID NO: 2049652 - RNA, 19 nt, Artificial Sequence
  Description of Artificial Sequence: Synthetic oligonucleotide
gucgaauugcucucgcggg

SEQ ID NO: 2049653 - RNA, 19 nt, Artificial Sequence
  Description of Artificial Sequence: Synthetic oligonucleotide
ggugguauagguguggucc

SEQ ID NO: 2049654 - RNA, 19 nt, Artificial Sequence
  Description of Artificial Sequence: Synthetic oligonucleotide
ugaacacgcuugcugagcu

SEQ ID NO: 2049655 - RNA, 19 nt, Artificial Sequence
  Description of Artificial Sequence: Synthetic oligonucleotide
caggcguccauuaauggug

SEQ ID NO: 2049656 - RNA, 19 nt, Artificial Sequence
  Description of Artificial Sequence: Synthetic oligonucleotide
guuagugccaaucggcuca

SEQ ID NO: 2049657 - RNA, 19 nt, Artificial Sequence
  Description of Artificial Sequence: Synthetic oligonucleotide
uccauuaauggugagcguc

SEQ ID NO: 2049658 - RNA, 19 nt, Artificial Sequence
  Description of Artificial Sequence: Synthetic oligonucleotide
auauguugucaucugguau

SEQ ID NO: 2049659 - RNA, 19 nt, Artificial Sequence
  Description of Artificial Sequence: Synthetic oligonucleotide
acuaugauccaggccuucc

SEQ ID NO: 2049660 - RNA, 19 nt, Artificial Sequence
  Description of Artificial Sequence: Synthetic oligonucleotide
aauggugagcgucguaaau

SEQ ID NO: 2049661 - RNA, 19 nt, Artificial Sequence
  Description of Artificial Sequence: Synthetic oligonucleotide
aaugugugguagauuagcu

SEQ ID NO: 2049662 - RNA, 19 nt, Artificial Sequence
  Description of Artificial Sequence: Synthetic oligonucleotide
caaugaacgucuuguuacc

SEQ ID NO: 2049663 - RNA, 19 nt, Artificial Sequence
  Description of Artificial Sequence: Synthetic oligonucleotide
ugagcgucguaaauacuga

SEQ ID NO: 2049664 - RNA, 19 nt, Artificial Sequence
  Description of Artificial Sequence: Synthetic oligonucleotide
ucuugacuaugauccaggc

SEQ ID NO: 2049665 - RNA, 19 nt, Artificial Sequence
  Description of Artificial Sequence: Synthetic oligonucleotide
cuugacuaugauccaggcc

SEQ ID NO: 2049666 - RNA, 19 nt, Artificial Sequence
  Description of Artificial Sequence: Synthetic oligonucleotide
uguguugaacuguugcaaa

SEQ ID NO: 2049667 - RNA, 19 nt, Artificial Sequence
  Description of Artificial Sequence: Synthetic oligonucleotide
uggugagcgucguaaauac

SEQ ID NO: 2049668 - RNA, 19 nt, Artificial Sequence
  Description of Artificial Sequence: Synthetic oligonucleotide
aagaguucccagucauaug

SEQ ID NO: 2049669 - RNA, 19 nt, Artificial Sequence
  Description of Artificial Sequence: Synthetic oligonucleotide
uuagaacuucuuaaacuuu

SEQ ID NO: 2049670 - RNA, 19 nt, Artificial Sequence
  Description of Artificial Sequence: Synthetic oligonucleotide
aguucccagucauauguug

SEQ ID NO: 2049671 - RNA, 19 nt, Artificial Sequence
  Description of Artificial Sequence: Synthetic oligonucleotide
gugagcgucguaaauacug

SEQ ID NO: 2049672 - RNA, 19 nt, Artificial Sequence
  Description of Artificial Sequence: Synthetic oligonucleotide
uuuaauaagcaagggcgau

SEQ ID NO: 2049673 - RNA, 19 nt, Artificial Sequence
  Description of Artificial Sequence: Synthetic oligonucleotide
caucauuagguuugagcac

SEQ ID NO: 2049674 - RNA, 19 nt, Artificial Sequence
  Description of Artificial Sequence: Synthetic oligonucleotide
aguuccuacugucccagug

SEQ ID NO: 2049675 - RNA, 19 nt, Artificial Sequence
  Description of Artificial Sequence: Synthetic oligonucleotide
agcugaacacgcuugcuga

SEQ ID NO: 2049676 - RNA, 19 nt, Artificial Sequence
  Description of Artificial Sequence: Synthetic oligonucleotide
uuacuagauugucaaugaa

SEQ ID NO: 2049677 - RNA, 19 nt, Artificial Sequence
  Description of Artificial Sequence: Synthetic oligonucleotide
cauuagaacuucuuaaacu

SEQ ID NO: 2049678 - RNA, 19 nt, Artificial Sequence
  Description of Artificial Sequence: Synthetic oligonucleotide
uccaguuuagcugcuguca

SEQ ID NO: 2049679 - RNA, 19 nt, Artificial Sequence
  Description of Artificial Sequence: Synthetic oligonucleotide
gagcugggaacaaaggcag

SEQ ID NO: 2049680 - RNA, 19 nt, Artificial Sequence
  Description of Artificial Sequence: Synthetic oligonucleotide
agccgaguuugucagccac

SEQ ID NO: 2049681 - RNA, 19 nt, Artificial Sequence
  Description of Artificial Sequence: Synthetic oligonucleotide
guugaacuguugcaaagca

SEQ ID NO: 2049682 - RNA, 19 nt, Artificial Sequence
  Description of Artificial Sequence: Synthetic oligonucleotide
ugagccgaguuugucagcc

SEQ ID NO: 2049683 - RNA, 19 nt, Artificial Sequence
  Description of Artificial Sequence: Synthetic oligonucleotide
gcggcaucgggauugaagg

SEQ ID NO: 2049684 - RNA, 19 nt, Artificial Sequence
  Description of Artificial Sequence: Synthetic oligonucleotide
ucgaauugcucucgcgggc

SEQ ID NO: 2049685 - RNA, 19 nt, Artificial Sequence
  Description of Artificial Sequence: Synthetic oligonucleotide
gucuuguuaccccucauga

SEQ ID NO: 2049686 - RNA, 19 nt, Artificial Sequence
  Description of Artificial Sequence: Synthetic oligonucleotide
aucuugacuaugauccagg

SEQ ID NO: 2049687 - RNA, 19 nt, Artificial Sequence
  Description of Artificial Sequence: Synthetic oligonucleotide
agugacaacccaaaacuga

SEQ ID NO: 2049688 - RNA, 19 nt, Artificial Sequence
  Description of Artificial Sequence: Synthetic oligonucleotide
acaggcguccauuaauggu

SEQ ID NO: 2049689 - RNA, 19 nt, Artificial Sequence
  Description of Artificial Sequence: Synthetic oligonucleotide
gagucgaauugcucucgcg

SEQ ID NO: 2049690 - RNA, 19 nt, Artificial Sequence
  Description of Artificial Sequence: Synthetic oligonucleotide
uauaggugugguccaugca

SEQ ID NO: 2049691 - RNA, 19 nt, Artificial Sequence
  Description of Artificial Sequence: Synthetic oligonucleotide
uuguuaccccucaugagua

SEQ ID NO: 2049692 - RNA, 19 nt, Artificial Sequence
  Description of Artificial Sequence: Synthetic oligonucleotide
ucaucgccuguguugaacu

SEQ ID NO: 2049693 - RNA, 19 nt, Artificial Sequence
  Description of Artificial Sequence: Synthetic oligonucleotide
caugaguaaaugucauauc

SEQ ID NO: 2049694 - RNA, 19 nt, Artificial Sequence
  Description of Artificial Sequence: Synthetic oligonucleotide
uugagcggcaucgggauug

SEQ ID NO: 2049695 - RNA, 19 nt, Artificial Sequence
  Description of Artificial Sequence: Synthetic oligonucleotide
caaaacugaauuucauuaa

SEQ ID NO: 2049696 - RNA, 19 nt, Artificial Sequence
  Description of Artificial Sequence: Synthetic oligonucleotide
ggcgacauuacugaguccc

SEQ ID NO: 2049697 - RNA, 19 nt, Artificial Sequence
  Description of Artificial Sequence: Synthetic oligonucleotide
agucccaugaugauggcga

SEQ ID NO: 2049698 - RNA, 19 nt, Artificial Sequence
  Description of Artificial Sequence: Synthetic oligonucleotide
agggcgaugaaagggagug

SEQ ID NO: 2049699 - RNA, 19 nt, Artificial Sequence
  Description of Artificial Sequence: Synthetic oligonucleotide
uucuuaaacuuugcuuggc

SEQ ID NO: 2049700 - RNA, 19 nt, Artificial Sequence
  Description of Artificial Sequence: Synthetic oligonucleotide
ugagucgaauugcucucgc

SEQ ID NO: 2049701 - RNA, 19 nt, Artificial Sequence
  Description of Artificial Sequence: Synthetic oligonucleotide
uuccuacugucccaguggu

SEQ ID NO: 2049702 - RNA, 19 nt, Artificial Sequence
  Description of Artificial Sequence: Synthetic oligonucleotide
uacuccuugcagugagccg

SEQ ID NO: 2049703 - RNA, 19 nt, Artificial Sequence
  Description of Artificial Sequence: Synthetic oligonucleotide
gaaggauccauuaagcuuu

SEQ ID NO: 2049704 - RNA, 19 nt, Artificial Sequence
  Description of Artificial Sequence: Synthetic oligonucleotide
uuuguuugacgaucuucuc

SEQ ID NO: 2049705 - RNA, 19 nt, Artificial Sequence
  Description of Artificial Sequence: Synthetic oligonucleotide
gcgucguaaauacugaaac

SEQ ID NO: 2049706 - RNA, 19 nt, Artificial Sequence
  Description of Artificial Sequence: Synthetic oligonucleotide
guaugccaagucuuucgag

SEQ ID NO: 2049707 - RNA, 19 nt, Artificial Sequence
  Description of Artificial Sequence: Synthetic oligonucleotide
uucuuggaaggauccauua

SEQ ID NO: 2049708 - RNA, 19 nt, Artificial Sequence
  Description of Artificial Sequence: Synthetic oligonucleotide
cucgcgggcaggcaaacag

SEQ ID NO: 2049709 - RNA, 19 nt, Artificial Sequence
  Description of Artificial Sequence: Synthetic oligonucleotide
aguagaccuuaaacaaaac

SEQ ID NO: 2049710 - RNA, 19 nt, Artificial Sequence
  Description of Artificial Sequence: Synthetic oligonucleotide
ucauuagguuugagcacca

SEQ ID NO: 2049711 - RNA, 19 nt, Artificial Sequence
  Description of Artificial Sequence: Synthetic oligonucleotide
auuaagcuuucaaacucug

SEQ ID NO: 2049712 - RNA, 19 nt, Artificial Sequence
  Description of Artificial Sequence: Synthetic oligonucleotide
cucacggcgacauuacuga

SEQ ID NO: 2049713 - RNA, 19 nt, Artificial Sequence
  Description of Artificial Sequence: Synthetic oligonucleotide
ccauuaauggugagcgucg

SEQ ID NO: 2049714 - RNA, 19 nt, Artificial Sequence
  Description of Artificial Sequence: Synthetic oligonucleotide
gaucggcuggcgcuucugg

SEQ ID NO: 2049715 - RNA, 19 nt, Artificial Sequence
  Description of Artificial Sequence: Synthetic oligonucleotide
cuuuucuccuccagaguuc

SEQ ID NO: 2049716 - RNA, 19 nt, Artificial Sequence
  Description of Artificial Sequence: Synthetic oligonucleotide
cuuguuaccccucaugagu

SEQ ID NO: 2049717 - RNA, 19 nt, Artificial Sequence
  Description of Artificial Sequence: Synthetic oligonucleotide
acuguucuggcaguauuug

SEQ ID NO: 2049718 - RNA, 19 nt, Artificial Sequence
  Description of Artificial Sequence: Synthetic oligonucleotide
aguuucucccagguuagug

SEQ ID NO: 2049719 - RNA, 19 nt, Artificial Sequence
  Description of Artificial Sequence: Synthetic oligonucleotide
agccgcuaucuugauaaac

SEQ ID NO: 2049720 - RNA, 19 nt, Artificial Sequence
  Description of Artificial Sequence: Synthetic oligonucleotide
uuccccugagccgaguuug

SEQ ID NO: 2049721 - RNA, 19 nt, Artificial Sequence
  Description of Artificial Sequence: Synthetic oligonucleotide
ccugugguuucuuggaagg

SEQ ID NO: 2049722 - RNA, 19 nt, Artificial Sequence
  Description of Artificial Sequence: Synthetic oligonucleotide
aaacaucauuagguuugag

SEQ ID NO: 2049723 - RNA, 19 nt, Artificial Sequence
  Description of Artificial Sequence: Synthetic oligonucleotide
guacuccuugcagugagcc

SEQ ID NO: 2049724 - RNA, 19 nt, Artificial Sequence
  Description of Artificial Sequence: Synthetic oligonucleotide
ggggaguccaguuuagcug

SEQ ID NO: 2049725 - RNA, 19 nt, Artificial Sequence
  Description of Artificial Sequence: Synthetic oligonucleotide
gguagauuagcuccagcuc

SEQ ID NO: 2049726 - RNA, 19 nt, Artificial Sequence
  Description of Artificial Sequence: Synthetic oligonucleotide
aucggcuggcgcuucuggg

SEQ ID NO: 2049727 - RNA, 19 nt, Artificial Sequence
  Description of Artificial Sequence: Synthetic oligonucleotide
ugacaacccaaaacugaau

SEQ ID NO: 2049728 - RNA, 19 nt, Artificial Sequence
  Description of Artificial Sequence: Synthetic oligonucleotide
gagucccaugaugauggcg

SEQ ID NO: 2049729 - RNA, 19 nt, Artificial Sequence
  Description of Artificial Sequence: Synthetic oligonucleotide
cguccauuaauggugagcg

SEQ ID NO: 2049730 - RNA, 19 nt, Artificial Sequence
  Description of Artificial Sequence: Synthetic oligonucleotide
aguuuacuagauugucaau

SEQ ID NO: 2049731 - RNA, 19 nt, Artificial Sequence
  Description of Artificial Sequence: Synthetic oligonucleotide
gucguaaauacugaaacau

SEQ ID NO: 2049732 - RNA, 19 nt, Artificial Sequence
  Description of Artificial Sequence: Synthetic oligonucleotide
caagggcgaugaaagggag

SEQ ID NO: 2049733 - RNA, 19 nt, Artificial Sequence
  Description of Artificial Sequence: Synthetic oligonucleotide
gugccaaucggcucacggc

SEQ ID NO: 2049734 - RNA, 19 nt, Artificial Sequence
  Description of Artificial Sequence: Synthetic oligonucleotide
ugucccagugguugggccu

SEQ ID NO: 2049735 - RNA, 19 nt, Artificial Sequence
  Description of Artificial Sequence: Synthetic oligonucleotide
gaauugcucucgcgggcag

SEQ ID NO: 2049736 - RNA, 19 nt, Artificial Sequence
  Description of Artificial Sequence: Synthetic oligonucleotide
gucaaugaacgucuuguua

SEQ ID NO: 2049737 - RNA, 19 nt, Artificial Sequence
  Description of Artificial Sequence: Synthetic oligonucleotide
aucaguucaaaaguuccua

SEQ ID NO: 2049738 - RNA, 19 nt, Artificial Sequence
  Description of Artificial Sequence: Synthetic oligonucleotide
aauaagcaagggcgaugaa

SEQ ID NO: 2049739 - RNA, 19 nt, Artificial Sequence
  Description of Artificial Sequence: Synthetic oligonucleotide
ccaaaugugugguagauua

SEQ ID NO: 2049740 - RNA, 19 nt, Artificial Sequence
  Description of Artificial Sequence: Synthetic oligonucleotide
uacagguacccggauggug

SEQ ID NO: 2049741 - RNA, 19 nt, Artificial Sequence
  Description of Artificial Sequence: Synthetic oligonucleotide
caaauccaaguuugcugug

SEQ ID NO: 2049742 - RNA, 19 nt, Artificial Sequence
  Description of Artificial Sequence: Synthetic oligonucleotide
ggcaguauuugcaaucaug

SEQ ID NO: 2049743 - RNA, 19 nt, Artificial Sequence
  Description of Artificial Sequence: Synthetic oligonucleotide
uuccaaaugugugguagau

SEQ ID NO: 2049744 - RNA, 19 nt, Artificial Sequence
  Description of Artificial Sequence: Synthetic oligonucleotide
aggcagaucucagugacaa

SEQ ID NO: 2049745 - RNA, 19 nt, Artificial Sequence
  Description of Artificial Sequence: Synthetic oligonucleotide
ggcaguuucucccagguua

SEQ ID NO: 2049746 - RNA, 19 nt, Artificial Sequence
  Description of Artificial Sequence: Synthetic oligonucleotide
uucgagcucaucaguucaa

SEQ ID NO: 2049747 - RNA, 19 nt, Artificial Sequence
  Description of Artificial Sequence: Synthetic oligonucleotide
aaggauccauuaagcuuuc

SEQ ID NO: 2049748 - RNA, 19 nt, Artificial Sequence
  Description of Artificial Sequence: Synthetic oligonucleotide
ggcgaugaaagggagugag

SEQ ID NO: 2049749 - RNA, 19 nt, Artificial Sequence
  Description of Artificial Sequence: Synthetic oligonucleotide
ucacggcgacauuacugag

SEQ ID NO: 2049750 - RNA, 19 nt, Artificial Sequence
  Description of Artificial Sequence: Synthetic oligonucleotide
gugagucgaauugcucucg

SEQ ID NO: 2049751 - RNA, 19 nt, Artificial Sequence
  Description of Artificial Sequence: Synthetic oligonucleotide
ugguugggccuucuuguuc

SEQ ID NO: 2049752 - RNA, 19 nt, Artificial Sequence
  Description of Artificial Sequence: Synthetic oligonucleotide
ugccuuccaaauguguggu

SEQ ID NO: 2049753 - RNA, 19 nt, Artificial Sequence
  Description of Artificial Sequence: Synthetic oligonucleotide
cauauguugucaucuggua

SEQ ID NO: 2049754 - RNA, 19 nt, Artificial Sequence
  Description of Artificial Sequence: Synthetic oligonucleotide
aaucggcucacggcgacau

SEQ ID NO: 2049755 - RNA, 19 nt, Artificial Sequence
  Description of Artificial Sequence: Synthetic oligonucleotide
agcggcaucgggauugaag

SEQ ID NO: 2049756 - RNA, 19 nt, Artificial Sequence
  Description of Artificial Sequence: Synthetic oligonucleotide
uacugucccagugguuggg

SEQ ID NO: 2049757 - RNA, 19 nt, Artificial Sequence
  Description of Artificial Sequence: Synthetic oligonucleotide
uugcagugagccgcuaucu

SEQ ID NO: 2049758 - RNA, 19 nt, Artificial Sequence
  Description of Artificial Sequence: Synthetic oligonucleotide
ggcuuucacgucuucugag

SEQ ID NO: 2049759 - RNA, 19 nt, Artificial Sequence
  Description of Artificial Sequence: Synthetic oligonucleotide
cagugagccgcuaucuuga

SEQ ID NO: 2049760 - RNA, 19 nt, Artificial Sequence
  Description of Artificial Sequence: Synthetic oligonucleotide
ccagguuagugccaaucgg

SEQ ID NO: 2049761 - RNA, 19 nt, Artificial Sequence
  Description of Artificial Sequence: Synthetic oligonucleotide
gugacaacccaaaacugaa

SEQ ID NO: 2049762 - RNA, 19 nt, Artificial Sequence
  Description of Artificial Sequence: Synthetic oligonucleotide
ccuacugucccagugguug

SEQ ID NO: 2049763 - RNA, 19 nt, Artificial Sequence
  Description of Artificial Sequence: Synthetic oligonucleotide
ugcaaagcaccuugugcuu

SEQ ID NO: 2049764 - RNA, 19 nt, Artificial Sequence
  Description of Artificial Sequence: Synthetic oligonucleotide
uguuaccccucaugaguaa

SEQ ID NO: 2049765 - RNA, 19 nt, Artificial Sequence
  Description of Artificial Sequence: Synthetic oligonucleotide
cagugagucgaauugcucu

SEQ ID NO: 2049766 - RNA, 19 nt, Artificial Sequence
  Description of Artificial Sequence: Synthetic oligonucleotide
ccugagccgaguuugucag

SEQ ID NO: 2049767 - RNA, 19 nt, Artificial Sequence
  Description of Artificial Sequence: Synthetic oligonucleotide
agguuagugccaaucggcu

SEQ ID NO: 2049768 - RNA, 19 nt, Artificial Sequence
  Description of Artificial Sequence: Synthetic oligonucleotide
ggauccauuaagcuuucaa

SEQ ID NO: 2049769 - RNA, 19 nt, Artificial Sequence
  Description of Artificial Sequence: Synthetic oligonucleotide
gagauuuguuugacgaucu

SEQ ID NO: 2049770 - RNA, 19 nt, Artificial Sequence
  Description of Artificial Sequence: Synthetic oligonucleotide
cccagguuagugccaaucg

SEQ ID NO: 2049771 - RNA, 19 nt, Artificial Sequence
  Description of Artificial Sequence: Synthetic oligonucleotide
auuaauggugagcgucgua

SEQ ID NO: 2049772 - RNA, 19 nt, Artificial Sequence
  Description of Artificial Sequence: Synthetic oligonucleotide
ugccaagucuuucgagcuc

SEQ ID NO: 2049773 - RNA, 19 nt, Artificial Sequence
  Description of Artificial Sequence: Synthetic oligonucleotide
gaacacgcuugcugagcug

SEQ ID NO: 2049774 - RNA, 19 nt, Artificial Sequence
  Description of Artificial Sequence: Synthetic oligonucleotide
auggugagcgucguaaaua

SEQ ID NO: 2049775 - RNA, 19 nt, Artificial Sequence
  Description of Artificial Sequence: Synthetic oligonucleotide
ugacuaugauccaggccuu

SEQ ID NO: 2049776 - RNA, 19 nt, Artificial Sequence
  Description of Artificial Sequence: Synthetic oligonucleotide
gugguagauuagcuccagc

SEQ ID NO: 2049777 - RNA, 19 nt, Artificial Sequence
  Description of Artificial Sequence: Synthetic oligonucleotide
uucugggcccucucaucgc

SEQ ID NO: 2049778 - RNA, 19 nt, Artificial Sequence
  Description of Artificial Sequence: Synthetic oligonucleotide
ccccucaugaguaaauguc

SEQ ID NO: 2049779 - RNA, 19 nt, Artificial Sequence
  Description of Artificial Sequence: Synthetic oligonucleotide
aaguuugcuguggucuuuu

SEQ ID NO: 2049780 - RNA, 19 nt, Artificial Sequence
  Description of Artificial Sequence: Synthetic oligonucleotide
gugguuucuuggaaggauc

SEQ ID NO: 2049781 - RNA, 19 nt, Artificial Sequence
  Description of Artificial Sequence: Synthetic oligonucleotide
ucggcucacggcgacauua

SEQ ID NO: 2049782 - RNA, 19 nt, Artificial Sequence
  Description of Artificial Sequence: Synthetic oligonucleotide
gguaugccaagucuuucga

SEQ ID NO: 2049783 - RNA, 19 nt, Artificial Sequence
  Description of Artificial Sequence: Synthetic oligonucleotide
ugcagugagccgcuaucuu

SEQ ID NO: 2049784 - RNA, 19 nt, Artificial Sequence
  Description of Artificial Sequence: Synthetic oligonucleotide
cucaucgccuguguugaac

SEQ ID NO: 2049785 - RNA, 19 nt, Artificial Sequence
  Description of Artificial Sequence: Synthetic oligonucleotide
aaaucuccucaggaacaaa

SEQ ID NO: 2049786 - RNA, 19 nt, Artificial Sequence
  Description of Artificial Sequence: Synthetic oligonucleotide
aucucagugacaacccaaa

SEQ ID NO: 2049787 - RNA, 19 nt, Artificial Sequence
  Description of Artificial Sequence: Synthetic oligonucleotide
uucugugggcuuucacguc

SEQ ID NO: 2049788 - RNA, 19 nt, Artificial Sequence
  Description of Artificial Sequence: Synthetic oligonucleotide
ugagucccaugaugauggc

SEQ ID NO: 2049789 - RNA, 19 nt, Artificial Sequence
  Description of Artificial Sequence: Synthetic oligonucleotide
agcgucguaaauacugaaa

SEQ ID NO: 2049790 - RNA, 19 nt, Artificial Sequence
  Description of Artificial Sequence: Synthetic oligonucleotide
aagggcgaugaaagggagu

SEQ ID NO: 2049791 - RNA, 19 nt, Artificial Sequence
  Description of Artificial Sequence: Synthetic oligonucleotide
ccucucaucgccuguguug

SEQ ID NO: 2049792 - RNA, 19 nt, Artificial Sequence
  Description of Artificial Sequence: Synthetic oligonucleotide
guccaguuuagcugcuguc

SEQ ID NO: 2049793 - RNA, 19 nt, Artificial Sequence
  Description of Artificial Sequence: Synthetic oligonucleotide
cucucaucgccuguguuga

SEQ ID NO: 2049794 - RNA, 19 nt, Artificial Sequence
  Description of Artificial Sequence: Synthetic oligonucleotide
caucaguucaaaaguuccu

SEQ ID NO: 2049795 - RNA, 19 nt, Artificial Sequence
  Description of Artificial Sequence: Synthetic oligonucleotide
gagcgucguaaauacugaa

SEQ ID NO: 2049796 - RNA, 19 nt, Artificial Sequence
  Description of Artificial Sequence: Synthetic oligonucleotide
caucgccuguguugaacug

SEQ ID NO: 2049797 - RNA, 19 nt, Artificial Sequence
  Description of Artificial Sequence: Synthetic oligonucleotide
aucugguaugccaagucuu

SEQ ID NO: 2049798 - RNA, 19 nt, Artificial Sequence
  Description of Artificial Sequence: Synthetic oligonucleotide
uccaaaugugugguagauu

SEQ ID NO: 2049799 - RNA, 19 nt, Artificial Sequence
  Description of Artificial Sequence: Synthetic oligonucleotide
cuccagaguucaucuugac

SEQ ID NO: 2049800 - RNA, 19 nt, Artificial Sequence
  Description of Artificial Sequence: Synthetic oligonucleotide
caguucaaaaguuccuacu

SEQ ID NO: 2049801 - RNA, 19 nt, Artificial Sequence
  Description of Artificial Sequence: Synthetic oligonucleotide
accucaucagagccacgga

SEQ ID NO: 2049802 - RNA, 19 nt, Artificial Sequence
  Description of Artificial Sequence: Synthetic oligonucleotide
uggugguauaggugugguc

SEQ ID NO: 2049803 - RNA, 19 nt, Artificial Sequence
  Description of Artificial Sequence: Synthetic oligonucleotide
ucacgucuucugagauuug

SEQ ID NO: 2049804 - RNA, 19 nt, Artificial Sequence
  Description of Artificial Sequence: Synthetic oligonucleotide
gcugaacacgcuugcugag

SEQ ID NO: 2049805 - RNA, 19 nt, Artificial Sequence
  Description of Artificial Sequence: Synthetic oligonucleotide
cucaugaguaaaugucaua

SEQ ID NO: 2049806 - RNA, 19 nt, Artificial Sequence
  Description of Artificial Sequence: Synthetic oligonucleotide
ugggcccucucaucgccug

SEQ ID NO: 2049807 - RNA, 19 nt, Artificial Sequence
  Description of Artificial Sequence: Synthetic oligonucleotide
acgcuugcugagcugggaa

SEQ ID NO: 2049808 - RNA, 19 nt, Artificial Sequence
  Description of Artificial Sequence: Synthetic oligonucleotide
gguuagugccaaucggcuc

SEQ ID NO: 2049809 - RNA, 19 nt, Artificial Sequence
  Description of Artificial Sequence: Synthetic oligonucleotide
gcuuucacgucuucugaga

SEQ ID NO: 2049810 - RNA, 19 nt, Artificial Sequence
  Description of Artificial Sequence: Synthetic oligonucleotide
uuagugccaaucggcucac

SEQ ID NO: 2049811 - RNA, 19 nt, Artificial Sequence
  Description of Artificial Sequence: Synthetic oligonucleotide
caccgaggcagcuacaggu

SEQ ID NO: 2049812 - RNA, 19 nt, Artificial Sequence
  Description of Artificial Sequence: Synthetic oligonucleotide
aggccuuccccugagccga

SEQ ID NO: 2049813 - RNA, 19 nt, Artificial Sequence
  Description of Artificial Sequence: Synthetic oligonucleotide
cagucauauguugucaucu

SEQ ID NO: 2049814 - RNA, 19 nt, Artificial Sequence
  Description of Artificial Sequence: Synthetic oligonucleotide
caaacaggcguccauuaau

SEQ ID NO: 2049815 - RNA, 19 nt, Artificial Sequence
  Description of Artificial Sequence: Synthetic oligonucleotide
cugagccgaguuugucagc

SEQ ID NO: 2049816 - RNA, 19 nt, Artificial Sequence
  Description of Artificial Sequence: Synthetic oligonucleotide
cugguaugccaagucuuuc

SEQ ID NO: 2049817 - RNA, 19 nt, Artificial Sequence
  Description of Artificial Sequence: Synthetic oligonucleotide
gcucacggcgacauuacug

SEQ ID NO: 2049818 - RNA, 19 nt, Artificial Sequence
  Description of Artificial Sequence: Synthetic oligonucleotide
cccucaugaguaaauguca

SEQ ID NO: 2049819 - RNA, 19 nt, Artificial Sequence
  Description of Artificial Sequence: Synthetic oligonucleotide
caucgggauugaagggcug

SEQ ID NO: 2049820 - RNA, 19 nt, Artificial Sequence
  Description of Artificial Sequence: Synthetic oligonucleotide
cauuagguuugagcaccac

SEQ ID NO: 2049821 - RNA, 19 nt, Artificial Sequence
  Description of Artificial Sequence: Synthetic oligonucleotide
cuguaggcccugugguuuc

SEQ ID NO: 2049822 - RNA, 19 nt, Artificial Sequence
  Description of Artificial Sequence: Synthetic oligonucleotide
uccccugagccgaguuugu

SEQ ID NO: 2049823 - RNA, 19 nt, Artificial Sequence
  Description of Artificial Sequence: Synthetic oligonucleotide
uccaugcaguagaccuuaa

SEQ ID NO: 2049824 - RNA, 19 nt, Artificial Sequence
  Description of Artificial Sequence: Synthetic oligonucleotide
gcaagggcgaugaaaggga

SEQ ID NO: 2049825 - RNA, 19 nt, Artificial Sequence
  Description of Artificial Sequence: Synthetic oligonucleotide
gguauaggugugguccaug

SEQ ID NO: 2049826 - RNA, 19 nt, Artificial Sequence
  Description of Artificial Sequence: Synthetic oligonucleotide
guucccagucauauguugu

SEQ ID NO: 2049827 - RNA, 19 nt, Artificial Sequence
  Description of Artificial Sequence: Synthetic oligonucleotide
agugagccgcuaucuugau

SEQ ID NO: 2049828 - RNA, 19 nt, Artificial Sequence
  Description of Artificial Sequence: Synthetic oligonucleotide
gacuaugauccaggccuuc

SEQ ID NO: 2049829 - RNA, 19 nt, Artificial Sequence
  Description of Artificial Sequence: Synthetic oligonucleotide
cuuucacgucuucugagau

SEQ ID NO: 2049830 - RNA, 19 nt, Artificial Sequence
  Description of Artificial Sequence: Synthetic oligonucleotide
gcgaugaaagggagugagg

SEQ ID NO: 2049831 - RNA, 19 nt, Artificial Sequence
  Description of Artificial Sequence: Synthetic oligonucleotide
gcguccauuaauggugagc

SEQ ID NO: 2049832 - RNA, 19 nt, Artificial Sequence
  Description of Artificial Sequence: Synthetic oligonucleotide
uccuacugucccagugguu

SEQ ID NO: 2049833 - RNA, 19 nt, Artificial Sequence
  Description of Artificial Sequence: Synthetic oligonucleotide
ccggauggugguauaggug

SEQ ID NO: 2049834 - RNA, 19 nt, Artificial Sequence
  Description of Artificial Sequence: Synthetic oligonucleotide
cuggcuccugcaguaccgc

SEQ ID NO: 2049835 - RNA, 19 nt, Artificial Sequence
  Description of Artificial Sequence: Synthetic oligonucleotide
ugguauaggugugguccau

SEQ ID NO: 2049836 - RNA, 19 nt, Artificial Sequence
  Description of Artificial Sequence: Synthetic oligonucleotide
aggcguccauuaaugguga

SEQ ID NO: 2049837 - RNA, 19 nt, Artificial Sequence
  Description of Artificial Sequence: Synthetic oligonucleotide
ucccaugaugauggcgaaa

SEQ ID NO: 2049838 - RNA, 19 nt, Artificial Sequence
  Description of Artificial Sequence: Synthetic oligonucleotide
uugcugagcugggaacaaa

SEQ ID NO: 2049839 - RNA, 19 nt, Artificial Sequence
  Description of Artificial Sequence: Synthetic oligonucleotide
acgucuuguuaccccucau

SEQ ID NO: 2049840 - RNA, 19 nt, Artificial Sequence
  Description of Artificial Sequence: Synthetic oligonucleotide
uguaggcccugugguuucu

SEQ ID NO: 2049841 - RNA, 19 nt, Artificial Sequence
  Description of Artificial Sequence: Synthetic oligonucleotide
caaagcaccuugugcuucu

SEQ ID NO: 2049842 - RNA, 19 nt, Artificial Sequence
  Description of Artificial Sequence: Synthetic oligonucleotide
cugagauuuguuugacgau

SEQ ID NO: 2049843 - RNA, 19 nt, Artificial Sequence
  Description of Artificial Sequence: Synthetic oligonucleotide
gccaagucuuucgagcuca

SEQ ID NO: 2049844 - RNA, 19 nt, Artificial Sequence
  Description of Artificial Sequence: Synthetic oligonucleotide
acacgcuugcugagcuggg

SEQ ID NO: 2049845 - RNA, 19 nt, Artificial Sequence
  Description of Artificial Sequence: Synthetic oligonucleotide
gccgcuaucuugauaaacu

SEQ ID NO: 2049846 - RNA, 19 nt, Artificial Sequence
  Description of Artificial Sequence: Synthetic oligonucleotide
ucucaucgccuguguugaa

SEQ ID NO: 2049847 - RNA, 19 nt, Artificial Sequence
  Description of Artificial Sequence: Synthetic oligonucleotide
uugcaaucaugcgcauuuu

SEQ ID NO: 2049848 - RNA, 19 nt, Artificial Sequence
  Description of Artificial Sequence: Synthetic oligonucleotide
cgucguaaauacugaaaca

SEQ ID NO: 2049849 - RNA, 19 nt, Artificial Sequence
  Description of Artificial Sequence: Synthetic oligonucleotide
ggcaaacaggcguccauua

SEQ ID NO: 2049850 - RNA, 19 nt, Artificial Sequence
  Description of Artificial Sequence: Synthetic oligonucleotide
guaccgcacuguucuggca

SEQ ID NO: 2049851 - RNA, 19 nt, Artificial Sequence
  Description of Artificial Sequence: Synthetic oligonucleotide
cacggcgacauuacugagu

SEQ ID NO: 2049852 - RNA, 19 nt, Artificial Sequence
  Description of Artificial Sequence: Synthetic oligonucleotide
ccgaguuugucagccacug

SEQ ID NO: 2049853 - RNA, 19 nt, Artificial Sequence
  Description of Artificial Sequence: Synthetic oligonucleotide
gguuucuuggaaggaucca

SEQ ID NO: 2049854 - RNA, 19 nt, Artificial Sequence
  Description of Artificial Sequence: Synthetic oligonucleotide
aggcagcuacagguacccg

SEQ ID NO: 2049855 - RNA, 19 nt, Artificial Sequence
  Description of Artificial Sequence: Synthetic oligonucleotide
ucucgcgggcaggcaaaca

SEQ ID NO: 2049856 - RNA, 19 nt, Artificial Sequence
  Description of Artificial Sequence: Synthetic oligonucleotide
gggaacaaaggcagaucuc

SEQ ID NO: 2049857 - RNA, 19 nt, Artificial Sequence
  Description of Artificial Sequence: Synthetic oligonucleotide
ccuccagaguucaucuuga

SEQ ID NO: 2049858 - RNA, 19 nt, Artificial Sequence
  Description of Artificial Sequence: Synthetic oligonucleotide
gucccaugaugauggcgaa

SEQ ID NO: 2049859 - RNA, 19 nt, Artificial Sequence
  Description of Artificial Sequence: Synthetic oligonucleotide
gagcaccaccuuuucuccu

SEQ ID NO: 2049860 - RNA, 19 nt, Artificial Sequence
  Description of Artificial Sequence: Synthetic oligonucleotide
cauuacugagucccaugau

SEQ ID NO: 2049861 - RNA, 19 nt, Artificial Sequence
  Description of Artificial Sequence: Synthetic oligonucleotide
gucaucugguaugccaagu

SEQ ID NO: 2049862 - RNA, 19 nt, Artificial Sequence
  Description of Artificial Sequence: Synthetic oligonucleotide
cacgucuucugagauuugu

SEQ ID NO: 2049863 - RNA, 19 nt, Artificial Sequence
  Description of Artificial Sequence: Synthetic oligonucleotide
gccacggaucggcuggcgc

SEQ ID NO: 2049864 - RNA, 19 nt, Artificial Sequence
  Description of Artificial Sequence: Synthetic oligonucleotide
ggcguccauuaauggugag

SEQ ID NO: 2049865 - RNA, 19 nt, Artificial Sequence
  Description of Artificial Sequence: Synthetic oligonucleotide
ccgaggcagcuacagguac

SEQ ID NO: 2049866 - RNA, 19 nt, Artificial Sequence
  Description of Artificial Sequence: Synthetic oligonucleotide
gagccgcuaucuugauaaa

SEQ ID NO: 2049867 - RNA, 19 nt, Artificial Sequence
  Description of Artificial Sequence: Synthetic oligonucleotide
aggauccauuaagcuuuca

SEQ ID NO: 2049868 - RNA, 19 nt, Artificial Sequence
  Description of Artificial Sequence: Synthetic oligonucleotide
cccugagccgaguuuguca

SEQ ID NO: 2049869 - RNA, 19 nt, Artificial Sequence
  Description of Artificial Sequence: Synthetic oligonucleotide
acggaucggcuggcgcuuc

SEQ ID NO: 2049870 - RNA, 19 nt, Artificial Sequence
  Description of Artificial Sequence: Synthetic oligonucleotide
cuguugcaaagcaccuugu

SEQ ID NO: 2049871 - RNA, 19 nt, Artificial Sequence
  Description of Artificial Sequence: Synthetic oligonucleotide
ccaaucggcucacggcgac

SEQ ID NO: 2049872 - RNA, 19 nt, Artificial Sequence
  Description of Artificial Sequence: Synthetic oligonucleotide
gugagccgcuaucuugaua

SEQ ID NO: 2049873 - RNA, 19 nt, Artificial Sequence
  Description of Artificial Sequence: Synthetic oligonucleotide
cauuaauggugagcgucgu

SEQ ID NO: 2049874 - RNA, 19 nt, Artificial Sequence
  Description of Artificial Sequence: Synthetic oligonucleotide
uugcucucgcgggcaggca

SEQ ID NO: 2049875 - RNA, 19 nt, Artificial Sequence
  Description of Artificial Sequence: Synthetic oligonucleotide
cucucgcgggcaggcaaac

SEQ ID NO: 2049876 - RNA, 19 nt, Artificial Sequence
  Description of Artificial Sequence: Synthetic oligonucleotide
cggcaucgggauugaaggg

SEQ ID NO: 2049877 - RNA, 19 nt, Artificial Sequence
  Description of Artificial Sequence: Synthetic oligonucleotide
gguuugagcaccaccuuuu

SEQ ID NO: 2049878 - RNA, 19 nt, Artificial Sequence
  Description of Artificial Sequence: Synthetic oligonucleotide
cacgcuugcugagcuggga

SEQ ID NO: 2049879 - RNA, 19 nt, Artificial Sequence
  Description of Artificial Sequence: Synthetic oligonucleotide
gaguucccagucauauguu

SEQ ID NO: 2049880 - RNA, 19 nt, Artificial Sequence
  Description of Artificial Sequence: Synthetic oligonucleotide
aucggcucacggcgacauu

SEQ ID NO: 2049881 - RNA, 19 nt, Artificial Sequence
  Description of Artificial Sequence: Synthetic oligonucleotide
caaucggcucacggcgaca

SEQ ID NO: 2049882 - RNA, 19 nt, Artificial Sequence
  Description of Artificial Sequence: Synthetic oligonucleotide
guacccggauggugguaua

SEQ ID NO: 2049883 - RNA, 19 nt, Artificial Sequence
  Description of Artificial Sequence: Synthetic oligonucleotide
gcaucgggauugaagggcu

SEQ ID NO: 2049884 - RNA, 19 nt, Artificial Sequence
  Description of Artificial Sequence: Synthetic oligonucleotide
gcgacauuacugaguccca

SEQ ID NO: 2049885 - RNA, 19 nt, Artificial Sequence
  Description of Artificial Sequence: Synthetic oligonucleotide
gguacccggauggugguau

SEQ ID NO: 2049886 - RNA, 19 nt, Artificial Sequence
  Description of Artificial Sequence: Synthetic oligonucleotide
ccaugcaguagaccuuaaa

SEQ ID NO: 2049887 - RNA, 19 nt, Artificial Sequence
  Description of Artificial Sequence: Synthetic oligonucleotide
cccggauggugguauaggu

SEQ ID NO: 2049888 - RNA, 19 nt, Artificial Sequence
  Description of Artificial Sequence: Synthetic oligonucleotide
ucccagugguugggccuuc

SEQ ID NO: 2049889 - RNA, 19 nt, Artificial Sequence
  Description of Artificial Sequence: Synthetic oligonucleotide
uccuugcagugagccgcua

SEQ ID NO: 2049890 - RNA, 19 nt, Artificial Sequence
  Description of Artificial Sequence: Synthetic oligonucleotide
agguacccggaugguggua

SEQ ID NO: 2049891 - RNA, 19 nt, Artificial Sequence
  Description of Artificial Sequence: Synthetic oligonucleotide
gccaaucggcucacggcga

SEQ ID NO: 2049892 - RNA, 19 nt, Artificial Sequence
  Description of Artificial Sequence: Synthetic oligonucleotide
gcgcuucugggcccucuca

SEQ ID NO: 2049893 - RNA, 19 nt, Artificial Sequence
  Description of Artificial Sequence: Synthetic oligonucleotide
gggcgaugaaagggaguga

SEQ ID NO: 2049894 - RNA, 19 nt, Artificial Sequence
  Description of Artificial Sequence: Synthetic oligonucleotide
cuacagguacccggauggu

SEQ ID NO: 2049895 - RNA, 19 nt, Artificial Sequence
  Description of Artificial Sequence: Synthetic oligonucleotide
cccagucauauguugucau

SEQ ID NO: 2049896 - RNA, 19 nt, Artificial Sequence
  Description of Artificial Sequence: Synthetic oligonucleotide
cggcucacggcgacauuac

SEQ ID NO: 2049897 - RNA, 19 nt, Artificial Sequence
  Description of Artificial Sequence: Synthetic oligonucleotide
cgaauugcucucgcgggca

SEQ ID NO: 2049898 - RNA, 19 nt, Artificial Sequence
  Description of Artificial Sequence: Synthetic oligonucleotide
ggugagcgucguaaauacu

SEQ ID NO: 2049899 - RNA, 19 nt, Artificial Sequence
  Description of Artificial Sequence: Synthetic oligonucleotide
cgggcaggcaaacaggcgu

SEQ ID NO: 2049900 - RNA, 19 nt, Artificial Sequence
  Description of Artificial Sequence: Synthetic oligonucleotide
ccacggaucggcuggcgcu

SEQ ID NO: 2049901 - RNA, 19 nt, Artificial Sequence
  Description of Artificial Sequence: Synthetic oligonucleotide
ggcaagggagucagugagu

SEQ ID NO: 2049902 - RNA, 19 nt, Artificial Sequence
  Description of Artificial Sequence: Synthetic oligonucleotide
cugggcccucucaucgccu

SEQ ID NO: 2049903 - RNA, 19 nt, Artificial Sequence
  Description of Artificial Sequence: Synthetic oligonucleotide
ggcucacggcgacauuacu

SEQ ID NO: 2049904 - RNA, 19 nt, Artificial Sequence
  Description of Artificial Sequence: Synthetic oligonucleotide
ccgcuaucuugauaaacuu

SEQ ID NO: 2049905 - RNA, 19 nt, Artificial Sequence
  Description of Artificial Sequence: Synthetic oligonucleotide
cgcuaucuugauaaacuuu

SEQ ID NO: 2049906 - RNA, 19 nt, Artificial Sequence
  Description of Artificial Sequence: Synthetic oligonucleotide
ccugcaguaccgcacuguu

SEQ ID NO: 2049907 - RNA, 19 nt, Artificial Sequence
  Description of Artificial Sequence: Synthetic oligonucleotide
caguuucucccagguuagu

SEQ ID NO: 2049908 - RNA, 19 nt, Artificial Sequence
  Description of Artificial Sequence: Synthetic oligonucleotide
gcucucgcgggcaggcaaa

SEQ ID NO: 2049909 - RNA, 19 nt, Artificial Sequence
  Description of Artificial Sequence: Synthetic oligonucleotide
gccgaguuugucagccacu

SEQ ID NO: 2049910 - RNA, 19 nt, Artificial Sequence
  Description of Artificial Sequence: Synthetic oligonucleotide
gagcggcaucgggauugaa

SEQ ID NO: 2049911 - RNA, 19 nt, Artificial Sequence
  Description of Artificial Sequence: Synthetic oligonucleotide
cagcuacagguacccggau

SEQ ID NO: 2049912 - RNA, 19 nt, Artificial Sequence
  Description of Artificial Sequence: Synthetic oligonucleotide
gucagccuguaggcccugu

SEQ ID NO: 2049913 - RNA, 19 nt, Artificial Sequence
  Description of Artificial Sequence: Synthetic oligonucleotide
gggagucagugagucgaau

SEQ ID NO: 2049914 - RNA, 19 nt, Artificial Sequence
  Description of Artificial Sequence: Synthetic oligonucleotide
cacggaucggcuggcgcuu

SEQ ID NO: 2049915 - RNA, 19 nt, Artificial Sequence
  Description of Artificial Sequence: Synthetic oligonucleotide
ccuugcagugagccgcuau

SEQ ID NO: 2049916 - RNA, 19 nt, Artificial Sequence
  Description of Artificial Sequence: Synthetic oligonucleotide
cgacauuacugagucccau

SEQ ID NO: 2049917 - RNA, 19 nt, Artificial Sequence
  Description of Artificial Sequence: Synthetic oligonucleotide
cccucucaucgccuguguu

SEQ ID NO: 2049918 - RNA, 19 nt, Artificial Sequence
  Description of Artificial Sequence: Synthetic oligonucleotide
ccagugguugggccuucuu

SEQ ID NO: 2049919 - RNA, 19 nt, Artificial Sequence
  Description of Artificial Sequence: Synthetic oligonucleotide
ccgcacuguucuggcagua

SEQ ID NO: 2049920 - RNA, 19 nt, Artificial Sequence
  Description of Artificial Sequence: Synthetic oligonucleotide
cgcacuguucuggcaguau

SEQ ID NO: 2049921 - RNA, 19 nt, Artificial Sequence
  Description of Artificial Sequence: Synthetic oligonucleotide
gccuuccccugagccgagu

SEQ ID NO: 2049922 - RNA, 19 nt, Artificial Sequence
  Description of Artificial Sequence: Synthetic oligonucleotide
cggaucggcuggcgcuucu

SEQ ID NO: 2049923 - RNA, 19 nt, Artificial Sequence
  Description of Artificial Sequence: Synthetic oligonucleotide
aaacuuaucuccuagaauc

SEQ ID NO: 2049924 - RNA, 19 nt, Artificial Sequence
  Description of Artificial Sequence: Synthetic oligonucleotide
aaccauuuuauguaggggc

SEQ ID NO: 2049925 - RNA, 19 nt, Artificial Sequence
  Description of Artificial Sequence: Synthetic oligonucleotide
uuugcuuauauccaucagg

SEQ ID NO: 2049926 - RNA, 19 nt, Artificial Sequence
  Description of Artificial Sequence: Synthetic oligonucleotide
agcauuaaagcacagacag

SEQ ID NO: 2049927 - RNA, 19 nt, Artificial Sequence
  Description of Artificial Sequence: Synthetic oligonucleotide
cauacguuugcuuauaucc

SEQ ID NO: 2049928 - RNA, 19 nt, Artificial Sequence
  Description of Artificial Sequence: Synthetic oligonucleotide
ugauuuguccucaaagccg

SEQ ID NO: 2049929 - RNA, 19 nt, Artificial Sequence
  Description of Artificial Sequence: Synthetic oligonucleotide
aacucuugaauccccaagg

SEQ ID NO: 2049930 - RNA, 19 nt, Artificial Sequence
  Description of Artificial Sequence: Synthetic oligonucleotide
aaauucugggacuaaaggu

SEQ ID NO: 2049931 - RNA, 19 nt, Artificial Sequence
  Description of Artificial Sequence: Synthetic oligonucleotide
aacacgaucuucuuccccg

SEQ ID NO: 2049932 - RNA, 19 nt, Artificial Sequence
  Description of Artificial Sequence: Synthetic oligonucleotide
uguaguaucaauuggccca

SEQ ID NO: 2049933 - RNA, 19 nt, Artificial Sequence
  Description of Artificial Sequence: Synthetic oligonucleotide
uuauguaggggccagggag

SEQ ID NO: 2049934 - RNA, 19 nt, Artificial Sequence
  Description of Artificial Sequence: Synthetic oligonucleotide
cuguauggaaauuucaucc

SEQ ID NO: 2049935 - RNA, 19 nt, Artificial Sequence
  Description of Artificial Sequence: Synthetic oligonucleotide
uuuagcuucucuaggaacc

SEQ ID NO: 2049936 - RNA, 19 nt, Artificial Sequence
  Description of Artificial Sequence: Synthetic oligonucleotide
aagaguguaguaucaauug

SEQ ID NO: 2049937 - RNA, 19 nt, Artificial Sequence
  Description of Artificial Sequence: Synthetic oligonucleotide
aacccagagaaauacuuuc

SEQ ID NO: 2049938 - RNA, 19 nt, Artificial Sequence
  Description of Artificial Sequence: Synthetic oligonucleotide
uuucccgucacaaacacga

SEQ ID NO: 2049939 - RNA, 19 nt, Artificial Sequence
  Description of Artificial Sequence: Synthetic oligonucleotide
uugcuuauauccaucaggc

SEQ ID NO: 2049940 - RNA, 19 nt, Artificial Sequence
  Description of Artificial Sequence: Synthetic oligonucleotide
agagcaaacgugcagagug

SEQ ID NO: 2049941 - RNA, 19 nt, Artificial Sequence
  Description of Artificial Sequence: Synthetic oligonucleotide
uguauggaaauuucauccg

SEQ ID NO: 2049942 - RNA, 19 nt, Artificial Sequence
  Description of Artificial Sequence: Synthetic oligonucleotide
ucuaggaaccauuuuaugu

SEQ ID NO: 2049943 - RNA, 19 nt, Artificial Sequence
  Description of Artificial Sequence: Synthetic oligonucleotide
uacucuuguagcuugagca

SEQ ID NO: 2049944 - RNA, 19 nt, Artificial Sequence
  Description of Artificial Sequence: Synthetic oligonucleotide
agaaauacuuuccaggagu

SEQ ID NO: 2049945 - RNA, 19 nt, Artificial Sequence
  Description of Artificial Sequence: Synthetic oligonucleotide
aucuccuagaaucugaaug

SEQ ID NO: 2049946 - RNA, 19 nt, Artificial Sequence
  Description of Artificial Sequence: Synthetic oligonucleotide
aaagcacagacagguaucc

SEQ ID NO: 2049947 - RNA, 19 nt, Artificial Sequence
  Description of Artificial Sequence: Synthetic oligonucleotide
acuaugccaggccaaaggc

SEQ ID NO: 2049948 - RNA, 19 nt, Artificial Sequence
  Description of Artificial Sequence: Synthetic oligonucleotide
ugcacggaaacuuaucucc

SEQ ID NO: 2049949 - RNA, 19 nt, Artificial Sequence
  Description of Artificial Sequence: Synthetic oligonucleotide
gaaucgaugagaaauggug

SEQ ID NO: 2049950 - RNA, 19 nt, Artificial Sequence
  Description of Artificial Sequence: Synthetic oligonucleotide
aaacacgaucuucuucccc

SEQ ID NO: 2049951 - RNA, 19 nt, Artificial Sequence
  Description of Artificial Sequence: Synthetic oligonucleotide
uuaaagcacagacagguau

SEQ ID NO: 2049952 - RNA, 19 nt, Artificial Sequence
  Description of Artificial Sequence: Synthetic oligonucleotide
ugagaaaugguguucuucu

SEQ ID NO: 2049953 - RNA, 19 nt, Artificial Sequence
  Description of Artificial Sequence: Synthetic oligonucleotide
uguagcuugagcagggccc

SEQ ID NO: 2049954 - RNA, 19 nt, Artificial Sequence
  Description of Artificial Sequence: Synthetic oligonucleotide
ucuccuagaaucugaauga

SEQ ID NO: 2049955 - RNA, 19 nt, Artificial Sequence
  Description of Artificial Sequence: Synthetic oligonucleotide
aaaguucugcaccaguccu

SEQ ID NO: 2049956 - RNA, 19 nt, Artificial Sequence
  Description of Artificial Sequence: Synthetic oligonucleotide
aguguaguaucaauuggcc

SEQ ID NO: 2049957 - RNA, 19 nt, Artificial Sequence
  Description of Artificial Sequence: Synthetic oligonucleotide
uauggaaauuucauccggc

SEQ ID NO: 2049958 - RNA, 19 nt, Artificial Sequence
  Description of Artificial Sequence: Synthetic oligonucleotide
aaggcaacucuugaauccc

SEQ ID NO: 2049959 - RNA, 19 nt, Artificial Sequence
  Description of Artificial Sequence: Synthetic oligonucleotide
gauuuguccucaaagccgg

SEQ ID NO: 2049960 - RNA, 19 nt, Artificial Sequence
  Description of Artificial Sequence: Synthetic oligonucleotide
cugauuuguccucaaagcc

SEQ ID NO: 2049961 - RNA, 19 nt, Artificial Sequence
  Description of Artificial Sequence: Synthetic oligonucleotide
uucucuaggaaccauuuua

SEQ ID NO: 2049962 - RNA, 19 nt, Artificial Sequence
  Description of Artificial Sequence: Synthetic oligonucleotide
aaacgugcagagugcauag

SEQ ID NO: 2049963 - RNA, 19 nt, Artificial Sequence
  Description of Artificial Sequence: Synthetic oligonucleotide
gaaagcagggaucccagcc

SEQ ID NO: 2049964 - RNA, 19 nt, Artificial Sequence
  Description of Artificial Sequence: Synthetic oligonucleotide
guauggaaauuucauccgg

SEQ ID NO: 2049965 - RNA, 19 nt, Artificial Sequence
  Description of Artificial Sequence: Synthetic oligonucleotide
uuucugugccaccaaagug

SEQ ID NO: 2049966 - RNA, 19 nt, Artificial Sequence
  Description of Artificial Sequence: Synthetic oligonucleotide
acgugcagagugcauaggc

SEQ ID NO: 2049967 - RNA, 19 nt, Artificial Sequence
  Description of Artificial Sequence: Synthetic oligonucleotide
gaaaguucugcaccagucc

SEQ ID NO: 2049968 - RNA, 19 nt, Artificial Sequence
  Description of Artificial Sequence: Synthetic oligonucleotide
gaauucccuauacagagca

SEQ ID NO: 2049969 - RNA, 19 nt, Artificial Sequence
  Description of Artificial Sequence: Synthetic oligonucleotide
ugaaugaccuccuccagcu

SEQ ID NO: 2049970 - RNA, 19 nt, Artificial Sequence
  Description of Artificial Sequence: Synthetic oligonucleotide
gcuuauauccaucaggcug

SEQ ID NO: 2049971 - RNA, 19 nt, Artificial Sequence
  Description of Artificial Sequence: Synthetic oligonucleotide
guaugcaccacuaugccag

SEQ ID NO: 2049972 - RNA, 19 nt, Artificial Sequence
  Description of Artificial Sequence: Synthetic oligonucleotide
ucuguauggaaauuucauc

SEQ ID NO: 2049973 - RNA, 19 nt, Artificial Sequence
  Description of Artificial Sequence: Synthetic oligonucleotide
gaaguacucuuguagcuug

SEQ ID NO: 2049974 - RNA, 19 nt, Artificial Sequence
  Description of Artificial Sequence: Synthetic oligonucleotide
accuucaggcuuuagcuuc

SEQ ID NO: 2049975 - RNA, 19 nt, Artificial Sequence
  Description of Artificial Sequence: Synthetic oligonucleotide
agggcaagaguguaguauc

SEQ ID NO: 2049976 - RNA, 19 nt, Artificial Sequence
  Description of Artificial Sequence: Synthetic oligonucleotide
agcuucuuugcauuucccg

SEQ ID NO: 2049977 - RNA, 19 nt, Artificial Sequence
  Description of Artificial Sequence: Synthetic oligonucleotide
uucuuccccgccaaagacg

SEQ ID NO: 2049978 - RNA, 19 nt, Artificial Sequence
  Description of Artificial Sequence: Synthetic oligonucleotide
uaggaaccauuuuauguag

SEQ ID NO: 2049979 - RNA, 19 nt, Artificial Sequence
  Description of Artificial Sequence: Synthetic oligonucleotide
uaugccaggccaaaggcaa

SEQ ID NO: 2049980 - RNA, 19 nt, Artificial Sequence
  Description of Artificial Sequence: Synthetic oligonucleotide
accauuuuauguaggggcc

SEQ ID NO: 2049981 - RNA, 19 nt, Artificial Sequence
  Description of Artificial Sequence: Synthetic oligonucleotide
gagaaauacuuuccaggag

SEQ ID NO: 2049982 - RNA, 19 nt, Artificial Sequence
  Description of Artificial Sequence: Synthetic oligonucleotide
cuuauauccaucaggcuga

SEQ ID NO: 2049983 - RNA, 19 nt, Artificial Sequence
  Description of Artificial Sequence: Synthetic oligonucleotide
ucuuccccgccaaagacgc

SEQ ID NO: 2049984 - RNA, 19 nt, Artificial Sequence
  Description of Artificial Sequence: Synthetic oligonucleotide
acucuugaauccccaaggg

SEQ ID NO: 2049985 - RNA, 19 nt, Artificial Sequence
  Description of Artificial Sequence: Synthetic oligonucleotide
aaaccgcucuuccauaccu

SEQ ID NO: 2049986 - RNA, 19 nt, Artificial Sequence
  Description of Artificial Sequence: Synthetic oligonucleotide
agugcacggaaacuuaucu

SEQ ID NO: 2049987 - RNA, 19 nt, Artificial Sequence
  Description of Artificial Sequence: Synthetic oligonucleotide
aggagugucugucuccugg

SEQ ID NO: 2049988 - RNA, 19 nt, Artificial Sequence
  Description of Artificial Sequence: Synthetic oligonucleotide
aaagcagggaucccagcca

SEQ ID NO: 2049989 - RNA, 19 nt, Artificial Sequence
  Description of Artificial Sequence: Synthetic oligonucleotide
aaucgaugagaaauggugu

SEQ ID NO: 2049990 - RNA, 19 nt, Artificial Sequence
  Description of Artificial Sequence: Synthetic oligonucleotide
ggaaccauuuuauguaggg

SEQ ID NO: 2049991 - RNA, 19 nt, Artificial Sequence
  Description of Artificial Sequence: Synthetic oligonucleotide
uguugaagcugccuggauc

SEQ ID NO: 2049992 - RNA, 19 nt, Artificial Sequence
  Description of Artificial Sequence: Synthetic oligonucleotide
uaaagcacagacagguauc

SEQ ID NO: 2049993 - RNA, 19 nt, Artificial Sequence
  Description of Artificial Sequence: Synthetic oligonucleotide
uccuagaaucugaaugacc

SEQ ID NO: 2049994 - RNA, 19 nt, Artificial Sequence
  Description of Artificial Sequence: Synthetic oligonucleotide
ucaauuggcccagaauucc

SEQ ID NO: 2049995 - RNA, 19 nt, Artificial Sequence
  Description of Artificial Sequence: Synthetic oligonucleotide
acagguauccuccaccagu

SEQ ID NO: 2049996 - RNA, 19 nt, Artificial Sequence
  Description of Artificial Sequence: Synthetic oligonucleotide
ucucuaggaaccauuuuau

SEQ ID NO: 2049997 - RNA, 19 nt, Artificial Sequence
  Description of Artificial Sequence: Synthetic oligonucleotide
caaagggcaacccagagaa

SEQ ID NO: 2049998 - RNA, 19 nt, Artificial Sequence
  Description of Artificial Sequence: Synthetic oligonucleotide
aaagacgcggccauggcca

SEQ ID NO: 2049999 - RNA, 19 nt, Artificial Sequence
  Description of Artificial Sequence: Synthetic oligonucleotide
auacagagcaaaccgcucu

SEQ ID NO: 2050000 - RNA, 19 nt, Artificial Sequence
  Description of Artificial Sequence: Synthetic oligonucleotide
uuccauaccuggcuguuga

SEQ ID NO: 2050001 - RNA, 19 nt, Artificial Sequence
  Description of Artificial Sequence: Synthetic oligonucleotide
acggaaacuuaucuccuag

SEQ ID NO: 2050002 - RNA, 19 nt, Artificial Sequence
  Description of Artificial Sequence: Synthetic oligonucleotide
caggcuuuagcuucucuag

SEQ ID NO: 2050003 - RNA, 19 nt, Artificial Sequence
  Description of Artificial Sequence: Synthetic oligonucleotide
uuugcauuucccgucacaa

SEQ ID NO: 2050004 - RNA, 19 nt, Artificial Sequence
  Description of Artificial Sequence: Synthetic oligonucleotide
augagaaaugguguucuuc

SEQ ID NO: 2050005 - RNA, 19 nt, Artificial Sequence
  Description of Artificial Sequence: Synthetic oligonucleotide
uuguagcuugagcagggcc

SEQ ID NO: 2050006 - RNA, 19 nt, Artificial Sequence
  Description of Artificial Sequence: Synthetic oligonucleotide
cacuaugccaggccaaagg

SEQ ID NO: 2050007 - RNA, 19 nt, Artificial Sequence
  Description of Artificial Sequence: Synthetic oligonucleotide
aggcugaaagcagggaucc

SEQ ID NO: 2050008 - RNA, 19 nt, Artificial Sequence
  Description of Artificial Sequence: Synthetic oligonucleotide
uuaucuccuagaaucugaa

SEQ ID NO: 2050009 - RNA, 19 nt, Artificial Sequence
  Description of Artificial Sequence: Synthetic oligonucleotide
ucaaagccggccaggagcu

SEQ ID NO: 2050010 - RNA, 19 nt, Artificial Sequence
  Description of Artificial Sequence: Synthetic oligonucleotide
aagggcaacccagagaaau

SEQ ID NO: 2050011 - RNA, 19 nt, Artificial Sequence
  Description of Artificial Sequence: Synthetic oligonucleotide
gcugauuuguccucaaagc

SEQ ID NO: 2050012 - RNA, 19 nt, Artificial Sequence
  Description of Artificial Sequence: Synthetic oligonucleotide
uugcacuucuguauggaaa

SEQ ID NO: 2050013 - RNA, 19 nt, Artificial Sequence
  Description of Artificial Sequence: Synthetic oligonucleotide
guauccuccaccaguacag

SEQ ID NO: 2050014 - RNA, 19 nt, Artificial Sequence
  Description of Artificial Sequence: Synthetic oligonucleotide
uucuuugcauuucccguca

SEQ ID NO: 2050015 - RNA, 19 nt, Artificial Sequence
  Description of Artificial Sequence: Synthetic oligonucleotide
uggaaauuucauccggcuc

SEQ ID NO: 2050016 - RNA, 19 nt, Artificial Sequence
  Description of Artificial Sequence: Synthetic oligonucleotide
auggaaauuucauccggcu

SEQ ID NO: 2050017 - RNA, 19 nt, Artificial Sequence
  Description of Artificial Sequence: Synthetic oligonucleotide
aaagccggccaggagcugg

SEQ ID NO: 2050018 - RNA, 19 nt, Artificial Sequence
  Description of Artificial Sequence: Synthetic oligonucleotide
guguaguaucaauuggccc

SEQ ID NO: 2050019 - RNA, 19 nt, Artificial Sequence
  Description of Artificial Sequence: Synthetic oligonucleotide
gaacaggagcacuggcugg

SEQ ID NO: 2050020 - RNA, 19 nt, Artificial Sequence
  Description of Artificial Sequence: Synthetic oligonucleotide
agugcauaggcugauuugu

SEQ ID NO: 2050021 - RNA, 19 nt, Artificial Sequence
  Description of Artificial Sequence: Synthetic oligonucleotide
caaaggcaacucuugaauc

SEQ ID NO: 2050022 - RNA, 19 nt, Artificial Sequence
  Description of Artificial Sequence: Synthetic oligonucleotide
cuaggaaccauuuuaugua

SEQ ID NO: 2050023 - RNA, 19 nt, Artificial Sequence
  Description of Artificial Sequence: Synthetic oligonucleotide
cccuauacagagcaaaccg

SEQ ID NO: 2050024 - RNA, 19 nt, Artificial Sequence
  Description of Artificial Sequence: Synthetic oligonucleotide
uucccuauacagagcaaac

SEQ ID NO: 2050025 - RNA, 19 nt, Artificial Sequence
  Description of Artificial Sequence: Synthetic oligonucleotide
uccuccaccaguacaggac

SEQ ID NO: 2050026 - RNA, 19 nt, Artificial Sequence
  Description of Artificial Sequence: Synthetic oligonucleotide
uauacagagcaaaccgcuc

SEQ ID NO: 2050027 - RNA, 19 nt, Artificial Sequence
  Description of Artificial Sequence: Synthetic oligonucleotide
aggcuuuagcuucucuagg

SEQ ID NO: 2050028 - RNA, 19 nt, Artificial Sequence
  Description of Artificial Sequence: Synthetic oligonucleotide
aagggcaagaguguaguau

SEQ ID NO: 2050029 - RNA, 19 nt, Artificial Sequence
  Description of Artificial Sequence: Synthetic oligonucleotide
agaauucccuauacagagc

SEQ ID NO: 2050030 - RNA, 19 nt, Artificial Sequence
  Description of Artificial Sequence: Synthetic oligonucleotide
aaauuucauccggcucucc

SEQ ID NO: 2050031 - RNA, 19 nt, Artificial Sequence
  Description of Artificial Sequence: Synthetic oligonucleotide
aacuuaucuccuagaaucu

SEQ ID NO: 2050032 - RNA, 19 nt, Artificial Sequence
  Description of Artificial Sequence: Synthetic oligonucleotide
accgcucuuccauaccugg

SEQ ID NO: 2050033 - RNA, 19 nt, Artificial Sequence
  Description of Artificial Sequence: Synthetic oligonucleotide
ggcugauuuguccucaaag

SEQ ID NO: 2050034 - RNA, 19 nt, Artificial Sequence
  Description of Artificial Sequence: Synthetic oligonucleotide
cauuaaagcacagacaggu

SEQ ID NO: 2050035 - RNA, 19 nt, Artificial Sequence
  Description of Artificial Sequence: Synthetic oligonucleotide
ucugcauacguuugcuuau

SEQ ID NO: 2050036 - RNA, 19 nt, Artificial Sequence
  Description of Artificial Sequence: Synthetic oligonucleotide
guuugcuuauauccaucag

SEQ ID NO: 2050037 - RNA, 19 nt, Artificial Sequence
  Description of Artificial Sequence: Synthetic oligonucleotide
acacgaucuucuuccccgc

SEQ ID NO: 2050038 - RNA, 19 nt, Artificial Sequence
  Description of Artificial Sequence: Synthetic oligonucleotide
uacguuugcuuauauccau

SEQ ID NO: 2050039 - RNA, 19 nt, Artificial Sequence
  Description of Artificial Sequence: Synthetic oligonucleotide
ucccuauacagagcaaacc

SEQ ID NO: 2050040 - RNA, 19 nt, Artificial Sequence
  Description of Artificial Sequence: Synthetic oligonucleotide
uguccucaaagccggccag

SEQ ID NO: 2050041 - RNA, 19 nt, Artificial Sequence
  Description of Artificial Sequence: Synthetic oligonucleotide
agacagguauccuccacca

SEQ ID NO: 2050042 - RNA, 19 nt, Artificial Sequence
  Description of Artificial Sequence: Synthetic oligonucleotide
caauuggcccagaauuccc

SEQ ID NO: 2050043 - RNA, 19 nt, Artificial Sequence
  Description of Artificial Sequence: Synthetic oligonucleotide
aaauacuuuccaggagugu

SEQ ID NO: 2050044 - RNA, 19 nt, Artificial Sequence
  Description of Artificial Sequence: Synthetic oligonucleotide
aaagaucuaucugccucug

SEQ ID NO: 2050045 - RNA, 19 nt, Artificial Sequence
  Description of Artificial Sequence: Synthetic oligonucleotide
cauuucccgucacaaacac

SEQ ID NO: 2050046 - RNA, 19 nt, Artificial Sequence
  Description of Artificial Sequence: Synthetic oligonucleotide
agcaucucacuauguagcu

SEQ ID NO: 2050047 - RNA, 19 nt, Artificial Sequence
  Description of Artificial Sequence: Synthetic oligonucleotide
aucgaugagaaaugguguu

SEQ ID NO: 2050048 - RNA, 19 nt, Artificial Sequence
  Description of Artificial Sequence: Synthetic oligonucleotide
aaguucugcaccaguccuc

SEQ ID NO: 2050049 - RNA, 19 nt, Artificial Sequence
  Description of Artificial Sequence: Synthetic oligonucleotide
gaagcugccuggauccccg

SEQ ID NO: 2050050 - RNA, 19 nt, Artificial Sequence
  Description of Artificial Sequence: Synthetic oligonucleotide
aagugcacggaaacuuauc

SEQ ID NO: 2050051 - RNA, 19 nt, Artificial Sequence
  Description of Artificial Sequence: Synthetic oligonucleotide
gaggucuggccccugaaca

SEQ ID NO: 2050052 - RNA, 19 nt, Artificial Sequence
  Description of Artificial Sequence: Synthetic oligonucleotide
agagcaaaccgcucuucca

SEQ ID NO: 2050053 - RNA, 19 nt, Artificial Sequence
  Description of Artificial Sequence: Synthetic oligonucleotide
cagccuuuggcaucucugc

SEQ ID NO: 2050054 - RNA, 19 nt, Artificial Sequence
  Description of Artificial Sequence: Synthetic oligonucleotide
auccggcucucccugguac

SEQ ID NO: 2050055 - RNA, 19 nt, Artificial Sequence
  Description of Artificial Sequence: Synthetic oligonucleotide
cuucuuccccgccaaagac

SEQ ID NO: 2050056 - RNA, 19 nt, Artificial Sequence
  Description of Artificial Sequence: Synthetic oligonucleotide
agccaaagucccgggagcc

SEQ ID NO: 2050057 - RNA, 19 nt, Artificial Sequence
  Description of Artificial Sequence: Synthetic oligonucleotide
guacucuuguagcuugagc

SEQ ID NO: 2050058 - RNA, 19 nt, Artificial Sequence
  Description of Artificial Sequence: Synthetic oligonucleotide
aguaucaauuggcccagaa

SEQ ID NO: 2050059 - RNA, 19 nt, Artificial Sequence
  Description of Artificial Sequence: Synthetic oligonucleotide
ccuauacagagcaaaccgc

SEQ ID NO: 2050060 - RNA, 19 nt, Artificial Sequence
  Description of Artificial Sequence: Synthetic oligonucleotide
auaccuggcuguugaagcu

SEQ ID NO: 2050061 - RNA, 19 nt, Artificial Sequence
  Description of Artificial Sequence: Synthetic oligonucleotide
cagagcaaaccgcucuucc

SEQ ID NO: 2050062 - RNA, 19 nt, Artificial Sequence
  Description of Artificial Sequence: Synthetic oligonucleotide
cauuuuauguaggggccag

SEQ ID NO: 2050063 - RNA, 19 nt, Artificial Sequence
  Description of Artificial Sequence: Synthetic oligonucleotide
ucguggcaucacaaucugg

SEQ ID NO: 2050064 - RNA, 19 nt, Artificial Sequence
  Description of Artificial Sequence: Synthetic oligonucleotide
caaacacgaucuucuuccc

SEQ ID NO: 2050065 - RNA, 19 nt, Artificial Sequence
  Description of Artificial Sequence: Synthetic oligonucleotide
uccaggagugucugucucc

SEQ ID NO: 2050066 - RNA, 19 nt, Artificial Sequence
  Description of Artificial Sequence: Synthetic oligonucleotide
ugcuuauauccaucaggcu

SEQ ID NO: 2050067 - RNA, 19 nt, Artificial Sequence
  Description of Artificial Sequence: Synthetic oligonucleotide
gaaacuuaucuccuagaau

SEQ ID NO: 2050068 - RNA, 19 nt, Artificial Sequence
  Description of Artificial Sequence: Synthetic oligonucleotide
caccaaagugcacggaaac

SEQ ID NO: 2050069 - RNA, 19 nt, Artificial Sequence
  Description of Artificial Sequence: Synthetic oligonucleotide
guagcuugagcagggcccg

SEQ ID NO: 2050070 - RNA, 19 nt, Artificial Sequence
  Description of Artificial Sequence: Synthetic oligonucleotide
caggcugaaagcagggauc

SEQ ID NO: 2050071 - RNA, 19 nt, Artificial Sequence
  Description of Artificial Sequence: Synthetic oligonucleotide
ugcaccaguccuccccucc

SEQ ID NO: 2050072 - RNA, 19 nt, Artificial Sequence
  Description of Artificial Sequence: Synthetic oligonucleotide
acuuaucuccuagaaucug

SEQ ID NO: 2050073 - RNA, 19 nt, Artificial Sequence
  Description of Artificial Sequence: Synthetic oligonucleotide
uuaguggccaccggcaguc

SEQ ID NO: 2050074 - RNA, 19 nt, Artificial Sequence
  Description of Artificial Sequence: Synthetic oligonucleotide
ucccugguacucaggcagg

SEQ ID NO: 2050075 - RNA, 19 nt, Artificial Sequence
  Description of Artificial Sequence: Synthetic oligonucleotide
auguaggggccagggagcc

SEQ ID NO: 2050076 - RNA, 19 nt, Artificial Sequence
  Description of Artificial Sequence: Synthetic oligonucleotide
auacguuugcuuauaucca

SEQ ID NO: 2050077 - RNA, 19 nt, Artificial Sequence
  Description of Artificial Sequence: Synthetic oligonucleotide
auuuuauguaggggccagg

SEQ ID NO: 2050078 - RNA, 19 nt, Artificial Sequence
  Description of Artificial Sequence: Synthetic oligonucleotide
cuauacagagcaaaccgcu

SEQ ID NO: 2050079 - RNA, 19 nt, Artificial Sequence
  Description of Artificial Sequence: Synthetic oligonucleotide
uucugggacuaaagguaug

SEQ ID NO: 2050080 - RNA, 19 nt, Artificial Sequence
  Description of Artificial Sequence: Synthetic oligonucleotide
ugcugagagcaaacgugca

SEQ ID NO: 2050081 - RNA, 19 nt, Artificial Sequence
  Description of Artificial Sequence: Synthetic oligonucleotide
aacgugcagagugcauagg

SEQ ID NO: 2050082 - RNA, 19 nt, Artificial Sequence
  Description of Artificial Sequence: Synthetic oligonucleotide
ucccgucacaaacacgauc

SEQ ID NO: 2050083 - RNA, 19 nt, Artificial Sequence
  Description of Artificial Sequence: Synthetic oligonucleotide
aaagugcacggaaacuuau

SEQ ID NO: 2050084 - RNA, 19 nt, Artificial Sequence
  Description of Artificial Sequence: Synthetic oligonucleotide
cguggcaucacaaucuggc

SEQ ID NO: 2050085 - RNA, 19 nt, Artificial Sequence
  Description of Artificial Sequence: Synthetic oligonucleotide
ggaaacuuaucuccuagaa

SEQ ID NO: 2050086 - RNA, 19 nt, Artificial Sequence
  Description of Artificial Sequence: Synthetic oligonucleotide
agugucugucuccuggaaa

SEQ ID NO: 2050087 - RNA, 19 nt, Artificial Sequence
  Description of Artificial Sequence: Synthetic oligonucleotide
uauccuccaccaguacagg

SEQ ID NO: 2050088 - RNA, 19 nt, Artificial Sequence
  Description of Artificial Sequence: Synthetic oligonucleotide
ucgaugagaaaugguguuc

SEQ ID NO: 2050089 - RNA, 19 nt, Artificial Sequence
  Description of Artificial Sequence: Synthetic oligonucleotide
cauaggcugauuuguccuc

SEQ ID NO: 2050090 - RNA, 19 nt, Artificial Sequence
  Description of Artificial Sequence: Synthetic oligonucleotide
guggcaucacaaucuggcc

SEQ ID NO: 2050091 - RNA, 19 nt, Artificial Sequence
  Description of Artificial Sequence: Synthetic oligonucleotide
gacagguauccuccaccag

SEQ ID NO: 2050092 - RNA, 19 nt, Artificial Sequence
  Description of Artificial Sequence: Synthetic oligonucleotide
cccgagagcauuaaagcac

SEQ ID NO: 2050093 - RNA, 19 nt, Artificial Sequence
  Description of Artificial Sequence: Synthetic oligonucleotide
ugcauacguuugcuuauau

SEQ ID NO: 2050094 - RNA, 19 nt, Artificial Sequence
  Description of Artificial Sequence: Synthetic oligonucleotide
aguacucuuguagcuugag

SEQ ID NO: 2050095 - RNA, 19 nt, Artificial Sequence
  Description of Artificial Sequence: Synthetic oligonucleotide
uucauccggcucucccugg

SEQ ID NO: 2050096 - RNA, 19 nt, Artificial Sequence
  Description of Artificial Sequence: Synthetic oligonucleotide
uacagagcaaaccgcucuu

SEQ ID NO: 2050097 - RNA, 19 nt, Artificial Sequence
  Description of Artificial Sequence: Synthetic oligonucleotide
caaagucccgggagccucg

SEQ ID NO: 2050098 - RNA, 19 nt, Artificial Sequence
  Description of Artificial Sequence: Synthetic oligonucleotide
uccccaagggcaagagugu

SEQ ID NO: 2050099 - RNA, 19 nt, Artificial Sequence
  Description of Artificial Sequence: Synthetic oligonucleotide
caaaccgcucuuccauacc

SEQ ID NO: 2050100 - RNA, 19 nt, Artificial Sequence
  Description of Artificial Sequence: Synthetic oligonucleotide
gcugagagcaaacgugcag

SEQ ID NO: 2050101 - RNA, 19 nt, Artificial Sequence
  Description of Artificial Sequence: Synthetic oligonucleotide
aagacgcggccauggccag

SEQ ID NO: 2050102 - RNA, 19 nt, Artificial Sequence
  Description of Artificial Sequence: Synthetic oligonucleotide
uggcuugggucuccagugc

SEQ ID NO: 2050103 - RNA, 19 nt, Artificial Sequence
  Description of Artificial Sequence: Synthetic oligonucleotide
ugguacucaggcaggucaa

SEQ ID NO: 2050104 - RNA, 19 nt, Artificial Sequence
  Description of Artificial Sequence: Synthetic oligonucleotide
cuaugccaggccaaaggca

SEQ ID NO: 2050105 - RNA, 19 nt, Artificial Sequence
  Description of Artificial Sequence: Synthetic oligonucleotide
cuugaauccccaagggcaa

SEQ ID NO: 2050106 - RNA, 19 nt, Artificial Sequence
  Description of Artificial Sequence: Synthetic oligonucleotide
gugccaccaaagugcacgg

SEQ ID NO: 2050107 - RNA, 19 nt, Artificial Sequence
  Description of Artificial Sequence: Synthetic oligonucleotide
acguuugcuuauauccauc

SEQ ID NO: 2050108 - RNA, 19 nt, Artificial Sequence
  Description of Artificial Sequence: Synthetic oligonucleotide
ugaauccccaagggcaaga

SEQ ID NO: 2050109 - RNA, 19 nt, Artificial Sequence
  Description of Artificial Sequence: Synthetic oligonucleotide
uaucuccuagaaucugaau

SEQ ID NO: 2050110 - RNA, 19 nt, Artificial Sequence
  Description of Artificial Sequence: Synthetic oligonucleotide
gagcaaacgugcagagugc

SEQ ID NO: 2050111 - RNA, 19 nt, Artificial Sequence
  Description of Artificial Sequence: Synthetic oligonucleotide
accaaagugcacggaaacu

SEQ ID NO: 2050112 - RNA, 19 nt, Artificial Sequence
  Description of Artificial Sequence: Synthetic oligonucleotide
auuucccgucacaaacacg

SEQ ID NO: 2050113 - RNA, 19 nt, Artificial Sequence
  Description of Artificial Sequence: Synthetic oligonucleotide
cucguggcaucacaaucug

SEQ ID NO: 2050114 - RNA, 19 nt, Artificial Sequence
  Description of Artificial Sequence: Synthetic oligonucleotide
cugagagcaaacgugcaga

SEQ ID NO: 2050115 - RNA, 19 nt, Artificial Sequence
  Description of Artificial Sequence: Synthetic oligonucleotide
cagccaaagucccgggagc

SEQ ID NO: 2050116 - RNA, 19 nt, Artificial Sequence
  Description of Artificial Sequence: Synthetic oligonucleotide
aggcaacucuugaaucccc

SEQ ID NO: 2050117 - RNA, 19 nt, Artificial Sequence
  Description of Artificial Sequence: Synthetic oligonucleotide
gguauccuccaccaguaca

SEQ ID NO: 2050118 - RNA, 19 nt, Artificial Sequence
  Description of Artificial Sequence: Synthetic oligonucleotide
agccuuuggcaucucugca

SEQ ID NO: 2050119 - RNA, 19 nt, Artificial Sequence
  Description of Artificial Sequence: Synthetic oligonucleotide
ucuuugcauuucccgucac

SEQ ID NO: 2050120 - RNA, 19 nt, Artificial Sequence
  Description of Artificial Sequence: Synthetic oligonucleotide
ggcuuuagcuucucuagga

SEQ ID NO: 2050121 - RNA, 19 nt, Artificial Sequence
  Description of Artificial Sequence: Synthetic oligonucleotide
agaaucugaaugaccuccu

SEQ ID NO: 2050122 - RNA, 19 nt, Artificial Sequence
  Description of Artificial Sequence: Synthetic oligonucleotide
auaggcugauuuguccuca

SEQ ID NO: 2050123 - RNA, 19 nt, Artificial Sequence
  Description of Artificial Sequence: Synthetic oligonucleotide
gugcacggaaacuuaucuc

SEQ ID NO: 2050124 - RNA, 19 nt, Artificial Sequence
  Description of Artificial Sequence: Synthetic oligonucleotide
auucugggacuaaagguau

SEQ ID NO: 2050125 - RNA, 19 nt, Artificial Sequence
  Description of Artificial Sequence: Synthetic oligonucleotide
caagaguguaguaucaauu

SEQ ID NO: 2050126 - RNA, 19 nt, Artificial Sequence
  Description of Artificial Sequence: Synthetic oligonucleotide
uggccuuaguggccaccgg

SEQ ID NO: 2050127 - RNA, 19 nt, Artificial Sequence
  Description of Artificial Sequence: Synthetic oligonucleotide
agcaaacgugcagagugca

SEQ ID NO: 2050128 - RNA, 19 nt, Artificial Sequence
  Description of Artificial Sequence: Synthetic oligonucleotide
gguaugcaccacuaugcca

SEQ ID NO: 2050129 - RNA, 19 nt, Artificial Sequence
  Description of Artificial Sequence: Synthetic oligonucleotide
gcauuaaagcacagacagg

SEQ ID NO: 2050130 - RNA, 19 nt, Artificial Sequence
  Description of Artificial Sequence: Synthetic oligonucleotide
caaucuggcccgaggucug

SEQ ID NO: 2050131 - RNA, 19 nt, Artificial Sequence
  Description of Artificial Sequence: Synthetic oligonucleotide
aaguacucuuguagcuuga

SEQ ID NO: 2050132 - RNA, 19 nt, Artificial Sequence
  Description of Artificial Sequence: Synthetic oligonucleotide
cuuguagcuugagcagggc

SEQ ID NO: 2050133 - RNA, 19 nt, Artificial Sequence
  Description of Artificial Sequence: Synthetic oligonucleotide
uccaaaauucugggacuaa

SEQ ID NO: 2050134 - RNA, 19 nt, Artificial Sequence
  Description of Artificial Sequence: Synthetic oligonucleotide
cuggcgagcugccuccuug

SEQ ID NO: 2050135 - RNA, 19 nt, Artificial Sequence
  Description of Artificial Sequence: Synthetic oligonucleotide
cuuugcauuucccgucaca

SEQ ID NO: 2050136 - RNA, 19 nt, Artificial Sequence
  Description of Artificial Sequence: Synthetic oligonucleotide
caccuggcgagcugccucc

SEQ ID NO: 2050137 - RNA, 19 nt, Artificial Sequence
  Description of Artificial Sequence: Synthetic oligonucleotide
cauggccagggcugguuac

SEQ ID NO: 2050138 - RNA, 19 nt, Artificial Sequence
  Description of Artificial Sequence: Synthetic oligonucleotide
aaccgcucuuccauaccug

SEQ ID NO: 2050139 - RNA, 19 nt, Artificial Sequence
  Description of Artificial Sequence: Synthetic oligonucleotide
guaucaauuggcccagaau

SEQ ID NO: 2050140 - RNA, 19 nt, Artificial Sequence
  Description of Artificial Sequence: Synthetic oligonucleotide
aauucccuauacagagcaa

SEQ ID NO: 2050141 - RNA, 19 nt, Artificial Sequence
  Description of Artificial Sequence: Synthetic oligonucleotide
cuauguagcucugguuguc

SEQ ID NO: 2050142 - RNA, 19 nt, Artificial Sequence
  Description of Artificial Sequence: Synthetic oligonucleotide
acacugaaguacucuugua

SEQ ID NO: 2050143 - RNA, 19 nt, Artificial Sequence
  Description of Artificial Sequence: Synthetic oligonucleotide
ugucugucuccuggaaagu

SEQ ID NO: 2050144 - RNA, 19 nt, Artificial Sequence
  Description of Artificial Sequence: Synthetic oligonucleotide
ggccuuaguggccaccggc

SEQ ID NO: 2050145 - RNA, 19 nt, Artificial Sequence
  Description of Artificial Sequence: Synthetic oligonucleotide
agcaaaccgcucuuccaua

SEQ ID NO: 2050146 - RNA, 19 nt, Artificial Sequence
  Description of Artificial Sequence: Synthetic oligonucleotide
caaacgugcagagugcaua

SEQ ID NO: 2050147 - RNA, 19 nt, Artificial Sequence
  Description of Artificial Sequence: Synthetic oligonucleotide
gcaaaccgcucuuccauac

SEQ ID NO: 2050148 - RNA, 19 nt, Artificial Sequence
  Description of Artificial Sequence: Synthetic oligonucleotide
ccggaaucgaugagaaaug

SEQ ID NO: 2050149 - RNA, 19 nt, Artificial Sequence
  Description of Artificial Sequence: Synthetic oligonucleotide
ccuccaccaguacaggacc

SEQ ID NO: 2050150 - RNA, 19 nt, Artificial Sequence
  Description of Artificial Sequence: Synthetic oligonucleotide
auuaaagcacagacaggua

SEQ ID NO: 2050151 - RNA, 19 nt, Artificial Sequence
  Description of Artificial Sequence: Synthetic oligonucleotide
uggcccgaggucuggcccc

SEQ ID NO: 2050152 - RNA, 19 nt, Artificial Sequence
  Description of Artificial Sequence: Synthetic oligonucleotide
uggcaucucugcauacguu

SEQ ID NO: 2050153 - RNA, 19 nt, Artificial Sequence
  Description of Artificial Sequence: Synthetic oligonucleotide
gcauacguuugcuuauauc

SEQ ID NO: 2050154 - RNA, 19 nt, Artificial Sequence
  Description of Artificial Sequence: Synthetic oligonucleotide
uuauauccaucaggcugaa

SEQ ID NO: 2050155 - RNA, 19 nt, Artificial Sequence
  Description of Artificial Sequence: Synthetic oligonucleotide
uccggcucucccugguacu

SEQ ID NO: 2050156 - RNA, 19 nt, Artificial Sequence
  Description of Artificial Sequence: Synthetic oligonucleotide
uccauaccuggcuguugaa

SEQ ID NO: 2050157 - RNA, 19 nt, Artificial Sequence
  Description of Artificial Sequence: Synthetic oligonucleotide
gggcaacccagagaaauac

SEQ ID NO: 2050158 - RNA, 19 nt, Artificial Sequence
  Description of Artificial Sequence: Synthetic oligonucleotide
cuuccauaccuggcuguug

SEQ ID NO: 2050159 - RNA, 19 nt, Artificial Sequence
  Description of Artificial Sequence: Synthetic oligonucleotide
cagucacacugaaguacuc

SEQ ID NO: 2050160 - RNA, 19 nt, Artificial Sequence
  Description of Artificial Sequence: Synthetic oligonucleotide
ggucuggccccugaacagg

SEQ ID NO: 2050161 - RNA, 19 nt, Artificial Sequence
  Description of Artificial Sequence: Synthetic oligonucleotide
ggaucccagccaaaguccc

SEQ ID NO: 2050162 - RNA, 19 nt, Artificial Sequence
  Description of Artificial Sequence: Synthetic oligonucleotide
uucccgucacaaacacgau

SEQ ID NO: 2050163 - RNA, 19 nt, Artificial Sequence
  Description of Artificial Sequence: Synthetic oligonucleotide
agggcccggaaucgaugag

SEQ ID NO: 2050164 - RNA, 19 nt, Artificial Sequence
  Description of Artificial Sequence: Synthetic oligonucleotide
gagugucugucuccuggaa

SEQ ID NO: 2050165 - RNA, 19 nt, Artificial Sequence
  Description of Artificial Sequence: Synthetic oligonucleotide
ccugaacaggagcacuggc

SEQ ID NO: 2050166 - RNA, 19 nt, Artificial Sequence
  Description of Artificial Sequence: Synthetic oligonucleotide
caggacccugcaccuggcg

SEQ ID NO: 2050167 - RNA, 19 nt, Artificial Sequence
  Description of Artificial Sequence: Synthetic oligonucleotide
accacuaugccaggccaaa

SEQ ID NO: 2050168 - RNA, 19 nt, Artificial Sequence
  Description of Artificial Sequence: Synthetic oligonucleotide
agccucguggcaucacaau

SEQ ID NO: 2050169 - RNA, 19 nt, Artificial Sequence
  Description of Artificial Sequence: Synthetic oligonucleotide
aagucccgggagccucgug

SEQ ID NO: 2050170 - RNA, 19 nt, Artificial Sequence
  Description of Artificial Sequence: Synthetic oligonucleotide
cauggccuuaguggccacc

SEQ ID NO: 2050171 - RNA, 19 nt, Artificial Sequence
  Description of Artificial Sequence: Synthetic oligonucleotide
cagggcccggaaucgauga

SEQ ID NO: 2050172 - RNA, 19 nt, Artificial Sequence
  Description of Artificial Sequence: Synthetic oligonucleotide
aaagucccgggagccucgu

SEQ ID NO: 2050173 - RNA, 19 nt, Artificial Sequence
  Description of Artificial Sequence: Synthetic oligonucleotide
cccgucacaaacacgaucu

SEQ ID NO: 2050174 - RNA, 19 nt, Artificial Sequence
  Description of Artificial Sequence: Synthetic oligonucleotide
gccucguggcaucacaauc

SEQ ID NO: 2050175 - RNA, 19 nt, Artificial Sequence
  Description of Artificial Sequence: Synthetic oligonucleotide
gcauaggcugauuuguccu

SEQ ID NO: 2050176 - RNA, 19 nt, Artificial Sequence
  Description of Artificial Sequence: Synthetic oligonucleotide
aggcugauuuguccucaaa

SEQ ID NO: 2050177 - RNA, 19 nt, Artificial Sequence
  Description of Artificial Sequence: Synthetic oligonucleotide
cuuccccgccaaagacgcg

SEQ ID NO: 2050178 - RNA, 19 nt, Artificial Sequence
  Description of Artificial Sequence: Synthetic oligonucleotide
cccaagggcaagaguguag

SEQ ID NO: 2050179 - RNA, 19 nt, Artificial Sequence
  Description of Artificial Sequence: Synthetic oligonucleotide
gugcauaggcugauuuguc

SEQ ID NO: 2050180 - RNA, 19 nt, Artificial Sequence
  Description of Artificial Sequence: Synthetic oligonucleotide
ccgagagcauuaaagcaca

SEQ ID NO: 2050181 - RNA, 19 nt, Artificial Sequence
  Description of Artificial Sequence: Synthetic oligonucleotide
ggccaaaggcaacucuuga

SEQ ID NO: 2050182 - RNA, 19 nt, Artificial Sequence
  Description of Artificial Sequence: Synthetic oligonucleotide
cacagacagguauccucca

SEQ ID NO: 2050183 - RNA, 19 nt, Artificial Sequence
  Description of Artificial Sequence: Synthetic oligonucleotide
cggaaucgaugagaaaugg

SEQ ID NO: 2050184 - RNA, 19 nt, Artificial Sequence
  Description of Artificial Sequence: Synthetic oligonucleotide
uguaggggccagggagccc

SEQ ID NO: 2050185 - RNA, 19 nt, Artificial Sequence
  Description of Artificial Sequence: Synthetic oligonucleotide
ggauccccggcaaagggca

SEQ ID NO: 2050186 - RNA, 19 nt, Artificial Sequence
  Description of Artificial Sequence: Synthetic oligonucleotide
aaagggcaacccagagaaa

SEQ ID NO: 2050187 - RNA, 19 nt, Artificial Sequence
  Description of Artificial Sequence: Synthetic oligonucleotide
ccauaccuggcuguugaag

SEQ ID NO: 2050188 - RNA, 19 nt, Artificial Sequence
  Description of Artificial Sequence: Synthetic oligonucleotide
gacccugcaccuggcgagc

SEQ ID NO: 2050189 - RNA, 19 nt, Artificial Sequence
  Description of Artificial Sequence: Synthetic oligonucleotide
caucacaaucuggcccgag

SEQ ID NO: 2050190 - RNA, 19 nt, Artificial Sequence
  Description of Artificial Sequence: Synthetic oligonucleotide
uagcuugagcagggcccgg

SEQ ID NO: 2050191 - RNA, 19 nt, Artificial Sequence
  Description of Artificial Sequence: Synthetic oligonucleotide
ucccgggagccucguggca

SEQ ID NO: 2050192 - RNA, 19 nt, Artificial Sequence
  Description of Artificial Sequence: Synthetic oligonucleotide
cuccaaaauucugggacua

SEQ ID NO: 2050193 - RNA, 19 nt, Artificial Sequence
  Description of Artificial Sequence: Synthetic oligonucleotide
cacggaaacuuaucuccua

SEQ ID NO: 2050194 - RNA, 19 nt, Artificial Sequence
  Description of Artificial Sequence: Synthetic oligonucleotide
uaguaucaauuggcccaga

SEQ ID NO: 2050195 - RNA, 19 nt, Artificial Sequence
  Description of Artificial Sequence: Synthetic oligonucleotide
ggagccucguggcaucaca

SEQ ID NO: 2050196 - RNA, 19 nt, Artificial Sequence
  Description of Artificial Sequence: Synthetic oligonucleotide
caacccagagaaauacuuu

SEQ ID NO: 2050197 - RNA, 19 nt, Artificial Sequence
  Description of Artificial Sequence: Synthetic oligonucleotide
cugcaccuggcgagcugcc

SEQ ID NO: 2050198 - RNA, 19 nt, Artificial Sequence
  Description of Artificial Sequence: Synthetic oligonucleotide
ccaaagacgcggccauggc

SEQ ID NO: 2050199 - RNA, 19 nt, Artificial Sequence
  Description of Artificial Sequence: Synthetic oligonucleotide
accggcagucacacugaag

SEQ ID NO: 2050200 - RNA, 19 nt, Artificial Sequence
  Description of Artificial Sequence: Synthetic oligonucleotide
ugcaccuggcgagcugccu

SEQ ID NO: 2050201 - RNA, 19 nt, Artificial Sequence
  Description of Artificial Sequence: Synthetic oligonucleotide
cuuaguggccaccggcagu

SEQ ID NO: 2050202 - RNA, 19 nt, Artificial Sequence
  Description of Artificial Sequence: Synthetic oligonucleotide
caggagugucugucuccug

SEQ ID NO: 2050203 - RNA, 19 nt, Artificial Sequence
  Description of Artificial Sequence: Synthetic oligonucleotide
gagccucguggcaucacaa

SEQ ID NO: 2050204 - RNA, 19 nt, Artificial Sequence
  Description of Artificial Sequence: Synthetic oligonucleotide
agggcaacccagagaaaua

SEQ ID NO: 2050205 - RNA, 19 nt, Artificial Sequence
  Description of Artificial Sequence: Synthetic oligonucleotide
gcaacucuugaauccccaa

SEQ ID NO: 2050206 - RNA, 19 nt, Artificial Sequence
  Description of Artificial Sequence: Synthetic oligonucleotide
caccacuaugccaggccaa

SEQ ID NO: 2050207 - RNA, 19 nt, Artificial Sequence
  Description of Artificial Sequence: Synthetic oligonucleotide
ggaaucgaugagaaauggu

SEQ ID NO: 2050208 - RNA, 19 nt, Artificial Sequence
  Description of Artificial Sequence: Synthetic oligonucleotide
ggcaacucuugaaucccca

SEQ ID NO: 2050209 - RNA, 19 nt, Artificial Sequence
  Description of Artificial Sequence: Synthetic oligonucleotide
cccggaaucgaugagaaau

SEQ ID NO: 2050210 - RNA, 19 nt, Artificial Sequence
  Description of Artificial Sequence: Synthetic oligonucleotide
caagggcaagaguguagua

SEQ ID NO: 2050211 - RNA, 19 nt, Artificial Sequence
  Description of Artificial Sequence: Synthetic oligonucleotide
gggcaagaguguaguauca

SEQ ID NO: 2050212 - RNA, 19 nt, Artificial Sequence
  Description of Artificial Sequence: Synthetic oligonucleotide
ccucguggcaucacaaucu

SEQ ID NO: 2050213 - RNA, 19 nt, Artificial Sequence
  Description of Artificial Sequence: Synthetic oligonucleotide
gcuggcuugggucuccagu

SEQ ID NO: 2050214 - RNA, 19 nt, Artificial Sequence
  Description of Artificial Sequence: Synthetic oligonucleotide
gcaucucacuauguagcuc

SEQ ID NO: 2050215 - RNA, 19 nt, Artificial Sequence
  Description of Artificial Sequence: Synthetic oligonucleotide
ccgcucuuccauaccuggc

SEQ ID NO: 2050216 - RNA, 19 nt, Artificial Sequence
  Description of Artificial Sequence: Synthetic oligonucleotide
gccuuaguggccaccggca

SEQ ID NO: 2050217 - RNA, 19 nt, Artificial Sequence
  Description of Artificial Sequence: Synthetic oligonucleotide
gcaacccagagaaauacuu

SEQ ID NO: 2050218 - RNA, 19 nt, Artificial Sequence
  Description of Artificial Sequence: Synthetic oligonucleotide
ccauuuuauguaggggcca

SEQ ID NO: 2050219 - RNA, 19 nt, Artificial Sequence
  Description of Artificial Sequence: Synthetic oligonucleotide
agcagggcccggaaucgau

SEQ ID NO: 2050220 - RNA, 19 nt, Artificial Sequence
  Description of Artificial Sequence: Synthetic oligonucleotide
cuccagugcugagagcaaa

SEQ ID NO: 2050221 - RNA, 19 nt, Artificial Sequence
  Description of Artificial Sequence: Synthetic oligonucleotide
cgagagcauuaaagcacag

SEQ ID NO: 2050222 - RNA, 19 nt, Artificial Sequence
  Description of Artificial Sequence: Synthetic oligonucleotide
ccuccaaaauucugggacu

SEQ ID NO: 2050223 - RNA, 19 nt, Artificial Sequence
  Description of Artificial Sequence: Synthetic oligonucleotide
cugcaccaguccuccccuc

SEQ ID NO: 2050224 - RNA, 19 nt, Artificial Sequence
  Description of Artificial Sequence: Synthetic oligonucleotide
ccuuuggcaucucugcaua

SEQ ID NO: 2050225 - RNA, 19 nt, Artificial Sequence
  Description of Artificial Sequence: Synthetic oligonucleotide
cugcauacguuugcuuaua

SEQ ID NO: 2050226 - RNA, 19 nt, Artificial Sequence
  Description of Artificial Sequence: Synthetic oligonucleotide
uaguggccaccggcaguca

SEQ ID NO: 2050227 - RNA, 19 nt, Artificial Sequence
  Description of Artificial Sequence: Synthetic oligonucleotide
gggcccggaaucgaugaga

SEQ ID NO: 2050228 - RNA, 19 nt, Artificial Sequence
  Description of Artificial Sequence: Synthetic oligonucleotide
gaaugaccuccuccagcuu

SEQ ID NO: 2050229 - RNA, 19 nt, Artificial Sequence
  Description of Artificial Sequence: Synthetic oligonucleotide
gcagggcccggaaucgaug

SEQ ID NO: 2050230 - RNA, 19 nt, Artificial Sequence
  Description of Artificial Sequence: Synthetic oligonucleotide
gccuuuggcaucucugcau

SEQ ID NO: 2050231 - RNA, 19 nt, Artificial Sequence
  Description of Artificial Sequence: Synthetic oligonucleotide
cggaaacuuaucuccuaga

SEQ ID NO: 2050232 - RNA, 19 nt, Artificial Sequence
  Description of Artificial Sequence: Synthetic oligonucleotide
ccacuaugccaggccaaag

SEQ ID NO: 2050233 - RNA, 19 nt, Artificial Sequence
  Description of Artificial Sequence: Synthetic oligonucleotide
caaagccggccaggagcug

SEQ ID NO: 2050234 - RNA, 19 nt, Artificial Sequence
  Description of Artificial Sequence: Synthetic oligonucleotide
ggcuugggucuccagugcu

SEQ ID NO: 2050235 - RNA, 19 nt, Artificial Sequence
  Description of Artificial Sequence: Synthetic oligonucleotide
cuggcuguugaagcugccu

SEQ ID NO: 2050236 - RNA, 19 nt, Artificial Sequence
  Description of Artificial Sequence: Synthetic oligonucleotide
cgaggucuggccccugaac

SEQ ID NO: 2050237 - RNA, 19 nt, Artificial Sequence
  Description of Artificial Sequence: Synthetic oligonucleotide
gauccccggcaaagggcaa

SEQ ID NO: 2050238 - RNA, 19 nt, Artificial Sequence
  Description of Artificial Sequence: Synthetic oligonucleotide
cccggcaaagggcaaccca

SEQ ID NO: 2050239 - RNA, 19 nt, Artificial Sequence
  Description of Artificial Sequence: Synthetic oligonucleotide
agcagggaucccagccaaa

SEQ ID NO: 2050240 - RNA, 19 nt, Artificial Sequence
  Description of Artificial Sequence: Synthetic oligonucleotide
ccaagggcaagaguguagu

SEQ ID NO: 2050241 - RNA, 19 nt, Artificial Sequence
  Description of Artificial Sequence: Synthetic oligonucleotide
gcacggaaacuuaucuccu

SEQ ID NO: 2050242 - RNA, 19 nt, Artificial Sequence
  Description of Artificial Sequence: Synthetic oligonucleotide
cuguugaagcugccuggau

SEQ ID NO: 2050243 - RNA, 19 nt, Artificial Sequence
  Description of Artificial Sequence: Synthetic oligonucleotide
cgaugagaaaugguguucu

SEQ ID NO: 2050244 - RNA, 19 nt, Artificial Sequence
  Description of Artificial Sequence: Synthetic oligonucleotide
cgaucuucuuccccgccaa

SEQ ID NO: 2050245 - RNA, 19 nt, Artificial Sequence
  Description of Artificial Sequence: Synthetic oligonucleotide
cccagccaaagucccggga

SEQ ID NO: 2050246 - RNA, 19 nt, Artificial Sequence
  Description of Artificial Sequence: Synthetic oligonucleotide
ccaggccaaaggcaacucu

SEQ ID NO: 2050247 - RNA, 19 nt, Artificial Sequence
  Description of Artificial Sequence: Synthetic oligonucleotide
ccccgccaaagacgcggcc

SEQ ID NO: 2050248 - RNA, 19 nt, Artificial Sequence
  Description of Artificial Sequence: Synthetic oligonucleotide
cggcaaagggcaacccaga

SEQ ID NO: 2050249 - RNA, 19 nt, Artificial Sequence
  Description of Artificial Sequence: Synthetic oligonucleotide
gguacucaggcaggucaau

SEQ ID NO: 2050250 - RNA, 19 nt, Artificial Sequence
  Description of Artificial Sequence: Synthetic oligonucleotide
ccauggccagggcugguua

SEQ ID NO: 2050251 - RNA, 19 nt, Artificial Sequence
  Description of Artificial Sequence: Synthetic oligonucleotide
gcaaacgugcagagugcau

SEQ ID NO: 2050252 - RNA, 19 nt, Artificial Sequence
  Description of Artificial Sequence: Synthetic oligonucleotide
ccccggcaaagggcaaccc

SEQ ID NO: 2050253 - RNA, 19 nt, Artificial Sequence
  Description of Artificial Sequence: Synthetic oligonucleotide
gccccugaacaggagcacu

SEQ ID NO: 2050254 - RNA, 19 nt, Artificial Sequence
  Description of Artificial Sequence: Synthetic oligonucleotide
gccaaagucccgggagccu

SEQ ID NO: 2050255 - RNA, 19 nt, Artificial Sequence
  Description of Artificial Sequence: Synthetic oligonucleotide
cagagugcauaggcugauu

SEQ ID NO: 2050256 - RNA, 19 nt, Artificial Sequence
  Description of Artificial Sequence: Synthetic oligonucleotide
cccgaggucuggccccuga

SEQ ID NO: 2050257 - RNA, 19 nt, Artificial Sequence
  Description of Artificial Sequence: Synthetic oligonucleotide
gcacuucuguauggaaauu

SEQ ID NO: 2050258 - RNA, 19 nt, Artificial Sequence
  Description of Artificial Sequence: Synthetic oligonucleotide
ccgaggucuggccccugaa

SEQ ID NO: 2050259 - RNA, 19 nt, Artificial Sequence
  Description of Artificial Sequence: Synthetic oligonucleotide
ccccaagggcaagagugua

SEQ ID NO: 2050260 - RNA, 19 nt, Artificial Sequence
  Description of Artificial Sequence: Synthetic oligonucleotide
ccgccaaagacgcggccau

SEQ ID NO: 2050261 - RNA, 19 nt, Artificial Sequence
  Description of Artificial Sequence: Synthetic oligonucleotide
ccgucacaaacacgaucuu

SEQ ID NO: 2050262 - RNA, 19 nt, Artificial Sequence
  Description of Artificial Sequence: Synthetic oligonucleotide
gcccgaggucuggccccug

SEQ ID NO: 2050263 - RNA, 19 nt, Artificial Sequence
  Description of Artificial Sequence: Synthetic oligonucleotide
ccuggcgagcugccuccuu

SEQ ID NO: 2050264 - RNA, 19 nt, Artificial Sequence
  Description of Artificial Sequence: Synthetic oligonucleotide
aaugauuucccucagaaca

SEQ ID NO: 2050265 - RNA, 19 nt, Artificial Sequence
  Description of Artificial Sequence: Synthetic oligonucleotide
aaauaguauggcuucagcc

SEQ ID NO: 2050266 - RNA, 19 nt, Artificial Sequence
  Description of Artificial Sequence: Synthetic oligonucleotide
uaaaccagcgccaagaggg

SEQ ID NO: 2050267 - RNA, 19 nt, Artificial Sequence
  Description of Artificial Sequence: Synthetic oligonucleotide
auugcuauaaaauaguaug

SEQ ID NO: 2050268 - RNA, 19 nt, Artificial Sequence
  Description of Artificial Sequence: Synthetic oligonucleotide
aauuuuaauuggcaagcgc

SEQ ID NO: 2050269 - RNA, 19 nt, Artificial Sequence
  Description of Artificial Sequence: Synthetic oligonucleotide
uuuguaauaucuuuaaugu

SEQ ID NO: 2050270 - RNA, 19 nt, Artificial Sequence
  Description of Artificial Sequence: Synthetic oligonucleotide
auaucuacccauuuauucc

SEQ ID NO: 2050271 - RNA, 19 nt, Artificial Sequence
  Description of Artificial Sequence: Synthetic oligonucleotide
aauucuacagccgggaggc

SEQ ID NO: 2050272 - RNA, 19 nt, Artificial Sequence
  Description of Artificial Sequence: Synthetic oligonucleotide
aaaauaguauggcuucagc

SEQ ID NO: 2050273 - RNA, 19 nt, Artificial Sequence
  Description of Artificial Sequence: Synthetic oligonucleotide
aauaguauggcuucagcca

SEQ ID NO: 2050274 - RNA, 19 nt, Artificial Sequence
  Description of Artificial Sequence: Synthetic oligonucleotide
aacaguuggaaggagaacg

SEQ ID NO: 2050275 - RNA, 19 nt, Artificial Sequence
  Description of Artificial Sequence: Synthetic oligonucleotide
auuuuaauuggcaagcgcc

SEQ ID NO: 2050276 - RNA, 19 nt, Artificial Sequence
  Description of Artificial Sequence: Synthetic oligonucleotide
uuacauaucaggacaacag

SEQ ID NO: 2050277 - RNA, 19 nt, Artificial Sequence
  Description of Artificial Sequence: Synthetic oligonucleotide
caugauugcuauaaaauag

SEQ ID NO: 2050278 - RNA, 19 nt, Artificial Sequence
  Description of Artificial Sequence: Synthetic oligonucleotide
uaucaugaaaguaggaggc

SEQ ID NO: 2050279 - RNA, 19 nt, Artificial Sequence
  Description of Artificial Sequence: Synthetic oligonucleotide
aaacgcauuaacauggacg

SEQ ID NO: 2050280 - RNA, 19 nt, Artificial Sequence
  Description of Artificial Sequence: Synthetic oligonucleotide
auguuaaagagucacucac

SEQ ID NO: 2050281 - RNA, 19 nt, Artificial Sequence
  Description of Artificial Sequence: Synthetic oligonucleotide
aaaguaggaggcauguacc

SEQ ID NO: 2050282 - RNA, 19 nt, Artificial Sequence
  Description of Artificial Sequence: Synthetic oligonucleotide
aguccuacaauccccaggg

SEQ ID NO: 2050283 - RNA, 19 nt, Artificial Sequence
  Description of Artificial Sequence: Synthetic oligonucleotide
uaauucuacagccgggagg

SEQ ID NO: 2050284 - RNA, 19 nt, Artificial Sequence
  Description of Artificial Sequence: Synthetic oligonucleotide
gauaucuacccauuuauuc

SEQ ID NO: 2050285 - RNA, 19 nt, Artificial Sequence
  Description of Artificial Sequence: Synthetic oligonucleotide
aaucaaagcguguacugug

SEQ ID NO: 2050286 - RNA, 19 nt, Artificial Sequence
  Description of Artificial Sequence: Synthetic oligonucleotide
ugggauagaugucacagcc

SEQ ID NO: 2050287 - RNA, 19 nt, Artificial Sequence
  Description of Artificial Sequence: Synthetic oligonucleotide
guuaaagagucacucacag

SEQ ID NO: 2050288 - RNA, 19 nt, Artificial Sequence
  Description of Artificial Sequence: Synthetic oligonucleotide
caagacuuuguuaaugacc

SEQ ID NO: 2050289 - RNA, 19 nt, Artificial Sequence
  Description of Artificial Sequence: Synthetic oligonucleotide
ugaaugauuucccucagaa

SEQ ID NO: 2050290 - RNA, 19 nt, Artificial Sequence
  Description of Artificial Sequence: Synthetic oligonucleotide
auuggcaagcgccaguucg

SEQ ID NO: 2050291 - RNA, 19 nt, Artificial Sequence
  Description of Artificial Sequence: Synthetic oligonucleotide
auuggcaagacuuuguuaa

SEQ ID NO: 2050292 - RNA, 19 nt, Artificial Sequence
  Description of Artificial Sequence: Synthetic oligonucleotide
guaccagacaaacugauug

SEQ ID NO: 2050293 - RNA, 19 nt, Artificial Sequence
  Description of Artificial Sequence: Synthetic oligonucleotide
auuaacauggacggugugc

SEQ ID NO: 2050294 - RNA, 19 nt, Artificial Sequence
  Description of Artificial Sequence: Synthetic oligonucleotide
accgcugcaauuuuaauug

SEQ ID NO: 2050295 - RNA, 19 nt, Artificial Sequence
  Description of Artificial Sequence: Synthetic oligonucleotide
aaauaaaccagcgccaaga

SEQ ID NO: 2050296 - RNA, 19 nt, Artificial Sequence
  Description of Artificial Sequence: Synthetic oligonucleotide
aaugcaagagcaugggccu

SEQ ID NO: 2050297 - RNA, 19 nt, Artificial Sequence
  Description of Artificial Sequence: Synthetic oligonucleotide
gaugggauagaugucacag

SEQ ID NO: 2050298 - RNA, 19 nt, Artificial Sequence
  Description of Artificial Sequence: Synthetic oligonucleotide
ugggaaguuacuaaagggu

SEQ ID NO: 2050299 - RNA, 19 nt, Artificial Sequence
  Description of Artificial Sequence: Synthetic oligonucleotide
uguaggaccgccucauugg

SEQ ID NO: 2050300 - RNA, 19 nt, Artificial Sequence
  Description of Artificial Sequence: Synthetic oligonucleotide
caaacaucaugcucaaucc

SEQ ID NO: 2050301 - RNA, 19 nt, Artificial Sequence
  Description of Artificial Sequence: Synthetic oligonucleotide
gucaaacgcauuaacaugg

SEQ ID NO: 2050302 - RNA, 19 nt, Artificial Sequence
  Description of Artificial Sequence: Synthetic oligonucleotide
ugcugcaaaugcaagagca

SEQ ID NO: 2050303 - RNA, 19 nt, Artificial Sequence
  Description of Artificial Sequence: Synthetic oligonucleotide
uuuuaauuggcaagcgcca

SEQ ID NO: 2050304 - RNA, 19 nt, Artificial Sequence
  Description of Artificial Sequence: Synthetic oligonucleotide
aaagggugaaugauuuccc

SEQ ID NO: 2050305 - RNA, 19 nt, Artificial Sequence
  Description of Artificial Sequence: Synthetic oligonucleotide
gauauaguggaauucucuc

SEQ ID NO: 2050306 - RNA, 19 nt, Artificial Sequence
  Description of Artificial Sequence: Synthetic oligonucleotide
agcacaacuuuacauauca

SEQ ID NO: 2050307 - RNA, 19 nt, Artificial Sequence
  Description of Artificial Sequence: Synthetic oligonucleotide
acaauucccaguuugcucu

SEQ ID NO: 2050308 - RNA, 19 nt, Artificial Sequence
  Description of Artificial Sequence: Synthetic oligonucleotide
acuccuggcaaauaaacca

SEQ ID NO: 2050309 - RNA, 19 nt, Artificial Sequence
  Description of Artificial Sequence: Synthetic oligonucleotide
guacaggaaggucagagag

SEQ ID NO: 2050310 - RNA, 19 nt, Artificial Sequence
  Description of Artificial Sequence: Synthetic oligonucleotide
guaacugucaucuuccaga

SEQ ID NO: 2050311 - RNA, 19 nt, Artificial Sequence
  Description of Artificial Sequence: Synthetic oligonucleotide
ugcuauaaaauaguauggc

SEQ ID NO: 2050312 - RNA, 19 nt, Artificial Sequence
  Description of Artificial Sequence: Synthetic oligonucleotide
caugggaaguuacuaaagg

SEQ ID NO: 2050313 - RNA, 19 nt, Artificial Sequence
  Description of Artificial Sequence: Synthetic oligonucleotide
uucgggaagaauuccugcg

SEQ ID NO: 2050314 - RNA, 19 nt, Artificial Sequence
  Description of Artificial Sequence: Synthetic oligonucleotide
agcuuguaucuguaggacc

SEQ ID NO: 2050315 - RNA, 19 nt, Artificial Sequence
  Description of Artificial Sequence: Synthetic oligonucleotide
uguacaacugcugcuauca

SEQ ID NO: 2050316 - RNA, 19 nt, Artificial Sequence
  Description of Artificial Sequence: Synthetic oligonucleotide
aauacuguucaugggaagu

SEQ ID NO: 2050317 - RNA, 19 nt, Artificial Sequence
  Description of Artificial Sequence: Synthetic oligonucleotide
ucaugcucaauccaggcau

SEQ ID NO: 2050318 - RNA, 19 nt, Artificial Sequence
  Description of Artificial Sequence: Synthetic oligonucleotide
ucagcauccaucugucuag

SEQ ID NO: 2050319 - RNA, 19 nt, Artificial Sequence
  Description of Artificial Sequence: Synthetic oligonucleotide
aaccacaucgaaucuucag

SEQ ID NO: 2050320 - RNA, 19 nt, Artificial Sequence
  Description of Artificial Sequence: Synthetic oligonucleotide
agucaaacgcauuaacaug

SEQ ID NO: 2050321 - RNA, 19 nt, Artificial Sequence
  Description of Artificial Sequence: Synthetic oligonucleotide
uuuacauaucaggacaaca

SEQ ID NO: 2050322 - RNA, 19 nt, Artificial Sequence
  Description of Artificial Sequence: Synthetic oligonucleotide
uguuaaagagucacucaca

SEQ ID NO: 2050323 - RNA, 19 nt, Artificial Sequence
  Description of Artificial Sequence: Synthetic oligonucleotide
uucccaaccacaucgaauc

SEQ ID NO: 2050324 - RNA, 19 nt, Artificial Sequence
  Description of Artificial Sequence: Synthetic oligonucleotide
aguuacuaaagggugaaug

SEQ ID NO: 2050325 - RNA, 19 nt, Artificial Sequence
  Description of Artificial Sequence: Synthetic oligonucleotide
aaggagagcacaacuuuac

SEQ ID NO: 2050326 - RNA, 19 nt, Artificial Sequence
  Description of Artificial Sequence: Synthetic oligonucleotide
guuugcucuggauauagug

SEQ ID NO: 2050327 - RNA, 19 nt, Artificial Sequence
  Description of Artificial Sequence: Synthetic oligonucleotide
ugcuuguacgcccaguuga

SEQ ID NO: 2050328 - RNA, 19 nt, Artificial Sequence
  Description of Artificial Sequence: Synthetic oligonucleotide
uuuuguugaaccugcuugu

SEQ ID NO: 2050329 - RNA, 19 nt, Artificial Sequence
  Description of Artificial Sequence: Synthetic oligonucleotide
acaacugcugcuaucacuc

SEQ ID NO: 2050330 - RNA, 19 nt, Artificial Sequence
  Description of Artificial Sequence: Synthetic oligonucleotide
agaacaguguacaggaagg

SEQ ID NO: 2050331 - RNA, 19 nt, Artificial Sequence
  Description of Artificial Sequence: Synthetic oligonucleotide
guuacuaaagggugaauga

SEQ ID NO: 2050332 - RNA, 19 nt, Artificial Sequence
  Description of Artificial Sequence: Synthetic oligonucleotide
acggcuaucaugaaaguag

SEQ ID NO: 2050333 - RNA, 19 nt, Artificial Sequence
  Description of Artificial Sequence: Synthetic oligonucleotide
uguacugugcccagaagaa

SEQ ID NO: 2050334 - RNA, 19 nt, Artificial Sequence
  Description of Artificial Sequence: Synthetic oligonucleotide
ucucccgugugcuuagucg

SEQ ID NO: 2050335 - RNA, 19 nt, Artificial Sequence
  Description of Artificial Sequence: Synthetic oligonucleotide
gacggugugcugcaaaugc

SEQ ID NO: 2050336 - RNA, 19 nt, Artificial Sequence
  Description of Artificial Sequence: Synthetic oligonucleotide
augggauagaugucacagc

SEQ ID NO: 2050337 - RNA, 19 nt, Artificial Sequence
  Description of Artificial Sequence: Synthetic oligonucleotide
uuaacauggacggugugcu

SEQ ID NO: 2050338 - RNA, 19 nt, Artificial Sequence
  Description of Artificial Sequence: Synthetic oligonucleotide
auaaaccagcgccaagagg

SEQ ID NO: 2050339 - RNA, 19 nt, Artificial Sequence
  Description of Artificial Sequence: Synthetic oligonucleotide
caucugucuagccauggcg

SEQ ID NO: 2050340 - RNA, 19 nt, Artificial Sequence
  Description of Artificial Sequence: Synthetic oligonucleotide
ucgaguaacugucaucuuc

SEQ ID NO: 2050341 - RNA, 19 nt, Artificial Sequence
  Description of Artificial Sequence: Synthetic oligonucleotide
aguugagcagcuuguaucu

SEQ ID NO: 2050342 - RNA, 19 nt, Artificial Sequence
  Description of Artificial Sequence: Synthetic oligonucleotide
agucgaguaacugucaucu

SEQ ID NO: 2050343 - RNA, 19 nt, Artificial Sequence
  Description of Artificial Sequence: Synthetic oligonucleotide
auagaugucacagccaaga

SEQ ID NO: 2050344 - RNA, 19 nt, Artificial Sequence
  Description of Artificial Sequence: Synthetic oligonucleotide
cuacccauuuauuccaggc

SEQ ID NO: 2050345 - RNA, 19 nt, Artificial Sequence
  Description of Artificial Sequence: Synthetic oligonucleotide
aaguaggaggcauguacca

SEQ ID NO: 2050346 - RNA, 19 nt, Artificial Sequence
  Description of Artificial Sequence: Synthetic oligonucleotide
caacuuuacauaucaggac

SEQ ID NO: 2050347 - RNA, 19 nt, Artificial Sequence
  Description of Artificial Sequence: Synthetic oligonucleotide
aagaauuccugcgugugcu

SEQ ID NO: 2050348 - RNA, 19 nt, Artificial Sequence
  Description of Artificial Sequence: Synthetic oligonucleotide
uugguuuguaauaucuuua

SEQ ID NO: 2050349 - RNA, 19 nt, Artificial Sequence
  Description of Artificial Sequence: Synthetic oligonucleotide
auugcggaguuguacaacu

SEQ ID NO: 2050350 - RNA, 19 nt, Artificial Sequence
  Description of Artificial Sequence: Synthetic oligonucleotide
ugcggaguuguacaacugc

SEQ ID NO: 2050351 - RNA, 19 nt, Artificial Sequence
  Description of Artificial Sequence: Synthetic oligonucleotide
ucacucacagaugggauag

SEQ ID NO: 2050352 - RNA, 19 nt, Artificial Sequence
  Description of Artificial Sequence: Synthetic oligonucleotide
ugaaccugcuuguacgccc

SEQ ID NO: 2050353 - RNA, 19 nt, Artificial Sequence
  Description of Artificial Sequence: Synthetic oligonucleotide
gagaggauauaaccgcugc

SEQ ID NO: 2050354 - RNA, 19 nt, Artificial Sequence
  Description of Artificial Sequence: Synthetic oligonucleotide
accacaucgaaucuucagu

SEQ ID NO: 2050355 - RNA, 19 nt, Artificial Sequence
  Description of Artificial Sequence: Synthetic oligonucleotide
aaagcguguacugugccca

SEQ ID NO: 2050356 - RNA, 19 nt, Artificial Sequence
  Description of Artificial Sequence: Synthetic oligonucleotide
uuuaauuggcaagcgccag

SEQ ID NO: 2050357 - RNA, 19 nt, Artificial Sequence
  Description of Artificial Sequence: Synthetic oligonucleotide
ugauugcuauaaaauagua

SEQ ID NO: 2050358 - RNA, 19 nt, Artificial Sequence
  Description of Artificial Sequence: Synthetic oligonucleotide
aauguucuccaugauugcu

SEQ ID NO: 2050359 - RNA, 19 nt, Artificial Sequence
  Description of Artificial Sequence: Synthetic oligonucleotide
uucuccaaacaucaugcuc

SEQ ID NO: 2050360 - RNA, 19 nt, Artificial Sequence
  Description of Artificial Sequence: Synthetic oligonucleotide
uuguacgcccaguugagca

SEQ ID NO: 2050361 - RNA, 19 nt, Artificial Sequence
  Description of Artificial Sequence: Synthetic oligonucleotide
ugcuuagucgaguaacugu

SEQ ID NO: 2050362 - RNA, 19 nt, Artificial Sequence
  Description of Artificial Sequence: Synthetic oligonucleotide
ucuuuguuuuguugaaccu

SEQ ID NO: 2050363 - RNA, 19 nt, Artificial Sequence
  Description of Artificial Sequence: Synthetic oligonucleotide
ugugcuuagucgaguaacu

SEQ ID NO: 2050364 - RNA, 19 nt, Artificial Sequence
  Description of Artificial Sequence: Synthetic oligonucleotide
uccuguuuacuuugcuggg

SEQ ID NO: 2050365 - RNA, 19 nt, Artificial Sequence
  Description of Artificial Sequence: Synthetic oligonucleotide
gaagaauuccugcgugugc

SEQ ID NO: 2050366 - RNA, 19 nt, Artificial Sequence
  Description of Artificial Sequence: Synthetic oligonucleotide
uggaauucucuccauguua

SEQ ID NO: 2050367 - RNA, 19 nt, Artificial Sequence
  Description of Artificial Sequence: Synthetic oligonucleotide
agagcacaacuuuacauau

SEQ ID NO: 2050368 - RNA, 19 nt, Artificial Sequence
  Description of Artificial Sequence: Synthetic oligonucleotide
aggagaacggcuaucauga

SEQ ID NO: 2050369 - RNA, 19 nt, Artificial Sequence
  Description of Artificial Sequence: Synthetic oligonucleotide
ucaaagcguguacugugcc

SEQ ID NO: 2050370 - RNA, 19 nt, Artificial Sequence
  Description of Artificial Sequence: Synthetic oligonucleotide
ucuacccauuuauuccagg

SEQ ID NO: 2050371 - RNA, 19 nt, Artificial Sequence
  Description of Artificial Sequence: Synthetic oligonucleotide
agaugucacagccaagaga

SEQ ID NO: 2050372 - RNA, 19 nt, Artificial Sequence
  Description of Artificial Sequence: Synthetic oligonucleotide
uuucccucagaacagugua

SEQ ID NO: 2050373 - RNA, 19 nt, Artificial Sequence
  Description of Artificial Sequence: Synthetic oligonucleotide
aauccccagggacacauaa

SEQ ID NO: 2050374 - RNA, 19 nt, Artificial Sequence
  Description of Artificial Sequence: Synthetic oligonucleotide
gaaugauuucccucagaac

SEQ ID NO: 2050375 - RNA, 19 nt, Artificial Sequence
  Description of Artificial Sequence: Synthetic oligonucleotide
uuaauuggcaagcgccagu

SEQ ID NO: 2050376 - RNA, 19 nt, Artificial Sequence
  Description of Artificial Sequence: Synthetic oligonucleotide
aauuggcaagcgccaguuc

SEQ ID NO: 2050377 - RNA, 19 nt, Artificial Sequence
  Description of Artificial Sequence: Synthetic oligonucleotide
caauuuuaauuggcaagcg

SEQ ID NO: 2050378 - RNA, 19 nt, Artificial Sequence
  Description of Artificial Sequence: Synthetic oligonucleotide
uaacugucaucuuccagac

SEQ ID NO: 2050379 - RNA, 19 nt, Artificial Sequence
  Description of Artificial Sequence: Synthetic oligonucleotide
gacaauucccaguuugcuc

SEQ ID NO: 2050380 - RNA, 19 nt, Artificial Sequence
  Description of Artificial Sequence: Synthetic oligonucleotide
uacuaaagggugaaugauu

SEQ ID NO: 2050381 - RNA, 19 nt, Artificial Sequence
  Description of Artificial Sequence: Synthetic oligonucleotide
gcaauuuuaauuggcaagc

SEQ ID NO: 2050382 - RNA, 19 nt, Artificial Sequence
  Description of Artificial Sequence: Synthetic oligonucleotide
gagagcacaacuuuacaua

SEQ ID NO: 2050383 - RNA, 19 nt, Artificial Sequence
  Description of Artificial Sequence: Synthetic oligonucleotide
gcuuguaucuguaggaccg

SEQ ID NO: 2050384 - RNA, 19 nt, Artificial Sequence
  Description of Artificial Sequence: Synthetic oligonucleotide
aaggucagagaggauauaa

SEQ ID NO: 2050385 - RNA, 19 nt, Artificial Sequence
  Description of Artificial Sequence: Synthetic oligonucleotide
cucauuggguacgacaggc

SEQ ID NO: 2050386 - RNA, 19 nt, Artificial Sequence
  Description of Artificial Sequence: Synthetic oligonucleotide
gaaaccauuggcaagacuu

SEQ ID NO: 2050387 - RNA, 19 nt, Artificial Sequence
  Description of Artificial Sequence: Synthetic oligonucleotide
cuccuggcaaauaaaccag

SEQ ID NO: 2050388 - RNA, 19 nt, Artificial Sequence
  Description of Artificial Sequence: Synthetic oligonucleotide
uccauguuaaagagucacu

SEQ ID NO: 2050389 - RNA, 19 nt, Artificial Sequence
  Description of Artificial Sequence: Synthetic oligonucleotide
ggaguuguacaacugcugc

SEQ ID NO: 2050390 - RNA, 19 nt, Artificial Sequence
  Description of Artificial Sequence: Synthetic oligonucleotide
cacuccuggcaaauaaacc

SEQ ID NO: 2050391 - RNA, 19 nt, Artificial Sequence
  Description of Artificial Sequence: Synthetic oligonucleotide
caggcuguacacugcaugc

SEQ ID NO: 2050392 - RNA, 19 nt, Artificial Sequence
  Description of Artificial Sequence: Synthetic oligonucleotide
caucaugcucaauccaggc

SEQ ID NO: 2050393 - RNA, 19 nt, Artificial Sequence
  Description of Artificial Sequence: Synthetic oligonucleotide
uguacgcccaguugagcag

SEQ ID NO: 2050394 - RNA, 19 nt, Artificial Sequence
  Description of Artificial Sequence: Synthetic oligonucleotide
aguaauucuacagccggga

SEQ ID NO: 2050395 - RNA, 19 nt, Artificial Sequence
  Description of Artificial Sequence: Synthetic oligonucleotide
uucuacagccgggaggccg

SEQ ID NO: 2050396 - RNA, 19 nt, Artificial Sequence
  Description of Artificial Sequence: Synthetic oligonucleotide
uacuugguuccauugcgga

SEQ ID NO: 2050397 - RNA, 19 nt, Artificial Sequence
  Description of Artificial Sequence: Synthetic oligonucleotide
augauugcuauaaaauagu

SEQ ID NO: 2050398 - RNA, 19 nt, Artificial Sequence
  Description of Artificial Sequence: Synthetic oligonucleotide
uccgugucagcauccaucu

SEQ ID NO: 2050399 - RNA, 19 nt, Artificial Sequence
  Description of Artificial Sequence: Synthetic oligonucleotide
acccauuuauuccaggcaa

SEQ ID NO: 2050400 - RNA, 19 nt, Artificial Sequence
  Description of Artificial Sequence: Synthetic oligonucleotide
aucugucuagccauggcgg

SEQ ID NO: 2050401 - RNA, 19 nt, Artificial Sequence
  Description of Artificial Sequence: Synthetic oligonucleotide
ucaaacgcauuaacaugga

SEQ ID NO: 2050402 - RNA, 19 nt, Artificial Sequence
  Description of Artificial Sequence: Synthetic oligonucleotide
uuacuaaagggugaaugau

SEQ ID NO: 2050403 - RNA, 19 nt, Artificial Sequence
  Description of Artificial Sequence: Synthetic oligonucleotide
uuguaauaucuuuaauguu

SEQ ID NO: 2050404 - RNA, 19 nt, Artificial Sequence
  Description of Artificial Sequence: Synthetic oligonucleotide
auggaaaccauuggcaaga

SEQ ID NO: 2050405 - RNA, 19 nt, Artificial Sequence
  Description of Artificial Sequence: Synthetic oligonucleotide
uguaucuguaggaccgccu

SEQ ID NO: 2050406 - RNA, 19 nt, Artificial Sequence
  Description of Artificial Sequence: Synthetic oligonucleotide
ugcccagaagaagagagac

SEQ ID NO: 2050407 - RNA, 19 nt, Artificial Sequence
  Description of Artificial Sequence: Synthetic oligonucleotide
cauuggguacgacaggcug

SEQ ID NO: 2050408 - RNA, 19 nt, Artificial Sequence
  Description of Artificial Sequence: Synthetic oligonucleotide
uggauauaguggaauucuc

SEQ ID NO: 2050409 - RNA, 19 nt, Artificial Sequence
  Description of Artificial Sequence: Synthetic oligonucleotide
guaauucuacagccgggag

SEQ ID NO: 2050410 - RNA, 19 nt, Artificial Sequence
  Description of Artificial Sequence: Synthetic oligonucleotide
ucgggaagaauuccugcgu

SEQ ID NO: 2050411 - RNA, 19 nt, Artificial Sequence
  Description of Artificial Sequence: Synthetic oligonucleotide
uuuucagcauguguggguc

SEQ ID NO: 2050412 - RNA, 19 nt, Artificial Sequence
  Description of Artificial Sequence: Synthetic oligonucleotide
cauguuaaagagucacuca

SEQ ID NO: 2050413 - RNA, 19 nt, Artificial Sequence
  Description of Artificial Sequence: Synthetic oligonucleotide
ucuacagccgggaggccgc

SEQ ID NO: 2050414 - RNA, 19 nt, Artificial Sequence
  Description of Artificial Sequence: Synthetic oligonucleotide
gagacaauucccaguuugc

SEQ ID NO: 2050415 - RNA, 19 nt, Artificial Sequence
  Description of Artificial Sequence: Synthetic oligonucleotide
ugauaucuacccauuuauu

SEQ ID NO: 2050416 - RNA, 19 nt, Artificial Sequence
  Description of Artificial Sequence: Synthetic oligonucleotide
caaagcguguacugugccc

SEQ ID NO: 2050417 - RNA, 19 nt, Artificial Sequence
  Description of Artificial Sequence: Synthetic oligonucleotide
uauaaccgcugcaauuuua

SEQ ID NO: 2050418 - RNA, 19 nt, Artificial Sequence
  Description of Artificial Sequence: Synthetic oligonucleotide
acuaaagggugaaugauuu

SEQ ID NO: 2050419 - RNA, 19 nt, Artificial Sequence
  Description of Artificial Sequence: Synthetic oligonucleotide
acaguuggaaggagaacgg

SEQ ID NO: 2050420 - RNA, 19 nt, Artificial Sequence
  Description of Artificial Sequence: Synthetic oligonucleotide
guucgggaagaauuccugc

SEQ ID NO: 2050421 - RNA, 19 nt, Artificial Sequence
  Description of Artificial Sequence: Synthetic oligonucleotide
auaaaucuccauucuccaa

SEQ ID NO: 2050422 - RNA, 19 nt, Artificial Sequence
  Description of Artificial Sequence: Synthetic oligonucleotide
agaggauauaaccgcugca

SEQ ID NO: 2050423 - RNA, 19 nt, Artificial Sequence
  Description of Artificial Sequence: Synthetic oligonucleotide
guaggaccgccucauuggg

SEQ ID NO: 2050424 - RNA, 19 nt, Artificial Sequence
  Description of Artificial Sequence: Synthetic oligonucleotide
ucccaguuugcucuggaua

SEQ ID NO: 2050425 - RNA, 19 nt, Artificial Sequence
  Description of Artificial Sequence: Synthetic oligonucleotide
aguauggcuucagccaccg

SEQ ID NO: 2050426 - RNA, 19 nt, Artificial Sequence
  Description of Artificial Sequence: Synthetic oligonucleotide
caguccuacaauccccagg

SEQ ID NO: 2050427 - RNA, 19 nt, Artificial Sequence
  Description of Artificial Sequence: Synthetic oligonucleotide
gaggauauaaccgcugcaa

SEQ ID NO: 2050428 - RNA, 19 nt, Artificial Sequence
  Description of Artificial Sequence: Synthetic oligonucleotide
uggcaagacuuuguuaaug

SEQ ID NO: 2050429 - RNA, 19 nt, Artificial Sequence
  Description of Artificial Sequence: Synthetic oligonucleotide
gcugcuaucacuccuggca

SEQ ID NO: 2050430 - RNA, 19 nt, Artificial Sequence
  Description of Artificial Sequence: Synthetic oligonucleotide
aauucccaguuugcucugg

SEQ ID NO: 2050431 - RNA, 19 nt, Artificial Sequence
  Description of Artificial Sequence: Synthetic oligonucleotide
gaaguuacuaaagggugaa

SEQ ID NO: 2050432 - RNA, 19 nt, Artificial Sequence
  Description of Artificial Sequence: Synthetic oligonucleotide
agagccaggauggccaguc

SEQ ID NO: 2050433 - RNA, 19 nt, Artificial Sequence
  Description of Artificial Sequence: Synthetic oligonucleotide
aggucagagaggauauaac

SEQ ID NO: 2050434 - RNA, 19 nt, Artificial Sequence
  Description of Artificial Sequence: Synthetic oligonucleotide
gguacgacaggcuguacac

SEQ ID NO: 2050435 - RNA, 19 nt, Artificial Sequence
  Description of Artificial Sequence: Synthetic oligonucleotide
gauauaaccgcugcaauuu

SEQ ID NO: 2050436 - RNA, 19 nt, Artificial Sequence
  Description of Artificial Sequence: Synthetic oligonucleotide
aucaggacaacaguuggaa

SEQ ID NO: 2050437 - RNA, 19 nt, Artificial Sequence
  Description of Artificial Sequence: Synthetic oligonucleotide
uguaccagacaaacugauu

SEQ ID NO: 2050438 - RNA, 19 nt, Artificial Sequence
  Description of Artificial Sequence: Synthetic oligonucleotide
ugcugaagcucggaggggc

SEQ ID NO: 2050439 - RNA, 19 nt, Artificial Sequence
  Description of Artificial Sequence: Synthetic oligonucleotide
aggauauaaccgcugcaau

SEQ ID NO: 2050440 - RNA, 19 nt, Artificial Sequence
  Description of Artificial Sequence: Synthetic oligonucleotide
guucaugggaaguuacuaa

SEQ ID NO: 2050441 - RNA, 19 nt, Artificial Sequence
  Description of Artificial Sequence: Synthetic oligonucleotide
ucuccauguuaaagaguca

SEQ ID NO: 2050442 - RNA, 19 nt, Artificial Sequence
  Description of Artificial Sequence: Synthetic oligonucleotide
gggaaguuacuaaagggug

SEQ ID NO: 2050443 - RNA, 19 nt, Artificial Sequence
  Description of Artificial Sequence: Synthetic oligonucleotide
guacuugguuccauugcgg

SEQ ID NO: 2050444 - RNA, 19 nt, Artificial Sequence
  Description of Artificial Sequence: Synthetic oligonucleotide
guaucuguaggaccgccuc

SEQ ID NO: 2050445 - RNA, 19 nt, Artificial Sequence
  Description of Artificial Sequence: Synthetic oligonucleotide
accggcuucuccgugggac

SEQ ID NO: 2050446 - RNA, 19 nt, Artificial Sequence
  Description of Artificial Sequence: Synthetic oligonucleotide
aguaggaggcauguaccag

SEQ ID NO: 2050447 - RNA, 19 nt, Artificial Sequence
  Description of Artificial Sequence: Synthetic oligonucleotide
aggauggccaguccuacaa

SEQ ID NO: 2050448 - RNA, 19 nt, Artificial Sequence
  Description of Artificial Sequence: Synthetic oligonucleotide
aggacaacaguuggaagga

SEQ ID NO: 2050449 - RNA, 19 nt, Artificial Sequence
  Description of Artificial Sequence: Synthetic oligonucleotide
aauuccugcgugugcugaa

SEQ ID NO: 2050450 - RNA, 19 nt, Artificial Sequence
  Description of Artificial Sequence: Synthetic oligonucleotide
ggauagaugucacagccaa

SEQ ID NO: 2050451 - RNA, 19 nt, Artificial Sequence
  Description of Artificial Sequence: Synthetic oligonucleotide
acauaucaggacaacaguu

SEQ ID NO: 2050452 - RNA, 19 nt, Artificial Sequence
  Description of Artificial Sequence: Synthetic oligonucleotide
gagaacggcuaucaugaaa

SEQ ID NO: 2050453 - RNA, 19 nt, Artificial Sequence
  Description of Artificial Sequence: Synthetic oligonucleotide
caagagagccaggauggcc

SEQ ID NO: 2050454 - RNA, 19 nt, Artificial Sequence
  Description of Artificial Sequence: Synthetic oligonucleotide
caaacgcauuaacauggac

SEQ ID NO: 2050455 - RNA, 19 nt, Artificial Sequence
  Description of Artificial Sequence: Synthetic oligonucleotide
aacggcuaucaugaaagua

SEQ ID NO: 2050456 - RNA, 19 nt, Artificial Sequence
  Description of Artificial Sequence: Synthetic oligonucleotide
agacaauucccaguuugcu

SEQ ID NO: 2050457 - RNA, 19 nt, Artificial Sequence
  Description of Artificial Sequence: Synthetic oligonucleotide
aggagagcacaacuuuaca

SEQ ID NO: 2050458 - RNA, 19 nt, Artificial Sequence
  Description of Artificial Sequence: Synthetic oligonucleotide
agacuuuguuaaugaccag

SEQ ID NO: 2050459 - RNA, 19 nt, Artificial Sequence
  Description of Artificial Sequence: Synthetic oligonucleotide
uuggaaggagaacggcuau

SEQ ID NO: 2050460 - RNA, 19 nt, Artificial Sequence
  Description of Artificial Sequence: Synthetic oligonucleotide
uugcggaguuguacaacug

SEQ ID NO: 2050461 - RNA, 19 nt, Artificial Sequence
  Description of Artificial Sequence: Synthetic oligonucleotide
cuguacacugcaugcaaca

SEQ ID NO: 2050462 - RNA, 19 nt, Artificial Sequence
  Description of Artificial Sequence: Synthetic oligonucleotide
aagcguguacugugcccag

SEQ ID NO: 2050463 - RNA, 19 nt, Artificial Sequence
  Description of Artificial Sequence: Synthetic oligonucleotide
gugugcuuagucgaguaac

SEQ ID NO: 2050464 - RNA, 19 nt, Artificial Sequence
  Description of Artificial Sequence: Synthetic oligonucleotide
uagucgaguaacugucauc

SEQ ID NO: 2050465 - RNA, 19 nt, Artificial Sequence
  Description of Artificial Sequence: Synthetic oligonucleotide
gcuauaaaauaguauggcu

SEQ ID NO: 2050466 - RNA, 19 nt, Artificial Sequence
  Description of Artificial Sequence: Synthetic oligonucleotide
cgaguaacugucaucuucc

SEQ ID NO: 2050467 - RNA, 19 nt, Artificial Sequence
  Description of Artificial Sequence: Synthetic oligonucleotide
ucagaacaguguacaggaa

SEQ ID NO: 2050468 - RNA, 19 nt, Artificial Sequence
  Description of Artificial Sequence: Synthetic oligonucleotide
uuguacaacugcugcuauc

SEQ ID NO: 2050469 - RNA, 19 nt, Artificial Sequence
  Description of Artificial Sequence: Synthetic oligonucleotide
cuacaauccccagggacac

SEQ ID NO: 2050470 - RNA, 19 nt, Artificial Sequence
  Description of Artificial Sequence: Synthetic oligonucleotide
gggugauggaaaccauugg

SEQ ID NO: 2050471 - RNA, 19 nt, Artificial Sequence
  Description of Artificial Sequence: Synthetic oligonucleotide
aaaguucuucuugguuugu

SEQ ID NO: 2050472 - RNA, 19 nt, Artificial Sequence
  Description of Artificial Sequence: Synthetic oligonucleotide
cuuagucgaguaacuguca

SEQ ID NO: 2050473 - RNA, 19 nt, Artificial Sequence
  Description of Artificial Sequence: Synthetic oligonucleotide
auaaccgcugcaauuuuaa

SEQ ID NO: 2050474 - RNA, 19 nt, Artificial Sequence
  Description of Artificial Sequence: Synthetic oligonucleotide
cagaugggauagaugucac

SEQ ID NO: 2050475 - RNA, 19 nt, Artificial Sequence
  Description of Artificial Sequence: Synthetic oligonucleotide
caugugugggucucccgug

SEQ ID NO: 2050476 - RNA, 19 nt, Artificial Sequence
  Description of Artificial Sequence: Synthetic oligonucleotide
uggcgggaauuucuuguac

SEQ ID NO: 2050477 - RNA, 19 nt, Artificial Sequence
  Description of Artificial Sequence: Synthetic oligonucleotide
gugugcugcaaaugcaaga

SEQ ID NO: 2050478 - RNA, 19 nt, Artificial Sequence
  Description of Artificial Sequence: Synthetic oligonucleotide
agagaggauauaaccgcug

SEQ ID NO: 2050479 - RNA, 19 nt, Artificial Sequence
  Description of Artificial Sequence: Synthetic oligonucleotide
ucccgugugcuuagucgag

SEQ ID NO: 2050480 - RNA, 19 nt, Artificial Sequence
  Description of Artificial Sequence: Synthetic oligonucleotide
cuugguuuguaauaucuuu

SEQ ID NO: 2050481 - RNA, 19 nt, Artificial Sequence
  Description of Artificial Sequence: Synthetic oligonucleotide
agcccgaacugcuuccgug

SEQ ID NO: 2050482 - RNA, 19 nt, Artificial Sequence
  Description of Artificial Sequence: Synthetic oligonucleotide
aggaccgccucauugggua

SEQ ID NO: 2050483 - RNA, 19 nt, Artificial Sequence
  Description of Artificial Sequence: Synthetic oligonucleotide
ugcgugugcugaagcucgg

SEQ ID NO: 2050484 - RNA, 19 nt, Artificial Sequence
  Description of Artificial Sequence: Synthetic oligonucleotide
cugauugauaucuacccau

SEQ ID NO: 2050485 - RNA, 19 nt, Artificial Sequence
  Description of Artificial Sequence: Synthetic oligonucleotide
auuucccucagaacagugu

SEQ ID NO: 2050486 - RNA, 19 nt, Artificial Sequence
  Description of Artificial Sequence: Synthetic oligonucleotide
gccucauuggguacgacag

SEQ ID NO: 2050487 - RNA, 19 nt, Artificial Sequence
  Description of Artificial Sequence: Synthetic oligonucleotide
uggacggugugcugcaaau

SEQ ID NO: 2050488 - RNA, 19 nt, Artificial Sequence
  Description of Artificial Sequence: Synthetic oligonucleotide
auuggguacgacaggcugu

SEQ ID NO: 2050489 - RNA, 19 nt, Artificial Sequence
  Description of Artificial Sequence: Synthetic oligonucleotide
auauaaccgcugcaauuuu

SEQ ID NO: 2050490 - RNA, 19 nt, Artificial Sequence
  Description of Artificial Sequence: Synthetic oligonucleotide
gcagcuuguaucuguagga

SEQ ID NO: 2050491 - RNA, 19 nt, Artificial Sequence
  Description of Artificial Sequence: Synthetic oligonucleotide
ggaagaauuccugcgugug

SEQ ID NO: 2050492 - RNA, 19 nt, Artificial Sequence
  Description of Artificial Sequence: Synthetic oligonucleotide
cauuaacauggacggugug

SEQ ID NO: 2050493 - RNA, 19 nt, Artificial Sequence
  Description of Artificial Sequence: Synthetic oligonucleotide
ugugggucucccgugugcu

SEQ ID NO: 2050494 - RNA, 19 nt, Artificial Sequence
  Description of Artificial Sequence: Synthetic oligonucleotide
ucccaaccacaucgaaucu

SEQ ID NO: 2050495 - RNA, 19 nt, Artificial Sequence
  Description of Artificial Sequence: Synthetic oligonucleotide
ccauguuaaagagucacuc

SEQ ID NO: 2050496 - RNA, 19 nt, Artificial Sequence
  Description of Artificial Sequence: Synthetic oligonucleotide
gaguaacugucaucuucca

SEQ ID NO: 2050497 - RNA, 19 nt, Artificial Sequence
  Description of Artificial Sequence: Synthetic oligonucleotide
acaauccccagggacacau

SEQ ID NO: 2050498 - RNA, 19 nt, Artificial Sequence
  Description of Artificial Sequence: Synthetic oligonucleotide
caugcucaauccaggcauc

SEQ ID NO: 2050499 - RNA, 19 nt, Artificial Sequence
  Description of Artificial Sequence: Synthetic oligonucleotide
cagcuuguaucuguaggac

SEQ ID NO: 2050500 - RNA, 19 nt, Artificial Sequence
  Description of Artificial Sequence: Synthetic oligonucleotide
gcuuagucgaguaacuguc

SEQ ID NO: 2050501 - RNA, 19 nt, Artificial Sequence
  Description of Artificial Sequence: Synthetic oligonucleotide
uggcaagcgccaguucggg

SEQ ID NO: 2050502 - RNA, 19 nt, Artificial Sequence
  Description of Artificial Sequence: Synthetic oligonucleotide
ugucuagccauggcgggaa

SEQ ID NO: 2050503 - RNA, 19 nt, Artificial Sequence
  Description of Artificial Sequence: Synthetic oligonucleotide
gaguuguacaacugcugcu

SEQ ID NO: 2050504 - RNA, 19 nt, Artificial Sequence
  Description of Artificial Sequence: Synthetic oligonucleotide
caugggccuuuucagcaug

SEQ ID NO: 2050505 - RNA, 19 nt, Artificial Sequence
  Description of Artificial Sequence: Synthetic oligonucleotide
caguuggaaggagaacggc

SEQ ID NO: 2050506 - RNA, 19 nt, Artificial Sequence
  Description of Artificial Sequence: Synthetic oligonucleotide
gaauuccugcgugugcuga

SEQ ID NO: 2050507 - RNA, 19 nt, Artificial Sequence
  Description of Artificial Sequence: Synthetic oligonucleotide
ugcugcuaucacuccuggc

SEQ ID NO: 2050508 - RNA, 19 nt, Artificial Sequence
  Description of Artificial Sequence: Synthetic oligonucleotide
cucggaggggcagucaaac

SEQ ID NO: 2050509 - RNA, 19 nt, Artificial Sequence
  Description of Artificial Sequence: Synthetic oligonucleotide
gcaagacuuuguuaaugac

SEQ ID NO: 2050510 - RNA, 19 nt, Artificial Sequence
  Description of Artificial Sequence: Synthetic oligonucleotide
ggcagucaaacgcauuaac

SEQ ID NO: 2050511 - RNA, 19 nt, Artificial Sequence
  Description of Artificial Sequence: Synthetic oligonucleotide
cuuguacgcccaguugagc

SEQ ID NO: 2050512 - RNA, 19 nt, Artificial Sequence
  Description of Artificial Sequence: Synthetic oligonucleotide
augugugggucucccgugu

SEQ ID NO: 2050513 - RNA, 19 nt, Artificial Sequence
  Description of Artificial Sequence: Synthetic oligonucleotide
accaggauuggaauucuau

SEQ ID NO: 2050514 - RNA, 19 nt, Artificial Sequence
  Description of Artificial Sequence: Synthetic oligonucleotide
ccuacaauccccagggaca

SEQ ID NO: 2050515 - RNA, 19 nt, Artificial Sequence
  Description of Artificial Sequence: Synthetic oligonucleotide
guuggaaggagaacggcua

SEQ ID NO: 2050516 - RNA, 19 nt, Artificial Sequence
  Description of Artificial Sequence: Synthetic oligonucleotide
uaaccgcugcaauuuuaau

SEQ ID NO: 2050517 - RNA, 19 nt, Artificial Sequence
  Description of Artificial Sequence: Synthetic oligonucleotide
gugcuuagucgaguaacug

SEQ ID NO: 2050518 - RNA, 19 nt, Artificial Sequence
  Description of Artificial Sequence: Synthetic oligonucleotide
caagcgccaguucgggaag

SEQ ID NO: 2050519 - RNA, 19 nt, Artificial Sequence
  Description of Artificial Sequence: Synthetic oligonucleotide
gaccgccucauuggguacg

SEQ ID NO: 2050520 - RNA, 19 nt, Artificial Sequence
  Description of Artificial Sequence: Synthetic oligonucleotide
aaguuacuaaagggugaau

SEQ ID NO: 2050521 - RNA, 19 nt, Artificial Sequence
  Description of Artificial Sequence: Synthetic oligonucleotide
ugaccaggauuggaauucu

SEQ ID NO: 2050522 - RNA, 19 nt, Artificial Sequence
  Description of Artificial Sequence: Synthetic oligonucleotide
ggaauucucuccauguuaa

SEQ ID NO: 2050523 - RNA, 19 nt, Artificial Sequence
  Description of Artificial Sequence: Synthetic oligonucleotide
cauugcggaguuguacaac

SEQ ID NO: 2050524 - RNA, 19 nt, Artificial Sequence
  Description of Artificial Sequence: Synthetic oligonucleotide
auacuguucaugggaaguu

SEQ ID NO: 2050525 - RNA, 19 nt, Artificial Sequence
  Description of Artificial Sequence: Synthetic oligonucleotide
ggaaggagaacggcuauca

SEQ ID NO: 2050526 - RNA, 19 nt, Artificial Sequence
  Description of Artificial Sequence: Synthetic oligonucleotide
cauggcgggaauuucuugu

SEQ ID NO: 2050527 - RNA, 19 nt, Artificial Sequence
  Description of Artificial Sequence: Synthetic oligonucleotide
cucccgugugcuuagucga

SEQ ID NO: 2050528 - RNA, 19 nt, Artificial Sequence
  Description of Artificial Sequence: Synthetic oligonucleotide
accauuggcaagacuuugu

SEQ ID NO: 2050529 - RNA, 19 nt, Artificial Sequence
  Description of Artificial Sequence: Synthetic oligonucleotide
caauucccaguuugcucug

SEQ ID NO: 2050530 - RNA, 19 nt, Artificial Sequence
  Description of Artificial Sequence: Synthetic oligonucleotide
gugaaugauuucccucaga

SEQ ID NO: 2050531 - RNA, 19 nt, Artificial Sequence
  Description of Artificial Sequence: Synthetic oligonucleotide
uuggguacgacaggcugua

SEQ ID NO: 2050532 - RNA, 19 nt, Artificial Sequence
  Description of Artificial Sequence: Synthetic oligonucleotide
ugucagcauccaucugucu

SEQ ID NO: 2050533 - RNA, 19 nt, Artificial Sequence
  Description of Artificial Sequence: Synthetic oligonucleotide
aaaccagcgccaagagggu

SEQ ID NO: 2050534 - RNA, 19 nt, Artificial Sequence
  Description of Artificial Sequence: Synthetic oligonucleotide
gucacucacagaugggaua

SEQ ID NO: 2050535 - RNA, 19 nt, Artificial Sequence
  Description of Artificial Sequence: Synthetic oligonucleotide
caguaucuuccuccucaag

SEQ ID NO: 2050536 - RNA, 19 nt, Artificial Sequence
  Description of Artificial Sequence: Synthetic oligonucleotide
ugaaaguaggaggcaugua

SEQ ID NO: 2050537 - RNA, 19 nt, Artificial Sequence
  Description of Artificial Sequence: Synthetic oligonucleotide
caacaguuggaaggagaac

SEQ ID NO: 2050538 - RNA, 19 nt, Artificial Sequence
  Description of Artificial Sequence: Synthetic oligonucleotide
cuuuucagcaugugugggu

SEQ ID NO: 2050539 - RNA, 19 nt, Artificial Sequence
  Description of Artificial Sequence: Synthetic oligonucleotide
ucaauccaggcauccucuu

SEQ ID NO: 2050540 - RNA, 19 nt, Artificial Sequence
  Description of Artificial Sequence: Synthetic oligonucleotide
cuuaggcuucauuuuccaa

SEQ ID NO: 2050541 - RNA, 19 nt, Artificial Sequence
  Description of Artificial Sequence: Synthetic oligonucleotide
cauuggcaagacuuuguua

SEQ ID NO: 2050542 - RNA, 19 nt, Artificial Sequence
  Description of Artificial Sequence: Synthetic oligonucleotide
uggaaggagaacggcuauc

SEQ ID NO: 2050543 - RNA, 19 nt, Artificial Sequence
  Description of Artificial Sequence: Synthetic oligonucleotide
ugcucaauccaggcauccu

SEQ ID NO: 2050544 - RNA, 19 nt, Artificial Sequence
  Description of Artificial Sequence: Synthetic oligonucleotide
auguucuccaugauugcua

SEQ ID NO: 2050545 - RNA, 19 nt, Artificial Sequence
  Description of Artificial Sequence: Synthetic oligonucleotide
ggugugcugcaaaugcaag

SEQ ID NO: 2050546 - RNA, 19 nt, Artificial Sequence
  Description of Artificial Sequence: Synthetic oligonucleotide
cgcauuaacauggacggug

SEQ ID NO: 2050547 - RNA, 19 nt, Artificial Sequence
  Description of Artificial Sequence: Synthetic oligonucleotide
uggaaaccauuggcaagac

SEQ ID NO: 2050548 - RNA, 19 nt, Artificial Sequence
  Description of Artificial Sequence: Synthetic oligonucleotide
ggagagcacaacuuuacau

SEQ ID NO: 2050549 - RNA, 19 nt, Artificial Sequence
  Description of Artificial Sequence: Synthetic oligonucleotide
gaaccugcuuguacgccca

SEQ ID NO: 2050550 - RNA, 19 nt, Artificial Sequence
  Description of Artificial Sequence: Synthetic oligonucleotide
aucacuccuggcaaauaaa

SEQ ID NO: 2050551 - RNA, 19 nt, Artificial Sequence
  Description of Artificial Sequence: Synthetic oligonucleotide
cugcuuccgugucagcauc

SEQ ID NO: 2050552 - RNA, 19 nt, Artificial Sequence
  Description of Artificial Sequence: Synthetic oligonucleotide
ggacacauaaaucuccauu

SEQ ID NO: 2050553 - RNA, 19 nt, Artificial Sequence
  Description of Artificial Sequence: Synthetic oligonucleotide
ggauauaguggaauucucu

SEQ ID NO: 2050554 - RNA, 19 nt, Artificial Sequence
  Description of Artificial Sequence: Synthetic oligonucleotide
gcaagcgccaguucgggaa

SEQ ID NO: 2050555 - RNA, 19 nt, Artificial Sequence
  Description of Artificial Sequence: Synthetic oligonucleotide
ggggcagucaaacgcauua

SEQ ID NO: 2050556 - RNA, 19 nt, Artificial Sequence
  Description of Artificial Sequence: Synthetic oligonucleotide
gcuuguacgcccaguugag

SEQ ID NO: 2050557 - RNA, 19 nt, Artificial Sequence
  Description of Artificial Sequence: Synthetic oligonucleotide
gaagcucggaggggcaguc

SEQ ID NO: 2050558 - RNA, 19 nt, Artificial Sequence
  Description of Artificial Sequence: Synthetic oligonucleotide
guauggcuucagccaccgg

SEQ ID NO: 2050559 - RNA, 19 nt, Artificial Sequence
  Description of Artificial Sequence: Synthetic oligonucleotide
ggauauaaccgcugcaauu

SEQ ID NO: 2050560 - RNA, 19 nt, Artificial Sequence
  Description of Artificial Sequence: Synthetic oligonucleotide
gaggcauguaccagacaaa

SEQ ID NO: 2050561 - RNA, 19 nt, Artificial Sequence
  Description of Artificial Sequence: Synthetic oligonucleotide
aguuugcucuggauauagu

SEQ ID NO: 2050562 - RNA, 19 nt, Artificial Sequence
  Description of Artificial Sequence: Synthetic oligonucleotide
gaacggcuaucaugaaagu

SEQ ID NO: 2050563 - RNA, 19 nt, Artificial Sequence
  Description of Artificial Sequence: Synthetic oligonucleotide
gguuccauugcggaguugu

SEQ ID NO: 2050564 - RNA, 19 nt, Artificial Sequence
  Description of Artificial Sequence: Synthetic oligonucleotide
cagcauccaucugucuagc

SEQ ID NO: 2050565 - RNA, 19 nt, Artificial Sequence
  Description of Artificial Sequence: Synthetic oligonucleotide
acggugugcugcaaaugca

SEQ ID NO: 2050566 - RNA, 19 nt, Artificial Sequence
  Description of Artificial Sequence: Synthetic oligonucleotide
caaccacaucgaaucuuca

SEQ ID NO: 2050567 - RNA, 19 nt, Artificial Sequence
  Description of Artificial Sequence: Synthetic oligonucleotide
gcaaauaaaccagcgccaa

SEQ ID NO: 2050568 - RNA, 19 nt, Artificial Sequence
  Description of Artificial Sequence: Synthetic oligonucleotide
uccaggcauccucuuuguu

SEQ ID NO: 2050569 - RNA, 19 nt, Artificial Sequence
  Description of Artificial Sequence: Synthetic oligonucleotide
gugcugaagcucggagggg

SEQ ID NO: 2050570 - RNA, 19 nt, Artificial Sequence
  Description of Artificial Sequence: Synthetic oligonucleotide
ccaucugucuagccauggc

SEQ ID NO: 2050571 - RNA, 19 nt, Artificial Sequence
  Description of Artificial Sequence: Synthetic oligonucleotide
ccaguucgggaagaauucc

SEQ ID NO: 2050572 - RNA, 19 nt, Artificial Sequence
  Description of Artificial Sequence: Synthetic oligonucleotide
ccgcugcaauuuuaauugg

SEQ ID NO: 2050573 - RNA, 19 nt, Artificial Sequence
  Description of Artificial Sequence: Synthetic oligonucleotide
caguucgggaagaauuccu

SEQ ID NO: 2050574 - RNA, 19 nt, Artificial Sequence
  Description of Artificial Sequence: Synthetic oligonucleotide
gaaggagaacggcuaucau

SEQ ID NO: 2050575 - RNA, 19 nt, Artificial Sequence
  Description of Artificial Sequence: Synthetic oligonucleotide
guuguacaacugcugcuau

SEQ ID NO: 2050576 - RNA, 19 nt, Artificial Sequence
  Description of Artificial Sequence: Synthetic oligonucleotide
gccaguucgggaagaauuc

SEQ ID NO: 2050577 - RNA, 19 nt, Artificial Sequence
  Description of Artificial Sequence: Synthetic oligonucleotide
gucucccgugugcuuaguc

SEQ ID NO: 2050578 - RNA, 19 nt, Artificial Sequence
  Description of Artificial Sequence: Synthetic oligonucleotide
aagcgccaguucgggaaga

SEQ ID NO: 2050579 - RNA, 19 nt, Artificial Sequence
  Description of Artificial Sequence: Synthetic oligonucleotide
gccgccuccauccuguuua

SEQ ID NO: 2050580 - RNA, 19 nt, Artificial Sequence
  Description of Artificial Sequence: Synthetic oligonucleotide
cucuggauauaguggaauu

SEQ ID NO: 2050581 - RNA, 19 nt, Artificial Sequence
  Description of Artificial Sequence: Synthetic oligonucleotide
ggacaacaguuggaaggag

SEQ ID NO: 2050582 - RNA, 19 nt, Artificial Sequence
  Description of Artificial Sequence: Synthetic oligonucleotide
ccacaucgaaucuucagua

SEQ ID NO: 2050583 - RNA, 19 nt, Artificial Sequence
  Description of Artificial Sequence: Synthetic oligonucleotide
gcuguacacugcaugcaac

SEQ ID NO: 2050584 - RNA, 19 nt, Artificial Sequence
  Description of Artificial Sequence: Synthetic oligonucleotide
cacaucgaaucuucaguau

SEQ ID NO: 2050585 - RNA, 19 nt, Artificial Sequence
  Description of Artificial Sequence: Synthetic oligonucleotide
cuuuaauguucuccaugau

SEQ ID NO: 2050586 - RNA, 19 nt, Artificial Sequence
  Description of Artificial Sequence: Synthetic oligonucleotide
cgggaggccgccuccaucc

SEQ ID NO: 2050587 - RNA, 19 nt, Artificial Sequence
  Description of Artificial Sequence: Synthetic oligonucleotide
agagggugauggaaaccau

SEQ ID NO: 2050588 - RNA, 19 nt, Artificial Sequence
  Description of Artificial Sequence: Synthetic oligonucleotide
ggcgggaauuucuuguacu

SEQ ID NO: 2050589 - RNA, 19 nt, Artificial Sequence
  Description of Artificial Sequence: Synthetic oligonucleotide
cgugugcugaagcucggag

SEQ ID NO: 2050590 - RNA, 19 nt, Artificial Sequence
  Description of Artificial Sequence: Synthetic oligonucleotide
acgcauuaacauggacggu

SEQ ID NO: 2050591 - RNA, 19 nt, Artificial Sequence
  Description of Artificial Sequence: Synthetic oligonucleotide
gcaaggagagcacaacuuu

SEQ ID NO: 2050592 - RNA, 19 nt, Artificial Sequence
  Description of Artificial Sequence: Synthetic oligonucleotide
gaaggucagagaggauaua

SEQ ID NO: 2050593 - RNA, 19 nt, Artificial Sequence
  Description of Artificial Sequence: Synthetic oligonucleotide
gggauagaugucacagcca

SEQ ID NO: 2050594 - RNA, 19 nt, Artificial Sequence
  Description of Artificial Sequence: Synthetic oligonucleotide
ggacggugugcugcaaaug

SEQ ID NO: 2050595 - RNA, 19 nt, Artificial Sequence
  Description of Artificial Sequence: Synthetic oligonucleotide
cgggaagaauuccugcgug

SEQ ID NO: 2050596 - RNA, 19 nt, Artificial Sequence
  Description of Artificial Sequence: Synthetic oligonucleotide
ccauggcgggaauuucuug

SEQ ID NO: 2050597 - RNA, 19 nt, Artificial Sequence
  Description of Artificial Sequence: Synthetic oligonucleotide
cugucuagccauggcggga

SEQ ID NO: 2050598 - RNA, 19 nt, Artificial Sequence
  Description of Artificial Sequence: Synthetic oligonucleotide
agcguguacugugcccaga

SEQ ID NO: 2050599 - RNA, 19 nt, Artificial Sequence
  Description of Artificial Sequence: Synthetic oligonucleotide
ccccagggacacauaaauc

SEQ ID NO: 2050600 - RNA, 19 nt, Artificial Sequence
  Description of Artificial Sequence: Synthetic oligonucleotide
gcagcccgaacugcuuccg

SEQ ID NO: 2050601 - RNA, 19 nt, Artificial Sequence
  Description of Artificial Sequence: Synthetic oligonucleotide
ccggcuucuccgugggacc

SEQ ID NO: 2050602 - RNA, 19 nt, Artificial Sequence
  Description of Artificial Sequence: Synthetic oligonucleotide
accgccucauuggguacga

SEQ ID NO: 2050603 - RNA, 19 nt, Artificial Sequence
  Description of Artificial Sequence: Synthetic oligonucleotide
ugguuccauugcggaguug

SEQ ID NO: 2050604 - RNA, 19 nt, Artificial Sequence
  Description of Artificial Sequence: Synthetic oligonucleotide
ccugcgugugcugaagcuc

SEQ ID NO: 2050605 - RNA, 19 nt, Artificial Sequence
  Description of Artificial Sequence: Synthetic oligonucleotide
ccaguccuacaauccccag

SEQ ID NO: 2050606 - RNA, 19 nt, Artificial Sequence
  Description of Artificial Sequence: Synthetic oligonucleotide
gcguguacugugcccagaa

SEQ ID NO: 2050607 - RNA, 19 nt, Artificial Sequence
  Description of Artificial Sequence: Synthetic oligonucleotide
cgugucagcauccaucugu

SEQ ID NO: 2050608 - RNA, 19 nt, Artificial Sequence
  Description of Artificial Sequence: Synthetic oligonucleotide
cagccgggaggccgccucc

SEQ ID NO: 2050609 - RNA, 19 nt, Artificial Sequence
  Description of Artificial Sequence: Synthetic oligonucleotide
gcauuaacauggacggugu

SEQ ID NO: 2050610 - RNA, 19 nt, Artificial Sequence
  Description of Artificial Sequence: Synthetic oligonucleotide
ggaaaccauuggcaagacu

SEQ ID NO: 2050611 - RNA, 19 nt, Artificial Sequence
  Description of Artificial Sequence: Synthetic oligonucleotide
cuaucacuccuggcaaaua

SEQ ID NO: 2050612 - RNA, 19 nt, Artificial Sequence
  Description of Artificial Sequence: Synthetic oligonucleotide
cgcccaguugagcagcuug

SEQ ID NO: 2050613 - RNA, 19 nt, Artificial Sequence
  Description of Artificial Sequence: Synthetic oligonucleotide
gaccaggauuggaauucua

SEQ ID NO: 2050614 - RNA, 19 nt, Artificial Sequence
  Description of Artificial Sequence: Synthetic oligonucleotide
ggaccgccucauuggguac

SEQ ID NO: 2050615 - RNA, 19 nt, Artificial Sequence
  Description of Artificial Sequence: Synthetic oligonucleotide
uggguacgacaggcuguac

SEQ ID NO: 2050616 - RNA, 19 nt, Artificial Sequence
  Description of Artificial Sequence: Synthetic oligonucleotide
agcgccaguucgggaagaa

SEQ ID NO: 2050617 - RNA, 19 nt, Artificial Sequence
  Description of Artificial Sequence: Synthetic oligonucleotide
cuacagccgggaggccgcc

SEQ ID NO: 2050618 - RNA, 19 nt, Artificial Sequence
  Description of Artificial Sequence: Synthetic oligonucleotide
guacgacaggcuguacacu

SEQ ID NO: 2050619 - RNA, 19 nt, Artificial Sequence
  Description of Artificial Sequence: Synthetic oligonucleotide
ggcaagcgccaguucggga

SEQ ID NO: 2050620 - RNA, 19 nt, Artificial Sequence
  Description of Artificial Sequence: Synthetic oligonucleotide
ggagaacggcuaucaugaa

SEQ ID NO: 2050621 - RNA, 19 nt, Artificial Sequence
  Description of Artificial Sequence: Synthetic oligonucleotide
gcggaguuguacaacugcu

SEQ ID NO: 2050622 - RNA, 19 nt, Artificial Sequence
  Description of Artificial Sequence: Synthetic oligonucleotide
ccauugcggaguuguacaa

SEQ ID NO: 2050623 - RNA, 19 nt, Artificial Sequence
  Description of Artificial Sequence: Synthetic oligonucleotide
gcgggaauuucuuguacuu

SEQ ID NO: 2050624 - RNA, 19 nt, Artificial Sequence
  Description of Artificial Sequence: Synthetic oligonucleotide
cgccucauuggguacgaca

SEQ ID NO: 2050625 - RNA, 19 nt, Artificial Sequence
  Description of Artificial Sequence: Synthetic oligonucleotide
cccgaacugcuuccguguc

SEQ ID NO: 2050626 - RNA, 19 nt, Artificial Sequence
  Description of Artificial Sequence: Synthetic oligonucleotide
gcccgaacugcuuccgugu

SEQ ID NO: 2050627 - RNA, 19 nt, Artificial Sequence
  Description of Artificial Sequence: Synthetic oligonucleotide
gggacacauaaaucuccau

SEQ ID NO: 2050628 - RNA, 19 nt, Artificial Sequence
  Description of Artificial Sequence: Synthetic oligonucleotide
gcuaucacuccuggcaaau

SEQ ID NO: 2050629 - RNA, 19 nt, Artificial Sequence
  Description of Artificial Sequence: Synthetic oligonucleotide
gucgaguaacugucaucuu

SEQ ID NO: 2050630 - RNA, 19 nt, Artificial Sequence
  Description of Artificial Sequence: Synthetic oligonucleotide
caauccccagggacacaua

SEQ ID NO: 2050631 - RNA, 19 nt, Artificial Sequence
  Description of Artificial Sequence: Synthetic oligonucleotide
cggugugcugcaaaugcaa

SEQ ID NO: 2050632 - RNA, 19 nt, Artificial Sequence
  Description of Artificial Sequence: Synthetic oligonucleotide
agccgggaggccgccucca

SEQ ID NO: 2050633 - RNA, 19 nt, Artificial Sequence
  Description of Artificial Sequence: Synthetic oligonucleotide
cuuccgugucagcauccau

SEQ ID NO: 2050634 - RNA, 19 nt, Artificial Sequence
  Description of Artificial Sequence: Synthetic oligonucleotide
ccauuggcaagacuuuguu

SEQ ID NO: 2050635 - RNA, 19 nt, Artificial Sequence
  Description of Artificial Sequence: Synthetic oligonucleotide
ccgccuccauccuguuuac

SEQ ID NO: 2050636 - RNA, 19 nt, Artificial Sequence
  Description of Artificial Sequence: Synthetic oligonucleotide
gcaugggccuuuucagcau

SEQ ID NO: 2050637 - RNA, 19 nt, Artificial Sequence
  Description of Artificial Sequence: Synthetic oligonucleotide
cauggacggugugcugcaa

SEQ ID NO: 2050638 - RNA, 19 nt, Artificial Sequence
  Description of Artificial Sequence: Synthetic oligonucleotide
ccgugucagcauccaucug

SEQ ID NO: 2050639 - RNA, 19 nt, Artificial Sequence
  Description of Artificial Sequence: Synthetic oligonucleotide
cgccaguucgggaagaauu

SEQ ID NO: 2050640 - RNA, 19 nt, Artificial Sequence
  Description of Artificial Sequence: Synthetic oligonucleotide
caggaaggucagagaggau

SEQ ID NO: 2050641 - RNA, 19 nt, Artificial Sequence
  Description of Artificial Sequence: Synthetic oligonucleotide
gucuagccauggcgggaau

SEQ ID NO: 2050642 - RNA, 19 nt, Artificial Sequence
  Description of Artificial Sequence: Synthetic oligonucleotide
cagcgccaagagggugaug

SEQ ID NO: 2050643 - RNA, 19 nt, Artificial Sequence
  Description of Artificial Sequence: Synthetic oligonucleotide
cagcccgaacugcuuccgu

SEQ ID NO: 2050644 - RNA, 19 nt, Artificial Sequence
  Description of Artificial Sequence: Synthetic oligonucleotide
gcucggaggggcagucaaa

SEQ ID NO: 2050645 - RNA, 19 nt, Artificial Sequence
  Description of Artificial Sequence: Synthetic oligonucleotide
cgccaagagggugauggaa

SEQ ID NO: 2050646 - RNA, 19 nt, Artificial Sequence
  Description of Artificial Sequence: Synthetic oligonucleotide
gccauggcgggaauuucuu

SEQ ID NO: 2050647 - RNA, 19 nt, Artificial Sequence
  Description of Artificial Sequence: Synthetic oligonucleotide
cccaaccacaucgaaucuu

SEQ ID NO: 2050648 - RNA, 19 nt, Artificial Sequence
  Description of Artificial Sequence: Synthetic oligonucleotide
ccgccucauuggguacgac

SEQ ID NO: 2050649 - RNA, 19 nt, Artificial Sequence
  Description of Artificial Sequence: Synthetic oligonucleotide
cccgugugcuuagucgagu

SEQ ID NO: 2050650 - RNA, 19 nt, Artificial Sequence
  Description of Artificial Sequence: Synthetic oligonucleotide
gcgccaguucgggaagaau

SEQ ID NO: 2050651 - RNA, 19 nt, Artificial Sequence
  Description of Artificial Sequence: Synthetic oligonucleotide
ggccgccuccauccuguuu

SEQ ID NO: 2050652 - RNA, 19 nt, Artificial Sequence
  Description of Artificial Sequence: Synthetic oligonucleotide
gccgggaggccgccuccau

SEQ ID NO: 2050653 - RNA, 19 nt, Artificial Sequence
  Description of Artificial Sequence: Synthetic oligonucleotide
aggugcaucacauagugcc

SEQ ID NO: 2050654 - RNA, 19 nt, Artificial Sequence
  Description of Artificial Sequence: Synthetic oligonucleotide
aaguugacggcccucacgc

SEQ ID NO: 2050655 - RNA, 19 nt, Artificial Sequence
  Description of Artificial Sequence: Synthetic oligonucleotide
uuuucuacacuccaguuug

SEQ ID NO: 2050656 - RNA, 19 nt, Artificial Sequence
  Description of Artificial Sequence: Synthetic oligonucleotide
caggaagcgaauuugagcg

SEQ ID NO: 2050657 - RNA, 19 nt, Artificial Sequence
  Description of Artificial Sequence: Synthetic oligonucleotide
gauaugucuaugcagcuag

SEQ ID NO: 2050658 - RNA, 19 nt, Artificial Sequence
  Description of Artificial Sequence: Synthetic oligonucleotide
cuacacuccaguuugaggc

SEQ ID NO: 2050659 - RNA, 19 nt, Artificial Sequence
  Description of Artificial Sequence: Synthetic oligonucleotide
ugagcgauagcacacagcu

SEQ ID NO: 2050660 - RNA, 19 nt, Artificial Sequence
  Description of Artificial Sequence: Synthetic oligonucleotide
aaacgugcuguguggagcc

SEQ ID NO: 2050661 - RNA, 19 nt, Artificial Sequence
  Description of Artificial Sequence: Synthetic oligonucleotide
uccgauaugucuaugcagc

SEQ ID NO: 2050662 - RNA, 19 nt, Artificial Sequence
  Description of Artificial Sequence: Synthetic oligonucleotide
ugauagaugagccccggag

SEQ ID NO: 2050663 - RNA, 19 nt, Artificial Sequence
  Description of Artificial Sequence: Synthetic oligonucleotide
aauuugagcgauagcacac

SEQ ID NO: 2050664 - RNA, 19 nt, Artificial Sequence
  Description of Artificial Sequence: Synthetic oligonucleotide
uccgcagacacauggaagg

SEQ ID NO: 2050665 - RNA, 19 nt, Artificial Sequence
  Description of Artificial Sequence: Synthetic oligonucleotide
agcgauagcacacagcucu

SEQ ID NO: 2050666 - RNA, 19 nt, Artificial Sequence
  Description of Artificial Sequence: Synthetic oligonucleotide
agcgagaaaaucugggaac

SEQ ID NO: 2050667 - RNA, 19 nt, Artificial Sequence
  Description of Artificial Sequence: Synthetic oligonucleotide
aacuugaaaggcuggccgg

SEQ ID NO: 2050668 - RNA, 19 nt, Artificial Sequence
  Description of Artificial Sequence: Synthetic oligonucleotide
agggugauagaugagcccc

SEQ ID NO: 2050669 - RNA, 19 nt, Artificial Sequence
  Description of Artificial Sequence: Synthetic oligonucleotide
cauggaaggaauaggccgg

SEQ ID NO: 2050670 - RNA, 19 nt, Artificial Sequence
  Description of Artificial Sequence: Synthetic oligonucleotide
uaugcagcuagccccaucu

SEQ ID NO: 2050671 - RNA, 19 nt, Artificial Sequence
  Description of Artificial Sequence: Synthetic oligonucleotide
ucuacacuccaguuugagg

SEQ ID NO: 2050672 - RNA, 19 nt, Artificial Sequence
  Description of Artificial Sequence: Synthetic oligonucleotide
ugagaacuugaaaggcugg

SEQ ID NO: 2050673 - RNA, 19 nt, Artificial Sequence
  Description of Artificial Sequence: Synthetic oligonucleotide
ugacccagcgagaaaaucu

SEQ ID NO: 2050674 - RNA, 19 nt, Artificial Sequence
  Description of Artificial Sequence: Synthetic oligonucleotide
gaauuugagcgauagcaca

SEQ ID NO: 2050675 - RNA, 19 nt, Artificial Sequence
  Description of Artificial Sequence: Synthetic oligonucleotide
gaauaggccggcuuugccc

SEQ ID NO: 2050676 - RNA, 19 nt, Artificial Sequence
  Description of Artificial Sequence: Synthetic oligonucleotide
aaguuguccuugccugugc

SEQ ID NO: 2050677 - RNA, 19 nt, Artificial Sequence
  Description of Artificial Sequence: Synthetic oligonucleotide
ucacauagugccuuucucu

SEQ ID NO: 2050678 - RNA, 19 nt, Artificial Sequence
  Description of Artificial Sequence: Synthetic oligonucleotide
aacgugcaggacuuccacg

SEQ ID NO: 2050679 - RNA, 19 nt, Artificial Sequence
  Description of Artificial Sequence: Synthetic oligonucleotide
gaaguugacggcccucacg

SEQ ID NO: 2050680 - RNA, 19 nt, Artificial Sequence
  Description of Artificial Sequence: Synthetic oligonucleotide
ugagcguccguacacgaca

SEQ ID NO: 2050681 - RNA, 19 nt, Artificial Sequence
  Description of Artificial Sequence: Synthetic oligonucleotide
gauccggucacagauuucc

SEQ ID NO: 2050682 - RNA, 19 nt, Artificial Sequence
  Description of Artificial Sequence: Synthetic oligonucleotide
uuugccgcccguguaaacg

SEQ ID NO: 2050683 - RNA, 19 nt, Artificial Sequence
  Description of Artificial Sequence: Synthetic oligonucleotide
aucacauagugccuuucuc

SEQ ID NO: 2050684 - RNA, 19 nt, Artificial Sequence
  Description of Artificial Sequence: Synthetic oligonucleotide
uuugagcgauagcacacag

SEQ ID NO: 2050685 - RNA, 19 nt, Artificial Sequence
  Description of Artificial Sequence: Synthetic oligonucleotide
cugagaacuugaaaggcug

SEQ ID NO: 2050686 - RNA, 19 nt, Artificial Sequence
  Description of Artificial Sequence: Synthetic oligonucleotide
cuugccugugcucacaaac

SEQ ID NO: 2050687 - RNA, 19 nt, Artificial Sequence
  Description of Artificial Sequence: Synthetic oligonucleotide
cuucucaggcuuuccaacg

SEQ ID NO: 2050688 - RNA, 19 nt, Artificial Sequence
  Description of Artificial Sequence: Synthetic oligonucleotide
uuaagcaaguuguccuugc

SEQ ID NO: 2050689 - RNA, 19 nt, Artificial Sequence
  Description of Artificial Sequence: Synthetic oligonucleotide
aagcgaauuugagcgauag

SEQ ID NO: 2050690 - RNA, 19 nt, Artificial Sequence
  Description of Artificial Sequence: Synthetic oligonucleotide
gggacagugacccagcgag

SEQ ID NO: 2050691 - RNA, 19 nt, Artificial Sequence
  Description of Artificial Sequence: Synthetic oligonucleotide
gagcguauguaguugucgc

SEQ ID NO: 2050692 - RNA, 19 nt, Artificial Sequence
  Description of Artificial Sequence: Synthetic oligonucleotide
gacagcgcacaccaccucg

SEQ ID NO: 2050693 - RNA, 19 nt, Artificial Sequence
  Description of Artificial Sequence: Synthetic oligonucleotide
gaaaaucugggaacugaag

SEQ ID NO: 2050694 - RNA, 19 nt, Artificial Sequence
  Description of Artificial Sequence: Synthetic oligonucleotide
cacauggaaggaauaggcc

SEQ ID NO: 2050695 - RNA, 19 nt, Artificial Sequence
  Description of Artificial Sequence: Synthetic oligonucleotide
gauagaugagccccggaga

SEQ ID NO: 2050696 - RNA, 19 nt, Artificial Sequence
  Description of Artificial Sequence: Synthetic oligonucleotide
acgugacugcucuccaucc

SEQ ID NO: 2050697 - RNA, 19 nt, Artificial Sequence
  Description of Artificial Sequence: Synthetic oligonucleotide
guguaaacgugcugugugg

SEQ ID NO: 2050698 - RNA, 19 nt, Artificial Sequence
  Description of Artificial Sequence: Synthetic oligonucleotide
uugccugugcucacaaacc

SEQ ID NO: 2050699 - RNA, 19 nt, Artificial Sequence
  Description of Artificial Sequence: Synthetic oligonucleotide
gauugaggucagcucagcc

SEQ ID NO: 2050700 - RNA, 19 nt, Artificial Sequence
  Description of Artificial Sequence: Synthetic oligonucleotide
uccugguugggacagugac

SEQ ID NO: 2050701 - RNA, 19 nt, Artificial Sequence
  Description of Artificial Sequence: Synthetic oligonucleotide
gauacccgugcccaccagg

SEQ ID NO: 2050702 - RNA, 19 nt, Artificial Sequence
  Description of Artificial Sequence: Synthetic oligonucleotide
agcgaauuugagcgauagc

SEQ ID NO: 2050703 - RNA, 19 nt, Artificial Sequence
  Description of Artificial Sequence: Synthetic oligonucleotide
acuuccacgugacugcucu

SEQ ID NO: 2050704 - RNA, 19 nt, Artificial Sequence
  Description of Artificial Sequence: Synthetic oligonucleotide
agcguauguaguugucgcg

SEQ ID NO: 2050705 - RNA, 19 nt, Artificial Sequence
  Description of Artificial Sequence: Synthetic oligonucleotide
cucgccaugggucagcgug

SEQ ID NO: 2050706 - RNA, 19 nt, Artificial Sequence
  Description of Artificial Sequence: Synthetic oligonucleotide
aauccagcugagccacggg

SEQ ID NO: 2050707 - RNA, 19 nt, Artificial Sequence
  Description of Artificial Sequence: Synthetic oligonucleotide
agacacauggaaggaauag

SEQ ID NO: 2050708 - RNA, 19 nt, Artificial Sequence
  Description of Artificial Sequence: Synthetic oligonucleotide
agaccuuagcgucggggcg

SEQ ID NO: 2050709 - RNA, 19 nt, Artificial Sequence
  Description of Artificial Sequence: Synthetic oligonucleotide
uugacggcccucacgcagg

SEQ ID NO: 2050710 - RNA, 19 nt, Artificial Sequence
  Description of Artificial Sequence: Synthetic oligonucleotide
guaguugucgcgguucagg

SEQ ID NO: 2050711 - RNA, 19 nt, Artificial Sequence
  Description of Artificial Sequence: Synthetic oligonucleotide
aguccgauaugucuaugca

SEQ ID NO: 2050712 - RNA, 19 nt, Artificial Sequence
  Description of Artificial Sequence: Synthetic oligonucleotide
uaguugucgcgguucaggc

SEQ ID NO: 2050713 - RNA, 19 nt, Artificial Sequence
  Description of Artificial Sequence: Synthetic oligonucleotide
guccgauaugucuaugcag

SEQ ID NO: 2050714 - RNA, 19 nt, Artificial Sequence
  Description of Artificial Sequence: Synthetic oligonucleotide
cagaccuuagcgucggggc

SEQ ID NO: 2050715 - RNA, 19 nt, Artificial Sequence
  Description of Artificial Sequence: Synthetic oligonucleotide
ugccugugcucacaaacca

SEQ ID NO: 2050716 - RNA, 19 nt, Artificial Sequence
  Description of Artificial Sequence: Synthetic oligonucleotide
ugugcucacaaaccagcgu

SEQ ID NO: 2050717 - RNA, 19 nt, Artificial Sequence
  Description of Artificial Sequence: Synthetic oligonucleotide
gagaaaaucugggaacuga

SEQ ID NO: 2050718 - RNA, 19 nt, Artificial Sequence
  Description of Artificial Sequence: Synthetic oligonucleotide
augccaucaggggugagcg

SEQ ID NO: 2050719 - RNA, 19 nt, Artificial Sequence
  Description of Artificial Sequence: Synthetic oligonucleotide
uugauccggucacagauuu

SEQ ID NO: 2050720 - RNA, 19 nt, Artificial Sequence
  Description of Artificial Sequence: Synthetic oligonucleotide
ugagccacgggugucuugc

SEQ ID NO: 2050721 - RNA, 19 nt, Artificial Sequence
  Description of Artificial Sequence: Synthetic oligonucleotide
acgacagagcugcugaccu

SEQ ID NO: 2050722 - RNA, 19 nt, Artificial Sequence
  Description of Artificial Sequence: Synthetic oligonucleotide
cacaggaagcgaauuugag

SEQ ID NO: 2050723 - RNA, 19 nt, Artificial Sequence
  Description of Artificial Sequence: Synthetic oligonucleotide
cucgugcagacgcagcugg

SEQ ID NO: 2050724 - RNA, 19 nt, Artificial Sequence
  Description of Artificial Sequence: Synthetic oligonucleotide
acgggugucuugcugcccg

SEQ ID NO: 2050725 - RNA, 19 nt, Artificial Sequence
  Description of Artificial Sequence: Synthetic oligonucleotide
cugugcucacaaaccagcg

SEQ ID NO: 2050726 - RNA, 19 nt, Artificial Sequence
  Description of Artificial Sequence: Synthetic oligonucleotide
uguaaacgugcugugugga

SEQ ID NO: 2050727 - RNA, 19 nt, Artificial Sequence
  Description of Artificial Sequence: Synthetic oligonucleotide
cauagugccuuucucuguc

SEQ ID NO: 2050728 - RNA, 19 nt, Artificial Sequence
  Description of Artificial Sequence: Synthetic oligonucleotide
caggcauuaagcaaguugu

SEQ ID NO: 2050729 - RNA, 19 nt, Artificial Sequence
  Description of Artificial Sequence: Synthetic oligonucleotide
gugcucacaaaccagcguc

SEQ ID NO: 2050730 - RNA, 19 nt, Artificial Sequence
  Description of Artificial Sequence: Synthetic oligonucleotide
auuaagcaaguuguccuug

SEQ ID NO: 2050731 - RNA, 19 nt, Artificial Sequence
  Description of Artificial Sequence: Synthetic oligonucleotide
gcgaauuugagcgauagca

SEQ ID NO: 2050732 - RNA, 19 nt, Artificial Sequence
  Description of Artificial Sequence: Synthetic oligonucleotide
uucucaggcuuuccaacgu

SEQ ID NO: 2050733 - RNA, 19 nt, Artificial Sequence
  Description of Artificial Sequence: Synthetic oligonucleotide
uucuacacuccaguuugag

SEQ ID NO: 2050734 - RNA, 19 nt, Artificial Sequence
  Description of Artificial Sequence: Synthetic oligonucleotide
uugggacagugacccagcg

SEQ ID NO: 2050735 - RNA, 19 nt, Artificial Sequence
  Description of Artificial Sequence: Synthetic oligonucleotide
gauggugacagcgcacacc

SEQ ID NO: 2050736 - RNA, 19 nt, Artificial Sequence
  Description of Artificial Sequence: Synthetic oligonucleotide
uccgaugggaagggcaccg

SEQ ID NO: 2050737 - RNA, 19 nt, Artificial Sequence
  Description of Artificial Sequence: Synthetic oligonucleotide
aagcagaccuuagcgucgg

SEQ ID NO: 2050738 - RNA, 19 nt, Artificial Sequence
  Description of Artificial Sequence: Synthetic oligonucleotide
cauccgaugggaagggcac

SEQ ID NO: 2050739 - RNA, 19 nt, Artificial Sequence
  Description of Artificial Sequence: Synthetic oligonucleotide
guugucgcgguucaggcaa

SEQ ID NO: 2050740 - RNA, 19 nt, Artificial Sequence
  Description of Artificial Sequence: Synthetic oligonucleotide
ucgcgguucaggcaaucca

SEQ ID NO: 2050741 - RNA, 19 nt, Artificial Sequence
  Description of Artificial Sequence: Synthetic oligonucleotide
ugcaggacuuccacgugac

SEQ ID NO: 2050742 - RNA, 19 nt, Artificial Sequence
  Description of Artificial Sequence: Synthetic oligonucleotide
auggaaggaauaggccggc

SEQ ID NO: 2050743 - RNA, 19 nt, Artificial Sequence
  Description of Artificial Sequence: Synthetic oligonucleotide
uacacuccaguuugaggcu

SEQ ID NO: 2050744 - RNA, 19 nt, Artificial Sequence
  Description of Artificial Sequence: Synthetic oligonucleotide
gacccagcgagaaaaucug

SEQ ID NO: 2050745 - RNA, 19 nt, Artificial Sequence
  Description of Artificial Sequence: Synthetic oligonucleotide
ugaugcgcggugugggugc

SEQ ID NO: 2050746 - RNA, 19 nt, Artificial Sequence
  Description of Artificial Sequence: Synthetic oligonucleotide
uccaacgugcaggacuucc

SEQ ID NO: 2050747 - RNA, 19 nt, Artificial Sequence
  Description of Artificial Sequence: Synthetic oligonucleotide
ggcauuaagcaaguugucc

SEQ ID NO: 2050748 - RNA, 19 nt, Artificial Sequence
  Description of Artificial Sequence: Synthetic oligonucleotide
cagggugauagaugagccc

SEQ ID NO: 2050749 - RNA, 19 nt, Artificial Sequence
  Description of Artificial Sequence: Synthetic oligonucleotide
uuugauccggucacagauu

SEQ ID NO: 2050750 - RNA, 19 nt, Artificial Sequence
  Description of Artificial Sequence: Synthetic oligonucleotide
uuucuacacuccaguuuga

SEQ ID NO: 2050751 - RNA, 19 nt, Artificial Sequence
  Description of Artificial Sequence: Synthetic oligonucleotide
guacggguguccuccaggc

SEQ ID NO: 2050752 - RNA, 19 nt, Artificial Sequence
  Description of Artificial Sequence: Synthetic oligonucleotide
auaugucuaugcagcuagc

SEQ ID NO: 2050753 - RNA, 19 nt, Artificial Sequence
  Description of Artificial Sequence: Synthetic oligonucleotide
acauagugccuuucucugu

SEQ ID NO: 2050754 - RNA, 19 nt, Artificial Sequence
  Description of Artificial Sequence: Synthetic oligonucleotide
acacgacagagcugcugac

SEQ ID NO: 2050755 - RNA, 19 nt, Artificial Sequence
  Description of Artificial Sequence: Synthetic oligonucleotide
acggguguccuccaggcau

SEQ ID NO: 2050756 - RNA, 19 nt, Artificial Sequence
  Description of Artificial Sequence: Synthetic oligonucleotide
cuuuccaacgugcaggacu

SEQ ID NO: 2050757 - RNA, 19 nt, Artificial Sequence
  Description of Artificial Sequence: Synthetic oligonucleotide
auacccgugcccaccaggg

SEQ ID NO: 2050758 - RNA, 19 nt, Artificial Sequence
  Description of Artificial Sequence: Synthetic oligonucleotide
ggagaugagggugugacuc

SEQ ID NO: 2050759 - RNA, 19 nt, Artificial Sequence
  Description of Artificial Sequence: Synthetic oligonucleotide
auguaguugucgcgguuca

SEQ ID NO: 2050760 - RNA, 19 nt, Artificial Sequence
  Description of Artificial Sequence: Synthetic oligonucleotide
ggagcguauguaguugucg

SEQ ID NO: 2050761 - RNA, 19 nt, Artificial Sequence
  Description of Artificial Sequence: Synthetic oligonucleotide
caauccagcugagccacgg

SEQ ID NO: 2050762 - RNA, 19 nt, Artificial Sequence
  Description of Artificial Sequence: Synthetic oligonucleotide
aguuugaggcugugguacu

SEQ ID NO: 2050763 - RNA, 19 nt, Artificial Sequence
  Description of Artificial Sequence: Synthetic oligonucleotide
uuagcgucggggcgugaca

SEQ ID NO: 2050764 - RNA, 19 nt, Artificial Sequence
  Description of Artificial Sequence: Synthetic oligonucleotide
accaccucgccauggguca

SEQ ID NO: 2050765 - RNA, 19 nt, Artificial Sequence
  Description of Artificial Sequence: Synthetic oligonucleotide
ccugugcucacaaaccagc

SEQ ID NO: 2050766 - RNA, 19 nt, Artificial Sequence
  Description of Artificial Sequence: Synthetic oligonucleotide
auuugagcgauagcacaca

SEQ ID NO: 2050767 - RNA, 19 nt, Artificial Sequence
  Description of Artificial Sequence: Synthetic oligonucleotide
ucuggccguccgcagacac

SEQ ID NO: 2050768 - RNA, 19 nt, Artificial Sequence
  Description of Artificial Sequence: Synthetic oligonucleotide
ugggacagugacccagcga

SEQ ID NO: 2050769 - RNA, 19 nt, Artificial Sequence
  Description of Artificial Sequence: Synthetic oligonucleotide
caugggucagcgugugcag

SEQ ID NO: 2050770 - RNA, 19 nt, Artificial Sequence
  Description of Artificial Sequence: Synthetic oligonucleotide
guccguacacgacagagcu

SEQ ID NO: 2050771 - RNA, 19 nt, Artificial Sequence
  Description of Artificial Sequence: Synthetic oligonucleotide
ugcagacgcagcugguacu

SEQ ID NO: 2050772 - RNA, 19 nt, Artificial Sequence
  Description of Artificial Sequence: Synthetic oligonucleotide
gcguauguaguugucgcgg

SEQ ID NO: 2050773 - RNA, 19 nt, Artificial Sequence
  Description of Artificial Sequence: Synthetic oligonucleotide
uucaggcaauccagcugag

SEQ ID NO: 2050774 - RNA, 19 nt, Artificial Sequence
  Description of Artificial Sequence: Synthetic oligonucleotide
aguugucgcgguucaggca

SEQ ID NO: 2050775 - RNA, 19 nt, Artificial Sequence
  Description of Artificial Sequence: Synthetic oligonucleotide
acagcgcacaccaccucgc

SEQ ID NO: 2050776 - RNA, 19 nt, Artificial Sequence
  Description of Artificial Sequence: Synthetic oligonucleotide
caacgugcaggacuuccac

SEQ ID NO: 2050777 - RNA, 19 nt, Artificial Sequence
  Description of Artificial Sequence: Synthetic oligonucleotide
uacugagcuuggagaaacu

SEQ ID NO: 2050778 - RNA, 19 nt, Artificial Sequence
  Description of Artificial Sequence: Synthetic oligonucleotide
uccguacacgacagagcug

SEQ ID NO: 2050779 - RNA, 19 nt, Artificial Sequence
  Description of Artificial Sequence: Synthetic oligonucleotide
aaaggcuggccggacugca

SEQ ID NO: 2050780 - RNA, 19 nt, Artificial Sequence
  Description of Artificial Sequence: Synthetic oligonucleotide
caggagaagcagaccuuag

SEQ ID NO: 2050781 - RNA, 19 nt, Artificial Sequence
  Description of Artificial Sequence: Synthetic oligonucleotide
cacgugacugcucuccauc

SEQ ID NO: 2050782 - RNA, 19 nt, Artificial Sequence
  Description of Artificial Sequence: Synthetic oligonucleotide
ccguacacgacagagcugc

SEQ ID NO: 2050783 - RNA, 19 nt, Artificial Sequence
  Description of Artificial Sequence: Synthetic oligonucleotide
ccggucacagauuuccagg

SEQ ID NO: 2050784 - RNA, 19 nt, Artificial Sequence
  Description of Artificial Sequence: Synthetic oligonucleotide
aggaagcgaauuugagcga

SEQ ID NO: 2050785 - RNA, 19 nt, Artificial Sequence
  Description of Artificial Sequence: Synthetic oligonucleotide
gccgcugauggugacagcg

SEQ ID NO: 2050786 - RNA, 19 nt, Artificial Sequence
  Description of Artificial Sequence: Synthetic oligonucleotide
gcauuaagcaaguuguccu

SEQ ID NO: 2050787 - RNA, 19 nt, Artificial Sequence
  Description of Artificial Sequence: Synthetic oligonucleotide
uugccgcccguguaaacgu

SEQ ID NO: 2050788 - RNA, 19 nt, Artificial Sequence
  Description of Artificial Sequence: Synthetic oligonucleotide
gauagcacacagcucucgu

SEQ ID NO: 2050789 - RNA, 19 nt, Artificial Sequence
  Description of Artificial Sequence: Synthetic oligonucleotide
aggcauuaagcaaguuguc

SEQ ID NO: 2050790 - RNA, 19 nt, Artificial Sequence
  Description of Artificial Sequence: Synthetic oligonucleotide
augagccccggagaugagg

SEQ ID NO: 2050791 - RNA, 19 nt, Artificial Sequence
  Description of Artificial Sequence: Synthetic oligonucleotide
gugcagacgcagcugguac

SEQ ID NO: 2050792 - RNA, 19 nt, Artificial Sequence
  Description of Artificial Sequence: Synthetic oligonucleotide
auccgaugggaagggcacc

SEQ ID NO: 2050793 - RNA, 19 nt, Artificial Sequence
  Description of Artificial Sequence: Synthetic oligonucleotide
gguugggacagugacccag

SEQ ID NO: 2050794 - RNA, 19 nt, Artificial Sequence
  Description of Artificial Sequence: Synthetic oligonucleotide
caggugcaucacauagugc

SEQ ID NO: 2050795 - RNA, 19 nt, Artificial Sequence
  Description of Artificial Sequence: Synthetic oligonucleotide
cacgacagagcugcugacc

SEQ ID NO: 2050796 - RNA, 19 nt, Artificial Sequence
  Description of Artificial Sequence: Synthetic oligonucleotide
uagcgucggggcgugacag

SEQ ID NO: 2050797 - RNA, 19 nt, Artificial Sequence
  Description of Artificial Sequence: Synthetic oligonucleotide
caucuggccguccgcagac

SEQ ID NO: 2050798 - RNA, 19 nt, Artificial Sequence
  Description of Artificial Sequence: Synthetic oligonucleotide
gcggauugaggucagcuca

SEQ ID NO: 2050799 - RNA, 19 nt, Artificial Sequence
  Description of Artificial Sequence: Synthetic oligonucleotide
acuugaaaggcuggccgga

SEQ ID NO: 2050800 - RNA, 19 nt, Artificial Sequence
  Description of Artificial Sequence: Synthetic oligonucleotide
agcuagccccaucugugca

SEQ ID NO: 2050801 - RNA, 19 nt, Artificial Sequence
  Description of Artificial Sequence: Synthetic oligonucleotide
cagccagcgcauagcaggc

SEQ ID NO: 2050802 - RNA, 19 nt, Artificial Sequence
  Description of Artificial Sequence: Synthetic oligonucleotide
ggaauaggccggcuuugcc

SEQ ID NO: 2050803 - RNA, 19 nt, Artificial Sequence
  Description of Artificial Sequence: Synthetic oligonucleotide
cacgaucaggcucugccca

SEQ ID NO: 2050804 - RNA, 19 nt, Artificial Sequence
  Description of Artificial Sequence: Synthetic oligonucleotide
cacaccuucacacagccuu

SEQ ID NO: 2050805 - RNA, 19 nt, Artificial Sequence
  Description of Artificial Sequence: Synthetic oligonucleotide
gccagcgcauagcaggccg

SEQ ID NO: 2050806 - RNA, 19 nt, Artificial Sequence
  Description of Artificial Sequence: Synthetic oligonucleotide
ucgcuggccagcuuuucua

SEQ ID NO: 2050807 - RNA, 19 nt, Artificial Sequence
  Description of Artificial Sequence: Synthetic oligonucleotide
aaaccagcguccacaggaa

SEQ ID NO: 2050808 - RNA, 19 nt, Artificial Sequence
  Description of Artificial Sequence: Synthetic oligonucleotide
uacggguguccuccaggca

SEQ ID NO: 2050809 - RNA, 19 nt, Artificial Sequence
  Description of Artificial Sequence: Synthetic oligonucleotide
gagcguccguacacgacag

SEQ ID NO: 2050810 - RNA, 19 nt, Artificial Sequence
  Description of Artificial Sequence: Synthetic oligonucleotide
cguguaaacgugcugugug

SEQ ID NO: 2050811 - RNA, 19 nt, Artificial Sequence
  Description of Artificial Sequence: Synthetic oligonucleotide
ggugauagaugagccccgg

SEQ ID NO: 2050812 - RNA, 19 nt, Artificial Sequence
  Description of Artificial Sequence: Synthetic oligonucleotide
caccggcugcaucuggccg

SEQ ID NO: 2050813 - RNA, 19 nt, Artificial Sequence
  Description of Artificial Sequence: Synthetic oligonucleotide
cuuagcgucggggcgugac

SEQ ID NO: 2050814 - RNA, 19 nt, Artificial Sequence
  Description of Artificial Sequence: Synthetic oligonucleotide
cagcgugugcagcugccgc

SEQ ID NO: 2050815 - RNA, 19 nt, Artificial Sequence
  Description of Artificial Sequence: Synthetic oligonucleotide
ucccguaguccgauauguc

SEQ ID NO: 2050816 - RNA, 19 nt, Artificial Sequence
  Description of Artificial Sequence: Synthetic oligonucleotide
aucaggcucugcccaucag

SEQ ID NO: 2050817 - RNA, 19 nt, Artificial Sequence
  Description of Artificial Sequence: Synthetic oligonucleotide
cugauggugacagcgcaca

SEQ ID NO: 2050818 - RNA, 19 nt, Artificial Sequence
  Description of Artificial Sequence: Synthetic oligonucleotide
uggccguccgcagacacau

SEQ ID NO: 2050819 - RNA, 19 nt, Artificial Sequence
  Description of Artificial Sequence: Synthetic oligonucleotide
caccagggcauccgauggg

SEQ ID NO: 2050820 - RNA, 19 nt, Artificial Sequence
  Description of Artificial Sequence: Synthetic oligonucleotide
cuugaaaggcuggccggac

SEQ ID NO: 2050821 - RNA, 19 nt, Artificial Sequence
  Description of Artificial Sequence: Synthetic oligonucleotide
auaggccggcuuugccccg

SEQ ID NO: 2050822 - RNA, 19 nt, Artificial Sequence
  Description of Artificial Sequence: Synthetic oligonucleotide
gccacgggugucuugcugc

SEQ ID NO: 2050823 - RNA, 19 nt, Artificial Sequence
  Description of Artificial Sequence: Synthetic oligonucleotide
uggccggacugcagcgggg

SEQ ID NO: 2050824 - RNA, 19 nt, Artificial Sequence
  Description of Artificial Sequence: Synthetic oligonucleotide
cuggcuucaccacccacga

SEQ ID NO: 2050825 - RNA, 19 nt, Artificial Sequence
  Description of Artificial Sequence: Synthetic oligonucleotide
acgcagcugguacuucuca

SEQ ID NO: 2050826 - RNA, 19 nt, Artificial Sequence
  Description of Artificial Sequence: Synthetic oligonucleotide
cuggcucacgucccacacc

SEQ ID NO: 2050827 - RNA, 19 nt, Artificial Sequence
  Description of Artificial Sequence: Synthetic oligonucleotide
agccccggagaugagggug

SEQ ID NO: 2050828 - RNA, 19 nt, Artificial Sequence
  Description of Artificial Sequence: Synthetic oligonucleotide
ggcaauccagcugagccac

SEQ ID NO: 2050829 - RNA, 19 nt, Artificial Sequence
  Description of Artificial Sequence: Synthetic oligonucleotide
agccacgggugucuugcug

SEQ ID NO: 2050830 - RNA, 19 nt, Artificial Sequence
  Description of Artificial Sequence: Synthetic oligonucleotide
acccagcgagaaaaucugg

SEQ ID NO: 2050831 - RNA, 19 nt, Artificial Sequence
  Description of Artificial Sequence: Synthetic oligonucleotide
agcgcacaccaccucgcca

SEQ ID NO: 2050832 - RNA, 19 nt, Artificial Sequence
  Description of Artificial Sequence: Synthetic oligonucleotide
aggagcguauguaguuguc

SEQ ID NO: 2050833 - RNA, 19 nt, Artificial Sequence
  Description of Artificial Sequence: Synthetic oligonucleotide
cugaaguugacggcccuca

SEQ ID NO: 2050834 - RNA, 19 nt, Artificial Sequence
  Description of Artificial Sequence: Synthetic oligonucleotide
ccaccagggcauccgaugg

SEQ ID NO: 2050835 - RNA, 19 nt, Artificial Sequence
  Description of Artificial Sequence: Synthetic oligonucleotide
agcaggccggggcggauug

SEQ ID NO: 2050836 - RNA, 19 nt, Artificial Sequence
  Description of Artificial Sequence: Synthetic oligonucleotide
agccuugaugcgcggugug

SEQ ID NO: 2050837 - RNA, 19 nt, Artificial Sequence
  Description of Artificial Sequence: Synthetic oligonucleotide
cagugacccagcgagaaaa

SEQ ID NO: 2050838 - RNA, 19 nt, Artificial Sequence
  Description of Artificial Sequence: Synthetic oligonucleotide
gggcgugacagccagcgca

SEQ ID NO: 2050839 - RNA, 19 nt, Artificial Sequence
  Description of Artificial Sequence: Synthetic oligonucleotide
accagggcauccgauggga

SEQ ID NO: 2050840 - RNA, 19 nt, Artificial Sequence
  Description of Artificial Sequence: Synthetic oligonucleotide
ugacagcgcacaccaccuc

SEQ ID NO: 2050841 - RNA, 19 nt, Artificial Sequence
  Description of Artificial Sequence: Synthetic oligonucleotide
ggucacagauuuccaggac

SEQ ID NO: 2050842 - RNA, 19 nt, Artificial Sequence
  Description of Artificial Sequence: Synthetic oligonucleotide
aaaugccaucaggggugag

SEQ ID NO: 2050843 - RNA, 19 nt, Artificial Sequence
  Description of Artificial Sequence: Synthetic oligonucleotide
cuuugccgcccguguaaac

SEQ ID NO: 2050844 - RNA, 19 nt, Artificial Sequence
  Description of Artificial Sequence: Synthetic oligonucleotide
ugccgcccguguaaacgug

SEQ ID NO: 2050845 - RNA, 19 nt, Artificial Sequence
  Description of Artificial Sequence: Synthetic oligonucleotide
gcguccguacacgacagag

SEQ ID NO: 2050846 - RNA, 19 nt, Artificial Sequence
  Description of Artificial Sequence: Synthetic oligonucleotide
agccgcugauggugacagc

SEQ ID NO: 2050847 - RNA, 19 nt, Artificial Sequence
  Description of Artificial Sequence: Synthetic oligonucleotide
cacagcucucgugcagacg

SEQ ID NO: 2050848 - RNA, 19 nt, Artificial Sequence
  Description of Artificial Sequence: Synthetic oligonucleotide
caggggugagcguccguac

SEQ ID NO: 2050849 - RNA, 19 nt, Artificial Sequence
  Description of Artificial Sequence: Synthetic oligonucleotide
ccuugaugcgcgguguggg

SEQ ID NO: 2050850 - RNA, 19 nt, Artificial Sequence
  Description of Artificial Sequence: Synthetic oligonucleotide
gguacuucucaggcuuucc

SEQ ID NO: 2050851 - RNA, 19 nt, Artificial Sequence
  Description of Artificial Sequence: Synthetic oligonucleotide
ucgugcagacgcagcuggu

SEQ ID NO: 2050852 - RNA, 19 nt, Artificial Sequence
  Description of Artificial Sequence: Synthetic oligonucleotide
uugcugcccggcuggcuca

SEQ ID NO: 2050853 - RNA, 19 nt, Artificial Sequence
  Description of Artificial Sequence: Synthetic oligonucleotide
ugcgcggugugggugccgc

SEQ ID NO: 2050854 - RNA, 19 nt, Artificial Sequence
  Description of Artificial Sequence: Synthetic oligonucleotide
cuaugcagcuagccccauc

SEQ ID NO: 2050855 - RNA, 19 nt, Artificial Sequence
  Description of Artificial Sequence: Synthetic oligonucleotide
gggugauagaugagccccg

SEQ ID NO: 2050856 - RNA, 19 nt, Artificial Sequence
  Description of Artificial Sequence: Synthetic oligonucleotide
gugauagaugagccccgga

SEQ ID NO: 2050857 - RNA, 19 nt, Artificial Sequence
  Description of Artificial Sequence: Synthetic oligonucleotide
ggcggauugaggucagcuc

SEQ ID NO: 2050858 - RNA, 19 nt, Artificial Sequence
  Description of Artificial Sequence: Synthetic oligonucleotide
cauuaagcaaguuguccuu

SEQ ID NO: 2050859 - RNA, 19 nt, Artificial Sequence
  Description of Artificial Sequence: Synthetic oligonucleotide
uccacagccgggucccgua

SEQ ID NO: 2050860 - RNA, 19 nt, Artificial Sequence
  Description of Artificial Sequence: Synthetic oligonucleotide
accucgccaugggucagcg

SEQ ID NO: 2050861 - RNA, 19 nt, Artificial Sequence
  Description of Artificial Sequence: Synthetic oligonucleotide
caucaggggugagcguccg

SEQ ID NO: 2050862 - RNA, 19 nt, Artificial Sequence
  Description of Artificial Sequence: Synthetic oligonucleotide
ugacggcccucacgcaggu

SEQ ID NO: 2050863 - RNA, 19 nt, Artificial Sequence
  Description of Artificial Sequence: Synthetic oligonucleotide
guaguccgauaugucuaug

SEQ ID NO: 2050864 - RNA, 19 nt, Artificial Sequence
  Description of Artificial Sequence: Synthetic oligonucleotide
ggcuuuccaacgugcagga

SEQ ID NO: 2050865 - RNA, 19 nt, Artificial Sequence
  Description of Artificial Sequence: Synthetic oligonucleotide
gucgcgguucaggcaaucc

SEQ ID NO: 2050866 - RNA, 19 nt, Artificial Sequence
  Description of Artificial Sequence: Synthetic oligonucleotide
acgaucaggcucugcccau

SEQ ID NO: 2050867 - RNA, 19 nt, Artificial Sequence
  Description of Artificial Sequence: Synthetic oligonucleotide
ggggugagcguccguacac

SEQ ID NO: 2050868 - RNA, 19 nt, Artificial Sequence
  Description of Artificial Sequence: Synthetic oligonucleotide
ccacgaucaggcucugccc

SEQ ID NO: 2050869 - RNA, 19 nt, Artificial Sequence
  Description of Artificial Sequence: Synthetic oligonucleotide
gugacccagcgagaaaauc

SEQ ID NO: 2050870 - RNA, 19 nt, Artificial Sequence
  Description of Artificial Sequence: Synthetic oligonucleotide
uaggccggcuuugccccgg

SEQ ID NO: 2050871 - RNA, 19 nt, Artificial Sequence
  Description of Artificial Sequence: Synthetic oligonucleotide
ccagcgagaaaaucuggga

SEQ ID NO: 2050872 - RNA, 19 nt, Artificial Sequence
  Description of Artificial Sequence: Synthetic oligonucleotide
gacgcagcugguacuucuc

SEQ ID NO: 2050873 - RNA, 19 nt, Artificial Sequence
  Description of Artificial Sequence: Synthetic oligonucleotide
gggugugacucaaaugcca

SEQ ID NO: 2050874 - RNA, 19 nt, Artificial Sequence
  Description of Artificial Sequence: Synthetic oligonucleotide
ggucccguaguccgauaug

SEQ ID NO: 2050875 - RNA, 19 nt, Artificial Sequence
  Description of Artificial Sequence: Synthetic oligonucleotide
agcugccgcgcguggcggg

SEQ ID NO: 2050876 - RNA, 19 nt, Artificial Sequence
  Description of Artificial Sequence: Synthetic oligonucleotide
gggugagcguccguacacg

SEQ ID NO: 2050877 - RNA, 19 nt, Artificial Sequence
  Description of Artificial Sequence: Synthetic oligonucleotide
agcguccacaggaagcgaa

SEQ ID NO: 2050878 - RNA, 19 nt, Artificial Sequence
  Description of Artificial Sequence: Synthetic oligonucleotide
aucccaacggccagccagu

SEQ ID NO: 2050879 - RNA, 19 nt, Artificial Sequence
  Description of Artificial Sequence: Synthetic oligonucleotide
gaugagccccggagaugag

SEQ ID NO: 2050880 - RNA, 19 nt, Artificial Sequence
  Description of Artificial Sequence: Synthetic oligonucleotide
ggugagcguccguacacga

SEQ ID NO: 2050881 - RNA, 19 nt, Artificial Sequence
  Description of Artificial Sequence: Synthetic oligonucleotide
gcuggcucacgucccacac

SEQ ID NO: 2050882 - RNA, 19 nt, Artificial Sequence
  Description of Artificial Sequence: Synthetic oligonucleotide
gagcgauagcacacagcuc

SEQ ID NO: 2050883 - RNA, 19 nt, Artificial Sequence
  Description of Artificial Sequence: Synthetic oligonucleotide
ccaucaggggugagcgucc

SEQ ID NO: 2050884 - RNA, 19 nt, Artificial Sequence
  Description of Artificial Sequence: Synthetic oligonucleotide
gugagcguccguacacgac

SEQ ID NO: 2050885 - RNA, 19 nt, Artificial Sequence
  Description of Artificial Sequence: Synthetic oligonucleotide
gaugcgcggugugggugcc

SEQ ID NO: 2050886 - RNA, 19 nt, Artificial Sequence
  Description of Artificial Sequence: Synthetic oligonucleotide
uggagccgcugauggugac

SEQ ID NO: 2050887 - RNA, 19 nt, Artificial Sequence
  Description of Artificial Sequence: Synthetic oligonucleotide
gcugcaucuggccguccgc

SEQ ID NO: 2050888 - RNA, 19 nt, Artificial Sequence
  Description of Artificial Sequence: Synthetic oligonucleotide
cugagccacgggugucuug

SEQ ID NO: 2050889 - RNA, 19 nt, Artificial Sequence
  Description of Artificial Sequence: Synthetic oligonucleotide
cuuccacgugacugcucuc

SEQ ID NO: 2050890 - RNA, 19 nt, Artificial Sequence
  Description of Artificial Sequence: Synthetic oligonucleotide
caggagcguauguaguugu

SEQ ID NO: 2050891 - RNA, 19 nt, Artificial Sequence
  Description of Artificial Sequence: Synthetic oligonucleotide
gaagcgaauuugagcgaua

SEQ ID NO: 2050892 - RNA, 19 nt, Artificial Sequence
  Description of Artificial Sequence: Synthetic oligonucleotide
caggccggggcggauugag

SEQ ID NO: 2050893 - RNA, 19 nt, Artificial Sequence
  Description of Artificial Sequence: Synthetic oligonucleotide
gccuugaugcgcggugugg

SEQ ID NO: 2050894 - RNA, 19 nt, Artificial Sequence
  Description of Artificial Sequence: Synthetic oligonucleotide
cguccguacacgacagagc

SEQ ID NO: 2050895 - RNA, 19 nt, Artificial Sequence
  Description of Artificial Sequence: Synthetic oligonucleotide
acccacgaucaggcucugc

SEQ ID NO: 2050896 - RNA, 19 nt, Artificial Sequence
  Description of Artificial Sequence: Synthetic oligonucleotide
gaugagggugugacucaaa

SEQ ID NO: 2050897 - RNA, 19 nt, Artificial Sequence
  Description of Artificial Sequence: Synthetic oligonucleotide
uugucgcgguucaggcaau

SEQ ID NO: 2050898 - RNA, 19 nt, Artificial Sequence
  Description of Artificial Sequence: Synthetic oligonucleotide
gcauccgaugggaagggca

SEQ ID NO: 2050899 - RNA, 19 nt, Artificial Sequence
  Description of Artificial Sequence: Synthetic oligonucleotide
agccuuugccgcccgugua

SEQ ID NO: 2050900 - RNA, 19 nt, Artificial Sequence
  Description of Artificial Sequence: Synthetic oligonucleotide
agcguccguacacgacaga

SEQ ID NO: 2050901 - RNA, 19 nt, Artificial Sequence
  Description of Artificial Sequence: Synthetic oligonucleotide
gcccguacggguguccucc

SEQ ID NO: 2050902 - RNA, 19 nt, Artificial Sequence
  Description of Artificial Sequence: Synthetic oligonucleotide
gcccggcuggcucacgucc

SEQ ID NO: 2050903 - RNA, 19 nt, Artificial Sequence
  Description of Artificial Sequence: Synthetic oligonucleotide
gugacagcgcacaccaccu

SEQ ID NO: 2050904 - RNA, 19 nt, Artificial Sequence
  Description of Artificial Sequence: Synthetic oligonucleotide
gccccaucugugcaggaga

SEQ ID NO: 2050905 - RNA, 19 nt, Artificial Sequence
  Description of Artificial Sequence: Synthetic oligonucleotide
gaccuuagcgucggggcgu

SEQ ID NO: 2050906 - RNA, 19 nt, Artificial Sequence
  Description of Artificial Sequence: Synthetic oligonucleotide
uggcuucaccacccacgau

SEQ ID NO: 2050907 - RNA, 19 nt, Artificial Sequence
  Description of Artificial Sequence: Synthetic oligonucleotide
cccguguaaacgugcugug

SEQ ID NO: 2050908 - RNA, 19 nt, Artificial Sequence
  Description of Artificial Sequence: Synthetic oligonucleotide
cuugaugcgcggugugggu

SEQ ID NO: 2050909 - RNA, 19 nt, Artificial Sequence
  Description of Artificial Sequence: Synthetic oligonucleotide
guccacaggaagcgaauuu

SEQ ID NO: 2050910 - RNA, 19 nt, Artificial Sequence
  Description of Artificial Sequence: Synthetic oligonucleotide
cggauugaggucagcucag

SEQ ID NO: 2050911 - RNA, 19 nt, Artificial Sequence
  Description of Artificial Sequence: Synthetic oligonucleotide
auccggucacagauuucca

SEQ ID NO: 2050912 - RNA, 19 nt, Artificial Sequence
  Description of Artificial Sequence: Synthetic oligonucleotide
ccgcugauggugacagcgc

SEQ ID NO: 2050913 - RNA, 19 nt, Artificial Sequence
  Description of Artificial Sequence: Synthetic oligonucleotide
gcgagaaaaucugggaacu

SEQ ID NO: 2050914 - RNA, 19 nt, Artificial Sequence
  Description of Artificial Sequence: Synthetic oligonucleotide
ugucgcgguucaggcaauc

SEQ ID NO: 2050915 - RNA, 19 nt, Artificial Sequence
  Description of Artificial Sequence: Synthetic oligonucleotide
ucggggcgugacagccagc

SEQ ID NO: 2050916 - RNA, 19 nt, Artificial Sequence
  Description of Artificial Sequence: Synthetic oligonucleotide
ggauacccgugcccaccag

SEQ ID NO: 2050917 - RNA, 19 nt, Artificial Sequence
  Description of Artificial Sequence: Synthetic oligonucleotide
ugcccggcuggcucacguc

SEQ ID NO: 2050918 - RNA, 19 nt, Artificial Sequence
  Description of Artificial Sequence: Synthetic oligonucleotide
cuggccguccgcagacaca

SEQ ID NO: 2050919 - RNA, 19 nt, Artificial Sequence
  Description of Artificial Sequence: Synthetic oligonucleotide
ccacgggugucuugcugcc

SEQ ID NO: 2050920 - RNA, 19 nt, Artificial Sequence
  Description of Artificial Sequence: Synthetic oligonucleotide
aggccggcuuugccccggg

SEQ ID NO: 2050921 - RNA, 19 nt, Artificial Sequence
  Description of Artificial Sequence: Synthetic oligonucleotide
cgugacugcucuccauccc

SEQ ID NO: 2050922 - RNA, 19 nt, Artificial Sequence
  Description of Artificial Sequence: Synthetic oligonucleotide
cuuugccccggggaugcca

SEQ ID NO: 2050923 - RNA, 19 nt, Artificial Sequence
  Description of Artificial Sequence: Synthetic oligonucleotide
ggaaggaauaggccggcuu

SEQ ID NO: 2050924 - RNA, 19 nt, Artificial Sequence
  Description of Artificial Sequence: Synthetic oligonucleotide
ccguaguccgauaugucua

SEQ ID NO: 2050925 - RNA, 19 nt, Artificial Sequence
  Description of Artificial Sequence: Synthetic oligonucleotide
ccaacgugcaggacuucca

SEQ ID NO: 2050926 - RNA, 19 nt, Artificial Sequence
  Description of Artificial Sequence: Synthetic oligonucleotide
ggaagcgaauuugagcgau

SEQ ID NO: 2050927 - RNA, 19 nt, Artificial Sequence
  Description of Artificial Sequence: Synthetic oligonucleotide
aguccacagccgggucccg

SEQ ID NO: 2050928 - RNA, 19 nt, Artificial Sequence
  Description of Artificial Sequence: Synthetic oligonucleotide
gcgcacaguguuguccaag

SEQ ID NO: 2050929 - RNA, 19 nt, Artificial Sequence
  Description of Artificial Sequence: Synthetic oligonucleotide
gcagacacauggaaggaau

SEQ ID NO: 2050930 - RNA, 19 nt, Artificial Sequence
  Description of Artificial Sequence: Synthetic oligonucleotide
cggggcgugacagccagcg

SEQ ID NO: 2050931 - RNA, 19 nt, Artificial Sequence
  Description of Artificial Sequence: Synthetic oligonucleotide
cucgcuggccagcuuuucu

SEQ ID NO: 2050932 - RNA, 19 nt, Artificial Sequence
  Description of Artificial Sequence: Synthetic oligonucleotide
ccggggaugccaggcaggg

SEQ ID NO: 2050933 - RNA, 19 nt, Artificial Sequence
  Description of Artificial Sequence: Synthetic oligonucleotide
gccuuugccgcccguguaa

SEQ ID NO: 2050934 - RNA, 19 nt, Artificial Sequence
  Description of Artificial Sequence: Synthetic oligonucleotide
gcaaguuguccuugccugu

SEQ ID NO: 2050935 - RNA, 19 nt, Artificial Sequence
  Description of Artificial Sequence: Synthetic oligonucleotide
cuggcccguacgggugucc

SEQ ID NO: 2050936 - RNA, 19 nt, Artificial Sequence
  Description of Artificial Sequence: Synthetic oligonucleotide
uuccaacgugcaggacuuc

SEQ ID NO: 2050937 - RNA, 19 nt, Artificial Sequence
  Description of Artificial Sequence: Synthetic oligonucleotide
ucccaacggccagccaguc

SEQ ID NO: 2050938 - RNA, 19 nt, Artificial Sequence
  Description of Artificial Sequence: Synthetic oligonucleotide
cagacgcagcugguacuuc

SEQ ID NO: 2050939 - RNA, 19 nt, Artificial Sequence
  Description of Artificial Sequence: Synthetic oligonucleotide
ggugcaucacauagugccu

SEQ ID NO: 2050940 - RNA, 19 nt, Artificial Sequence
  Description of Artificial Sequence: Synthetic oligonucleotide
gcggugugggugccgccag

SEQ ID NO: 2050941 - RNA, 19 nt, Artificial Sequence
  Description of Artificial Sequence: Synthetic oligonucleotide
gcaauccagcugagccacg

SEQ ID NO: 2050942 - RNA, 19 nt, Artificial Sequence
  Description of Artificial Sequence: Synthetic oligonucleotide
ccacccacgaucaggcucu

SEQ ID NO: 2050943 - RNA, 19 nt, Artificial Sequence
  Description of Artificial Sequence: Synthetic oligonucleotide
gugcaucacauagugccuu

SEQ ID NO: 2050944 - RNA, 19 nt, Artificial Sequence
  Description of Artificial Sequence: Synthetic oligonucleotide
gccgcccguguaaacgugc

SEQ ID NO: 2050945 - RNA, 19 nt, Artificial Sequence
  Description of Artificial Sequence: Synthetic oligonucleotide
cccggcuggcucacguccc

SEQ ID NO: 2050946 - RNA, 19 nt, Artificial Sequence
  Description of Artificial Sequence: Synthetic oligonucleotide
aucuggccguccgcagaca

SEQ ID NO: 2050947 - RNA, 19 nt, Artificial Sequence
  Description of Artificial Sequence: Synthetic oligonucleotide
ggggcgugacagccagcgc

SEQ ID NO: 2050948 - RNA, 19 nt, Artificial Sequence
  Description of Artificial Sequence: Synthetic oligonucleotide
gccaugggucagcgugugc

SEQ ID NO: 2050949 - RNA, 19 nt, Artificial Sequence
  Description of Artificial Sequence: Synthetic oligonucleotide
gcgcacaccaccucgccau

SEQ ID NO: 2050950 - RNA, 19 nt, Artificial Sequence
  Description of Artificial Sequence: Synthetic oligonucleotide
ugcugcccggcuggcucac

SEQ ID NO: 2050951 - RNA, 19 nt, Artificial Sequence
  Description of Artificial Sequence: Synthetic oligonucleotide
gcugccgcgcguggcgggg

SEQ ID NO: 2050952 - RNA, 19 nt, Artificial Sequence
  Description of Artificial Sequence: Synthetic oligonucleotide
cagccuuugccgcccgugu

SEQ ID NO: 2050953 - RNA, 19 nt, Artificial Sequence
  Description of Artificial Sequence: Synthetic oligonucleotide
ccgaugggaagggcaccgg

SEQ ID NO: 2050954 - RNA, 19 nt, Artificial Sequence
  Description of Artificial Sequence: Synthetic oligonucleotide
gggucccguaguccgauau

SEQ ID NO: 2050955 - RNA, 19 nt, Artificial Sequence
  Description of Artificial Sequence: Synthetic oligonucleotide
gggcggauugaggucagcu

SEQ ID NO: 2050956 - RNA, 19 nt, Artificial Sequence
  Description of Artificial Sequence: Synthetic oligonucleotide
ccgauaugucuaugcagcu

SEQ ID NO: 2050957 - RNA, 19 nt, Artificial Sequence
  Description of Artificial Sequence: Synthetic oligonucleotide
gcgauagcacacagcucuc

SEQ ID NO: 2050958 - RNA, 19 nt, Artificial Sequence
  Description of Artificial Sequence: Synthetic oligonucleotide
gagccacgggugucuugcu

SEQ ID NO: 2050959 - RNA, 19 nt, Artificial Sequence
  Description of Artificial Sequence: Synthetic oligonucleotide
ccccaucugugcaggagaa

SEQ ID NO: 2050960 - RNA, 19 nt, Artificial Sequence
  Description of Artificial Sequence: Synthetic oligonucleotide
ggccggcuuugccccgggg

SEQ ID NO: 2050961 - RNA, 19 nt, Artificial Sequence
  Description of Artificial Sequence: Synthetic oligonucleotide
ccguacggguguccuccag

SEQ ID NO: 2050962 - RNA, 19 nt, Artificial Sequence
  Description of Artificial Sequence: Synthetic oligonucleotide
ggugugggugccgccaggu

SEQ ID NO: 2050963 - RNA, 19 nt, Artificial Sequence
  Description of Artificial Sequence: Synthetic oligonucleotide
cguccgcagacacauggaa

SEQ ID NO: 2050964 - RNA, 19 nt, Artificial Sequence
  Description of Artificial Sequence: Synthetic oligonucleotide
cgugugcagcugccgcgcg

SEQ ID NO: 2050965 - RNA, 19 nt, Artificial Sequence
  Description of Artificial Sequence: Synthetic oligonucleotide
cucagccuugaugcgcggu

SEQ ID NO: 2050966 - RNA, 19 nt, Artificial Sequence
  Description of Artificial Sequence: Synthetic oligonucleotide
gcagcuugcaggagcguau

SEQ ID NO: 2050967 - RNA, 19 nt, Artificial Sequence
  Description of Artificial Sequence: Synthetic oligonucleotide
cagcguccacaggaagcga

SEQ ID NO: 2050968 - RNA, 19 nt, Artificial Sequence
  Description of Artificial Sequence: Synthetic oligonucleotide
gacggcccucacgcagguc

SEQ ID NO: 2050969 - RNA, 19 nt, Artificial Sequence
  Description of Artificial Sequence: Synthetic oligonucleotide
ggcccguacggguguccuc

SEQ ID NO: 2050970 - RNA, 19 nt, Artificial Sequence
  Description of Artificial Sequence: Synthetic oligonucleotide
cguauguaguugucgcggu

SEQ ID NO: 2050971 - RNA, 19 nt, Artificial Sequence
  Description of Artificial Sequence: Synthetic oligonucleotide
cacagccgggucccguagu

SEQ ID NO: 2050972 - RNA, 19 nt, Artificial Sequence
  Description of Artificial Sequence: Synthetic oligonucleotide
cgauaugucuaugcagcua

SEQ ID NO: 2050973 - RNA, 19 nt, Artificial Sequence
  Description of Artificial Sequence: Synthetic oligonucleotide
ccagggcauccgaugggaa

SEQ ID NO: 2050974 - RNA, 19 nt, Artificial Sequence
  Description of Artificial Sequence: Synthetic oligonucleotide
ccgcagacacauggaagga

SEQ ID NO: 2050975 - RNA, 19 nt, Artificial Sequence
  Description of Artificial Sequence: Synthetic oligonucleotide
cguaguccgauaugucuau

SEQ ID NO: 2050976 - RNA, 19 nt, Artificial Sequence
  Description of Artificial Sequence: Synthetic oligonucleotide
gcagacgcagcugguacuu

SEQ ID NO: 2050977 - RNA, 19 nt, Artificial Sequence
  Description of Artificial Sequence: Synthetic oligonucleotide
ggcgugacagccagcgcau

SEQ ID NO: 2050978 - RNA, 19 nt, Artificial Sequence
  Description of Artificial Sequence: Synthetic oligonucleotide
ggggcggauugaggucagc

SEQ ID NO: 2050979 - RNA, 19 nt, Artificial Sequence
  Description of Artificial Sequence: Synthetic oligonucleotide
cgcccguguaaacgugcug

SEQ ID NO: 2050980 - RNA, 19 nt, Artificial Sequence
  Description of Artificial Sequence: Synthetic oligonucleotide
ccuugccugugcucacaaa

SEQ ID NO: 2050981 - RNA, 19 nt, Artificial Sequence
  Description of Artificial Sequence: Synthetic oligonucleotide
cgaucaggcucugcccauc

SEQ ID NO: 2050982 - RNA, 19 nt, Artificial Sequence
  Description of Artificial Sequence: Synthetic oligonucleotide
ccuuugccgcccguguaaa

SEQ ID NO: 2050983 - RNA, 19 nt, Artificial Sequence
  Description of Artificial Sequence: Synthetic oligonucleotide
gcgcggugugggugccgcc

SEQ ID NO: 2050984 - RNA, 19 nt, Artificial Sequence
  Description of Artificial Sequence: Synthetic oligonucleotide
ccguguaaacgugcugugu

SEQ ID NO: 2050985 - RNA, 19 nt, Artificial Sequence
  Description of Artificial Sequence: Synthetic oligonucleotide
ccggcuuugccccggggau

SEQ ID NO: 2050986 - RNA, 19 nt, Artificial Sequence
  Description of Artificial Sequence: Synthetic oligonucleotide
gggugccgccaggucccag

SEQ ID NO: 2050987 - RNA, 19 nt, Artificial Sequence
  Description of Artificial Sequence: Synthetic oligonucleotide
ggccggacugcagcggggu

SEQ ID NO: 2050988 - RNA, 19 nt, Artificial Sequence
  Description of Artificial Sequence: Synthetic oligonucleotide
cggcuuugccccggggaug

SEQ ID NO: 2050989 - RNA, 19 nt, Artificial Sequence
  Description of Artificial Sequence: Synthetic oligonucleotide
gcguccacaggaagcgaau

SEQ ID NO: 2050990 - RNA, 19 nt, Artificial Sequence
  Description of Artificial Sequence: Synthetic oligonucleotide
ggccguccgcagacacaug

SEQ ID NO: 2050991 - RNA, 19 nt, Artificial Sequence
  Description of Artificial Sequence: Synthetic oligonucleotide
ccccggagaugagggugug

SEQ ID NO: 2050992 - RNA, 19 nt, Artificial Sequence
  Description of Artificial Sequence: Synthetic oligonucleotide
cccguacggguguccucca

SEQ ID NO: 2050993 - RNA, 19 nt, Artificial Sequence
  Description of Artificial Sequence: Synthetic oligonucleotide
ccgcccguguaaacgugcu

SEQ ID NO: 2050994 - RNA, 19 nt, Artificial Sequence
  Description of Artificial Sequence: Synthetic oligonucleotide
cgcggugugggugccgcca

SEQ ID NO: 2050995 - RNA, 19 nt, Artificial Sequence
  Description of Artificial Sequence: Synthetic oligonucleotide
cgucggggcgugacagcca

SEQ ID NO: 2050996 - RNA, 19 nt, Artificial Sequence
  Description of Artificial Sequence: Synthetic oligonucleotide
cccggagaugaggguguga

SEQ ID NO: 2050997 - RNA, 19 nt, Artificial Sequence
  Description of Artificial Sequence: Synthetic oligonucleotide
cccgugcccaccagggcau

SEQ ID NO: 2050998 - RNA, 19 nt, Artificial Sequence
  Description of Artificial Sequence: Synthetic oligonucleotide
gcgugacagccagcgcaua

SEQ ID NO: 2050999 - RNA, 19 nt, Artificial Sequence
  Description of Artificial Sequence: Synthetic oligonucleotide
cguacacgacagagcugcu

SEQ ID NO: 2051000 - RNA, 19 nt, Artificial Sequence
  Description of Artificial Sequence: Synthetic oligonucleotide
gcugagccacgggugucuu

SEQ ID NO: 2051001 - RNA, 19 nt, Artificial Sequence
  Description of Artificial Sequence: Synthetic oligonucleotide
ccgugcccaccagggcauc

SEQ ID NO: 2051002 - RNA, 19 nt, Artificial Sequence
  Description of Artificial Sequence: Synthetic oligonucleotide
ccuuagcgucggggcguga

SEQ ID NO: 2051003 - RNA, 19 nt, Artificial Sequence
  Description of Artificial Sequence: Synthetic oligonucleotide
ccucgccaugggucagcgu

SEQ ID NO: 2051004 - RNA, 19 nt, Artificial Sequence
  Description of Artificial Sequence: Synthetic oligonucleotide
ggcucacgucccacaccuu

SEQ ID NO: 2051005 - RNA, 19 nt, Artificial Sequence
  Description of Artificial Sequence: Synthetic oligonucleotide
cgggucccguaguccgaua

SEQ ID NO: 2051006 - RNA, 19 nt, Artificial Sequence
  Description of Artificial Sequence: Synthetic oligonucleotide
aaaggaauggccuauaagc

SEQ ID NO: 2051007 - RNA, 19 nt, Artificial Sequence
  Description of Artificial Sequence: Synthetic oligonucleotide
uuauuauucaaacaaaagg

SEQ ID NO: 2051008 - RNA, 19 nt, Artificial Sequence
  Description of Artificial Sequence: Synthetic oligonucleotide
aaauguuaagaucagaguc

SEQ ID NO: 2051009 - RNA, 19 nt, Artificial Sequence
  Description of Artificial Sequence: Synthetic oligonucleotide
auuucgguaaaacugaagc

SEQ ID NO: 2051010 - RNA, 19 nt, Artificial Sequence
  Description of Artificial Sequence: Synthetic oligonucleotide
uauccuauaaugaagaugu

SEQ ID NO: 2051011 - RNA, 19 nt, Artificial Sequence
  Description of Artificial Sequence: Synthetic oligonucleotide
uuagaagaaacaaacagug

SEQ ID NO: 2051012 - RNA, 19 nt, Artificial Sequence
  Description of Artificial Sequence: Synthetic oligonucleotide
aaaggacagaaauucauac

SEQ ID NO: 2051013 - RNA, 19 nt, Artificial Sequence
  Description of Artificial Sequence: Synthetic oligonucleotide
uguuauuucgguaaaacug

SEQ ID NO: 2051014 - RNA, 19 nt, Artificial Sequence
  Description of Artificial Sequence: Synthetic oligonucleotide
ucaguuaucagacaggcca

SEQ ID NO: 2051015 - RNA, 19 nt, Artificial Sequence
  Description of Artificial Sequence: Synthetic oligonucleotide
uguuugauaaucagguugg

SEQ ID NO: 2051016 - RNA, 19 nt, Artificial Sequence
  Description of Artificial Sequence: Synthetic oligonucleotide
gaaagagacacuaaagugg

SEQ ID NO: 2051017 - RNA, 19 nt, Artificial Sequence
  Description of Artificial Sequence: Synthetic oligonucleotide
aaauucauacucugccugc

SEQ ID NO: 2051018 - RNA, 19 nt, Artificial Sequence
  Description of Artificial Sequence: Synthetic oligonucleotide
aaagagacacuaaaguggc

SEQ ID NO: 2051019 - RNA, 19 nt, Artificial Sequence
  Description of Artificial Sequence: Synthetic oligonucleotide
ugucauaacggaaacagca

SEQ ID NO: 2051020 - RNA, 19 nt, Artificial Sequence
  Description of Artificial Sequence: Synthetic oligonucleotide
aggacagaaauucauacuc

SEQ ID NO: 2051021 - RNA, 19 nt, Artificial Sequence
  Description of Artificial Sequence: Synthetic oligonucleotide
uuaucagcaggaaagagac

SEQ ID NO: 2051022 - RNA, 19 nt, Artificial Sequence
  Description of Artificial Sequence: Synthetic oligonucleotide
aaaauguuaagaucagagu

SEQ ID NO: 2051023 - RNA, 19 nt, Artificial Sequence
  Description of Artificial Sequence: Synthetic oligonucleotide
uugauaaucagguugggac

SEQ ID NO: 2051024 - RNA, 19 nt, Artificial Sequence
  Description of Artificial Sequence: Synthetic oligonucleotide
aauccugucaucuccaggu

SEQ ID NO: 2051025 - RNA, 19 nt, Artificial Sequence
  Description of Artificial Sequence: Synthetic oligonucleotide
caucaauuauccuauaaug

SEQ ID NO: 2051026 - RNA, 19 nt, Artificial Sequence
  Description of Artificial Sequence: Synthetic oligonucleotide
agcaagugcagauauggac

SEQ ID NO: 2051027 - RNA, 19 nt, Artificial Sequence
  Description of Artificial Sequence: Synthetic oligonucleotide
uguaauuguacucuccuuc

SEQ ID NO: 2051028 - RNA, 19 nt, Artificial Sequence
  Description of Artificial Sequence: Synthetic oligonucleotide
uuagaaaagguguucugcc

SEQ ID NO: 2051029 - RNA, 19 nt, Artificial Sequence
  Description of Artificial Sequence: Synthetic oligonucleotide
aauuauccuauaaugaaga

SEQ ID NO: 2051030 - RNA, 19 nt, Artificial Sequence
  Description of Artificial Sequence: Synthetic oligonucleotide
aaaacugaagcucuuugau

SEQ ID NO: 2051031 - RNA, 19 nt, Artificial Sequence
  Description of Artificial Sequence: Synthetic oligonucleotide
aauguuaagaucagaguca

SEQ ID NO: 2051032 - RNA, 19 nt, Artificial Sequence
  Description of Artificial Sequence: Synthetic oligonucleotide
uuuagaaaagguguucugc

SEQ ID NO: 2051033 - RNA, 19 nt, Artificial Sequence
  Description of Artificial Sequence: Synthetic oligonucleotide
uucgcuaauaucaucgagu

SEQ ID NO: 2051034 - RNA, 19 nt, Artificial Sequence
  Description of Artificial Sequence: Synthetic oligonucleotide
gaaacuucuuaucugcaug

SEQ ID NO: 2051035 - RNA, 19 nt, Artificial Sequence
  Description of Artificial Sequence: Synthetic oligonucleotide
uugagaacuggcaucaacu

SEQ ID NO: 2051036 - RNA, 19 nt, Artificial Sequence
  Description of Artificial Sequence: Synthetic oligonucleotide
uauaagcaagugcagauau

SEQ ID NO: 2051037 - RNA, 19 nt, Artificial Sequence
  Description of Artificial Sequence: Synthetic oligonucleotide
agaacuagguggcuguacg

SEQ ID NO: 2051038 - RNA, 19 nt, Artificial Sequence
  Description of Artificial Sequence: Synthetic oligonucleotide
aauuguacucuccuucacu

SEQ ID NO: 2051039 - RNA, 19 nt, Artificial Sequence
  Description of Artificial Sequence: Synthetic oligonucleotide
gaagauguuauuucgguaa

SEQ ID NO: 2051040 - RNA, 19 nt, Artificial Sequence
  Description of Artificial Sequence: Synthetic oligonucleotide
ugauaaucagguugggacc

SEQ ID NO: 2051041 - RNA, 19 nt, Artificial Sequence
  Description of Artificial Sequence: Synthetic oligonucleotide
ucguacaaaggacagaaau

SEQ ID NO: 2051042 - RNA, 19 nt, Artificial Sequence
  Description of Artificial Sequence: Synthetic oligonucleotide
uggaaaguuaacuggaaaa

SEQ ID NO: 2051043 - RNA, 19 nt, Artificial Sequence
  Description of Artificial Sequence: Synthetic oligonucleotide
agauguuucaugaacuggg

SEQ ID NO: 2051044 - RNA, 19 nt, Artificial Sequence
  Description of Artificial Sequence: Synthetic oligonucleotide
aacuagguggcuguacggc

SEQ ID NO: 2051045 - RNA, 19 nt, Artificial Sequence
  Description of Artificial Sequence: Synthetic oligonucleotide
uguacucuccuucacugcc

SEQ ID NO: 2051046 - RNA, 19 nt, Artificial Sequence
  Description of Artificial Sequence: Synthetic oligonucleotide
uagaaaagguguucugccg

SEQ ID NO: 2051047 - RNA, 19 nt, Artificial Sequence
  Description of Artificial Sequence: Synthetic oligonucleotide
agaacuggcaucaacucac

SEQ ID NO: 2051048 - RNA, 19 nt, Artificial Sequence
  Description of Artificial Sequence: Synthetic oligonucleotide
uuauccuauaaugaagaug

SEQ ID NO: 2051049 - RNA, 19 nt, Artificial Sequence
  Description of Artificial Sequence: Synthetic oligonucleotide
gaagauguuucaugaacug

SEQ ID NO: 2051050 - RNA, 19 nt, Artificial Sequence
  Description of Artificial Sequence: Synthetic oligonucleotide
ugcaauguaauuguacucu

SEQ ID NO: 2051051 - RNA, 19 nt, Artificial Sequence
  Description of Artificial Sequence: Synthetic oligonucleotide
aacugaauucccugcaagu

SEQ ID NO: 2051052 - RNA, 19 nt, Artificial Sequence
  Description of Artificial Sequence: Synthetic oligonucleotide
uuucgcuaauaucaucgag

SEQ ID NO: 2051053 - RNA, 19 nt, Artificial Sequence
  Description of Artificial Sequence: Synthetic oligonucleotide
ucgcuaauaucaucgagug

SEQ ID NO: 2051054 - RNA, 19 nt, Artificial Sequence
  Description of Artificial Sequence: Synthetic oligonucleotide
uugaagauguuauuucggu

SEQ ID NO: 2051055 - RNA, 19 nt, Artificial Sequence
  Description of Artificial Sequence: Synthetic oligonucleotide
acaucaauuauccuauaau

SEQ ID NO: 2051056 - RNA, 19 nt, Artificial Sequence
  Description of Artificial Sequence: Synthetic oligonucleotide
gauguuauuucgguaaaac

SEQ ID NO: 2051057 - RNA, 19 nt, Artificial Sequence
  Description of Artificial Sequence: Synthetic oligonucleotide
cuggcaucaacucacaguc

SEQ ID NO: 2051058 - RNA, 19 nt, Artificial Sequence
  Description of Artificial Sequence: Synthetic oligonucleotide
uauuucgguaaaacugaag

SEQ ID NO: 2051059 - RNA, 19 nt, Artificial Sequence
  Description of Artificial Sequence: Synthetic oligonucleotide
aacggaaacagcagguuag

SEQ ID NO: 2051060 - RNA, 19 nt, Artificial Sequence
  Description of Artificial Sequence: Synthetic oligonucleotide
uucgcugacaccucgcgcc

SEQ ID NO: 2051061 - RNA, 19 nt, Artificial Sequence
  Description of Artificial Sequence: Synthetic oligonucleotide
caugaacugaauucccugc

SEQ ID NO: 2051062 - RNA, 19 nt, Artificial Sequence
  Description of Artificial Sequence: Synthetic oligonucleotide
ucgguaaaacugaagcucu

SEQ ID NO: 2051063 - RNA, 19 nt, Artificial Sequence
  Description of Artificial Sequence: Synthetic oligonucleotide
uucgguaaaacugaagcuc

SEQ ID NO: 2051064 - RNA, 19 nt, Artificial Sequence
  Description of Artificial Sequence: Synthetic oligonucleotide
auguuauuucgguaaaacu

SEQ ID NO: 2051065 - RNA, 19 nt, Artificial Sequence
  Description of Artificial Sequence: Synthetic oligonucleotide
ccuauaaugaagauguuuc

SEQ ID NO: 2051066 - RNA, 19 nt, Artificial Sequence
  Description of Artificial Sequence: Synthetic oligonucleotide
aucaauuauccuauaauga

SEQ ID NO: 2051067 - RNA, 19 nt, Artificial Sequence
  Description of Artificial Sequence: Synthetic oligonucleotide
agcaucacccggcacgagc

SEQ ID NO: 2051068 - RNA, 19 nt, Artificial Sequence
  Description of Artificial Sequence: Synthetic oligonucleotide
cuugguaagaccagacuuc

SEQ ID NO: 2051069 - RNA, 19 nt, Artificial Sequence
  Description of Artificial Sequence: Synthetic oligonucleotide
ugacaugcuguccagcaac

SEQ ID NO: 2051070 - RNA, 19 nt, Artificial Sequence
  Description of Artificial Sequence: Synthetic oligonucleotide
aaacaaaaggaauggccua

SEQ ID NO: 2051071 - RNA, 19 nt, Artificial Sequence
  Description of Artificial Sequence: Synthetic oligonucleotide
ugucguacaaaggacagaa

SEQ ID NO: 2051072 - RNA, 19 nt, Artificial Sequence
  Description of Artificial Sequence: Synthetic oligonucleotide
aacuggggcauguauuugu

SEQ ID NO: 2051073 - RNA, 19 nt, Artificial Sequence
  Description of Artificial Sequence: Synthetic oligonucleotide
ucuuugaugcuuucgcuaa

SEQ ID NO: 2051074 - RNA, 19 nt, Artificial Sequence
  Description of Artificial Sequence: Synthetic oligonucleotide
agcuuuauuuauuauucaa

SEQ ID NO: 2051075 - RNA, 19 nt, Artificial Sequence
  Description of Artificial Sequence: Synthetic oligonucleotide
accagacuucccaugaugc

SEQ ID NO: 2051076 - RNA, 19 nt, Artificial Sequence
  Description of Artificial Sequence: Synthetic oligonucleotide
ucauccggcuguuugauaa

SEQ ID NO: 2051077 - RNA, 19 nt, Artificial Sequence
  Description of Artificial Sequence: Synthetic oligonucleotide
agaaaagguguucugccga

SEQ ID NO: 2051078 - RNA, 19 nt, Artificial Sequence
  Description of Artificial Sequence: Synthetic oligonucleotide
agcucuuuaacagugcuca

SEQ ID NO: 2051079 - RNA, 19 nt, Artificial Sequence
  Description of Artificial Sequence: Synthetic oligonucleotide
uauaaugaagauguuucau

SEQ ID NO: 2051080 - RNA, 19 nt, Artificial Sequence
  Description of Artificial Sequence: Synthetic oligonucleotide
gaagcagccuucuucggug

SEQ ID NO: 2051081 - RNA, 19 nt, Artificial Sequence
  Description of Artificial Sequence: Synthetic oligonucleotide
uacgccuagcaucacccgg

SEQ ID NO: 2051082 - RNA, 19 nt, Artificial Sequence
  Description of Artificial Sequence: Synthetic oligonucleotide
gauacgccuagcaucaccc

SEQ ID NO: 2051083 - RNA, 19 nt, Artificial Sequence
  Description of Artificial Sequence: Synthetic oligonucleotide
caauguaauuguacucucc

SEQ ID NO: 2051084 - RNA, 19 nt, Artificial Sequence
  Description of Artificial Sequence: Synthetic oligonucleotide
gaaaagguguucugccgag

SEQ ID NO: 2051085 - RNA, 19 nt, Artificial Sequence
  Description of Artificial Sequence: Synthetic oligonucleotide
aaggaauggccuauaagca

SEQ ID NO: 2051086 - RNA, 19 nt, Artificial Sequence
  Description of Artificial Sequence: Synthetic oligonucleotide
auuauucaaacaaaaggaa

SEQ ID NO: 2051087 - RNA, 19 nt, Artificial Sequence
  Description of Artificial Sequence: Synthetic oligonucleotide
uagaacuagcuuuauuuau

SEQ ID NO: 2051088 - RNA, 19 nt, Artificial Sequence
  Description of Artificial Sequence: Synthetic oligonucleotide
ugcugugucauaacggaaa

SEQ ID NO: 2051089 - RNA, 19 nt, Artificial Sequence
  Description of Artificial Sequence: Synthetic oligonucleotide
ucugcacagcucuuuaaca

SEQ ID NO: 2051090 - RNA, 19 nt, Artificial Sequence
  Description of Artificial Sequence: Synthetic oligonucleotide
cuucuuaucugcaugaacu

SEQ ID NO: 2051091 - RNA, 19 nt, Artificial Sequence
  Description of Artificial Sequence: Synthetic oligonucleotide
uggagauggaaaguuaacu

SEQ ID NO: 2051092 - RNA, 19 nt, Artificial Sequence
  Description of Artificial Sequence: Synthetic oligonucleotide
ucgauaaucugauccuucu

SEQ ID NO: 2051093 - RNA, 19 nt, Artificial Sequence
  Description of Artificial Sequence: Synthetic oligonucleotide
agugcucacaucaauuauc

SEQ ID NO: 2051094 - RNA, 19 nt, Artificial Sequence
  Description of Artificial Sequence: Synthetic oligonucleotide
accaaucugacaugcuguc

SEQ ID NO: 2051095 - RNA, 19 nt, Artificial Sequence
  Description of Artificial Sequence: Synthetic oligonucleotide
ugcugcaauguaauuguac

SEQ ID NO: 2051096 - RNA, 19 nt, Artificial Sequence
  Description of Artificial Sequence: Synthetic oligonucleotide
gaacuagguggcuguacgg

SEQ ID NO: 2051097 - RNA, 19 nt, Artificial Sequence
  Description of Artificial Sequence: Synthetic oligonucleotide
ucggugcaaauucauaauc

SEQ ID NO: 2051098 - RNA, 19 nt, Artificial Sequence
  Description of Artificial Sequence: Synthetic oligonucleotide
agacaggccaucucgauaa

SEQ ID NO: 2051099 - RNA, 19 nt, Artificial Sequence
  Description of Artificial Sequence: Synthetic oligonucleotide
gcagauauggacugagggg

SEQ ID NO: 2051100 - RNA, 19 nt, Artificial Sequence
  Description of Artificial Sequence: Synthetic oligonucleotide
uuugauaaucagguuggga

SEQ ID NO: 2051101 - RNA, 19 nt, Artificial Sequence
  Description of Artificial Sequence: Synthetic oligonucleotide
auagaacuagcuuuauuua

SEQ ID NO: 2051102 - RNA, 19 nt, Artificial Sequence
  Description of Artificial Sequence: Synthetic oligonucleotide
aucucgauaaucugauccu

SEQ ID NO: 2051103 - RNA, 19 nt, Artificial Sequence
  Description of Artificial Sequence: Synthetic oligonucleotide
auggcugcgccacuuucgc

SEQ ID NO: 2051104 - RNA, 19 nt, Artificial Sequence
  Description of Artificial Sequence: Synthetic oligonucleotide
uucaaacaaaaggaauggc

SEQ ID NO: 2051105 - RNA, 19 nt, Artificial Sequence
  Description of Artificial Sequence: Synthetic oligonucleotide
ugcaugaacugaauucccu

SEQ ID NO: 2051106 - RNA, 19 nt, Artificial Sequence
  Description of Artificial Sequence: Synthetic oligonucleotide
aauguccaauccugucauc

SEQ ID NO: 2051107 - RNA, 19 nt, Artificial Sequence
  Description of Artificial Sequence: Synthetic oligonucleotide
guugcugugucauaacgga

SEQ ID NO: 2051108 - RNA, 19 nt, Artificial Sequence
  Description of Artificial Sequence: Synthetic oligonucleotide
aagaguugcugugucauaa

SEQ ID NO: 2051109 - RNA, 19 nt, Artificial Sequence
  Description of Artificial Sequence: Synthetic oligonucleotide
caaacaaaaggaauggccu

SEQ ID NO: 2051110 - RNA, 19 nt, Artificial Sequence
  Description of Artificial Sequence: Synthetic oligonucleotide
uuaagaucagagucaguua

SEQ ID NO: 2051111 - RNA, 19 nt, Artificial Sequence
  Description of Artificial Sequence: Synthetic oligonucleotide
uucagccaaaauguuaaga

SEQ ID NO: 2051112 - RNA, 19 nt, Artificial Sequence
  Description of Artificial Sequence: Synthetic oligonucleotide
aacaaaaggaauggccuau

SEQ ID NO: 2051113 - RNA, 19 nt, Artificial Sequence
  Description of Artificial Sequence: Synthetic oligonucleotide
uacggcuugagaacuggca

SEQ ID NO: 2051114 - RNA, 19 nt, Artificial Sequence
  Description of Artificial Sequence: Synthetic oligonucleotide
ugagaacuggcaucaacuc

SEQ ID NO: 2051115 - RNA, 19 nt, Artificial Sequence
  Description of Artificial Sequence: Synthetic oligonucleotide
agucugcugucguacaaag

SEQ ID NO: 2051116 - RNA, 19 nt, Artificial Sequence
  Description of Artificial Sequence: Synthetic oligonucleotide
ucugccugcugcaauguaa

SEQ ID NO: 2051117 - RNA, 19 nt, Artificial Sequence
  Description of Artificial Sequence: Synthetic oligonucleotide
guuaucagcaggaaagaga

SEQ ID NO: 2051118 - RNA, 19 nt, Artificial Sequence
  Description of Artificial Sequence: Synthetic oligonucleotide
uaagaccagacuucccaug

SEQ ID NO: 2051119 - RNA, 19 nt, Artificial Sequence
  Description of Artificial Sequence: Synthetic oligonucleotide
uaauuguacucuccuucac

SEQ ID NO: 2051120 - RNA, 19 nt, Artificial Sequence
  Description of Artificial Sequence: Synthetic oligonucleotide
auaaucugauccuucucaa

SEQ ID NO: 2051121 - RNA, 19 nt, Artificial Sequence
  Description of Artificial Sequence: Synthetic oligonucleotide
caagugcagauauggacug

SEQ ID NO: 2051122 - RNA, 19 nt, Artificial Sequence
  Description of Artificial Sequence: Synthetic oligonucleotide
uaacggaaacagcagguua

SEQ ID NO: 2051123 - RNA, 19 nt, Artificial Sequence
  Description of Artificial Sequence: Synthetic oligonucleotide
ugaacugaauucccugcaa

SEQ ID NO: 2051124 - RNA, 19 nt, Artificial Sequence
  Description of Artificial Sequence: Synthetic oligonucleotide
uuauuucgguaaaacugaa

SEQ ID NO: 2051125 - RNA, 19 nt, Artificial Sequence
  Description of Artificial Sequence: Synthetic oligonucleotide
agaucagagucaguuauca

SEQ ID NO: 2051126 - RNA, 19 nt, Artificial Sequence
  Description of Artificial Sequence: Synthetic oligonucleotide
uggcuguacggcuugagaa

SEQ ID NO: 2051127 - RNA, 19 nt, Artificial Sequence
  Description of Artificial Sequence: Synthetic oligonucleotide
gaucagagucaguuaucag

SEQ ID NO: 2051128 - RNA, 19 nt, Artificial Sequence
  Description of Artificial Sequence: Synthetic oligonucleotide
augaacugaauucccugca

SEQ ID NO: 2051129 - RNA, 19 nt, Artificial Sequence
  Description of Artificial Sequence: Synthetic oligonucleotide
ucucaauguccaauccugu

SEQ ID NO: 2051130 - RNA, 19 nt, Artificial Sequence
  Description of Artificial Sequence: Synthetic oligonucleotide
uucugccgaguuaucagca

SEQ ID NO: 2051131 - RNA, 19 nt, Artificial Sequence
  Description of Artificial Sequence: Synthetic oligonucleotide
ugaugcuuucgcuaauauc

SEQ ID NO: 2051132 - RNA, 19 nt, Artificial Sequence
  Description of Artificial Sequence: Synthetic oligonucleotide
guuagaagaaacaaacagu

SEQ ID NO: 2051133 - RNA, 19 nt, Artificial Sequence
  Description of Artificial Sequence: Synthetic oligonucleotide
uccaauccugucaucucca

SEQ ID NO: 2051134 - RNA, 19 nt, Artificial Sequence
  Description of Artificial Sequence: Synthetic oligonucleotide
auuauccuauaaugaagau

SEQ ID NO: 2051135 - RNA, 19 nt, Artificial Sequence
  Description of Artificial Sequence: Synthetic oligonucleotide
cauggcugcgccacuuucg

SEQ ID NO: 2051136 - RNA, 19 nt, Artificial Sequence
  Description of Artificial Sequence: Synthetic oligonucleotide
agugcagauauggacugag

SEQ ID NO: 2051137 - RNA, 19 nt, Artificial Sequence
  Description of Artificial Sequence: Synthetic oligonucleotide
uccuauaaugaagauguuu

SEQ ID NO: 2051138 - RNA, 19 nt, Artificial Sequence
  Description of Artificial Sequence: Synthetic oligonucleotide
caaucugacaugcugucca

SEQ ID NO: 2051139 - RNA, 19 nt, Artificial Sequence
  Description of Artificial Sequence: Synthetic oligonucleotide
cuuucgcugacaccucgcg

SEQ ID NO: 2051140 - RNA, 19 nt, Artificial Sequence
  Description of Artificial Sequence: Synthetic oligonucleotide
guccaauccugucaucucc

SEQ ID NO: 2051141 - RNA, 19 nt, Artificial Sequence
  Description of Artificial Sequence: Synthetic oligonucleotide
gguaagaccagacuuccca

SEQ ID NO: 2051142 - RNA, 19 nt, Artificial Sequence
  Description of Artificial Sequence: Synthetic oligonucleotide
aauucccugcaaguggaca

SEQ ID NO: 2051143 - RNA, 19 nt, Artificial Sequence
  Description of Artificial Sequence: Synthetic oligonucleotide
cagccaaaauguuaagauc

SEQ ID NO: 2051144 - RNA, 19 nt, Artificial Sequence
  Description of Artificial Sequence: Synthetic oligonucleotide
uuucgcugacaccucgcgc

SEQ ID NO: 2051145 - RNA, 19 nt, Artificial Sequence
  Description of Artificial Sequence: Synthetic oligonucleotide
ugagccaugcucuccccug

SEQ ID NO: 2051146 - RNA, 19 nt, Artificial Sequence
  Description of Artificial Sequence: Synthetic oligonucleotide
acagugcucacaucaauua

SEQ ID NO: 2051147 - RNA, 19 nt, Artificial Sequence
  Description of Artificial Sequence: Synthetic oligonucleotide
aggaauggccuauaagcaa

SEQ ID NO: 2051148 - RNA, 19 nt, Artificial Sequence
  Description of Artificial Sequence: Synthetic oligonucleotide
ccuagcaucacccggcacg

SEQ ID NO: 2051149 - RNA, 19 nt, Artificial Sequence
  Description of Artificial Sequence: Synthetic oligonucleotide
uucggugcaaauucauaau

SEQ ID NO: 2051150 - RNA, 19 nt, Artificial Sequence
  Description of Artificial Sequence: Synthetic oligonucleotide
guuaagaucagagucaguu

SEQ ID NO: 2051151 - RNA, 19 nt, Artificial Sequence
  Description of Artificial Sequence: Synthetic oligonucleotide
uaucugcaugaacugaauu

SEQ ID NO: 2051152 - RNA, 19 nt, Artificial Sequence
  Description of Artificial Sequence: Synthetic oligonucleotide
ucauacucugccugcugca

SEQ ID NO: 2051153 - RNA, 19 nt, Artificial Sequence
  Description of Artificial Sequence: Synthetic oligonucleotide
cugcaauguaauuguacuc

SEQ ID NO: 2051154 - RNA, 19 nt, Artificial Sequence
  Description of Artificial Sequence: Synthetic oligonucleotide
cucgauaaucugauccuuc

SEQ ID NO: 2051155 - RNA, 19 nt, Artificial Sequence
  Description of Artificial Sequence: Synthetic oligonucleotide
cugcaugaacugaauuccc

SEQ ID NO: 2051156 - RNA, 19 nt, Artificial Sequence
  Description of Artificial Sequence: Synthetic oligonucleotide
ucauaauccucuggauacc

SEQ ID NO: 2051157 - RNA, 19 nt, Artificial Sequence
  Description of Artificial Sequence: Synthetic oligonucleotide
cauuucaauagaacuagcu

SEQ ID NO: 2051158 - RNA, 19 nt, Artificial Sequence
  Description of Artificial Sequence: Synthetic oligonucleotide
acuagguggcuguacggcu

SEQ ID NO: 2051159 - RNA, 19 nt, Artificial Sequence
  Description of Artificial Sequence: Synthetic oligonucleotide
uccggcuguuugauaauca

SEQ ID NO: 2051160 - RNA, 19 nt, Artificial Sequence
  Description of Artificial Sequence: Synthetic oligonucleotide
ggaauggccuauaagcaag

SEQ ID NO: 2051161 - RNA, 19 nt, Artificial Sequence
  Description of Artificial Sequence: Synthetic oligonucleotide
caauccugucaucuccagg

SEQ ID NO: 2051162 - RNA, 19 nt, Artificial Sequence
  Description of Artificial Sequence: Synthetic oligonucleotide
uugcaccaaucugacaugc

SEQ ID NO: 2051163 - RNA, 19 nt, Artificial Sequence
  Description of Artificial Sequence: Synthetic oligonucleotide
auaucaucgagugcccugu

SEQ ID NO: 2051164 - RNA, 19 nt, Artificial Sequence
  Description of Artificial Sequence: Synthetic oligonucleotide
ugaugucuugucugcuuga

SEQ ID NO: 2051165 - RNA, 19 nt, Artificial Sequence
  Description of Artificial Sequence: Synthetic oligonucleotide
aguggacagagccccggag

SEQ ID NO: 2051166 - RNA, 19 nt, Artificial Sequence
  Description of Artificial Sequence: Synthetic oligonucleotide
cuugcaccaaucugacaug

SEQ ID NO: 2051167 - RNA, 19 nt, Artificial Sequence
  Description of Artificial Sequence: Synthetic oligonucleotide
ugccuugguaagaccagac

SEQ ID NO: 2051168 - RNA, 19 nt, Artificial Sequence
  Description of Artificial Sequence: Synthetic oligonucleotide
uucuucggugcaaauucau

SEQ ID NO: 2051169 - RNA, 19 nt, Artificial Sequence
  Description of Artificial Sequence: Synthetic oligonucleotide
auacgccuagcaucacccg

SEQ ID NO: 2051170 - RNA, 19 nt, Artificial Sequence
  Description of Artificial Sequence: Synthetic oligonucleotide
gacacuaaaguggcuucug

SEQ ID NO: 2051171 - RNA, 19 nt, Artificial Sequence
  Description of Artificial Sequence: Synthetic oligonucleotide
guuugauaaucagguuggg

SEQ ID NO: 2051172 - RNA, 19 nt, Artificial Sequence
  Description of Artificial Sequence: Synthetic oligonucleotide
acggcuugagaacuggcau

SEQ ID NO: 2051173 - RNA, 19 nt, Artificial Sequence
  Description of Artificial Sequence: Synthetic oligonucleotide
aguuaucagacaggccauc

SEQ ID NO: 2051174 - RNA, 19 nt, Artificial Sequence
  Description of Artificial Sequence: Synthetic oligonucleotide
agaacuagcuuuauuuauu

SEQ ID NO: 2051175 - RNA, 19 nt, Artificial Sequence
  Description of Artificial Sequence: Synthetic oligonucleotide
uuugaugcuuucgcuaaua

SEQ ID NO: 2051176 - RNA, 19 nt, Artificial Sequence
  Description of Artificial Sequence: Synthetic oligonucleotide
acgccuagcaucacccggc

SEQ ID NO: 2051177 - RNA, 19 nt, Artificial Sequence
  Description of Artificial Sequence: Synthetic oligonucleotide
cacuuucgcugacaccucg

SEQ ID NO: 2051178 - RNA, 19 nt, Artificial Sequence
  Description of Artificial Sequence: Synthetic oligonucleotide
cugcugucguacaaaggac

SEQ ID NO: 2051179 - RNA, 19 nt, Artificial Sequence
  Description of Artificial Sequence: Synthetic oligonucleotide
ucccaugaugcuccuugca

SEQ ID NO: 2051180 - RNA, 19 nt, Artificial Sequence
  Description of Artificial Sequence: Synthetic oligonucleotide
ugguaagaccagacuuccc

SEQ ID NO: 2051181 - RNA, 19 nt, Artificial Sequence
  Description of Artificial Sequence: Synthetic oligonucleotide
agggauacgccuagcauca

SEQ ID NO: 2051182 - RNA, 19 nt, Artificial Sequence
  Description of Artificial Sequence: Synthetic oligonucleotide
gcucacaucaauuauccua

SEQ ID NO: 2051183 - RNA, 19 nt, Artificial Sequence
  Description of Artificial Sequence: Synthetic oligonucleotide
uguccaauccugucaucuc

SEQ ID NO: 2051184 - RNA, 19 nt, Artificial Sequence
  Description of Artificial Sequence: Synthetic oligonucleotide
gcaugaacugaauucccug

SEQ ID NO: 2051185 - RNA, 19 nt, Artificial Sequence
  Description of Artificial Sequence: Synthetic oligonucleotide
acuuucgcugacaccucgc

SEQ ID NO: 2051186 - RNA, 19 nt, Artificial Sequence
  Description of Artificial Sequence: Synthetic oligonucleotide
cacugccuugguaagacca

SEQ ID NO: 2051187 - RNA, 19 nt, Artificial Sequence
  Description of Artificial Sequence: Synthetic oligonucleotide
cacuaaaguggcuucugga

SEQ ID NO: 2051188 - RNA, 19 nt, Artificial Sequence
  Description of Artificial Sequence: Synthetic oligonucleotide
gcaccaaucugacaugcug

SEQ ID NO: 2051189 - RNA, 19 nt, Artificial Sequence
  Description of Artificial Sequence: Synthetic oligonucleotide
uaauaucaucgagugcccu

SEQ ID NO: 2051190 - RNA, 19 nt, Artificial Sequence
  Description of Artificial Sequence: Synthetic oligonucleotide
ugaugcuccuugcaccaau

SEQ ID NO: 2051191 - RNA, 19 nt, Artificial Sequence
  Description of Artificial Sequence: Synthetic oligonucleotide
agugaugucuugucugcuu

SEQ ID NO: 2051192 - RNA, 19 nt, Artificial Sequence
  Description of Artificial Sequence: Synthetic oligonucleotide
gaggagucugcugucguac

SEQ ID NO: 2051193 - RNA, 19 nt, Artificial Sequence
  Description of Artificial Sequence: Synthetic oligonucleotide
cauaacggaaacagcaggu

SEQ ID NO: 2051194 - RNA, 19 nt, Artificial Sequence
  Description of Artificial Sequence: Synthetic oligonucleotide
uugcugugucauaacggaa

SEQ ID NO: 2051195 - RNA, 19 nt, Artificial Sequence
  Description of Artificial Sequence: Synthetic oligonucleotide
uucccaugaugcuccuugc

SEQ ID NO: 2051196 - RNA, 19 nt, Artificial Sequence
  Description of Artificial Sequence: Synthetic oligonucleotide
aagguguucugccgaguua

SEQ ID NO: 2051197 - RNA, 19 nt, Artificial Sequence
  Description of Artificial Sequence: Synthetic oligonucleotide
cuccuugcaccaaucugac

SEQ ID NO: 2051198 - RNA, 19 nt, Artificial Sequence
  Description of Artificial Sequence: Synthetic oligonucleotide
uucuuuucgucugucuuuu

SEQ ID NO: 2051199 - RNA, 19 nt, Artificial Sequence
  Description of Artificial Sequence: Synthetic oligonucleotide
ucgagugcccugugagaag

SEQ ID NO: 2051200 - RNA, 19 nt, Artificial Sequence
  Description of Artificial Sequence: Synthetic oligonucleotide
ugcuuucgcuaauaucauc

SEQ ID NO: 2051201 - RNA, 19 nt, Artificial Sequence
  Description of Artificial Sequence: Synthetic oligonucleotide
cuuucgcuaauaucaucga

SEQ ID NO: 2051202 - RNA, 19 nt, Artificial Sequence
  Description of Artificial Sequence: Synthetic oligonucleotide
aucaucgagugcccuguga

SEQ ID NO: 2051203 - RNA, 19 nt, Artificial Sequence
  Description of Artificial Sequence: Synthetic oligonucleotide
aucgagugcccugugagaa

SEQ ID NO: 2051204 - RNA, 19 nt, Artificial Sequence
  Description of Artificial Sequence: Synthetic oligonucleotide
agaccauccgcugagccau

SEQ ID NO: 2051205 - RNA, 19 nt, Artificial Sequence
  Description of Artificial Sequence: Synthetic oligonucleotide
ugcaccaaucugacaugcu

SEQ ID NO: 2051206 - RNA, 19 nt, Artificial Sequence
  Description of Artificial Sequence: Synthetic oligonucleotide
cauccgcugagccaugcuc

SEQ ID NO: 2051207 - RNA, 19 nt, Artificial Sequence
  Description of Artificial Sequence: Synthetic oligonucleotide
auaagcaagugcagauaug

SEQ ID NO: 2051208 - RNA, 19 nt, Artificial Sequence
  Description of Artificial Sequence: Synthetic oligonucleotide
ucaauagaacuagcuuuau

SEQ ID NO: 2051209 - RNA, 19 nt, Artificial Sequence
  Description of Artificial Sequence: Synthetic oligonucleotide
aucacccggcacgagccgc

SEQ ID NO: 2051210 - RNA, 19 nt, Artificial Sequence
  Description of Artificial Sequence: Synthetic oligonucleotide
acaccucgcgccccgaacu

SEQ ID NO: 2051211 - RNA, 19 nt, Artificial Sequence
  Description of Artificial Sequence: Synthetic oligonucleotide
auccggcuguuugauaauc

SEQ ID NO: 2051212 - RNA, 19 nt, Artificial Sequence
  Description of Artificial Sequence: Synthetic oligonucleotide
acuggggcauguauuuguc

SEQ ID NO: 2051213 - RNA, 19 nt, Artificial Sequence
  Description of Artificial Sequence: Synthetic oligonucleotide
auaauccucuggauaccag

SEQ ID NO: 2051214 - RNA, 19 nt, Artificial Sequence
  Description of Artificial Sequence: Synthetic oligonucleotide
uaucaucgagugcccugug

SEQ ID NO: 2051215 - RNA, 19 nt, Artificial Sequence
  Description of Artificial Sequence: Synthetic oligonucleotide
gugucauaacggaaacagc

SEQ ID NO: 2051216 - RNA, 19 nt, Artificial Sequence
  Description of Artificial Sequence: Synthetic oligonucleotide
cuuuaacagugcucacauc

SEQ ID NO: 2051217 - RNA, 19 nt, Artificial Sequence
  Description of Artificial Sequence: Synthetic oligonucleotide
auaacggaaacagcagguu

SEQ ID NO: 2051218 - RNA, 19 nt, Artificial Sequence
  Description of Artificial Sequence: Synthetic oligonucleotide
caaguggacagagccccgg

SEQ ID NO: 2051219 - RNA, 19 nt, Artificial Sequence
  Description of Artificial Sequence: Synthetic oligonucleotide
ucgcgccccgaacugcccg

SEQ ID NO: 2051220 - RNA, 19 nt, Artificial Sequence
  Description of Artificial Sequence: Synthetic oligonucleotide
ugcucacaucaauuauccu

SEQ ID NO: 2051221 - RNA, 19 nt, Artificial Sequence
  Description of Artificial Sequence: Synthetic oligonucleotide
gagaacuagguggcuguac

SEQ ID NO: 2051222 - RNA, 19 nt, Artificial Sequence
  Description of Artificial Sequence: Synthetic oligonucleotide
caggccaucucgauaaucu

SEQ ID NO: 2051223 - RNA, 19 nt, Artificial Sequence
  Description of Artificial Sequence: Synthetic oligonucleotide
ucacugccuugguaagacc

SEQ ID NO: 2051224 - RNA, 19 nt, Artificial Sequence
  Description of Artificial Sequence: Synthetic oligonucleotide
ggugcaaauucauaauccu

SEQ ID NO: 2051225 - RNA, 19 nt, Artificial Sequence
  Description of Artificial Sequence: Synthetic oligonucleotide
ggauacgccuagcaucacc

SEQ ID NO: 2051226 - RNA, 19 nt, Artificial Sequence
  Description of Artificial Sequence: Synthetic oligonucleotide
ucucgauaaucugauccuu

SEQ ID NO: 2051227 - RNA, 19 nt, Artificial Sequence
  Description of Artificial Sequence: Synthetic oligonucleotide
cauaauccucuggauacca

SEQ ID NO: 2051228 - RNA, 19 nt, Artificial Sequence
  Description of Artificial Sequence: Synthetic oligonucleotide
gagccaugcucuccccugc

SEQ ID NO: 2051229 - RNA, 19 nt, Artificial Sequence
  Description of Artificial Sequence: Synthetic oligonucleotide
uggagcccagggauacgcc

SEQ ID NO: 2051230 - RNA, 19 nt, Artificial Sequence
  Description of Artificial Sequence: Synthetic oligonucleotide
ucgcugacaccucgcgccc

SEQ ID NO: 2051231 - RNA, 19 nt, Artificial Sequence
  Description of Artificial Sequence: Synthetic oligonucleotide
gaacuggggcauguauuug

SEQ ID NO: 2051232 - RNA, 19 nt, Artificial Sequence
  Description of Artificial Sequence: Synthetic oligonucleotide
uggauaccagcgucugcac

SEQ ID NO: 2051233 - RNA, 19 nt, Artificial Sequence
  Description of Artificial Sequence: Synthetic oligonucleotide
ggcuguuugauaaucaggu

SEQ ID NO: 2051234 - RNA, 19 nt, Artificial Sequence
  Description of Artificial Sequence: Synthetic oligonucleotide
agauguuauuucgguaaaa

SEQ ID NO: 2051235 - RNA, 19 nt, Artificial Sequence
  Description of Artificial Sequence: Synthetic oligonucleotide
gucugcugucguacaaagg

SEQ ID NO: 2051236 - RNA, 19 nt, Artificial Sequence
  Description of Artificial Sequence: Synthetic oligonucleotide
ggaccuucagccaaaaugu

SEQ ID NO: 2051237 - RNA, 19 nt, Artificial Sequence
  Description of Artificial Sequence: Synthetic oligonucleotide
ucacccggcacgagccgcc

SEQ ID NO: 2051238 - RNA, 19 nt, Artificial Sequence
  Description of Artificial Sequence: Synthetic oligonucleotide
ggcuguacggcuugagaac

SEQ ID NO: 2051239 - RNA, 19 nt, Artificial Sequence
  Description of Artificial Sequence: Synthetic oligonucleotide
aagugcagauauggacuga

SEQ ID NO: 2051240 - RNA, 19 nt, Artificial Sequence
  Description of Artificial Sequence: Synthetic oligonucleotide
accauccgcugagccaugc

SEQ ID NO: 2051241 - RNA, 19 nt, Artificial Sequence
  Description of Artificial Sequence: Synthetic oligonucleotide
gacaccucgcgccccgaac

SEQ ID NO: 2051242 - RNA, 19 nt, Artificial Sequence
  Description of Artificial Sequence: Synthetic oligonucleotide
aagagacacuaaaguggcu

SEQ ID NO: 2051243 - RNA, 19 nt, Artificial Sequence
  Description of Artificial Sequence: Synthetic oligonucleotide
uaaucagguugggaccuuc

SEQ ID NO: 2051244 - RNA, 19 nt, Artificial Sequence
  Description of Artificial Sequence: Synthetic oligonucleotide
gaugcuccuugcaccaauc

SEQ ID NO: 2051245 - RNA, 19 nt, Artificial Sequence
  Description of Artificial Sequence: Synthetic oligonucleotide
cagaccauccgcugagcca

SEQ ID NO: 2051246 - RNA, 19 nt, Artificial Sequence
  Description of Artificial Sequence: Synthetic oligonucleotide
cuguacggcuugagaacug

SEQ ID NO: 2051247 - RNA, 19 nt, Artificial Sequence
  Description of Artificial Sequence: Synthetic oligonucleotide
uccuugcaccaaucugaca

SEQ ID NO: 2051248 - RNA, 19 nt, Artificial Sequence
  Description of Artificial Sequence: Synthetic oligonucleotide
guccacccagaccauccgc

SEQ ID NO: 2051249 - RNA, 19 nt, Artificial Sequence
  Description of Artificial Sequence: Synthetic oligonucleotide
caucacccggcacgagccg

SEQ ID NO: 2051250 - RNA, 19 nt, Artificial Sequence
  Description of Artificial Sequence: Synthetic oligonucleotide
cuauaagcaagugcagaua

SEQ ID NO: 2051251 - RNA, 19 nt, Artificial Sequence
  Description of Artificial Sequence: Synthetic oligonucleotide
acggaaacagcagguuaga

SEQ ID NO: 2051252 - RNA, 19 nt, Artificial Sequence
  Description of Artificial Sequence: Synthetic oligonucleotide
agaccagacuucccaugau

SEQ ID NO: 2051253 - RNA, 19 nt, Artificial Sequence
  Description of Artificial Sequence: Synthetic oligonucleotide
gguccacccagaccauccg

SEQ ID NO: 2051254 - RNA, 19 nt, Artificial Sequence
  Description of Artificial Sequence: Synthetic oligonucleotide
accucgcgccccgaacugc

SEQ ID NO: 2051255 - RNA, 19 nt, Artificial Sequence
  Description of Artificial Sequence: Synthetic oligonucleotide
accagcgucugcacagcuc

SEQ ID NO: 2051256 - RNA, 19 nt, Artificial Sequence
  Description of Artificial Sequence: Synthetic oligonucleotide
acaaaaggaauggccuaua

SEQ ID NO: 2051257 - RNA, 19 nt, Artificial Sequence
  Description of Artificial Sequence: Synthetic oligonucleotide
gcaagugcagauauggacu

SEQ ID NO: 2051258 - RNA, 19 nt, Artificial Sequence
  Description of Artificial Sequence: Synthetic oligonucleotide
ccuugcaccaaucugacau

SEQ ID NO: 2051259 - RNA, 19 nt, Artificial Sequence
  Description of Artificial Sequence: Synthetic oligonucleotide
uccgcugagccaugcucuc

SEQ ID NO: 2051260 - RNA, 19 nt, Artificial Sequence
  Description of Artificial Sequence: Synthetic oligonucleotide
uugucugcuugaggagucu

SEQ ID NO: 2051261 - RNA, 19 nt, Artificial Sequence
  Description of Artificial Sequence: Synthetic oligonucleotide
guaagaccagacuucccau

SEQ ID NO: 2051262 - RNA, 19 nt, Artificial Sequence
  Description of Artificial Sequence: Synthetic oligonucleotide
cuagcaucacccggcacga

SEQ ID NO: 2051263 - RNA, 19 nt, Artificial Sequence
  Description of Artificial Sequence: Synthetic oligonucleotide
gguugggaccuucagccaa

SEQ ID NO: 2051264 - RNA, 19 nt, Artificial Sequence
  Description of Artificial Sequence: Synthetic oligonucleotide
ugcgccacuuucgcugaca

SEQ ID NO: 2051265 - RNA, 19 nt, Artificial Sequence
  Description of Artificial Sequence: Synthetic oligonucleotide
cuggggcauguauuuguca

SEQ ID NO: 2051266 - RNA, 19 nt, Artificial Sequence
  Description of Artificial Sequence: Synthetic oligonucleotide
agagccccggaggagucug

SEQ ID NO: 2051267 - RNA, 19 nt, Artificial Sequence
  Description of Artificial Sequence: Synthetic oligonucleotide
guacggcuugagaacuggc

SEQ ID NO: 2051268 - RNA, 19 nt, Artificial Sequence
  Description of Artificial Sequence: Synthetic oligonucleotide
cacggccccagcccagccg

SEQ ID NO: 2051269 - RNA, 19 nt, Artificial Sequence
  Description of Artificial Sequence: Synthetic oligonucleotide
gaacuggcaucaacucaca

SEQ ID NO: 2051270 - RNA, 19 nt, Artificial Sequence
  Description of Artificial Sequence: Synthetic oligonucleotide
ccagaccauccgcugagcc

SEQ ID NO: 2051271 - RNA, 19 nt, Artificial Sequence
  Description of Artificial Sequence: Synthetic oligonucleotide
augcuuucgcuaauaucau

SEQ ID NO: 2051272 - RNA, 19 nt, Artificial Sequence
  Description of Artificial Sequence: Synthetic oligonucleotide
gccuauaagcaagugcaga

SEQ ID NO: 2051273 - RNA, 19 nt, Artificial Sequence
  Description of Artificial Sequence: Synthetic oligonucleotide
ugacaccucgcgccccgaa

SEQ ID NO: 2051274 - RNA, 19 nt, Artificial Sequence
  Description of Artificial Sequence: Synthetic oligonucleotide
ugccugccacccacgcccc

SEQ ID NO: 2051275 - RNA, 19 nt, Artificial Sequence
  Description of Artificial Sequence: Synthetic oligonucleotide
cugcccgugccugccaccc

SEQ ID NO: 2051276 - RNA, 19 nt, Artificial Sequence
  Description of Artificial Sequence: Synthetic oligonucleotide
ccugucaucuccaggucca

SEQ ID NO: 2051277 - RNA, 19 nt, Artificial Sequence
  Description of Artificial Sequence: Synthetic oligonucleotide
ggauaccagcgucugcaca

SEQ ID NO: 2051278 - RNA, 19 nt, Artificial Sequence
  Description of Artificial Sequence: Synthetic oligonucleotide
cacgccccgcaacagccug

SEQ ID NO: 2051279 - RNA, 19 nt, Artificial Sequence
  Description of Artificial Sequence: Synthetic oligonucleotide
ggccuauaagcaagugcag

SEQ ID NO: 2051280 - RNA, 19 nt, Artificial Sequence
  Description of Artificial Sequence: Synthetic oligonucleotide
gaauggccuauaagcaagu

SEQ ID NO: 2051281 - RNA, 19 nt, Artificial Sequence
  Description of Artificial Sequence: Synthetic oligonucleotide
ccaaucugacaugcugucc

SEQ ID NO: 2051282 - RNA, 19 nt, Artificial Sequence
  Description of Artificial Sequence: Synthetic oligonucleotide
ccuauaagcaagugcagau

SEQ ID NO: 2051283 - RNA, 19 nt, Artificial Sequence
  Description of Artificial Sequence: Synthetic oligonucleotide
ggcauguauuugucaagaa

SEQ ID NO: 2051284 - RNA, 19 nt, Artificial Sequence
  Description of Artificial Sequence: Synthetic oligonucleotide
ccaauccugucaucuccag

SEQ ID NO: 2051285 - RNA, 19 nt, Artificial Sequence
  Description of Artificial Sequence: Synthetic oligonucleotide
cugacaugcuguccagcaa

SEQ ID NO: 2051286 - RNA, 19 nt, Artificial Sequence
  Description of Artificial Sequence: Synthetic oligonucleotide
caauagaacuagcuuuauu

SEQ ID NO: 2051287 - RNA, 19 nt, Artificial Sequence
  Description of Artificial Sequence: Synthetic oligonucleotide
uggcugcgccacuuucgcu

SEQ ID NO: 2051288 - RNA, 19 nt, Artificial Sequence
  Description of Artificial Sequence: Synthetic oligonucleotide
caccucgcgccccgaacug

SEQ ID NO: 2051289 - RNA, 19 nt, Artificial Sequence
  Description of Artificial Sequence: Synthetic oligonucleotide
cucgcgccccgaacugccc

SEQ ID NO: 2051290 - RNA, 19 nt, Artificial Sequence
  Description of Artificial Sequence: Synthetic oligonucleotide
uugggaccuucagccaaaa

SEQ ID NO: 2051291 - RNA, 19 nt, Artificial Sequence
  Description of Artificial Sequence: Synthetic oligonucleotide
gcucuuuaacagugcucac

SEQ ID NO: 2051292 - RNA, 19 nt, Artificial Sequence
  Description of Artificial Sequence: Synthetic oligonucleotide
gaacugcccgugccugcca

SEQ ID NO: 2051293 - RNA, 19 nt, Artificial Sequence
  Description of Artificial Sequence: Synthetic oligonucleotide
agcgucugcacagcucuuu

SEQ ID NO: 2051294 - RNA, 19 nt, Artificial Sequence
  Description of Artificial Sequence: Synthetic oligonucleotide
guugggaccuucagccaaa

SEQ ID NO: 2051295 - RNA, 19 nt, Artificial Sequence
  Description of Artificial Sequence: Synthetic oligonucleotide
caguuaucagacaggccau

SEQ ID NO: 2051296 - RNA, 19 nt, Artificial Sequence
  Description of Artificial Sequence: Synthetic oligonucleotide
auaaucagguugggaccuu

SEQ ID NO: 2051297 - RNA, 19 nt, Artificial Sequence
  Description of Artificial Sequence: Synthetic oligonucleotide
ccaaaauguuaagaucaga

SEQ ID NO: 2051298 - RNA, 19 nt, Artificial Sequence
  Description of Artificial Sequence: Synthetic oligonucleotide
gccgccacggccccagccc

SEQ ID NO: 2051299 - RNA, 19 nt, Artificial Sequence
  Description of Artificial Sequence: Synthetic oligonucleotide
ccuugguaagaccagacuu

SEQ ID NO: 2051300 - RNA, 19 nt, Artificial Sequence
  Description of Artificial Sequence: Synthetic oligonucleotide
cgcuaauaucaucgagugc

SEQ ID NO: 2051301 - RNA, 19 nt, Artificial Sequence
  Description of Artificial Sequence: Synthetic oligonucleotide
cugucaucuccagguccac

SEQ ID NO: 2051302 - RNA, 19 nt, Artificial Sequence
  Description of Artificial Sequence: Synthetic oligonucleotide
gcaaguggacagagccccg

SEQ ID NO: 2051303 - RNA, 19 nt, Artificial Sequence
  Description of Artificial Sequence: Synthetic oligonucleotide
cacgagccgccacggcccc

SEQ ID NO: 2051304 - RNA, 19 nt, Artificial Sequence
  Description of Artificial Sequence: Synthetic oligonucleotide
gcacgagccgccacggccc

SEQ ID NO: 2051305 - RNA, 19 nt, Artificial Sequence
  Description of Artificial Sequence: Synthetic oligonucleotide
cagugcucacaucaauuau

SEQ ID NO: 2051306 - RNA, 19 nt, Artificial Sequence
  Description of Artificial Sequence: Synthetic oligonucleotide
gagcccagggauacgccua

SEQ ID NO: 2051307 - RNA, 19 nt, Artificial Sequence
  Description of Artificial Sequence: Synthetic oligonucleotide
gucguacaaaggacagaaa

SEQ ID NO: 2051308 - RNA, 19 nt, Artificial Sequence
  Description of Artificial Sequence: Synthetic oligonucleotide
gcgccacuuucgcugacac

SEQ ID NO: 2051309 - RNA, 19 nt, Artificial Sequence
  Description of Artificial Sequence: Synthetic oligonucleotide
agcaacucauccggcuguu

SEQ ID NO: 2051310 - RNA, 19 nt, Artificial Sequence
  Description of Artificial Sequence: Synthetic oligonucleotide
gccccgaacugcccgugcc

SEQ ID NO: 2051311 - RNA, 19 nt, Artificial Sequence
  Description of Artificial Sequence: Synthetic oligonucleotide
cuagguggcuguacggcuu

SEQ ID NO: 2051312 - RNA, 19 nt, Artificial Sequence
  Description of Artificial Sequence: Synthetic oligonucleotide
gcuguacggcuugagaacu

SEQ ID NO: 2051313 - RNA, 19 nt, Artificial Sequence
  Description of Artificial Sequence: Synthetic oligonucleotide
auccuauaaugaagauguu

SEQ ID NO: 2051314 - RNA, 19 nt, Artificial Sequence
  Description of Artificial Sequence: Synthetic oligonucleotide
ggagcccagggauacgccu

SEQ ID NO: 2051315 - RNA, 19 nt, Artificial Sequence
  Description of Artificial Sequence: Synthetic oligonucleotide
cuuugaugcuuucgcuaau

SEQ ID NO: 2051316 - RNA, 19 nt, Artificial Sequence
  Description of Artificial Sequence: Synthetic oligonucleotide
ggguaggcguggccugaag

SEQ ID NO: 2051317 - RNA, 19 nt, Artificial Sequence
  Description of Artificial Sequence: Synthetic oligonucleotide
ggaggagucugcugucgua

SEQ ID NO: 2051318 - RNA, 19 nt, Artificial Sequence
  Description of Artificial Sequence: Synthetic oligonucleotide
acgccccgcaacagccugg

SEQ ID NO: 2051319 - RNA, 19 nt, Artificial Sequence
  Description of Artificial Sequence: Synthetic oligonucleotide
agccccggaggagucugcu

SEQ ID NO: 2051320 - RNA, 19 nt, Artificial Sequence
  Description of Artificial Sequence: Synthetic oligonucleotide
gccuggagcccagggauac

SEQ ID NO: 2051321 - RNA, 19 nt, Artificial Sequence
  Description of Artificial Sequence: Synthetic oligonucleotide
gccuugguaagaccagacu

SEQ ID NO: 2051322 - RNA, 19 nt, Artificial Sequence
  Description of Artificial Sequence: Synthetic oligonucleotide
cucauccggcuguuugaua

SEQ ID NO: 2051323 - RNA, 19 nt, Artificial Sequence
  Description of Artificial Sequence: Synthetic oligonucleotide
aggcguggccugaagcuua

SEQ ID NO: 2051324 - RNA, 19 nt, Artificial Sequence
  Description of Artificial Sequence: Synthetic oligonucleotide
cggcuugagaacuggcauc

SEQ ID NO: 2051325 - RNA, 19 nt, Artificial Sequence
  Description of Artificial Sequence: Synthetic oligonucleotide
gccaucucgauaaucugau

SEQ ID NO: 2051326 - RNA, 19 nt, Artificial Sequence
  Description of Artificial Sequence: Synthetic oligonucleotide
gaccauccgcugagccaug

SEQ ID NO: 2051327 - RNA, 19 nt, Artificial Sequence
  Description of Artificial Sequence: Synthetic oligonucleotide
gcuguuugauaaucagguu

SEQ ID NO: 2051328 - RNA, 19 nt, Artificial Sequence
  Description of Artificial Sequence: Synthetic oligonucleotide
ugccacccacgccccgcaa

SEQ ID NO: 2051329 - RNA, 19 nt, Artificial Sequence
  Description of Artificial Sequence: Synthetic oligonucleotide
gagccccggaggagucugc

SEQ ID NO: 2051330 - RNA, 19 nt, Artificial Sequence
  Description of Artificial Sequence: Synthetic oligonucleotide
gacuucccaugaugcuccu

SEQ ID NO: 2051331 - RNA, 19 nt, Artificial Sequence
  Description of Artificial Sequence: Synthetic oligonucleotide
gaccuucagccaaaauguu

SEQ ID NO: 2051332 - RNA, 19 nt, Artificial Sequence
  Description of Artificial Sequence: Synthetic oligonucleotide
cugagccaugcucuccccu

SEQ ID NO: 2051333 - RNA, 19 nt, Artificial Sequence
  Description of Artificial Sequence: Synthetic oligonucleotide
gcccgugccugccacccac

SEQ ID NO: 2051334 - RNA, 19 nt, Artificial Sequence
  Description of Artificial Sequence: Synthetic oligonucleotide
ccacuuucgcugacaccuc

SEQ ID NO: 2051335 - RNA, 19 nt, Artificial Sequence
  Description of Artificial Sequence: Synthetic oligonucleotide
cgaacugcccgugccugcc

SEQ ID NO: 2051336 - RNA, 19 nt, Artificial Sequence
  Description of Artificial Sequence: Synthetic oligonucleotide
cugcgccacuuucgcugac

SEQ ID NO: 2051337 - RNA, 19 nt, Artificial Sequence
  Description of Artificial Sequence: Synthetic oligonucleotide
cauccggcuguuugauaau

SEQ ID NO: 2051338 - RNA, 19 nt, Artificial Sequence
  Description of Artificial Sequence: Synthetic oligonucleotide
cccgaacugcccgugccug

SEQ ID NO: 2051339 - RNA, 19 nt, Artificial Sequence
  Description of Artificial Sequence: Synthetic oligonucleotide
cccgugccugccacccacg

SEQ ID NO: 2051340 - RNA, 19 nt, Artificial Sequence
  Description of Artificial Sequence: Synthetic oligonucleotide
ccacccacgccccgcaaca

SEQ ID NO: 2051341 - RNA, 19 nt, Artificial Sequence
  Description of Artificial Sequence: Synthetic oligonucleotide
gcgucugcacagcucuuua

SEQ ID NO: 2051342 - RNA, 19 nt, Artificial Sequence
  Description of Artificial Sequence: Synthetic oligonucleotide
gccuagcaucacccggcac

SEQ ID NO: 2051343 - RNA, 19 nt, Artificial Sequence
  Description of Artificial Sequence: Synthetic oligonucleotide
ccgugccugccacccacgc

SEQ ID NO: 2051344 - RNA, 19 nt, Artificial Sequence
  Description of Artificial Sequence: Synthetic oligonucleotide
gccgaguuaucagcaggaa

SEQ ID NO: 2051345 - RNA, 19 nt, Artificial Sequence
  Description of Artificial Sequence: Synthetic oligonucleotide
ggcguggccugaagcuuac

SEQ ID NO: 2051346 - RNA, 19 nt, Artificial Sequence
  Description of Artificial Sequence: Synthetic oligonucleotide
gccugccacccacgccccg

SEQ ID NO: 2051347 - RNA, 19 nt, Artificial Sequence
  Description of Artificial Sequence: Synthetic oligonucleotide
ccgcugagccaugcucucc

SEQ ID NO: 2051348 - RNA, 19 nt, Artificial Sequence
  Description of Artificial Sequence: Synthetic oligonucleotide
gggauacgccuagcaucac

SEQ ID NO: 2051349 - RNA, 19 nt, Artificial Sequence
  Description of Artificial Sequence: Synthetic oligonucleotide
gcucuccccugccgccaug

SEQ ID NO: 2051350 - RNA, 19 nt, Artificial Sequence
  Description of Artificial Sequence: Synthetic oligonucleotide
cgucugcacagcucuuuaa

SEQ ID NO: 2051351 - RNA, 19 nt, Artificial Sequence
  Description of Artificial Sequence: Synthetic oligonucleotide
cugacaccucgcgccccga

SEQ ID NO: 2051352 - RNA, 19 nt, Artificial Sequence
  Description of Artificial Sequence: Synthetic oligonucleotide
acgagccgccacggcccca

SEQ ID NO: 2051353 - RNA, 19 nt, Artificial Sequence
  Description of Artificial Sequence: Synthetic oligonucleotide
cacccggcacgagccgcca

SEQ ID NO: 2051354 - RNA, 19 nt, Artificial Sequence
  Description of Artificial Sequence: Synthetic oligonucleotide
gggguaggcguggccugaa

SEQ ID NO: 2051355 - RNA, 19 nt, Artificial Sequence
  Description of Artificial Sequence: Synthetic oligonucleotide
cagagccccggaggagucu

SEQ ID NO: 2051356 - RNA, 19 nt, Artificial Sequence
  Description of Artificial Sequence: Synthetic oligonucleotide
cgccccgaacugcccgugc

SEQ ID NO: 2051357 - RNA, 19 nt, Artificial Sequence
  Description of Artificial Sequence: Synthetic oligonucleotide
ccgccacggccccagccca

SEQ ID NO: 2051358 - RNA, 19 nt, Artificial Sequence
  Description of Artificial Sequence: Synthetic oligonucleotide
gcgccccgaacugcccgug

SEQ ID NO: 2051359 - RNA, 19 nt, Artificial Sequence
  Description of Artificial Sequence: Synthetic oligonucleotide
cgccuagcaucacccggca

SEQ ID NO: 2051360 - RNA, 19 nt, Artificial Sequence
  Description of Artificial Sequence: Synthetic oligonucleotide
cgcugacaccucgcgcccc

SEQ ID NO: 2051361 - RNA, 19 nt, Artificial Sequence
  Description of Artificial Sequence: Synthetic oligonucleotide
gccauggcugcgccacuuu

SEQ ID NO: 2051362 - RNA, 19 nt, Artificial Sequence
  Description of Artificial Sequence: Synthetic oligonucleotide
ccccgaacugcccgugccu

SEQ ID NO: 2051363 - RNA, 19 nt, Artificial Sequence
  Description of Artificial Sequence: Synthetic oligonucleotide
cccugccgccauggcugcg

SEQ ID NO: 2051364 - RNA, 19 nt, Artificial Sequence
  Description of Artificial Sequence: Synthetic oligonucleotide
gcguggccugaagcuuaca

SEQ ID NO: 2051365 - RNA, 19 nt, Artificial Sequence
  Description of Artificial Sequence: Synthetic oligonucleotide
ccagcgcgcgcaggcgcca

SEQ ID NO: 2051366 - RNA, 19 nt, Artificial Sequence
  Description of Artificial Sequence: Synthetic oligonucleotide
cgcgccccgaacugcccgu

SEQ ID NO: 2051367 - RNA, 19 nt, Artificial Sequence
  Description of Artificial Sequence: Synthetic oligonucleotide
ccgccauggcugcgccacu

SEQ ID NO: 2051368 - RNA, 19 nt, Artificial Sequence
  Description of Artificial Sequence: Synthetic oligonucleotide
aaucgauagaaccagacag

SEQ ID NO: 2051369 - RNA, 19 nt, Artificial Sequence
  Description of Artificial Sequence: Synthetic oligonucleotide
aaagccauacuuccaaugc

SEQ ID NO: 2051370 - RNA, 19 nt, Artificial Sequence
  Description of Artificial Sequence: Synthetic oligonucleotide
ugugucuuuaucuagaagc

SEQ ID NO: 2051371 - RNA, 19 nt, Artificial Sequence
  Description of Artificial Sequence: Synthetic oligonucleotide
ucuucguuaaauugaacgg

SEQ ID NO: 2051372 - RNA, 19 nt, Artificial Sequence
  Description of Artificial Sequence: Synthetic oligonucleotide
acuuccaaugcauuagucc

SEQ ID NO: 2051373 - RNA, 19 nt, Artificial Sequence
  Description of Artificial Sequence: Synthetic oligonucleotide
ucuagaagccgcaaagugg

SEQ ID NO: 2051374 - RNA, 19 nt, Artificial Sequence
  Description of Artificial Sequence: Synthetic oligonucleotide
aauugaacgguguucaccu

SEQ ID NO: 2051375 - RNA, 19 nt, Artificial Sequence
  Description of Artificial Sequence: Synthetic oligonucleotide
cucuucguuaaauugaacg

SEQ ID NO: 2051376 - RNA, 19 nt, Artificial Sequence
  Description of Artificial Sequence: Synthetic oligonucleotide
acuguaccacacuagaacc

SEQ ID NO: 2051377 - RNA, 19 nt, Artificial Sequence
  Description of Artificial Sequence: Synthetic oligonucleotide
aaauugaacgguguucacc

SEQ ID NO: 2051378 - RNA, 19 nt, Artificial Sequence
  Description of Artificial Sequence: Synthetic oligonucleotide
uuggcuuggugucagaucc

SEQ ID NO: 2051379 - RNA, 19 nt, Artificial Sequence
  Description of Artificial Sequence: Synthetic oligonucleotide
aaauugucuuuguuggguc

SEQ ID NO: 2051380 - RNA, 19 nt, Artificial Sequence
  Description of Artificial Sequence: Synthetic oligonucleotide
agcuuuaggguuuuaucgc

SEQ ID NO: 2051381 - RNA, 19 nt, Artificial Sequence
  Description of Artificial Sequence: Synthetic oligonucleotide
auccuuaggucauagcgcc

SEQ ID NO: 2051382 - RNA, 19 nt, Artificial Sequence
  Description of Artificial Sequence: Synthetic oligonucleotide
aaucgcaccgcucucacug

SEQ ID NO: 2051383 - RNA, 19 nt, Artificial Sequence
  Description of Artificial Sequence: Synthetic oligonucleotide
cagcuuuaggguuuuaucg

SEQ ID NO: 2051384 - RNA, 19 nt, Artificial Sequence
  Description of Artificial Sequence: Synthetic oligonucleotide
ucuggcuucaucuagcguc

SEQ ID NO: 2051385 - RNA, 19 nt, Artificial Sequence
  Description of Artificial Sequence: Synthetic oligonucleotide
agaacccacggacagggcc

SEQ ID NO: 2051386 - RNA, 19 nt, Artificial Sequence
  Description of Artificial Sequence: Synthetic oligonucleotide
uucguuaaauugaacggug

SEQ ID NO: 2051387 - RNA, 19 nt, Artificial Sequence
  Description of Artificial Sequence: Synthetic oligonucleotide
ugucaaaagagccggcugc

SEQ ID NO: 2051388 - RNA, 19 nt, Artificial Sequence
  Description of Artificial Sequence: Synthetic oligonucleotide
ugccauccacauuaaaucg

SEQ ID NO: 2051389 - RNA, 19 nt, Artificial Sequence
  Description of Artificial Sequence: Synthetic oligonucleotide
ucuagaauaaauugucuuu

SEQ ID NO: 2051390 - RNA, 19 nt, Artificial Sequence
  Description of Artificial Sequence: Synthetic oligonucleotide
ugcauuaguccacuacccg

SEQ ID NO: 2051391 - RNA, 19 nt, Artificial Sequence
  Description of Artificial Sequence: Synthetic oligonucleotide
ugcuggaaucgauagaacc

SEQ ID NO: 2051392 - RNA, 19 nt, Artificial Sequence
  Description of Artificial Sequence: Synthetic oligonucleotide
agaucccuaagcaucagcc

SEQ ID NO: 2051393 - RNA, 19 nt, Artificial Sequence
  Description of Artificial Sequence: Synthetic oligonucleotide
aggguuuuaucgcugccgc

SEQ ID NO: 2051394 - RNA, 19 nt, Artificial Sequence
  Description of Artificial Sequence: Synthetic oligonucleotide
ucucacugcgcccuggccg

SEQ ID NO: 2051395 - RNA, 19 nt, Artificial Sequence
  Description of Artificial Sequence: Synthetic oligonucleotide
cuuuggcucaggaaaagcc

SEQ ID NO: 2051396 - RNA, 19 nt, Artificial Sequence
  Description of Artificial Sequence: Synthetic oligonucleotide
cacacuagaacccacggac

SEQ ID NO: 2051397 - RNA, 19 nt, Artificial Sequence
  Description of Artificial Sequence: Synthetic oligonucleotide
aucucuagaauaaauuguc

SEQ ID NO: 2051398 - RNA, 19 nt, Artificial Sequence
  Description of Artificial Sequence: Synthetic oligonucleotide
uuuacacuggauaugccau

SEQ ID NO: 2051399 - RNA, 19 nt, Artificial Sequence
  Description of Artificial Sequence: Synthetic oligonucleotide
uuuggcucaggaaaagcca

SEQ ID NO: 2051400 - RNA, 19 nt, Artificial Sequence
  Description of Artificial Sequence: Synthetic oligonucleotide
ucaucuagcgucugcacug

SEQ ID NO: 2051401 - RNA, 19 nt, Artificial Sequence
  Description of Artificial Sequence: Synthetic oligonucleotide
ucuucagccguuucugcgg

SEQ ID NO: 2051402 - RNA, 19 nt, Artificial Sequence
  Description of Artificial Sequence: Synthetic oligonucleotide
uugccauccacauuaaauc

SEQ ID NO: 2051403 - RNA, 19 nt, Artificial Sequence
  Description of Artificial Sequence: Synthetic oligonucleotide
gauaucagagugcacugac

SEQ ID NO: 2051404 - RNA, 19 nt, Artificial Sequence
  Description of Artificial Sequence: Synthetic oligonucleotide
uuuaggguuuuaucgcugc

SEQ ID NO: 2051405 - RNA, 19 nt, Artificial Sequence
  Description of Artificial Sequence: Synthetic oligonucleotide
uaguccacuacccgcauug

SEQ ID NO: 2051406 - RNA, 19 nt, Artificial Sequence
  Description of Artificial Sequence: Synthetic oligonucleotide
cuuuguugggucuucugag

SEQ ID NO: 2051407 - RNA, 19 nt, Artificial Sequence
  Description of Artificial Sequence: Synthetic oligonucleotide
aguacuggaugcugacacc

SEQ ID NO: 2051408 - RNA, 19 nt, Artificial Sequence
  Description of Artificial Sequence: Synthetic oligonucleotide
cuggauaugccaucucugg

SEQ ID NO: 2051409 - RNA, 19 nt, Artificial Sequence
  Description of Artificial Sequence: Synthetic oligonucleotide
aauugucuuuguugggucu

SEQ ID NO: 2051410 - RNA, 19 nt, Artificial Sequence
  Description of Artificial Sequence: Synthetic oligonucleotide
guaguugccauccacauua

SEQ ID NO: 2051411 - RNA, 19 nt, Artificial Sequence
  Description of Artificial Sequence: Synthetic oligonucleotide
cauccuuaggucauagcgc

SEQ ID NO: 2051412 - RNA, 19 nt, Artificial Sequence
  Description of Artificial Sequence: Synthetic oligonucleotide
gaaccagacaggaugacug

SEQ ID NO: 2051413 - RNA, 19 nt, Artificial Sequence
  Description of Artificial Sequence: Synthetic oligonucleotide
gucacgcucacucaggcag

SEQ ID NO: 2051414 - RNA, 19 nt, Artificial Sequence
  Description of Artificial Sequence: Synthetic oligonucleotide
uuauggccaacauacucgc

SEQ ID NO: 2051415 - RNA, 19 nt, Artificial Sequence
  Description of Artificial Sequence: Synthetic oligonucleotide
ugaccauccuggcugaagc

SEQ ID NO: 2051416 - RNA, 19 nt, Artificial Sequence
  Description of Artificial Sequence: Synthetic oligonucleotide
ucucuagaauaaauugucu

SEQ ID NO: 2051417 - RNA, 19 nt, Artificial Sequence
  Description of Artificial Sequence: Synthetic oligonucleotide
cauacuuccaaugcauuag

SEQ ID NO: 2051418 - RNA, 19 nt, Artificial Sequence
  Description of Artificial Sequence: Synthetic oligonucleotide
ugucuuuaucuagaagccg

SEQ ID NO: 2051419 - RNA, 19 nt, Artificial Sequence
  Description of Artificial Sequence: Synthetic oligonucleotide
auuaaaucgcaccgcucuc

SEQ ID NO: 2051420 - RNA, 19 nt, Artificial Sequence
  Description of Artificial Sequence: Synthetic oligonucleotide
gaugcugacacccauggcu

SEQ ID NO: 2051421 - RNA, 19 nt, Artificial Sequence
  Description of Artificial Sequence: Synthetic oligonucleotide
cuagaacccacggacaggg

SEQ ID NO: 2051422 - RNA, 19 nt, Artificial Sequence
  Description of Artificial Sequence: Synthetic oligonucleotide
gauuccgugggaugguaag

SEQ ID NO: 2051423 - RNA, 19 nt, Artificial Sequence
  Description of Artificial Sequence: Synthetic oligonucleotide
uugucaaaagagccggcug

SEQ ID NO: 2051424 - RNA, 19 nt, Artificial Sequence
  Description of Artificial Sequence: Synthetic oligonucleotide
uucaucuagcgucugcacu

SEQ ID NO: 2051425 - RNA, 19 nt, Artificial Sequence
  Description of Artificial Sequence: Synthetic oligonucleotide
gaugcuggaaucgauagaa

SEQ ID NO: 2051426 - RNA, 19 nt, Artificial Sequence
  Description of Artificial Sequence: Synthetic oligonucleotide
guugguguggguccuuugg

SEQ ID NO: 2051427 - RNA, 19 nt, Artificial Sequence
  Description of Artificial Sequence: Synthetic oligonucleotide
uaccacacuagaacccacg

SEQ ID NO: 2051428 - RNA, 19 nt, Artificial Sequence
  Description of Artificial Sequence: Synthetic oligonucleotide
aagccauacuuccaaugca

SEQ ID NO: 2051429 - RNA, 19 nt, Artificial Sequence
  Description of Artificial Sequence: Synthetic oligonucleotide
aaauuugcgcacgaccugu

SEQ ID NO: 2051430 - RNA, 19 nt, Artificial Sequence
  Description of Artificial Sequence: Synthetic oligonucleotide
cuagaagccgcaaagugga

SEQ ID NO: 2051431 - RNA, 19 nt, Artificial Sequence
  Description of Artificial Sequence: Synthetic oligonucleotide
cuuuacacuggauaugcca

SEQ ID NO: 2051432 - RNA, 19 nt, Artificial Sequence
  Description of Artificial Sequence: Synthetic oligonucleotide
augacuguaccacacuaga

SEQ ID NO: 2051433 - RNA, 19 nt, Artificial Sequence
  Description of Artificial Sequence: Synthetic oligonucleotide
gucuuuaucuagaagccgc

SEQ ID NO: 2051434 - RNA, 19 nt, Artificial Sequence
  Description of Artificial Sequence: Synthetic oligonucleotide
gaaucgauagaaccagaca

SEQ ID NO: 2051435 - RNA, 19 nt, Artificial Sequence
  Description of Artificial Sequence: Synthetic oligonucleotide
agcacuucguagccguggc

SEQ ID NO: 2051436 - RNA, 19 nt, Artificial Sequence
  Description of Artificial Sequence: Synthetic oligonucleotide
gaaauuugcgcacgaccug

SEQ ID NO: 2051437 - RNA, 19 nt, Artificial Sequence
  Description of Artificial Sequence: Synthetic oligonucleotide
uuaucgcugccgcagguca

SEQ ID NO: 2051438 - RNA, 19 nt, Artificial Sequence
  Description of Artificial Sequence: Synthetic oligonucleotide
ucauaggucucuucucgcc

SEQ ID NO: 2051439 - RNA, 19 nt, Artificial Sequence
  Description of Artificial Sequence: Synthetic oligonucleotide
guuaaauugaacgguguuc

SEQ ID NO: 2051440 - RNA, 19 nt, Artificial Sequence
  Description of Artificial Sequence: Synthetic oligonucleotide
augcauuaguccacuaccc

SEQ ID NO: 2051441 - RNA, 19 nt, Artificial Sequence
  Description of Artificial Sequence: Synthetic oligonucleotide
uggauaucagagugcacug

SEQ ID NO: 2051442 - RNA, 19 nt, Artificial Sequence
  Description of Artificial Sequence: Synthetic oligonucleotide
accacacuagaacccacgg

SEQ ID NO: 2051443 - RNA, 19 nt, Artificial Sequence
  Description of Artificial Sequence: Synthetic oligonucleotide
gaagccgcaaaguggaguc

SEQ ID NO: 2051444 - RNA, 19 nt, Artificial Sequence
  Description of Artificial Sequence: Synthetic oligonucleotide
aacgguguucaccuuucca

SEQ ID NO: 2051445 - RNA, 19 nt, Artificial Sequence
  Description of Artificial Sequence: Synthetic oligonucleotide
aucgauagaaccagacagg

SEQ ID NO: 2051446 - RNA, 19 nt, Artificial Sequence
  Description of Artificial Sequence: Synthetic oligonucleotide
caggcagcagucuagcuug

SEQ ID NO: 2051447 - RNA, 19 nt, Artificial Sequence
  Description of Artificial Sequence: Synthetic oligonucleotide
uuugcgcacgaccugucca

SEQ ID NO: 2051448 - RNA, 19 nt, Artificial Sequence
  Description of Artificial Sequence: Synthetic oligonucleotide
caguacuggaugcugacac

SEQ ID NO: 2051449 - RNA, 19 nt, Artificial Sequence
  Description of Artificial Sequence: Synthetic oligonucleotide
ucguuaaauugaacggugu

SEQ ID NO: 2051450 - RNA, 19 nt, Artificial Sequence
  Description of Artificial Sequence: Synthetic oligonucleotide
uggugucagaucccuaagc

SEQ ID NO: 2051451 - RNA, 19 nt, Artificial Sequence
  Description of Artificial Sequence: Synthetic oligonucleotide
ugggaugguaagccaauga

SEQ ID NO: 2051452 - RNA, 19 nt, Artificial Sequence
  Description of Artificial Sequence: Synthetic oligonucleotide
caaugcauuaguccacuac

SEQ ID NO: 2051453 - RNA, 19 nt, Artificial Sequence
  Description of Artificial Sequence: Synthetic oligonucleotide
uuuguugggucuucugagu

SEQ ID NO: 2051454 - RNA, 19 nt, Artificial Sequence
  Description of Artificial Sequence: Synthetic oligonucleotide
uguaccacacuagaaccca

SEQ ID NO: 2051455 - RNA, 19 nt, Artificial Sequence
  Description of Artificial Sequence: Synthetic oligonucleotide
auaucagagugcacugacc

SEQ ID NO: 2051456 - RNA, 19 nt, Artificial Sequence
  Description of Artificial Sequence: Synthetic oligonucleotide
agcaucggaugcuggaauc

SEQ ID NO: 2051457 - RNA, 19 nt, Artificial Sequence
  Description of Artificial Sequence: Synthetic oligonucleotide
cuguaccacacuagaaccc

SEQ ID NO: 2051458 - RNA, 19 nt, Artificial Sequence
  Description of Artificial Sequence: Synthetic oligonucleotide
acuggcucaggcuuccgag

SEQ ID NO: 2051459 - RNA, 19 nt, Artificial Sequence
  Description of Artificial Sequence: Synthetic oligonucleotide
uuaggguuuuaucgcugcc

SEQ ID NO: 2051460 - RNA, 19 nt, Artificial Sequence
  Description of Artificial Sequence: Synthetic oligonucleotide
cuggaaucgauagaaccag

SEQ ID NO: 2051461 - RNA, 19 nt, Artificial Sequence
  Description of Artificial Sequence: Synthetic oligonucleotide
acuguacguccgcagcagc

SEQ ID NO: 2051462 - RNA, 19 nt, Artificial Sequence
  Description of Artificial Sequence: Synthetic oligonucleotide
uuaaaucgcaccgcucuca

SEQ ID NO: 2051463 - RNA, 19 nt, Artificial Sequence
  Description of Artificial Sequence: Synthetic oligonucleotide
auaggucucuucucgccag

SEQ ID NO: 2051464 - RNA, 19 nt, Artificial Sequence
  Description of Artificial Sequence: Synthetic oligonucleotide
uuggugucagaucccuaag

SEQ ID NO: 2051465 - RNA, 19 nt, Artificial Sequence
  Description of Artificial Sequence: Synthetic oligonucleotide
uugguguggguccuuuggc

SEQ ID NO: 2051466 - RNA, 19 nt, Artificial Sequence
  Description of Artificial Sequence: Synthetic oligonucleotide
guuuuaucgcugccgcagg

SEQ ID NO: 2051467 - RNA, 19 nt, Artificial Sequence
  Description of Artificial Sequence: Synthetic oligonucleotide
aguccagcgucuucagccg

SEQ ID NO: 2051468 - RNA, 19 nt, Artificial Sequence
  Description of Artificial Sequence: Synthetic oligonucleotide
gaccacaugugugucacgc

SEQ ID NO: 2051469 - RNA, 19 nt, Artificial Sequence
  Description of Artificial Sequence: Synthetic oligonucleotide
cauagcgccucacucgacc

SEQ ID NO: 2051470 - RNA, 19 nt, Artificial Sequence
  Description of Artificial Sequence: Synthetic oligonucleotide
cacuagaacccacggacag

SEQ ID NO: 2051471 - RNA, 19 nt, Artificial Sequence
  Description of Artificial Sequence: Synthetic oligonucleotide
gagugcacugaccauccug

SEQ ID NO: 2051472 - RNA, 19 nt, Artificial Sequence
  Description of Artificial Sequence: Synthetic oligonucleotide
uaaaucgcaccgcucucac

SEQ ID NO: 2051473 - RNA, 19 nt, Artificial Sequence
  Description of Artificial Sequence: Synthetic oligonucleotide
uagccguggccacuguacg

SEQ ID NO: 2051474 - RNA, 19 nt, Artificial Sequence
  Description of Artificial Sequence: Synthetic oligonucleotide
uucucgccaguacuggaug

SEQ ID NO: 2051475 - RNA, 19 nt, Artificial Sequence
  Description of Artificial Sequence: Synthetic oligonucleotide
ucagagugcacugaccauc

SEQ ID NO: 2051476 - RNA, 19 nt, Artificial Sequence
  Description of Artificial Sequence: Synthetic oligonucleotide
cuuuaggguuuuaucgcug

SEQ ID NO: 2051477 - RNA, 19 nt, Artificial Sequence
  Description of Artificial Sequence: Synthetic oligonucleotide
aacggcagucccagcaucg

SEQ ID NO: 2051478 - RNA, 19 nt, Artificial Sequence
  Description of Artificial Sequence: Synthetic oligonucleotide
uccagcguggccccgaaau

SEQ ID NO: 2051479 - RNA, 19 nt, Artificial Sequence
  Description of Artificial Sequence: Synthetic oligonucleotide
cuguacguccgcagcagcg

SEQ ID NO: 2051480 - RNA, 19 nt, Artificial Sequence
  Description of Artificial Sequence: Synthetic oligonucleotide
uguugucaaaagagccggc

SEQ ID NO: 2051481 - RNA, 19 nt, Artificial Sequence
  Description of Artificial Sequence: Synthetic oligonucleotide
ugaacgguguucaccuuuc

SEQ ID NO: 2051482 - RNA, 19 nt, Artificial Sequence
  Description of Artificial Sequence: Synthetic oligonucleotide
cagagugcacugaccaucc

SEQ ID NO: 2051483 - RNA, 19 nt, Artificial Sequence
  Description of Artificial Sequence: Synthetic oligonucleotide
gguguucaccuuuccagcg

SEQ ID NO: 2051484 - RNA, 19 nt, Artificial Sequence
  Description of Artificial Sequence: Synthetic oligonucleotide
uaaauugaacgguguucac

SEQ ID NO: 2051485 - RNA, 19 nt, Artificial Sequence
  Description of Artificial Sequence: Synthetic oligonucleotide
uuggcucaggaaaagccau

SEQ ID NO: 2051486 - RNA, 19 nt, Artificial Sequence
  Description of Artificial Sequence: Synthetic oligonucleotide
uuuuaucgcugccgcaggu

SEQ ID NO: 2051487 - RNA, 19 nt, Artificial Sequence
  Description of Artificial Sequence: Synthetic oligonucleotide
cucauaggucucuucucgc

SEQ ID NO: 2051488 - RNA, 19 nt, Artificial Sequence
  Description of Artificial Sequence: Synthetic oligonucleotide
cauuaguccacuacccgca

SEQ ID NO: 2051489 - RNA, 19 nt, Artificial Sequence
  Description of Artificial Sequence: Synthetic oligonucleotide
ugacuguaccacacuagaa

SEQ ID NO: 2051490 - RNA, 19 nt, Artificial Sequence
  Description of Artificial Sequence: Synthetic oligonucleotide
guacuggaugcugacaccc

SEQ ID NO: 2051491 - RNA, 19 nt, Artificial Sequence
  Description of Artificial Sequence: Synthetic oligonucleotide
cugucagcaggcaggauuc

SEQ ID NO: 2051492 - RNA, 19 nt, Artificial Sequence
  Description of Artificial Sequence: Synthetic oligonucleotide
uugaacgguguucaccuuu

SEQ ID NO: 2051493 - RNA, 19 nt, Artificial Sequence
  Description of Artificial Sequence: Synthetic oligonucleotide
cauuaaaucgcaccgcucu

SEQ ID NO: 2051494 - RNA, 19 nt, Artificial Sequence
  Description of Artificial Sequence: Synthetic oligonucleotide
uacuuccaaugcauuaguc

SEQ ID NO: 2051495 - RNA, 19 nt, Artificial Sequence
  Description of Artificial Sequence: Synthetic oligonucleotide
gguuuuaucgcugccgcag

SEQ ID NO: 2051496 - RNA, 19 nt, Artificial Sequence
  Description of Artificial Sequence: Synthetic oligonucleotide
gcuguugucaaaagagccg

SEQ ID NO: 2051497 - RNA, 19 nt, Artificial Sequence
  Description of Artificial Sequence: Synthetic oligonucleotide
guaagccaaugacuguacc

SEQ ID NO: 2051498 - RNA, 19 nt, Artificial Sequence
  Description of Artificial Sequence: Synthetic oligonucleotide
ucaccuuuccagcguggcc

SEQ ID NO: 2051499 - RNA, 19 nt, Artificial Sequence
  Description of Artificial Sequence: Synthetic oligonucleotide
uuccgagaacggcaguccc

SEQ ID NO: 2051500 - RNA, 19 nt, Artificial Sequence
  Description of Artificial Sequence: Synthetic oligonucleotide
agcagcugaccacaugugu

SEQ ID NO: 2051501 - RNA, 19 nt, Artificial Sequence
  Description of Artificial Sequence: Synthetic oligonucleotide
uugcgcacgaccuguccag

SEQ ID NO: 2051502 - RNA, 19 nt, Artificial Sequence
  Description of Artificial Sequence: Synthetic oligonucleotide
aagccgcaaaguggagucc

SEQ ID NO: 2051503 - RNA, 19 nt, Artificial Sequence
  Description of Artificial Sequence: Synthetic oligonucleotide
gcauuaguccacuacccgc

SEQ ID NO: 2051504 - RNA, 19 nt, Artificial Sequence
  Description of Artificial Sequence: Synthetic oligonucleotide
uggaaucgauagaaccaga

SEQ ID NO: 2051505 - RNA, 19 nt, Artificial Sequence
  Description of Artificial Sequence: Synthetic oligonucleotide
uuguugggucuucugaguu

SEQ ID NO: 2051506 - RNA, 19 nt, Artificial Sequence
  Description of Artificial Sequence: Synthetic oligonucleotide
agcagagauggcuguuguc

SEQ ID NO: 2051507 - RNA, 19 nt, Artificial Sequence
  Description of Artificial Sequence: Synthetic oligonucleotide
agcgucuucagccguuucu

SEQ ID NO: 2051508 - RNA, 19 nt, Artificial Sequence
  Description of Artificial Sequence: Synthetic oligonucleotide
acuagaacccacggacagg

SEQ ID NO: 2051509 - RNA, 19 nt, Artificial Sequence
  Description of Artificial Sequence: Synthetic oligonucleotide
cacguagucugagaagacc

SEQ ID NO: 2051510 - RNA, 19 nt, Artificial Sequence
  Description of Artificial Sequence: Synthetic oligonucleotide
gggaugguaagccaaugac

SEQ ID NO: 2051511 - RNA, 19 nt, Artificial Sequence
  Description of Artificial Sequence: Synthetic oligonucleotide
gugugucacgcucacucag

SEQ ID NO: 2051512 - RNA, 19 nt, Artificial Sequence
  Description of Artificial Sequence: Synthetic oligonucleotide
caaaagagccggcugcauc

SEQ ID NO: 2051513 - RNA, 19 nt, Artificial Sequence
  Description of Artificial Sequence: Synthetic oligonucleotide
uuacacuggauaugccauc

SEQ ID NO: 2051514 - RNA, 19 nt, Artificial Sequence
  Description of Artificial Sequence: Synthetic oligonucleotide
agauggcuguugucaaaag

SEQ ID NO: 2051515 - RNA, 19 nt, Artificial Sequence
  Description of Artificial Sequence: Synthetic oligonucleotide
ucaggcuuccgagaacggc

SEQ ID NO: 2051516 - RNA, 19 nt, Artificial Sequence
  Description of Artificial Sequence: Synthetic oligonucleotide
ucucgccaguacuggaugc

SEQ ID NO: 2051517 - RNA, 19 nt, Artificial Sequence
  Description of Artificial Sequence: Synthetic oligonucleotide
aauuugcgcacgaccuguc

SEQ ID NO: 2051518 - RNA, 19 nt, Artificial Sequence
  Description of Artificial Sequence: Synthetic oligonucleotide
ugguguggguccuuuggcu

SEQ ID NO: 2051519 - RNA, 19 nt, Artificial Sequence
  Description of Artificial Sequence: Synthetic oligonucleotide
accgucuuguccccaccac

SEQ ID NO: 2051520 - RNA, 19 nt, Artificial Sequence
  Description of Artificial Sequence: Synthetic oligonucleotide
uggaguccaggcuggauau

SEQ ID NO: 2051521 - RNA, 19 nt, Artificial Sequence
  Description of Artificial Sequence: Synthetic oligonucleotide
acauuaaaucgcaccgcuc

SEQ ID NO: 2051522 - RNA, 19 nt, Artificial Sequence
  Description of Artificial Sequence: Synthetic oligonucleotide
uccaaugcauuaguccacu

SEQ ID NO: 2051523 - RNA, 19 nt, Artificial Sequence
  Description of Artificial Sequence: Synthetic oligonucleotide
uccgagaacggcaguccca

SEQ ID NO: 2051524 - RNA, 19 nt, Artificial Sequence
  Description of Artificial Sequence: Synthetic oligonucleotide
acuggauaugccaucucug

SEQ ID NO: 2051525 - RNA, 19 nt, Artificial Sequence
  Description of Artificial Sequence: Synthetic oligonucleotide
uccgcagcagcgucccacg

SEQ ID NO: 2051526 - RNA, 19 nt, Artificial Sequence
  Description of Artificial Sequence: Synthetic oligonucleotide
cucacucgaccauccacag

SEQ ID NO: 2051527 - RNA, 19 nt, Artificial Sequence
  Description of Artificial Sequence: Synthetic oligonucleotide
uauggccaacauacucgcc

SEQ ID NO: 2051528 - RNA, 19 nt, Artificial Sequence
  Description of Artificial Sequence: Synthetic oligonucleotide
cugugucuuuaucuagaag

SEQ ID NO: 2051529 - RNA, 19 nt, Artificial Sequence
  Description of Artificial Sequence: Synthetic oligonucleotide
cccagaagaacacuuuccc

SEQ ID NO: 2051530 - RNA, 19 nt, Artificial Sequence
  Description of Artificial Sequence: Synthetic oligonucleotide
cucacugcgcccuggccgc

SEQ ID NO: 2051531 - RNA, 19 nt, Artificial Sequence
  Description of Artificial Sequence: Synthetic oligonucleotide
cacucaggcagcagucuag

SEQ ID NO: 2051532 - RNA, 19 nt, Artificial Sequence
  Description of Artificial Sequence: Synthetic oligonucleotide
auaugccaucucuggcuuc

SEQ ID NO: 2051533 - RNA, 19 nt, Artificial Sequence
  Description of Artificial Sequence: Synthetic oligonucleotide
caacauacucgcccagcag

SEQ ID NO: 2051534 - RNA, 19 nt, Artificial Sequence
  Description of Artificial Sequence: Synthetic oligonucleotide
aaaucgcaccgcucucacu

SEQ ID NO: 2051535 - RNA, 19 nt, Artificial Sequence
  Description of Artificial Sequence: Synthetic oligonucleotide
accaccgucuuguccccac

SEQ ID NO: 2051536 - RNA, 19 nt, Artificial Sequence
  Description of Artificial Sequence: Synthetic oligonucleotide
cugaccacaugugugucac

SEQ ID NO: 2051537 - RNA, 19 nt, Artificial Sequence
  Description of Artificial Sequence: Synthetic oligonucleotide
cacggacagggccaguacc

SEQ ID NO: 2051538 - RNA, 19 nt, Artificial Sequence
  Description of Artificial Sequence: Synthetic oligonucleotide
ccgaaauuugcgcacgacc

SEQ ID NO: 2051539 - RNA, 19 nt, Artificial Sequence
  Description of Artificial Sequence: Synthetic oligonucleotide
auagcgccucacucgacca

SEQ ID NO: 2051540 - RNA, 19 nt, Artificial Sequence
  Description of Artificial Sequence: Synthetic oligonucleotide
guggccccgaaauuugcgc

SEQ ID NO: 2051541 - RNA, 19 nt, Artificial Sequence
  Description of Artificial Sequence: Synthetic oligonucleotide
ucgcaccgcucucacugcg

SEQ ID NO: 2051542 - RNA, 19 nt, Artificial Sequence
  Description of Artificial Sequence: Synthetic oligonucleotide
uagaagccgcaaaguggag

SEQ ID NO: 2051543 - RNA, 19 nt, Artificial Sequence
  Description of Artificial Sequence: Synthetic oligonucleotide
ggcacccucuaccaggucc

SEQ ID NO: 2051544 - RNA, 19 nt, Artificial Sequence
  Description of Artificial Sequence: Synthetic oligonucleotide
cuggauaucagagugcacu

SEQ ID NO: 2051545 - RNA, 19 nt, Artificial Sequence
  Description of Artificial Sequence: Synthetic oligonucleotide
ucacucaggcagcagucua

SEQ ID NO: 2051546 - RNA, 19 nt, Artificial Sequence
  Description of Artificial Sequence: Synthetic oligonucleotide
acacuggauaugccaucuc

SEQ ID NO: 2051547 - RNA, 19 nt, Artificial Sequence
  Description of Artificial Sequence: Synthetic oligonucleotide
gcaggauuccgugggaugg

SEQ ID NO: 2051548 - RNA, 19 nt, Artificial Sequence
  Description of Artificial Sequence: Synthetic oligonucleotide
uguacguccgcagcagcgu

SEQ ID NO: 2051549 - RNA, 19 nt, Artificial Sequence
  Description of Artificial Sequence: Synthetic oligonucleotide
cucuucucgccaguacugg

SEQ ID NO: 2051550 - RNA, 19 nt, Artificial Sequence
  Description of Artificial Sequence: Synthetic oligonucleotide
agagccggcugcauccagc

SEQ ID NO: 2051551 - RNA, 19 nt, Artificial Sequence
  Description of Artificial Sequence: Synthetic oligonucleotide
gugucacgcucacucaggc

SEQ ID NO: 2051552 - RNA, 19 nt, Artificial Sequence
  Description of Artificial Sequence: Synthetic oligonucleotide
gaguccaggcuggauauca

SEQ ID NO: 2051553 - RNA, 19 nt, Artificial Sequence
  Description of Artificial Sequence: Synthetic oligonucleotide
gcucaggcuuccgagaacg

SEQ ID NO: 2051554 - RNA, 19 nt, Artificial Sequence
  Description of Artificial Sequence: Synthetic oligonucleotide
ggaaucgauagaaccagac

SEQ ID NO: 2051555 - RNA, 19 nt, Artificial Sequence
  Description of Artificial Sequence: Synthetic oligonucleotide
aguccacuacccgcauugc

SEQ ID NO: 2051556 - RNA, 19 nt, Artificial Sequence
  Description of Artificial Sequence: Synthetic oligonucleotide
uuuaucgcugccgcagguc

SEQ ID NO: 2051557 - RNA, 19 nt, Artificial Sequence
  Description of Artificial Sequence: Synthetic oligonucleotide
gucuuuguugggucuucug

SEQ ID NO: 2051558 - RNA, 19 nt, Artificial Sequence
  Description of Artificial Sequence: Synthetic oligonucleotide
ugucacgcucacucaggca

SEQ ID NO: 2051559 - RNA, 19 nt, Artificial Sequence
  Description of Artificial Sequence: Synthetic oligonucleotide
agaacggcagucccagcau

SEQ ID NO: 2051560 - RNA, 19 nt, Artificial Sequence
  Description of Artificial Sequence: Synthetic oligonucleotide
cauaggucucuucucgcca

SEQ ID NO: 2051561 - RNA, 19 nt, Artificial Sequence
  Description of Artificial Sequence: Synthetic oligonucleotide
ugaccacaugugugucacg

SEQ ID NO: 2051562 - RNA, 19 nt, Artificial Sequence
  Description of Artificial Sequence: Synthetic oligonucleotide
uccgugggaugguaagcca

SEQ ID NO: 2051563 - RNA, 19 nt, Artificial Sequence
  Description of Artificial Sequence: Synthetic oligonucleotide
gaacgguguucaccuuucc

SEQ ID NO: 2051564 - RNA, 19 nt, Artificial Sequence
  Description of Artificial Sequence: Synthetic oligonucleotide
cucuagaauaaauugucuu

SEQ ID NO: 2051565 - RNA, 19 nt, Artificial Sequence
  Description of Artificial Sequence: Synthetic oligonucleotide
guagccguggccacuguac

SEQ ID NO: 2051566 - RNA, 19 nt, Artificial Sequence
  Description of Artificial Sequence: Synthetic oligonucleotide
aguaccagggcacccucua

SEQ ID NO: 2051567 - RNA, 19 nt, Artificial Sequence
  Description of Artificial Sequence: Synthetic oligonucleotide
ucacucgaccauccacaga

SEQ ID NO: 2051568 - RNA, 19 nt, Artificial Sequence
  Description of Artificial Sequence: Synthetic oligonucleotide
gcuggaaucgauagaacca

SEQ ID NO: 2051569 - RNA, 19 nt, Artificial Sequence
  Description of Artificial Sequence: Synthetic oligonucleotide
uguggccucuucguuaaau

SEQ ID NO: 2051570 - RNA, 19 nt, Artificial Sequence
  Description of Artificial Sequence: Synthetic oligonucleotide
caucuagcgucugcacugg

SEQ ID NO: 2051571 - RNA, 19 nt, Artificial Sequence
  Description of Artificial Sequence: Synthetic oligonucleotide
aucagagugcacugaccau

SEQ ID NO: 2051572 - RNA, 19 nt, Artificial Sequence
  Description of Artificial Sequence: Synthetic oligonucleotide
gaacccacggacagggcca

SEQ ID NO: 2051573 - RNA, 19 nt, Artificial Sequence
  Description of Artificial Sequence: Synthetic oligonucleotide
caaugacuguaccacacua

SEQ ID NO: 2051574 - RNA, 19 nt, Artificial Sequence
  Description of Artificial Sequence: Synthetic oligonucleotide
acguccgcagcagcguccc

SEQ ID NO: 2051575 - RNA, 19 nt, Artificial Sequence
  Description of Artificial Sequence: Synthetic oligonucleotide
cuucguuaaauugaacggu

SEQ ID NO: 2051576 - RNA, 19 nt, Artificial Sequence
  Description of Artificial Sequence: Synthetic oligonucleotide
agccauacuuccaaugcau

SEQ ID NO: 2051577 - RNA, 19 nt, Artificial Sequence
  Description of Artificial Sequence: Synthetic oligonucleotide
cagcacuucguagccgugg

SEQ ID NO: 2051578 - RNA, 19 nt, Artificial Sequence
  Description of Artificial Sequence: Synthetic oligonucleotide
accacaugugugucacgcu

SEQ ID NO: 2051579 - RNA, 19 nt, Artificial Sequence
  Description of Artificial Sequence: Synthetic oligonucleotide
aaagagccggcugcaucca

SEQ ID NO: 2051580 - RNA, 19 nt, Artificial Sequence
  Description of Artificial Sequence: Synthetic oligonucleotide
agaagaccugccccauccu

SEQ ID NO: 2051581 - RNA, 19 nt, Artificial Sequence
  Description of Artificial Sequence: Synthetic oligonucleotide
gaacggcagucccagcauc

SEQ ID NO: 2051582 - RNA, 19 nt, Artificial Sequence
  Description of Artificial Sequence: Synthetic oligonucleotide
caccuuuacacuggauaug

SEQ ID NO: 2051583 - RNA, 19 nt, Artificial Sequence
  Description of Artificial Sequence: Synthetic oligonucleotide
caggaucucauggucugac

SEQ ID NO: 2051584 - RNA, 19 nt, Artificial Sequence
  Description of Artificial Sequence: Synthetic oligonucleotide
uccuuaggucauagcgccu

SEQ ID NO: 2051585 - RNA, 19 nt, Artificial Sequence
  Description of Artificial Sequence: Synthetic oligonucleotide
uagcgucugcacuggcuca

SEQ ID NO: 2051586 - RNA, 19 nt, Artificial Sequence
  Description of Artificial Sequence: Synthetic oligonucleotide
agcugaccacauguguguc

SEQ ID NO: 2051587 - RNA, 19 nt, Artificial Sequence
  Description of Artificial Sequence: Synthetic oligonucleotide
uuaggucauagcgccucac

SEQ ID NO: 2051588 - RNA, 19 nt, Artificial Sequence
  Description of Artificial Sequence: Synthetic oligonucleotide
gauaugccaucucuggcuu

SEQ ID NO: 2051589 - RNA, 19 nt, Artificial Sequence
  Description of Artificial Sequence: Synthetic oligonucleotide
gcaucggaugcuggaaucg

SEQ ID NO: 2051590 - RNA, 19 nt, Artificial Sequence
  Description of Artificial Sequence: Synthetic oligonucleotide
uuaguccacuacccgcauu

SEQ ID NO: 2051591 - RNA, 19 nt, Artificial Sequence
  Description of Artificial Sequence: Synthetic oligonucleotide
gacacccauggcugucagc

SEQ ID NO: 2051592 - RNA, 19 nt, Artificial Sequence
  Description of Artificial Sequence: Synthetic oligonucleotide
uaggucucuucucgccagu

SEQ ID NO: 2051593 - RNA, 19 nt, Artificial Sequence
  Description of Artificial Sequence: Synthetic oligonucleotide
guucaccuuuccagcgugg

SEQ ID NO: 2051594 - RNA, 19 nt, Artificial Sequence
  Description of Artificial Sequence: Synthetic oligonucleotide
cacuucguagccguggcca

SEQ ID NO: 2051595 - RNA, 19 nt, Artificial Sequence
  Description of Artificial Sequence: Synthetic oligonucleotide
ucgccaguacuggaugcug

SEQ ID NO: 2051596 - RNA, 19 nt, Artificial Sequence
  Description of Artificial Sequence: Synthetic oligonucleotide
acacuagaacccacggaca

SEQ ID NO: 2051597 - RNA, 19 nt, Artificial Sequence
  Description of Artificial Sequence: Synthetic oligonucleotide
aguugccauccacauuaaa

SEQ ID NO: 2051598 - RNA, 19 nt, Artificial Sequence
  Description of Artificial Sequence: Synthetic oligonucleotide
uggcucaggaaaagccaua

SEQ ID NO: 2051599 - RNA, 19 nt, Artificial Sequence
  Description of Artificial Sequence: Synthetic oligonucleotide
gucaaaagagccggcugca

SEQ ID NO: 2051600 - RNA, 19 nt, Artificial Sequence
  Description of Artificial Sequence: Synthetic oligonucleotide
ugcugacacccauggcugu

SEQ ID NO: 2051601 - RNA, 19 nt, Artificial Sequence
  Description of Artificial Sequence: Synthetic oligonucleotide
cacgaccuguccaguugcc

SEQ ID NO: 2051602 - RNA, 19 nt, Artificial Sequence
  Description of Artificial Sequence: Synthetic oligonucleotide
uaguugccauccacauuaa

SEQ ID NO: 2051603 - RNA, 19 nt, Artificial Sequence
  Description of Artificial Sequence: Synthetic oligonucleotide
guugucaaaagagccggcu

SEQ ID NO: 2051604 - RNA, 19 nt, Artificial Sequence
  Description of Artificial Sequence: Synthetic oligonucleotide
ugacaccuuuacacuggau

SEQ ID NO: 2051605 - RNA, 19 nt, Artificial Sequence
  Description of Artificial Sequence: Synthetic oligonucleotide
agccgcaaaguggagucca

SEQ ID NO: 2051606 - RNA, 19 nt, Artificial Sequence
  Description of Artificial Sequence: Synthetic oligonucleotide
acggacagggccaguacca

SEQ ID NO: 2051607 - RNA, 19 nt, Artificial Sequence
  Description of Artificial Sequence: Synthetic oligonucleotide
cuagcuuguacuucugguu

SEQ ID NO: 2051608 - RNA, 19 nt, Artificial Sequence
  Description of Artificial Sequence: Synthetic oligonucleotide
uugucuuuguugggucuuc

SEQ ID NO: 2051609 - RNA, 19 nt, Artificial Sequence
  Description of Artificial Sequence: Synthetic oligonucleotide
agagccugccaggaucuca

SEQ ID NO: 2051610 - RNA, 19 nt, Artificial Sequence
  Description of Artificial Sequence: Synthetic oligonucleotide
cacuggauaugccaucucu

SEQ ID NO: 2051611 - RNA, 19 nt, Artificial Sequence
  Description of Artificial Sequence: Synthetic oligonucleotide
guggccacuguacguccgc

SEQ ID NO: 2051612 - RNA, 19 nt, Artificial Sequence
  Description of Artificial Sequence: Synthetic oligonucleotide
agccguggccacuguacgu

SEQ ID NO: 2051613 - RNA, 19 nt, Artificial Sequence
  Description of Artificial Sequence: Synthetic oligonucleotide
ggcucaggaaaagccauac

SEQ ID NO: 2051614 - RNA, 19 nt, Artificial Sequence
  Description of Artificial Sequence: Synthetic oligonucleotide
gaccugccccauccuuagg

SEQ ID NO: 2051615 - RNA, 19 nt, Artificial Sequence
  Description of Artificial Sequence: Synthetic oligonucleotide
ccacaugugugucacgcuc

SEQ ID NO: 2051616 - RNA, 19 nt, Artificial Sequence
  Description of Artificial Sequence: Synthetic oligonucleotide
acgcagcggguuccacagc

SEQ ID NO: 2051617 - RNA, 19 nt, Artificial Sequence
  Description of Artificial Sequence: Synthetic oligonucleotide
uuuccagcguggccccgaa

SEQ ID NO: 2051618 - RNA, 19 nt, Artificial Sequence
  Description of Artificial Sequence: Synthetic oligonucleotide
acccucugccucauagguc

SEQ ID NO: 2051619 - RNA, 19 nt, Artificial Sequence
  Description of Artificial Sequence: Synthetic oligonucleotide
ggccucuucguuaaauuga

SEQ ID NO: 2051620 - RNA, 19 nt, Artificial Sequence
  Description of Artificial Sequence: Synthetic oligonucleotide
auugaacgguguucaccuu

SEQ ID NO: 2051621 - RNA, 19 nt, Artificial Sequence
  Description of Artificial Sequence: Synthetic oligonucleotide
gguaagccaaugacuguac

SEQ ID NO: 2051622 - RNA, 19 nt, Artificial Sequence
  Description of Artificial Sequence: Synthetic oligonucleotide
cuuaggucauagcgccuca

SEQ ID NO: 2051623 - RNA, 19 nt, Artificial Sequence
  Description of Artificial Sequence: Synthetic oligonucleotide
ggcuucaucuagcgucugc

SEQ ID NO: 2051624 - RNA, 19 nt, Artificial Sequence
  Description of Artificial Sequence: Synthetic oligonucleotide
agcguggccccgaaauuug

SEQ ID NO: 2051625 - RNA, 19 nt, Artificial Sequence
  Description of Artificial Sequence: Synthetic oligonucleotide
guaccagggcacccucuac

SEQ ID NO: 2051626 - RNA, 19 nt, Artificial Sequence
  Description of Artificial Sequence: Synthetic oligonucleotide
cugacaccuuuacacugga

SEQ ID NO: 2051627 - RNA, 19 nt, Artificial Sequence
  Description of Artificial Sequence: Synthetic oligonucleotide
ccucacucgaccauccaca

SEQ ID NO: 2051628 - RNA, 19 nt, Artificial Sequence
  Description of Artificial Sequence: Synthetic oligonucleotide
agccggcugcauccagcac

SEQ ID NO: 2051629 - RNA, 19 nt, Artificial Sequence
  Description of Artificial Sequence: Synthetic oligonucleotide
ggucucuucucgccaguac

SEQ ID NO: 2051630 - RNA, 19 nt, Artificial Sequence
  Description of Artificial Sequence: Synthetic oligonucleotide
gcuuuaggguuuuaucgcu

SEQ ID NO: 2051631 - RNA, 19 nt, Artificial Sequence
  Description of Artificial Sequence: Synthetic oligonucleotide
gugucagaucccuaagcau

SEQ ID NO: 2051632 - RNA, 19 nt, Artificial Sequence
  Description of Artificial Sequence: Synthetic oligonucleotide
guacguccgcagcagcguc

SEQ ID NO: 2051633 - RNA, 19 nt, Artificial Sequence
  Description of Artificial Sequence: Synthetic oligonucleotide
aguuccccugugucuuuau

SEQ ID NO: 2051634 - RNA, 19 nt, Artificial Sequence
  Description of Artificial Sequence: Synthetic oligonucleotide
cagcagcaucucuagaaua

SEQ ID NO: 2051635 - RNA, 19 nt, Artificial Sequence
  Description of Artificial Sequence: Synthetic oligonucleotide
gccucacucgaccauccac

SEQ ID NO: 2051636 - RNA, 19 nt, Artificial Sequence
  Description of Artificial Sequence: Synthetic oligonucleotide
acgaccuguccaguugcca

SEQ ID NO: 2051637 - RNA, 19 nt, Artificial Sequence
  Description of Artificial Sequence: Synthetic oligonucleotide
ggcuuuggcucaggaaaag

SEQ ID NO: 2051638 - RNA, 19 nt, Artificial Sequence
  Description of Artificial Sequence: Synthetic oligonucleotide
guaccacacuagaacccac

SEQ ID NO: 2051639 - RNA, 19 nt, Artificial Sequence
  Description of Artificial Sequence: Synthetic oligonucleotide
cgguguucaccuuuccagc

SEQ ID NO: 2051640 - RNA, 19 nt, Artificial Sequence
  Description of Artificial Sequence: Synthetic oligonucleotide
cgaaauuugcgcacgaccu

SEQ ID NO: 2051641 - RNA, 19 nt, Artificial Sequence
  Description of Artificial Sequence: Synthetic oligonucleotide
gaagaccugccccauccuu

SEQ ID NO: 2051642 - RNA, 19 nt, Artificial Sequence
  Description of Artificial Sequence: Synthetic oligonucleotide
aaguggaguccaggcugga

SEQ ID NO: 2051643 - RNA, 19 nt, Artificial Sequence
  Description of Artificial Sequence: Synthetic oligonucleotide
ccaacauacucgcccagca

SEQ ID NO: 2051644 - RNA, 19 nt, Artificial Sequence
  Description of Artificial Sequence: Synthetic oligonucleotide
caucggaugcuggaaucga

SEQ ID NO: 2051645 - RNA, 19 nt, Artificial Sequence
  Description of Artificial Sequence: Synthetic oligonucleotide
ggccacuguacguccgcag

SEQ ID NO: 2051646 - RNA, 19 nt, Artificial Sequence
  Description of Artificial Sequence: Synthetic oligonucleotide
ccuuaggucauagcgccuc

SEQ ID NO: 2051647 - RNA, 19 nt, Artificial Sequence
  Description of Artificial Sequence: Synthetic oligonucleotide
cacccucugccucauaggu

SEQ ID NO: 2051648 - RNA, 19 nt, Artificial Sequence
  Description of Artificial Sequence: Synthetic oligonucleotide
caccgcucucacugcgccc

SEQ ID NO: 2051649 - RNA, 19 nt, Artificial Sequence
  Description of Artificial Sequence: Synthetic oligonucleotide
aucggaugcuggaaucgau

SEQ ID NO: 2051650 - RNA, 19 nt, Artificial Sequence
  Description of Artificial Sequence: Synthetic oligonucleotide
gcaccgcucucacugcgcc

SEQ ID NO: 2051651 - RNA, 19 nt, Artificial Sequence
  Description of Artificial Sequence: Synthetic oligonucleotide
ccauacuuccaaugcauua

SEQ ID NO: 2051652 - RNA, 19 nt, Artificial Sequence
  Description of Artificial Sequence: Synthetic oligonucleotide
guguucaccuuuccagcgu

SEQ ID NO: 2051653 - RNA, 19 nt, Artificial Sequence
  Description of Artificial Sequence: Synthetic oligonucleotide
cuucucgccaguacuggau

SEQ ID NO: 2051654 - RNA, 19 nt, Artificial Sequence
  Description of Artificial Sequence: Synthetic oligonucleotide
aguggaguccaggcuggau

SEQ ID NO: 2051655 - RNA, 19 nt, Artificial Sequence
  Description of Artificial Sequence: Synthetic oligonucleotide
gccaacauacucgcccagc

SEQ ID NO: 2051656 - RNA, 19 nt, Artificial Sequence
  Description of Artificial Sequence: Synthetic oligonucleotide
gcugucagcaggcaggauu

SEQ ID NO: 2051657 - RNA, 19 nt, Artificial Sequence
  Description of Artificial Sequence: Synthetic oligonucleotide
cacugaccauccuggcuga

SEQ ID NO: 2051658 - RNA, 19 nt, Artificial Sequence
  Description of Artificial Sequence: Synthetic oligonucleotide
agggcacccucuaccaggu

SEQ ID NO: 2051659 - RNA, 19 nt, Artificial Sequence
  Description of Artificial Sequence: Synthetic oligonucleotide
cccugugucuuuaucuaga

SEQ ID NO: 2051660 - RNA, 19 nt, Artificial Sequence
  Description of Artificial Sequence: Synthetic oligonucleotide
gcagucuagcuuguacuuc

SEQ ID NO: 2051661 - RNA, 19 nt, Artificial Sequence
  Description of Artificial Sequence: Synthetic oligonucleotide
ugcgcacgaccuguccagu

SEQ ID NO: 2051662 - RNA, 19 nt, Artificial Sequence
  Description of Artificial Sequence: Synthetic oligonucleotide
cugacacccauggcuguca

SEQ ID NO: 2051663 - RNA, 19 nt, Artificial Sequence
  Description of Artificial Sequence: Synthetic oligonucleotide
caccgucuuguccccacca

SEQ ID NO: 2051664 - RNA, 19 nt, Artificial Sequence
  Description of Artificial Sequence: Synthetic oligonucleotide
ccucuucguuaaauugaac

SEQ ID NO: 2051665 - RNA, 19 nt, Artificial Sequence
  Description of Artificial Sequence: Synthetic oligonucleotide
ccacguagucugagaagac

SEQ ID NO: 2051666 - RNA, 19 nt, Artificial Sequence
  Description of Artificial Sequence: Synthetic oligonucleotide
cacuggcucaggcuuccga

SEQ ID NO: 2051667 - RNA, 19 nt, Artificial Sequence
  Description of Artificial Sequence: Synthetic oligonucleotide
gccccgaaauuugcgcacg

SEQ ID NO: 2051668 - RNA, 19 nt, Artificial Sequence
  Description of Artificial Sequence: Synthetic oligonucleotide
gucccacgcagcggguucc

SEQ ID NO: 2051669 - RNA, 19 nt, Artificial Sequence
  Description of Artificial Sequence: Synthetic oligonucleotide
uggcuucaucuagcgucug

SEQ ID NO: 2051670 - RNA, 19 nt, Artificial Sequence
  Description of Artificial Sequence: Synthetic oligonucleotide
ggguuuuaucgcugccgca

SEQ ID NO: 2051671 - RNA, 19 nt, Artificial Sequence
  Description of Artificial Sequence: Synthetic oligonucleotide
gccucuucguuaaauugaa

SEQ ID NO: 2051672 - RNA, 19 nt, Artificial Sequence
  Description of Artificial Sequence: Synthetic oligonucleotide
gcacuucguagccguggcc

SEQ ID NO: 2051673 - RNA, 19 nt, Artificial Sequence
  Description of Artificial Sequence: Synthetic oligonucleotide
aggauuccgugggauggua

SEQ ID NO: 2051674 - RNA, 19 nt, Artificial Sequence
  Description of Artificial Sequence: Synthetic oligonucleotide
uuccagcguggccccgaaa

SEQ ID NO: 2051675 - RNA, 19 nt, Artificial Sequence
  Description of Artificial Sequence: Synthetic oligonucleotide
gccggcugcauccagcacu

SEQ ID NO: 2051676 - RNA, 19 nt, Artificial Sequence
  Description of Artificial Sequence: Synthetic oligonucleotide
cgucuuguccccaccacca

SEQ ID NO: 2051677 - RNA, 19 nt, Artificial Sequence
  Description of Artificial Sequence: Synthetic oligonucleotide
gcagcgucccacgcagcgg

SEQ ID NO: 2051678 - RNA, 19 nt, Artificial Sequence
  Description of Artificial Sequence: Synthetic oligonucleotide
ugaguugguguggguccuu

SEQ ID NO: 2051679 - RNA, 19 nt, Artificial Sequence
  Description of Artificial Sequence: Synthetic oligonucleotide
ccgcaaaguggaguccagg

SEQ ID NO: 2051680 - RNA, 19 nt, Artificial Sequence
  Description of Artificial Sequence: Synthetic oligonucleotide
cacagcuuuaggguuuuau

SEQ ID NO: 2051681 - RNA, 19 nt, Artificial Sequence
  Description of Artificial Sequence: Synthetic oligonucleotide
gagccugccaggaucucau

SEQ ID NO: 2051682 - RNA, 19 nt, Artificial Sequence
  Description of Artificial Sequence: Synthetic oligonucleotide
ggcucaggcuuccgagaac

SEQ ID NO: 2051683 - RNA, 19 nt, Artificial Sequence
  Description of Artificial Sequence: Synthetic oligonucleotide
caggcaggauuccguggga

SEQ ID NO: 2051684 - RNA, 19 nt, Artificial Sequence
  Description of Artificial Sequence: Synthetic oligonucleotide
aggucucuucucgccagua

SEQ ID NO: 2051685 - RNA, 19 nt, Artificial Sequence
  Description of Artificial Sequence: Synthetic oligonucleotide
ugccgcaggucaggcagua

SEQ ID NO: 2051686 - RNA, 19 nt, Artificial Sequence
  Description of Artificial Sequence: Synthetic oligonucleotide
ccacacuagaacccacgga

SEQ ID NO: 2051687 - RNA, 19 nt, Artificial Sequence
  Description of Artificial Sequence: Synthetic oligonucleotide
uccggggcccguggcuuug

SEQ ID NO: 2051688 - RNA, 19 nt, Artificial Sequence
  Description of Artificial Sequence: Synthetic oligonucleotide
ccacuguacguccgcagca

SEQ ID NO: 2051689 - RNA, 19 nt, Artificial Sequence
  Description of Artificial Sequence: Synthetic oligonucleotide
gccguggccacuguacguc

SEQ ID NO: 2051690 - RNA, 19 nt, Artificial Sequence
  Description of Artificial Sequence: Synthetic oligonucleotide
ccguggccacuguacgucc

SEQ ID NO: 2051691 - RNA, 19 nt, Artificial Sequence
  Description of Artificial Sequence: Synthetic oligonucleotide
cacgcucacucaggcagca

SEQ ID NO: 2051692 - RNA, 19 nt, Artificial Sequence
  Description of Artificial Sequence: Synthetic oligonucleotide
ucccacgcagcggguucca

SEQ ID NO: 2051693 - RNA, 19 nt, Artificial Sequence
  Description of Artificial Sequence: Synthetic oligonucleotide
cgcacgaccuguccaguug

SEQ ID NO: 2051694 - RNA, 19 nt, Artificial Sequence
  Description of Artificial Sequence: Synthetic oligonucleotide
cguggccacuguacguccg

SEQ ID NO: 2051695 - RNA, 19 nt, Artificial Sequence
  Description of Artificial Sequence: Synthetic oligonucleotide
gcugcauccagcacuucgu

SEQ ID NO: 2051696 - RNA, 19 nt, Artificial Sequence
  Description of Artificial Sequence: Synthetic oligonucleotide
agcggguuccacagcuuua

SEQ ID NO: 2051697 - RNA, 19 nt, Artificial Sequence
  Description of Artificial Sequence: Synthetic oligonucleotide
cccgaaauuugcgcacgac

SEQ ID NO: 2051698 - RNA, 19 nt, Artificial Sequence
  Description of Artificial Sequence: Synthetic oligonucleotide
ccacggacagggccaguac

SEQ ID NO: 2051699 - RNA, 19 nt, Artificial Sequence
  Description of Artificial Sequence: Synthetic oligonucleotide
cagcaucggaugcuggaau

SEQ ID NO: 2051700 - RNA, 19 nt, Artificial Sequence
  Description of Artificial Sequence: Synthetic oligonucleotide
gcucaggaaaagccauacu

SEQ ID NO: 2051701 - RNA, 19 nt, Artificial Sequence
  Description of Artificial Sequence: Synthetic oligonucleotide
ggauuccgugggaugguaa

SEQ ID NO: 2051702 - RNA, 19 nt, Artificial Sequence
  Description of Artificial Sequence: Synthetic oligonucleotide
cucgccaguacuggaugcu

SEQ ID NO: 2051703 - RNA, 19 nt, Artificial Sequence
  Description of Artificial Sequence: Synthetic oligonucleotide
acugaccauccuggcugaa

SEQ ID NO: 2051704 - RNA, 19 nt, Artificial Sequence
  Description of Artificial Sequence: Synthetic oligonucleotide
ggccaguaccagggcaccc

SEQ ID NO: 2051705 - RNA, 19 nt, Artificial Sequence
  Description of Artificial Sequence: Synthetic oligonucleotide
cugaguugguguggguccu

SEQ ID NO: 2051706 - RNA, 19 nt, Artificial Sequence
  Description of Artificial Sequence: Synthetic oligonucleotide
ggcagucccagcaucggau

SEQ ID NO: 2051707 - RNA, 19 nt, Artificial Sequence
  Description of Artificial Sequence: Synthetic oligonucleotide
gcgccucacucgaccaucc

SEQ ID NO: 2051708 - RNA, 19 nt, Artificial Sequence
  Description of Artificial Sequence: Synthetic oligonucleotide
guccagcgucuucagccgu

SEQ ID NO: 2051709 - RNA, 19 nt, Artificial Sequence
  Description of Artificial Sequence: Synthetic oligonucleotide
ggcuuggugucagaucccu

SEQ ID NO: 2051710 - RNA, 19 nt, Artificial Sequence
  Description of Artificial Sequence: Synthetic oligonucleotide
caguaccagggcacccucu

SEQ ID NO: 2051711 - RNA, 19 nt, Artificial Sequence
  Description of Artificial Sequence: Synthetic oligonucleotide
cggguuccacagcuuuagg

SEQ ID NO: 2051712 - RNA, 19 nt, Artificial Sequence
  Description of Artificial Sequence: Synthetic oligonucleotide
ccacgcagcggguuccaca

SEQ ID NO: 2051713 - RNA, 19 nt, Artificial Sequence
  Description of Artificial Sequence: Synthetic oligonucleotide
gcguggccccgaaauuugc

SEQ ID NO: 2051714 - RNA, 19 nt, Artificial Sequence
  Description of Artificial Sequence: Synthetic oligonucleotide
cguuaaauugaacgguguu

SEQ ID NO: 2051715 - RNA, 19 nt, Artificial Sequence
  Description of Artificial Sequence: Synthetic oligonucleotide
cagcguggccccgaaauuu

SEQ ID NO: 2051716 - RNA, 19 nt, Artificial Sequence
  Description of Artificial Sequence: Synthetic oligonucleotide
ccgcaguccagcgucuuca

SEQ ID NO: 2051717 - RNA, 19 nt, Artificial Sequence
  Description of Artificial Sequence: Synthetic oligonucleotide
ccuaagcaucagccugcuc

SEQ ID NO: 2051718 - RNA, 19 nt, Artificial Sequence
  Description of Artificial Sequence: Synthetic oligonucleotide
cgagaacggcagucccagc

SEQ ID NO: 2051719 - RNA, 19 nt, Artificial Sequence
  Description of Artificial Sequence: Synthetic oligonucleotide
agcgucccacgcagcgggu

SEQ ID NO: 2051720 - RNA, 19 nt, Artificial Sequence
  Description of Artificial Sequence: Synthetic oligonucleotide
ccaaugcauuaguccacua

SEQ ID NO: 2051721 - RNA, 19 nt, Artificial Sequence
  Description of Artificial Sequence: Synthetic oligonucleotide
cggacagggccaguaccag

SEQ ID NO: 2051722 - RNA, 19 nt, Artificial Sequence
  Description of Artificial Sequence: Synthetic oligonucleotide
cgucccacgcagcggguuc

SEQ ID NO: 2051723 - RNA, 19 nt, Artificial Sequence
  Description of Artificial Sequence: Synthetic oligonucleotide
cacccucuaccagguccca

SEQ ID NO: 2051724 - RNA, 19 nt, Artificial Sequence
  Description of Artificial Sequence: Synthetic oligonucleotide
ccccgaaauuugcgcacga

SEQ ID NO: 2051725 - RNA, 19 nt, Artificial Sequence
  Description of Artificial Sequence: Synthetic oligonucleotide
ggggcccguggcuuuggcu

SEQ ID NO: 2051726 - RNA, 19 nt, Artificial Sequence
  Description of Artificial Sequence: Synthetic oligonucleotide
cgcucacucaggcagcagu

SEQ ID NO: 2051727 - RNA, 19 nt, Artificial Sequence
  Description of Artificial Sequence: Synthetic oligonucleotide
cgcagcggguuccacagcu

SEQ ID NO: 2051728 - RNA, 19 nt, Artificial Sequence
  Description of Artificial Sequence: Synthetic oligonucleotide
cccacggacagggccagua

SEQ ID NO: 2051729 - RNA, 19 nt, Artificial Sequence
  Description of Artificial Sequence: Synthetic oligonucleotide
gggcacccucuaccagguc

SEQ ID NO: 2051730 - RNA, 19 nt, Artificial Sequence
  Description of Artificial Sequence: Synthetic oligonucleotide
ccggcugcauccagcacuu

SEQ ID NO: 2051731 - RNA, 19 nt, Artificial Sequence
  Description of Artificial Sequence: Synthetic oligonucleotide
cguagccguggccacugua

SEQ ID NO: 2051732 - RNA, 19 nt, Artificial Sequence
  Description of Artificial Sequence: Synthetic oligonucleotide
cccacgcagcggguuccac

SEQ ID NO: 2051733 - RNA, 19 nt, Artificial Sequence
  Description of Artificial Sequence: Synthetic oligonucleotide
ccggggcccguggcuuugg

SEQ ID NO: 2051734 - RNA, 19 nt, Artificial Sequence
  Description of Artificial Sequence: Synthetic oligonucleotide
ccgcucucacugcgcccug

SEQ ID NO: 2051735 - RNA, 19 nt, Artificial Sequence
  Description of Artificial Sequence: Synthetic oligonucleotide
gcgcacgaccuguccaguu

SEQ ID NO: 2051736 - RNA, 19 nt, Artificial Sequence
  Description of Artificial Sequence: Synthetic oligonucleotide
ccagcguggccccgaaauu

SEQ ID NO: 2051737 - RNA, 19 nt, Artificial Sequence
  Description of Artificial Sequence: Synthetic oligonucleotide
guggguccuuuggcuuggu

SEQ ID NO: 2051738 - RNA, 19 nt, Artificial Sequence
  Description of Artificial Sequence: Synthetic oligonucleotide
cggggcccguggcuuuggc

SEQ ID NO: 2051739 - RNA, 19 nt, Artificial Sequence
  Description of Artificial Sequence: Synthetic oligonucleotide
cuccggggcccguggcuuu

SEQ ID NO: 2051740 - RNA, 19 nt, Artificial Sequence
  Description of Artificial Sequence: Synthetic oligonucleotide
cccuaagcaucagccugcu

SEQ ID NO: 2051741 - RNA, 19 nt, Artificial Sequence
  Description of Artificial Sequence: Synthetic oligonucleotide
cgccucacucgaccaucca

SEQ ID NO: 2051742 - RNA, 19 nt, Artificial Sequence
  Description of Artificial Sequence: Synthetic oligonucleotide
gcagcggguuccacagcuu

SEQ ID NO: 2051743 - RNA, 19 nt, Artificial Sequence
  Description of Artificial Sequence: Synthetic oligonucleotide
gcgucccacgcagcggguu

SEQ ID NO: 2051744 - RNA, 19 nt, Artificial Sequence
  Description of Artificial Sequence: Synthetic oligonucleotide
ggccgcaguccagcgucuu

SEQ ID NO: 2051745 - RNA, 19 nt, Artificial Sequence
  Description of Artificial Sequence: Synthetic oligonucleotide
cguccgcagcagcguccca

SEQ ID NO: 2051746 - RNA, 19 nt, Artificial Sequence
  Description of Artificial Sequence: Synthetic oligonucleotide
aaagcuugaacaugggugc

SEQ ID NO: 2051747 - RNA, 19 nt, Artificial Sequence
  Description of Artificial Sequence: Synthetic oligonucleotide
uuaauugccucaaugaugu

SEQ ID NO: 2051748 - RNA, 19 nt, Artificial Sequence
  Description of Artificial Sequence: Synthetic oligonucleotide
auaaacacugaccuucucc

SEQ ID NO: 2051749 - RNA, 19 nt, Artificial Sequence
  Description of Artificial Sequence: Synthetic oligonucleotide
aaacuugugaaaugaaucu

SEQ ID NO: 2051750 - RNA, 19 nt, Artificial Sequence
  Description of Artificial Sequence: Synthetic oligonucleotide
ucuagaauagccaaugguc

SEQ ID NO: 2051751 - RNA, 19 nt, Artificial Sequence
  Description of Artificial Sequence: Synthetic oligonucleotide
gauaaagaggguaaugagg

SEQ ID NO: 2051752 - RNA, 19 nt, Artificial Sequence
  Description of Artificial Sequence: Synthetic oligonucleotide
gauguuggacuuuaguggg

SEQ ID NO: 2051753 - RNA, 19 nt, Artificial Sequence
  Description of Artificial Sequence: Synthetic oligonucleotide
caauguuggagauaaagag

SEQ ID NO: 2051754 - RNA, 19 nt, Artificial Sequence
  Description of Artificial Sequence: Synthetic oligonucleotide
aaaggaaggacuucuucag

SEQ ID NO: 2051755 - RNA, 19 nt, Artificial Sequence
  Description of Artificial Sequence: Synthetic oligonucleotide
ucauuaauugccucaauga

SEQ ID NO: 2051756 - RNA, 19 nt, Artificial Sequence
  Description of Artificial Sequence: Synthetic oligonucleotide
cauuucaugacccuggcag

SEQ ID NO: 2051757 - RNA, 19 nt, Artificial Sequence
  Description of Artificial Sequence: Synthetic oligonucleotide
aacaaugacauggaacuuc

SEQ ID NO: 2051758 - RNA, 19 nt, Artificial Sequence
  Description of Artificial Sequence: Synthetic oligonucleotide
cuuuaguggggcauaaugg

SEQ ID NO: 2051759 - RNA, 19 nt, Artificial Sequence
  Description of Artificial Sequence: Synthetic oligonucleotide
uuaaggaaggcuucuacug

SEQ ID NO: 2051760 - RNA, 19 nt, Artificial Sequence
  Description of Artificial Sequence: Synthetic oligonucleotide
gaaagcuugaacaugggug

SEQ ID NO: 2051761 - RNA, 19 nt, Artificial Sequence
  Description of Artificial Sequence: Synthetic oligonucleotide
uuugcuugggacaaauuga

SEQ ID NO: 2051762 - RNA, 19 nt, Artificial Sequence
  Description of Artificial Sequence: Synthetic oligonucleotide
aggacaauaaacacugacc

SEQ ID NO: 2051763 - RNA, 19 nt, Artificial Sequence
  Description of Artificial Sequence: Synthetic oligonucleotide
uucuacgcgaaucaacucc

SEQ ID NO: 2051764 - RNA, 19 nt, Artificial Sequence
  Description of Artificial Sequence: Synthetic oligonucleotide
ugacucuugacauaacagc

SEQ ID NO: 2051765 - RNA, 19 nt, Artificial Sequence
  Description of Artificial Sequence: Synthetic oligonucleotide
cacaggacaauaaacacug

SEQ ID NO: 2051766 - RNA, 19 nt, Artificial Sequence
  Description of Artificial Sequence: Synthetic oligonucleotide
uuuaguggggcauaaugga

SEQ ID NO: 2051767 - RNA, 19 nt, Artificial Sequence
  Description of Artificial Sequence: Synthetic oligonucleotide
guuugcuugggacaaauug

SEQ ID NO: 2051768 - RNA, 19 nt, Artificial Sequence
  Description of Artificial Sequence: Synthetic oligonucleotide
agauaaagaggguaaugag

SEQ ID NO: 2051769 - RNA, 19 nt, Artificial Sequence
  Description of Artificial Sequence: Synthetic oligonucleotide
uucacugggaaacugugga

SEQ ID NO: 2051770 - RNA, 19 nt, Artificial Sequence
  Description of Artificial Sequence: Synthetic oligonucleotide
cucggcaacaaugacaugg

SEQ ID NO: 2051771 - RNA, 19 nt, Artificial Sequence
  Description of Artificial Sequence: Synthetic oligonucleotide
ugaacaugggugcacacac

SEQ ID NO: 2051772 - RNA, 19 nt, Artificial Sequence
  Description of Artificial Sequence: Synthetic oligonucleotide
acuuuaguggggcauaaug

SEQ ID NO: 2051773 - RNA, 19 nt, Artificial Sequence
  Description of Artificial Sequence: Synthetic oligonucleotide
uucuagaauagccaauggu

SEQ ID NO: 2051774 - RNA, 19 nt, Artificial Sequence
  Description of Artificial Sequence: Synthetic oligonucleotide
cuacuguucuagaauagcc

SEQ ID NO: 2051775 - RNA, 19 nt, Artificial Sequence
  Description of Artificial Sequence: Synthetic oligonucleotide
gacguggucaucaggaugg

SEQ ID NO: 2051776 - RNA, 19 nt, Artificial Sequence
  Description of Artificial Sequence: Synthetic oligonucleotide
auaaagaggguaaugaggu

SEQ ID NO: 2051777 - RNA, 19 nt, Artificial Sequence
  Description of Artificial Sequence: Synthetic oligonucleotide
uuagcagcucauuaauugc

SEQ ID NO: 2051778 - RNA, 19 nt, Artificial Sequence
  Description of Artificial Sequence: Synthetic oligonucleotide
ucaauguuugcuugggaca

SEQ ID NO: 2051779 - RNA, 19 nt, Artificial Sequence
  Description of Artificial Sequence: Synthetic oligonucleotide
uguucuagaauagccaaug

SEQ ID NO: 2051780 - RNA, 19 nt, Artificial Sequence
  Description of Artificial Sequence: Synthetic oligonucleotide
uguaggacggugcauuccc

SEQ ID NO: 2051781 - RNA, 19 nt, Artificial Sequence
  Description of Artificial Sequence: Synthetic oligonucleotide
aaacuguggagaaagcuug

SEQ ID NO: 2051782 - RNA, 19 nt, Artificial Sequence
  Description of Artificial Sequence: Synthetic oligonucleotide
auagucuucguaccaauga

SEQ ID NO: 2051783 - RNA, 19 nt, Artificial Sequence
  Description of Artificial Sequence: Synthetic oligonucleotide
cucaauguuugcuugggac

SEQ ID NO: 2051784 - RNA, 19 nt, Artificial Sequence
  Description of Artificial Sequence: Synthetic oligonucleotide
ugcauucccgccaauguug

SEQ ID NO: 2051785 - RNA, 19 nt, Artificial Sequence
  Description of Artificial Sequence: Synthetic oligonucleotide
cuucguaccaaugaucacc

SEQ ID NO: 2051786 - RNA, 19 nt, Artificial Sequence
  Description of Artificial Sequence: Synthetic oligonucleotide
gaagcugaaauccucgcuc

SEQ ID NO: 2051787 - RNA, 19 nt, Artificial Sequence
  Description of Artificial Sequence: Synthetic oligonucleotide
auuaauugccucaaugaug

SEQ ID NO: 2051788 - RNA, 19 nt, Artificial Sequence
  Description of Artificial Sequence: Synthetic oligonucleotide
uccacgaagcccucuaucc

SEQ ID NO: 2051789 - RNA, 19 nt, Artificial Sequence
  Description of Artificial Sequence: Synthetic oligonucleotide
acaacuccgagucuuucuc

SEQ ID NO: 2051790 - RNA, 19 nt, Artificial Sequence
  Description of Artificial Sequence: Synthetic oligonucleotide
uucaggagccacaaacuug

SEQ ID NO: 2051791 - RNA, 19 nt, Artificial Sequence
  Description of Artificial Sequence: Synthetic oligonucleotide
ugugaaaggaaggacuucu

SEQ ID NO: 2051792 - RNA, 19 nt, Artificial Sequence
  Description of Artificial Sequence: Synthetic oligonucleotide
uagagcucgcucaucaggc

SEQ ID NO: 2051793 - RNA, 19 nt, Artificial Sequence
  Description of Artificial Sequence: Synthetic oligonucleotide
acuugugaaaugaaucuuc

SEQ ID NO: 2051794 - RNA, 19 nt, Artificial Sequence
  Description of Artificial Sequence: Synthetic oligonucleotide
ugucucaauguuugcuugg

SEQ ID NO: 2051795 - RNA, 19 nt, Artificial Sequence
  Description of Artificial Sequence: Synthetic oligonucleotide
cuagaauagccaaugguca

SEQ ID NO: 2051796 - RNA, 19 nt, Artificial Sequence
  Description of Artificial Sequence: Synthetic oligonucleotide
cuugggacaaauugacagc

SEQ ID NO: 2051797 - RNA, 19 nt, Artificial Sequence
  Description of Artificial Sequence: Synthetic oligonucleotide
aagcccucuauccucccgg

SEQ ID NO: 2051798 - RNA, 19 nt, Artificial Sequence
  Description of Artificial Sequence: Synthetic oligonucleotide
uggugguccgugaugagcc

SEQ ID NO: 2051799 - RNA, 19 nt, Artificial Sequence
  Description of Artificial Sequence: Synthetic oligonucleotide
accuuguugacucuugaca

SEQ ID NO: 2051800 - RNA, 19 nt, Artificial Sequence
  Description of Artificial Sequence: Synthetic oligonucleotide
ucuacgcgaaucaacucca

SEQ ID NO: 2051801 - RNA, 19 nt, Artificial Sequence
  Description of Artificial Sequence: Synthetic oligonucleotide
acucuccucaccauguugc

SEQ ID NO: 2051802 - RNA, 19 nt, Artificial Sequence
  Description of Artificial Sequence: Synthetic oligonucleotide
gaaccguuggccaggauag

SEQ ID NO: 2051803 - RNA, 19 nt, Artificial Sequence
  Description of Artificial Sequence: Synthetic oligonucleotide
guagagcucgcucaucagg

SEQ ID NO: 2051804 - RNA, 19 nt, Artificial Sequence
  Description of Artificial Sequence: Synthetic oligonucleotide
ucuacuguucuagaauagc

SEQ ID NO: 2051805 - RNA, 19 nt, Artificial Sequence
  Description of Artificial Sequence: Synthetic oligonucleotide
uucguaccaaugaucaccu

SEQ ID NO: 2051806 - RNA, 19 nt, Artificial Sequence
  Description of Artificial Sequence: Synthetic oligonucleotide
ggagaaagcuugaacaugg

SEQ ID NO: 2051807 - RNA, 19 nt, Artificial Sequence
  Description of Artificial Sequence: Synthetic oligonucleotide
acuguucuagaauagccaa

SEQ ID NO: 2051808 - RNA, 19 nt, Artificial Sequence
  Description of Artificial Sequence: Synthetic oligonucleotide
aaacacugaccuucuccag

SEQ ID NO: 2051809 - RNA, 19 nt, Artificial Sequence
  Description of Artificial Sequence: Synthetic oligonucleotide
ugcacacacgaugaguggg

SEQ ID NO: 2051810 - RNA, 19 nt, Artificial Sequence
  Description of Artificial Sequence: Synthetic oligonucleotide
aaauugacagccauuucau

SEQ ID NO: 2051811 - RNA, 19 nt, Artificial Sequence
  Description of Artificial Sequence: Synthetic oligonucleotide
uccgugaugagcccgcaca

SEQ ID NO: 2051812 - RNA, 19 nt, Artificial Sequence
  Description of Artificial Sequence: Synthetic oligonucleotide
aauguucuccguugugccu

SEQ ID NO: 2051813 - RNA, 19 nt, Artificial Sequence
  Description of Artificial Sequence: Synthetic oligonucleotide
uauccucccggacaacucc

SEQ ID NO: 2051814 - RNA, 19 nt, Artificial Sequence
  Description of Artificial Sequence: Synthetic oligonucleotide
cacacgaugaguggggugg

SEQ ID NO: 2051815 - RNA, 19 nt, Artificial Sequence
  Description of Artificial Sequence: Synthetic oligonucleotide
caugacaguugucucaaug

SEQ ID NO: 2051816 - RNA, 19 nt, Artificial Sequence
  Description of Artificial Sequence: Synthetic oligonucleotide
aagaggguaaugaggucgg

SEQ ID NO: 2051817 - RNA, 19 nt, Artificial Sequence
  Description of Artificial Sequence: Synthetic oligonucleotide
cagucugccauacuccucc

SEQ ID NO: 2051818 - RNA, 19 nt, Artificial Sequence
  Description of Artificial Sequence: Synthetic oligonucleotide
accucauuggaguggaugu

SEQ ID NO: 2051819 - RNA, 19 nt, Artificial Sequence
  Description of Artificial Sequence: Synthetic oligonucleotide
gaaucuucuucacugggaa

SEQ ID NO: 2051820 - RNA, 19 nt, Artificial Sequence
  Description of Artificial Sequence: Synthetic oligonucleotide
aucaacuccaucagcucgc

SEQ ID NO: 2051821 - RNA, 19 nt, Artificial Sequence
  Description of Artificial Sequence: Synthetic oligonucleotide
gacucuugacauaacagca

SEQ ID NO: 2051822 - RNA, 19 nt, Artificial Sequence
  Description of Artificial Sequence: Synthetic oligonucleotide
caugggugcacacacgaug

SEQ ID NO: 2051823 - RNA, 19 nt, Artificial Sequence
  Description of Artificial Sequence: Synthetic oligonucleotide
uuaguggggcauaauggaa

SEQ ID NO: 2051824 - RNA, 19 nt, Artificial Sequence
  Description of Artificial Sequence: Synthetic oligonucleotide
guguuuugcugccagugcc

SEQ ID NO: 2051825 - RNA, 19 nt, Artificial Sequence
  Description of Artificial Sequence: Synthetic oligonucleotide
ucggccaugacaguugucu

SEQ ID NO: 2051826 - RNA, 19 nt, Artificial Sequence
  Description of Artificial Sequence: Synthetic oligonucleotide
aggaugguagagcucgcuc

SEQ ID NO: 2051827 - RNA, 19 nt, Artificial Sequence
  Description of Artificial Sequence: Synthetic oligonucleotide
gaucgcucucgucacugcg

SEQ ID NO: 2051828 - RNA, 19 nt, Artificial Sequence
  Description of Artificial Sequence: Synthetic oligonucleotide
aggacggugcauucccgcc

SEQ ID NO: 2051829 - RNA, 19 nt, Artificial Sequence
  Description of Artificial Sequence: Synthetic oligonucleotide
ucccggacaacuccgaguc

SEQ ID NO: 2051830 - RNA, 19 nt, Artificial Sequence
  Description of Artificial Sequence: Synthetic oligonucleotide
uuccgcucuggacaggcag

SEQ ID NO: 2051831 - RNA, 19 nt, Artificial Sequence
  Description of Artificial Sequence: Synthetic oligonucleotide
uguuggacuuuaguggggc

SEQ ID NO: 2051832 - RNA, 19 nt, Artificial Sequence
  Description of Artificial Sequence: Synthetic oligonucleotide
gaaauccucgcucaggccu

SEQ ID NO: 2051833 - RNA, 19 nt, Artificial Sequence
  Description of Artificial Sequence: Synthetic oligonucleotide
uccuccugccuucuacgcg

SEQ ID NO: 2051834 - RNA, 19 nt, Artificial Sequence
  Description of Artificial Sequence: Synthetic oligonucleotide
uuguugacucuugacauaa

SEQ ID NO: 2051835 - RNA, 19 nt, Artificial Sequence
  Description of Artificial Sequence: Synthetic oligonucleotide
ucggcaacaaugacaugga

SEQ ID NO: 2051836 - RNA, 19 nt, Artificial Sequence
  Description of Artificial Sequence: Synthetic oligonucleotide
uggggcauaauggaagcug

SEQ ID NO: 2051837 - RNA, 19 nt, Artificial Sequence
  Description of Artificial Sequence: Synthetic oligonucleotide
gaaucaacuccaucagcuc

SEQ ID NO: 2051838 - RNA, 19 nt, Artificial Sequence
  Description of Artificial Sequence: Synthetic oligonucleotide
ugacaguugucucaauguu

SEQ ID NO: 2051839 - RNA, 19 nt, Artificial Sequence
  Description of Artificial Sequence: Synthetic oligonucleotide
cacguagucgaacacagga

SEQ ID NO: 2051840 - RNA, 19 nt, Artificial Sequence
  Description of Artificial Sequence: Synthetic oligonucleotide
ucagggaaccguuggccag

SEQ ID NO: 2051841 - RNA, 19 nt, Artificial Sequence
  Description of Artificial Sequence: Synthetic oligonucleotide
gaggguaaugaggucgggg

SEQ ID NO: 2051842 - RNA, 19 nt, Artificial Sequence
  Description of Artificial Sequence: Synthetic oligonucleotide
uccucuuucgggcugccuc

SEQ ID NO: 2051843 - RNA, 19 nt, Artificial Sequence
  Description of Artificial Sequence: Synthetic oligonucleotide
auuucaugacccuggcaga

SEQ ID NO: 2051844 - RNA, 19 nt, Artificial Sequence
  Description of Artificial Sequence: Synthetic oligonucleotide
ugcaauguucuccguugug

SEQ ID NO: 2051845 - RNA, 19 nt, Artificial Sequence
  Description of Artificial Sequence: Synthetic oligonucleotide
aguugucucaauguuugcu

SEQ ID NO: 2051846 - RNA, 19 nt, Artificial Sequence
  Description of Artificial Sequence: Synthetic oligonucleotide
aaucuucuucacugggaaa

SEQ ID NO: 2051847 - RNA, 19 nt, Artificial Sequence
  Description of Artificial Sequence: Synthetic oligonucleotide
gucuucguaccaaugauca

SEQ ID NO: 2051848 - RNA, 19 nt, Artificial Sequence
  Description of Artificial Sequence: Synthetic oligonucleotide
ugguguuuugcugccagug

SEQ ID NO: 2051849 - RNA, 19 nt, Artificial Sequence
  Description of Artificial Sequence: Synthetic oligonucleotide
aacuugugaaaugaaucuu

SEQ ID NO: 2051850 - RNA, 19 nt, Artificial Sequence
  Description of Artificial Sequence: Synthetic oligonucleotide
agcacacucggcaacaaug

SEQ ID NO: 2051851 - RNA, 19 nt, Artificial Sequence
  Description of Artificial Sequence: Synthetic oligonucleotide
agucuucguaccaaugauc

SEQ ID NO: 2051852 - RNA, 19 nt, Artificial Sequence
  Description of Artificial Sequence: Synthetic oligonucleotide
ucucaauguuugcuuggga

SEQ ID NO: 2051853 - RNA, 19 nt, Artificial Sequence
  Description of Artificial Sequence: Synthetic oligonucleotide
uugaacaugggugcacaca

SEQ ID NO: 2051854 - RNA, 19 nt, Artificial Sequence
  Description of Artificial Sequence: Synthetic oligonucleotide
gaugagugggguggagugg

SEQ ID NO: 2051855 - RNA, 19 nt, Artificial Sequence
  Description of Artificial Sequence: Synthetic oligonucleotide
agaggacguggucaucagg

SEQ ID NO: 2051856 - RNA, 19 nt, Artificial Sequence
  Description of Artificial Sequence: Synthetic oligonucleotide
acuccgagucuuucuccgc

SEQ ID NO: 2051857 - RNA, 19 nt, Artificial Sequence
  Description of Artificial Sequence: Synthetic oligonucleotide
guggaugugcuccagagcu

SEQ ID NO: 2051858 - RNA, 19 nt, Artificial Sequence
  Description of Artificial Sequence: Synthetic oligonucleotide
guagauguaggacggugca

SEQ ID NO: 2051859 - RNA, 19 nt, Artificial Sequence
  Description of Artificial Sequence: Synthetic oligonucleotide
gaggacguggucaucagga

SEQ ID NO: 2051860 - RNA, 19 nt, Artificial Sequence
  Description of Artificial Sequence: Synthetic oligonucleotide
acaaacuugugaaaugaau

SEQ ID NO: 2051861 - RNA, 19 nt, Artificial Sequence
  Description of Artificial Sequence: Synthetic oligonucleotide
agaauagccaauggucaug

SEQ ID NO: 2051862 - RNA, 19 nt, Artificial Sequence
  Description of Artificial Sequence: Synthetic oligonucleotide
ucuauccucccggacaacu

SEQ ID NO: 2051863 - RNA, 19 nt, Artificial Sequence
  Description of Artificial Sequence: Synthetic oligonucleotide
gaggacucuccucaccaug

SEQ ID NO: 2051864 - RNA, 19 nt, Artificial Sequence
  Description of Artificial Sequence: Synthetic oligonucleotide
caccauguugcccacggug

SEQ ID NO: 2051865 - RNA, 19 nt, Artificial Sequence
  Description of Artificial Sequence: Synthetic oligonucleotide
auguaggacggugcauucc

SEQ ID NO: 2051866 - RNA, 19 nt, Artificial Sequence
  Description of Artificial Sequence: Synthetic oligonucleotide
cuugaggacucuccucacc

SEQ ID NO: 2051867 - RNA, 19 nt, Artificial Sequence
  Description of Artificial Sequence: Synthetic oligonucleotide
uccgagucuuucuccgcgg

SEQ ID NO: 2051868 - RNA, 19 nt, Artificial Sequence
  Description of Artificial Sequence: Synthetic oligonucleotide
cuguggagaaagcuugaac

SEQ ID NO: 2051869 - RNA, 19 nt, Artificial Sequence
  Description of Artificial Sequence: Synthetic oligonucleotide
acguagucgaacacaggac

SEQ ID NO: 2051870 - RNA, 19 nt, Artificial Sequence
  Description of Artificial Sequence: Synthetic oligonucleotide
aggagccacaaacuuguga

SEQ ID NO: 2051871 - RNA, 19 nt, Artificial Sequence
  Description of Artificial Sequence: Synthetic oligonucleotide
uaaagaggguaaugagguc

SEQ ID NO: 2051872 - RNA, 19 nt, Artificial Sequence
  Description of Artificial Sequence: Synthetic oligonucleotide
cuccgagucuuucuccgcg

SEQ ID NO: 2051873 - RNA, 19 nt, Artificial Sequence
  Description of Artificial Sequence: Synthetic oligonucleotide
ggugcacacacgaugagug

SEQ ID NO: 2051874 - RNA, 19 nt, Artificial Sequence
  Description of Artificial Sequence: Synthetic oligonucleotide
ucgcucucgucacugcgcc

SEQ ID NO: 2051875 - RNA, 19 nt, Artificial Sequence
  Description of Artificial Sequence: Synthetic oligonucleotide
gccaggauagucuucguac

SEQ ID NO: 2051876 - RNA, 19 nt, Artificial Sequence
  Description of Artificial Sequence: Synthetic oligonucleotide
gcagaaaggagcacacucg

SEQ ID NO: 2051877 - RNA, 19 nt, Artificial Sequence
  Description of Artificial Sequence: Synthetic oligonucleotide
gauguaggacggugcauuc

SEQ ID NO: 2051878 - RNA, 19 nt, Artificial Sequence
  Description of Artificial Sequence: Synthetic oligonucleotide
gcugcaauguucuccguug

SEQ ID NO: 2051879 - RNA, 19 nt, Artificial Sequence
  Description of Artificial Sequence: Synthetic oligonucleotide
uaggacggugcauucccgc

SEQ ID NO: 2051880 - RNA, 19 nt, Artificial Sequence
  Description of Artificial Sequence: Synthetic oligonucleotide
ucuucguaccaaugaucac

SEQ ID NO: 2051881 - RNA, 19 nt, Artificial Sequence
  Description of Artificial Sequence: Synthetic oligonucleotide
gaacaugggugcacacacg

SEQ ID NO: 2051882 - RNA, 19 nt, Artificial Sequence
  Description of Artificial Sequence: Synthetic oligonucleotide
aucgcucucgucacugcgc

SEQ ID NO: 2051883 - RNA, 19 nt, Artificial Sequence
  Description of Artificial Sequence: Synthetic oligonucleotide
agucugccauacuccuccc

SEQ ID NO: 2051884 - RNA, 19 nt, Artificial Sequence
  Description of Artificial Sequence: Synthetic oligonucleotide
uucccgccaauguuggaga

SEQ ID NO: 2051885 - RNA, 19 nt, Artificial Sequence
  Description of Artificial Sequence: Synthetic oligonucleotide
guugcuccagugguggucc

SEQ ID NO: 2051886 - RNA, 19 nt, Artificial Sequence
  Description of Artificial Sequence: Synthetic oligonucleotide
ucuuucuccgcggcacccg

SEQ ID NO: 2051887 - RNA, 19 nt, Artificial Sequence
  Description of Artificial Sequence: Synthetic oligonucleotide
ggaugucaagaguuugugc

SEQ ID NO: 2051888 - RNA, 19 nt, Artificial Sequence
  Description of Artificial Sequence: Synthetic oligonucleotide
gugcacacacgaugagugg

SEQ ID NO: 2051889 - RNA, 19 nt, Artificial Sequence
  Description of Artificial Sequence: Synthetic oligonucleotide
cacgaagcccucuauccuc

SEQ ID NO: 2051890 - RNA, 19 nt, Artificial Sequence
  Description of Artificial Sequence: Synthetic oligonucleotide
gagucuuucuccgcggcac

SEQ ID NO: 2051891 - RNA, 19 nt, Artificial Sequence
  Description of Artificial Sequence: Synthetic oligonucleotide
uccggaugucaagaguuug

SEQ ID NO: 2051892 - RNA, 19 nt, Artificial Sequence
  Description of Artificial Sequence: Synthetic oligonucleotide
cuugaacaugggugcacac

SEQ ID NO: 2051893 - RNA, 19 nt, Artificial Sequence
  Description of Artificial Sequence: Synthetic oligonucleotide
agauguaggacggugcauu

SEQ ID NO: 2051894 - RNA, 19 nt, Artificial Sequence
  Description of Artificial Sequence: Synthetic oligonucleotide
cugguuccgcucuggacag

SEQ ID NO: 2051895 - RNA, 19 nt, Artificial Sequence
  Description of Artificial Sequence: Synthetic oligonucleotide
ggagauaaagaggguaaug

SEQ ID NO: 2051896 - RNA, 19 nt, Artificial Sequence
  Description of Artificial Sequence: Synthetic oligonucleotide
acacucggcaacaaugaca

SEQ ID NO: 2051897 - RNA, 19 nt, Artificial Sequence
  Description of Artificial Sequence: Synthetic oligonucleotide
gguguuuugcugccagugc

SEQ ID NO: 2051898 - RNA, 19 nt, Artificial Sequence
  Description of Artificial Sequence: Synthetic oligonucleotide
ugcugaucgcucucgucac

SEQ ID NO: 2051899 - RNA, 19 nt, Artificial Sequence
  Description of Artificial Sequence: Synthetic oligonucleotide
cuucuacgcgaaucaacuc

SEQ ID NO: 2051900 - RNA, 19 nt, Artificial Sequence
  Description of Artificial Sequence: Synthetic oligonucleotide
ugguccgugaugagcccgc

SEQ ID NO: 2051901 - RNA, 19 nt, Artificial Sequence
  Description of Artificial Sequence: Synthetic oligonucleotide
gguagauguaggacggugc

SEQ ID NO: 2051902 - RNA, 19 nt, Artificial Sequence
  Description of Artificial Sequence: Synthetic oligonucleotide
ugggugcacacacgaugag

SEQ ID NO: 2051903 - RNA, 19 nt, Artificial Sequence
  Description of Artificial Sequence: Synthetic oligonucleotide
cucuugacauaacagcaaa

SEQ ID NO: 2051904 - RNA, 19 nt, Artificial Sequence
  Description of Artificial Sequence: Synthetic oligonucleotide
uguugacucuugacauaac

SEQ ID NO: 2051905 - RNA, 19 nt, Artificial Sequence
  Description of Artificial Sequence: Synthetic oligonucleotide
gaaacuguggagaaagcuu

SEQ ID NO: 2051906 - RNA, 19 nt, Artificial Sequence
  Description of Artificial Sequence: Synthetic oligonucleotide
cgaacacaggacaauaaac

SEQ ID NO: 2051907 - RNA, 19 nt, Artificial Sequence
  Description of Artificial Sequence: Synthetic oligonucleotide
caccuuguugacucuugac

SEQ ID NO: 2051908 - RNA, 19 nt, Artificial Sequence
  Description of Artificial Sequence: Synthetic oligonucleotide
agugugaguuccugccaca

SEQ ID NO: 2051909 - RNA, 19 nt, Artificial Sequence
  Description of Artificial Sequence: Synthetic oligonucleotide
caaugauguuggacuuuag

SEQ ID NO: 2051910 - RNA, 19 nt, Artificial Sequence
  Description of Artificial Sequence: Synthetic oligonucleotide
uggagauaaagaggguaau

SEQ ID NO: 2051911 - RNA, 19 nt, Artificial Sequence
  Description of Artificial Sequence: Synthetic oligonucleotide
acugcgcccgugcagucug

SEQ ID NO: 2051912 - RNA, 19 nt, Artificial Sequence
  Description of Artificial Sequence: Synthetic oligonucleotide
ugaucgcucucgucacugc

SEQ ID NO: 2051913 - RNA, 19 nt, Artificial Sequence
  Description of Artificial Sequence: Synthetic oligonucleotide
cucuccucaccauguugcc

SEQ ID NO: 2051914 - RNA, 19 nt, Artificial Sequence
  Description of Artificial Sequence: Synthetic oligonucleotide
ggcacguagucgaacacag

SEQ ID NO: 2051915 - RNA, 19 nt, Artificial Sequence
  Description of Artificial Sequence: Synthetic oligonucleotide
cuauccucccggacaacuc

SEQ ID NO: 2051916 - RNA, 19 nt, Artificial Sequence
  Description of Artificial Sequence: Synthetic oligonucleotide
augggugcacacacgauga

SEQ ID NO: 2051917 - RNA, 19 nt, Artificial Sequence
  Description of Artificial Sequence: Synthetic oligonucleotide
ggcgguagauguaggacgg

SEQ ID NO: 2051918 - RNA, 19 nt, Artificial Sequence
  Description of Artificial Sequence: Synthetic oligonucleotide
ucgcucaggccuccggaug

SEQ ID NO: 2051919 - RNA, 19 nt, Artificial Sequence
  Description of Artificial Sequence: Synthetic oligonucleotide
cagcucauuaauugccuca

SEQ ID NO: 2051920 - RNA, 19 nt, Artificial Sequence
  Description of Artificial Sequence: Synthetic oligonucleotide
uucuccguugugccuucca

SEQ ID NO: 2051921 - RNA, 19 nt, Artificial Sequence
  Description of Artificial Sequence: Synthetic oligonucleotide
gccacaaacuugugaaaug

SEQ ID NO: 2051922 - RNA, 19 nt, Artificial Sequence
  Description of Artificial Sequence: Synthetic oligonucleotide
acacacgaugaguggggug

SEQ ID NO: 2051923 - RNA, 19 nt, Artificial Sequence
  Description of Artificial Sequence: Synthetic oligonucleotide
ucaucaggcgguagaugua

SEQ ID NO: 2051924 - RNA, 19 nt, Artificial Sequence
  Description of Artificial Sequence: Synthetic oligonucleotide
gugccagagugugaguucc

SEQ ID NO: 2051925 - RNA, 19 nt, Artificial Sequence
  Description of Artificial Sequence: Synthetic oligonucleotide
cguaccaaugaucaccuug

SEQ ID NO: 2051926 - RNA, 19 nt, Artificial Sequence
  Description of Artificial Sequence: Synthetic oligonucleotide
uuucgggcugccucuuuaa

SEQ ID NO: 2051927 - RNA, 19 nt, Artificial Sequence
  Description of Artificial Sequence: Synthetic oligonucleotide
ucaacuccaucagcucgcc

SEQ ID NO: 2051928 - RNA, 19 nt, Artificial Sequence
  Description of Artificial Sequence: Synthetic oligonucleotide
caguugucucaauguuugc

SEQ ID NO: 2051929 - RNA, 19 nt, Artificial Sequence
  Description of Artificial Sequence: Synthetic oligonucleotide
ugccauacuccucccggau

SEQ ID NO: 2051930 - RNA, 19 nt, Artificial Sequence
  Description of Artificial Sequence: Synthetic oligonucleotide
uguuugcuugggacaaauu

SEQ ID NO: 2051931 - RNA, 19 nt, Artificial Sequence
  Description of Artificial Sequence: Synthetic oligonucleotide
cucgucacugcgcccgugc

SEQ ID NO: 2051932 - RNA, 19 nt, Artificial Sequence
  Description of Artificial Sequence: Synthetic oligonucleotide
acgguggucucagagggcu

SEQ ID NO: 2051933 - RNA, 19 nt, Artificial Sequence
  Description of Artificial Sequence: Synthetic oligonucleotide
auguuggacuuuagugggg

SEQ ID NO: 2051934 - RNA, 19 nt, Artificial Sequence
  Description of Artificial Sequence: Synthetic oligonucleotide
guaccaaugaucaccuugu

SEQ ID NO: 2051935 - RNA, 19 nt, Artificial Sequence
  Description of Artificial Sequence: Synthetic oligonucleotide
gugcagucugccauacucc

SEQ ID NO: 2051936 - RNA, 19 nt, Artificial Sequence
  Description of Artificial Sequence: Synthetic oligonucleotide
auggucaugaucaccucau

SEQ ID NO: 2051937 - RNA, 19 nt, Artificial Sequence
  Description of Artificial Sequence: Synthetic oligonucleotide
agucgaacacaggacaaua

SEQ ID NO: 2051938 - RNA, 19 nt, Artificial Sequence
  Description of Artificial Sequence: Synthetic oligonucleotide
cacacucggcaacaaugac

SEQ ID NO: 2051939 - RNA, 19 nt, Artificial Sequence
  Description of Artificial Sequence: Synthetic oligonucleotide
cuccgagcugcgcugcccg

SEQ ID NO: 2051940 - RNA, 19 nt, Artificial Sequence
  Description of Artificial Sequence: Synthetic oligonucleotide
acucuugacauaacagcaa

SEQ ID NO: 2051941 - RNA, 19 nt, Artificial Sequence
  Description of Artificial Sequence: Synthetic oligonucleotide
ggacguggucaucaggaug

SEQ ID NO: 2051942 - RNA, 19 nt, Artificial Sequence
  Description of Artificial Sequence: Synthetic oligonucleotide
caauguuugcuugggacaa

SEQ ID NO: 2051943 - RNA, 19 nt, Artificial Sequence
  Description of Artificial Sequence: Synthetic oligonucleotide
agccauguccuccgagcug

SEQ ID NO: 2051944 - RNA, 19 nt, Artificial Sequence
  Description of Artificial Sequence: Synthetic oligonucleotide
auacuccucccggaugauc

SEQ ID NO: 2051945 - RNA, 19 nt, Artificial Sequence
  Description of Artificial Sequence: Synthetic oligonucleotide
gcugccucuuuaaggaagg

SEQ ID NO: 2051946 - RNA, 19 nt, Artificial Sequence
  Description of Artificial Sequence: Synthetic oligonucleotide
cugaucgcucucgucacug

SEQ ID NO: 2051947 - RNA, 19 nt, Artificial Sequence
  Description of Artificial Sequence: Synthetic oligonucleotide
ggaaccguuggccaggaua

SEQ ID NO: 2051948 - RNA, 19 nt, Artificial Sequence
  Description of Artificial Sequence: Synthetic oligonucleotide
aauguuugcuugggacaaa

SEQ ID NO: 2051949 - RNA, 19 nt, Artificial Sequence
  Description of Artificial Sequence: Synthetic oligonucleotide
uagucgaacacaggacaau

SEQ ID NO: 2051950 - RNA, 19 nt, Artificial Sequence
  Description of Artificial Sequence: Synthetic oligonucleotide
caggauagucuucguacca

SEQ ID NO: 2051951 - RNA, 19 nt, Artificial Sequence
  Description of Artificial Sequence: Synthetic oligonucleotide
gaaggcuucuacuguucua

SEQ ID NO: 2051952 - RNA, 19 nt, Artificial Sequence
  Description of Artificial Sequence: Synthetic oligonucleotide
auguugcccacgguggucu

SEQ ID NO: 2051953 - RNA, 19 nt, Artificial Sequence
  Description of Artificial Sequence: Synthetic oligonucleotide
cugcccgccaccucgcuuc

SEQ ID NO: 2051954 - RNA, 19 nt, Artificial Sequence
  Description of Artificial Sequence: Synthetic oligonucleotide
guggagaaagcuugaacau

SEQ ID NO: 2051955 - RNA, 19 nt, Artificial Sequence
  Description of Artificial Sequence: Synthetic oligonucleotide
caauggucaugaucaccuc

SEQ ID NO: 2051956 - RNA, 19 nt, Artificial Sequence
  Description of Artificial Sequence: Synthetic oligonucleotide
guaggacggugcauucccg

SEQ ID NO: 2051957 - RNA, 19 nt, Artificial Sequence
  Description of Artificial Sequence: Synthetic oligonucleotide
cagaggacguggucaucag

SEQ ID NO: 2051958 - RNA, 19 nt, Artificial Sequence
  Description of Artificial Sequence: Synthetic oligonucleotide
ucgucacugcgcccgugca

SEQ ID NO: 2051959 - RNA, 19 nt, Artificial Sequence
  Description of Artificial Sequence: Synthetic oligonucleotide
cuccacgaagcccucuauc

SEQ ID NO: 2051960 - RNA, 19 nt, Artificial Sequence
  Description of Artificial Sequence: Synthetic oligonucleotide
uggacuuuaguggggcaua

SEQ ID NO: 2051961 - RNA, 19 nt, Artificial Sequence
  Description of Artificial Sequence: Synthetic oligonucleotide
auguuugcuugggacaaau

SEQ ID NO: 2051962 - RNA, 19 nt, Artificial Sequence
  Description of Artificial Sequence: Synthetic oligonucleotide
ugaggacucuccucaccau

SEQ ID NO: 2051963 - RNA, 19 nt, Artificial Sequence
  Description of Artificial Sequence: Synthetic oligonucleotide
cuuguugacucuugacaua

SEQ ID NO: 2051964 - RNA, 19 nt, Artificial Sequence
  Description of Artificial Sequence: Synthetic oligonucleotide
gcggccgucauccuccugc

SEQ ID NO: 2051965 - RNA, 19 nt, Artificial Sequence
  Description of Artificial Sequence: Synthetic oligonucleotide
gcucucgucacugcgcccg

SEQ ID NO: 2051966 - RNA, 19 nt, Artificial Sequence
  Description of Artificial Sequence: Synthetic oligonucleotide
cagggaaccguuggccagg

SEQ ID NO: 2051967 - RNA, 19 nt, Artificial Sequence
  Description of Artificial Sequence: Synthetic oligonucleotide
agaggguaaugaggucggg

SEQ ID NO: 2051968 - RNA, 19 nt, Artificial Sequence
  Description of Artificial Sequence: Synthetic oligonucleotide
gagccacaaacuugugaaa

SEQ ID NO: 2051969 - RNA, 19 nt, Artificial Sequence
  Description of Artificial Sequence: Synthetic oligonucleotide
gugguccgugaugagcccg

SEQ ID NO: 2051970 - RNA, 19 nt, Artificial Sequence
  Description of Artificial Sequence: Synthetic oligonucleotide
guagucgaacacaggacaa

SEQ ID NO: 2051971 - RNA, 19 nt, Artificial Sequence
  Description of Artificial Sequence: Synthetic oligonucleotide
auccucccggacaacuccg

SEQ ID NO: 2051972 - RNA, 19 nt, Artificial Sequence
  Description of Artificial Sequence: Synthetic oligonucleotide
acgaugagugggguggagu

SEQ ID NO: 2051973 - RNA, 19 nt, Artificial Sequence
  Description of Artificial Sequence: Synthetic oligonucleotide
agcaucggccaugacaguu

SEQ ID NO: 2051974 - RNA, 19 nt, Artificial Sequence
  Description of Artificial Sequence: Synthetic oligonucleotide
uagauguaggacggugcau

SEQ ID NO: 2051975 - RNA, 19 nt, Artificial Sequence
  Description of Artificial Sequence: Synthetic oligonucleotide
ccagagugugaguuccugc

SEQ ID NO: 2051976 - RNA, 19 nt, Artificial Sequence
  Description of Artificial Sequence: Synthetic oligonucleotide
augguagagcucgcucauc

SEQ ID NO: 2051977 - RNA, 19 nt, Artificial Sequence
  Description of Artificial Sequence: Synthetic oligonucleotide
guuggacuuuaguggggca

SEQ ID NO: 2051978 - RNA, 19 nt, Artificial Sequence
  Description of Artificial Sequence: Synthetic oligonucleotide
uccucccggacaacuccga

SEQ ID NO: 2051979 - RNA, 19 nt, Artificial Sequence
  Description of Artificial Sequence: Synthetic oligonucleotide
aggcuucuacuguucuaga

SEQ ID NO: 2051980 - RNA, 19 nt, Artificial Sequence
  Description of Artificial Sequence: Synthetic oligonucleotide
uggaugugcuccagagcuu

SEQ ID NO: 2051981 - RNA, 19 nt, Artificial Sequence
  Description of Artificial Sequence: Synthetic oligonucleotide
acuguggagaaagcuugaa

SEQ ID NO: 2051982 - RNA, 19 nt, Artificial Sequence
  Description of Artificial Sequence: Synthetic oligonucleotide
gcacacacgaugagugggg

SEQ ID NO: 2051983 - RNA, 19 nt, Artificial Sequence
  Description of Artificial Sequence: Synthetic oligonucleotide
uguucuccguugugccuuc

SEQ ID NO: 2051984 - RNA, 19 nt, Artificial Sequence
  Description of Artificial Sequence: Synthetic oligonucleotide
cuccugcugaucgcucucg

SEQ ID NO: 2051985 - RNA, 19 nt, Artificial Sequence
  Description of Artificial Sequence: Synthetic oligonucleotide
gcauucccgccaauguugg

SEQ ID NO: 2051986 - RNA, 19 nt, Artificial Sequence
  Description of Artificial Sequence: Synthetic oligonucleotide
ggccaugacaguugucuca

SEQ ID NO: 2051987 - RNA, 19 nt, Artificial Sequence
  Description of Artificial Sequence: Synthetic oligonucleotide
ccucuuuaaggaaggcuuc

SEQ ID NO: 2051988 - RNA, 19 nt, Artificial Sequence
  Description of Artificial Sequence: Synthetic oligonucleotide
cacgguggucucagagggc

SEQ ID NO: 2051989 - RNA, 19 nt, Artificial Sequence
  Description of Artificial Sequence: Synthetic oligonucleotide
gacggugcauucccgccaa

SEQ ID NO: 2051990 - RNA, 19 nt, Artificial Sequence
  Description of Artificial Sequence: Synthetic oligonucleotide
ggaaacuguggagaaagcu

SEQ ID NO: 2051991 - RNA, 19 nt, Artificial Sequence
  Description of Artificial Sequence: Synthetic oligonucleotide
ugccagagugugaguuccu

SEQ ID NO: 2051992 - RNA, 19 nt, Artificial Sequence
  Description of Artificial Sequence: Synthetic oligonucleotide
gucgaacacaggacaauaa

SEQ ID NO: 2051993 - RNA, 19 nt, Artificial Sequence
  Description of Artificial Sequence: Synthetic oligonucleotide
cguagucgaacacaggaca

SEQ ID NO: 2051994 - RNA, 19 nt, Artificial Sequence
  Description of Artificial Sequence: Synthetic oligonucleotide
ccuucuacgcgaaucaacu

SEQ ID NO: 2051995 - RNA, 19 nt, Artificial Sequence
  Description of Artificial Sequence: Synthetic oligonucleotide
ccacaaacuugugaaauga

SEQ ID NO: 2051996 - RNA, 19 nt, Artificial Sequence
  Description of Artificial Sequence: Synthetic oligonucleotide
gacuccugcugaucgcucu

SEQ ID NO: 2051997 - RNA, 19 nt, Artificial Sequence
  Description of Artificial Sequence: Synthetic oligonucleotide
cauguugcccacggugguc

SEQ ID NO: 2051998 - RNA, 19 nt, Artificial Sequence
  Description of Artificial Sequence: Synthetic oligonucleotide
ggcuucuacuguucuagaa

SEQ ID NO: 2051999 - RNA, 19 nt, Artificial Sequence
  Description of Artificial Sequence: Synthetic oligonucleotide
cgagccauguccuccgagc

SEQ ID NO: 2052000 - RNA, 19 nt, Artificial Sequence
  Description of Artificial Sequence: Synthetic oligonucleotide
ggugcauucccgccaaugu

SEQ ID NO: 2052001 - RNA, 19 nt, Artificial Sequence
  Description of Artificial Sequence: Synthetic oligonucleotide
agagggcugagcggccguc

SEQ ID NO: 2052002 - RNA, 19 nt, Artificial Sequence
  Description of Artificial Sequence: Synthetic oligonucleotide
uccuccgagcugcgcugcc

SEQ ID NO: 2052003 - RNA, 19 nt, Artificial Sequence
  Description of Artificial Sequence: Synthetic oligonucleotide
agcccucuauccucccgga

SEQ ID NO: 2052004 - RNA, 19 nt, Artificial Sequence
  Description of Artificial Sequence: Synthetic oligonucleotide
ugggguggagugguguuuu

SEQ ID NO: 2052005 - RNA, 19 nt, Artificial Sequence
  Description of Artificial Sequence: Synthetic oligonucleotide
ccucagggaaccguuggcc

SEQ ID NO: 2052006 - RNA, 19 nt, Artificial Sequence
  Description of Artificial Sequence: Synthetic oligonucleotide
ggcagugucagaggacgug

SEQ ID NO: 2052007 - RNA, 19 nt, Artificial Sequence
  Description of Artificial Sequence: Synthetic oligonucleotide
cgcgaaucaacuccaucag

SEQ ID NO: 2052008 - RNA, 19 nt, Artificial Sequence
  Description of Artificial Sequence: Synthetic oligonucleotide
ccauacuccucccggauga

SEQ ID NO: 2052009 - RNA, 19 nt, Artificial Sequence
  Description of Artificial Sequence: Synthetic oligonucleotide
ugccuucuacgcgaaucaa

SEQ ID NO: 2052010 - RNA, 19 nt, Artificial Sequence
  Description of Artificial Sequence: Synthetic oligonucleotide
cugccucuuuaaggaaggc

SEQ ID NO: 2052011 - RNA, 19 nt, Artificial Sequence
  Description of Artificial Sequence: Synthetic oligonucleotide
ggggcauaauggaagcuga

SEQ ID NO: 2052012 - RNA, 19 nt, Artificial Sequence
  Description of Artificial Sequence: Synthetic oligonucleotide
agggucucccgagccaugu

SEQ ID NO: 2052013 - RNA, 19 nt, Artificial Sequence
  Description of Artificial Sequence: Synthetic oligonucleotide
ggaagcugaaauccucgcu

SEQ ID NO: 2052014 - RNA, 19 nt, Artificial Sequence
  Description of Artificial Sequence: Synthetic oligonucleotide
cauuagcagcucauuaauu

SEQ ID NO: 2052015 - RNA, 19 nt, Artificial Sequence
  Description of Artificial Sequence: Synthetic oligonucleotide
aaccguuggccaggauagu

SEQ ID NO: 2052016 - RNA, 19 nt, Artificial Sequence
  Description of Artificial Sequence: Synthetic oligonucleotide
ucccgccaauguuggagau

SEQ ID NO: 2052017 - RNA, 19 nt, Artificial Sequence
  Description of Artificial Sequence: Synthetic oligonucleotide
gggacaaauugacagccau

SEQ ID NO: 2052018 - RNA, 19 nt, Artificial Sequence
  Description of Artificial Sequence: Synthetic oligonucleotide
uaauugccucaaugauguu

SEQ ID NO: 2052019 - RNA, 19 nt, Artificial Sequence
  Description of Artificial Sequence: Synthetic oligonucleotide
gcaucggccaugacaguug

SEQ ID NO: 2052020 - RNA, 19 nt, Artificial Sequence
  Description of Artificial Sequence: Synthetic oligonucleotide
cuuucgggcugccucuuua

SEQ ID NO: 2052021 - RNA, 19 nt, Artificial Sequence
  Description of Artificial Sequence: Synthetic oligonucleotide
acucggcaacaaugacaug

SEQ ID NO: 2052022 - RNA, 19 nt, Artificial Sequence
  Description of Artificial Sequence: Synthetic oligonucleotide
ggugguccgugaugagccc

SEQ ID NO: 2052023 - RNA, 19 nt, Artificial Sequence
  Description of Artificial Sequence: Synthetic oligonucleotide
gcuugaacaugggugcaca

SEQ ID NO: 2052024 - RNA, 19 nt, Artificial Sequence
  Description of Artificial Sequence: Synthetic oligonucleotide
ggguggagugguguuuugc

SEQ ID NO: 2052025 - RNA, 19 nt, Artificial Sequence
  Description of Artificial Sequence: Synthetic oligonucleotide
cacgaugagugggguggag

SEQ ID NO: 2052026 - RNA, 19 nt, Artificial Sequence
  Description of Artificial Sequence: Synthetic oligonucleotide
cuguucuagaauagccaau

SEQ ID NO: 2052027 - RNA, 19 nt, Artificial Sequence
  Description of Artificial Sequence: Synthetic oligonucleotide
gccuucuacgcgaaucaac

SEQ ID NO: 2052028 - RNA, 19 nt, Artificial Sequence
  Description of Artificial Sequence: Synthetic oligonucleotide
gcccgcguugcuccagugg

SEQ ID NO: 2052029 - RNA, 19 nt, Artificial Sequence
  Description of Artificial Sequence: Synthetic oligonucleotide
cucuuuaaggaaggcuucu

SEQ ID NO: 2052030 - RNA, 19 nt, Artificial Sequence
  Description of Artificial Sequence: Synthetic oligonucleotide
cccucuauccucccggaca

SEQ ID NO: 2052031 - RNA, 19 nt, Artificial Sequence
  Description of Artificial Sequence: Synthetic oligonucleotide
ccgugaugagcccgcacag

SEQ ID NO: 2052032 - RNA, 19 nt, Artificial Sequence
  Description of Artificial Sequence: Synthetic oligonucleotide
cucgcucaucaggcgguag

SEQ ID NO: 2052033 - RNA, 19 nt, Artificial Sequence
  Description of Artificial Sequence: Synthetic oligonucleotide
ugcgcccgugcagucugcc

SEQ ID NO: 2052034 - RNA, 19 nt, Artificial Sequence
  Description of Artificial Sequence: Synthetic oligonucleotide
ugcuccaguggugguccgu

SEQ ID NO: 2052035 - RNA, 19 nt, Artificial Sequence
  Description of Artificial Sequence: Synthetic oligonucleotide
acacgaugaguggggugga

SEQ ID NO: 2052036 - RNA, 19 nt, Artificial Sequence
  Description of Artificial Sequence: Synthetic oligonucleotide
accucgcuucagagccucc

SEQ ID NO: 2052037 - RNA, 19 nt, Artificial Sequence
  Description of Artificial Sequence: Synthetic oligonucleotide
ucacugcgcccgugcaguc

SEQ ID NO: 2052038 - RNA, 19 nt, Artificial Sequence
  Description of Artificial Sequence: Synthetic oligonucleotide
ucucgucacugcgcccgug

SEQ ID NO: 2052039 - RNA, 19 nt, Artificial Sequence
  Description of Artificial Sequence: Synthetic oligonucleotide
caccucgcuucagagccuc

SEQ ID NO: 2052040 - RNA, 19 nt, Artificial Sequence
  Description of Artificial Sequence: Synthetic oligonucleotide
cuccaucagcucgcccgcg

SEQ ID NO: 2052041 - RNA, 19 nt, Artificial Sequence
  Description of Artificial Sequence: Synthetic oligonucleotide
gcacguagucgaacacagg

SEQ ID NO: 2052042 - RNA, 19 nt, Artificial Sequence
  Description of Artificial Sequence: Synthetic oligonucleotide
aucggccaugacaguuguc

SEQ ID NO: 2052043 - RNA, 19 nt, Artificial Sequence
  Description of Artificial Sequence: Synthetic oligonucleotide
cgggcugccucuuuaagga

SEQ ID NO: 2052044 - RNA, 19 nt, Artificial Sequence
  Description of Artificial Sequence: Synthetic oligonucleotide
uuccucuuucgggcugccu

SEQ ID NO: 2052045 - RNA, 19 nt, Artificial Sequence
  Description of Artificial Sequence: Synthetic oligonucleotide
ucguaccaaugaucaccuu

SEQ ID NO: 2052046 - RNA, 19 nt, Artificial Sequence
  Description of Artificial Sequence: Synthetic oligonucleotide
ggauagucuucguaccaau

SEQ ID NO: 2052047 - RNA, 19 nt, Artificial Sequence
  Description of Artificial Sequence: Synthetic oligonucleotide
gccaugacaguugucucaa

SEQ ID NO: 2052048 - RNA, 19 nt, Artificial Sequence
  Description of Artificial Sequence: Synthetic oligonucleotide
ccgagucuuucuccgcggc

SEQ ID NO: 2052049 - RNA, 19 nt, Artificial Sequence
  Description of Artificial Sequence: Synthetic oligonucleotide
gugcauucccgccaauguu

SEQ ID NO: 2052050 - RNA, 19 nt, Artificial Sequence
  Description of Artificial Sequence: Synthetic oligonucleotide
ccucauuggaguggaugug

SEQ ID NO: 2052051 - RNA, 19 nt, Artificial Sequence
  Description of Artificial Sequence: Synthetic oligonucleotide
uugugccuuccaguuccau

SEQ ID NO: 2052052 - RNA, 19 nt, Artificial Sequence
  Description of Artificial Sequence: Synthetic oligonucleotide
gcuccaguggugguccgug

SEQ ID NO: 2052053 - RNA, 19 nt, Artificial Sequence
  Description of Artificial Sequence: Synthetic oligonucleotide
gcucaucaggcgguagaug

SEQ ID NO: 2052054 - RNA, 19 nt, Artificial Sequence
  Description of Artificial Sequence: Synthetic oligonucleotide
gggcacguagucgaacaca

SEQ ID NO: 2052055 - RNA, 19 nt, Artificial Sequence
  Description of Artificial Sequence: Synthetic oligonucleotide
uccugccuucuacgcgaau

SEQ ID NO: 2052056 - RNA, 19 nt, Artificial Sequence
  Description of Artificial Sequence: Synthetic oligonucleotide
cggaugucaagaguuugug

SEQ ID NO: 2052057 - RNA, 19 nt, Artificial Sequence
  Description of Artificial Sequence: Synthetic oligonucleotide
gagggcugagcggccguca

SEQ ID NO: 2052058 - RNA, 19 nt, Artificial Sequence
  Description of Artificial Sequence: Synthetic oligonucleotide
ccgccaauguuggagauaa

SEQ ID NO: 2052059 - RNA, 19 nt, Artificial Sequence
  Description of Artificial Sequence: Synthetic oligonucleotide
cacagcccucagggaaccg

SEQ ID NO: 2052060 - RNA, 19 nt, Artificial Sequence
  Description of Artificial Sequence: Synthetic oligonucleotide
cauucccgccaauguugga

SEQ ID NO: 2052061 - RNA, 19 nt, Artificial Sequence
  Description of Artificial Sequence: Synthetic oligonucleotide
agggaaccguuggccagga

SEQ ID NO: 2052062 - RNA, 19 nt, Artificial Sequence
  Description of Artificial Sequence: Synthetic oligonucleotide
cuccaguggugguccguga

SEQ ID NO: 2052063 - RNA, 19 nt, Artificial Sequence
  Description of Artificial Sequence: Synthetic oligonucleotide
ccucuauccucccggacaa

SEQ ID NO: 2052064 - RNA, 19 nt, Artificial Sequence
  Description of Artificial Sequence: Synthetic oligonucleotide
caaugacauggaacuuccu

SEQ ID NO: 2052065 - RNA, 19 nt, Artificial Sequence
  Description of Artificial Sequence: Synthetic oligonucleotide
cucuauccucccggacaac

SEQ ID NO: 2052066 - RNA, 19 nt, Artificial Sequence
  Description of Artificial Sequence: Synthetic oligonucleotide
caucggccaugacaguugu

SEQ ID NO: 2052067 - RNA, 19 nt, Artificial Sequence
  Description of Artificial Sequence: Synthetic oligonucleotide
gggguggagugguguuuug

SEQ ID NO: 2052068 - RNA, 19 nt, Artificial Sequence
  Description of Artificial Sequence: Synthetic oligonucleotide
ccgucauccuccugccuuc

SEQ ID NO: 2052069 - RNA, 19 nt, Artificial Sequence
  Description of Artificial Sequence: Synthetic oligonucleotide
guucuccguugugccuucc

SEQ ID NO: 2052070 - RNA, 19 nt, Artificial Sequence
  Description of Artificial Sequence: Synthetic oligonucleotide
ccgccaccucgcuucagag

SEQ ID NO: 2052071 - RNA, 19 nt, Artificial Sequence
  Description of Artificial Sequence: Synthetic oligonucleotide
cgguagauguaggacggug

SEQ ID NO: 2052072 - RNA, 19 nt, Artificial Sequence
  Description of Artificial Sequence: Synthetic oligonucleotide
ggacuuuaguggggcauaa

SEQ ID NO: 2052073 - RNA, 19 nt, Artificial Sequence
  Description of Artificial Sequence: Synthetic oligonucleotide
cugcgcccgugcagucugc

SEQ ID NO: 2052074 - RNA, 19 nt, Artificial Sequence
  Description of Artificial Sequence: Synthetic oligonucleotide
ccuccggaugucaagaguu

SEQ ID NO: 2052075 - RNA, 19 nt, Artificial Sequence
  Description of Artificial Sequence: Synthetic oligonucleotide
ccauuucaugacccuggca

SEQ ID NO: 2052076 - RNA, 19 nt, Artificial Sequence
  Description of Artificial Sequence: Synthetic oligonucleotide
agcggccgucauccuccug

SEQ ID NO: 2052077 - RNA, 19 nt, Artificial Sequence
  Description of Artificial Sequence: Synthetic oligonucleotide
cucgcccgcguugcuccag

SEQ ID NO: 2052078 - RNA, 19 nt, Artificial Sequence
  Description of Artificial Sequence: Synthetic oligonucleotide
ccgagccauguccuccgag

SEQ ID NO: 2052079 - RNA, 19 nt, Artificial Sequence
  Description of Artificial Sequence: Synthetic oligonucleotide
guuccgcucuggacaggca

SEQ ID NO: 2052080 - RNA, 19 nt, Artificial Sequence
  Description of Artificial Sequence: Synthetic oligonucleotide
cuccggaugucaagaguuu

SEQ ID NO: 2052081 - RNA, 19 nt, Artificial Sequence
  Description of Artificial Sequence: Synthetic oligonucleotide
ccggaugucaagaguuugu

SEQ ID NO: 2052082 - RNA, 19 nt, Artificial Sequence
  Description of Artificial Sequence: Synthetic oligonucleotide
ggcugcaauguucuccguu

SEQ ID NO: 2052083 - RNA, 19 nt, Artificial Sequence
  Description of Artificial Sequence: Synthetic oligonucleotide
gccgucauccuccugccuu

SEQ ID NO: 2052084 - RNA, 19 nt, Artificial Sequence
  Description of Artificial Sequence: Synthetic oligonucleotide
cacacacgaugaguggggu

SEQ ID NO: 2052085 - RNA, 19 nt, Artificial Sequence
  Description of Artificial Sequence: Synthetic oligonucleotide
gggugcacacacgaugagu

SEQ ID NO: 2052086 - RNA, 19 nt, Artificial Sequence
  Description of Artificial Sequence: Synthetic oligonucleotide
gcccucuauccucccggac

SEQ ID NO: 2052087 - RNA, 19 nt, Artificial Sequence
  Description of Artificial Sequence: Synthetic oligonucleotide
cuacgcgaaucaacuccau

SEQ ID NO: 2052088 - RNA, 19 nt, Artificial Sequence
  Description of Artificial Sequence: Synthetic oligonucleotide
acggugcauucccgccaau

SEQ ID NO: 2052089 - RNA, 19 nt, Artificial Sequence
  Description of Artificial Sequence: Synthetic oligonucleotide
ccguuggccaggauagucu

SEQ ID NO: 2052090 - RNA, 19 nt, Artificial Sequence
  Description of Artificial Sequence: Synthetic oligonucleotide
gggacuccugcugaucgcu

SEQ ID NO: 2052091 - RNA, 19 nt, Artificial Sequence
  Description of Artificial Sequence: Synthetic oligonucleotide
gccuccggaugucaagagu

SEQ ID NO: 2052092 - RNA, 19 nt, Artificial Sequence
  Description of Artificial Sequence: Synthetic oligonucleotide
ccucgcucaggccuccgga

SEQ ID NO: 2052093 - RNA, 19 nt, Artificial Sequence
  Description of Artificial Sequence: Synthetic oligonucleotide
gccuccacgaagcccucua

SEQ ID NO: 2052094 - RNA, 19 nt, Artificial Sequence
  Description of Artificial Sequence: Synthetic oligonucleotide
ccuccgagcugcgcugccc

SEQ ID NO: 2052095 - RNA, 19 nt, Artificial Sequence
  Description of Artificial Sequence: Synthetic oligonucleotide
cggccaugacaguugucuc

SEQ ID NO: 2052096 - RNA, 19 nt, Artificial Sequence
  Description of Artificial Sequence: Synthetic oligonucleotide
ggagcacacucggcaacaa

SEQ ID NO: 2052097 - RNA, 19 nt, Artificial Sequence
  Description of Artificial Sequence: Synthetic oligonucleotide
cccgcguugcuccaguggu

SEQ ID NO: 2052098 - RNA, 19 nt, Artificial Sequence
  Description of Artificial Sequence: Synthetic oligonucleotide
cggugcauucccgccaaug

SEQ ID NO: 2052099 - RNA, 19 nt, Artificial Sequence
  Description of Artificial Sequence: Synthetic oligonucleotide
ccacgaagcccucuauccu

SEQ ID NO: 2052100 - RNA, 19 nt, Artificial Sequence
  Description of Artificial Sequence: Synthetic oligonucleotide
cccgccaccucgcuucaga

SEQ ID NO: 2052101 - RNA, 19 nt, Artificial Sequence
  Description of Artificial Sequence: Synthetic oligonucleotide
cccgugcagucugccauac

SEQ ID NO: 2052102 - RNA, 19 nt, Artificial Sequence
  Description of Artificial Sequence: Synthetic oligonucleotide
ccaguuccauuagcagcuc

SEQ ID NO: 2052103 - RNA, 19 nt, Artificial Sequence
  Description of Artificial Sequence: Synthetic oligonucleotide
gcugaucgcucucgucacu

SEQ ID NO: 2052104 - RNA, 19 nt, Artificial Sequence
  Description of Artificial Sequence: Synthetic oligonucleotide
cgagucuuucuccgcggca

SEQ ID NO: 2052105 - RNA, 19 nt, Artificial Sequence
  Description of Artificial Sequence: Synthetic oligonucleotide
gcgcccgugcagucugcca

SEQ ID NO: 2052106 - RNA, 19 nt, Artificial Sequence
  Description of Artificial Sequence: Synthetic oligonucleotide
cauacuccucccggaugau

SEQ ID NO: 2052107 - RNA, 19 nt, Artificial Sequence
  Description of Artificial Sequence: Synthetic oligonucleotide
cgcucucgucacugcgccc

SEQ ID NO: 2052108 - RNA, 19 nt, Artificial Sequence
  Description of Artificial Sequence: Synthetic oligonucleotide
gcccgugcagucugccaua

SEQ ID NO: 2052109 - RNA, 19 nt, Artificial Sequence
  Description of Artificial Sequence: Synthetic oligonucleotide
cucucgucacugcgcccgu

SEQ ID NO: 2052110 - RNA, 19 nt, Artificial Sequence
  Description of Artificial Sequence: Synthetic oligonucleotide
cacugcgcccgugcagucu

SEQ ID NO: 2052111 - RNA, 19 nt, Artificial Sequence
  Description of Artificial Sequence: Synthetic oligonucleotide
ccggacaacuccgagucuu

SEQ ID NO: 2052112 - RNA, 19 nt, Artificial Sequence
  Description of Artificial Sequence: Synthetic oligonucleotide
gcucgcccgcguugcucca

SEQ ID NO: 2052113 - RNA, 19 nt, Artificial Sequence
  Description of Artificial Sequence: Synthetic oligonucleotide
ccagagcuugggcugcaau

SEQ ID NO: 2052114 - RNA, 19 nt, Artificial Sequence
  Description of Artificial Sequence: Synthetic oligonucleotide
gcgcugcccgccaccucgc

SEQ ID NO: 2052115 - RNA, 19 nt, Artificial Sequence
  Description of Artificial Sequence: Synthetic oligonucleotide
cgcucaggccuccggaugu

SEQ ID NO: 2052116 - RNA, 19 nt, Artificial Sequence
  Description of Artificial Sequence: Synthetic oligonucleotide
ggccgucauccuccugccu

SEQ ID NO: 2052117 - RNA, 19 nt, Artificial Sequence
  Description of Artificial Sequence: Synthetic oligonucleotide
gcucgcucaucaggcggua

SEQ ID NO: 2052118 - RNA, 19 nt, Artificial Sequence
  Description of Artificial Sequence: Synthetic oligonucleotide
cccgccaauguuggagaua

SEQ ID NO: 2052119 - RNA, 19 nt, Artificial Sequence
  Description of Artificial Sequence: Synthetic oligonucleotide
gcgguagauguaggacggu

SEQ ID NO: 2052120 - RNA, 19 nt, Artificial Sequence
  Description of Artificial Sequence: Synthetic oligonucleotide
gcugcccgccaccucgcuu

SEQ ID NO: 2052121 - RNA, 19 nt, Artificial Sequence
  Description of Artificial Sequence: Synthetic oligonucleotide
cgcccgcguugcuccagug

SEQ ID NO: 2052122 - RNA, 19 nt, Artificial Sequence
  Description of Artificial Sequence: Synthetic oligonucleotide
ccuccacgaagcccucuau

SEQ ID NO: 2052123 - RNA, 19 nt, Artificial Sequence
  Description of Artificial Sequence: Synthetic oligonucleotide
cgcccgugcagucugccau

SEQ ID NO: 2052124 - RNA, 19 nt, Artificial Sequence
  Description of Artificial Sequence: Synthetic oligonucleotide
ccaugacaguugucucaau

SEQ ID NO: 2052125 - RNA, 19 nt, Artificial Sequence
  Description of Artificial Sequence: Synthetic oligonucleotide
cgcucaucaggcgguagau

SEQ ID NO: 2052126 - RNA, 19 nt, Artificial Sequence
  Description of Artificial Sequence: Synthetic oligonucleotide
gggaaccguuggccaggau

SEQ ID NO: 2052127 - RNA, 19 nt, Artificial Sequence
  Description of Artificial Sequence: Synthetic oligonucleotide
cccggacaacuccgagucu

SEQ ID NO: 2052128 - RNA, 19 nt, Artificial Sequence
  Description of Artificial Sequence: Synthetic oligonucleotide
cgccaauguuggagauaaa

SEQ ID NO: 2052129 - RNA, 19 nt, Artificial Sequence
  Description of Artificial Sequence: Synthetic oligonucleotide
ccgugcagucugccauacu

SEQ ID NO: 2052130 - RNA, 19 nt, Artificial Sequence
  Description of Artificial Sequence: Synthetic oligonucleotide
cgcucuggacaggcagugu

SEQ ID NO: 2052131 - RNA, 19 nt, Artificial Sequence
  Description of Artificial Sequence: Synthetic oligonucleotide
acaaaagacagucuguucc

SEQ ID NO: 2052132 - RNA, 19 nt, Artificial Sequence
  Description of Artificial Sequence: Synthetic oligonucleotide
ugaaaagacagccaagugg

SEQ ID NO: 2052133 - RNA, 19 nt, Artificial Sequence
  Description of Artificial Sequence: Synthetic oligonucleotide
uuuucuuaagccaugaucu

SEQ ID NO: 2052134 - RNA, 19 nt, Artificial Sequence
  Description of Artificial Sequence: Synthetic oligonucleotide
uuuuguauaaacaauuuuc

SEQ ID NO: 2052135 - RNA, 19 nt, Artificial Sequence
  Description of Artificial Sequence: Synthetic oligonucleotide
uucauagcaaaauugguag

SEQ ID NO: 2052136 - RNA, 19 nt, Artificial Sequence
  Description of Artificial Sequence: Synthetic oligonucleotide
agaauugucuucuccaagc

SEQ ID NO: 2052137 - RNA, 19 nt, Artificial Sequence
  Description of Artificial Sequence: Synthetic oligonucleotide
aaaauugguagauggcaac

SEQ ID NO: 2052138 - RNA, 19 nt, Artificial Sequence
  Description of Artificial Sequence: Synthetic oligonucleotide
ugggaaacacaaaagacag

SEQ ID NO: 2052139 - RNA, 19 nt, Artificial Sequence
  Description of Artificial Sequence: Synthetic oligonucleotide
ucuccauaaaaccacugcg

SEQ ID NO: 2052140 - RNA, 19 nt, Artificial Sequence
  Description of Artificial Sequence: Synthetic oligonucleotide
acagaaauggucuuugauc

SEQ ID NO: 2052141 - RNA, 19 nt, Artificial Sequence
  Description of Artificial Sequence: Synthetic oligonucleotide
aaacaauuuucuuaagcca

SEQ ID NO: 2052142 - RNA, 19 nt, Artificial Sequence
  Description of Artificial Sequence: Synthetic oligonucleotide
uagcaaaauugguagaugg

SEQ ID NO: 2052143 - RNA, 19 nt, Artificial Sequence
  Description of Artificial Sequence: Synthetic oligonucleotide
aaaugaguuuugcaagcac

SEQ ID NO: 2052144 - RNA, 19 nt, Artificial Sequence
  Description of Artificial Sequence: Synthetic oligonucleotide
caaacuugaaaagacagcc

SEQ ID NO: 2052145 - RNA, 19 nt, Artificial Sequence
  Description of Artificial Sequence: Synthetic oligonucleotide
uuaaguuccucuccaaagc

SEQ ID NO: 2052146 - RNA, 19 nt, Artificial Sequence
  Description of Artificial Sequence: Synthetic oligonucleotide
aaugcuggcaggccuggcc

SEQ ID NO: 2052147 - RNA, 19 nt, Artificial Sequence
  Description of Artificial Sequence: Synthetic oligonucleotide
ucugcaaacuugaaaagac

SEQ ID NO: 2052148 - RNA, 19 nt, Artificial Sequence
  Description of Artificial Sequence: Synthetic oligonucleotide
gacgcagucaccaagguag

SEQ ID NO: 2052149 - RNA, 19 nt, Artificial Sequence
  Description of Artificial Sequence: Synthetic oligonucleotide
gaagcaagagccuggcucg

SEQ ID NO: 2052150 - RNA, 19 nt, Artificial Sequence
  Description of Artificial Sequence: Synthetic oligonucleotide
aauugucuucuccaagcuc

SEQ ID NO: 2052151 - RNA, 19 nt, Artificial Sequence
  Description of Artificial Sequence: Synthetic oligonucleotide
ucgucuguaggccaggucc

SEQ ID NO: 2052152 - RNA, 19 nt, Artificial Sequence
  Description of Artificial Sequence: Synthetic oligonucleotide
uccauaaaaccacugcggc

SEQ ID NO: 2052153 - RNA, 19 nt, Artificial Sequence
  Description of Artificial Sequence: Synthetic oligonucleotide
uggucuuugaucuuucuga

SEQ ID NO: 2052154 - RNA, 19 nt, Artificial Sequence
  Description of Artificial Sequence: Synthetic oligonucleotide
aaagacagccaaguggagg

SEQ ID NO: 2052155 - RNA, 19 nt, Artificial Sequence
  Description of Artificial Sequence: Synthetic oligonucleotide
ucaaauucucuggaggacg

SEQ ID NO: 2052156 - RNA, 19 nt, Artificial Sequence
  Description of Artificial Sequence: Synthetic oligonucleotide
aagcaaacgagguuugcug

SEQ ID NO: 2052157 - RNA, 19 nt, Artificial Sequence
  Description of Artificial Sequence: Synthetic oligonucleotide
gaauguacaauggaggaac

SEQ ID NO: 2052158 - RNA, 19 nt, Artificial Sequence
  Description of Artificial Sequence: Synthetic oligonucleotide
uuugcaagcacagaauugu

SEQ ID NO: 2052159 - RNA, 19 nt, Artificial Sequence
  Description of Artificial Sequence: Synthetic oligonucleotide
uaguuuccaaguuugcugc

SEQ ID NO: 2052160 - RNA, 19 nt, Artificial Sequence
  Description of Artificial Sequence: Synthetic oligonucleotide
gauacuggcguacuccugc

SEQ ID NO: 2052161 - RNA, 19 nt, Artificial Sequence
  Description of Artificial Sequence: Synthetic oligonucleotide
augacguacacaaugcugg

SEQ ID NO: 2052162 - RNA, 19 nt, Artificial Sequence
  Description of Artificial Sequence: Synthetic oligonucleotide
agugagaacuuccauguca

SEQ ID NO: 2052163 - RNA, 19 nt, Artificial Sequence
  Description of Artificial Sequence: Synthetic oligonucleotide
cuccauaaaaccacugcgg

SEQ ID NO: 2052164 - RNA, 19 nt, Artificial Sequence
  Description of Artificial Sequence: Synthetic oligonucleotide
gaucuguaucuccaugugg

SEQ ID NO: 2052165 - RNA, 19 nt, Artificial Sequence
  Description of Artificial Sequence: Synthetic oligonucleotide
uggagguacagcacugugg

SEQ ID NO: 2052166 - RNA, 19 nt, Artificial Sequence
  Description of Artificial Sequence: Synthetic oligonucleotide
uggaacugauuuuccaagg

SEQ ID NO: 2052167 - RNA, 19 nt, Artificial Sequence
  Description of Artificial Sequence: Synthetic oligonucleotide
agggaaaugaguuuugcaa

SEQ ID NO: 2052168 - RNA, 19 nt, Artificial Sequence
  Description of Artificial Sequence: Synthetic oligonucleotide
ucuuuguuacuugagguga

SEQ ID NO: 2052169 - RNA, 19 nt, Artificial Sequence
  Description of Artificial Sequence: Synthetic oligonucleotide
aacaauuuucuuaagccau

SEQ ID NO: 2052170 - RNA, 19 nt, Artificial Sequence
  Description of Artificial Sequence: Synthetic oligonucleotide
uaaguuccucuccaaagca

SEQ ID NO: 2052171 - RNA, 19 nt, Artificial Sequence
  Description of Artificial Sequence: Synthetic oligonucleotide
acguacacaaugcuggcag

SEQ ID NO: 2052172 - RNA, 19 nt, Artificial Sequence
  Description of Artificial Sequence: Synthetic oligonucleotide
uugaaaagacagccaagug

SEQ ID NO: 2052173 - RNA, 19 nt, Artificial Sequence
  Description of Artificial Sequence: Synthetic oligonucleotide
agacugggugagcugaagc

SEQ ID NO: 2052174 - RNA, 19 nt, Artificial Sequence
  Description of Artificial Sequence: Synthetic oligonucleotide
cauaaaaccacugcggcuc

SEQ ID NO: 2052175 - RNA, 19 nt, Artificial Sequence
  Description of Artificial Sequence: Synthetic oligonucleotide
aauucucuggaggacgcag

SEQ ID NO: 2052176 - RNA, 19 nt, Artificial Sequence
  Description of Artificial Sequence: Synthetic oligonucleotide
agcaaaauugguagauggc

SEQ ID NO: 2052177 - RNA, 19 nt, Artificial Sequence
  Description of Artificial Sequence: Synthetic oligonucleotide
uacgccucugccaaucucc

SEQ ID NO: 2052178 - RNA, 19 nt, Artificial Sequence
  Description of Artificial Sequence: Synthetic oligonucleotide
aaagcaaacgagguuugcu

SEQ ID NO: 2052179 - RNA, 19 nt, Artificial Sequence
  Description of Artificial Sequence: Synthetic oligonucleotide
ugaucuguaucuccaugug

SEQ ID NO: 2052180 - RNA, 19 nt, Artificial Sequence
  Description of Artificial Sequence: Synthetic oligonucleotide
ucugggguaauaucuuccc

SEQ ID NO: 2052181 - RNA, 19 nt, Artificial Sequence
  Description of Artificial Sequence: Synthetic oligonucleotide
ucgucuguccccgagauga

SEQ ID NO: 2052182 - RNA, 19 nt, Artificial Sequence
  Description of Artificial Sequence: Synthetic oligonucleotide
aauugguagauggcaacug

SEQ ID NO: 2052183 - RNA, 19 nt, Artificial Sequence
  Description of Artificial Sequence: Synthetic oligonucleotide
gaugacguacacaaugcug

SEQ ID NO: 2052184 - RNA, 19 nt, Artificial Sequence
  Description of Artificial Sequence: Synthetic oligonucleotide
gaguuuugcaagcacagaa

SEQ ID NO: 2052185 - RNA, 19 nt, Artificial Sequence
  Description of Artificial Sequence: Synthetic oligonucleotide
aaauugguagauggcaacu

SEQ ID NO: 2052186 - RNA, 19 nt, Artificial Sequence
  Description of Artificial Sequence: Synthetic oligonucleotide
uguggaacugauuuuccaa

SEQ ID NO: 2052187 - RNA, 19 nt, Artificial Sequence
  Description of Artificial Sequence: Synthetic oligonucleotide
cagcacagcgccuucaggg

SEQ ID NO: 2052188 - RNA, 19 nt, Artificial Sequence
  Description of Artificial Sequence: Synthetic oligonucleotide
ucuuaagccaugaucugua

SEQ ID NO: 2052189 - RNA, 19 nt, Artificial Sequence
  Description of Artificial Sequence: Synthetic oligonucleotide
uuucucguauuccugucgu

SEQ ID NO: 2052190 - RNA, 19 nt, Artificial Sequence
  Description of Artificial Sequence: Synthetic oligonucleotide
ucgaauucgccgccgagca

SEQ ID NO: 2052191 - RNA, 19 nt, Artificial Sequence
  Description of Artificial Sequence: Synthetic oligonucleotide
guggaacugauuuuccaag

SEQ ID NO: 2052192 - RNA, 19 nt, Artificial Sequence
  Description of Artificial Sequence: Synthetic oligonucleotide
uacaauggaggaacugaug

SEQ ID NO: 2052193 - RNA, 19 nt, Artificial Sequence
  Description of Artificial Sequence: Synthetic oligonucleotide
guagucagggcuucgggcc

SEQ ID NO: 2052194 - RNA, 19 nt, Artificial Sequence
  Description of Artificial Sequence: Synthetic oligonucleotide
guagauggcaacuguucag

SEQ ID NO: 2052195 - RNA, 19 nt, Artificial Sequence
  Description of Artificial Sequence: Synthetic oligonucleotide
guuacuugaggugacacuc

SEQ ID NO: 2052196 - RNA, 19 nt, Artificial Sequence
  Description of Artificial Sequence: Synthetic oligonucleotide
uucugaaccacuugucuuc

SEQ ID NO: 2052197 - RNA, 19 nt, Artificial Sequence
  Description of Artificial Sequence: Synthetic oligonucleotide
uuucuuaagccaugaucug

SEQ ID NO: 2052198 - RNA, 19 nt, Artificial Sequence
  Description of Artificial Sequence: Synthetic oligonucleotide
uguugguugcuuaguuucc

SEQ ID NO: 2052199 - RNA, 19 nt, Artificial Sequence
  Description of Artificial Sequence: Synthetic oligonucleotide
gagaugacguacacaaugc

SEQ ID NO: 2052200 - RNA, 19 nt, Artificial Sequence
  Description of Artificial Sequence: Synthetic oligonucleotide
caaauucucuggaggacgc

SEQ ID NO: 2052201 - RNA, 19 nt, Artificial Sequence
  Description of Artificial Sequence: Synthetic oligonucleotide
gucuuuguuacuugaggug

SEQ ID NO: 2052202 - RNA, 19 nt, Artificial Sequence
  Description of Artificial Sequence: Synthetic oligonucleotide
cuuucucguauuccugucg

SEQ ID NO: 2052203 - RNA, 19 nt, Artificial Sequence
  Description of Artificial Sequence: Synthetic oligonucleotide
gaguccucgaauucgccgc

SEQ ID NO: 2052204 - RNA, 19 nt, Artificial Sequence
  Description of Artificial Sequence: Synthetic oligonucleotide
aacacggaguccucgaauu

SEQ ID NO: 2052205 - RNA, 19 nt, Artificial Sequence
  Description of Artificial Sequence: Synthetic oligonucleotide
auugguagauggcaacugu

SEQ ID NO: 2052206 - RNA, 19 nt, Artificial Sequence
  Description of Artificial Sequence: Synthetic oligonucleotide
aagagccuggcucgaauca

SEQ ID NO: 2052207 - RNA, 19 nt, Artificial Sequence
  Description of Artificial Sequence: Synthetic oligonucleotide
gaugucuuuguuacuugag

SEQ ID NO: 2052208 - RNA, 19 nt, Artificial Sequence
  Description of Artificial Sequence: Synthetic oligonucleotide
ucauagcaaaauugguaga

SEQ ID NO: 2052209 - RNA, 19 nt, Artificial Sequence
  Description of Artificial Sequence: Synthetic oligonucleotide
gaauucgccgccgagcacc

SEQ ID NO: 2052210 - RNA, 19 nt, Artificial Sequence
  Description of Artificial Sequence: Synthetic oligonucleotide
aaaccacugcggcucgcac

SEQ ID NO: 2052211 - RNA, 19 nt, Artificial Sequence
  Description of Artificial Sequence: Synthetic oligonucleotide
uugaucuuucugaaccacu

SEQ ID NO: 2052212 - RNA, 19 nt, Artificial Sequence
  Description of Artificial Sequence: Synthetic oligonucleotide
uguuacuugaggugacacu

SEQ ID NO: 2052213 - RNA, 19 nt, Artificial Sequence
  Description of Artificial Sequence: Synthetic oligonucleotide
ugguagauggcaacuguuc

SEQ ID NO: 2052214 - RNA, 19 nt, Artificial Sequence
  Description of Artificial Sequence: Synthetic oligonucleotide
auaaaaccacugcggcucg

SEQ ID NO: 2052215 - RNA, 19 nt, Artificial Sequence
  Description of Artificial Sequence: Synthetic oligonucleotide
caggcacaggcuuucagcc

SEQ ID NO: 2052216 - RNA, 19 nt, Artificial Sequence
  Description of Artificial Sequence: Synthetic oligonucleotide
agucuguuccagaauguac

SEQ ID NO: 2052217 - RNA, 19 nt, Artificial Sequence
  Description of Artificial Sequence: Synthetic oligonucleotide
uuaagccaugaucuguauc

SEQ ID NO: 2052218 - RNA, 19 nt, Artificial Sequence
  Description of Artificial Sequence: Synthetic oligonucleotide
ucuguccccgagaugacgu

SEQ ID NO: 2052219 - RNA, 19 nt, Artificial Sequence
  Description of Artificial Sequence: Synthetic oligonucleotide
uuuucugggguaauaucuu

SEQ ID NO: 2052220 - RNA, 19 nt, Artificial Sequence
  Description of Artificial Sequence: Synthetic oligonucleotide
uuggacaucccuuuucaua

SEQ ID NO: 2052221 - RNA, 19 nt, Artificial Sequence
  Description of Artificial Sequence: Synthetic oligonucleotide
acaggcuuucagccgggcc

SEQ ID NO: 2052222 - RNA, 19 nt, Artificial Sequence
  Description of Artificial Sequence: Synthetic oligonucleotide
cauguggaacugauuuucc

SEQ ID NO: 2052223 - RNA, 19 nt, Artificial Sequence
  Description of Artificial Sequence: Synthetic oligonucleotide
agcgcuuucucguauuccu

SEQ ID NO: 2052224 - RNA, 19 nt, Artificial Sequence
  Description of Artificial Sequence: Synthetic oligonucleotide
augaacuucaucucuuauu

SEQ ID NO: 2052225 - RNA, 19 nt, Artificial Sequence
  Description of Artificial Sequence: Synthetic oligonucleotide
cagaaauggucuuugaucu

SEQ ID NO: 2052226 - RNA, 19 nt, Artificial Sequence
  Description of Artificial Sequence: Synthetic oligonucleotide
aaacuugaaaagacagcca

SEQ ID NO: 2052227 - RNA, 19 nt, Artificial Sequence
  Description of Artificial Sequence: Synthetic oligonucleotide
accacugcggcucgcacag

SEQ ID NO: 2052228 - RNA, 19 nt, Artificial Sequence
  Description of Artificial Sequence: Synthetic oligonucleotide
uucgggccaacacacuuca

SEQ ID NO: 2052229 - RNA, 19 nt, Artificial Sequence
  Description of Artificial Sequence: Synthetic oligonucleotide
ucucguauuccugucgucu

SEQ ID NO: 2052230 - RNA, 19 nt, Artificial Sequence
  Description of Artificial Sequence: Synthetic oligonucleotide
agcaaacgagguuugcuga

SEQ ID NO: 2052231 - RNA, 19 nt, Artificial Sequence
  Description of Artificial Sequence: Synthetic oligonucleotide
aguuuccaaguuugcugcg

SEQ ID NO: 2052232 - RNA, 19 nt, Artificial Sequence
  Description of Artificial Sequence: Synthetic oligonucleotide
uagauggcaacuguucaga

SEQ ID NO: 2052233 - RNA, 19 nt, Artificial Sequence
  Description of Artificial Sequence: Synthetic oligonucleotide
aguccucgaauucgccgcc

SEQ ID NO: 2052234 - RNA, 19 nt, Artificial Sequence
  Description of Artificial Sequence: Synthetic oligonucleotide
uguaggccagguccccucg

SEQ ID NO: 2052235 - RNA, 19 nt, Artificial Sequence
  Description of Artificial Sequence: Synthetic oligonucleotide
ugcucgaacacggaguccu

SEQ ID NO: 2052236 - RNA, 19 nt, Artificial Sequence
  Description of Artificial Sequence: Synthetic oligonucleotide
ucgaaucagacaggcacag

SEQ ID NO: 2052237 - RNA, 19 nt, Artificial Sequence
  Description of Artificial Sequence: Synthetic oligonucleotide
auagcaaaauugguagaug

SEQ ID NO: 2052238 - RNA, 19 nt, Artificial Sequence
  Description of Artificial Sequence: Synthetic oligonucleotide
gacugggugagcugaagca

SEQ ID NO: 2052239 - RNA, 19 nt, Artificial Sequence
  Description of Artificial Sequence: Synthetic oligonucleotide
cuggcguacuccugcagcg

SEQ ID NO: 2052240 - RNA, 19 nt, Artificial Sequence
  Description of Artificial Sequence: Synthetic oligonucleotide
ugagagugagaacuuccau

SEQ ID NO: 2052241 - RNA, 19 nt, Artificial Sequence
  Description of Artificial Sequence: Synthetic oligonucleotide
cuuuguuacuugaggugac

SEQ ID NO: 2052242 - RNA, 19 nt, Artificial Sequence
  Description of Artificial Sequence: Synthetic oligonucleotide
cagucaccaagguagucag

SEQ ID NO: 2052243 - RNA, 19 nt, Artificial Sequence
  Description of Artificial Sequence: Synthetic oligonucleotide
caugaucuguaucuccaug

SEQ ID NO: 2052244 - RNA, 19 nt, Artificial Sequence
  Description of Artificial Sequence: Synthetic oligonucleotide
guucagaggaugcagggaa

SEQ ID NO: 2052245 - RNA, 19 nt, Artificial Sequence
  Description of Artificial Sequence: Synthetic oligonucleotide
gagguuugcugagacuggg

SEQ ID NO: 2052246 - RNA, 19 nt, Artificial Sequence
  Description of Artificial Sequence: Synthetic oligonucleotide
agaugacguacacaaugcu

SEQ ID NO: 2052247 - RNA, 19 nt, Artificial Sequence
  Description of Artificial Sequence: Synthetic oligonucleotide
cagaauugucuucuccaag

SEQ ID NO: 2052248 - RNA, 19 nt, Artificial Sequence
  Description of Artificial Sequence: Synthetic oligonucleotide
caaaauugguagauggcaa

SEQ ID NO: 2052249 - RNA, 19 nt, Artificial Sequence
  Description of Artificial Sequence: Synthetic oligonucleotide
gugagaugguccguguugg

SEQ ID NO: 2052250 - RNA, 19 nt, Artificial Sequence
  Description of Artificial Sequence: Synthetic oligonucleotide
agauggcaacuguucagag

SEQ ID NO: 2052251 - RNA, 19 nt, Artificial Sequence
  Description of Artificial Sequence: Synthetic oligonucleotide
cucuggaggacgcagucac

SEQ ID NO: 2052252 - RNA, 19 nt, Artificial Sequence
  Description of Artificial Sequence: Synthetic oligonucleotide
uacuugaggugacacucgu

SEQ ID NO: 2052253 - RNA, 19 nt, Artificial Sequence
  Description of Artificial Sequence: Synthetic oligonucleotide
ugcagggaaaugaguuuug

SEQ ID NO: 2052254 - RNA, 19 nt, Artificial Sequence
  Description of Artificial Sequence: Synthetic oligonucleotide
gauuuuccaagggacagaa

SEQ ID NO: 2052255 - RNA, 19 nt, Artificial Sequence
  Description of Artificial Sequence: Synthetic oligonucleotide
uuuccaaguuugcugcgau

SEQ ID NO: 2052256 - RNA, 19 nt, Artificial Sequence
  Description of Artificial Sequence: Synthetic oligonucleotide
aagccaugaucuguaucuc

SEQ ID NO: 2052257 - RNA, 19 nt, Artificial Sequence
  Description of Artificial Sequence: Synthetic oligonucleotide
ugacguacacaaugcuggc

SEQ ID NO: 2052258 - RNA, 19 nt, Artificial Sequence
  Description of Artificial Sequence: Synthetic oligonucleotide
aacgagguuugcugagacu

SEQ ID NO: 2052259 - RNA, 19 nt, Artificial Sequence
  Description of Artificial Sequence: Synthetic oligonucleotide
gaugguccguguugguugc

SEQ ID NO: 2052260 - RNA, 19 nt, Artificial Sequence
  Description of Artificial Sequence: Synthetic oligonucleotide
aacacacuucaccucugaa

SEQ ID NO: 2052261 - RNA, 19 nt, Artificial Sequence
  Description of Artificial Sequence: Synthetic oligonucleotide
ugucaucacugcuugccgu

SEQ ID NO: 2052262 - RNA, 19 nt, Artificial Sequence
  Description of Artificial Sequence: Synthetic oligonucleotide
auguggaacugauuuucca

SEQ ID NO: 2052263 - RNA, 19 nt, Artificial Sequence
  Description of Artificial Sequence: Synthetic oligonucleotide
uuuguuacuugaggugaca

SEQ ID NO: 2052264 - RNA, 19 nt, Artificial Sequence
  Description of Artificial Sequence: Synthetic oligonucleotide
acacaaugcuggcaggccu

SEQ ID NO: 2052265 - RNA, 19 nt, Artificial Sequence
  Description of Artificial Sequence: Synthetic oligonucleotide
ggaguccucgaauucgccg

SEQ ID NO: 2052266 - RNA, 19 nt, Artificial Sequence
  Description of Artificial Sequence: Synthetic oligonucleotide
aauucgccgccgagcaccc

SEQ ID NO: 2052267 - RNA, 19 nt, Artificial Sequence
  Description of Artificial Sequence: Synthetic oligonucleotide
aacugaugucuuuguuacu

SEQ ID NO: 2052268 - RNA, 19 nt, Artificial Sequence
  Description of Artificial Sequence: Synthetic oligonucleotide
uacacaaugcuggcaggcc

SEQ ID NO: 2052269 - RNA, 19 nt, Artificial Sequence
  Description of Artificial Sequence: Synthetic oligonucleotide
uugccgucucuccauaaaa

SEQ ID NO: 2052270 - RNA, 19 nt, Artificial Sequence
  Description of Artificial Sequence: Synthetic oligonucleotide
agggcuucgggccaacaca

SEQ ID NO: 2052271 - RNA, 19 nt, Artificial Sequence
  Description of Artificial Sequence: Synthetic oligonucleotide
uucgccgccgagcacccag

SEQ ID NO: 2052272 - RNA, 19 nt, Artificial Sequence
  Description of Artificial Sequence: Synthetic oligonucleotide
acuugaaaagacagccaag

SEQ ID NO: 2052273 - RNA, 19 nt, Artificial Sequence
  Description of Artificial Sequence: Synthetic oligonucleotide
acacggaguccucgaauuc

SEQ ID NO: 2052274 - RNA, 19 nt, Artificial Sequence
  Description of Artificial Sequence: Synthetic oligonucleotide
uucagagauacuggcguac

SEQ ID NO: 2052275 - RNA, 19 nt, Artificial Sequence
  Description of Artificial Sequence: Synthetic oligonucleotide
uugaggugacacucgucug

SEQ ID NO: 2052276 - RNA, 19 nt, Artificial Sequence
  Description of Artificial Sequence: Synthetic oligonucleotide
cuugaggugacacucgucu

SEQ ID NO: 2052277 - RNA, 19 nt, Artificial Sequence
  Description of Artificial Sequence: Synthetic oligonucleotide
cacggaguccucgaauucg

SEQ ID NO: 2052278 - RNA, 19 nt, Artificial Sequence
  Description of Artificial Sequence: Synthetic oligonucleotide
cuuugaucuuucugaacca

SEQ ID NO: 2052279 - RNA, 19 nt, Artificial Sequence
  Description of Artificial Sequence: Synthetic oligonucleotide
ugauuuuccaagggacaga

SEQ ID NO: 2052280 - RNA, 19 nt, Artificial Sequence
  Description of Artificial Sequence: Synthetic oligonucleotide
ggugagaugguccguguug

SEQ ID NO: 2052281 - RNA, 19 nt, Artificial Sequence
  Description of Artificial Sequence: Synthetic oligonucleotide
aaaaccacugcggcucgca

SEQ ID NO: 2052282 - RNA, 19 nt, Artificial Sequence
  Description of Artificial Sequence: Synthetic oligonucleotide
acugauuuuccaagggaca

SEQ ID NO: 2052283 - RNA, 19 nt, Artificial Sequence
  Description of Artificial Sequence: Synthetic oligonucleotide
uccaagggacagaaauggu

SEQ ID NO: 2052284 - RNA, 19 nt, Artificial Sequence
  Description of Artificial Sequence: Synthetic oligonucleotide
ggugacacucgucuguccc

SEQ ID NO: 2052285 - RNA, 19 nt, Artificial Sequence
  Description of Artificial Sequence: Synthetic oligonucleotide
aggugacacucgucugucc

SEQ ID NO: 2052286 - RNA, 19 nt, Artificial Sequence
  Description of Artificial Sequence: Synthetic oligonucleotide
uccaaggguucagaggaug

SEQ ID NO: 2052287 - RNA, 19 nt, Artificial Sequence
  Description of Artificial Sequence: Synthetic oligonucleotide
uucucuggaggacgcaguc

SEQ ID NO: 2052288 - RNA, 19 nt, Artificial Sequence
  Description of Artificial Sequence: Synthetic oligonucleotide
caagggacagaaauggucu

SEQ ID NO: 2052289 - RNA, 19 nt, Artificial Sequence
  Description of Artificial Sequence: Synthetic oligonucleotide
cugaugucuuuguuacuug

SEQ ID NO: 2052290 - RNA, 19 nt, Artificial Sequence
  Description of Artificial Sequence: Synthetic oligonucleotide
agccaaguggagguacagc

SEQ ID NO: 2052291 - RNA, 19 nt, Artificial Sequence
  Description of Artificial Sequence: Synthetic oligonucleotide
gacaggcacaggcuuucag

SEQ ID NO: 2052292 - RNA, 19 nt, Artificial Sequence
  Description of Artificial Sequence: Synthetic oligonucleotide
ucguauuccugucgucugu

SEQ ID NO: 2052293 - RNA, 19 nt, Artificial Sequence
  Description of Artificial Sequence: Synthetic oligonucleotide
uucaccucugaaugaacuu

SEQ ID NO: 2052294 - RNA, 19 nt, Artificial Sequence
  Description of Artificial Sequence: Synthetic oligonucleotide
ugaguuuugcaagcacaga

SEQ ID NO: 2052295 - RNA, 19 nt, Artificial Sequence
  Description of Artificial Sequence: Synthetic oligonucleotide
acagcuuggcgccgugggg

SEQ ID NO: 2052296 - RNA, 19 nt, Artificial Sequence
  Description of Artificial Sequence: Synthetic oligonucleotide
ucgaacacggaguccucga

SEQ ID NO: 2052297 - RNA, 19 nt, Artificial Sequence
  Description of Artificial Sequence: Synthetic oligonucleotide
cugggguaauaucuucccc

SEQ ID NO: 2052298 - RNA, 19 nt, Artificial Sequence
  Description of Artificial Sequence: Synthetic oligonucleotide
cucguauuccugucgucug

SEQ ID NO: 2052299 - RNA, 19 nt, Artificial Sequence
  Description of Artificial Sequence: Synthetic oligonucleotide
agaauguacaauggaggaa

SEQ ID NO: 2052300 - RNA, 19 nt, Artificial Sequence
  Description of Artificial Sequence: Synthetic oligonucleotide
guacacaaugcuggcaggc

SEQ ID NO: 2052301 - RNA, 19 nt, Artificial Sequence
  Description of Artificial Sequence: Synthetic oligonucleotide
ucugaaccacuugucuuca

SEQ ID NO: 2052302 - RNA, 19 nt, Artificial Sequence
  Description of Artificial Sequence: Synthetic oligonucleotide
uucagaggaugcagggaaa

SEQ ID NO: 2052303 - RNA, 19 nt, Artificial Sequence
  Description of Artificial Sequence: Synthetic oligonucleotide
cucgaauucgccgccgagc

SEQ ID NO: 2052304 - RNA, 19 nt, Artificial Sequence
  Description of Artificial Sequence: Synthetic oligonucleotide
ugcugcgaucuccagcgcu

SEQ ID NO: 2052305 - RNA, 19 nt, Artificial Sequence
  Description of Artificial Sequence: Synthetic oligonucleotide
uccccucggaacuucuuga

SEQ ID NO: 2052306 - RNA, 19 nt, Artificial Sequence
  Description of Artificial Sequence: Synthetic oligonucleotide
uggcucgaaucagacaggc

SEQ ID NO: 2052307 - RNA, 19 nt, Artificial Sequence
  Description of Artificial Sequence: Synthetic oligonucleotide
gacucagguacgccucugc

SEQ ID NO: 2052308 - RNA, 19 nt, Artificial Sequence
  Description of Artificial Sequence: Synthetic oligonucleotide
gguagauggcaacuguuca

SEQ ID NO: 2052309 - RNA, 19 nt, Artificial Sequence
  Description of Artificial Sequence: Synthetic oligonucleotide
cacagcgccuucagggagg

SEQ ID NO: 2052310 - RNA, 19 nt, Artificial Sequence
  Description of Artificial Sequence: Synthetic oligonucleotide
ucagagauacuggcguacu

SEQ ID NO: 2052311 - RNA, 19 nt, Artificial Sequence
  Description of Artificial Sequence: Synthetic oligonucleotide
guauuccugucgucuguag

SEQ ID NO: 2052312 - RNA, 19 nt, Artificial Sequence
  Description of Artificial Sequence: Synthetic oligonucleotide
ucgugucuccccaggugag

SEQ ID NO: 2052313 - RNA, 19 nt, Artificial Sequence
  Description of Artificial Sequence: Synthetic oligonucleotide
aguuuugcaagcacagaau

SEQ ID NO: 2052314 - RNA, 19 nt, Artificial Sequence
  Description of Artificial Sequence: Synthetic oligonucleotide
cacuugucuucaaauucuc

SEQ ID NO: 2052315 - RNA, 19 nt, Artificial Sequence
  Description of Artificial Sequence: Synthetic oligonucleotide
acacuucaccucugaauga

SEQ ID NO: 2052316 - RNA, 19 nt, Artificial Sequence
  Description of Artificial Sequence: Synthetic oligonucleotide
cuguaucuccauguggaac

SEQ ID NO: 2052317 - RNA, 19 nt, Artificial Sequence
  Description of Artificial Sequence: Synthetic oligonucleotide
ugcggcucgcacagcuugg

SEQ ID NO: 2052318 - RNA, 19 nt, Artificial Sequence
  Description of Artificial Sequence: Synthetic oligonucleotide
ucaggcaagguugcuggga

SEQ ID NO: 2052319 - RNA, 19 nt, Artificial Sequence
  Description of Artificial Sequence: Synthetic oligonucleotide
cgagaugacguacacaaug

SEQ ID NO: 2052320 - RNA, 19 nt, Artificial Sequence
  Description of Artificial Sequence: Synthetic oligonucleotide
ggaacugaugucuuuguua

SEQ ID NO: 2052321 - RNA, 19 nt, Artificial Sequence
  Description of Artificial Sequence: Synthetic oligonucleotide
cuggcucgaaucagacagg

SEQ ID NO: 2052322 - RNA, 19 nt, Artificial Sequence
  Description of Artificial Sequence: Synthetic oligonucleotide
gacagaaauggucuuugau

SEQ ID NO: 2052323 - RNA, 19 nt, Artificial Sequence
  Description of Artificial Sequence: Synthetic oligonucleotide
cucgaaucagacaggcaca

SEQ ID NO: 2052324 - RNA, 19 nt, Artificial Sequence
  Description of Artificial Sequence: Synthetic oligonucleotide
ggcaacuguucagagauac

SEQ ID NO: 2052325 - RNA, 19 nt, Artificial Sequence
  Description of Artificial Sequence: Synthetic oligonucleotide
guccuuaaguuccucucca

SEQ ID NO: 2052326 - RNA, 19 nt, Artificial Sequence
  Description of Artificial Sequence: Synthetic oligonucleotide
uacuggcguacuccugcag

SEQ ID NO: 2052327 - RNA, 19 nt, Artificial Sequence
  Description of Artificial Sequence: Synthetic oligonucleotide
ucagaggaugcagggaaau

SEQ ID NO: 2052328 - RNA, 19 nt, Artificial Sequence
  Description of Artificial Sequence: Synthetic oligonucleotide
cuucgggccaacacacuuc

SEQ ID NO: 2052329 - RNA, 19 nt, Artificial Sequence
  Description of Artificial Sequence: Synthetic oligonucleotide
aguuugcugcgaucuccag

SEQ ID NO: 2052330 - RNA, 19 nt, Artificial Sequence
  Description of Artificial Sequence: Synthetic oligonucleotide
aucucaggcaagguugcug

SEQ ID NO: 2052331 - RNA, 19 nt, Artificial Sequence
  Description of Artificial Sequence: Synthetic oligonucleotide
uccggccucugcucgaaca

SEQ ID NO: 2052332 - RNA, 19 nt, Artificial Sequence
  Description of Artificial Sequence: Synthetic oligonucleotide
gugacacucgucugucccc

SEQ ID NO: 2052333 - RNA, 19 nt, Artificial Sequence
  Description of Artificial Sequence: Synthetic oligonucleotide
guggagguacagcacugug

SEQ ID NO: 2052334 - RNA, 19 nt, Artificial Sequence
  Description of Artificial Sequence: Synthetic oligonucleotide
aaguuccucuccaaagcaa

SEQ ID NO: 2052335 - RNA, 19 nt, Artificial Sequence
  Description of Artificial Sequence: Synthetic oligonucleotide
uccuuaaguuccucuccaa

SEQ ID NO: 2052336 - RNA, 19 nt, Artificial Sequence
  Description of Artificial Sequence: Synthetic oligonucleotide
guccguguugguugcuuag

SEQ ID NO: 2052337 - RNA, 19 nt, Artificial Sequence
  Description of Artificial Sequence: Synthetic oligonucleotide
cucgaacacggaguccucg

SEQ ID NO: 2052338 - RNA, 19 nt, Artificial Sequence
  Description of Artificial Sequence: Synthetic oligonucleotide
guuuugcaagcacagaauu

SEQ ID NO: 2052339 - RNA, 19 nt, Artificial Sequence
  Description of Artificial Sequence: Synthetic oligonucleotide
gcaaacgagguuugcugag

SEQ ID NO: 2052340 - RNA, 19 nt, Artificial Sequence
  Description of Artificial Sequence: Synthetic oligonucleotide
cagggaaaugaguuuugca

SEQ ID NO: 2052341 - RNA, 19 nt, Artificial Sequence
  Description of Artificial Sequence: Synthetic oligonucleotide
ggaggacgcagucaccaag

SEQ ID NO: 2052342 - RNA, 19 nt, Artificial Sequence
  Description of Artificial Sequence: Synthetic oligonucleotide
acucgucuguccccgagau

SEQ ID NO: 2052343 - RNA, 19 nt, Artificial Sequence
  Description of Artificial Sequence: Synthetic oligonucleotide
gacagccaaguggagguac

SEQ ID NO: 2052344 - RNA, 19 nt, Artificial Sequence
  Description of Artificial Sequence: Synthetic oligonucleotide
agcuuggcgccguggggcg

SEQ ID NO: 2052345 - RNA, 19 nt, Artificial Sequence
  Description of Artificial Sequence: Synthetic oligonucleotide
ggaggaacugaugucuuug

SEQ ID NO: 2052346 - RNA, 19 nt, Artificial Sequence
  Description of Artificial Sequence: Synthetic oligonucleotide
cucgugucuccccagguga

SEQ ID NO: 2052347 - RNA, 19 nt, Artificial Sequence
  Description of Artificial Sequence: Synthetic oligonucleotide
uggacucagguacgccucu

SEQ ID NO: 2052348 - RNA, 19 nt, Artificial Sequence
  Description of Artificial Sequence: Synthetic oligonucleotide
aggcugagcuccuucacuu

SEQ ID NO: 2052349 - RNA, 19 nt, Artificial Sequence
  Description of Artificial Sequence: Synthetic oligonucleotide
ccccaggugagccagacac

SEQ ID NO: 2052350 - RNA, 19 nt, Artificial Sequence
  Description of Artificial Sequence: Synthetic oligonucleotide
agguacgccucugccaauc

SEQ ID NO: 2052351 - RNA, 19 nt, Artificial Sequence
  Description of Artificial Sequence: Synthetic oligonucleotide
acacucgucuguccccgag

SEQ ID NO: 2052352 - RNA, 19 nt, Artificial Sequence
  Description of Artificial Sequence: Synthetic oligonucleotide
guccccucggaacuucuug

SEQ ID NO: 2052353 - RNA, 19 nt, Artificial Sequence
  Description of Artificial Sequence: Synthetic oligonucleotide
uccucgaauucgccgccga

SEQ ID NO: 2052354 - RNA, 19 nt, Artificial Sequence
  Description of Artificial Sequence: Synthetic oligonucleotide
cucaggcaagguugcuggg

SEQ ID NO: 2052355 - RNA, 19 nt, Artificial Sequence
  Description of Artificial Sequence: Synthetic oligonucleotide
cucagguacgccucugcca

SEQ ID NO: 2052356 - RNA, 19 nt, Artificial Sequence
  Description of Artificial Sequence: Synthetic oligonucleotide
uuucagccgggccuccauc

SEQ ID NO: 2052357 - RNA, 19 nt, Artificial Sequence
  Description of Artificial Sequence: Synthetic oligonucleotide
cuucaccucugaaugaacu

SEQ ID NO: 2052358 - RNA, 19 nt, Artificial Sequence
  Description of Artificial Sequence: Synthetic oligonucleotide
cccgagaugacguacacaa

SEQ ID NO: 2052359 - RNA, 19 nt, Artificial Sequence
  Description of Artificial Sequence: Synthetic oligonucleotide
auacuggcguacuccugca

SEQ ID NO: 2052360 - RNA, 19 nt, Artificial Sequence
  Description of Artificial Sequence: Synthetic oligonucleotide
ggagguacagcacuguggu

SEQ ID NO: 2052361 - RNA, 19 nt, Artificial Sequence
  Description of Artificial Sequence: Synthetic oligonucleotide
cagcuccaaggguucagag

SEQ ID NO: 2052362 - RNA, 19 nt, Artificial Sequence
  Description of Artificial Sequence: Synthetic oligonucleotide
cuccauguggaacugauuu

SEQ ID NO: 2052363 - RNA, 19 nt, Artificial Sequence
  Description of Artificial Sequence: Synthetic oligonucleotide
agacagucuguuccagaau

SEQ ID NO: 2052364 - RNA, 19 nt, Artificial Sequence
  Description of Artificial Sequence: Synthetic oligonucleotide
ggcucgcacagcuuggcgc

SEQ ID NO: 2052365 - RNA, 19 nt, Artificial Sequence
  Description of Artificial Sequence: Synthetic oligonucleotide
ccaggugagccagacaccg

SEQ ID NO: 2052366 - RNA, 19 nt, Artificial Sequence
  Description of Artificial Sequence: Synthetic oligonucleotide
ucucuggaggacgcaguca

SEQ ID NO: 2052367 - RNA, 19 nt, Artificial Sequence
  Description of Artificial Sequence: Synthetic oligonucleotide
ugagaugguccguguuggu

SEQ ID NO: 2052368 - RNA, 19 nt, Artificial Sequence
  Description of Artificial Sequence: Synthetic oligonucleotide
gaaauggucuuugaucuuu

SEQ ID NO: 2052369 - RNA, 19 nt, Artificial Sequence
  Description of Artificial Sequence: Synthetic oligonucleotide
cuuaguuuccaaguuugcu

SEQ ID NO: 2052370 - RNA, 19 nt, Artificial Sequence
  Description of Artificial Sequence: Synthetic oligonucleotide
gguugcuuaguuuccaagu

SEQ ID NO: 2052371 - RNA, 19 nt, Artificial Sequence
  Description of Artificial Sequence: Synthetic oligonucleotide
acugggugagcugaagcaa

SEQ ID NO: 2052372 - RNA, 19 nt, Artificial Sequence
  Description of Artificial Sequence: Synthetic oligonucleotide
gagacugggugagcugaag

SEQ ID NO: 2052373 - RNA, 19 nt, Artificial Sequence
  Description of Artificial Sequence: Synthetic oligonucleotide
ccaaggguucagaggaugc

SEQ ID NO: 2052374 - RNA, 19 nt, Artificial Sequence
  Description of Artificial Sequence: Synthetic oligonucleotide
acuugaggugacacucguc

SEQ ID NO: 2052375 - RNA, 19 nt, Artificial Sequence
  Description of Artificial Sequence: Synthetic oligonucleotide
cagcuuggcgccguggggc

SEQ ID NO: 2052376 - RNA, 19 nt, Artificial Sequence
  Description of Artificial Sequence: Synthetic oligonucleotide
ucuccauguggaacugauu

SEQ ID NO: 2052377 - RNA, 19 nt, Artificial Sequence
  Description of Artificial Sequence: Synthetic oligonucleotide
uccccgagaugacguacac

SEQ ID NO: 2052378 - RNA, 19 nt, Artificial Sequence
  Description of Artificial Sequence: Synthetic oligonucleotide
gagugagaacuuccauguc

SEQ ID NO: 2052379 - RNA, 19 nt, Artificial Sequence
  Description of Artificial Sequence: Synthetic oligonucleotide
uucucguauuccugucguc

SEQ ID NO: 2052380 - RNA, 19 nt, Artificial Sequence
  Description of Artificial Sequence: Synthetic oligonucleotide
guugcuuaguuuccaaguu

SEQ ID NO: 2052381 - RNA, 19 nt, Artificial Sequence
  Description of Artificial Sequence: Synthetic oligonucleotide
cugcggcucgcacagcuug

SEQ ID NO: 2052382 - RNA, 19 nt, Artificial Sequence
  Description of Artificial Sequence: Synthetic oligonucleotide
uccguguugguugcuuagu

SEQ ID NO: 2052383 - RNA, 19 nt, Artificial Sequence
  Description of Artificial Sequence: Synthetic oligonucleotide
gacguacacaaugcuggca

SEQ ID NO: 2052384 - RNA, 19 nt, Artificial Sequence
  Description of Artificial Sequence: Synthetic oligonucleotide
aguggagguacagcacugu

SEQ ID NO: 2052385 - RNA, 19 nt, Artificial Sequence
  Description of Artificial Sequence: Synthetic oligonucleotide
gaacuuccaugucaucacu

SEQ ID NO: 2052386 - RNA, 19 nt, Artificial Sequence
  Description of Artificial Sequence: Synthetic oligonucleotide
cugagacugggugagcuga

SEQ ID NO: 2052387 - RNA, 19 nt, Artificial Sequence
  Description of Artificial Sequence: Synthetic oligonucleotide
uaucuccauguggaacuga

SEQ ID NO: 2052388 - RNA, 19 nt, Artificial Sequence
  Description of Artificial Sequence: Synthetic oligonucleotide
cagggcuucgggccaacac

SEQ ID NO: 2052389 - RNA, 19 nt, Artificial Sequence
  Description of Artificial Sequence: Synthetic oligonucleotide
aggacgcagucaccaaggu

SEQ ID NO: 2052390 - RNA, 19 nt, Artificial Sequence
  Description of Artificial Sequence: Synthetic oligonucleotide
guuuccaaguuugcugcga

SEQ ID NO: 2052391 - RNA, 19 nt, Artificial Sequence
  Description of Artificial Sequence: Synthetic oligonucleotide
guaggccagguccccucgg

SEQ ID NO: 2052392 - RNA, 19 nt, Artificial Sequence
  Description of Artificial Sequence: Synthetic oligonucleotide
uggugagaugguccguguu

SEQ ID NO: 2052393 - RNA, 19 nt, Artificial Sequence
  Description of Artificial Sequence: Synthetic oligonucleotide
gcucgcacagcuuggcgcc

SEQ ID NO: 2052394 - RNA, 19 nt, Artificial Sequence
  Description of Artificial Sequence: Synthetic oligonucleotide
cgucucuccauaaaaccac

SEQ ID NO: 2052395 - RNA, 19 nt, Artificial Sequence
  Description of Artificial Sequence: Synthetic oligonucleotide
ugucuccccaggugagcca

SEQ ID NO: 2052396 - RNA, 19 nt, Artificial Sequence
  Description of Artificial Sequence: Synthetic oligonucleotide
ccucuccaaagcaaacgag

SEQ ID NO: 2052397 - RNA, 19 nt, Artificial Sequence
  Description of Artificial Sequence: Synthetic oligonucleotide
cuccugcugaguccuuaag

SEQ ID NO: 2052398 - RNA, 19 nt, Artificial Sequence
  Description of Artificial Sequence: Synthetic oligonucleotide
uaaaaccacugcggcucgc

SEQ ID NO: 2052399 - RNA, 19 nt, Artificial Sequence
  Description of Artificial Sequence: Synthetic oligonucleotide
ucuguaggccagguccccu

SEQ ID NO: 2052400 - RNA, 19 nt, Artificial Sequence
  Description of Artificial Sequence: Synthetic oligonucleotide
gcagucaccaagguaguca

SEQ ID NO: 2052401 - RNA, 19 nt, Artificial Sequence
  Description of Artificial Sequence: Synthetic oligonucleotide
auucucuggaggacgcagu

SEQ ID NO: 2052402 - RNA, 19 nt, Artificial Sequence
  Description of Artificial Sequence: Synthetic oligonucleotide
caccaagguagucagggcu

SEQ ID NO: 2052403 - RNA, 19 nt, Artificial Sequence
  Description of Artificial Sequence: Synthetic oligonucleotide
cuguaggccagguccccuc

SEQ ID NO: 2052404 - RNA, 19 nt, Artificial Sequence
  Description of Artificial Sequence: Synthetic oligonucleotide
ccgagccuggccuucuugg

SEQ ID NO: 2052405 - RNA, 19 nt, Artificial Sequence
  Description of Artificial Sequence: Synthetic oligonucleotide
ggccucugcucgaacacgg

SEQ ID NO: 2052406 - RNA, 19 nt, Artificial Sequence
  Description of Artificial Sequence: Synthetic oligonucleotide
agauacuggcguacuccug

SEQ ID NO: 2052407 - RNA, 19 nt, Artificial Sequence
  Description of Artificial Sequence: Synthetic oligonucleotide
caggcuuucagccgggccu

SEQ ID NO: 2052408 - RNA, 19 nt, Artificial Sequence
  Description of Artificial Sequence: Synthetic oligonucleotide
agcacuguggugagauggu

SEQ ID NO: 2052409 - RNA, 19 nt, Artificial Sequence
  Description of Artificial Sequence: Synthetic oligonucleotide
cgggccaacacacuucacc

SEQ ID NO: 2052410 - RNA, 19 nt, Artificial Sequence
  Description of Artificial Sequence: Synthetic oligonucleotide
gaacacggaguccucgaau

SEQ ID NO: 2052411 - RNA, 19 nt, Artificial Sequence
  Description of Artificial Sequence: Synthetic oligonucleotide
ccgccgagcacccagcccc

SEQ ID NO: 2052412 - RNA, 19 nt, Artificial Sequence
  Description of Artificial Sequence: Synthetic oligonucleotide
ugcagcgcuuucucguauu

SEQ ID NO: 2052413 - RNA, 19 nt, Artificial Sequence
  Description of Artificial Sequence: Synthetic oligonucleotide
caacacacuucaccucuga

SEQ ID NO: 2052414 - RNA, 19 nt, Artificial Sequence
  Description of Artificial Sequence: Synthetic oligonucleotide
cuugccgucucuccauaaa

SEQ ID NO: 2052415 - RNA, 19 nt, Artificial Sequence
  Description of Artificial Sequence: Synthetic oligonucleotide
uggcguacuccugcagcgc

SEQ ID NO: 2052416 - RNA, 19 nt, Artificial Sequence
  Description of Artificial Sequence: Synthetic oligonucleotide
caaacgagguuugcugaga

SEQ ID NO: 2052417 - RNA, 19 nt, Artificial Sequence
  Description of Artificial Sequence: Synthetic oligonucleotide
aagcaagagccuggcucga

SEQ ID NO: 2052418 - RNA, 19 nt, Artificial Sequence
  Description of Artificial Sequence: Synthetic oligonucleotide
caggcaagguugcugggaa

SEQ ID NO: 2052419 - RNA, 19 nt, Artificial Sequence
  Description of Artificial Sequence: Synthetic oligonucleotide
caaggguucagaggaugca

SEQ ID NO: 2052420 - RNA, 19 nt, Artificial Sequence
  Description of Artificial Sequence: Synthetic oligonucleotide
gcugaagcaagagccuggc

SEQ ID NO: 2052421 - RNA, 19 nt, Artificial Sequence
  Description of Artificial Sequence: Synthetic oligonucleotide
ugcuugccgucucuccaua

SEQ ID NO: 2052422 - RNA, 19 nt, Artificial Sequence
  Description of Artificial Sequence: Synthetic oligonucleotide
ccagacaccgagccuggcc

SEQ ID NO: 2052423 - RNA, 19 nt, Artificial Sequence
  Description of Artificial Sequence: Synthetic oligonucleotide
ccugucgucuguaggccag

SEQ ID NO: 2052424 - RNA, 19 nt, Artificial Sequence
  Description of Artificial Sequence: Synthetic oligonucleotide
ccgucucuccauaaaacca

SEQ ID NO: 2052425 - RNA, 19 nt, Artificial Sequence
  Description of Artificial Sequence: Synthetic oligonucleotide
guacgccucugccaaucuc

SEQ ID NO: 2052426 - RNA, 19 nt, Artificial Sequence
  Description of Artificial Sequence: Synthetic oligonucleotide
gcacagcgccuucagggag

SEQ ID NO: 2052427 - RNA, 19 nt, Artificial Sequence
  Description of Artificial Sequence: Synthetic oligonucleotide
cagacaccgagccuggccu

SEQ ID NO: 2052428 - RNA, 19 nt, Artificial Sequence
  Description of Artificial Sequence: Synthetic oligonucleotide
gcuuucucguauuccuguc

SEQ ID NO: 2052429 - RNA, 19 nt, Artificial Sequence
  Description of Artificial Sequence: Synthetic oligonucleotide
gggccaacacacuucaccu

SEQ ID NO: 2052430 - RNA, 19 nt, Artificial Sequence
  Description of Artificial Sequence: Synthetic oligonucleotide
cugucgucuguaggccagg

SEQ ID NO: 2052431 - RNA, 19 nt, Artificial Sequence
  Description of Artificial Sequence: Synthetic oligonucleotide
guccucgaauucgccgccg

SEQ ID NO: 2052432 - RNA, 19 nt, Artificial Sequence
  Description of Artificial Sequence: Synthetic oligonucleotide
cucugccaaucuccaccag

SEQ ID NO: 2052433 - RNA, 19 nt, Artificial Sequence
  Description of Artificial Sequence: Synthetic oligonucleotide
cgagguuugcugagacugg

SEQ ID NO: 2052434 - RNA, 19 nt, Artificial Sequence
  Description of Artificial Sequence: Synthetic oligonucleotide
cucgucuguccccgagaug

SEQ ID NO: 2052435 - RNA, 19 nt, Artificial Sequence
  Description of Artificial Sequence: Synthetic oligonucleotide
aggcaagguugcugggaaa

SEQ ID NO: 2052436 - RNA, 19 nt, Artificial Sequence
  Description of Artificial Sequence: Synthetic oligonucleotide
ggaugcagggaaaugaguu

SEQ ID NO: 2052437 - RNA, 19 nt, Artificial Sequence
  Description of Artificial Sequence: Synthetic oligonucleotide
gcuuccucgugucucccca

SEQ ID NO: 2052438 - RNA, 19 nt, Artificial Sequence
  Description of Artificial Sequence: Synthetic oligonucleotide
ucgggccaacacacuucac

SEQ ID NO: 2052439 - RNA, 19 nt, Artificial Sequence
  Description of Artificial Sequence: Synthetic oligonucleotide
cagcgcuuccucgugucuc

SEQ ID NO: 2052440 - RNA, 19 nt, Artificial Sequence
  Description of Artificial Sequence: Synthetic oligonucleotide
gacaccgagccuggccuuc

SEQ ID NO: 2052441 - RNA, 19 nt, Artificial Sequence
  Description of Artificial Sequence: Synthetic oligonucleotide
cuuaagccaugaucuguau

SEQ ID NO: 2052442 - RNA, 19 nt, Artificial Sequence
  Description of Artificial Sequence: Synthetic oligonucleotide
ggccaacacacuucaccuc

SEQ ID NO: 2052443 - RNA, 19 nt, Artificial Sequence
  Description of Artificial Sequence: Synthetic oligonucleotide
cucgcacagcuuggcgccg

SEQ ID NO: 2052444 - RNA, 19 nt, Artificial Sequence
  Description of Artificial Sequence: Synthetic oligonucleotide
gggcuucgggccaacacac

SEQ ID NO: 2052445 - RNA, 19 nt, Artificial Sequence
  Description of Artificial Sequence: Synthetic oligonucleotide
cacucgucuguccccgaga

SEQ ID NO: 2052446 - RNA, 19 nt, Artificial Sequence
  Description of Artificial Sequence: Synthetic oligonucleotide
guccccgagaugacguaca

SEQ ID NO: 2052447 - RNA, 19 nt, Artificial Sequence
  Description of Artificial Sequence: Synthetic oligonucleotide
ugguccguguugguugcuu

SEQ ID NO: 2052448 - RNA, 19 nt, Artificial Sequence
  Description of Artificial Sequence: Synthetic oligonucleotide
ccccucggaacuucuugag

SEQ ID NO: 2052449 - RNA, 19 nt, Artificial Sequence
  Description of Artificial Sequence: Synthetic oligonucleotide
caaugcuggcaggccuggc

SEQ ID NO: 2052450 - RNA, 19 nt, Artificial Sequence
  Description of Artificial Sequence: Synthetic oligonucleotide
gagaugguccguguugguu

SEQ ID NO: 2052451 - RNA, 19 nt, Artificial Sequence
  Description of Artificial Sequence: Synthetic oligonucleotide
ccucgugucuccccaggug

SEQ ID NO: 2052452 - RNA, 19 nt, Artificial Sequence
  Description of Artificial Sequence: Synthetic oligonucleotide
uggggcgcgggcggcucgg

SEQ ID NO: 2052453 - RNA, 19 nt, Artificial Sequence
  Description of Artificial Sequence: Synthetic oligonucleotide
ggcccuggacucagguacg

SEQ ID NO: 2052454 - RNA, 19 nt, Artificial Sequence
  Description of Artificial Sequence: Synthetic oligonucleotide
acgccucugccaaucucca

SEQ ID NO: 2052455 - RNA, 19 nt, Artificial Sequence
  Description of Artificial Sequence: Synthetic oligonucleotide
acgcagucaccaagguagu

SEQ ID NO: 2052456 - RNA, 19 nt, Artificial Sequence
  Description of Artificial Sequence: Synthetic oligonucleotide
ccauaaaaccacugcggcu

SEQ ID NO: 2052457 - RNA, 19 nt, Artificial Sequence
  Description of Artificial Sequence: Synthetic oligonucleotide
cuccaucucaggcaagguu

SEQ ID NO: 2052458 - RNA, 19 nt, Artificial Sequence
  Description of Artificial Sequence: Synthetic oligonucleotide
guggugagaugguccgugu

SEQ ID NO: 2052459 - RNA, 19 nt, Artificial Sequence
  Description of Artificial Sequence: Synthetic oligonucleotide
agcaagagccuggcucgaa

SEQ ID NO: 2052460 - RNA, 19 nt, Artificial Sequence
  Description of Artificial Sequence: Synthetic oligonucleotide
guggggcgcgggcggcucg

SEQ ID NO: 2052461 - RNA, 19 nt, Artificial Sequence
  Description of Artificial Sequence: Synthetic oligonucleotide
ccucgaauucgccgccgag

SEQ ID NO: 2052462 - RNA, 19 nt, Artificial Sequence
  Description of Artificial Sequence: Synthetic oligonucleotide
cugcgaucuccagcgcuuc

SEQ ID NO: 2052463 - RNA, 19 nt, Artificial Sequence
  Description of Artificial Sequence: Synthetic oligonucleotide
ggacgcagucaccaaggua

SEQ ID NO: 2052464 - RNA, 19 nt, Artificial Sequence
  Description of Artificial Sequence: Synthetic oligonucleotide
cacugcggcucgcacagcu

SEQ ID NO: 2052465 - RNA, 19 nt, Artificial Sequence
  Description of Artificial Sequence: Synthetic oligonucleotide
acaccgagccuggccuucu

SEQ ID NO: 2052466 - RNA, 19 nt, Artificial Sequence
  Description of Artificial Sequence: Synthetic oligonucleotide
ccggccucugcucgaacac

SEQ ID NO: 2052467 - RNA, 19 nt, Artificial Sequence
  Description of Artificial Sequence: Synthetic oligonucleotide
gcgcuuucucguauuccug

SEQ ID NO: 2052468 - RNA, 19 nt, Artificial Sequence
  Description of Artificial Sequence: Synthetic oligonucleotide
agacagccaaguggaggua

SEQ ID NO: 2052469 - RNA, 19 nt, Artificial Sequence
  Description of Artificial Sequence: Synthetic oligonucleotide
gguccguguugguugcuua

SEQ ID NO: 2052470 - RNA, 19 nt, Artificial Sequence
  Description of Artificial Sequence: Synthetic oligonucleotide
aaucuccugcugaguccuu

SEQ ID NO: 2052471 - RNA, 19 nt, Artificial Sequence
  Description of Artificial Sequence: Synthetic oligonucleotide
ccaagguagucagggcuuc

SEQ ID NO: 2052472 - RNA, 19 nt, Artificial Sequence
  Description of Artificial Sequence: Synthetic oligonucleotide
ggcguacuccugcagcgcu

SEQ ID NO: 2052473 - RNA, 19 nt, Artificial Sequence
  Description of Artificial Sequence: Synthetic oligonucleotide
gcuucgggccaacacacuu

SEQ ID NO: 2052474 - RNA, 19 nt, Artificial Sequence
  Description of Artificial Sequence: Synthetic oligonucleotide
gcacuguggugagaugguc

SEQ ID NO: 2052475 - RNA, 19 nt, Artificial Sequence
  Description of Artificial Sequence: Synthetic oligonucleotide
cggaguccucgaauucgcc

SEQ ID NO: 2052476 - RNA, 19 nt, Artificial Sequence
  Description of Artificial Sequence: Synthetic oligonucleotide
cugcuugccgucucuccau

SEQ ID NO: 2052477 - RNA, 19 nt, Artificial Sequence
  Description of Artificial Sequence: Synthetic oligonucleotide
ggcucgggccgccgcuccg

SEQ ID NO: 2052478 - RNA, 19 nt, Artificial Sequence
  Description of Artificial Sequence: Synthetic oligonucleotide
cuuucagccgggccuccau

SEQ ID NO: 2052479 - RNA, 19 nt, Artificial Sequence
  Description of Artificial Sequence: Synthetic oligonucleotide
cuguccccgagaugacgua

SEQ ID NO: 2052480 - RNA, 19 nt, Artificial Sequence
  Description of Artificial Sequence: Synthetic oligonucleotide
gggaaacacaaaagacagu

SEQ ID NO: 2052481 - RNA, 19 nt, Artificial Sequence
  Description of Artificial Sequence: Synthetic oligonucleotide
guacagcacuguggugaga

SEQ ID NO: 2052482 - RNA, 19 nt, Artificial Sequence
  Description of Artificial Sequence: Synthetic oligonucleotide
ccgcuccggccucugcucg

SEQ ID NO: 2052483 - RNA, 19 nt, Artificial Sequence
  Description of Artificial Sequence: Synthetic oligonucleotide
augguccguguugguugcu

SEQ ID NO: 2052484 - RNA, 19 nt, Artificial Sequence
  Description of Artificial Sequence: Synthetic oligonucleotide
cuccggccucugcucgaac

SEQ ID NO: 2052485 - RNA, 19 nt, Artificial Sequence
  Description of Artificial Sequence: Synthetic oligonucleotide
gguacgccucugccaaucu

SEQ ID NO: 2052486 - RNA, 19 nt, Artificial Sequence
  Description of Artificial Sequence: Synthetic oligonucleotide
ggcucgaaucagacaggca

SEQ ID NO: 2052487 - RNA, 19 nt, Artificial Sequence
  Description of Artificial Sequence: Synthetic oligonucleotide
gcuugccgucucuccauaa

SEQ ID NO: 2052488 - RNA, 19 nt, Artificial Sequence
  Description of Artificial Sequence: Synthetic oligonucleotide
gccgcuccggccucugcuc

SEQ ID NO: 2052489 - RNA, 19 nt, Artificial Sequence
  Description of Artificial Sequence: Synthetic oligonucleotide
gcccuggacucagguacgc

SEQ ID NO: 2052490 - RNA, 19 nt, Artificial Sequence
  Description of Artificial Sequence: Synthetic oligonucleotide
gcggcucgcacagcuuggc

SEQ ID NO: 2052491 - RNA, 19 nt, Artificial Sequence
  Description of Artificial Sequence: Synthetic oligonucleotide
cccuggacucagguacgcc

SEQ ID NO: 2052492 - RNA, 19 nt, Artificial Sequence
  Description of Artificial Sequence: Synthetic oligonucleotide
gccgggccuccaucucagg

SEQ ID NO: 2052493 - RNA, 19 nt, Artificial Sequence
  Description of Artificial Sequence: Synthetic oligonucleotide
cuccaaggguucagaggau

SEQ ID NO: 2052494 - RNA, 19 nt, Artificial Sequence
  Description of Artificial Sequence: Synthetic oligonucleotide
cggcucgcacagcuuggcg

SEQ ID NO: 2052495 - RNA, 19 nt, Artificial Sequence
  Description of Artificial Sequence: Synthetic oligonucleotide
ccugcagcgcuuucucgua

SEQ ID NO: 2052496 - RNA, 19 nt, Artificial Sequence
  Description of Artificial Sequence: Synthetic oligonucleotide
cgcuuccucgugucucccc

SEQ ID NO: 2052497 - RNA, 19 nt, Artificial Sequence
  Description of Artificial Sequence: Synthetic oligonucleotide
uggcgccguggggcgcggg

SEQ ID NO: 2052498 - RNA, 19 nt, Artificial Sequence
  Description of Artificial Sequence: Synthetic oligonucleotide
cgaauucgccgccgagcac

SEQ ID NO: 2052499 - RNA, 19 nt, Artificial Sequence
  Description of Artificial Sequence: Synthetic oligonucleotide
caucucaggcaagguugcu

SEQ ID NO: 2052500 - RNA, 19 nt, Artificial Sequence
  Description of Artificial Sequence: Synthetic oligonucleotide
ggcuuucagccgggccucc

SEQ ID NO: 2052501 - RNA, 19 nt, Artificial Sequence
  Description of Artificial Sequence: Synthetic oligonucleotide
auucgccgccgagcaccca

SEQ ID NO: 2052502 - RNA, 19 nt, Artificial Sequence
  Description of Artificial Sequence: Synthetic oligonucleotide
caccaacagcacagcgccu

SEQ ID NO: 2052503 - RNA, 19 nt, Artificial Sequence
  Description of Artificial Sequence: Synthetic oligonucleotide
gcgccuucagggaggcuga

SEQ ID NO: 2052504 - RNA, 19 nt, Artificial Sequence
  Description of Artificial Sequence: Synthetic oligonucleotide
cgucuguccccgagaugac

SEQ ID NO: 2052505 - RNA, 19 nt, Artificial Sequence
  Description of Artificial Sequence: Synthetic oligonucleotide
cugcagcgcuuucucguau

SEQ ID NO: 2052506 - RNA, 19 nt, Artificial Sequence
  Description of Artificial Sequence: Synthetic oligonucleotide
gcugcgaucuccagcgcuu

SEQ ID NO: 2052507 - RNA, 19 nt, Artificial Sequence
  Description of Artificial Sequence: Synthetic oligonucleotide
cgaacacggaguccucgaa

SEQ ID NO: 2052508 - RNA, 19 nt, Artificial Sequence
  Description of Artificial Sequence: Synthetic oligonucleotide
gcgcuuccucgugucuccc

SEQ ID NO: 2052509 - RNA, 19 nt, Artificial Sequence
  Description of Artificial Sequence: Synthetic oligonucleotide
gccucugcucgaacacgga

SEQ ID NO: 2052510 - RNA, 19 nt, Artificial Sequence
  Description of Artificial Sequence: Synthetic oligonucleotide
gcuuggcgccguggggcgc

SEQ ID NO: 2052511 - RNA, 19 nt, Artificial Sequence
  Description of Artificial Sequence: Synthetic oligonucleotide
cgcagucaccaagguaguc

SEQ ID NO: 2052512 - RNA, 19 nt, Artificial Sequence
  Description of Artificial Sequence: Synthetic oligonucleotide
cguauuccugucgucugua

SEQ ID NO: 2052513 - RNA, 19 nt, Artificial Sequence
  Description of Artificial Sequence: Synthetic oligonucleotide
ccguguugguugcuuaguu

SEQ ID NO: 2052514 - RNA, 19 nt, Artificial Sequence
  Description of Artificial Sequence: Synthetic oligonucleotide
cagguacgccucugccaau

SEQ ID NO: 2052515 - RNA, 19 nt, Artificial Sequence
  Description of Artificial Sequence: Synthetic oligonucleotide
gcuccggccucugcucgaa

SEQ ID NO: 2052516 - RNA, 19 nt, Artificial Sequence
  Description of Artificial Sequence: Synthetic oligonucleotide
ccgagaugacguacacaau

SEQ ID NO: 2052517 - RNA, 19 nt, Artificial Sequence
  Description of Artificial Sequence: Synthetic oligonucleotide
cgcacagcuuggcgccgug

SEQ ID NO: 2052518 - RNA, 19 nt, Artificial Sequence
  Description of Artificial Sequence: Synthetic oligonucleotide
ggcuucgggccaacacacu

SEQ ID NO: 2052519 - RNA, 19 nt, Artificial Sequence
  Description of Artificial Sequence: Synthetic oligonucleotide
ccuggccuucuuggacauc

SEQ ID NO: 2052520 - RNA, 19 nt, Artificial Sequence
  Description of Artificial Sequence: Synthetic oligonucleotide
ccagcgcuuccucgugucu

SEQ ID NO: 2052521 - RNA, 19 nt, Artificial Sequence
  Description of Artificial Sequence: Synthetic oligonucleotide
ccuccaucucaggcaaggu

SEQ ID NO: 2052522 - RNA, 19 nt, Artificial Sequence
  Description of Artificial Sequence: Synthetic oligonucleotide
ccacugcggcucgcacagc

SEQ ID NO: 2052523 - RNA, 19 nt, Artificial Sequence
  Description of Artificial Sequence: Synthetic oligonucleotide
gcguacuccugcagcgcuu

SEQ ID NO: 2052524 - RNA, 19 nt, Artificial Sequence
  Description of Artificial Sequence: Synthetic oligonucleotide
cagcgccuucagggaggcu

SEQ ID NO: 2052525 - RNA, 19 nt, Artificial Sequence
  Description of Artificial Sequence: Synthetic oligonucleotide
accaauaaaaucuauuucc

SEQ ID NO: 2052526 - RNA, 19 nt, Artificial Sequence
  Description of Artificial Sequence: Synthetic oligonucleotide
aaaagaacgccuuggaacc

SEQ ID NO: 2052527 - RNA, 19 nt, Artificial Sequence
  Description of Artificial Sequence: Synthetic oligonucleotide
aauuucauccuuccaacgc

SEQ ID NO: 2052528 - RNA, 19 nt, Artificial Sequence
  Description of Artificial Sequence: Synthetic oligonucleotide
auauucaccauccaaggcc

SEQ ID NO: 2052529 - RNA, 19 nt, Artificial Sequence
  Description of Artificial Sequence: Synthetic oligonucleotide
aagaagauuucacuucugc

SEQ ID NO: 2052530 - RNA, 19 nt, Artificial Sequence
  Description of Artificial Sequence: Synthetic oligonucleotide
aauauuugaaaagucuugg

SEQ ID NO: 2052531 - RNA, 19 nt, Artificial Sequence
  Description of Artificial Sequence: Synthetic oligonucleotide
aauccuauagaagagaucu

SEQ ID NO: 2052532 - RNA, 19 nt, Artificial Sequence
  Description of Artificial Sequence: Synthetic oligonucleotide
uuuucuacgaaacuuccag

SEQ ID NO: 2052533 - RNA, 19 nt, Artificial Sequence
  Description of Artificial Sequence: Synthetic oligonucleotide
aauacccauaaaugggugc

SEQ ID NO: 2052534 - RNA, 19 nt, Artificial Sequence
  Description of Artificial Sequence: Synthetic oligonucleotide
uauuugaaaagucuugggc

SEQ ID NO: 2052535 - RNA, 19 nt, Artificial Sequence
  Description of Artificial Sequence: Synthetic oligonucleotide
acugucuccaucuuuaggg

SEQ ID NO: 2052536 - RNA, 19 nt, Artificial Sequence
  Description of Artificial Sequence: Synthetic oligonucleotide
aaacacaccaauaaaaucu

SEQ ID NO: 2052537 - RNA, 19 nt, Artificial Sequence
  Description of Artificial Sequence: Synthetic oligonucleotide
ggaaguuacauccaaagcg

SEQ ID NO: 2052538 - RNA, 19 nt, Artificial Sequence
  Description of Artificial Sequence: Synthetic oligonucleotide
uauagaagagaucuuguca

SEQ ID NO: 2052539 - RNA, 19 nt, Artificial Sequence
  Description of Artificial Sequence: Synthetic oligonucleotide
uucaauauuugaaaagucu

SEQ ID NO: 2052540 - RNA, 19 nt, Artificial Sequence
  Description of Artificial Sequence: Synthetic oligonucleotide
aaacugaauacccauaaau

SEQ ID NO: 2052541 - RNA, 19 nt, Artificial Sequence
  Description of Artificial Sequence: Synthetic oligonucleotide
uuuucguugggcuagaaaa

SEQ ID NO: 2052542 - RNA, 19 nt, Artificial Sequence
  Description of Artificial Sequence: Synthetic oligonucleotide
auuucauccuuccaacgcc

SEQ ID NO: 2052543 - RNA, 19 nt, Artificial Sequence
  Description of Artificial Sequence: Synthetic oligonucleotide
gauaacauugcacaguauc

SEQ ID NO: 2052544 - RNA, 19 nt, Artificial Sequence
  Description of Artificial Sequence: Synthetic oligonucleotide
aaaauuuucguugggcuag

SEQ ID NO: 2052545 - RNA, 19 nt, Artificial Sequence
  Description of Artificial Sequence: Synthetic oligonucleotide
uuuccaaugagccacaauu

SEQ ID NO: 2052546 - RNA, 19 nt, Artificial Sequence
  Description of Artificial Sequence: Synthetic oligonucleotide
ugauauucaccauccaagg

SEQ ID NO: 2052547 - RNA, 19 nt, Artificial Sequence
  Description of Artificial Sequence: Synthetic oligonucleotide
agauacagagaauugaaca

SEQ ID NO: 2052548 - RNA, 19 nt, Artificial Sequence
  Description of Artificial Sequence: Synthetic oligonucleotide
gaaguuacauccaaagcgg

SEQ ID NO: 2052549 - RNA, 19 nt, Artificial Sequence
  Description of Artificial Sequence: Synthetic oligonucleotide
cugaauacccauaaauggg

SEQ ID NO: 2052550 - RNA, 19 nt, Artificial Sequence
  Description of Artificial Sequence: Synthetic oligonucleotide
aaaagucuugggcuaagag

SEQ ID NO: 2052551 - RNA, 19 nt, Artificial Sequence
  Description of Artificial Sequence: Synthetic oligonucleotide
uauucaccauccaaggccg

SEQ ID NO: 2052552 - RNA, 19 nt, Artificial Sequence
  Description of Artificial Sequence: Synthetic oligonucleotide
acuaacuucggguucauug

SEQ ID NO: 2052553 - RNA, 19 nt, Artificial Sequence
  Description of Artificial Sequence: Synthetic oligonucleotide
cuuuaggaaguuucuaugg

SEQ ID NO: 2052554 - RNA, 19 nt, Artificial Sequence
  Description of Artificial Sequence: Synthetic oligonucleotide
ugucaaaacuaacuucggg

SEQ ID NO: 2052555 - RNA, 19 nt, Artificial Sequence
  Description of Artificial Sequence: Synthetic oligonucleotide
uggaucaguaaacacacca

SEQ ID NO: 2052556 - RNA, 19 nt, Artificial Sequence
  Description of Artificial Sequence: Synthetic oligonucleotide
cugauauucaccauccaag

SEQ ID NO: 2052557 - RNA, 19 nt, Artificial Sequence
  Description of Artificial Sequence: Synthetic oligonucleotide
ggaagaauagucuacaaac

SEQ ID NO: 2052558 - RNA, 19 nt, Artificial Sequence
  Description of Artificial Sequence: Synthetic oligonucleotide
uucuguaugggcuggauca

SEQ ID NO: 2052559 - RNA, 19 nt, Artificial Sequence
  Description of Artificial Sequence: Synthetic oligonucleotide
aaucuugacuuccugccag

SEQ ID NO: 2052560 - RNA, 19 nt, Artificial Sequence
  Description of Artificial Sequence: Synthetic oligonucleotide
uucuauggauauaaguacc

SEQ ID NO: 2052561 - RNA, 19 nt, Artificial Sequence
  Description of Artificial Sequence: Synthetic oligonucleotide
aaaauaagcuuuggcaauc

SEQ ID NO: 2052562 - RNA, 19 nt, Artificial Sequence
  Description of Artificial Sequence: Synthetic oligonucleotide
uggagaauucucauaagca

SEQ ID NO: 2052563 - RNA, 19 nt, Artificial Sequence
  Description of Artificial Sequence: Synthetic oligonucleotide
auggauauaaguaccaauc

SEQ ID NO: 2052564 - RNA, 19 nt, Artificial Sequence
  Description of Artificial Sequence: Synthetic oligonucleotide
aauauguucuacugcuuca

SEQ ID NO: 2052565 - RNA, 19 nt, Artificial Sequence
  Description of Artificial Sequence: Synthetic oligonucleotide
ucaagaagauuucacuucu

SEQ ID NO: 2052566 - RNA, 19 nt, Artificial Sequence
  Description of Artificial Sequence: Synthetic oligonucleotide
auuaugaccucuuguaaug

SEQ ID NO: 2052567 - RNA, 19 nt, Artificial Sequence
  Description of Artificial Sequence: Synthetic oligonucleotide
aguaauuugugaauggaag

SEQ ID NO: 2052568 - RNA, 19 nt, Artificial Sequence
  Description of Artificial Sequence: Synthetic oligonucleotide
aaucaguaauuugugaaug

SEQ ID NO: 2052569 - RNA, 19 nt, Artificial Sequence
  Description of Artificial Sequence: Synthetic oligonucleotide
aacugaauacccauaaaug

SEQ ID NO: 2052570 - RNA, 19 nt, Artificial Sequence
  Description of Artificial Sequence: Synthetic oligonucleotide
ugaauacccauaaaugggu

SEQ ID NO: 2052571 - RNA, 19 nt, Artificial Sequence
  Description of Artificial Sequence: Synthetic oligonucleotide
ugcuuugucaaaacuaacu

SEQ ID NO: 2052572 - RNA, 19 nt, Artificial Sequence
  Description of Artificial Sequence: Synthetic oligonucleotide
ugucuuaucagaagucacc

SEQ ID NO: 2052573 - RNA, 19 nt, Artificial Sequence
  Description of Artificial Sequence: Synthetic oligonucleotide
gauaaagucuguaucuugc

SEQ ID NO: 2052574 - RNA, 19 nt, Artificial Sequence
  Description of Artificial Sequence: Synthetic oligonucleotide
uuuaggaaguuucuaugga

SEQ ID NO: 2052575 - RNA, 19 nt, Artificial Sequence
  Description of Artificial Sequence: Synthetic oligonucleotide
uggauauaaguaccaauca

SEQ ID NO: 2052576 - RNA, 19 nt, Artificial Sequence
  Description of Artificial Sequence: Synthetic oligonucleotide
aguuucuauggauauaagu

SEQ ID NO: 2052577 - RNA, 19 nt, Artificial Sequence
  Description of Artificial Sequence: Synthetic oligonucleotide
acuuccugccaguagggcc

SEQ ID NO: 2052578 - RNA, 19 nt, Artificial Sequence
  Description of Artificial Sequence: Synthetic oligonucleotide
ucuauggauauaaguacca

SEQ ID NO: 2052579 - RNA, 19 nt, Artificial Sequence
  Description of Artificial Sequence: Synthetic oligonucleotide
aguucaauauuugaaaagu

SEQ ID NO: 2052580 - RNA, 19 nt, Artificial Sequence
  Description of Artificial Sequence: Synthetic oligonucleotide
ugaccucuuguaaugggcg

SEQ ID NO: 2052581 - RNA, 19 nt, Artificial Sequence
  Description of Artificial Sequence: Synthetic oligonucleotide
aauugucuuaucagaaguc

SEQ ID NO: 2052582 - RNA, 19 nt, Artificial Sequence
  Description of Artificial Sequence: Synthetic oligonucleotide
auuuucaagaagauuucac

SEQ ID NO: 2052583 - RNA, 19 nt, Artificial Sequence
  Description of Artificial Sequence: Synthetic oligonucleotide
uuggcuugcuccauuauga

SEQ ID NO: 2052584 - RNA, 19 nt, Artificial Sequence
  Description of Artificial Sequence: Synthetic oligonucleotide
uacaagugggcucuggaca

SEQ ID NO: 2052585 - RNA, 19 nt, Artificial Sequence
  Description of Artificial Sequence: Synthetic oligonucleotide
augaaguaacuguacaucu

SEQ ID NO: 2052586 - RNA, 19 nt, Artificial Sequence
  Description of Artificial Sequence: Synthetic oligonucleotide
aucauaauacugcuuccuc

SEQ ID NO: 2052587 - RNA, 19 nt, Artificial Sequence
  Description of Artificial Sequence: Synthetic oligonucleotide
ucuugccugauauucacca

SEQ ID NO: 2052588 - RNA, 19 nt, Artificial Sequence
  Description of Artificial Sequence: Synthetic oligonucleotide
cagagaauugaacagggac

SEQ ID NO: 2052589 - RNA, 19 nt, Artificial Sequence
  Description of Artificial Sequence: Synthetic oligonucleotide
uucuacgaaacuuccagac

SEQ ID NO: 2052590 - RNA, 19 nt, Artificial Sequence
  Description of Artificial Sequence: Synthetic oligonucleotide
aaaacuaacuucggguuca

SEQ ID NO: 2052591 - RNA, 19 nt, Artificial Sequence
  Description of Artificial Sequence: Synthetic oligonucleotide
cuggagaauucucauaagc

SEQ ID NO: 2052592 - RNA, 19 nt, Artificial Sequence
  Description of Artificial Sequence: Synthetic oligonucleotide
auacagagaauugaacagg

SEQ ID NO: 2052593 - RNA, 19 nt, Artificial Sequence
  Description of Artificial Sequence: Synthetic oligonucleotide
acuuugauuguucuuggcu

SEQ ID NO: 2052594 - RNA, 19 nt, Artificial Sequence
  Description of Artificial Sequence: Synthetic oligonucleotide
uuuguggcgauccucuugu

SEQ ID NO: 2052595 - RNA, 19 nt, Artificial Sequence
  Description of Artificial Sequence: Synthetic oligonucleotide
cuauuuccagaaagaaugg

SEQ ID NO: 2052596 - RNA, 19 nt, Artificial Sequence
  Description of Artificial Sequence: Synthetic oligonucleotide
gauauucaccauccaaggc

SEQ ID NO: 2052597 - RNA, 19 nt, Artificial Sequence
  Description of Artificial Sequence: Synthetic oligonucleotide
acagggaccaaucauaaua

SEQ ID NO: 2052598 - RNA, 19 nt, Artificial Sequence
  Description of Artificial Sequence: Synthetic oligonucleotide
uaugaccucuuguaauggg

SEQ ID NO: 2052599 - RNA, 19 nt, Artificial Sequence
  Description of Artificial Sequence: Synthetic oligonucleotide
ugaacagggaccaaucaua

SEQ ID NO: 2052600 - RNA, 19 nt, Artificial Sequence
  Description of Artificial Sequence: Synthetic oligonucleotide
ugaauccuauagaagagau

SEQ ID NO: 2052601 - RNA, 19 nt, Artificial Sequence
  Description of Artificial Sequence: Synthetic oligonucleotide
uccuauagaagagaucuug

SEQ ID NO: 2052602 - RNA, 19 nt, Artificial Sequence
  Description of Artificial Sequence: Synthetic oligonucleotide
aaaugggugcaaggcagcc

SEQ ID NO: 2052603 - RNA, 19 nt, Artificial Sequence
  Description of Artificial Sequence: Synthetic oligonucleotide
aucagaagucaccauccac

SEQ ID NO: 2052604 - RNA, 19 nt, Artificial Sequence
  Description of Artificial Sequence: Synthetic oligonucleotide
uccauuaugaccucuugua

SEQ ID NO: 2052605 - RNA, 19 nt, Artificial Sequence
  Description of Artificial Sequence: Synthetic oligonucleotide
caguucaauauuugaaaag

SEQ ID NO: 2052606 - RNA, 19 nt, Artificial Sequence
  Description of Artificial Sequence: Synthetic oligonucleotide
ucaaaacuaacuucggguu

SEQ ID NO: 2052607 - RNA, 19 nt, Artificial Sequence
  Description of Artificial Sequence: Synthetic oligonucleotide
uaaugggcggccuucuggg

SEQ ID NO: 2052608 - RNA, 19 nt, Artificial Sequence
  Description of Artificial Sequence: Synthetic oligonucleotide
ugggcuaagagcuggagaa

SEQ ID NO: 2052609 - RNA, 19 nt, Artificial Sequence
  Description of Artificial Sequence: Synthetic oligonucleotide
auaaaugggugcaaggcag

SEQ ID NO: 2052610 - RNA, 19 nt, Artificial Sequence
  Description of Artificial Sequence: Synthetic oligonucleotide
aaucuauuuccagaaagaa

SEQ ID NO: 2052611 - RNA, 19 nt, Artificial Sequence
  Description of Artificial Sequence: Synthetic oligonucleotide
ucucauaagcaaauucuuc

SEQ ID NO: 2052612 - RNA, 19 nt, Artificial Sequence
  Description of Artificial Sequence: Synthetic oligonucleotide
gaugacuggaagaauaguc

SEQ ID NO: 2052613 - RNA, 19 nt, Artificial Sequence
  Description of Artificial Sequence: Synthetic oligonucleotide
aauugcuuugucaaaacua

SEQ ID NO: 2052614 - RNA, 19 nt, Artificial Sequence
  Description of Artificial Sequence: Synthetic oligonucleotide
uauggauauaaguaccaau

SEQ ID NO: 2052615 - RNA, 19 nt, Artificial Sequence
  Description of Artificial Sequence: Synthetic oligonucleotide
uauccuuccuugauuugag

SEQ ID NO: 2052616 - RNA, 19 nt, Artificial Sequence
  Description of Artificial Sequence: Synthetic oligonucleotide
aucucuaauugcuuuguca

SEQ ID NO: 2052617 - RNA, 19 nt, Artificial Sequence
  Description of Artificial Sequence: Synthetic oligonucleotide
aaguuacauccaaagcggc

SEQ ID NO: 2052618 - RNA, 19 nt, Artificial Sequence
  Description of Artificial Sequence: Synthetic oligonucleotide
uggauaacauugcacagua

SEQ ID NO: 2052619 - RNA, 19 nt, Artificial Sequence
  Description of Artificial Sequence: Synthetic oligonucleotide
uugucaaguacaagugggc

SEQ ID NO: 2052620 - RNA, 19 nt, Artificial Sequence
  Description of Artificial Sequence: Synthetic oligonucleotide
ggauauaaguaccaaucag

SEQ ID NO: 2052621 - RNA, 19 nt, Artificial Sequence
  Description of Artificial Sequence: Synthetic oligonucleotide
ucaaguacaagugggcucu

SEQ ID NO: 2052622 - RNA, 19 nt, Artificial Sequence
  Description of Artificial Sequence: Synthetic oligonucleotide
aacgccuaauauguucuac

SEQ ID NO: 2052623 - RNA, 19 nt, Artificial Sequence
  Description of Artificial Sequence: Synthetic oligonucleotide
uucuuuguggcgauccucu

SEQ ID NO: 2052624 - RNA, 19 nt, Artificial Sequence
  Description of Artificial Sequence: Synthetic oligonucleotide
uaccaaucaguaauuugug

SEQ ID NO: 2052625 - RNA, 19 nt, Artificial Sequence
  Description of Artificial Sequence: Synthetic oligonucleotide
uuguacacccucuucaguc

SEQ ID NO: 2052626 - RNA, 19 nt, Artificial Sequence
  Description of Artificial Sequence: Synthetic oligonucleotide
cuuccucucaaaagaacgc

SEQ ID NO: 2052627 - RNA, 19 nt, Artificial Sequence
  Description of Artificial Sequence: Synthetic oligonucleotide
uauaaguaccaaucaguaa

SEQ ID NO: 2052628 - RNA, 19 nt, Artificial Sequence
  Description of Artificial Sequence: Synthetic oligonucleotide
ucuuuaggggccucggagc

SEQ ID NO: 2052629 - RNA, 19 nt, Artificial Sequence
  Description of Artificial Sequence: Synthetic oligonucleotide
uuguuucugcggaugacug

SEQ ID NO: 2052630 - RNA, 19 nt, Artificial Sequence
  Description of Artificial Sequence: Synthetic oligonucleotide
cuauuuucaagaagauuuc

SEQ ID NO: 2052631 - RNA, 19 nt, Artificial Sequence
  Description of Artificial Sequence: Synthetic oligonucleotide
agcuggagaauucucauaa

SEQ ID NO: 2052632 - RNA, 19 nt, Artificial Sequence
  Description of Artificial Sequence: Synthetic oligonucleotide
caauuucauccuuccaacg

SEQ ID NO: 2052633 - RNA, 19 nt, Artificial Sequence
  Description of Artificial Sequence: Synthetic oligonucleotide
gauauaaguaccaaucagu

SEQ ID NO: 2052634 - RNA, 19 nt, Artificial Sequence
  Description of Artificial Sequence: Synthetic oligonucleotide
uugcacaguauccacucug

SEQ ID NO: 2052635 - RNA, 19 nt, Artificial Sequence
  Description of Artificial Sequence: Synthetic oligonucleotide
ucaguaauuugugaaugga

SEQ ID NO: 2052636 - RNA, 19 nt, Artificial Sequence
  Description of Artificial Sequence: Synthetic oligonucleotide
cuauagaagagaucuuguc

SEQ ID NO: 2052637 - RNA, 19 nt, Artificial Sequence
  Description of Artificial Sequence: Synthetic oligonucleotide
aauacugcuuccucucaaa

SEQ ID NO: 2052638 - RNA, 19 nt, Artificial Sequence
  Description of Artificial Sequence: Synthetic oligonucleotide
aagucuguaucuugccuga

SEQ ID NO: 2052639 - RNA, 19 nt, Artificial Sequence
  Description of Artificial Sequence: Synthetic oligonucleotide
guaaugggcggccuucugg

SEQ ID NO: 2052640 - RNA, 19 nt, Artificial Sequence
  Description of Artificial Sequence: Synthetic oligonucleotide
uugucuuaucagaagucac

SEQ ID NO: 2052641 - RNA, 19 nt, Artificial Sequence
  Description of Artificial Sequence: Synthetic oligonucleotide
caaucauaauacugcuucc

SEQ ID NO: 2052642 - RNA, 19 nt, Artificial Sequence
  Description of Artificial Sequence: Synthetic oligonucleotide
auugucuuaucagaaguca

SEQ ID NO: 2052643 - RNA, 19 nt, Artificial Sequence
  Description of Artificial Sequence: Synthetic oligonucleotide
uaucuugccugauauucac

SEQ ID NO: 2052644 - RNA, 19 nt, Artificial Sequence
  Description of Artificial Sequence: Synthetic oligonucleotide
aaugggcggccuucugggc

SEQ ID NO: 2052645 - RNA, 19 nt, Artificial Sequence
  Description of Artificial Sequence: Synthetic oligonucleotide
uccaccuuaucugccaggg

SEQ ID NO: 2052646 - RNA, 19 nt, Artificial Sequence
  Description of Artificial Sequence: Synthetic oligonucleotide
caugaaguaacuguacauc

SEQ ID NO: 2052647 - RNA, 19 nt, Artificial Sequence
  Description of Artificial Sequence: Synthetic oligonucleotide
ucggagauacagagaauug

SEQ ID NO: 2052648 - RNA, 19 nt, Artificial Sequence
  Description of Artificial Sequence: Synthetic oligonucleotide
augaccucuuguaaugggc

SEQ ID NO: 2052649 - RNA, 19 nt, Artificial Sequence
  Description of Artificial Sequence: Synthetic oligonucleotide
ugacuuccugccaguaggg

SEQ ID NO: 2052650 - RNA, 19 nt, Artificial Sequence
  Description of Artificial Sequence: Synthetic oligonucleotide
uuucuacgaaacuuccaga

SEQ ID NO: 2052651 - RNA, 19 nt, Artificial Sequence
  Description of Artificial Sequence: Synthetic oligonucleotide
uaaaugggugcaaggcagc

SEQ ID NO: 2052652 - RNA, 19 nt, Artificial Sequence
  Description of Artificial Sequence: Synthetic oligonucleotide
ccaaucauaauacugcuuc

SEQ ID NO: 2052653 - RNA, 19 nt, Artificial Sequence
  Description of Artificial Sequence: Synthetic oligonucleotide
uuugauuguucuuggcuau

SEQ ID NO: 2052654 - RNA, 19 nt, Artificial Sequence
  Description of Artificial Sequence: Synthetic oligonucleotide
cagggaccaaucauaauac

SEQ ID NO: 2052655 - RNA, 19 nt, Artificial Sequence
  Description of Artificial Sequence: Synthetic oligonucleotide
auugaacagggaccaauca

SEQ ID NO: 2052656 - RNA, 19 nt, Artificial Sequence
  Description of Artificial Sequence: Synthetic oligonucleotide
cauugcacaguauccacuc

SEQ ID NO: 2052657 - RNA, 19 nt, Artificial Sequence
  Description of Artificial Sequence: Synthetic oligonucleotide
gggugaauccuauagaaga

SEQ ID NO: 2052658 - RNA, 19 nt, Artificial Sequence
  Description of Artificial Sequence: Synthetic oligonucleotide
gucaaaacuaacuucgggu

SEQ ID NO: 2052659 - RNA, 19 nt, Artificial Sequence
  Description of Artificial Sequence: Synthetic oligonucleotide
uccucucaaaagaacgccu

SEQ ID NO: 2052660 - RNA, 19 nt, Artificial Sequence
  Description of Artificial Sequence: Synthetic oligonucleotide
agaaagaaugguccaucca

SEQ ID NO: 2052661 - RNA, 19 nt, Artificial Sequence
  Description of Artificial Sequence: Synthetic oligonucleotide
uucacuucugccuccaauu

SEQ ID NO: 2052662 - RNA, 19 nt, Artificial Sequence
  Description of Artificial Sequence: Synthetic oligonucleotide
auugcuuugucaaaacuaa

SEQ ID NO: 2052663 - RNA, 19 nt, Artificial Sequence
  Description of Artificial Sequence: Synthetic oligonucleotide
aacccuggauaacauugca

SEQ ID NO: 2052664 - RNA, 19 nt, Artificial Sequence
  Description of Artificial Sequence: Synthetic oligonucleotide
gaccucuuguaaugggcgg

SEQ ID NO: 2052665 - RNA, 19 nt, Artificial Sequence
  Description of Artificial Sequence: Synthetic oligonucleotide
aagagcuggagaauucuca

SEQ ID NO: 2052666 - RNA, 19 nt, Artificial Sequence
  Description of Artificial Sequence: Synthetic oligonucleotide
uugggcuaagagcuggaga

SEQ ID NO: 2052667 - RNA, 19 nt, Artificial Sequence
  Description of Artificial Sequence: Synthetic oligonucleotide
uaaguaccaaucaguaauu

SEQ ID NO: 2052668 - RNA, 19 nt, Artificial Sequence
  Description of Artificial Sequence: Synthetic oligonucleotide
uccaaagcggcuucuuugu

SEQ ID NO: 2052669 - RNA, 19 nt, Artificial Sequence
  Description of Artificial Sequence: Synthetic oligonucleotide
cauugucaggggaaguuac

SEQ ID NO: 2052670 - RNA, 19 nt, Artificial Sequence
  Description of Artificial Sequence: Synthetic oligonucleotide
auccacucuggcuacuguc

SEQ ID NO: 2052671 - RNA, 19 nt, Artificial Sequence
  Description of Artificial Sequence: Synthetic oligonucleotide
cauaaaugggugcaaggca

SEQ ID NO: 2052672 - RNA, 19 nt, Artificial Sequence
  Description of Artificial Sequence: Synthetic oligonucleotide
ugucaaguacaagugggcu

SEQ ID NO: 2052673 - RNA, 19 nt, Artificial Sequence
  Description of Artificial Sequence: Synthetic oligonucleotide
uuccucucaaaagaacgcc

SEQ ID NO: 2052674 - RNA, 19 nt, Artificial Sequence
  Description of Artificial Sequence: Synthetic oligonucleotide
uucugcggaugacuggaag

SEQ ID NO: 2052675 - RNA, 19 nt, Artificial Sequence
  Description of Artificial Sequence: Synthetic oligonucleotide
gaagagaucuugucaagua

SEQ ID NO: 2052676 - RNA, 19 nt, Artificial Sequence
  Description of Artificial Sequence: Synthetic oligonucleotide
augacuggaagaauagucu

SEQ ID NO: 2052677 - RNA, 19 nt, Artificial Sequence
  Description of Artificial Sequence: Synthetic oligonucleotide
cuuggcuugcuccauuaug

SEQ ID NO: 2052678 - RNA, 19 nt, Artificial Sequence
  Description of Artificial Sequence: Synthetic oligonucleotide
uguacacccucuucagucu

SEQ ID NO: 2052679 - RNA, 19 nt, Artificial Sequence
  Description of Artificial Sequence: Synthetic oligonucleotide
aguaacuguacaucugauu

SEQ ID NO: 2052680 - RNA, 19 nt, Artificial Sequence
  Description of Artificial Sequence: Synthetic oligonucleotide
gccauuguaaguaagaaaa

SEQ ID NO: 2052681 - RNA, 19 nt, Artificial Sequence
  Description of Artificial Sequence: Synthetic oligonucleotide
uguggcgauccucuuguac

SEQ ID NO: 2052682 - RNA, 19 nt, Artificial Sequence
  Description of Artificial Sequence: Synthetic oligonucleotide
cuuccaacgccuaauaugu

SEQ ID NO: 2052683 - RNA, 19 nt, Artificial Sequence
  Description of Artificial Sequence: Synthetic oligonucleotide
ugacuggaagaauagucua

SEQ ID NO: 2052684 - RNA, 19 nt, Artificial Sequence
  Description of Artificial Sequence: Synthetic oligonucleotide
caucucguauccuuccuug

SEQ ID NO: 2052685 - RNA, 19 nt, Artificial Sequence
  Description of Artificial Sequence: Synthetic oligonucleotide
gaagccauuguaaguaaga

SEQ ID NO: 2052686 - RNA, 19 nt, Artificial Sequence
  Description of Artificial Sequence: Synthetic oligonucleotide
agagaucuugucaaguaca

SEQ ID NO: 2052687 - RNA, 19 nt, Artificial Sequence
  Description of Artificial Sequence: Synthetic oligonucleotide
aacgccuuggaacccugga

SEQ ID NO: 2052688 - RNA, 19 nt, Artificial Sequence
  Description of Artificial Sequence: Synthetic oligonucleotide
accucuuguaaugggcggc

SEQ ID NO: 2052689 - RNA, 19 nt, Artificial Sequence
  Description of Artificial Sequence: Synthetic oligonucleotide
uguaugggcuggaucagua

SEQ ID NO: 2052690 - RNA, 19 nt, Artificial Sequence
  Description of Artificial Sequence: Synthetic oligonucleotide
uucugggccuuuccaauga

SEQ ID NO: 2052691 - RNA, 19 nt, Artificial Sequence
  Description of Artificial Sequence: Synthetic oligonucleotide
acgccuaauauguucuacu

SEQ ID NO: 2052692 - RNA, 19 nt, Artificial Sequence
  Description of Artificial Sequence: Synthetic oligonucleotide
ggaacccuggauaacauug

SEQ ID NO: 2052693 - RNA, 19 nt, Artificial Sequence
  Description of Artificial Sequence: Synthetic oligonucleotide
ucguauccuuccuugauuu

SEQ ID NO: 2052694 - RNA, 19 nt, Artificial Sequence
  Description of Artificial Sequence: Synthetic oligonucleotide
uugcuuugucaaaacuaac

SEQ ID NO: 2052695 - RNA, 19 nt, Artificial Sequence
  Description of Artificial Sequence: Synthetic oligonucleotide
cuugacuuccugccaguag

SEQ ID NO: 2052696 - RNA, 19 nt, Artificial Sequence
  Description of Artificial Sequence: Synthetic oligonucleotide
cuuccuugauuugagaaga

SEQ ID NO: 2052697 - RNA, 19 nt, Artificial Sequence
  Description of Artificial Sequence: Synthetic oligonucleotide
agaagagaucuugucaagu

SEQ ID NO: 2052698 - RNA, 19 nt, Artificial Sequence
  Description of Artificial Sequence: Synthetic oligonucleotide
gcuuuaggaaguuucuaug

SEQ ID NO: 2052699 - RNA, 19 nt, Artificial Sequence
  Description of Artificial Sequence: Synthetic oligonucleotide
uggacaucucguauccuuc

SEQ ID NO: 2052700 - RNA, 19 nt, Artificial Sequence
  Description of Artificial Sequence: Synthetic oligonucleotide
uacgaaacuuccagacaac

SEQ ID NO: 2052701 - RNA, 19 nt, Artificial Sequence
  Description of Artificial Sequence: Synthetic oligonucleotide
ggagaauucucauaagcaa

SEQ ID NO: 2052702 - RNA, 19 nt, Artificial Sequence
  Description of Artificial Sequence: Synthetic oligonucleotide
uaacuucggguucauuguc

SEQ ID NO: 2052703 - RNA, 19 nt, Artificial Sequence
  Description of Artificial Sequence: Synthetic oligonucleotide
gucaaguacaagugggcuc

SEQ ID NO: 2052704 - RNA, 19 nt, Artificial Sequence
  Description of Artificial Sequence: Synthetic oligonucleotide
aaguacaagugggcucugg

SEQ ID NO: 2052705 - RNA, 19 nt, Artificial Sequence
  Description of Artificial Sequence: Synthetic oligonucleotide
guggcgauccucuuguaca

SEQ ID NO: 2052706 - RNA, 19 nt, Artificial Sequence
  Description of Artificial Sequence: Synthetic oligonucleotide
aacacaccaauaaaaucua

SEQ ID NO: 2052707 - RNA, 19 nt, Artificial Sequence
  Description of Artificial Sequence: Synthetic oligonucleotide
acaagugggcucuggacau

SEQ ID NO: 2052708 - RNA, 19 nt, Artificial Sequence
  Description of Artificial Sequence: Synthetic oligonucleotide
ucuuggcuauuuucaagaa

SEQ ID NO: 2052709 - RNA, 19 nt, Artificial Sequence
  Description of Artificial Sequence: Synthetic oligonucleotide
uccaucuuuaggggccucg

SEQ ID NO: 2052710 - RNA, 19 nt, Artificial Sequence
  Description of Artificial Sequence: Synthetic oligonucleotide
uaacuguacaucugauuuu

SEQ ID NO: 2052711 - RNA, 19 nt, Artificial Sequence
  Description of Artificial Sequence: Synthetic oligonucleotide
augggcuggaucaguaaac

SEQ ID NO: 2052712 - RNA, 19 nt, Artificial Sequence
  Description of Artificial Sequence: Synthetic oligonucleotide
auuuucguugggcuagaaa

SEQ ID NO: 2052713 - RNA, 19 nt, Artificial Sequence
  Description of Artificial Sequence: Synthetic oligonucleotide
gggaaguuacauccaaagc

SEQ ID NO: 2052714 - RNA, 19 nt, Artificial Sequence
  Description of Artificial Sequence: Synthetic oligonucleotide
acuuguuucugcggaugac

SEQ ID NO: 2052715 - RNA, 19 nt, Artificial Sequence
  Description of Artificial Sequence: Synthetic oligonucleotide
cuuuguggcgauccucuug

SEQ ID NO: 2052716 - RNA, 19 nt, Artificial Sequence
  Description of Artificial Sequence: Synthetic oligonucleotide
gaacccuggauaacauugc

SEQ ID NO: 2052717 - RNA, 19 nt, Artificial Sequence
  Description of Artificial Sequence: Synthetic oligonucleotide
uucauugucaggggaaguu

SEQ ID NO: 2052718 - RNA, 19 nt, Artificial Sequence
  Description of Artificial Sequence: Synthetic oligonucleotide
caauugucuuaucagaagu

SEQ ID NO: 2052719 - RNA, 19 nt, Artificial Sequence
  Description of Artificial Sequence: Synthetic oligonucleotide
ugggcuggaucaguaaaca

SEQ ID NO: 2052720 - RNA, 19 nt, Artificial Sequence
  Description of Artificial Sequence: Synthetic oligonucleotide
cuuggaacccuggauaaca

SEQ ID NO: 2052721 - RNA, 19 nt, Artificial Sequence
  Description of Artificial Sequence: Synthetic oligonucleotide
ugggcucuggacaucucgu

SEQ ID NO: 2052722 - RNA, 19 nt, Artificial Sequence
  Description of Artificial Sequence: Synthetic oligonucleotide
ccaauugucuuaucagaag

SEQ ID NO: 2052723 - RNA, 19 nt, Artificial Sequence
  Description of Artificial Sequence: Synthetic oligonucleotide
aucuugccugauauucacc

SEQ ID NO: 2052724 - RNA, 19 nt, Artificial Sequence
  Description of Artificial Sequence: Synthetic oligonucleotide
guauccuuccuugauuuga

SEQ ID NO: 2052725 - RNA, 19 nt, Artificial Sequence
  Description of Artificial Sequence: Synthetic oligonucleotide
aacagggaccaaucauaau

SEQ ID NO: 2052726 - RNA, 19 nt, Artificial Sequence
  Description of Artificial Sequence: Synthetic oligonucleotide
ccauaaaugggugcaaggc

SEQ ID NO: 2052727 - RNA, 19 nt, Artificial Sequence
  Description of Artificial Sequence: Synthetic oligonucleotide
cucaaaagaacgccuugga

SEQ ID NO: 2052728 - RNA, 19 nt, Artificial Sequence
  Description of Artificial Sequence: Synthetic oligonucleotide
gaauccuauagaagagauc

SEQ ID NO: 2052729 - RNA, 19 nt, Artificial Sequence
  Description of Artificial Sequence: Synthetic oligonucleotide
acccuggauaacauugcac

SEQ ID NO: 2052730 - RNA, 19 nt, Artificial Sequence
  Description of Artificial Sequence: Synthetic oligonucleotide
guuucugcggaugacugga

SEQ ID NO: 2052731 - RNA, 19 nt, Artificial Sequence
  Description of Artificial Sequence: Synthetic oligonucleotide
agggugaauccuauagaag

SEQ ID NO: 2052732 - RNA, 19 nt, Artificial Sequence
  Description of Artificial Sequence: Synthetic oligonucleotide
gccuaauauguucuacugc

SEQ ID NO: 2052733 - RNA, 19 nt, Artificial Sequence
  Description of Artificial Sequence: Synthetic oligonucleotide
uccuugauuugagaagaaa

SEQ ID NO: 2052734 - RNA, 19 nt, Artificial Sequence
  Description of Artificial Sequence: Synthetic oligonucleotide
auccccacggacucggaga

SEQ ID NO: 2052735 - RNA, 19 nt, Artificial Sequence
  Description of Artificial Sequence: Synthetic oligonucleotide
aguuacauccaaagcggcu

SEQ ID NO: 2052736 - RNA, 19 nt, Artificial Sequence
  Description of Artificial Sequence: Synthetic oligonucleotide
gccacaauuucauccuucc

SEQ ID NO: 2052737 - RNA, 19 nt, Artificial Sequence
  Description of Artificial Sequence: Synthetic oligonucleotide
aaauuuucguugggcuaga

SEQ ID NO: 2052738 - RNA, 19 nt, Artificial Sequence
  Description of Artificial Sequence: Synthetic oligonucleotide
uggaagccauuguaaguaa

SEQ ID NO: 2052739 - RNA, 19 nt, Artificial Sequence
  Description of Artificial Sequence: Synthetic oligonucleotide
uuggaacccuggauaacau

SEQ ID NO: 2052740 - RNA, 19 nt, Artificial Sequence
  Description of Artificial Sequence: Synthetic oligonucleotide
cuuguaaugggcggccuuc

SEQ ID NO: 2052741 - RNA, 19 nt, Artificial Sequence
  Description of Artificial Sequence: Synthetic oligonucleotide
aagugggcucuggacaucu

SEQ ID NO: 2052742 - RNA, 19 nt, Artificial Sequence
  Description of Artificial Sequence: Synthetic oligonucleotide
uccuuccaacgccuaauau

SEQ ID NO: 2052743 - RNA, 19 nt, Artificial Sequence
  Description of Artificial Sequence: Synthetic oligonucleotide
aaguaccaaucaguaauuu

SEQ ID NO: 2052744 - RNA, 19 nt, Artificial Sequence
  Description of Artificial Sequence: Synthetic oligonucleotide
aucaguaaacacaccaaua

SEQ ID NO: 2052745 - RNA, 19 nt, Artificial Sequence
  Description of Artificial Sequence: Synthetic oligonucleotide
ucauugucaggggaaguua

SEQ ID NO: 2052746 - RNA, 19 nt, Artificial Sequence
  Description of Artificial Sequence: Synthetic oligonucleotide
cacggacucggagauacag

SEQ ID NO: 2052747 - RNA, 19 nt, Artificial Sequence
  Description of Artificial Sequence: Synthetic oligonucleotide
agggaccaaucauaauacu

SEQ ID NO: 2052748 - RNA, 19 nt, Artificial Sequence
  Description of Artificial Sequence: Synthetic oligonucleotide
cuaacuucggguucauugu

SEQ ID NO: 2052749 - RNA, 19 nt, Artificial Sequence
  Description of Artificial Sequence: Synthetic oligonucleotide
acccauaaaugggugcaag

SEQ ID NO: 2052750 - RNA, 19 nt, Artificial Sequence
  Description of Artificial Sequence: Synthetic oligonucleotide
cccauaaaugggugcaagg

SEQ ID NO: 2052751 - RNA, 19 nt, Artificial Sequence
  Description of Artificial Sequence: Synthetic oligonucleotide
gugaauccuauagaagaga

SEQ ID NO: 2052752 - RNA, 19 nt, Artificial Sequence
  Description of Artificial Sequence: Synthetic oligonucleotide
ccaaucaguaauuugugaa

SEQ ID NO: 2052753 - RNA, 19 nt, Artificial Sequence
  Description of Artificial Sequence: Synthetic oligonucleotide
uggcuugcuccauuaugac

SEQ ID NO: 2052754 - RNA, 19 nt, Artificial Sequence
  Description of Artificial Sequence: Synthetic oligonucleotide
uccucuggauaaagucugu

SEQ ID NO: 2052755 - RNA, 19 nt, Artificial Sequence
  Description of Artificial Sequence: Synthetic oligonucleotide
ccuggauaacauugcacag

SEQ ID NO: 2052756 - RNA, 19 nt, Artificial Sequence
  Description of Artificial Sequence: Synthetic oligonucleotide
ggcuggaucaguaaacaca

SEQ ID NO: 2052757 - RNA, 19 nt, Artificial Sequence
  Description of Artificial Sequence: Synthetic oligonucleotide
gguucauugucaggggaag

SEQ ID NO: 2052758 - RNA, 19 nt, Artificial Sequence
  Description of Artificial Sequence: Synthetic oligonucleotide
ggacaucucguauccuucc

SEQ ID NO: 2052759 - RNA, 19 nt, Artificial Sequence
  Description of Artificial Sequence: Synthetic oligonucleotide
ggcuugcuccauuaugacc

SEQ ID NO: 2052760 - RNA, 19 nt, Artificial Sequence
  Description of Artificial Sequence: Synthetic oligonucleotide
aucuugacuuccugccagu

SEQ ID NO: 2052761 - RNA, 19 nt, Artificial Sequence
  Description of Artificial Sequence: Synthetic oligonucleotide
ggagauacagagaauugaa

SEQ ID NO: 2052762 - RNA, 19 nt, Artificial Sequence
  Description of Artificial Sequence: Synthetic oligonucleotide
caucucuaauugcuuuguc

SEQ ID NO: 2052763 - RNA, 19 nt, Artificial Sequence
  Description of Artificial Sequence: Synthetic oligonucleotide
cuucuuuguggcgauccuc

SEQ ID NO: 2052764 - RNA, 19 nt, Artificial Sequence
  Description of Artificial Sequence: Synthetic oligonucleotide
uccccacggacucggagau

SEQ ID NO: 2052765 - RNA, 19 nt, Artificial Sequence
  Description of Artificial Sequence: Synthetic oligonucleotide
agcggcuucuuuguggcga

SEQ ID NO: 2052766 - RNA, 19 nt, Artificial Sequence
  Description of Artificial Sequence: Synthetic oligonucleotide
caguauccacucuggcuac

SEQ ID NO: 2052767 - RNA, 19 nt, Artificial Sequence
  Description of Artificial Sequence: Synthetic oligonucleotide
gcgauccucuuguacaccc

SEQ ID NO: 2052768 - RNA, 19 nt, Artificial Sequence
  Description of Artificial Sequence: Synthetic oligonucleotide
cacaguauccacucuggcu

SEQ ID NO: 2052769 - RNA, 19 nt, Artificial Sequence
  Description of Artificial Sequence: Synthetic oligonucleotide
cuugggcuaagagcuggag

SEQ ID NO: 2052770 - RNA, 19 nt, Artificial Sequence
  Description of Artificial Sequence: Synthetic oligonucleotide
uuucugcggaugacuggaa

SEQ ID NO: 2052771 - RNA, 19 nt, Artificial Sequence
  Description of Artificial Sequence: Synthetic oligonucleotide
gccuccaauugucuuauca

SEQ ID NO: 2052772 - RNA, 19 nt, Artificial Sequence
  Description of Artificial Sequence: Synthetic oligonucleotide
gcuggagaauucucauaag

SEQ ID NO: 2052773 - RNA, 19 nt, Artificial Sequence
  Description of Artificial Sequence: Synthetic oligonucleotide
accauccacuucuccaaau

SEQ ID NO: 2052774 - RNA, 19 nt, Artificial Sequence
  Description of Artificial Sequence: Synthetic oligonucleotide
ggaagccauuguaaguaag

SEQ ID NO: 2052775 - RNA, 19 nt, Artificial Sequence
  Description of Artificial Sequence: Synthetic oligonucleotide
uggaacccuggauaacauu

SEQ ID NO: 2052776 - RNA, 19 nt, Artificial Sequence
  Description of Artificial Sequence: Synthetic oligonucleotide
acagagaauugaacaggga

SEQ ID NO: 2052777 - RNA, 19 nt, Artificial Sequence
  Description of Artificial Sequence: Synthetic oligonucleotide
aauuuucguugggcuagaa

SEQ ID NO: 2052778 - RNA, 19 nt, Artificial Sequence
  Description of Artificial Sequence: Synthetic oligonucleotide
cagcccuuggcuuuaggaa

SEQ ID NO: 2052779 - RNA, 19 nt, Artificial Sequence
  Description of Artificial Sequence: Synthetic oligonucleotide
ggcuucuuuguggcgaucc

SEQ ID NO: 2052780 - RNA, 19 nt, Artificial Sequence
  Description of Artificial Sequence: Synthetic oligonucleotide
ggccucggagcucagaguc

SEQ ID NO: 2052781 - RNA, 19 nt, Artificial Sequence
  Description of Artificial Sequence: Synthetic oligonucleotide
cuauggauauaaguaccaa

SEQ ID NO: 2052782 - RNA, 19 nt, Artificial Sequence
  Description of Artificial Sequence: Synthetic oligonucleotide
gaacgccuuggaacccugg

SEQ ID NO: 2052783 - RNA, 19 nt, Artificial Sequence
  Description of Artificial Sequence: Synthetic oligonucleotide
acgccuuggaacccuggau

SEQ ID NO: 2052784 - RNA, 19 nt, Artificial Sequence
  Description of Artificial Sequence: Synthetic oligonucleotide
uggcuuuaggaaguuucua

SEQ ID NO: 2052785 - RNA, 19 nt, Artificial Sequence
  Description of Artificial Sequence: Synthetic oligonucleotide
cacaccaauaaaaucuauu

SEQ ID NO: 2052786 - RNA, 19 nt, Artificial Sequence
  Description of Artificial Sequence: Synthetic oligonucleotide
guuacauccaaagcggcuu

SEQ ID NO: 2052787 - RNA, 19 nt, Artificial Sequence
  Description of Artificial Sequence: Synthetic oligonucleotide
agagucccauagagcaggg

SEQ ID NO: 2052788 - RNA, 19 nt, Artificial Sequence
  Description of Artificial Sequence: Synthetic oligonucleotide
gcuuugucaaaacuaacuu

SEQ ID NO: 2052789 - RNA, 19 nt, Artificial Sequence
  Description of Artificial Sequence: Synthetic oligonucleotide
uacccauaaaugggugcaa

SEQ ID NO: 2052790 - RNA, 19 nt, Artificial Sequence
  Description of Artificial Sequence: Synthetic oligonucleotide
guaugggcuggaucaguaa

SEQ ID NO: 2052791 - RNA, 19 nt, Artificial Sequence
  Description of Artificial Sequence: Synthetic oligonucleotide
cacgggugaacaugaagua

SEQ ID NO: 2052792 - RNA, 19 nt, Artificial Sequence
  Description of Artificial Sequence: Synthetic oligonucleotide
ucuggacaucucguauccu

SEQ ID NO: 2052793 - RNA, 19 nt, Artificial Sequence
  Description of Artificial Sequence: Synthetic oligonucleotide
gcuccauuaugaccucuug

SEQ ID NO: 2052794 - RNA, 19 nt, Artificial Sequence
  Description of Artificial Sequence: Synthetic oligonucleotide
cugcuuccucucaaaagaa

SEQ ID NO: 2052795 - RNA, 19 nt, Artificial Sequence
  Description of Artificial Sequence: Synthetic oligonucleotide
ggcuuuaggaaguuucuau

SEQ ID NO: 2052796 - RNA, 19 nt, Artificial Sequence
  Description of Artificial Sequence: Synthetic oligonucleotide
uugauuguucuuggcuauu

SEQ ID NO: 2052797 - RNA, 19 nt, Artificial Sequence
  Description of Artificial Sequence: Synthetic oligonucleotide
cuaagagcuggagaauucu

SEQ ID NO: 2052798 - RNA, 19 nt, Artificial Sequence
  Description of Artificial Sequence: Synthetic oligonucleotide
cggaugacuggaagaauag

SEQ ID NO: 2052799 - RNA, 19 nt, Artificial Sequence
  Description of Artificial Sequence: Synthetic oligonucleotide
gcagcccuuggcuuuagga

SEQ ID NO: 2052800 - RNA, 19 nt, Artificial Sequence
  Description of Artificial Sequence: Synthetic oligonucleotide
cuccauuaugaccucuugu

SEQ ID NO: 2052801 - RNA, 19 nt, Artificial Sequence
  Description of Artificial Sequence: Synthetic oligonucleotide
cucggagauacagagaauu

SEQ ID NO: 2052802 - RNA, 19 nt, Artificial Sequence
  Description of Artificial Sequence: Synthetic oligonucleotide
cuggauaacauugcacagu

SEQ ID NO: 2052803 - RNA, 19 nt, Artificial Sequence
  Description of Artificial Sequence: Synthetic oligonucleotide
cuuuaggggccucggagcu

SEQ ID NO: 2052804 - RNA, 19 nt, Artificial Sequence
  Description of Artificial Sequence: Synthetic oligonucleotide
auucaccauccaaggccgg

SEQ ID NO: 2052805 - RNA, 19 nt, Artificial Sequence
  Description of Artificial Sequence: Synthetic oligonucleotide
gcacaguauccacucuggc

SEQ ID NO: 2052806 - RNA, 19 nt, Artificial Sequence
  Description of Artificial Sequence: Synthetic oligonucleotide
cgccuaauauguucuacug

SEQ ID NO: 2052807 - RNA, 19 nt, Artificial Sequence
  Description of Artificial Sequence: Synthetic oligonucleotide
ugcggaugacuggaagaau

SEQ ID NO: 2052808 - RNA, 19 nt, Artificial Sequence
  Description of Artificial Sequence: Synthetic oligonucleotide
ccagaaagaaugguccauc

SEQ ID NO: 2052809 - RNA, 19 nt, Artificial Sequence
  Description of Artificial Sequence: Synthetic oligonucleotide
caucuuuaggggccucgga

SEQ ID NO: 2052810 - RNA, 19 nt, Artificial Sequence
  Description of Artificial Sequence: Synthetic oligonucleotide
gagucccauagagcagggc

SEQ ID NO: 2052811 - RNA, 19 nt, Artificial Sequence
  Description of Artificial Sequence: Synthetic oligonucleotide
caggggaaguuacauccaa

SEQ ID NO: 2052812 - RNA, 19 nt, Artificial Sequence
  Description of Artificial Sequence: Synthetic oligonucleotide
ucggagcucagagucccau

SEQ ID NO: 2052813 - RNA, 19 nt, Artificial Sequence
  Description of Artificial Sequence: Synthetic oligonucleotide
gcuaagagcuggagaauuc

SEQ ID NO: 2052814 - RNA, 19 nt, Artificial Sequence
  Description of Artificial Sequence: Synthetic oligonucleotide
cccacggacucggagauac

SEQ ID NO: 2052815 - RNA, 19 nt, Artificial Sequence
  Description of Artificial Sequence: Synthetic oligonucleotide
ccacgggugaacaugaagu

SEQ ID NO: 2052816 - RNA, 19 nt, Artificial Sequence
  Description of Artificial Sequence: Synthetic oligonucleotide
acacaccaauaaaaucuau

SEQ ID NO: 2052817 - RNA, 19 nt, Artificial Sequence
  Description of Artificial Sequence: Synthetic oligonucleotide
aguauccacucuggcuacu

SEQ ID NO: 2052818 - RNA, 19 nt, Artificial Sequence
  Description of Artificial Sequence: Synthetic oligonucleotide
gaauucucauaagcaaauu

SEQ ID NO: 2052819 - RNA, 19 nt, Artificial Sequence
  Description of Artificial Sequence: Synthetic oligonucleotide
cuuguacacccucuucagu

SEQ ID NO: 2052820 - RNA, 19 nt, Artificial Sequence
  Description of Artificial Sequence: Synthetic oligonucleotide
aggggaaguuacauccaaa

SEQ ID NO: 2052821 - RNA, 19 nt, Artificial Sequence
  Description of Artificial Sequence: Synthetic oligonucleotide
gcugggagacucugucagc

SEQ ID NO: 2052822 - RNA, 19 nt, Artificial Sequence
  Description of Artificial Sequence: Synthetic oligonucleotide
ccauuaugaccucuuguaa

SEQ ID NO: 2052823 - RNA, 19 nt, Artificial Sequence
  Description of Artificial Sequence: Synthetic oligonucleotide
ccaucuuuaggggccucgg

SEQ ID NO: 2052824 - RNA, 19 nt, Artificial Sequence
  Description of Artificial Sequence: Synthetic oligonucleotide
accauccaaggccggccau

SEQ ID NO: 2052825 - RNA, 19 nt, Artificial Sequence
  Description of Artificial Sequence: Synthetic oligonucleotide
ccucggagcucagaguccc

SEQ ID NO: 2052826 - RNA, 19 nt, Artificial Sequence
  Description of Artificial Sequence: Synthetic oligonucleotide
cacuucugccuccaauugu

SEQ ID NO: 2052827 - RNA, 19 nt, Artificial Sequence
  Description of Artificial Sequence: Synthetic oligonucleotide
uggcuacugucuccaucuu

SEQ ID NO: 2052828 - RNA, 19 nt, Artificial Sequence
  Description of Artificial Sequence: Synthetic oligonucleotide
cagaagucaccauccacuu

SEQ ID NO: 2052829 - RNA, 19 nt, Artificial Sequence
  Description of Artificial Sequence: Synthetic oligonucleotide
gcggaugacuggaagaaua

SEQ ID NO: 2052830 - RNA, 19 nt, Artificial Sequence
  Description of Artificial Sequence: Synthetic oligonucleotide
ccaacgccuaauauguucu

SEQ ID NO: 2052831 - RNA, 19 nt, Artificial Sequence
  Description of Artificial Sequence: Synthetic oligonucleotide
caccauccaaggccggcca

SEQ ID NO: 2052832 - RNA, 19 nt, Artificial Sequence
  Description of Artificial Sequence: Synthetic oligonucleotide
cucguauccuuccuugauu

SEQ ID NO: 2052833 - RNA, 19 nt, Artificial Sequence
  Description of Artificial Sequence: Synthetic oligonucleotide
ccaaagcggcuucuuugug

SEQ ID NO: 2052834 - RNA, 19 nt, Artificial Sequence
  Description of Artificial Sequence: Synthetic oligonucleotide
uuguggcgauccucuugua

SEQ ID NO: 2052835 - RNA, 19 nt, Artificial Sequence
  Description of Artificial Sequence: Synthetic oligonucleotide
agucuguaucuugccugau

SEQ ID NO: 2052836 - RNA, 19 nt, Artificial Sequence
  Description of Artificial Sequence: Synthetic oligonucleotide
caacgccuaauauguucua

SEQ ID NO: 2052837 - RNA, 19 nt, Artificial Sequence
  Description of Artificial Sequence: Synthetic oligonucleotide
acucggagauacagagaau

SEQ ID NO: 2052838 - RNA, 19 nt, Artificial Sequence
  Description of Artificial Sequence: Synthetic oligonucleotide
caaggccggccauccccac

SEQ ID NO: 2052839 - RNA, 19 nt, Artificial Sequence
  Description of Artificial Sequence: Synthetic oligonucleotide
cggagauacagagaauuga

SEQ ID NO: 2052840 - RNA, 19 nt, Artificial Sequence
  Description of Artificial Sequence: Synthetic oligonucleotide
gggugcaaggcagcccuug

SEQ ID NO: 2052841 - RNA, 19 nt, Artificial Sequence
  Description of Artificial Sequence: Synthetic oligonucleotide
cauccaaagcggcuucuuu

SEQ ID NO: 2052842 - RNA, 19 nt, Artificial Sequence
  Description of Artificial Sequence: Synthetic oligonucleotide
cauccuuccaacgccuaau

SEQ ID NO: 2052843 - RNA, 19 nt, Artificial Sequence
  Description of Artificial Sequence: Synthetic oligonucleotide
ggaugacuggaagaauagu

SEQ ID NO: 2052844 - RNA, 19 nt, Artificial Sequence
  Description of Artificial Sequence: Synthetic oligonucleotide
ccacaauuucauccuucca

SEQ ID NO: 2052845 - RNA, 19 nt, Artificial Sequence
  Description of Artificial Sequence: Synthetic oligonucleotide
uaggggccucggagcucag

SEQ ID NO: 2052846 - RNA, 19 nt, Artificial Sequence
  Description of Artificial Sequence: Synthetic oligonucleotide
gccugauauucaccaucca

SEQ ID NO: 2052847 - RNA, 19 nt, Artificial Sequence
  Description of Artificial Sequence: Synthetic oligonucleotide
ggcuauuuucaagaagauu

SEQ ID NO: 2052848 - RNA, 19 nt, Artificial Sequence
  Description of Artificial Sequence: Synthetic oligonucleotide
ggcucuggacaucucguau

SEQ ID NO: 2052849 - RNA, 19 nt, Artificial Sequence
  Description of Artificial Sequence: Synthetic oligonucleotide
ggcuaagagcuggagaauu

SEQ ID NO: 2052850 - RNA, 19 nt, Artificial Sequence
  Description of Artificial Sequence: Synthetic oligonucleotide
gcuucuuuguggcgauccu

SEQ ID NO: 2052851 - RNA, 19 nt, Artificial Sequence
  Description of Artificial Sequence: Synthetic oligonucleotide
gggcucuggacaucucgua

SEQ ID NO: 2052852 - RNA, 19 nt, Artificial Sequence
  Description of Artificial Sequence: Synthetic oligonucleotide
ggccauccccacggacucg

SEQ ID NO: 2052853 - RNA, 19 nt, Artificial Sequence
  Description of Artificial Sequence: Synthetic oligonucleotide
ccucucaaaagaacgccuu

SEQ ID NO: 2052854 - RNA, 19 nt, Artificial Sequence
  Description of Artificial Sequence: Synthetic oligonucleotide
aggggccucggagcucaga

SEQ ID NO: 2052855 - RNA, 19 nt, Artificial Sequence
  Description of Artificial Sequence: Synthetic oligonucleotide
gccggccauccccacggac

SEQ ID NO: 2052856 - RNA, 19 nt, Artificial Sequence
  Description of Artificial Sequence: Synthetic oligonucleotide
cucuuguaaugggcggccu

SEQ ID NO: 2052857 - RNA, 19 nt, Artificial Sequence
  Description of Artificial Sequence: Synthetic oligonucleotide
ccggccauccccacggacu

SEQ ID NO: 2052858 - RNA, 19 nt, Artificial Sequence
  Description of Artificial Sequence: Synthetic oligonucleotide
ggauaacauugcacaguau

SEQ ID NO: 2052859 - RNA, 19 nt, Artificial Sequence
  Description of Artificial Sequence: Synthetic oligonucleotide
ccuuaucugccagggugaa

SEQ ID NO: 2052860 - RNA, 19 nt, Artificial Sequence
  Description of Artificial Sequence: Synthetic oligonucleotide
cacccucuucagucuuccu

SEQ ID NO: 2052861 - RNA, 19 nt, Artificial Sequence
  Description of Artificial Sequence: Synthetic oligonucleotide
gggcuaagagcuggagaau

SEQ ID NO: 2052862 - RNA, 19 nt, Artificial Sequence
  Description of Artificial Sequence: Synthetic oligonucleotide
cucuggcuacugucuccau

SEQ ID NO: 2052863 - RNA, 19 nt, Artificial Sequence
  Description of Artificial Sequence: Synthetic oligonucleotide
ccuuuccaaugagccacaa

SEQ ID NO: 2052864 - RNA, 19 nt, Artificial Sequence
  Description of Artificial Sequence: Synthetic oligonucleotide
ccacggacucggagauaca

SEQ ID NO: 2052865 - RNA, 19 nt, Artificial Sequence
  Description of Artificial Sequence: Synthetic oligonucleotide
ccaccuuaucugccagggu

SEQ ID NO: 2052866 - RNA, 19 nt, Artificial Sequence
  Description of Artificial Sequence: Synthetic oligonucleotide
cgauccucuuguacacccu

SEQ ID NO: 2052867 - RNA, 19 nt, Artificial Sequence
  Description of Artificial Sequence: Synthetic oligonucleotide
gcagggcacuuugauuguu

SEQ ID NO: 2052868 - RNA, 19 nt, Artificial Sequence
  Description of Artificial Sequence: Synthetic oligonucleotide
ccauagagcagggcacuuu

SEQ ID NO: 2052869 - RNA, 19 nt, Artificial Sequence
  Description of Artificial Sequence: Synthetic oligonucleotide
cggagcucagagucccaua

SEQ ID NO: 2052870 - RNA, 19 nt, Artificial Sequence
  Description of Artificial Sequence: Synthetic oligonucleotide
ccccacgggugaacaugaa

SEQ ID NO: 2052871 - RNA, 19 nt, Artificial Sequence
  Description of Artificial Sequence: Synthetic oligonucleotide
ccccacggacucggagaua

SEQ ID NO: 2052872 - RNA, 19 nt, Artificial Sequence
  Description of Artificial Sequence: Synthetic oligonucleotide
aaauacuugaguuuguuca

SEQ ID NO: 2052873 - RNA, 19 nt, Artificial Sequence
  Description of Artificial Sequence: Synthetic oligonucleotide
acaaacacuacucaaacag

SEQ ID NO: 2052874 - RNA, 19 nt, Artificial Sequence
  Description of Artificial Sequence: Synthetic oligonucleotide
aaugaaguacauaagcgcg

SEQ ID NO: 2052875 - RNA, 19 nt, Artificial Sequence
  Description of Artificial Sequence: Synthetic oligonucleotide
aauacuugaguuuguucac

SEQ ID NO: 2052876 - RNA, 19 nt, Artificial Sequence
  Description of Artificial Sequence: Synthetic oligonucleotide
ucucgcucaacacugaccg

SEQ ID NO: 2052877 - RNA, 19 nt, Artificial Sequence
  Description of Artificial Sequence: Synthetic oligonucleotide
uguaucaucgaagagagga

SEQ ID NO: 2052878 - RNA, 19 nt, Artificial Sequence
  Description of Artificial Sequence: Synthetic oligonucleotide
uccaugaacacccacacca

SEQ ID NO: 2052879 - RNA, 19 nt, Artificial Sequence
  Description of Artificial Sequence: Synthetic oligonucleotide
aaacaguugcuucucucgc

SEQ ID NO: 2052880 - RNA, 19 nt, Artificial Sequence
  Description of Artificial Sequence: Synthetic oligonucleotide
acacuacucaaacaguugc

SEQ ID NO: 2052881 - RNA, 19 nt, Artificial Sequence
  Description of Artificial Sequence: Synthetic oligonucleotide
gaaguuacccgacagcccg

SEQ ID NO: 2052882 - RNA, 19 nt, Artificial Sequence
  Description of Artificial Sequence: Synthetic oligonucleotide
cuuguaucaucgaagagag

SEQ ID NO: 2052883 - RNA, 19 nt, Artificial Sequence
  Description of Artificial Sequence: Synthetic oligonucleotide
uaggccauagccauauugg

SEQ ID NO: 2052884 - RNA, 19 nt, Artificial Sequence
  Description of Artificial Sequence: Synthetic oligonucleotide
aagaccaacaguccuagcu

SEQ ID NO: 2052885 - RNA, 19 nt, Artificial Sequence
  Description of Artificial Sequence: Synthetic oligonucleotide
cuugaguuuguucacagag

SEQ ID NO: 2052886 - RNA, 19 nt, Artificial Sequence
  Description of Artificial Sequence: Synthetic oligonucleotide
aacaccucuggggagaacc

SEQ ID NO: 2052887 - RNA, 19 nt, Artificial Sequence
  Description of Artificial Sequence: Synthetic oligonucleotide
aaucagugccaccugggac

SEQ ID NO: 2052888 - RNA, 19 nt, Artificial Sequence
  Description of Artificial Sequence: Synthetic oligonucleotide
uaagccauggccacgacga

SEQ ID NO: 2052889 - RNA, 19 nt, Artificial Sequence
  Description of Artificial Sequence: Synthetic oligonucleotide
uguguguaggggaagacca

SEQ ID NO: 2052890 - RNA, 19 nt, Artificial Sequence
  Description of Artificial Sequence: Synthetic oligonucleotide
uauuuguaaccgcuguagg

SEQ ID NO: 2052891 - RNA, 19 nt, Artificial Sequence
  Description of Artificial Sequence: Synthetic oligonucleotide
auagccaccacuuguauca

SEQ ID NO: 2052892 - RNA, 19 nt, Artificial Sequence
  Description of Artificial Sequence: Synthetic oligonucleotide
acaaugaaguacauaagcg

SEQ ID NO: 2052893 - RNA, 19 nt, Artificial Sequence
  Description of Artificial Sequence: Synthetic oligonucleotide
agugauaagccauggccac

SEQ ID NO: 2052894 - RNA, 19 nt, Artificial Sequence
  Description of Artificial Sequence: Synthetic oligonucleotide
cugcaguccgcaaagaacg

SEQ ID NO: 2052895 - RNA, 19 nt, Artificial Sequence
  Description of Artificial Sequence: Synthetic oligonucleotide
uuuguaaccgcuguaggcc

SEQ ID NO: 2052896 - RNA, 19 nt, Artificial Sequence
  Description of Artificial Sequence: Synthetic oligonucleotide
auaagcgcggaugaugucc

SEQ ID NO: 2052897 - RNA, 19 nt, Artificial Sequence
  Description of Artificial Sequence: Synthetic oligonucleotide
acauaguagccaucgcugc

SEQ ID NO: 2052898 - RNA, 19 nt, Artificial Sequence
  Description of Artificial Sequence: Synthetic oligonucleotide
acuguauugcauuuuccag

SEQ ID NO: 2052899 - RNA, 19 nt, Artificial Sequence
  Description of Artificial Sequence: Synthetic oligonucleotide
gaucgcucgaccuaagggc

SEQ ID NO: 2052900 - RNA, 19 nt, Artificial Sequence
  Description of Artificial Sequence: Synthetic oligonucleotide
aguuuguucacagagacaa

SEQ ID NO: 2052901 - RNA, 19 nt, Artificial Sequence
  Description of Artificial Sequence: Synthetic oligonucleotide
acuuguaucaucgaagaga

SEQ ID NO: 2052902 - RNA, 19 nt, Artificial Sequence
  Description of Artificial Sequence: Synthetic oligonucleotide
gugaugaaggccauggugg

SEQ ID NO: 2052903 - RNA, 19 nt, Artificial Sequence
  Description of Artificial Sequence: Synthetic oligonucleotide
gaagguacucaguucacug

SEQ ID NO: 2052904 - RNA, 19 nt, Artificial Sequence
  Description of Artificial Sequence: Synthetic oligonucleotide
aguacauaagcgcggauga

SEQ ID NO: 2052905 - RNA, 19 nt, Artificial Sequence
  Description of Artificial Sequence: Synthetic oligonucleotide
uguaggggaagaccaacag

SEQ ID NO: 2052906 - RNA, 19 nt, Artificial Sequence
  Description of Artificial Sequence: Synthetic oligonucleotide
ugaaggcuacaucagcucc

SEQ ID NO: 2052907 - RNA, 19 nt, Artificial Sequence
  Description of Artificial Sequence: Synthetic oligonucleotide
aaaacggugcagcucuuug

SEQ ID NO: 2052908 - RNA, 19 nt, Artificial Sequence
  Description of Artificial Sequence: Synthetic oligonucleotide
uaucaucgaagagaggagg

SEQ ID NO: 2052909 - RNA, 19 nt, Artificial Sequence
  Description of Artificial Sequence: Synthetic oligonucleotide
agccauauuggccacuggg

SEQ ID NO: 2052910 - RNA, 19 nt, Artificial Sequence
  Description of Artificial Sequence: Synthetic oligonucleotide
aaguacauaagcgcggaug

SEQ ID NO: 2052911 - RNA, 19 nt, Artificial Sequence
  Description of Artificial Sequence: Synthetic oligonucleotide
agcacauaggugaugaagg

SEQ ID NO: 2052912 - RNA, 19 nt, Artificial Sequence
  Description of Artificial Sequence: Synthetic oligonucleotide
cacaucaugacuguauugc

SEQ ID NO: 2052913 - RNA, 19 nt, Artificial Sequence
  Description of Artificial Sequence: Synthetic oligonucleotide
guaucaccggaccaggugg

SEQ ID NO: 2052914 - RNA, 19 nt, Artificial Sequence
  Description of Artificial Sequence: Synthetic oligonucleotide
uggaauagccaccacuugu

SEQ ID NO: 2052915 - RNA, 19 nt, Artificial Sequence
  Description of Artificial Sequence: Synthetic oligonucleotide
agaacgcacaaugaaguac

SEQ ID NO: 2052916 - RNA, 19 nt, Artificial Sequence
  Description of Artificial Sequence: Synthetic oligonucleotide
auccccacauauuuguaac

SEQ ID NO: 2052917 - RNA, 19 nt, Artificial Sequence
  Description of Artificial Sequence: Synthetic oligonucleotide
accgcuguaggccaagagg

SEQ ID NO: 2052918 - RNA, 19 nt, Artificial Sequence
  Description of Artificial Sequence: Synthetic oligonucleotide
auaggccauagccauauug

SEQ ID NO: 2052919 - RNA, 19 nt, Artificial Sequence
  Description of Artificial Sequence: Synthetic oligonucleotide
ugagucguggguacaaaca

SEQ ID NO: 2052920 - RNA, 19 nt, Artificial Sequence
  Description of Artificial Sequence: Synthetic oligonucleotide
gaaaucaaaucuucaaugu

SEQ ID NO: 2052921 - RNA, 19 nt, Artificial Sequence
  Description of Artificial Sequence: Synthetic oligonucleotide
cuauggagcugccauaggc

SEQ ID NO: 2052922 - RNA, 19 nt, Artificial Sequence
  Description of Artificial Sequence: Synthetic oligonucleotide
uacucaaacaguugcuucu

SEQ ID NO: 2052923 - RNA, 19 nt, Artificial Sequence
  Description of Artificial Sequence: Synthetic oligonucleotide
ugugaucacacugaggauc

SEQ ID NO: 2052924 - RNA, 19 nt, Artificial Sequence
  Description of Artificial Sequence: Synthetic oligonucleotide
aggaaaucaaaucuucaau

SEQ ID NO: 2052925 - RNA, 19 nt, Artificial Sequence
  Description of Artificial Sequence: Synthetic oligonucleotide
ucacagagacaaaacggug

SEQ ID NO: 2052926 - RNA, 19 nt, Artificial Sequence
  Description of Artificial Sequence: Synthetic oligonucleotide
accgaaguuacccgacagc

SEQ ID NO: 2052927 - RNA, 19 nt, Artificial Sequence
  Description of Artificial Sequence: Synthetic oligonucleotide
gagcauugaggucuuuccg

SEQ ID NO: 2052928 - RNA, 19 nt, Artificial Sequence
  Description of Artificial Sequence: Synthetic oligonucleotide
uacuugaguuuguucacag

SEQ ID NO: 2052929 - RNA, 19 nt, Artificial Sequence
  Description of Artificial Sequence: Synthetic oligonucleotide
uugaguuuguucacagaga

SEQ ID NO: 2052930 - RNA, 19 nt, Artificial Sequence
  Description of Artificial Sequence: Synthetic oligonucleotide
uuacccgacagcccgacac

SEQ ID NO: 2052931 - RNA, 19 nt, Artificial Sequence
  Description of Artificial Sequence: Synthetic oligonucleotide
uguauugcauuuuccaguu

SEQ ID NO: 2052932 - RNA, 19 nt, Artificial Sequence
  Description of Artificial Sequence: Synthetic oligonucleotide
auaagccauggccacgacg

SEQ ID NO: 2052933 - RNA, 19 nt, Artificial Sequence
  Description of Artificial Sequence: Synthetic oligonucleotide
gcugccauaggccauagcc

SEQ ID NO: 2052934 - RNA, 19 nt, Artificial Sequence
  Description of Artificial Sequence: Synthetic oligonucleotide
acaguccuagcuucuuggc

SEQ ID NO: 2052935 - RNA, 19 nt, Artificial Sequence
  Description of Artificial Sequence: Synthetic oligonucleotide
aucauccccacauauuugu

SEQ ID NO: 2052936 - RNA, 19 nt, Artificial Sequence
  Description of Artificial Sequence: Synthetic oligonucleotide
uacauaagcgcggaugaug

SEQ ID NO: 2052937 - RNA, 19 nt, Artificial Sequence
  Description of Artificial Sequence: Synthetic oligonucleotide
cuucucucgcucaacacug

SEQ ID NO: 2052938 - RNA, 19 nt, Artificial Sequence
  Description of Artificial Sequence: Synthetic oligonucleotide
caguucacugcguacagug

SEQ ID NO: 2052939 - RNA, 19 nt, Artificial Sequence
  Description of Artificial Sequence: Synthetic oligonucleotide
aacaguugcuucucucgcu

SEQ ID NO: 2052940 - RNA, 19 nt, Artificial Sequence
  Description of Artificial Sequence: Synthetic oligonucleotide
uggguacaaacacuacuca

SEQ ID NO: 2052941 - RNA, 19 nt, Artificial Sequence
  Description of Artificial Sequence: Synthetic oligonucleotide
aacacuacucaaacaguug

SEQ ID NO: 2052942 - RNA, 19 nt, Artificial Sequence
  Description of Artificial Sequence: Synthetic oligonucleotide
auaguagccaucgcugccg

SEQ ID NO: 2052943 - RNA, 19 nt, Artificial Sequence
  Description of Artificial Sequence: Synthetic oligonucleotide
gacaaaacggugcagcucu

SEQ ID NO: 2052944 - RNA, 19 nt, Artificial Sequence
  Description of Artificial Sequence: Synthetic oligonucleotide
gagucguggguacaaacac

SEQ ID NO: 2052945 - RNA, 19 nt, Artificial Sequence
  Description of Artificial Sequence: Synthetic oligonucleotide
aaacggugcagcucuuugu

SEQ ID NO: 2052946 - RNA, 19 nt, Artificial Sequence
  Description of Artificial Sequence: Synthetic oligonucleotide
aaacacuacucaaacaguu

SEQ ID NO: 2052947 - RNA, 19 nt, Artificial Sequence
  Description of Artificial Sequence: Synthetic oligonucleotide
guggaagguacucaguuca

SEQ ID NO: 2052948 - RNA, 19 nt, Artificial Sequence
  Description of Artificial Sequence: Synthetic oligonucleotide
uucacugcguacaguggcc

SEQ ID NO: 2052949 - RNA, 19 nt, Artificial Sequence
  Description of Artificial Sequence: Synthetic oligonucleotide
ucgaccuaagggcuggcug

SEQ ID NO: 2052950 - RNA, 19 nt, Artificial Sequence
  Description of Artificial Sequence: Synthetic oligonucleotide
ugcuauggagcugccauag

SEQ ID NO: 2052951 - RNA, 19 nt, Artificial Sequence
  Description of Artificial Sequence: Synthetic oligonucleotide
gaacgcacaaugaaguaca

SEQ ID NO: 2052952 - RNA, 19 nt, Artificial Sequence
  Description of Artificial Sequence: Synthetic oligonucleotide
aaccuuuucugaaugccca

SEQ ID NO: 2052953 - RNA, 19 nt, Artificial Sequence
  Description of Artificial Sequence: Synthetic oligonucleotide
aucaugacuguauugcauu

SEQ ID NO: 2052954 - RNA, 19 nt, Artificial Sequence
  Description of Artificial Sequence: Synthetic oligonucleotide
uugugcacuauguccuucc

SEQ ID NO: 2052955 - RNA, 19 nt, Artificial Sequence
  Description of Artificial Sequence: Synthetic oligonucleotide
ugaaguacauaagcgcgga

SEQ ID NO: 2052956 - RNA, 19 nt, Artificial Sequence
  Description of Artificial Sequence: Synthetic oligonucleotide
uguccuucccuugggaugc

SEQ ID NO: 2052957 - RNA, 19 nt, Artificial Sequence
  Description of Artificial Sequence: Synthetic oligonucleotide
cuggguauccgccugggug

SEQ ID NO: 2052958 - RNA, 19 nt, Artificial Sequence
  Description of Artificial Sequence: Synthetic oligonucleotide
cauaguagccaucgcugcc

SEQ ID NO: 2052959 - RNA, 19 nt, Artificial Sequence
  Description of Artificial Sequence: Synthetic oligonucleotide
ucaucgaagagaggaggag

SEQ ID NO: 2052960 - RNA, 19 nt, Artificial Sequence
  Description of Artificial Sequence: Synthetic oligonucleotide
acaucaugacuguauugca

SEQ ID NO: 2052961 - RNA, 19 nt, Artificial Sequence
  Description of Artificial Sequence: Synthetic oligonucleotide
cacuauguccuucccuugg

SEQ ID NO: 2052962 - RNA, 19 nt, Artificial Sequence
  Description of Artificial Sequence: Synthetic oligonucleotide
ugauaagccauggccacga

SEQ ID NO: 2052963 - RNA, 19 nt, Artificial Sequence
  Description of Artificial Sequence: Synthetic oligonucleotide
guaaaugaugaggggcugg

SEQ ID NO: 2052964 - RNA, 19 nt, Artificial Sequence
  Description of Artificial Sequence: Synthetic oligonucleotide
aagaacgcacaaugaagua

SEQ ID NO: 2052965 - RNA, 19 nt, Artificial Sequence
  Description of Artificial Sequence: Synthetic oligonucleotide
cacaccagugcugugcugg

SEQ ID NO: 2052966 - RNA, 19 nt, Artificial Sequence
  Description of Artificial Sequence: Synthetic oligonucleotide
uaagcgcggaugaugucca

SEQ ID NO: 2052967 - RNA, 19 nt, Artificial Sequence
  Description of Artificial Sequence: Synthetic oligonucleotide
gaccgaaguuacccgacag

SEQ ID NO: 2052968 - RNA, 19 nt, Artificial Sequence
  Description of Artificial Sequence: Synthetic oligonucleotide
auauuggccacugggucuc

SEQ ID NO: 2052969 - RNA, 19 nt, Artificial Sequence
  Description of Artificial Sequence: Synthetic oligonucleotide
cauugaggucuuuccgugg

SEQ ID NO: 2052970 - RNA, 19 nt, Artificial Sequence
  Description of Artificial Sequence: Synthetic oligonucleotide
caccggaccagguggaagg

SEQ ID NO: 2052971 - RNA, 19 nt, Artificial Sequence
  Description of Artificial Sequence: Synthetic oligonucleotide
aaccgcuguaggccaagag

SEQ ID NO: 2052972 - RNA, 19 nt, Artificial Sequence
  Description of Artificial Sequence: Synthetic oligonucleotide
uuguaaccgcuguaggcca

SEQ ID NO: 2052973 - RNA, 19 nt, Artificial Sequence
  Description of Artificial Sequence: Synthetic oligonucleotide
uggggagaaccuuuucuga

SEQ ID NO: 2052974 - RNA, 19 nt, Artificial Sequence
  Description of Artificial Sequence: Synthetic oligonucleotide
ugccauaggccauagccau

SEQ ID NO: 2052975 - RNA, 19 nt, Artificial Sequence
  Description of Artificial Sequence: Synthetic oligonucleotide
ggagcauugaggucuuucc

SEQ ID NO: 2052976 - RNA, 19 nt, Artificial Sequence
  Description of Artificial Sequence: Synthetic oligonucleotide
acugaccgaaguuacccga

SEQ ID NO: 2052977 - RNA, 19 nt, Artificial Sequence
  Description of Artificial Sequence: Synthetic oligonucleotide
cuacaucagcuccuggggc

SEQ ID NO: 2052978 - RNA, 19 nt, Artificial Sequence
  Description of Artificial Sequence: Synthetic oligonucleotide
agacaaaacggugcagcuc

SEQ ID NO: 2052979 - RNA, 19 nt, Artificial Sequence
  Description of Artificial Sequence: Synthetic oligonucleotide
aagagguggaagguacuca

SEQ ID NO: 2052980 - RNA, 19 nt, Artificial Sequence
  Description of Artificial Sequence: Synthetic oligonucleotide
uacccgacagcccgacacg

SEQ ID NO: 2052981 - RNA, 19 nt, Artificial Sequence
  Description of Artificial Sequence: Synthetic oligonucleotide
uccccacauauuuguaacc

SEQ ID NO: 2052982 - RNA, 19 nt, Artificial Sequence
  Description of Artificial Sequence: Synthetic oligonucleotide
guaucaucgaagagaggag

SEQ ID NO: 2052983 - RNA, 19 nt, Artificial Sequence
  Description of Artificial Sequence: Synthetic oligonucleotide
uuguaucaucgaagagagg

SEQ ID NO: 2052984 - RNA, 19 nt, Artificial Sequence
  Description of Artificial Sequence: Synthetic oligonucleotide
cgagugauaagccauggcc

SEQ ID NO: 2052985 - RNA, 19 nt, Artificial Sequence
  Description of Artificial Sequence: Synthetic oligonucleotide
ugugcacuauguccuuccc

SEQ ID NO: 2052986 - RNA, 19 nt, Artificial Sequence
  Description of Artificial Sequence: Synthetic oligonucleotide
uccguaucccgagugauaa

SEQ ID NO: 2052987 - RNA, 19 nt, Artificial Sequence
  Description of Artificial Sequence: Synthetic oligonucleotide
acauaagcgcggaugaugu

SEQ ID NO: 2052988 - RNA, 19 nt, Artificial Sequence
  Description of Artificial Sequence: Synthetic oligonucleotide
aaggccaugguggggauau

SEQ ID NO: 2052989 - RNA, 19 nt, Artificial Sequence
  Description of Artificial Sequence: Synthetic oligonucleotide
agaccaacaguccuagcuu

SEQ ID NO: 2052990 - RNA, 19 nt, Artificial Sequence
  Description of Artificial Sequence: Synthetic oligonucleotide
acucaguucacugcguaca

SEQ ID NO: 2052991 - RNA, 19 nt, Artificial Sequence
  Description of Artificial Sequence: Synthetic oligonucleotide
ucugaaugcccagugccgu

SEQ ID NO: 2052992 - RNA, 19 nt, Artificial Sequence
  Description of Artificial Sequence: Synthetic oligonucleotide
ccaguaaaugaugaggggc

SEQ ID NO: 2052993 - RNA, 19 nt, Artificial Sequence
  Description of Artificial Sequence: Synthetic oligonucleotide
gaugaaggccauggugggg

SEQ ID NO: 2052994 - RNA, 19 nt, Artificial Sequence
  Description of Artificial Sequence: Synthetic oligonucleotide
auggccacgacgaucgcuc

SEQ ID NO: 2052995 - RNA, 19 nt, Artificial Sequence
  Description of Artificial Sequence: Synthetic oligonucleotide
cacugaccgaaguuacccg

SEQ ID NO: 2052996 - RNA, 19 nt, Artificial Sequence
  Description of Artificial Sequence: Synthetic oligonucleotide
gaccaacaguccuagcuuc

SEQ ID NO: 2052997 - RNA, 19 nt, Artificial Sequence
  Description of Artificial Sequence: Synthetic oligonucleotide
gaggagaaucuggagcugc

SEQ ID NO: 2052998 - RNA, 19 nt, Artificial Sequence
  Description of Artificial Sequence: Synthetic oligonucleotide
uguguaggggaagaccaac

SEQ ID NO: 2052999 - RNA, 19 nt, Artificial Sequence
  Description of Artificial Sequence: Synthetic oligonucleotide
aggagcauugaggucuuuc

SEQ ID NO: 2053000 - RNA, 19 nt, Artificial Sequence
  Description of Artificial Sequence: Synthetic oligonucleotide
aggggaagaccaacagucc

SEQ ID NO: 2053001 - RNA, 19 nt, Artificial Sequence
  Description of Artificial Sequence: Synthetic oligonucleotide
ugaccgaaguuacccgaca

SEQ ID NO: 2053002 - RNA, 19 nt, Artificial Sequence
  Description of Artificial Sequence: Synthetic oligonucleotide
acaggcccaacaccucugg

SEQ ID NO: 2053003 - RNA, 19 nt, Artificial Sequence
  Description of Artificial Sequence: Synthetic oligonucleotide
auagccauauuggccacug

SEQ ID NO: 2053004 - RNA, 19 nt, Artificial Sequence
  Description of Artificial Sequence: Synthetic oligonucleotide
acgaucgcucgaccuaagg

SEQ ID NO: 2053005 - RNA, 19 nt, Artificial Sequence
  Description of Artificial Sequence: Synthetic oligonucleotide
gaucauccccacauauuug

SEQ ID NO: 2053006 - RNA, 19 nt, Artificial Sequence
  Description of Artificial Sequence: Synthetic oligonucleotide
ugaaugcccagugccgucc

SEQ ID NO: 2053007 - RNA, 19 nt, Artificial Sequence
  Description of Artificial Sequence: Synthetic oligonucleotide
uacucaguucacugcguac

SEQ ID NO: 2053008 - RNA, 19 nt, Artificial Sequence
  Description of Artificial Sequence: Synthetic oligonucleotide
cugaaggcuacaucagcuc

SEQ ID NO: 2053009 - RNA, 19 nt, Artificial Sequence
  Description of Artificial Sequence: Synthetic oligonucleotide
ucccuugggaugcuaugga

SEQ ID NO: 2053010 - RNA, 19 nt, Artificial Sequence
  Description of Artificial Sequence: Synthetic oligonucleotide
ucccagggcuggccgaucg

SEQ ID NO: 2053011 - RNA, 19 nt, Artificial Sequence
  Description of Artificial Sequence: Synthetic oligonucleotide
aaggcuacaucagcuccug

SEQ ID NO: 2053012 - RNA, 19 nt, Artificial Sequence
  Description of Artificial Sequence: Synthetic oligonucleotide
aguaaaugaugaggggcug

SEQ ID NO: 2053013 - RNA, 19 nt, Artificial Sequence
  Description of Artificial Sequence: Synthetic oligonucleotide
uaucaccggaccaggugga

SEQ ID NO: 2053014 - RNA, 19 nt, Artificial Sequence
  Description of Artificial Sequence: Synthetic oligonucleotide
cagguagagcuggagacgc

SEQ ID NO: 2053015 - RNA, 19 nt, Artificial Sequence
  Description of Artificial Sequence: Synthetic oligonucleotide
ucccgagugauaagccaug

SEQ ID NO: 2053016 - RNA, 19 nt, Artificial Sequence
  Description of Artificial Sequence: Synthetic oligonucleotide
agcccgacacgucccaggg

SEQ ID NO: 2053017 - RNA, 19 nt, Artificial Sequence
  Description of Artificial Sequence: Synthetic oligonucleotide
agagcagcccugugaucac

SEQ ID NO: 2053018 - RNA, 19 nt, Artificial Sequence
  Description of Artificial Sequence: Synthetic oligonucleotide
acuugaguuuguucacaga

SEQ ID NO: 2053019 - RNA, 19 nt, Artificial Sequence
  Description of Artificial Sequence: Synthetic oligonucleotide
agaggcacaucaugacugu

SEQ ID NO: 2053020 - RNA, 19 nt, Artificial Sequence
  Description of Artificial Sequence: Synthetic oligonucleotide
ccaugguggggauauagag

SEQ ID NO: 2053021 - RNA, 19 nt, Artificial Sequence
  Description of Artificial Sequence: Synthetic oligonucleotide
ucgcucaacacugaccgaa

SEQ ID NO: 2053022 - RNA, 19 nt, Artificial Sequence
  Description of Artificial Sequence: Synthetic oligonucleotide
uggaagguacucaguucac

SEQ ID NO: 2053023 - RNA, 19 nt, Artificial Sequence
  Description of Artificial Sequence: Synthetic oligonucleotide
acugcguacaguggccagg

SEQ ID NO: 2053024 - RNA, 19 nt, Artificial Sequence
  Description of Artificial Sequence: Synthetic oligonucleotide
ucuuggcuacauaggcugu

SEQ ID NO: 2053025 - RNA, 19 nt, Artificial Sequence
  Description of Artificial Sequence: Synthetic oligonucleotide
uccaguucugaugugugua

SEQ ID NO: 2053026 - RNA, 19 nt, Artificial Sequence
  Description of Artificial Sequence: Synthetic oligonucleotide
ugcucugagucguggguac

SEQ ID NO: 2053027 - RNA, 19 nt, Artificial Sequence
  Description of Artificial Sequence: Synthetic oligonucleotide
cacuuguaucaucgaagag

SEQ ID NO: 2053028 - RNA, 19 nt, Artificial Sequence
  Description of Artificial Sequence: Synthetic oligonucleotide
gcaaagaacgcacaaugaa

SEQ ID NO: 2053029 - RNA, 19 nt, Artificial Sequence
  Description of Artificial Sequence: Synthetic oligonucleotide
cuggagacgcugcccaggg

SEQ ID NO: 2053030 - RNA, 19 nt, Artificial Sequence
  Description of Artificial Sequence: Synthetic oligonucleotide
gucaggagcauugaggucu

SEQ ID NO: 2053031 - RNA, 19 nt, Artificial Sequence
  Description of Artificial Sequence: Synthetic oligonucleotide
gguaucaccggaccaggug

SEQ ID NO: 2053032 - RNA, 19 nt, Artificial Sequence
  Description of Artificial Sequence: Synthetic oligonucleotide
uagccauauuggccacugg

SEQ ID NO: 2053033 - RNA, 19 nt, Artificial Sequence
  Description of Artificial Sequence: Synthetic oligonucleotide
acuacucaaacaguugcuu

SEQ ID NO: 2053034 - RNA, 19 nt, Artificial Sequence
  Description of Artificial Sequence: Synthetic oligonucleotide
cgcacaaugaaguacauaa

SEQ ID NO: 2053035 - RNA, 19 nt, Artificial Sequence
  Description of Artificial Sequence: Synthetic oligonucleotide
ggccacauaguagccaucg

SEQ ID NO: 2053036 - RNA, 19 nt, Artificial Sequence
  Description of Artificial Sequence: Synthetic oligonucleotide
auacuugaguuuguucaca

SEQ ID NO: 2053037 - RNA, 19 nt, Artificial Sequence
  Description of Artificial Sequence: Synthetic oligonucleotide
cuugggaugcuauggagcu

SEQ ID NO: 2053038 - RNA, 19 nt, Artificial Sequence
  Description of Artificial Sequence: Synthetic oligonucleotide
ccuugggaugcuauggagc

SEQ ID NO: 2053039 - RNA, 19 nt, Artificial Sequence
  Description of Artificial Sequence: Synthetic oligonucleotide
cugaccgaaguuacccgac

SEQ ID NO: 2053040 - RNA, 19 nt, Artificial Sequence
  Description of Artificial Sequence: Synthetic oligonucleotide
gaagagaggaggagaaucu

SEQ ID NO: 2053041 - RNA, 19 nt, Artificial Sequence
  Description of Artificial Sequence: Synthetic oligonucleotide
caguucugauguguguagg

SEQ ID NO: 2053042 - RNA, 19 nt, Artificial Sequence
  Description of Artificial Sequence: Synthetic oligonucleotide
caguaaaugaugaggggcu

SEQ ID NO: 2053043 - RNA, 19 nt, Artificial Sequence
  Description of Artificial Sequence: Synthetic oligonucleotide
guaucccgagugauaagcc

SEQ ID NO: 2053044 - RNA, 19 nt, Artificial Sequence
  Description of Artificial Sequence: Synthetic oligonucleotide
aucaucgaagagaggagga

SEQ ID NO: 2053045 - RNA, 19 nt, Artificial Sequence
  Description of Artificial Sequence: Synthetic oligonucleotide
gugauaagccauggccacg

SEQ ID NO: 2053046 - RNA, 19 nt, Artificial Sequence
  Description of Artificial Sequence: Synthetic oligonucleotide
aguuacccgacagcccgac

SEQ ID NO: 2053047 - RNA, 19 nt, Artificial Sequence
  Description of Artificial Sequence: Synthetic oligonucleotide
ugggaccagguaucaccgg

SEQ ID NO: 2053048 - RNA, 19 nt, Artificial Sequence
  Description of Artificial Sequence: Synthetic oligonucleotide
ccaagcaggugguugacac

SEQ ID NO: 2053049 - RNA, 19 nt, Artificial Sequence
  Description of Artificial Sequence: Synthetic oligonucleotide
cuggaauagccaccacuug

SEQ ID NO: 2053050 - RNA, 19 nt, Artificial Sequence
  Description of Artificial Sequence: Synthetic oligonucleotide
gcacauaggugaugaaggc

SEQ ID NO: 2053051 - RNA, 19 nt, Artificial Sequence
  Description of Artificial Sequence: Synthetic oligonucleotide
aaucuggagcugcccgggu

SEQ ID NO: 2053052 - RNA, 19 nt, Artificial Sequence
  Description of Artificial Sequence: Synthetic oligonucleotide
gcauugaggucuuuccgug

SEQ ID NO: 2053053 - RNA, 19 nt, Artificial Sequence
  Description of Artificial Sequence: Synthetic oligonucleotide
aucgaagagaggaggagaa

SEQ ID NO: 2053054 - RNA, 19 nt, Artificial Sequence
  Description of Artificial Sequence: Synthetic oligonucleotide
agcugcccggguccugugc

SEQ ID NO: 2053055 - RNA, 19 nt, Artificial Sequence
  Description of Artificial Sequence: Synthetic oligonucleotide
ccgcaaagaacgcacaaug

SEQ ID NO: 2053056 - RNA, 19 nt, Artificial Sequence
  Description of Artificial Sequence: Synthetic oligonucleotide
ccgaaguuacccgacagcc

SEQ ID NO: 2053057 - RNA, 19 nt, Artificial Sequence
  Description of Artificial Sequence: Synthetic oligonucleotide
gagcuggagacgcugccca

SEQ ID NO: 2053058 - RNA, 19 nt, Artificial Sequence
  Description of Artificial Sequence: Synthetic oligonucleotide
gaagaccaacaguccuagc

SEQ ID NO: 2053059 - RNA, 19 nt, Artificial Sequence
  Description of Artificial Sequence: Synthetic oligonucleotide
ucguggguacaaacacuac

SEQ ID NO: 2053060 - RNA, 19 nt, Artificial Sequence
  Description of Artificial Sequence: Synthetic oligonucleotide
gaaccgugggcuccguauc

SEQ ID NO: 2053061 - RNA, 19 nt, Artificial Sequence
  Description of Artificial Sequence: Synthetic oligonucleotide
uccgcaaagaacgcacaau

SEQ ID NO: 2053062 - RNA, 19 nt, Artificial Sequence
  Description of Artificial Sequence: Synthetic oligonucleotide
uaguagccaucgcugccga

SEQ ID NO: 2053063 - RNA, 19 nt, Artificial Sequence
  Description of Artificial Sequence: Synthetic oligonucleotide
ggguccugugcuuggaacc

SEQ ID NO: 2053064 - RNA, 19 nt, Artificial Sequence
  Description of Artificial Sequence: Synthetic oligonucleotide
ucauccccacauauuugua

SEQ ID NO: 2053065 - RNA, 19 nt, Artificial Sequence
  Description of Artificial Sequence: Synthetic oligonucleotide
cagguaucaccggaccagg

SEQ ID NO: 2053066 - RNA, 19 nt, Artificial Sequence
  Description of Artificial Sequence: Synthetic oligonucleotide
uguaaccgcuguaggccaa

SEQ ID NO: 2053067 - RNA, 19 nt, Artificial Sequence
  Description of Artificial Sequence: Synthetic oligonucleotide
ucaccggaccagguggaag

SEQ ID NO: 2053068 - RNA, 19 nt, Artificial Sequence
  Description of Artificial Sequence: Synthetic oligonucleotide
gugguugacacugaaggcu

SEQ ID NO: 2053069 - RNA, 19 nt, Artificial Sequence
  Description of Artificial Sequence: Synthetic oligonucleotide
cauauuuguaaccgcugua

SEQ ID NO: 2053070 - RNA, 19 nt, Artificial Sequence
  Description of Artificial Sequence: Synthetic oligonucleotide
cauccccacauauuuguaa

SEQ ID NO: 2053071 - RNA, 19 nt, Artificial Sequence
  Description of Artificial Sequence: Synthetic oligonucleotide
cuuggcuacauaggcugug

SEQ ID NO: 2053072 - RNA, 19 nt, Artificial Sequence
  Description of Artificial Sequence: Synthetic oligonucleotide
uauccgccuggguggcugg

SEQ ID NO: 2053073 - RNA, 19 nt, Artificial Sequence
  Description of Artificial Sequence: Synthetic oligonucleotide
cauauuggccacugggucu

SEQ ID NO: 2053074 - RNA, 19 nt, Artificial Sequence
  Description of Artificial Sequence: Synthetic oligonucleotide
agccaccacuuguaucauc

SEQ ID NO: 2053075 - RNA, 19 nt, Artificial Sequence
  Description of Artificial Sequence: Synthetic oligonucleotide
ccccacauauuuguaaccg

SEQ ID NO: 2053076 - RNA, 19 nt, Artificial Sequence
  Description of Artificial Sequence: Synthetic oligonucleotide
agcugccauaggccauagc

SEQ ID NO: 2053077 - RNA, 19 nt, Artificial Sequence
  Description of Artificial Sequence: Synthetic oligonucleotide
ucacugcguacaguggcca

SEQ ID NO: 2053078 - RNA, 19 nt, Artificial Sequence
  Description of Artificial Sequence: Synthetic oligonucleotide
accgugggcuccguauccc

SEQ ID NO: 2053079 - RNA, 19 nt, Artificial Sequence
  Description of Artificial Sequence: Synthetic oligonucleotide
acugaggaucauccccaca

SEQ ID NO: 2053080 - RNA, 19 nt, Artificial Sequence
  Description of Artificial Sequence: Synthetic oligonucleotide
caucgaagagaggaggaga

SEQ ID NO: 2053081 - RNA, 19 nt, Artificial Sequence
  Description of Artificial Sequence: Synthetic oligonucleotide
aucgcucgaccuaagggcu

SEQ ID NO: 2053082 - RNA, 19 nt, Artificial Sequence
  Description of Artificial Sequence: Synthetic oligonucleotide
cagcucuuugugcacuaug

SEQ ID NO: 2053083 - RNA, 19 nt, Artificial Sequence
  Description of Artificial Sequence: Synthetic oligonucleotide
ucaguucacugcguacagu

SEQ ID NO: 2053084 - RNA, 19 nt, Artificial Sequence
  Description of Artificial Sequence: Synthetic oligonucleotide
agugccgucccagccagca

SEQ ID NO: 2053085 - RNA, 19 nt, Artificial Sequence
  Description of Artificial Sequence: Synthetic oligonucleotide
ggggcagaggcacaucaug

SEQ ID NO: 2053086 - RNA, 19 nt, Artificial Sequence
  Description of Artificial Sequence: Synthetic oligonucleotide
cugugcuggcacacaggcc

SEQ ID NO: 2053087 - RNA, 19 nt, Artificial Sequence
  Description of Artificial Sequence: Synthetic oligonucleotide
acgacgaucgcucgaccua

SEQ ID NO: 2053088 - RNA, 19 nt, Artificial Sequence
  Description of Artificial Sequence: Synthetic oligonucleotide
cccacauauuuguaaccgc

SEQ ID NO: 2053089 - RNA, 19 nt, Artificial Sequence
  Description of Artificial Sequence: Synthetic oligonucleotide
ccaguucugauguguguag

SEQ ID NO: 2053090 - RNA, 19 nt, Artificial Sequence
  Description of Artificial Sequence: Synthetic oligonucleotide
gaguuuguucacagagaca

SEQ ID NO: 2053091 - RNA, 19 nt, Artificial Sequence
  Description of Artificial Sequence: Synthetic oligonucleotide
cacgucccagggcuggccg

SEQ ID NO: 2053092 - RNA, 19 nt, Artificial Sequence
  Description of Artificial Sequence: Synthetic oligonucleotide
uggccacgacgaucgcucg

SEQ ID NO: 2053093 - RNA, 19 nt, Artificial Sequence
  Description of Artificial Sequence: Synthetic oligonucleotide
agucguggguacaaacacu

SEQ ID NO: 2053094 - RNA, 19 nt, Artificial Sequence
  Description of Artificial Sequence: Synthetic oligonucleotide
cugccgaagagcagcccug

SEQ ID NO: 2053095 - RNA, 19 nt, Artificial Sequence
  Description of Artificial Sequence: Synthetic oligonucleotide
gcacaucaugacuguauug

SEQ ID NO: 2053096 - RNA, 19 nt, Artificial Sequence
  Description of Artificial Sequence: Synthetic oligonucleotide
gauaagccauggccacgac

SEQ ID NO: 2053097 - RNA, 19 nt, Artificial Sequence
  Description of Artificial Sequence: Synthetic oligonucleotide
ucgcucgaccuaagggcug

SEQ ID NO: 2053098 - RNA, 19 nt, Artificial Sequence
  Description of Artificial Sequence: Synthetic oligonucleotide
cugauguguguaggggaag

SEQ ID NO: 2053099 - RNA, 19 nt, Artificial Sequence
  Description of Artificial Sequence: Synthetic oligonucleotide
ggcagaggcacaucaugac

SEQ ID NO: 2053100 - RNA, 19 nt, Artificial Sequence
  Description of Artificial Sequence: Synthetic oligonucleotide
gcacaaugaaguacauaag

SEQ ID NO: 2053101 - RNA, 19 nt, Artificial Sequence
  Description of Artificial Sequence: Synthetic oligonucleotide
aagcgcggaugauguccag

SEQ ID NO: 2053102 - RNA, 19 nt, Artificial Sequence
  Description of Artificial Sequence: Synthetic oligonucleotide
gaugaggggcuggaaggca

SEQ ID NO: 2053103 - RNA, 19 nt, Artificial Sequence
  Description of Artificial Sequence: Synthetic oligonucleotide
cagggcuggccgaucgcgg

SEQ ID NO: 2053104 - RNA, 19 nt, Artificial Sequence
  Description of Artificial Sequence: Synthetic oligonucleotide
guaggggaagaccaacagu

SEQ ID NO: 2053105 - RNA, 19 nt, Artificial Sequence
  Description of Artificial Sequence: Synthetic oligonucleotide
acacgucccagggcuggcc

SEQ ID NO: 2053106 - RNA, 19 nt, Artificial Sequence
  Description of Artificial Sequence: Synthetic oligonucleotide
ccacuuguaucaucgaaga

SEQ ID NO: 2053107 - RNA, 19 nt, Artificial Sequence
  Description of Artificial Sequence: Synthetic oligonucleotide
cguaucccgagugauaagc

SEQ ID NO: 2053108 - RNA, 19 nt, Artificial Sequence
  Description of Artificial Sequence: Synthetic oligonucleotide
cauaagcgcggaugauguc

SEQ ID NO: 2053109 - RNA, 19 nt, Artificial Sequence
  Description of Artificial Sequence: Synthetic oligonucleotide
ggguacaaacacuacucaa

SEQ ID NO: 2053110 - RNA, 19 nt, Artificial Sequence
  Description of Artificial Sequence: Synthetic oligonucleotide
cgaucgcucgaccuaaggg

SEQ ID NO: 2053111 - RNA, 19 nt, Artificial Sequence
  Description of Artificial Sequence: Synthetic oligonucleotide
guggggauauagaggucag

SEQ ID NO: 2053112 - RNA, 19 nt, Artificial Sequence
  Description of Artificial Sequence: Synthetic oligonucleotide
gcgcggaugauguccaggc

SEQ ID NO: 2053113 - RNA, 19 nt, Artificial Sequence
  Description of Artificial Sequence: Synthetic oligonucleotide
gcugcaguccgcaaagaac

SEQ ID NO: 2053114 - RNA, 19 nt, Artificial Sequence
  Description of Artificial Sequence: Synthetic oligonucleotide
cugaaugcccagugccguc

SEQ ID NO: 2053115 - RNA, 19 nt, Artificial Sequence
  Description of Artificial Sequence: Synthetic oligonucleotide
ucugagucguggguacaaa

SEQ ID NO: 2053116 - RNA, 19 nt, Artificial Sequence
  Description of Artificial Sequence: Synthetic oligonucleotide
ucaggagcauugaggucuu

SEQ ID NO: 2053117 - RNA, 19 nt, Artificial Sequence
  Description of Artificial Sequence: Synthetic oligonucleotide
aucccgagugauaagccau

SEQ ID NO: 2053118 - RNA, 19 nt, Artificial Sequence
  Description of Artificial Sequence: Synthetic oligonucleotide
cacugcguacaguggccag

SEQ ID NO: 2053119 - RNA, 19 nt, Artificial Sequence
  Description of Artificial Sequence: Synthetic oligonucleotide
agccaucgcugccgaagag

SEQ ID NO: 2053120 - RNA, 19 nt, Artificial Sequence
  Description of Artificial Sequence: Synthetic oligonucleotide
guauccgccuggguggcug

SEQ ID NO: 2053121 - RNA, 19 nt, Artificial Sequence
  Description of Artificial Sequence: Synthetic oligonucleotide
guauugcauuuuccaguuc

SEQ ID NO: 2053122 - RNA, 19 nt, Artificial Sequence
  Description of Artificial Sequence: Synthetic oligonucleotide
aacgcacaaugaaguacau

SEQ ID NO: 2053123 - RNA, 19 nt, Artificial Sequence
  Description of Artificial Sequence: Synthetic oligonucleotide
cacugaggaucauccccac

SEQ ID NO: 2053124 - RNA, 19 nt, Artificial Sequence
  Description of Artificial Sequence: Synthetic oligonucleotide
guguaggggaagaccaaca

SEQ ID NO: 2053125 - RNA, 19 nt, Artificial Sequence
  Description of Artificial Sequence: Synthetic oligonucleotide
ugcuuggaaccgugggcuc

SEQ ID NO: 2053126 - RNA, 19 nt, Artificial Sequence
  Description of Artificial Sequence: Synthetic oligonucleotide
auauagaggucaggagcau

SEQ ID NO: 2053127 - RNA, 19 nt, Artificial Sequence
  Description of Artificial Sequence: Synthetic oligonucleotide
caucaugacuguauugcau

SEQ ID NO: 2053128 - RNA, 19 nt, Artificial Sequence
  Description of Artificial Sequence: Synthetic oligonucleotide
gaaggcuacaucagcuccu

SEQ ID NO: 2053129 - RNA, 19 nt, Artificial Sequence
  Description of Artificial Sequence: Synthetic oligonucleotide
gcuauggagcugccauagg

SEQ ID NO: 2053130 - RNA, 19 nt, Artificial Sequence
  Description of Artificial Sequence: Synthetic oligonucleotide
ugggcuccguaucccgagu

SEQ ID NO: 2053131 - RNA, 19 nt, Artificial Sequence
  Description of Artificial Sequence: Synthetic oligonucleotide
augcuauggagcugccaua

SEQ ID NO: 2053132 - RNA, 19 nt, Artificial Sequence
  Description of Artificial Sequence: Synthetic oligonucleotide
ucgaagagaggaggagaau

SEQ ID NO: 2053133 - RNA, 19 nt, Artificial Sequence
  Description of Artificial Sequence: Synthetic oligonucleotide
ccgacagcccgacacgucc

SEQ ID NO: 2053134 - RNA, 19 nt, Artificial Sequence
  Description of Artificial Sequence: Synthetic oligonucleotide
ggucagccaguaaaugaug

SEQ ID NO: 2053135 - RNA, 19 nt, Artificial Sequence
  Description of Artificial Sequence: Synthetic oligonucleotide
aaguuacccgacagcccga

SEQ ID NO: 2053136 - RNA, 19 nt, Artificial Sequence
  Description of Artificial Sequence: Synthetic oligonucleotide
guccgcaaagaacgcacaa

SEQ ID NO: 2053137 - RNA, 19 nt, Artificial Sequence
  Description of Artificial Sequence: Synthetic oligonucleotide
gacagcccgacacguccca

SEQ ID NO: 2053138 - RNA, 19 nt, Artificial Sequence
  Description of Artificial Sequence: Synthetic oligonucleotide
ggaauagccaccacuugua

SEQ ID NO: 2053139 - RNA, 19 nt, Artificial Sequence
  Description of Artificial Sequence: Synthetic oligonucleotide
aggaucauccccacauauu

SEQ ID NO: 2053140 - RNA, 19 nt, Artificial Sequence
  Description of Artificial Sequence: Synthetic oligonucleotide
cgaaguuacccgacagccc

SEQ ID NO: 2053141 - RNA, 19 nt, Artificial Sequence
  Description of Artificial Sequence: Synthetic oligonucleotide
gcuucucucgcucaacacu

SEQ ID NO: 2053142 - RNA, 19 nt, Artificial Sequence
  Description of Artificial Sequence: Synthetic oligonucleotide
aguccgcaaagaacgcaca

SEQ ID NO: 2053143 - RNA, 19 nt, Artificial Sequence
  Description of Artificial Sequence: Synthetic oligonucleotide
cccuugggaugcuauggag

SEQ ID NO: 2053144 - RNA, 19 nt, Artificial Sequence
  Description of Artificial Sequence: Synthetic oligonucleotide
uaaccgcuguaggccaaga

SEQ ID NO: 2053145 - RNA, 19 nt, Artificial Sequence
  Description of Artificial Sequence: Synthetic oligonucleotide
cuggcacacaggcccaaca

SEQ ID NO: 2053146 - RNA, 19 nt, Artificial Sequence
  Description of Artificial Sequence: Synthetic oligonucleotide
gacgaucgcucgaccuaag

SEQ ID NO: 2053147 - RNA, 19 nt, Artificial Sequence
  Description of Artificial Sequence: Synthetic oligonucleotide
gugcuuggaaccgugggcu

SEQ ID NO: 2053148 - RNA, 19 nt, Artificial Sequence
  Description of Artificial Sequence: Synthetic oligonucleotide
ugcccggguccugugcuug

SEQ ID NO: 2053149 - RNA, 19 nt, Artificial Sequence
  Description of Artificial Sequence: Synthetic oligonucleotide
gcacuauguccuucccuug

SEQ ID NO: 2053150 - RNA, 19 nt, Artificial Sequence
  Description of Artificial Sequence: Synthetic oligonucleotide
ggcuggaauagccaccacu

SEQ ID NO: 2053151 - RNA, 19 nt, Artificial Sequence
  Description of Artificial Sequence: Synthetic oligonucleotide
gccaucgcugccgaagagc

SEQ ID NO: 2053152 - RNA, 19 nt, Artificial Sequence
  Description of Artificial Sequence: Synthetic oligonucleotide
ccacauauuuguaaccgcu

SEQ ID NO: 2053153 - RNA, 19 nt, Artificial Sequence
  Description of Artificial Sequence: Synthetic oligonucleotide
cccugugaucacacugagg

SEQ ID NO: 2053154 - RNA, 19 nt, Artificial Sequence
  Description of Artificial Sequence: Synthetic oligonucleotide
cucaacacugaccgaaguu

SEQ ID NO: 2053155 - RNA, 19 nt, Artificial Sequence
  Description of Artificial Sequence: Synthetic oligonucleotide
ccgagugauaagccauggc

SEQ ID NO: 2053156 - RNA, 19 nt, Artificial Sequence
  Description of Artificial Sequence: Synthetic oligonucleotide
ggggaagaccaacaguccu

SEQ ID NO: 2053157 - RNA, 19 nt, Artificial Sequence
  Description of Artificial Sequence: Synthetic oligonucleotide
gaaguacauaagcgcggau

SEQ ID NO: 2053158 - RNA, 19 nt, Artificial Sequence
  Description of Artificial Sequence: Synthetic oligonucleotide
gccuggguggcuggaauag

SEQ ID NO: 2053159 - RNA, 19 nt, Artificial Sequence
  Description of Artificial Sequence: Synthetic oligonucleotide
gacacgucccagggcuggc

SEQ ID NO: 2053160 - RNA, 19 nt, Artificial Sequence
  Description of Artificial Sequence: Synthetic oligonucleotide
cguacaguggccagguaga

SEQ ID NO: 2053161 - RNA, 19 nt, Artificial Sequence
  Description of Artificial Sequence: Synthetic oligonucleotide
accuaagggcuggcugcuc

SEQ ID NO: 2053162 - RNA, 19 nt, Artificial Sequence
  Description of Artificial Sequence: Synthetic oligonucleotide
gcagaggcacaucaugacu

SEQ ID NO: 2053163 - RNA, 19 nt, Artificial Sequence
  Description of Artificial Sequence: Synthetic oligonucleotide
gugcacuauguccuucccu

SEQ ID NO: 2053164 - RNA, 19 nt, Artificial Sequence
  Description of Artificial Sequence: Synthetic oligonucleotide
cacgacgaucgcucgaccu

SEQ ID NO: 2053165 - RNA, 19 nt, Artificial Sequence
  Description of Artificial Sequence: Synthetic oligonucleotide
acgcacaaugaaguacaua

SEQ ID NO: 2053166 - RNA, 19 nt, Artificial Sequence
  Description of Artificial Sequence: Synthetic oligonucleotide
caguccuagcuucuuggcu

SEQ ID NO: 2053167 - RNA, 19 nt, Artificial Sequence
  Description of Artificial Sequence: Synthetic oligonucleotide
uggaaccgugggcuccgua

SEQ ID NO: 2053168 - RNA, 19 nt, Artificial Sequence
  Description of Artificial Sequence: Synthetic oligonucleotide
aguagccaucgcugccgaa

SEQ ID NO: 2053169 - RNA, 19 nt, Artificial Sequence
  Description of Artificial Sequence: Synthetic oligonucleotide
ugccaccugggaccaggua

SEQ ID NO: 2053170 - RNA, 19 nt, Artificial Sequence
  Description of Artificial Sequence: Synthetic oligonucleotide
acccgacagcccgacacgu

SEQ ID NO: 2053171 - RNA, 19 nt, Artificial Sequence
  Description of Artificial Sequence: Synthetic oligonucleotide
cccgagugauaagccaugg

SEQ ID NO: 2053172 - RNA, 19 nt, Artificial Sequence
  Description of Artificial Sequence: Synthetic oligonucleotide
agguaucaccggaccaggu

SEQ ID NO: 2053173 - RNA, 19 nt, Artificial Sequence
  Description of Artificial Sequence: Synthetic oligonucleotide
gggcuccguaucccgagug

SEQ ID NO: 2053174 - RNA, 19 nt, Artificial Sequence
  Description of Artificial Sequence: Synthetic oligonucleotide
ccacauaguagccaucgcu

SEQ ID NO: 2053175 - RNA, 19 nt, Artificial Sequence
  Description of Artificial Sequence: Synthetic oligonucleotide
ggaaccgugggcuccguau

SEQ ID NO: 2053176 - RNA, 19 nt, Artificial Sequence
  Description of Artificial Sequence: Synthetic oligonucleotide
guuacccgacagcccgaca

SEQ ID NO: 2053177 - RNA, 19 nt, Artificial Sequence
  Description of Artificial Sequence: Synthetic oligonucleotide
cgcaaagaacgcacaauga

SEQ ID NO: 2053178 - RNA, 19 nt, Artificial Sequence
  Description of Artificial Sequence: Synthetic oligonucleotide
cuccguaucccgagugaua

SEQ ID NO: 2053179 - RNA, 19 nt, Artificial Sequence
  Description of Artificial Sequence: Synthetic oligonucleotide
ugcguacaguggccaggua

SEQ ID NO: 2053180 - RNA, 19 nt, Artificial Sequence
  Description of Artificial Sequence: Synthetic oligonucleotide
uccuagcuucuuggcuaca

SEQ ID NO: 2053181 - RNA, 19 nt, Artificial Sequence
  Description of Artificial Sequence: Synthetic oligonucleotide
gccacgacgaucgcucgac

SEQ ID NO: 2053182 - RNA, 19 nt, Artificial Sequence
  Description of Artificial Sequence: Synthetic oligonucleotide
gggagaaccuuuucugaau

SEQ ID NO: 2053183 - RNA, 19 nt, Artificial Sequence
  Description of Artificial Sequence: Synthetic oligonucleotide
gcuggaauagccaccacuu

SEQ ID NO: 2053184 - RNA, 19 nt, Artificial Sequence
  Description of Artificial Sequence: Synthetic oligonucleotide
cucgcucaacacugaccga

SEQ ID NO: 2053185 - RNA, 19 nt, Artificial Sequence
  Description of Artificial Sequence: Synthetic oligonucleotide
accggaccagguggaaggu

SEQ ID NO: 2053186 - RNA, 19 nt, Artificial Sequence
  Description of Artificial Sequence: Synthetic oligonucleotide
ggcuccguaucccgaguga

SEQ ID NO: 2053187 - RNA, 19 nt, Artificial Sequence
  Description of Artificial Sequence: Synthetic oligonucleotide
gguugacacugaaggcuac

SEQ ID NO: 2053188 - RNA, 19 nt, Artificial Sequence
  Description of Artificial Sequence: Synthetic oligonucleotide
gcugccgaagagcagcccu

SEQ ID NO: 2053189 - RNA, 19 nt, Artificial Sequence
  Description of Artificial Sequence: Synthetic oligonucleotide
ccgcuguaggccaagaggu

SEQ ID NO: 2053190 - RNA, 19 nt, Artificial Sequence
  Description of Artificial Sequence: Synthetic oligonucleotide
guguguaggggaagaccaa

SEQ ID NO: 2053191 - RNA, 19 nt, Artificial Sequence
  Description of Artificial Sequence: Synthetic oligonucleotide
ggcacaucaugacuguauu

SEQ ID NO: 2053192 - RNA, 19 nt, Artificial Sequence
  Description of Artificial Sequence: Synthetic oligonucleotide
uagccaccacuuguaucau

SEQ ID NO: 2053193 - RNA, 19 nt, Artificial Sequence
  Description of Artificial Sequence: Synthetic oligonucleotide
cauaggugaugaaggccau

SEQ ID NO: 2053194 - RNA, 19 nt, Artificial Sequence
  Description of Artificial Sequence: Synthetic oligonucleotide
gagguggaagguacucagu

SEQ ID NO: 2053195 - RNA, 19 nt, Artificial Sequence
  Description of Artificial Sequence: Synthetic oligonucleotide
ggcuggccgaucgcggccg

SEQ ID NO: 2053196 - RNA, 19 nt, Artificial Sequence
  Description of Artificial Sequence: Synthetic oligonucleotide
ggaaggucagccaguaaau

SEQ ID NO: 2053197 - RNA, 19 nt, Artificial Sequence
  Description of Artificial Sequence: Synthetic oligonucleotide
ccgugggcuccguaucccg

SEQ ID NO: 2053198 - RNA, 19 nt, Artificial Sequence
  Description of Artificial Sequence: Synthetic oligonucleotide
ggaagguacucaguucacu

SEQ ID NO: 2053199 - RNA, 19 nt, Artificial Sequence
  Description of Artificial Sequence: Synthetic oligonucleotide
gaccuaagggcuggcugcu

SEQ ID NO: 2053200 - RNA, 19 nt, Artificial Sequence
  Description of Artificial Sequence: Synthetic oligonucleotide
gcaguccgcaaagaacgca

SEQ ID NO: 2053201 - RNA, 19 nt, Artificial Sequence
  Description of Artificial Sequence: Synthetic oligonucleotide
cggaccagguggaagguca

SEQ ID NO: 2053202 - RNA, 19 nt, Artificial Sequence
  Description of Artificial Sequence: Synthetic oligonucleotide
gccaugguggggauauaga

SEQ ID NO: 2053203 - RNA, 19 nt, Artificial Sequence
  Description of Artificial Sequence: Synthetic oligonucleotide
aucaccggaccagguggaa

SEQ ID NO: 2053204 - RNA, 19 nt, Artificial Sequence
  Description of Artificial Sequence: Synthetic oligonucleotide
uccgccuggguggcuggaa

SEQ ID NO: 2053205 - RNA, 19 nt, Artificial Sequence
  Description of Artificial Sequence: Synthetic oligonucleotide
cugugaucacacugaggau

SEQ ID NO: 2053206 - RNA, 19 nt, Artificial Sequence
  Description of Artificial Sequence: Synthetic oligonucleotide
ugcuggcacacaggcccaa

SEQ ID NO: 2053207 - RNA, 19 nt, Artificial Sequence
  Description of Artificial Sequence: Synthetic oligonucleotide
gggcuggccgaucgcggcc

SEQ ID NO: 2053208 - RNA, 19 nt, Artificial Sequence
  Description of Artificial Sequence: Synthetic oligonucleotide
ccguaucccgagugauaag

SEQ ID NO: 2053209 - RNA, 19 nt, Artificial Sequence
  Description of Artificial Sequence: Synthetic oligonucleotide
cguggguacaaacacuacu

SEQ ID NO: 2053210 - RNA, 19 nt, Artificial Sequence
  Description of Artificial Sequence: Synthetic oligonucleotide
guacauaagcgcggaugau

SEQ ID NO: 2053211 - RNA, 19 nt, Artificial Sequence
  Description of Artificial Sequence: Synthetic oligonucleotide
gcucaacacugaccgaagu

SEQ ID NO: 2053212 - RNA, 19 nt, Artificial Sequence
  Description of Artificial Sequence: Synthetic oligonucleotide
cggguccugugcuuggaac

SEQ ID NO: 2053213 - RNA, 19 nt, Artificial Sequence
  Description of Artificial Sequence: Synthetic oligonucleotide
cccgacacgucccagggcu

SEQ ID NO: 2053214 - RNA, 19 nt, Artificial Sequence
  Description of Artificial Sequence: Synthetic oligonucleotide
acaaaacggugcagcucuu

SEQ ID NO: 2053215 - RNA, 19 nt, Artificial Sequence
  Description of Artificial Sequence: Synthetic oligonucleotide
cauggccacgacgaucgcu

SEQ ID NO: 2053216 - RNA, 19 nt, Artificial Sequence
  Description of Artificial Sequence: Synthetic oligonucleotide
caacaccucuggggagaac

SEQ ID NO: 2053217 - RNA, 19 nt, Artificial Sequence
  Description of Artificial Sequence: Synthetic oligonucleotide
gcccggguccugugcuugg

SEQ ID NO: 2053218 - RNA, 19 nt, Artificial Sequence
  Description of Artificial Sequence: Synthetic oligonucleotide
ggagcugccauaggccaua

SEQ ID NO: 2053219 - RNA, 19 nt, Artificial Sequence
  Description of Artificial Sequence: Synthetic oligonucleotide
ggguauccgccuggguggc

SEQ ID NO: 2053220 - RNA, 19 nt, Artificial Sequence
  Description of Artificial Sequence: Synthetic oligonucleotide
cugcguacaguggccaggu

SEQ ID NO: 2053221 - RNA, 19 nt, Artificial Sequence
  Description of Artificial Sequence: Synthetic oligonucleotide
cgacagcccgacacguccc

SEQ ID NO: 2053222 - RNA, 19 nt, Artificial Sequence
  Description of Artificial Sequence: Synthetic oligonucleotide
gguacucaguucacugcgu

SEQ ID NO: 2053223 - RNA, 19 nt, Artificial Sequence
  Description of Artificial Sequence: Synthetic oligonucleotide
ccacgacgaucgcucgacc

SEQ ID NO: 2053224 - RNA, 19 nt, Artificial Sequence
  Description of Artificial Sequence: Synthetic oligonucleotide
cauagccauauuggccacu

SEQ ID NO: 2053225 - RNA, 19 nt, Artificial Sequence
  Description of Artificial Sequence: Synthetic oligonucleotide
cgcggaugauguccaggcc

SEQ ID NO: 2053226 - RNA, 19 nt, Artificial Sequence
  Description of Artificial Sequence: Synthetic oligonucleotide
cgcucgaccuaagggcugg

SEQ ID NO: 2053227 - RNA, 19 nt, Artificial Sequence
  Description of Artificial Sequence: Synthetic oligonucleotide
ggccacgacgaucgcucga

SEQ ID NO: 2053228 - RNA, 19 nt, Artificial Sequence
  Description of Artificial Sequence: Synthetic oligonucleotide
gcccgacacgucccagggc

SEQ ID NO: 2053229 - RNA, 19 nt, Artificial Sequence
  Description of Artificial Sequence: Synthetic oligonucleotide
ccuaagggcuggcugcucu

SEQ ID NO: 2053230 - RNA, 19 nt, Artificial Sequence
  Description of Artificial Sequence: Synthetic oligonucleotide
gcugcccggguccugugcu

SEQ ID NO: 2053231 - RNA, 19 nt, Artificial Sequence
  Description of Artificial Sequence: Synthetic oligonucleotide
ccaccacuuguaucaucga

SEQ ID NO: 2053232 - RNA, 19 nt, Artificial Sequence
  Description of Artificial Sequence: Synthetic oligonucleotide
ccauaggccauagccauau

SEQ ID NO: 2053233 - RNA, 19 nt, Artificial Sequence
  Description of Artificial Sequence: Synthetic oligonucleotide
ccgacacgucccagggcug

SEQ ID NO: 2053234 - RNA, 19 nt, Artificial Sequence
  Description of Artificial Sequence: Synthetic oligonucleotide
caaaacggugcagcucuuu

SEQ ID NO: 2053235 - RNA, 19 nt, Artificial Sequence
  Description of Artificial Sequence: Synthetic oligonucleotide
cccgacagcccgacacguc

SEQ ID NO: 2053236 - RNA, 19 nt, Artificial Sequence
  Description of Artificial Sequence: Synthetic oligonucleotide
cucgaccuaagggcuggcu

SEQ ID NO: 2053237 - RNA, 19 nt, Artificial Sequence
  Description of Artificial Sequence: Synthetic oligonucleotide
gccgucccagccagcagca

SEQ ID NO: 2053238 - RNA, 19 nt, Artificial Sequence
  Description of Artificial Sequence: Synthetic oligonucleotide
guccugugcuuggaaccgu

SEQ ID NO: 2053239 - RNA, 19 nt, Artificial Sequence
  Description of Artificial Sequence: Synthetic oligonucleotide
ggagcugcccggguccugu

SEQ ID NO: 2053240 - RNA, 19 nt, Artificial Sequence
  Description of Artificial Sequence: Synthetic oligonucleotide
gcuccguaucccgagugau

SEQ ID NO: 2053241 - RNA, 19 nt, Artificial Sequence
  Description of Artificial Sequence: Synthetic oligonucleotide
ccauggccacgacgaucgc

SEQ ID NO: 2053242 - RNA, 19 nt, Artificial Sequence
  Description of Artificial Sequence: Synthetic oligonucleotide
gcucgaccuaagggcuggc

SEQ ID NO: 2053243 - RNA, 19 nt, Artificial Sequence
  Description of Artificial Sequence: Synthetic oligonucleotide
gggccacauaguagccauc

SEQ ID NO: 2053244 - RNA, 19 nt, Artificial Sequence
  Description of Artificial Sequence: Synthetic oligonucleotide
cugcucccagggucaggua

SEQ ID NO: 2053245 - RNA, 19 nt, Artificial Sequence
  Description of Artificial Sequence: Synthetic oligonucleotide
cgugggcuccguaucccga

SEQ ID NO: 2053246 - RNA, 19 nt, Artificial Sequence
  Description of Artificial Sequence: Synthetic oligonucleotide
gucccagggcuggccgauc

SEQ ID NO: 2053247 - RNA, 19 nt, Artificial Sequence
  Description of Artificial Sequence: Synthetic oligonucleotide
ccggaccagguggaagguc

SEQ ID NO: 2053248 - RNA, 19 nt, Artificial Sequence
  Description of Artificial Sequence: Synthetic oligonucleotide
gccauaggccauagccaua

SEQ ID NO: 2053249 - RNA, 19 nt, Artificial Sequence
  Description of Artificial Sequence: Synthetic oligonucleotide
aggccaugguggggauaua

SEQ ID NO: 2053250 - RNA, 19 nt, Artificial Sequence
  Description of Artificial Sequence: Synthetic oligonucleotide
cgacgaucgcucgaccuaa

SEQ ID NO: 2053251 - RNA, 19 nt, Artificial Sequence
  Description of Artificial Sequence: Synthetic oligonucleotide
caccucuggggagaaccuu

SEQ ID NO: 2053252 - RNA, 19 nt, Artificial Sequence
  Description of Artificial Sequence: Synthetic oligonucleotide
ccucuggggagaaccuuuu

SEQ ID NO: 2053253 - RNA, 19 nt, Artificial Sequence
  Description of Artificial Sequence: Synthetic oligonucleotide
gcagcucuuugugcacuau

SEQ ID NO: 2053254 - RNA, 19 nt, Artificial Sequence
  Description of Artificial Sequence: Synthetic oligonucleotide
gguauccgccuggguggcu

SEQ ID NO: 2053255 - RNA, 19 nt, Artificial Sequence
  Description of Artificial Sequence: Synthetic oligonucleotide
ccgccuggguggcuggaau

SEQ ID NO: 2053256 - RNA, 19 nt, Artificial Sequence
  Description of Artificial Sequence: Synthetic oligonucleotide
aaucaauagacuaaugagc

SEQ ID NO: 2053257 - RNA, 19 nt, Artificial Sequence
  Description of Artificial Sequence: Synthetic oligonucleotide
uuaggaaacaauaagacua

SEQ ID NO: 2053258 - RNA, 19 nt, Artificial Sequence
  Description of Artificial Sequence: Synthetic oligonucleotide
ugaaauauauaguugggag

SEQ ID NO: 2053259 - RNA, 19 nt, Artificial Sequence
  Description of Artificial Sequence: Synthetic oligonucleotide
uguaagaacucuuauaaug

SEQ ID NO: 2053260 - RNA, 19 nt, Artificial Sequence
  Description of Artificial Sequence: Synthetic oligonucleotide
acauauagagaacacaccg

SEQ ID NO: 2053261 - RNA, 19 nt, Artificial Sequence
  Description of Artificial Sequence: Synthetic oligonucleotide
agacuaaugagccaagagc

SEQ ID NO: 2053262 - RNA, 19 nt, Artificial Sequence
  Description of Artificial Sequence: Synthetic oligonucleotide
uccaaaauucuucuuaagg

SEQ ID NO: 2053263 - RNA, 19 nt, Artificial Sequence
  Description of Artificial Sequence: Synthetic oligonucleotide
uacaaugaacccuagagag

SEQ ID NO: 2053264 - RNA, 19 nt, Artificial Sequence
  Description of Artificial Sequence: Synthetic oligonucleotide
auaaauguacuucauuaac

SEQ ID NO: 2053265 - RNA, 19 nt, Artificial Sequence
  Description of Artificial Sequence: Synthetic oligonucleotide
uccugaaauauauaguugg

SEQ ID NO: 2053266 - RNA, 19 nt, Artificial Sequence
  Description of Artificial Sequence: Synthetic oligonucleotide
ucuucuuaagguaacauga

SEQ ID NO: 2053267 - RNA, 19 nt, Artificial Sequence
  Description of Artificial Sequence: Synthetic oligonucleotide
uuaaaagcaaaauacauuu

SEQ ID NO: 2053268 - RNA, 19 nt, Artificial Sequence
  Description of Artificial Sequence: Synthetic oligonucleotide
ugggaguucaggaauaugg

SEQ ID NO: 2053269 - RNA, 19 nt, Artificial Sequence
  Description of Artificial Sequence: Synthetic oligonucleotide
uauaggaacaccucuaccc

SEQ ID NO: 2053270 - RNA, 19 nt, Artificial Sequence
  Description of Artificial Sequence: Synthetic oligonucleotide
agcuaaagccuuuucaugc

SEQ ID NO: 2053271 - RNA, 19 nt, Artificial Sequence
  Description of Artificial Sequence: Synthetic oligonucleotide
uuauaauggagccuagucc

SEQ ID NO: 2053272 - RNA, 19 nt, Artificial Sequence
  Description of Artificial Sequence: Synthetic oligonucleotide
uucauuaacaggucaaugc

SEQ ID NO: 2053273 - RNA, 19 nt, Artificial Sequence
  Description of Artificial Sequence: Synthetic oligonucleotide
auuucaaacagacagugca

SEQ ID NO: 2053274 - RNA, 19 nt, Artificial Sequence
  Description of Artificial Sequence: Synthetic oligonucleotide
cuuaccauuuaacauauag

SEQ ID NO: 2053275 - RNA, 19 nt, Artificial Sequence
  Description of Artificial Sequence: Synthetic oligonucleotide
aauaagacuauuucucccu

SEQ ID NO: 2053276 - RNA, 19 nt, Artificial Sequence
  Description of Artificial Sequence: Synthetic oligonucleotide
aggaauaugguccauuauc

SEQ ID NO: 2053277 - RNA, 19 nt, Artificial Sequence
  Description of Artificial Sequence: Synthetic oligonucleotide
aauuuaggaaacaauaaga

SEQ ID NO: 2053278 - RNA, 19 nt, Artificial Sequence
  Description of Artificial Sequence: Synthetic oligonucleotide
aagcauguccccuugccgc

SEQ ID NO: 2053279 - RNA, 19 nt, Artificial Sequence
  Description of Artificial Sequence: Synthetic oligonucleotide
caaucaauagacuaaugag

SEQ ID NO: 2053280 - RNA, 19 nt, Artificial Sequence
  Description of Artificial Sequence: Synthetic oligonucleotide
auuuaggaaacaauaagac

SEQ ID NO: 2053281 - RNA, 19 nt, Artificial Sequence
  Description of Artificial Sequence: Synthetic oligonucleotide
agcaaaauacauuucagca

SEQ ID NO: 2053282 - RNA, 19 nt, Artificial Sequence
  Description of Artificial Sequence: Synthetic oligonucleotide
aacucgucgauguccaccc

SEQ ID NO: 2053283 - RNA, 19 nt, Artificial Sequence
  Description of Artificial Sequence: Synthetic oligonucleotide
aacaccucuacccuucaac

SEQ ID NO: 2053284 - RNA, 19 nt, Artificial Sequence
  Description of Artificial Sequence: Synthetic oligonucleotide
ucauuaacaggucaaugcc

SEQ ID NO: 2053285 - RNA, 19 nt, Artificial Sequence
  Description of Artificial Sequence: Synthetic oligonucleotide
ugcucuuaaaguuugugag

SEQ ID NO: 2053286 - RNA, 19 nt, Artificial Sequence
  Description of Artificial Sequence: Synthetic oligonucleotide
agacagugcauacagguac

SEQ ID NO: 2053287 - RNA, 19 nt, Artificial Sequence
  Description of Artificial Sequence: Synthetic oligonucleotide
uuaaacuagucuuucuugc

SEQ ID NO: 2053288 - RNA, 19 nt, Artificial Sequence
  Description of Artificial Sequence: Synthetic oligonucleotide
uguacaaacucucagguuu

SEQ ID NO: 2053289 - RNA, 19 nt, Artificial Sequence
  Description of Artificial Sequence: Synthetic oligonucleotide
uuuaaacuagucuuucuug

SEQ ID NO: 2053290 - RNA, 19 nt, Artificial Sequence
  Description of Artificial Sequence: Synthetic oligonucleotide
aacgaauuuguucucguca

SEQ ID NO: 2053291 - RNA, 19 nt, Artificial Sequence
  Description of Artificial Sequence: Synthetic oligonucleotide
uguguuacucuguaaauga

SEQ ID NO: 2053292 - RNA, 19 nt, Artificial Sequence
  Description of Artificial Sequence: Synthetic oligonucleotide
guaagaacucuuauaaugg

SEQ ID NO: 2053293 - RNA, 19 nt, Artificial Sequence
  Description of Artificial Sequence: Synthetic oligonucleotide
aaucuggccagucagugug

SEQ ID NO: 2053294 - RNA, 19 nt, Artificial Sequence
  Description of Artificial Sequence: Synthetic oligonucleotide
uuuaggaaacaauaagacu

SEQ ID NO: 2053295 - RNA, 19 nt, Artificial Sequence
  Description of Artificial Sequence: Synthetic oligonucleotide
ucgucaacgaauuuguucu

SEQ ID NO: 2053296 - RNA, 19 nt, Artificial Sequence
  Description of Artificial Sequence: Synthetic oligonucleotide
uauaguugggaguucagga

SEQ ID NO: 2053297 - RNA, 19 nt, Artificial Sequence
  Description of Artificial Sequence: Synthetic oligonucleotide
ucaagugucaauucugugu

SEQ ID NO: 2053298 - RNA, 19 nt, Artificial Sequence
  Description of Artificial Sequence: Synthetic oligonucleotide
uuaccauuuaacauauaga

SEQ ID NO: 2053299 - RNA, 19 nt, Artificial Sequence
  Description of Artificial Sequence: Synthetic oligonucleotide
guuacucuguaaaugaagg

SEQ ID NO: 2053300 - RNA, 19 nt, Artificial Sequence
  Description of Artificial Sequence: Synthetic oligonucleotide
aaauauauaguugggaguu

SEQ ID NO: 2053301 - RNA, 19 nt, Artificial Sequence
  Description of Artificial Sequence: Synthetic oligonucleotide
aguauaggaacaccucuac

SEQ ID NO: 2053302 - RNA, 19 nt, Artificial Sequence
  Description of Artificial Sequence: Synthetic oligonucleotide
aggcacuuuacaaugaacc

SEQ ID NO: 2053303 - RNA, 19 nt, Artificial Sequence
  Description of Artificial Sequence: Synthetic oligonucleotide
cagacugucauucauugcc

SEQ ID NO: 2053304 - RNA, 19 nt, Artificial Sequence
  Description of Artificial Sequence: Synthetic oligonucleotide
uccauuaucagucccuucu

SEQ ID NO: 2053305 - RNA, 19 nt, Artificial Sequence
  Description of Artificial Sequence: Synthetic oligonucleotide
uuugcuuaccauuuaacau

SEQ ID NO: 2053306 - RNA, 19 nt, Artificial Sequence
  Description of Artificial Sequence: Synthetic oligonucleotide
auauagagaacacaccgca

SEQ ID NO: 2053307 - RNA, 19 nt, Artificial Sequence
  Description of Artificial Sequence: Synthetic oligonucleotide
uacaccugacauaaucugg

SEQ ID NO: 2053308 - RNA, 19 nt, Artificial Sequence
  Description of Artificial Sequence: Synthetic oligonucleotide
uagacuaaugagccaagag

SEQ ID NO: 2053309 - RNA, 19 nt, Artificial Sequence
  Description of Artificial Sequence: Synthetic oligonucleotide
cuugguguugauuggagag

SEQ ID NO: 2053310 - RNA, 19 nt, Artificial Sequence
  Description of Artificial Sequence: Synthetic oligonucleotide
auaugguccauuaucaguc

SEQ ID NO: 2053311 - RNA, 19 nt, Artificial Sequence
  Description of Artificial Sequence: Synthetic oligonucleotide
gaguucaggaauauggucc

SEQ ID NO: 2053312 - RNA, 19 nt, Artificial Sequence
  Description of Artificial Sequence: Synthetic oligonucleotide
acaguguaucuguacaaac

SEQ ID NO: 2053313 - RNA, 19 nt, Artificial Sequence
  Description of Artificial Sequence: Synthetic oligonucleotide
acauaaucuggccagucag

SEQ ID NO: 2053314 - RNA, 19 nt, Artificial Sequence
  Description of Artificial Sequence: Synthetic oligonucleotide
uucauugccaucccuuugc

SEQ ID NO: 2053315 - RNA, 19 nt, Artificial Sequence
  Description of Artificial Sequence: Synthetic oligonucleotide
gaacucuuauaauggagcc

SEQ ID NO: 2053316 - RNA, 19 nt, Artificial Sequence
  Description of Artificial Sequence: Synthetic oligonucleotide
uucuucuuaagguaacaug

SEQ ID NO: 2053317 - RNA, 19 nt, Artificial Sequence
  Description of Artificial Sequence: Synthetic oligonucleotide
uucuguguuacucuguaaa

SEQ ID NO: 2053318 - RNA, 19 nt, Artificial Sequence
  Description of Artificial Sequence: Synthetic oligonucleotide
agguacaccugacauaauc

SEQ ID NO: 2053319 - RNA, 19 nt, Artificial Sequence
  Description of Artificial Sequence: Synthetic oligonucleotide
uacucuguaaaugaaggca

SEQ ID NO: 2053320 - RNA, 19 nt, Artificial Sequence
  Description of Artificial Sequence: Synthetic oligonucleotide
caaugaacccuagagagcc

SEQ ID NO: 2053321 - RNA, 19 nt, Artificial Sequence
  Description of Artificial Sequence: Synthetic oligonucleotide
gaaacgugaggacagugug

SEQ ID NO: 2053322 - RNA, 19 nt, Artificial Sequence
  Description of Artificial Sequence: Synthetic oligonucleotide
gcuuuauugaugcagcagg

SEQ ID NO: 2053323 - RNA, 19 nt, Artificial Sequence
  Description of Artificial Sequence: Synthetic oligonucleotide
aaauucuucuuaagguaac

SEQ ID NO: 2053324 - RNA, 19 nt, Artificial Sequence
  Description of Artificial Sequence: Synthetic oligonucleotide
auuucuguccagugacugc

SEQ ID NO: 2053325 - RNA, 19 nt, Artificial Sequence
  Description of Artificial Sequence: Synthetic oligonucleotide
cauauagagaacacaccgc

SEQ ID NO: 2053326 - RNA, 19 nt, Artificial Sequence
  Description of Artificial Sequence: Synthetic oligonucleotide
uucacuucagaacccaaac

SEQ ID NO: 2053327 - RNA, 19 nt, Artificial Sequence
  Description of Artificial Sequence: Synthetic oligonucleotide
uccugcaaagaauuuagga

SEQ ID NO: 2053328 - RNA, 19 nt, Artificial Sequence
  Description of Artificial Sequence: Synthetic oligonucleotide
caauaagacuauuucuccc

SEQ ID NO: 2053329 - RNA, 19 nt, Artificial Sequence
  Description of Artificial Sequence: Synthetic oligonucleotide
agagcuuuauugaugcagc

SEQ ID NO: 2053330 - RNA, 19 nt, Artificial Sequence
  Description of Artificial Sequence: Synthetic oligonucleotide
uucagcacuacacccuggg

SEQ ID NO: 2053331 - RNA, 19 nt, Artificial Sequence
  Description of Artificial Sequence: Synthetic oligonucleotide
uggccagucagugugauag

SEQ ID NO: 2053332 - RNA, 19 nt, Artificial Sequence
  Description of Artificial Sequence: Synthetic oligonucleotide
aacuagucuuucuugcugu

SEQ ID NO: 2053333 - RNA, 19 nt, Artificial Sequence
  Description of Artificial Sequence: Synthetic oligonucleotide
ugcucaauuucacugcucu

SEQ ID NO: 2053334 - RNA, 19 nt, Artificial Sequence
  Description of Artificial Sequence: Synthetic oligonucleotide
aacacaccgcaaucaauag

SEQ ID NO: 2053335 - RNA, 19 nt, Artificial Sequence
  Description of Artificial Sequence: Synthetic oligonucleotide
gauucuugguguugauugg

SEQ ID NO: 2053336 - RNA, 19 nt, Artificial Sequence
  Description of Artificial Sequence: Synthetic oligonucleotide
uguugauuggagaguuccg

SEQ ID NO: 2053337 - RNA, 19 nt, Artificial Sequence
  Description of Artificial Sequence: Synthetic oligonucleotide
auagucaagugucaauucu

SEQ ID NO: 2053338 - RNA, 19 nt, Artificial Sequence
  Description of Artificial Sequence: Synthetic oligonucleotide
uuccugaaauauauaguug

SEQ ID NO: 2053339 - RNA, 19 nt, Artificial Sequence
  Description of Artificial Sequence: Synthetic oligonucleotide
cuuuauugaugcagcaggc

SEQ ID NO: 2053340 - RNA, 19 nt, Artificial Sequence
  Description of Artificial Sequence: Synthetic oligonucleotide
uagucaagugucaauucug

SEQ ID NO: 2053341 - RNA, 19 nt, Artificial Sequence
  Description of Artificial Sequence: Synthetic oligonucleotide
uugcuuaccauuuaacaua

SEQ ID NO: 2053342 - RNA, 19 nt, Artificial Sequence
  Description of Artificial Sequence: Synthetic oligonucleotide
aauauauaguugggaguuc

SEQ ID NO: 2053343 - RNA, 19 nt, Artificial Sequence
  Description of Artificial Sequence: Synthetic oligonucleotide
aucagacugucauucauug

SEQ ID NO: 2053344 - RNA, 19 nt, Artificial Sequence
  Description of Artificial Sequence: Synthetic oligonucleotide
uuacucuguaaaugaaggc

SEQ ID NO: 2053345 - RNA, 19 nt, Artificial Sequence
  Description of Artificial Sequence: Synthetic oligonucleotide
auaagacuauuucucccuc

SEQ ID NO: 2053346 - RNA, 19 nt, Artificial Sequence
  Description of Artificial Sequence: Synthetic oligonucleotide
uauauaguugggaguucag

SEQ ID NO: 2053347 - RNA, 19 nt, Artificial Sequence
  Description of Artificial Sequence: Synthetic oligonucleotide
accucuacccuucaacauc

SEQ ID NO: 2053348 - RNA, 19 nt, Artificial Sequence
  Description of Artificial Sequence: Synthetic oligonucleotide
uucagaacccaaacucucc

SEQ ID NO: 2053349 - RNA, 19 nt, Artificial Sequence
  Description of Artificial Sequence: Synthetic oligonucleotide
uauugaugcagcaggcacu

SEQ ID NO: 2053350 - RNA, 19 nt, Artificial Sequence
  Description of Artificial Sequence: Synthetic oligonucleotide
agcacuacacccugggcuc

SEQ ID NO: 2053351 - RNA, 19 nt, Artificial Sequence
  Description of Artificial Sequence: Synthetic oligonucleotide
ucuguaaaugaaggcagag

SEQ ID NO: 2053352 - RNA, 19 nt, Artificial Sequence
  Description of Artificial Sequence: Synthetic oligonucleotide
auagagaacacaccgcaau

SEQ ID NO: 2053353 - RNA, 19 nt, Artificial Sequence
  Description of Artificial Sequence: Synthetic oligonucleotide
auauaguugggaguucagg

SEQ ID NO: 2053354 - RNA, 19 nt, Artificial Sequence
  Description of Artificial Sequence: Synthetic oligonucleotide
uacuucauuaacaggucaa

SEQ ID NO: 2053355 - RNA, 19 nt, Artificial Sequence
  Description of Artificial Sequence: Synthetic oligonucleotide
ugggcauccaaaauucuuc

SEQ ID NO: 2053356 - RNA, 19 nt, Artificial Sequence
  Description of Artificial Sequence: Synthetic oligonucleotide
gaauuuguucucgucaaac

SEQ ID NO: 2053357 - RNA, 19 nt, Artificial Sequence
  Description of Artificial Sequence: Synthetic oligonucleotide
ugcucgucaacgaauuugu

SEQ ID NO: 2053358 - RNA, 19 nt, Artificial Sequence
  Description of Artificial Sequence: Synthetic oligonucleotide
ucgucaaacucgucgaugu

SEQ ID NO: 2053359 - RNA, 19 nt, Artificial Sequence
  Description of Artificial Sequence: Synthetic oligonucleotide
ucaaacagacagugcauac

SEQ ID NO: 2053360 - RNA, 19 nt, Artificial Sequence
  Description of Artificial Sequence: Synthetic oligonucleotide
aaguuugugaguacuuuca

SEQ ID NO: 2053361 - RNA, 19 nt, Artificial Sequence
  Description of Artificial Sequence: Synthetic oligonucleotide
ccccauuucaaacagacag

SEQ ID NO: 2053362 - RNA, 19 nt, Artificial Sequence
  Description of Artificial Sequence: Synthetic oligonucleotide
acaaugaacccuagagagc

SEQ ID NO: 2053363 - RNA, 19 nt, Artificial Sequence
  Description of Artificial Sequence: Synthetic oligonucleotide
auaggaacaccucuacccu

SEQ ID NO: 2053364 - RNA, 19 nt, Artificial Sequence
  Description of Artificial Sequence: Synthetic oligonucleotide
augguccauuaucaguccc

SEQ ID NO: 2053365 - RNA, 19 nt, Artificial Sequence
  Description of Artificial Sequence: Synthetic oligonucleotide
ugcauggaaugcccgaagc

SEQ ID NO: 2053366 - RNA, 19 nt, Artificial Sequence
  Description of Artificial Sequence: Synthetic oligonucleotide
gauagucaagugucaauuc

SEQ ID NO: 2053367 - RNA, 19 nt, Artificial Sequence
  Description of Artificial Sequence: Synthetic oligonucleotide
ucagaacccaaacucuccu

SEQ ID NO: 2053368 - RNA, 19 nt, Artificial Sequence
  Description of Artificial Sequence: Synthetic oligonucleotide
aaugccauuucuguccagu

SEQ ID NO: 2053369 - RNA, 19 nt, Artificial Sequence
  Description of Artificial Sequence: Synthetic oligonucleotide
cuccccauuucaaacagac

SEQ ID NO: 2053370 - RNA, 19 nt, Artificial Sequence
  Description of Artificial Sequence: Synthetic oligonucleotide
uaagacuauuucucccucc

SEQ ID NO: 2053371 - RNA, 19 nt, Artificial Sequence
  Description of Artificial Sequence: Synthetic oligonucleotide
auacagguacaccugacau

SEQ ID NO: 2053372 - RNA, 19 nt, Artificial Sequence
  Description of Artificial Sequence: Synthetic oligonucleotide
ucaauagacuaaugagcca

SEQ ID NO: 2053373 - RNA, 19 nt, Artificial Sequence
  Description of Artificial Sequence: Synthetic oligonucleotide
aauagccccuccccauuuc

SEQ ID NO: 2053374 - RNA, 19 nt, Artificial Sequence
  Description of Artificial Sequence: Synthetic oligonucleotide
uggcaguauaggaacaccu

SEQ ID NO: 2053375 - RNA, 19 nt, Artificial Sequence
  Description of Artificial Sequence: Synthetic oligonucleotide
ucacuucagaacccaaacu

SEQ ID NO: 2053376 - RNA, 19 nt, Artificial Sequence
  Description of Artificial Sequence: Synthetic oligonucleotide
gcaaucaauagacuaauga

SEQ ID NO: 2053377 - RNA, 19 nt, Artificial Sequence
  Description of Artificial Sequence: Synthetic oligonucleotide
uuaucagucccuucuucac

SEQ ID NO: 2053378 - RNA, 19 nt, Artificial Sequence
  Description of Artificial Sequence: Synthetic oligonucleotide
aguucaggaauauggucca

SEQ ID NO: 2053379 - RNA, 19 nt, Artificial Sequence
  Description of Artificial Sequence: Synthetic oligonucleotide
uugauuggagaguuccgca

SEQ ID NO: 2053380 - RNA, 19 nt, Artificial Sequence
  Description of Artificial Sequence: Synthetic oligonucleotide
cauuucaaacagacagugc

SEQ ID NO: 2053381 - RNA, 19 nt, Artificial Sequence
  Description of Artificial Sequence: Synthetic oligonucleotide
ugauagucaagugucaauu

SEQ ID NO: 2053382 - RNA, 19 nt, Artificial Sequence
  Description of Artificial Sequence: Synthetic oligonucleotide
aaagccuuuucaugccacu

SEQ ID NO: 2053383 - RNA, 19 nt, Artificial Sequence
  Description of Artificial Sequence: Synthetic oligonucleotide
agccuaguccuccuacagc

SEQ ID NO: 2053384 - RNA, 19 nt, Artificial Sequence
  Description of Artificial Sequence: Synthetic oligonucleotide
gcuguaagaacucuuauaa

SEQ ID NO: 2053385 - RNA, 19 nt, Artificial Sequence
  Description of Artificial Sequence: Synthetic oligonucleotide
aauagacuaaugagccaag

SEQ ID NO: 2053386 - RNA, 19 nt, Artificial Sequence
  Description of Artificial Sequence: Synthetic oligonucleotide
acugucauucauugccauc

SEQ ID NO: 2053387 - RNA, 19 nt, Artificial Sequence
  Description of Artificial Sequence: Synthetic oligonucleotide
guacaccugacauaaucug

SEQ ID NO: 2053388 - RNA, 19 nt, Artificial Sequence
  Description of Artificial Sequence: Synthetic oligonucleotide
gaggacaguguguuccggg

SEQ ID NO: 2053389 - RNA, 19 nt, Artificial Sequence
  Description of Artificial Sequence: Synthetic oligonucleotide
ccaagagcuuuauugaugc

SEQ ID NO: 2053390 - RNA, 19 nt, Artificial Sequence
  Description of Artificial Sequence: Synthetic oligonucleotide
uaaagccuuuucaugccac

SEQ ID NO: 2053391 - RNA, 19 nt, Artificial Sequence
  Description of Artificial Sequence: Synthetic oligonucleotide
acagguacaccugacauaa

SEQ ID NO: 2053392 - RNA, 19 nt, Artificial Sequence
  Description of Artificial Sequence: Synthetic oligonucleotide
auauauaguugggaguuca

SEQ ID NO: 2053393 - RNA, 19 nt, Artificial Sequence
  Description of Artificial Sequence: Synthetic oligonucleotide
ucaacgaauuuguucucgu

SEQ ID NO: 2053394 - RNA, 19 nt, Artificial Sequence
  Description of Artificial Sequence: Synthetic oligonucleotide
auaguugggaguucaggaa

SEQ ID NO: 2053395 - RNA, 19 nt, Artificial Sequence
  Description of Artificial Sequence: Synthetic oligonucleotide
aacucuuauaauggagccu

SEQ ID NO: 2053396 - RNA, 19 nt, Artificial Sequence
  Description of Artificial Sequence: Synthetic oligonucleotide
uaugguccauuaucagucc

SEQ ID NO: 2053397 - RNA, 19 nt, Artificial Sequence
  Description of Artificial Sequence: Synthetic oligonucleotide
uaguugggaguucaggaau

SEQ ID NO: 2053398 - RNA, 19 nt, Artificial Sequence
  Description of Artificial Sequence: Synthetic oligonucleotide
ucuugguguugauuggaga

SEQ ID NO: 2053399 - RNA, 19 nt, Artificial Sequence
  Description of Artificial Sequence: Synthetic oligonucleotide
uuguucucgucaaacucgu

SEQ ID NO: 2053400 - RNA, 19 nt, Artificial Sequence
  Description of Artificial Sequence: Synthetic oligonucleotide
acaccucuacccuucaaca

SEQ ID NO: 2053401 - RNA, 19 nt, Artificial Sequence
  Description of Artificial Sequence: Synthetic oligonucleotide
gagccaagagcuuuauuga

SEQ ID NO: 2053402 - RNA, 19 nt, Artificial Sequence
  Description of Artificial Sequence: Synthetic oligonucleotide
cucccuccaccuuaaaagc

SEQ ID NO: 2053403 - RNA, 19 nt, Artificial Sequence
  Description of Artificial Sequence: Synthetic oligonucleotide
agauauguuuccugaaaua

SEQ ID NO: 2053404 - RNA, 19 nt, Artificial Sequence
  Description of Artificial Sequence: Synthetic oligonucleotide
guauaggaacaccucuacc

SEQ ID NO: 2053405 - RNA, 19 nt, Artificial Sequence
  Description of Artificial Sequence: Synthetic oligonucleotide
ugcuguaagaacucuuaua

SEQ ID NO: 2053406 - RNA, 19 nt, Artificial Sequence
  Description of Artificial Sequence: Synthetic oligonucleotide
gacauaaucuggccaguca

SEQ ID NO: 2053407 - RNA, 19 nt, Artificial Sequence
  Description of Artificial Sequence: Synthetic oligonucleotide
gucaacgaauuuguucucg

SEQ ID NO: 2053408 - RNA, 19 nt, Artificial Sequence
  Description of Artificial Sequence: Synthetic oligonucleotide
aacccuagagagccugucu

SEQ ID NO: 2053409 - RNA, 19 nt, Artificial Sequence
  Description of Artificial Sequence: Synthetic oligonucleotide
acgaauuuguucucgucaa

SEQ ID NO: 2053410 - RNA, 19 nt, Artificial Sequence
  Description of Artificial Sequence: Synthetic oligonucleotide
agcuuuccaaaccaucaga

SEQ ID NO: 2053411 - RNA, 19 nt, Artificial Sequence
  Description of Artificial Sequence: Synthetic oligonucleotide
gauauguuuccugaaauau

SEQ ID NO: 2053412 - RNA, 19 nt, Artificial Sequence
  Description of Artificial Sequence: Synthetic oligonucleotide
auacauuucagcagauaug

SEQ ID NO: 2053413 - RNA, 19 nt, Artificial Sequence
  Description of Artificial Sequence: Synthetic oligonucleotide
acucuuauaauggagccua

SEQ ID NO: 2053414 - RNA, 19 nt, Artificial Sequence
  Description of Artificial Sequence: Synthetic oligonucleotide
ugauuggagaguuccgcaa

SEQ ID NO: 2053415 - RNA, 19 nt, Artificial Sequence
  Description of Artificial Sequence: Synthetic oligonucleotide
ugguccauuaucagucccu

SEQ ID NO: 2053416 - RNA, 19 nt, Artificial Sequence
  Description of Artificial Sequence: Synthetic oligonucleotide
auucauugccaucccuuug

SEQ ID NO: 2053417 - RNA, 19 nt, Artificial Sequence
  Description of Artificial Sequence: Synthetic oligonucleotide
cauggcgggagcucggcgg

SEQ ID NO: 2053418 - RNA, 19 nt, Artificial Sequence
  Description of Artificial Sequence: Synthetic oligonucleotide
cauuaacaggucaaugcca

SEQ ID NO: 2053419 - RNA, 19 nt, Artificial Sequence
  Description of Artificial Sequence: Synthetic oligonucleotide
uccaccuuaaaagcaaaau

SEQ ID NO: 2053420 - RNA, 19 nt, Artificial Sequence
  Description of Artificial Sequence: Synthetic oligonucleotide
ugucauucauugccauccc

SEQ ID NO: 2053421 - RNA, 19 nt, Artificial Sequence
  Description of Artificial Sequence: Synthetic oligonucleotide
ugggaagacaguguaucug

SEQ ID NO: 2053422 - RNA, 19 nt, Artificial Sequence
  Description of Artificial Sequence: Synthetic oligonucleotide
ucagacugucauucauugc

SEQ ID NO: 2053423 - RNA, 19 nt, Artificial Sequence
  Description of Artificial Sequence: Synthetic oligonucleotide
cuguguuacucuguaaaug

SEQ ID NO: 2053424 - RNA, 19 nt, Artificial Sequence
  Description of Artificial Sequence: Synthetic oligonucleotide
ccugaaauauauaguuggg

SEQ ID NO: 2053425 - RNA, 19 nt, Artificial Sequence
  Description of Artificial Sequence: Synthetic oligonucleotide
cuucauuaacaggucaaug

SEQ ID NO: 2053426 - RNA, 19 nt, Artificial Sequence
  Description of Artificial Sequence: Synthetic oligonucleotide
auuaacaggucaaugccau

SEQ ID NO: 2053427 - RNA, 19 nt, Artificial Sequence
  Description of Artificial Sequence: Synthetic oligonucleotide
aacgugaggacaguguguu

SEQ ID NO: 2053428 - RNA, 19 nt, Artificial Sequence
  Description of Artificial Sequence: Synthetic oligonucleotide
gagccuaguccuccuacag

SEQ ID NO: 2053429 - RNA, 19 nt, Artificial Sequence
  Description of Artificial Sequence: Synthetic oligonucleotide
aaaccaucagacugucauu

SEQ ID NO: 2053430 - RNA, 19 nt, Artificial Sequence
  Description of Artificial Sequence: Synthetic oligonucleotide
aucagcuuuccaaaccauc

SEQ ID NO: 2053431 - RNA, 19 nt, Artificial Sequence
  Description of Artificial Sequence: Synthetic oligonucleotide
gaacacaccgcaaucaaua

SEQ ID NO: 2053432 - RNA, 19 nt, Artificial Sequence
  Description of Artificial Sequence: Synthetic oligonucleotide
cagcaggcacuuuacaaug

SEQ ID NO: 2053433 - RNA, 19 nt, Artificial Sequence
  Description of Artificial Sequence: Synthetic oligonucleotide
ucuuauaauggagccuagu

SEQ ID NO: 2053434 - RNA, 19 nt, Artificial Sequence
  Description of Artificial Sequence: Synthetic oligonucleotide
uucucccuccaccuuaaaa

SEQ ID NO: 2053435 - RNA, 19 nt, Artificial Sequence
  Description of Artificial Sequence: Synthetic oligonucleotide
uucaaacagacagugcaua

SEQ ID NO: 2053436 - RNA, 19 nt, Artificial Sequence
  Description of Artificial Sequence: Synthetic oligonucleotide
cagcccuuggaucugcacc

SEQ ID NO: 2053437 - RNA, 19 nt, Artificial Sequence
  Description of Artificial Sequence: Synthetic oligonucleotide
gagacaccaauccugcaaa

SEQ ID NO: 2053438 - RNA, 19 nt, Artificial Sequence
  Description of Artificial Sequence: Synthetic oligonucleotide
cugaaauauauaguuggga

SEQ ID NO: 2053439 - RNA, 19 nt, Artificial Sequence
  Description of Artificial Sequence: Synthetic oligonucleotide
cugcucuuaaaguuuguga

SEQ ID NO: 2053440 - RNA, 19 nt, Artificial Sequence
  Description of Artificial Sequence: Synthetic oligonucleotide
uccccuugccgcaggagcc

SEQ ID NO: 2053441 - RNA, 19 nt, Artificial Sequence
  Description of Artificial Sequence: Synthetic oligonucleotide
gagcccguccaccucggcg

SEQ ID NO: 2053442 - RNA, 19 nt, Artificial Sequence
  Description of Artificial Sequence: Synthetic oligonucleotide
cauccaaaauucuucuuaa

SEQ ID NO: 2053443 - RNA, 19 nt, Artificial Sequence
  Description of Artificial Sequence: Synthetic oligonucleotide
uaaucuggccagucagugu

SEQ ID NO: 2053444 - RNA, 19 nt, Artificial Sequence
  Description of Artificial Sequence: Synthetic oligonucleotide
caaaccaucagacugucau

SEQ ID NO: 2053445 - RNA, 19 nt, Artificial Sequence
  Description of Artificial Sequence: Synthetic oligonucleotide
gucaagugucaauucugug

SEQ ID NO: 2053446 - RNA, 19 nt, Artificial Sequence
  Description of Artificial Sequence: Synthetic oligonucleotide
uacagguacaccugacaua

SEQ ID NO: 2053447 - RNA, 19 nt, Artificial Sequence
  Description of Artificial Sequence: Synthetic oligonucleotide
cacuuuacaaugaacccua

SEQ ID NO: 2053448 - RNA, 19 nt, Artificial Sequence
  Description of Artificial Sequence: Synthetic oligonucleotide
uggagccuaguccuccuac

SEQ ID NO: 2053449 - RNA, 19 nt, Artificial Sequence
  Description of Artificial Sequence: Synthetic oligonucleotide
agacaccaauccugcaaag

SEQ ID NO: 2053450 - RNA, 19 nt, Artificial Sequence
  Description of Artificial Sequence: Synthetic oligonucleotide
aggaacaccucuacccuuc

SEQ ID NO: 2053451 - RNA, 19 nt, Artificial Sequence
  Description of Artificial Sequence: Synthetic oligonucleotide
uacccuucaacaucagcuu

SEQ ID NO: 2053452 - RNA, 19 nt, Artificial Sequence
  Description of Artificial Sequence: Synthetic oligonucleotide
gcuaaagccuuuucaugcc

SEQ ID NO: 2053453 - RNA, 19 nt, Artificial Sequence
  Description of Artificial Sequence: Synthetic oligonucleotide
uccgcaaggcugcauggaa

SEQ ID NO: 2053454 - RNA, 19 nt, Artificial Sequence
  Description of Artificial Sequence: Synthetic oligonucleotide
acagugcauacagguacac

SEQ ID NO: 2053455 - RNA, 19 nt, Artificial Sequence
  Description of Artificial Sequence: Synthetic oligonucleotide
cugcucgucaacgaauuug

SEQ ID NO: 2053456 - RNA, 19 nt, Artificial Sequence
  Description of Artificial Sequence: Synthetic oligonucleotide
uccccauuucaaacagaca

SEQ ID NO: 2053457 - RNA, 19 nt, Artificial Sequence
  Description of Artificial Sequence: Synthetic oligonucleotide
caccugacauaaucuggcc

SEQ ID NO: 2053458 - RNA, 19 nt, Artificial Sequence
  Description of Artificial Sequence: Synthetic oligonucleotide
auagacuaaugagccaaga

SEQ ID NO: 2053459 - RNA, 19 nt, Artificial Sequence
  Description of Artificial Sequence: Synthetic oligonucleotide
uguccacccgacggaaacg

SEQ ID NO: 2053460 - RNA, 19 nt, Artificial Sequence
  Description of Artificial Sequence: Synthetic oligonucleotide
gagcuuuauugaugcagca

SEQ ID NO: 2053461 - RNA, 19 nt, Artificial Sequence
  Description of Artificial Sequence: Synthetic oligonucleotide
accaauccugcaaagaauu

SEQ ID NO: 2053462 - RNA, 19 nt, Artificial Sequence
  Description of Artificial Sequence: Synthetic oligonucleotide
agccaagagcuuuauugau

SEQ ID NO: 2053463 - RNA, 19 nt, Artificial Sequence
  Description of Artificial Sequence: Synthetic oligonucleotide
caacgaauuuguucucguc

SEQ ID NO: 2053464 - RNA, 19 nt, Artificial Sequence
  Description of Artificial Sequence: Synthetic oligonucleotide
aguccuccuacagcuaaag

SEQ ID NO: 2053465 - RNA, 19 nt, Artificial Sequence
  Description of Artificial Sequence: Synthetic oligonucleotide
ugaggacaguguguuccgg

SEQ ID NO: 2053466 - RNA, 19 nt, Artificial Sequence
  Description of Artificial Sequence: Synthetic oligonucleotide
ggaguucaggaauaugguc

SEQ ID NO: 2053467 - RNA, 19 nt, Artificial Sequence
  Description of Artificial Sequence: Synthetic oligonucleotide
ugaacccuagagagccugu

SEQ ID NO: 2053468 - RNA, 19 nt, Artificial Sequence
  Description of Artificial Sequence: Synthetic oligonucleotide
cagcagauauguuuccuga

SEQ ID NO: 2053469 - RNA, 19 nt, Artificial Sequence
  Description of Artificial Sequence: Synthetic oligonucleotide
uccugcucgucaacgaauu

SEQ ID NO: 2053470 - RNA, 19 nt, Artificial Sequence
  Description of Artificial Sequence: Synthetic oligonucleotide
auggaaugcccgaagcaug

SEQ ID NO: 2053471 - RNA, 19 nt, Artificial Sequence
  Description of Artificial Sequence: Synthetic oligonucleotide
guccccuugccgcaggagc

SEQ ID NO: 2053472 - RNA, 19 nt, Artificial Sequence
  Description of Artificial Sequence: Synthetic oligonucleotide
auauguuuccugaaauaua

SEQ ID NO: 2053473 - RNA, 19 nt, Artificial Sequence
  Description of Artificial Sequence: Synthetic oligonucleotide
accgcaaucaauagacuaa

SEQ ID NO: 2053474 - RNA, 19 nt, Artificial Sequence
  Description of Artificial Sequence: Synthetic oligonucleotide
auagccccuccccauuuca

SEQ ID NO: 2053475 - RNA, 19 nt, Artificial Sequence
  Description of Artificial Sequence: Synthetic oligonucleotide
cacccgacggaaacgugag

SEQ ID NO: 2053476 - RNA, 19 nt, Artificial Sequence
  Description of Artificial Sequence: Synthetic oligonucleotide
cuaaagccuuuucaugcca

SEQ ID NO: 2053477 - RNA, 19 nt, Artificial Sequence
  Description of Artificial Sequence: Synthetic oligonucleotide
ugguguugauuggagaguu

SEQ ID NO: 2053478 - RNA, 19 nt, Artificial Sequence
  Description of Artificial Sequence: Synthetic oligonucleotide
cugcaccugcccaaauagc

SEQ ID NO: 2053479 - RNA, 19 nt, Artificial Sequence
  Description of Artificial Sequence: Synthetic oligonucleotide
ugacauaaucuggccaguc

SEQ ID NO: 2053480 - RNA, 19 nt, Artificial Sequence
  Description of Artificial Sequence: Synthetic oligonucleotide
cuuaagguaacaugauuuu

SEQ ID NO: 2053481 - RNA, 19 nt, Artificial Sequence
  Description of Artificial Sequence: Synthetic oligonucleotide
acccuagagagccugucuu

SEQ ID NO: 2053482 - RNA, 19 nt, Artificial Sequence
  Description of Artificial Sequence: Synthetic oligonucleotide
cucgguccuucacagcuug

SEQ ID NO: 2053483 - RNA, 19 nt, Artificial Sequence
  Description of Artificial Sequence: Synthetic oligonucleotide
auucuguguuacucuguaa

SEQ ID NO: 2053484 - RNA, 19 nt, Artificial Sequence
  Description of Artificial Sequence: Synthetic oligonucleotide
cugcauggaaugcccgaag

SEQ ID NO: 2053485 - RNA, 19 nt, Artificial Sequence
  Description of Artificial Sequence: Synthetic oligonucleotide
agcauguccccuugccgca

SEQ ID NO: 2053486 - RNA, 19 nt, Artificial Sequence
  Description of Artificial Sequence: Synthetic oligonucleotide
caccgcaaucaauagacua

SEQ ID NO: 2053487 - RNA, 19 nt, Artificial Sequence
  Description of Artificial Sequence: Synthetic oligonucleotide
ccuuugcuuaccauuuaac

SEQ ID NO: 2053488 - RNA, 19 nt, Artificial Sequence
  Description of Artificial Sequence: Synthetic oligonucleotide
uuaacaggucaaugccauu

SEQ ID NO: 2053489 - RNA, 19 nt, Artificial Sequence
  Description of Artificial Sequence: Synthetic oligonucleotide
aucugcaccugcccaaaua

SEQ ID NO: 2053490 - RNA, 19 nt, Artificial Sequence
  Description of Artificial Sequence: Synthetic oligonucleotide
cagugugauagucaagugu

SEQ ID NO: 2053491 - RNA, 19 nt, Artificial Sequence
  Description of Artificial Sequence: Synthetic oligonucleotide
cuaguccuccuacagcuaa

SEQ ID NO: 2053492 - RNA, 19 nt, Artificial Sequence
  Description of Artificial Sequence: Synthetic oligonucleotide
cagugcauacagguacacc

SEQ ID NO: 2053493 - RNA, 19 nt, Artificial Sequence
  Description of Artificial Sequence: Synthetic oligonucleotide
aaugaacccuagagagccu

SEQ ID NO: 2053494 - RNA, 19 nt, Artificial Sequence
  Description of Artificial Sequence: Synthetic oligonucleotide
acgugaggacaguguguuc

SEQ ID NO: 2053495 - RNA, 19 nt, Artificial Sequence
  Description of Artificial Sequence: Synthetic oligonucleotide
acuagucuuucuugcugua

SEQ ID NO: 2053496 - RNA, 19 nt, Artificial Sequence
  Description of Artificial Sequence: Synthetic oligonucleotide
caauccugcaaagaauuua

SEQ ID NO: 2053497 - RNA, 19 nt, Artificial Sequence
  Description of Artificial Sequence: Synthetic oligonucleotide
uccuacagcuaaagccuuu

SEQ ID NO: 2053498 - RNA, 19 nt, Artificial Sequence
  Description of Artificial Sequence: Synthetic oligonucleotide
gccaagagcuuuauugaug

SEQ ID NO: 2053499 - RNA, 19 nt, Artificial Sequence
  Description of Artificial Sequence: Synthetic oligonucleotide
uccacccgacggaaacgug

SEQ ID NO: 2053500 - RNA, 19 nt, Artificial Sequence
  Description of Artificial Sequence: Synthetic oligonucleotide
acucgucgauguccacccg

SEQ ID NO: 2053501 - RNA, 19 nt, Artificial Sequence
  Description of Artificial Sequence: Synthetic oligonucleotide
agaacacaccgcaaucaau

SEQ ID NO: 2053502 - RNA, 19 nt, Artificial Sequence
  Description of Artificial Sequence: Synthetic oligonucleotide
gcaguauaggaacaccucu

SEQ ID NO: 2053503 - RNA, 19 nt, Artificial Sequence
  Description of Artificial Sequence: Synthetic oligonucleotide
cagcacuacacccugggcu

SEQ ID NO: 2053504 - RNA, 19 nt, Artificial Sequence
  Description of Artificial Sequence: Synthetic oligonucleotide
agcucggcggcugcccagc

SEQ ID NO: 2053505 - RNA, 19 nt, Artificial Sequence
  Description of Artificial Sequence: Synthetic oligonucleotide
ucccuuugcuuaccauuua

SEQ ID NO: 2053506 - RNA, 19 nt, Artificial Sequence
  Description of Artificial Sequence: Synthetic oligonucleotide
agucagugugauagucaag

SEQ ID NO: 2053507 - RNA, 19 nt, Artificial Sequence
  Description of Artificial Sequence: Synthetic oligonucleotide
cauaaucuggccagucagu

SEQ ID NO: 2053508 - RNA, 19 nt, Artificial Sequence
  Description of Artificial Sequence: Synthetic oligonucleotide
cuucuuaagguaacaugau

SEQ ID NO: 2053509 - RNA, 19 nt, Artificial Sequence
  Description of Artificial Sequence: Synthetic oligonucleotide
acccgacggaaacgugagg

SEQ ID NO: 2053510 - RNA, 19 nt, Artificial Sequence
  Description of Artificial Sequence: Synthetic oligonucleotide
gaacccuagagagccuguc

SEQ ID NO: 2053511 - RNA, 19 nt, Artificial Sequence
  Description of Artificial Sequence: Synthetic oligonucleotide
cugcccaaauagccccucc

SEQ ID NO: 2053512 - RNA, 19 nt, Artificial Sequence
  Description of Artificial Sequence: Synthetic oligonucleotide
cagugacugcacagccugc

SEQ ID NO: 2053513 - RNA, 19 nt, Artificial Sequence
  Description of Artificial Sequence: Synthetic oligonucleotide
ccaccuuaaaagcaaaaua

SEQ ID NO: 2053514 - RNA, 19 nt, Artificial Sequence
  Description of Artificial Sequence: Synthetic oligonucleotide
aguugggaguucaggaaua

SEQ ID NO: 2053515 - RNA, 19 nt, Artificial Sequence
  Description of Artificial Sequence: Synthetic oligonucleotide
gguacaccugacauaaucu

SEQ ID NO: 2053516 - RNA, 19 nt, Artificial Sequence
  Description of Artificial Sequence: Synthetic oligonucleotide
cucgucgauguccacccga

SEQ ID NO: 2053517 - RNA, 19 nt, Artificial Sequence
  Description of Artificial Sequence: Synthetic oligonucleotide
agccccuccccauuucaaa

SEQ ID NO: 2053518 - RNA, 19 nt, Artificial Sequence
  Description of Artificial Sequence: Synthetic oligonucleotide
gugugauagucaaguguca

SEQ ID NO: 2053519 - RNA, 19 nt, Artificial Sequence
  Description of Artificial Sequence: Synthetic oligonucleotide
gugaguacuuucagcacua

SEQ ID NO: 2053520 - RNA, 19 nt, Artificial Sequence
  Description of Artificial Sequence: Synthetic oligonucleotide
guguuacucuguaaaugaa

SEQ ID NO: 2053521 - RNA, 19 nt, Artificial Sequence
  Description of Artificial Sequence: Synthetic oligonucleotide
ggaguaacacugcacugcu

SEQ ID NO: 2053522 - RNA, 19 nt, Artificial Sequence
  Description of Artificial Sequence: Synthetic oligonucleotide
cugggcucgguccuucaca

SEQ ID NO: 2053523 - RNA, 19 nt, Artificial Sequence
  Description of Artificial Sequence: Synthetic oligonucleotide
cuccaccuuaaaagcaaaa

SEQ ID NO: 2053524 - RNA, 19 nt, Artificial Sequence
  Description of Artificial Sequence: Synthetic oligonucleotide
aggaaacaauaagacuauu

SEQ ID NO: 2053525 - RNA, 19 nt, Artificial Sequence
  Description of Artificial Sequence: Synthetic oligonucleotide
uugccgcaggagcccgucc

SEQ ID NO: 2053526 - RNA, 19 nt, Artificial Sequence
  Description of Artificial Sequence: Synthetic oligonucleotide
gagcucggcggcugcccag

SEQ ID NO: 2053527 - RNA, 19 nt, Artificial Sequence
  Description of Artificial Sequence: Synthetic oligonucleotide
gcacuuuacaaugaacccu

SEQ ID NO: 2053528 - RNA, 19 nt, Artificial Sequence
  Description of Artificial Sequence: Synthetic oligonucleotide
cauucauugccaucccuuu

SEQ ID NO: 2053529 - RNA, 19 nt, Artificial Sequence
  Description of Artificial Sequence: Synthetic oligonucleotide
cuagucuuucuugcuguaa

SEQ ID NO: 2053530 - RNA, 19 nt, Artificial Sequence
  Description of Artificial Sequence: Synthetic oligonucleotide
ggagccuaguccuccuaca

SEQ ID NO: 2053531 - RNA, 19 nt, Artificial Sequence
  Description of Artificial Sequence: Synthetic oligonucleotide
ccagucagugugauaguca

SEQ ID NO: 2053532 - RNA, 19 nt, Artificial Sequence
  Description of Artificial Sequence: Synthetic oligonucleotide
ugccaucccuuugcuuacc

SEQ ID NO: 2053533 - RNA, 19 nt, Artificial Sequence
  Description of Artificial Sequence: Synthetic oligonucleotide
caucagacugucauucauu

SEQ ID NO: 2053534 - RNA, 19 nt, Artificial Sequence
  Description of Artificial Sequence: Synthetic oligonucleotide
acaccgcaaucaauagacu

SEQ ID NO: 2053535 - RNA, 19 nt, Artificial Sequence
  Description of Artificial Sequence: Synthetic oligonucleotide
cacuacacccugggcucgg

SEQ ID NO: 2053536 - RNA, 19 nt, Artificial Sequence
  Description of Artificial Sequence: Synthetic oligonucleotide
caccaauccugcaaagaau

SEQ ID NO: 2053537 - RNA, 19 nt, Artificial Sequence
  Description of Artificial Sequence: Synthetic oligonucleotide
ggaaacgugaggacagugu

SEQ ID NO: 2053538 - RNA, 19 nt, Artificial Sequence
  Description of Artificial Sequence: Synthetic oligonucleotide
cugggcauccaaaauucuu

SEQ ID NO: 2053539 - RNA, 19 nt, Artificial Sequence
  Description of Artificial Sequence: Synthetic oligonucleotide
cugcacugcuauuuucugu

SEQ ID NO: 2053540 - RNA, 19 nt, Artificial Sequence
  Description of Artificial Sequence: Synthetic oligonucleotide
acggaaacgugaggacagu

SEQ ID NO: 2053541 - RNA, 19 nt, Artificial Sequence
  Description of Artificial Sequence: Synthetic oligonucleotide
ggcugcauggaaugcccga

SEQ ID NO: 2053542 - RNA, 19 nt, Artificial Sequence
  Description of Artificial Sequence: Synthetic oligonucleotide
gccugucuucucugggaag

SEQ ID NO: 2053543 - RNA, 19 nt, Artificial Sequence
  Description of Artificial Sequence: Synthetic oligonucleotide
cuacacccugggcucgguc

SEQ ID NO: 2053544 - RNA, 19 nt, Artificial Sequence
  Description of Artificial Sequence: Synthetic oligonucleotide
ccgacggaaacgugaggac

SEQ ID NO: 2053545 - RNA, 19 nt, Artificial Sequence
  Description of Artificial Sequence: Synthetic oligonucleotide
gauguccacccgacggaaa

SEQ ID NO: 2053546 - RNA, 19 nt, Artificial Sequence
  Description of Artificial Sequence: Synthetic oligonucleotide
auggagccuaguccuccua

SEQ ID NO: 2053547 - RNA, 19 nt, Artificial Sequence
  Description of Artificial Sequence: Synthetic oligonucleotide
cccuagagagccugucuuc

SEQ ID NO: 2053548 - RNA, 19 nt, Artificial Sequence
  Description of Artificial Sequence: Synthetic oligonucleotide
cuugccgcaggagcccguc

SEQ ID NO: 2053549 - RNA, 19 nt, Artificial Sequence
  Description of Artificial Sequence: Synthetic oligonucleotide
gggccauggcgggagcucg

SEQ ID NO: 2053550 - RNA, 19 nt, Artificial Sequence
  Description of Artificial Sequence: Synthetic oligonucleotide
cccaaauagccccucccca

SEQ ID NO: 2053551 - RNA, 19 nt, Artificial Sequence
  Description of Artificial Sequence: Synthetic oligonucleotide
cccgacggaaacgugagga

SEQ ID NO: 2053552 - RNA, 19 nt, Artificial Sequence
  Description of Artificial Sequence: Synthetic oligonucleotide
ccacccgacggaaacguga

SEQ ID NO: 2053553 - RNA, 19 nt, Artificial Sequence
  Description of Artificial Sequence: Synthetic oligonucleotide
gggaguucaggaauauggu

SEQ ID NO: 2053554 - RNA, 19 nt, Artificial Sequence
  Description of Artificial Sequence: Synthetic oligonucleotide
caccucggcggggucgggg

SEQ ID NO: 2053555 - RNA, 19 nt, Artificial Sequence
  Description of Artificial Sequence: Synthetic oligonucleotide
aggagcccguccaccucgg

SEQ ID NO: 2053556 - RNA, 19 nt, Artificial Sequence
  Description of Artificial Sequence: Synthetic oligonucleotide
cuggcucgccagccgccgc

SEQ ID NO: 2053557 - RNA, 19 nt, Artificial Sequence
  Description of Artificial Sequence: Synthetic oligonucleotide
gcacuacacccugggcucg

SEQ ID NO: 2053558 - RNA, 19 nt, Artificial Sequence
  Description of Artificial Sequence: Synthetic oligonucleotide
guacaaacucucagguuuu

SEQ ID NO: 2053559 - RNA, 19 nt, Artificial Sequence
  Description of Artificial Sequence: Synthetic oligonucleotide
cuauuuucugugggcuucu

SEQ ID NO: 2053560 - RNA, 19 nt, Artificial Sequence
  Description of Artificial Sequence: Synthetic oligonucleotide
acuacacccugggcucggu

SEQ ID NO: 2053561 - RNA, 19 nt, Artificial Sequence
  Description of Artificial Sequence: Synthetic oligonucleotide
gcugcauggaaugcccgaa

SEQ ID NO: 2053562 - RNA, 19 nt, Artificial Sequence
  Description of Artificial Sequence: Synthetic oligonucleotide
cccuuugcuuaccauuuaa

SEQ ID NO: 2053563 - RNA, 19 nt, Artificial Sequence
  Description of Artificial Sequence: Synthetic oligonucleotide
ccauggcgggagcucggcg

SEQ ID NO: 2053564 - RNA, 19 nt, Artificial Sequence
  Description of Artificial Sequence: Synthetic oligonucleotide
ggaagacaguguaucugua

SEQ ID NO: 2053565 - RNA, 19 nt, Artificial Sequence
  Description of Artificial Sequence: Synthetic oligonucleotide
gaucugcaccugcccaaau

SEQ ID NO: 2053566 - RNA, 19 nt, Artificial Sequence
  Description of Artificial Sequence: Synthetic oligonucleotide
cugacauaaucuggccagu

SEQ ID NO: 2053567 - RNA, 19 nt, Artificial Sequence
  Description of Artificial Sequence: Synthetic oligonucleotide
caguguguuccgggccaug

SEQ ID NO: 2053568 - RNA, 19 nt, Artificial Sequence
  Description of Artificial Sequence: Synthetic oligonucleotide
ggagcucggcggcugccca

SEQ ID NO: 2053569 - RNA, 19 nt, Artificial Sequence
  Description of Artificial Sequence: Synthetic oligonucleotide
cgucaacgaauuuguucuc

SEQ ID NO: 2053570 - RNA, 19 nt, Artificial Sequence
  Description of Artificial Sequence: Synthetic oligonucleotide
cacugcucuuaaaguuugu

SEQ ID NO: 2053571 - RNA, 19 nt, Artificial Sequence
  Description of Artificial Sequence: Synthetic oligonucleotide
ggaaugcccgaagcauguc

SEQ ID NO: 2053572 - RNA, 19 nt, Artificial Sequence
  Description of Artificial Sequence: Synthetic oligonucleotide
uugaugcagcaggcacuuu

SEQ ID NO: 2053573 - RNA, 19 nt, Artificial Sequence
  Description of Artificial Sequence: Synthetic oligonucleotide
gggagcucggcggcugccc

SEQ ID NO: 2053574 - RNA, 19 nt, Artificial Sequence
  Description of Artificial Sequence: Synthetic oligonucleotide
ccuccaccuuaaaagcaaa

SEQ ID NO: 2053575 - RNA, 19 nt, Artificial Sequence
  Description of Artificial Sequence: Synthetic oligonucleotide
ggccauggcgggagcucgg

SEQ ID NO: 2053576 - RNA, 19 nt, Artificial Sequence
  Description of Artificial Sequence: Synthetic oligonucleotide
cuggccagucagugugaua

SEQ ID NO: 2053577 - RNA, 19 nt, Artificial Sequence
  Description of Artificial Sequence: Synthetic oligonucleotide
cggaaacgugaggacagug

SEQ ID NO: 2053578 - RNA, 19 nt, Artificial Sequence
  Description of Artificial Sequence: Synthetic oligonucleotide
ccaucagacugucauucau

SEQ ID NO: 2053579 - RNA, 19 nt, Artificial Sequence
  Description of Artificial Sequence: Synthetic oligonucleotide
ggagcccguccaccucggc

SEQ ID NO: 2053580 - RNA, 19 nt, Artificial Sequence
  Description of Artificial Sequence: Synthetic oligonucleotide
gguccauuaucagucccuu

SEQ ID NO: 2053581 - RNA, 19 nt, Artificial Sequence
  Description of Artificial Sequence: Synthetic oligonucleotide
ccuccccauuucaaacaga

SEQ ID NO: 2053582 - RNA, 19 nt, Artificial Sequence
  Description of Artificial Sequence: Synthetic oligonucleotide
ggcgggagcucggcggcug

SEQ ID NO: 2053583 - RNA, 19 nt, Artificial Sequence
  Description of Artificial Sequence: Synthetic oligonucleotide
cgaauuuguucucgucaaa

SEQ ID NO: 2053584 - RNA, 19 nt, Artificial Sequence
  Description of Artificial Sequence: Synthetic oligonucleotide
ccuaguccuccuacagcua

SEQ ID NO: 2053585 - RNA, 19 nt, Artificial Sequence
  Description of Artificial Sequence: Synthetic oligonucleotide
ccugcccaaauagccccuc

SEQ ID NO: 2053586 - RNA, 19 nt, Artificial Sequence
  Description of Artificial Sequence: Synthetic oligonucleotide
ccaauccugcaaagaauuu

SEQ ID NO: 2053587 - RNA, 19 nt, Artificial Sequence
  Description of Artificial Sequence: Synthetic oligonucleotide
ccgcaaucaauagacuaau

SEQ ID NO: 2053588 - RNA, 19 nt, Artificial Sequence
  Description of Artificial Sequence: Synthetic oligonucleotide
cagguacaccugacauaau

SEQ ID NO: 2053589 - RNA, 19 nt, Artificial Sequence
  Description of Artificial Sequence: Synthetic oligonucleotide
gcuuaccauuuaacauaua

SEQ ID NO: 2053590 - RNA, 19 nt, Artificial Sequence
  Description of Artificial Sequence: Synthetic oligonucleotide
cggggucggggccuggcuc

SEQ ID NO: 2053591 - RNA, 19 nt, Artificial Sequence
  Description of Artificial Sequence: Synthetic oligonucleotide
ccgcaaggcugcauggaau

SEQ ID NO: 2053592 - RNA, 19 nt, Artificial Sequence
  Description of Artificial Sequence: Synthetic oligonucleotide
cucggcggggucggggccu

SEQ ID NO: 2053593 - RNA, 19 nt, Artificial Sequence
  Description of Artificial Sequence: Synthetic oligonucleotide
cgauguccacccgacggaa

SEQ ID NO: 2053594 - RNA, 19 nt, Artificial Sequence
  Description of Artificial Sequence: Synthetic oligonucleotide
cgggccauggcgggagcuc

SEQ ID NO: 2053595 - RNA, 19 nt, Artificial Sequence
  Description of Artificial Sequence: Synthetic oligonucleotide
cgggagcucggcggcugcc

SEQ ID NO: 2053596 - RNA, 19 nt, Artificial Sequence
  Description of Artificial Sequence: Synthetic oligonucleotide
ccugcucgucaacgaauuu

SEQ ID NO: 2053597 - RNA, 19 nt, Artificial Sequence
  Description of Artificial Sequence: Synthetic oligonucleotide
gcucgguccuucacagcuu

SEQ ID NO: 2053598 - RNA, 19 nt, Artificial Sequence
  Description of Artificial Sequence: Synthetic oligonucleotide
ccaccucggcggggucggg

SEQ ID NO: 2053599 - RNA, 19 nt, Artificial Sequence
  Description of Artificial Sequence: Synthetic oligonucleotide
ccgggccauggcgggagcu

SEQ ID NO: 2053600 - RNA, 19 nt, Artificial Sequence
  Description of Artificial Sequence: Synthetic oligonucleotide
aagacacucagcuuucccc

SEQ ID NO: 2053601 - RNA, 19 nt, Artificial Sequence
  Description of Artificial Sequence: Synthetic oligonucleotide
ucuuaugcaagucuagaag

SEQ ID NO: 2053602 - RNA, 19 nt, Artificial Sequence
  Description of Artificial Sequence: Synthetic oligonucleotide
ucaagcaugugaaaggugc

SEQ ID NO: 2053603 - RNA, 19 nt, Artificial Sequence
  Description of Artificial Sequence: Synthetic oligonucleotide
ucuucaucuauaagggucg

SEQ ID NO: 2053604 - RNA, 19 nt, Artificial Sequence
  Description of Artificial Sequence: Synthetic oligonucleotide
auaaucucuggcuaggcgg

SEQ ID NO: 2053605 - RNA, 19 nt, Artificial Sequence
  Description of Artificial Sequence: Synthetic oligonucleotide
cacgaaaaugucuaguucg

SEQ ID NO: 2053606 - RNA, 19 nt, Artificial Sequence
  Description of Artificial Sequence: Synthetic oligonucleotide
ucugacguccuuauugugg

SEQ ID NO: 2053607 - RNA, 19 nt, Artificial Sequence
  Description of Artificial Sequence: Synthetic oligonucleotide
cuggauauuauccaccagg

SEQ ID NO: 2053608 - RNA, 19 nt, Artificial Sequence
  Description of Artificial Sequence: Synthetic oligonucleotide
uuuacaagguccacaaaca

SEQ ID NO: 2053609 - RNA, 19 nt, Artificial Sequence
  Description of Artificial Sequence: Synthetic oligonucleotide
acugaguaaccauccagcc

SEQ ID NO: 2053610 - RNA, 19 nt, Artificial Sequence
  Description of Artificial Sequence: Synthetic oligonucleotide
aaguugucaaacugccuac

SEQ ID NO: 2053611 - RNA, 19 nt, Artificial Sequence
  Description of Artificial Sequence: Synthetic oligonucleotide
aaugaggagcgccugucgg

SEQ ID NO: 2053612 - RNA, 19 nt, Artificial Sequence
  Description of Artificial Sequence: Synthetic oligonucleotide
guaauuccaguuuuggugc

SEQ ID NO: 2053613 - RNA, 19 nt, Artificial Sequence
  Description of Artificial Sequence: Synthetic oligonucleotide
uccuguuucaaaucgguug

SEQ ID NO: 2053614 - RNA, 19 nt, Artificial Sequence
  Description of Artificial Sequence: Synthetic oligonucleotide
ucuauaagggucguguugc

SEQ ID NO: 2053615 - RNA, 19 nt, Artificial Sequence
  Description of Artificial Sequence: Synthetic oligonucleotide
ugucaaacugccuacggca

SEQ ID NO: 2053616 - RNA, 19 nt, Artificial Sequence
  Description of Artificial Sequence: Synthetic oligonucleotide
agaccucccgaacaaaggc

SEQ ID NO: 2053617 - RNA, 19 nt, Artificial Sequence
  Description of Artificial Sequence: Synthetic oligonucleotide
aaagucaccaaagcucagg

SEQ ID NO: 2053618 - RNA, 19 nt, Artificial Sequence
  Description of Artificial Sequence: Synthetic oligonucleotide
aguguugcuggauauuauc

SEQ ID NO: 2053619 - RNA, 19 nt, Artificial Sequence
  Description of Artificial Sequence: Synthetic oligonucleotide
ucgucaaagguguaguacc

SEQ ID NO: 2053620 - RNA, 19 nt, Artificial Sequence
  Description of Artificial Sequence: Synthetic oligonucleotide
uaccucucaaugaggagcg

SEQ ID NO: 2053621 - RNA, 19 nt, Artificial Sequence
  Description of Artificial Sequence: Synthetic oligonucleotide
ucacugaguaaccauccag

SEQ ID NO: 2053622 - RNA, 19 nt, Artificial Sequence
  Description of Artificial Sequence: Synthetic oligonucleotide
ugaagacucgcuuaaaguu

SEQ ID NO: 2053623 - RNA, 19 nt, Artificial Sequence
  Description of Artificial Sequence: Synthetic oligonucleotide
ucaucuauaagggucgugu

SEQ ID NO: 2053624 - RNA, 19 nt, Artificial Sequence
  Description of Artificial Sequence: Synthetic oligonucleotide
ucuugguacccuuggacag

SEQ ID NO: 2053625 - RNA, 19 nt, Artificial Sequence
  Description of Artificial Sequence: Synthetic oligonucleotide
uugaagacucgcuuaaagu

SEQ ID NO: 2053626 - RNA, 19 nt, Artificial Sequence
  Description of Artificial Sequence: Synthetic oligonucleotide
uacuagaacuuugagcucc

SEQ ID NO: 2053627 - RNA, 19 nt, Artificial Sequence
  Description of Artificial Sequence: Synthetic oligonucleotide
uggcuaggcggucagagag

SEQ ID NO: 2053628 - RNA, 19 nt, Artificial Sequence
  Description of Artificial Sequence: Synthetic oligonucleotide
aacaaaggccucgucaaag

SEQ ID NO: 2053629 - RNA, 19 nt, Artificial Sequence
  Description of Artificial Sequence: Synthetic oligonucleotide
uuauugugggucagcuugg

SEQ ID NO: 2053630 - RNA, 19 nt, Artificial Sequence
  Description of Artificial Sequence: Synthetic oligonucleotide
agagaggaggaaguguugc

SEQ ID NO: 2053631 - RNA, 19 nt, Artificial Sequence
  Description of Artificial Sequence: Synthetic oligonucleotide
gagucgacggcuccaaggg

SEQ ID NO: 2053632 - RNA, 19 nt, Artificial Sequence
  Description of Artificial Sequence: Synthetic oligonucleotide
ucaaagguguaguaccucu

SEQ ID NO: 2053633 - RNA, 19 nt, Artificial Sequence
  Description of Artificial Sequence: Synthetic oligonucleotide
uaguaccucucaaugagga

SEQ ID NO: 2053634 - RNA, 19 nt, Artificial Sequence
  Description of Artificial Sequence: Synthetic oligonucleotide
uuuccuguuucaaaucggu

SEQ ID NO: 2053635 - RNA, 19 nt, Artificial Sequence
  Description of Artificial Sequence: Synthetic oligonucleotide
cacugaguaaccauccagc

SEQ ID NO: 2053636 - RNA, 19 nt, Artificial Sequence
  Description of Artificial Sequence: Synthetic oligonucleotide
augcaagucuagaaggucc

SEQ ID NO: 2053637 - RNA, 19 nt, Artificial Sequence
  Description of Artificial Sequence: Synthetic oligonucleotide
uucuugguacccuuggaca

SEQ ID NO: 2053638 - RNA, 19 nt, Artificial Sequence
  Description of Artificial Sequence: Synthetic oligonucleotide
uugucaaacugccuacggc

SEQ ID NO: 2053639 - RNA, 19 nt, Artificial Sequence
  Description of Artificial Sequence: Synthetic oligonucleotide
aagucaccaaagcucaggu

SEQ ID NO: 2053640 - RNA, 19 nt, Artificial Sequence
  Description of Artificial Sequence: Synthetic oligonucleotide
cugacguccuuauuguggg

SEQ ID NO: 2053641 - RNA, 19 nt, Artificial Sequence
  Description of Artificial Sequence: Synthetic oligonucleotide
gaagacucgcuuaaaguug

SEQ ID NO: 2053642 - RNA, 19 nt, Artificial Sequence
  Description of Artificial Sequence: Synthetic oligonucleotide
aaagacgauggcugcauaa

SEQ ID NO: 2053643 - RNA, 19 nt, Artificial Sequence
  Description of Artificial Sequence: Synthetic oligonucleotide
uucaaaucgguuguuggca

SEQ ID NO: 2053644 - RNA, 19 nt, Artificial Sequence
  Description of Artificial Sequence: Synthetic oligonucleotide
aucuauaagggucguguug

SEQ ID NO: 2053645 - RNA, 19 nt, Artificial Sequence
  Description of Artificial Sequence: Synthetic oligonucleotide
cauaaucucuggcuaggcg

SEQ ID NO: 2053646 - RNA, 19 nt, Artificial Sequence
  Description of Artificial Sequence: Synthetic oligonucleotide
cuuuccuguuucaaaucgg

SEQ ID NO: 2053647 - RNA, 19 nt, Artificial Sequence
  Description of Artificial Sequence: Synthetic oligonucleotide
auaagggucguguugccca

SEQ ID NO: 2053648 - RNA, 19 nt, Artificial Sequence
  Description of Artificial Sequence: Synthetic oligonucleotide
acgucuucaucuauaaggg

SEQ ID NO: 2053649 - RNA, 19 nt, Artificial Sequence
  Description of Artificial Sequence: Synthetic oligonucleotide
cuugaaguugguuuccauc

SEQ ID NO: 2053650 - RNA, 19 nt, Artificial Sequence
  Description of Artificial Sequence: Synthetic oligonucleotide
guugucaaacugccuacgg

SEQ ID NO: 2053651 - RNA, 19 nt, Artificial Sequence
  Description of Artificial Sequence: Synthetic oligonucleotide
acgaaaaugucuaguucgc

SEQ ID NO: 2053652 - RNA, 19 nt, Artificial Sequence
  Description of Artificial Sequence: Synthetic oligonucleotide
acggcaggguuccacaaac

SEQ ID NO: 2053653 - RNA, 19 nt, Artificial Sequence
  Description of Artificial Sequence: Synthetic oligonucleotide
guaaccauccagccagagg

SEQ ID NO: 2053654 - RNA, 19 nt, Artificial Sequence
  Description of Artificial Sequence: Synthetic oligonucleotide
ugcauaaucucuggcuagg

SEQ ID NO: 2053655 - RNA, 19 nt, Artificial Sequence
  Description of Artificial Sequence: Synthetic oligonucleotide
caaagcucagguacuguag

SEQ ID NO: 2053656 - RNA, 19 nt, Artificial Sequence
  Description of Artificial Sequence: Synthetic oligonucleotide
aagaugagcugguguagca

SEQ ID NO: 2053657 - RNA, 19 nt, Artificial Sequence
  Description of Artificial Sequence: Synthetic oligonucleotide
uauuccggagcguacucgc

SEQ ID NO: 2053658 - RNA, 19 nt, Artificial Sequence
  Description of Artificial Sequence: Synthetic oligonucleotide
guaccucucaaugaggagc

SEQ ID NO: 2053659 - RNA, 19 nt, Artificial Sequence
  Description of Artificial Sequence: Synthetic oligonucleotide
agacgauggcugcauaauc

SEQ ID NO: 2053660 - RNA, 19 nt, Artificial Sequence
  Description of Artificial Sequence: Synthetic oligonucleotide
aagaccucccgaacaaagg

SEQ ID NO: 2053661 - RNA, 19 nt, Artificial Sequence
  Description of Artificial Sequence: Synthetic oligonucleotide
aaugucuaguucgcugguc

SEQ ID NO: 2053662 - RNA, 19 nt, Artificial Sequence
  Description of Artificial Sequence: Synthetic oligonucleotide
agagccaccgcaucguuca

SEQ ID NO: 2053663 - RNA, 19 nt, Artificial Sequence
  Description of Artificial Sequence: Synthetic oligonucleotide
aaucaugauagaggcgcag

SEQ ID NO: 2053664 - RNA, 19 nt, Artificial Sequence
  Description of Artificial Sequence: Synthetic oligonucleotide
ucucugacguccuuauugu

SEQ ID NO: 2053665 - RNA, 19 nt, Artificial Sequence
  Description of Artificial Sequence: Synthetic oligonucleotide
acggaggguacccauguag

SEQ ID NO: 2053666 - RNA, 19 nt, Artificial Sequence
  Description of Artificial Sequence: Synthetic oligonucleotide
uaaucucuggcuaggcggu

SEQ ID NO: 2053667 - RNA, 19 nt, Artificial Sequence
  Description of Artificial Sequence: Synthetic oligonucleotide
ucaugauagaggcgcagaa

SEQ ID NO: 2053668 - RNA, 19 nt, Artificial Sequence
  Description of Artificial Sequence: Synthetic oligonucleotide
aguauuccggagcguacuc

SEQ ID NO: 2053669 - RNA, 19 nt, Artificial Sequence
  Description of Artificial Sequence: Synthetic oligonucleotide
ucugcagcacuccugcggu

SEQ ID NO: 2053670 - RNA, 19 nt, Artificial Sequence
  Description of Artificial Sequence: Synthetic oligonucleotide
gguguagcagcuucggcgg

SEQ ID NO: 2053671 - RNA, 19 nt, Artificial Sequence
  Description of Artificial Sequence: Synthetic oligonucleotide
augucuaguucgcugguca

SEQ ID NO: 2053672 - RNA, 19 nt, Artificial Sequence
  Description of Artificial Sequence: Synthetic oligonucleotide
gaggguacccauguagcgg

SEQ ID NO: 2053673 - RNA, 19 nt, Artificial Sequence
  Description of Artificial Sequence: Synthetic oligonucleotide
uauuauccaccagggagcc

SEQ ID NO: 2053674 - RNA, 19 nt, Artificial Sequence
  Description of Artificial Sequence: Synthetic oligonucleotide
acucgcuuaaaguugucaa

SEQ ID NO: 2053675 - RNA, 19 nt, Artificial Sequence
  Description of Artificial Sequence: Synthetic oligonucleotide
caugugaaaggugcgguag

SEQ ID NO: 2053676 - RNA, 19 nt, Artificial Sequence
  Description of Artificial Sequence: Synthetic oligonucleotide
ucgcagagccaccgcaucg

SEQ ID NO: 2053677 - RNA, 19 nt, Artificial Sequence
  Description of Artificial Sequence: Synthetic oligonucleotide
aguaccucucaaugaggag

SEQ ID NO: 2053678 - RNA, 19 nt, Artificial Sequence
  Description of Artificial Sequence: Synthetic oligonucleotide
ggagcguacucgcagagcc

SEQ ID NO: 2053679 - RNA, 19 nt, Artificial Sequence
  Description of Artificial Sequence: Synthetic oligonucleotide
agagccgcacaucacucag

SEQ ID NO: 2053680 - RNA, 19 nt, Artificial Sequence
  Description of Artificial Sequence: Synthetic oligonucleotide
augaggagcgccugucggg

SEQ ID NO: 2053681 - RNA, 19 nt, Artificial Sequence
  Description of Artificial Sequence: Synthetic oligonucleotide
gauagaggcgcagaaggca

SEQ ID NO: 2053682 - RNA, 19 nt, Artificial Sequence
  Description of Artificial Sequence: Synthetic oligonucleotide
uuccggagcguacucgcag

SEQ ID NO: 2053683 - RNA, 19 nt, Artificial Sequence
  Description of Artificial Sequence: Synthetic oligonucleotide
ucaaaucgguuguuggcaa

SEQ ID NO: 2053684 - RNA, 19 nt, Artificial Sequence
  Description of Artificial Sequence: Synthetic oligonucleotide
guguugcuggauauuaucc

SEQ ID NO: 2053685 - RNA, 19 nt, Artificial Sequence
  Description of Artificial Sequence: Synthetic oligonucleotide
augucguccaucugggagu

SEQ ID NO: 2053686 - RNA, 19 nt, Artificial Sequence
  Description of Artificial Sequence: Synthetic oligonucleotide
ucuugcccaagaccucccg

SEQ ID NO: 2053687 - RNA, 19 nt, Artificial Sequence
  Description of Artificial Sequence: Synthetic oligonucleotide
agaggcgauacacgucuuc

SEQ ID NO: 2053688 - RNA, 19 nt, Artificial Sequence
  Description of Artificial Sequence: Synthetic oligonucleotide
aguugucaaacugccuacg

SEQ ID NO: 2053689 - RNA, 19 nt, Artificial Sequence
  Description of Artificial Sequence: Synthetic oligonucleotide
cugcauaaucucuggcuag

SEQ ID NO: 2053690 - RNA, 19 nt, Artificial Sequence
  Description of Artificial Sequence: Synthetic oligonucleotide
uauaagggucguguugccc

SEQ ID NO: 2053691 - RNA, 19 nt, Artificial Sequence
  Description of Artificial Sequence: Synthetic oligonucleotide
uaugcaagucuagaagguc

SEQ ID NO: 2053692 - RNA, 19 nt, Artificial Sequence
  Description of Artificial Sequence: Synthetic oligonucleotide
ucaaacugccuacggcaac

SEQ ID NO: 2053693 - RNA, 19 nt, Artificial Sequence
  Description of Artificial Sequence: Synthetic oligonucleotide
aagagccgcacaucacuca

SEQ ID NO: 2053694 - RNA, 19 nt, Artificial Sequence
  Description of Artificial Sequence: Synthetic oligonucleotide
caccgcaucguucacugag

SEQ ID NO: 2053695 - RNA, 19 nt, Artificial Sequence
  Description of Artificial Sequence: Synthetic oligonucleotide
aagguguaguaccucucaa

SEQ ID NO: 2053696 - RNA, 19 nt, Artificial Sequence
  Description of Artificial Sequence: Synthetic oligonucleotide
agcguacucgcagagccac

SEQ ID NO: 2053697 - RNA, 19 nt, Artificial Sequence
  Description of Artificial Sequence: Synthetic oligonucleotide
caugauagaggcgcagaag

SEQ ID NO: 2053698 - RNA, 19 nt, Artificial Sequence
  Description of Artificial Sequence: Synthetic oligonucleotide
guagcggucccagaggacc

SEQ ID NO: 2053699 - RNA, 19 nt, Artificial Sequence
  Description of Artificial Sequence: Synthetic oligonucleotide
aaaucgguuguuggcaaaa

SEQ ID NO: 2053700 - RNA, 19 nt, Artificial Sequence
  Description of Artificial Sequence: Synthetic oligonucleotide
uguagcagcuucggcggcg

SEQ ID NO: 2053701 - RNA, 19 nt, Artificial Sequence
  Description of Artificial Sequence: Synthetic oligonucleotide
agccgcacaucacucagug

SEQ ID NO: 2053702 - RNA, 19 nt, Artificial Sequence
  Description of Artificial Sequence: Synthetic oligonucleotide
ggagucgacggcuccaagg

SEQ ID NO: 2053703 - RNA, 19 nt, Artificial Sequence
  Description of Artificial Sequence: Synthetic oligonucleotide
guaguaccucucaaugagg

SEQ ID NO: 2053704 - RNA, 19 nt, Artificial Sequence
  Description of Artificial Sequence: Synthetic oligonucleotide
cuacggcaacucuugagug

SEQ ID NO: 2053705 - RNA, 19 nt, Artificial Sequence
  Description of Artificial Sequence: Synthetic oligonucleotide
aggguacccauguagcggu

SEQ ID NO: 2053706 - RNA, 19 nt, Artificial Sequence
  Description of Artificial Sequence: Synthetic oligonucleotide
agccagaggcgauacacgu

SEQ ID NO: 2053707 - RNA, 19 nt, Artificial Sequence
  Description of Artificial Sequence: Synthetic oligonucleotide
aagacgauggcugcauaau

SEQ ID NO: 2053708 - RNA, 19 nt, Artificial Sequence
  Description of Artificial Sequence: Synthetic oligonucleotide
ccgcacaucacucaguggc

SEQ ID NO: 2053709 - RNA, 19 nt, Artificial Sequence
  Description of Artificial Sequence: Synthetic oligonucleotide
agaacggcaggguuccaca

SEQ ID NO: 2053710 - RNA, 19 nt, Artificial Sequence
  Description of Artificial Sequence: Synthetic oligonucleotide
cucgucaaagguguaguac

SEQ ID NO: 2053711 - RNA, 19 nt, Artificial Sequence
  Description of Artificial Sequence: Synthetic oligonucleotide
caaugaggagcgccugucg

SEQ ID NO: 2053712 - RNA, 19 nt, Artificial Sequence
  Description of Artificial Sequence: Synthetic oligonucleotide
cagugaauacugguugagg

SEQ ID NO: 2053713 - RNA, 19 nt, Artificial Sequence
  Description of Artificial Sequence: Synthetic oligonucleotide
gcuccaguauuccggagcg

SEQ ID NO: 2053714 - RNA, 19 nt, Artificial Sequence
  Description of Artificial Sequence: Synthetic oligonucleotide
acaaacuguaggcuucuuu

SEQ ID NO: 2053715 - RNA, 19 nt, Artificial Sequence
  Description of Artificial Sequence: Synthetic oligonucleotide
gcaucguucacugaguaac

SEQ ID NO: 2053716 - RNA, 19 nt, Artificial Sequence
  Description of Artificial Sequence: Synthetic oligonucleotide
cuauaagggucguguugcc

SEQ ID NO: 2053717 - RNA, 19 nt, Artificial Sequence
  Description of Artificial Sequence: Synthetic oligonucleotide
gaaguguugcuggauauua

SEQ ID NO: 2053718 - RNA, 19 nt, Artificial Sequence
  Description of Artificial Sequence: Synthetic oligonucleotide
aggaaguguugcuggauau

SEQ ID NO: 2053719 - RNA, 19 nt, Artificial Sequence
  Description of Artificial Sequence: Synthetic oligonucleotide
ucgacggcuccaagggucc

SEQ ID NO: 2053720 - RNA, 19 nt, Artificial Sequence
  Description of Artificial Sequence: Synthetic oligonucleotide
aaaagacgauggcugcaua

SEQ ID NO: 2053721 - RNA, 19 nt, Artificial Sequence
  Description of Artificial Sequence: Synthetic oligonucleotide
guauuccggagcguacucg

SEQ ID NO: 2053722 - RNA, 19 nt, Artificial Sequence
  Description of Artificial Sequence: Synthetic oligonucleotide
cucaagcaugugaaaggug

SEQ ID NO: 2053723 - RNA, 19 nt, Artificial Sequence
  Description of Artificial Sequence: Synthetic oligonucleotide
gucagaacggcaggguucc

SEQ ID NO: 2053724 - RNA, 19 nt, Artificial Sequence
  Description of Artificial Sequence: Synthetic oligonucleotide
caaagguguaguaccucuc

SEQ ID NO: 2053725 - RNA, 19 nt, Artificial Sequence
  Description of Artificial Sequence: Synthetic oligonucleotide
uacacaccaggcucuuaug

SEQ ID NO: 2053726 - RNA, 19 nt, Artificial Sequence
  Description of Artificial Sequence: Synthetic oligonucleotide
acacgucuucaucuauaag

SEQ ID NO: 2053727 - RNA, 19 nt, Artificial Sequence
  Description of Artificial Sequence: Synthetic oligonucleotide
gugaauacugguugaggaa

SEQ ID NO: 2053728 - RNA, 19 nt, Artificial Sequence
  Description of Artificial Sequence: Synthetic oligonucleotide
aacugccuacggcaacucu

SEQ ID NO: 2053729 - RNA, 19 nt, Artificial Sequence
  Description of Artificial Sequence: Synthetic oligonucleotide
agcacuccugcgguggcgc

SEQ ID NO: 2053730 - RNA, 19 nt, Artificial Sequence
  Description of Artificial Sequence: Synthetic oligonucleotide
ggguuccacaaacuguagg

SEQ ID NO: 2053731 - RNA, 19 nt, Artificial Sequence
  Description of Artificial Sequence: Synthetic oligonucleotide
agguguaguaccucucaau

SEQ ID NO: 2053732 - RNA, 19 nt, Artificial Sequence
  Description of Artificial Sequence: Synthetic oligonucleotide
gaguguaauuccaguuuug

SEQ ID NO: 2053733 - RNA, 19 nt, Artificial Sequence
  Description of Artificial Sequence: Synthetic oligonucleotide
ucguucacugaguaaccau

SEQ ID NO: 2053734 - RNA, 19 nt, Artificial Sequence
  Description of Artificial Sequence: Synthetic oligonucleotide
cucuuaugcaagucuagaa

SEQ ID NO: 2053735 - RNA, 19 nt, Artificial Sequence
  Description of Artificial Sequence: Synthetic oligonucleotide
uugcccaagaccucccgaa

SEQ ID NO: 2053736 - RNA, 19 nt, Artificial Sequence
  Description of Artificial Sequence: Synthetic oligonucleotide
cagccagaggcgauacacg

SEQ ID NO: 2053737 - RNA, 19 nt, Artificial Sequence
  Description of Artificial Sequence: Synthetic oligonucleotide
cugccuacggcaacucuug

SEQ ID NO: 2053738 - RNA, 19 nt, Artificial Sequence
  Description of Artificial Sequence: Synthetic oligonucleotide
uccaguauuccggagcgua

SEQ ID NO: 2053739 - RNA, 19 nt, Artificial Sequence
  Description of Artificial Sequence: Synthetic oligonucleotide
gaccucccgaacaaaggcc

SEQ ID NO: 2053740 - RNA, 19 nt, Artificial Sequence
  Description of Artificial Sequence: Synthetic oligonucleotide
augugaaaggugcgguagu

SEQ ID NO: 2053741 - RNA, 19 nt, Artificial Sequence
  Description of Artificial Sequence: Synthetic oligonucleotide
ucaaugaggagcgccuguc

SEQ ID NO: 2053742 - RNA, 19 nt, Artificial Sequence
  Description of Artificial Sequence: Synthetic oligonucleotide
cuggaucauaagcucagca

SEQ ID NO: 2053743 - RNA, 19 nt, Artificial Sequence
  Description of Artificial Sequence: Synthetic oligonucleotide
aucaugauagaggcgcaga

SEQ ID NO: 2053744 - RNA, 19 nt, Artificial Sequence
  Description of Artificial Sequence: Synthetic oligonucleotide
agccccgcauuucuuccac

SEQ ID NO: 2053745 - RNA, 19 nt, Artificial Sequence
  Description of Artificial Sequence: Synthetic oligonucleotide
cuuccaccaccuugaagac

SEQ ID NO: 2053746 - RNA, 19 nt, Artificial Sequence
  Description of Artificial Sequence: Synthetic oligonucleotide
ggcaggguuccacaaacug

SEQ ID NO: 2053747 - RNA, 19 nt, Artificial Sequence
  Description of Artificial Sequence: Synthetic oligonucleotide
acguccuuauuguggguca

SEQ ID NO: 2053748 - RNA, 19 nt, Artificial Sequence
  Description of Artificial Sequence: Synthetic oligonucleotide
aggagcgccugucgggagg

SEQ ID NO: 2053749 - RNA, 19 nt, Artificial Sequence
  Description of Artificial Sequence: Synthetic oligonucleotide
ucuggaucauaagcucagc

SEQ ID NO: 2053750 - RNA, 19 nt, Artificial Sequence
  Description of Artificial Sequence: Synthetic oligonucleotide
uucaucuauaagggucgug

SEQ ID NO: 2053751 - RNA, 19 nt, Artificial Sequence
  Description of Artificial Sequence: Synthetic oligonucleotide
caggguuccacaaacugua

SEQ ID NO: 2053752 - RNA, 19 nt, Artificial Sequence
  Description of Artificial Sequence: Synthetic oligonucleotide
gacguccuuauuguggguc

SEQ ID NO: 2053753 - RNA, 19 nt, Artificial Sequence
  Description of Artificial Sequence: Synthetic oligonucleotide
uuccuguuucaaaucgguu

SEQ ID NO: 2053754 - RNA, 19 nt, Artificial Sequence
  Description of Artificial Sequence: Synthetic oligonucleotide
cuacuagaacuuugagcuc

SEQ ID NO: 2053755 - RNA, 19 nt, Artificial Sequence
  Description of Artificial Sequence: Synthetic oligonucleotide
uauugugggucagcuuggc

SEQ ID NO: 2053756 - RNA, 19 nt, Artificial Sequence
  Description of Artificial Sequence: Synthetic oligonucleotide
uguugcccacgaaaauguc

SEQ ID NO: 2053757 - RNA, 19 nt, Artificial Sequence
  Description of Artificial Sequence: Synthetic oligonucleotide
gaggcgauacacgucuuca

SEQ ID NO: 2053758 - RNA, 19 nt, Artificial Sequence
  Description of Artificial Sequence: Synthetic oligonucleotide
cagcuacuagaacuuugag

SEQ ID NO: 2053759 - RNA, 19 nt, Artificial Sequence
  Description of Artificial Sequence: Synthetic oligonucleotide
uggucagaacggcaggguu

SEQ ID NO: 2053760 - RNA, 19 nt, Artificial Sequence
  Description of Artificial Sequence: Synthetic oligonucleotide
cacaucacucaguggccag

SEQ ID NO: 2053761 - RNA, 19 nt, Artificial Sequence
  Description of Artificial Sequence: Synthetic oligonucleotide
guacccauguagcgguccc

SEQ ID NO: 2053762 - RNA, 19 nt, Artificial Sequence
  Description of Artificial Sequence: Synthetic oligonucleotide
ggaguggacagacagugaa

SEQ ID NO: 2053763 - RNA, 19 nt, Artificial Sequence
  Description of Artificial Sequence: Synthetic oligonucleotide
ugcgguggcgccugucugc

SEQ ID NO: 2053764 - RNA, 19 nt, Artificial Sequence
  Description of Artificial Sequence: Synthetic oligonucleotide
ugaggagcgccugucggga

SEQ ID NO: 2053765 - RNA, 19 nt, Artificial Sequence
  Description of Artificial Sequence: Synthetic oligonucleotide
cugaguaaccauccagcca

SEQ ID NO: 2053766 - RNA, 19 nt, Artificial Sequence
  Description of Artificial Sequence: Synthetic oligonucleotide
aguaaccauccagccagag

SEQ ID NO: 2053767 - RNA, 19 nt, Artificial Sequence
  Description of Artificial Sequence: Synthetic oligonucleotide
gaagagccgcacaucacuc

SEQ ID NO: 2053768 - RNA, 19 nt, Artificial Sequence
  Description of Artificial Sequence: Synthetic oligonucleotide
cuccuucaagucuuggaga

SEQ ID NO: 2053769 - RNA, 19 nt, Artificial Sequence
  Description of Artificial Sequence: Synthetic oligonucleotide
ucguguugcccacgaaaau

SEQ ID NO: 2053770 - RNA, 19 nt, Artificial Sequence
  Description of Artificial Sequence: Synthetic oligonucleotide
auuauccaccagggagccc

SEQ ID NO: 2053771 - RNA, 19 nt, Artificial Sequence
  Description of Artificial Sequence: Synthetic oligonucleotide
uguagcggucccagaggac

SEQ ID NO: 2053772 - RNA, 19 nt, Artificial Sequence
  Description of Artificial Sequence: Synthetic oligonucleotide
agucgcucaagcaugugaa

SEQ ID NO: 2053773 - RNA, 19 nt, Artificial Sequence
  Description of Artificial Sequence: Synthetic oligonucleotide
gacucgcuuaaaguuguca

SEQ ID NO: 2053774 - RNA, 19 nt, Artificial Sequence
  Description of Artificial Sequence: Synthetic oligonucleotide
guccaucugggagucgacg

SEQ ID NO: 2053775 - RNA, 19 nt, Artificial Sequence
  Description of Artificial Sequence: Synthetic oligonucleotide
ugcccaagaccucccgaac

SEQ ID NO: 2053776 - RNA, 19 nt, Artificial Sequence
  Description of Artificial Sequence: Synthetic oligonucleotide
gcgguagugguccauggug

SEQ ID NO: 2053777 - RNA, 19 nt, Artificial Sequence
  Description of Artificial Sequence: Synthetic oligonucleotide
uccggagcguacucgcaga

SEQ ID NO: 2053778 - RNA, 19 nt, Artificial Sequence
  Description of Artificial Sequence: Synthetic oligonucleotide
ugucuaguucgcuggucau

SEQ ID NO: 2053779 - RNA, 19 nt, Artificial Sequence
  Description of Artificial Sequence: Synthetic oligonucleotide
uugguacccuuggacagcu

SEQ ID NO: 2053780 - RNA, 19 nt, Artificial Sequence
  Description of Artificial Sequence: Synthetic oligonucleotide
ucgcucugcagcacuccug

SEQ ID NO: 2053781 - RNA, 19 nt, Artificial Sequence
  Description of Artificial Sequence: Synthetic oligonucleotide
aucguucacugaguaacca

SEQ ID NO: 2053782 - RNA, 19 nt, Artificial Sequence
  Description of Artificial Sequence: Synthetic oligonucleotide
gaaaggugcgguagugguc

SEQ ID NO: 2053783 - RNA, 19 nt, Artificial Sequence
  Description of Artificial Sequence: Synthetic oligonucleotide
acucaguggccagugguca

SEQ ID NO: 2053784 - RNA, 19 nt, Artificial Sequence
  Description of Artificial Sequence: Synthetic oligonucleotide
aaguguugcuggauauuau

SEQ ID NO: 2053785 - RNA, 19 nt, Artificial Sequence
  Description of Artificial Sequence: Synthetic oligonucleotide
cucaguggccaguggucag

SEQ ID NO: 2053786 - RNA, 19 nt, Artificial Sequence
  Description of Artificial Sequence: Synthetic oligonucleotide
ugucgggagggagggaucu

SEQ ID NO: 2053787 - RNA, 19 nt, Artificial Sequence
  Description of Artificial Sequence: Synthetic oligonucleotide
cucugacguccuuauugug

SEQ ID NO: 2053788 - RNA, 19 nt, Artificial Sequence
  Description of Artificial Sequence: Synthetic oligonucleotide
ucaguggccaguggucaga

SEQ ID NO: 2053789 - RNA, 19 nt, Artificial Sequence
  Description of Artificial Sequence: Synthetic oligonucleotide
cuugaguguaauuccaguu

SEQ ID NO: 2053790 - RNA, 19 nt, Artificial Sequence
  Description of Artificial Sequence: Synthetic oligonucleotide
caaacaggucucugacguc

SEQ ID NO: 2053791 - RNA, 19 nt, Artificial Sequence
  Description of Artificial Sequence: Synthetic oligonucleotide
cgcucaagcaugugaaagg

SEQ ID NO: 2053792 - RNA, 19 nt, Artificial Sequence
  Description of Artificial Sequence: Synthetic oligonucleotide
gagggaucuggaagaugag

SEQ ID NO: 2053793 - RNA, 19 nt, Artificial Sequence
  Description of Artificial Sequence: Synthetic oligonucleotide
uagcggucccagaggaccu

SEQ ID NO: 2053794 - RNA, 19 nt, Artificial Sequence
  Description of Artificial Sequence: Synthetic oligonucleotide
acccauguagcggucccag

SEQ ID NO: 2053795 - RNA, 19 nt, Artificial Sequence
  Description of Artificial Sequence: Synthetic oligonucleotide
ggcgauacacgucuucauc

SEQ ID NO: 2053796 - RNA, 19 nt, Artificial Sequence
  Description of Artificial Sequence: Synthetic oligonucleotide
aagggucguguugcccacg

SEQ ID NO: 2053797 - RNA, 19 nt, Artificial Sequence
  Description of Artificial Sequence: Synthetic oligonucleotide
cagucgcucaagcauguga

SEQ ID NO: 2053798 - RNA, 19 nt, Artificial Sequence
  Description of Artificial Sequence: Synthetic oligonucleotide
uccccggagggcaguacac

SEQ ID NO: 2053799 - RNA, 19 nt, Artificial Sequence
  Description of Artificial Sequence: Synthetic oligonucleotide
gauacacgucuucaucuau

SEQ ID NO: 2053800 - RNA, 19 nt, Artificial Sequence
  Description of Artificial Sequence: Synthetic oligonucleotide
caucacucaguggccagug

SEQ ID NO: 2053801 - RNA, 19 nt, Artificial Sequence
  Description of Artificial Sequence: Synthetic oligonucleotide
ccgcauuucuuccaccacc

SEQ ID NO: 2053802 - RNA, 19 nt, Artificial Sequence
  Description of Artificial Sequence: Synthetic oligonucleotide
gcugcauaaucucuggcua

SEQ ID NO: 2053803 - RNA, 19 nt, Artificial Sequence
  Description of Artificial Sequence: Synthetic oligonucleotide
gucgacggcuccaaggguc

SEQ ID NO: 2053804 - RNA, 19 nt, Artificial Sequence
  Description of Artificial Sequence: Synthetic oligonucleotide
gucguguugcccacgaaaa

SEQ ID NO: 2053805 - RNA, 19 nt, Artificial Sequence
  Description of Artificial Sequence: Synthetic oligonucleotide
agaagguccuugucagcua

SEQ ID NO: 2053806 - RNA, 19 nt, Artificial Sequence
  Description of Artificial Sequence: Synthetic oligonucleotide
agucgacggcuccaagggu

SEQ ID NO: 2053807 - RNA, 19 nt, Artificial Sequence
  Description of Artificial Sequence: Synthetic oligonucleotide
ccaguuuuggugcugaugu

SEQ ID NO: 2053808 - RNA, 19 nt, Artificial Sequence
  Description of Artificial Sequence: Synthetic oligonucleotide
aggcgauacacgucuucau

SEQ ID NO: 2053809 - RNA, 19 nt, Artificial Sequence
  Description of Artificial Sequence: Synthetic oligonucleotide
caagguccacaaacagguc

SEQ ID NO: 2053810 - RNA, 19 nt, Artificial Sequence
  Description of Artificial Sequence: Synthetic oligonucleotide
acugccuacggcaacucuu

SEQ ID NO: 2053811 - RNA, 19 nt, Artificial Sequence
  Description of Artificial Sequence: Synthetic oligonucleotide
ugccuacggcaacucuuga

SEQ ID NO: 2053812 - RNA, 19 nt, Artificial Sequence
  Description of Artificial Sequence: Synthetic oligonucleotide
gccaccgcaucguucacug

SEQ ID NO: 2053813 - RNA, 19 nt, Artificial Sequence
  Description of Artificial Sequence: Synthetic oligonucleotide
gccuacggcaacucuugag

SEQ ID NO: 2053814 - RNA, 19 nt, Artificial Sequence
  Description of Artificial Sequence: Synthetic oligonucleotide
cuucggcggcgcaugcagc

SEQ ID NO: 2053815 - RNA, 19 nt, Artificial Sequence
  Description of Artificial Sequence: Synthetic oligonucleotide
ccacgaaaaugucuaguuc

SEQ ID NO: 2053816 - RNA, 19 nt, Artificial Sequence
  Description of Artificial Sequence: Synthetic oligonucleotide
acggcaacucuugagugua

SEQ ID NO: 2053817 - RNA, 19 nt, Artificial Sequence
  Description of Artificial Sequence: Synthetic oligonucleotide
ugacguccuuauugugggu

SEQ ID NO: 2053818 - RNA, 19 nt, Artificial Sequence
  Description of Artificial Sequence: Synthetic oligonucleotide
auacacgucuucaucuaua

SEQ ID NO: 2053819 - RNA, 19 nt, Artificial Sequence
  Description of Artificial Sequence: Synthetic oligonucleotide
acaucacucaguggccagu

SEQ ID NO: 2053820 - RNA, 19 nt, Artificial Sequence
  Description of Artificial Sequence: Synthetic oligonucleotide
uccagccagaggcgauaca

SEQ ID NO: 2053821 - RNA, 19 nt, Artificial Sequence
  Description of Artificial Sequence: Synthetic oligonucleotide
gaggagcgccugucgggag

SEQ ID NO: 2053822 - RNA, 19 nt, Artificial Sequence
  Description of Artificial Sequence: Synthetic oligonucleotide
ggcucuuaugcaagucuag

SEQ ID NO: 2053823 - RNA, 19 nt, Artificial Sequence
  Description of Artificial Sequence: Synthetic oligonucleotide
cagaacggcaggguuccac

SEQ ID NO: 2053824 - RNA, 19 nt, Artificial Sequence
  Description of Artificial Sequence: Synthetic oligonucleotide
gcuccaaggguccaguucu

SEQ ID NO: 2053825 - RNA, 19 nt, Artificial Sequence
  Description of Artificial Sequence: Synthetic oligonucleotide
accucucaaugaggagcgc

SEQ ID NO: 2053826 - RNA, 19 nt, Artificial Sequence
  Description of Artificial Sequence: Synthetic oligonucleotide
gaacggcaggguuccacaa

SEQ ID NO: 2053827 - RNA, 19 nt, Artificial Sequence
  Description of Artificial Sequence: Synthetic oligonucleotide
cagagccaccgcaucguuc

SEQ ID NO: 2053828 - RNA, 19 nt, Artificial Sequence
  Description of Artificial Sequence: Synthetic oligonucleotide
aaggugcgguaguggucca

SEQ ID NO: 2053829 - RNA, 19 nt, Artificial Sequence
  Description of Artificial Sequence: Synthetic oligonucleotide
cucgcagagccaccgcauc

SEQ ID NO: 2053830 - RNA, 19 nt, Artificial Sequence
  Description of Artificial Sequence: Synthetic oligonucleotide
gcgauacacgucuucaucu

SEQ ID NO: 2053831 - RNA, 19 nt, Artificial Sequence
  Description of Artificial Sequence: Synthetic oligonucleotide
cuugcccaagaccucccga

SEQ ID NO: 2053832 - RNA, 19 nt, Artificial Sequence
  Description of Artificial Sequence: Synthetic oligonucleotide
caccuugaagacucgcuua

SEQ ID NO: 2053833 - RNA, 19 nt, Artificial Sequence
  Description of Artificial Sequence: Synthetic oligonucleotide
cuggugccggaagccaucc

SEQ ID NO: 2053834 - RNA, 19 nt, Artificial Sequence
  Description of Artificial Sequence: Synthetic oligonucleotide
ucccgaacaaaggccucgu

SEQ ID NO: 2053835 - RNA, 19 nt, Artificial Sequence
  Description of Artificial Sequence: Synthetic oligonucleotide
ggucagaacggcaggguuc

SEQ ID NO: 2053836 - RNA, 19 nt, Artificial Sequence
  Description of Artificial Sequence: Synthetic oligonucleotide
caaaucgguuguuggcaaa

SEQ ID NO: 2053837 - RNA, 19 nt, Artificial Sequence
  Description of Artificial Sequence: Synthetic oligonucleotide
ccucucaaugaggagcgcc

SEQ ID NO: 2053838 - RNA, 19 nt, Artificial Sequence
  Description of Artificial Sequence: Synthetic oligonucleotide
ggucagagaggaggaagug

SEQ ID NO: 2053839 - RNA, 19 nt, Artificial Sequence
  Description of Artificial Sequence: Synthetic oligonucleotide
cuaggcggucagagaggag

SEQ ID NO: 2053840 - RNA, 19 nt, Artificial Sequence
  Description of Artificial Sequence: Synthetic oligonucleotide
uacccauguagcgguccca

SEQ ID NO: 2053841 - RNA, 19 nt, Artificial Sequence
  Description of Artificial Sequence: Synthetic oligonucleotide
caccaccuugaagacucgc

SEQ ID NO: 2053842 - RNA, 19 nt, Artificial Sequence
  Description of Artificial Sequence: Synthetic oligonucleotide
gguacccauguagcggucc

SEQ ID NO: 2053843 - RNA, 19 nt, Artificial Sequence
  Description of Artificial Sequence: Synthetic oligonucleotide
agcgccugucgggagggag

SEQ ID NO: 2053844 - RNA, 19 nt, Artificial Sequence
  Description of Artificial Sequence: Synthetic oligonucleotide
gcucuuaugcaagucuaga

SEQ ID NO: 2053845 - RNA, 19 nt, Artificial Sequence
  Description of Artificial Sequence: Synthetic oligonucleotide
gcauaaucucuggcuaggc

SEQ ID NO: 2053846 - RNA, 19 nt, Artificial Sequence
  Description of Artificial Sequence: Synthetic oligonucleotide
caaggguccaguucuggau

SEQ ID NO: 2053847 - RNA, 19 nt, Artificial Sequence
  Description of Artificial Sequence: Synthetic oligonucleotide
guguagcagcuucggcggc

SEQ ID NO: 2053848 - RNA, 19 nt, Artificial Sequence
  Description of Artificial Sequence: Synthetic oligonucleotide
gucagagaggaggaagugu

SEQ ID NO: 2053849 - RNA, 19 nt, Artificial Sequence
  Description of Artificial Sequence: Synthetic oligonucleotide
agcagucgcucaagcaugu

SEQ ID NO: 2053850 - RNA, 19 nt, Artificial Sequence
  Description of Artificial Sequence: Synthetic oligonucleotide
ccaguauuccggagcguac

SEQ ID NO: 2053851 - RNA, 19 nt, Artificial Sequence
  Description of Artificial Sequence: Synthetic oligonucleotide
uacccuuggacagcuucuu

SEQ ID NO: 2053852 - RNA, 19 nt, Artificial Sequence
  Description of Artificial Sequence: Synthetic oligonucleotide
gucgcucaagcaugugaaa

SEQ ID NO: 2053853 - RNA, 19 nt, Artificial Sequence
  Description of Artificial Sequence: Synthetic oligonucleotide
agccacggaggguacccau

SEQ ID NO: 2053854 - RNA, 19 nt, Artificial Sequence
  Description of Artificial Sequence: Synthetic oligonucleotide
gagccccgcauuucuucca

SEQ ID NO: 2053855 - RNA, 19 nt, Artificial Sequence
  Description of Artificial Sequence: Synthetic oligonucleotide
accgcaucguucacugagu

SEQ ID NO: 2053856 - RNA, 19 nt, Artificial Sequence
  Description of Artificial Sequence: Synthetic oligonucleotide
ggcuaggcggucagagagg

SEQ ID NO: 2053857 - RNA, 19 nt, Artificial Sequence
  Description of Artificial Sequence: Synthetic oligonucleotide
ugggagucgacggcuccaa

SEQ ID NO: 2053858 - RNA, 19 nt, Artificial Sequence
  Description of Artificial Sequence: Synthetic oligonucleotide
caaacugccuacggcaacu

SEQ ID NO: 2053859 - RNA, 19 nt, Artificial Sequence
  Description of Artificial Sequence: Synthetic oligonucleotide
ggccucgucaaagguguag

SEQ ID NO: 2053860 - RNA, 19 nt, Artificial Sequence
  Description of Artificial Sequence: Synthetic oligonucleotide
ggagcgccugucgggaggg

SEQ ID NO: 2053861 - RNA, 19 nt, Artificial Sequence
  Description of Artificial Sequence: Synthetic oligonucleotide
ggcgcagaaggcagccacg

SEQ ID NO: 2053862 - RNA, 19 nt, Artificial Sequence
  Description of Artificial Sequence: Synthetic oligonucleotide
gccgcacaucacucagugg

SEQ ID NO: 2053863 - RNA, 19 nt, Artificial Sequence
  Description of Artificial Sequence: Synthetic oligonucleotide
uuuccccggagggcaguac

SEQ ID NO: 2053864 - RNA, 19 nt, Artificial Sequence
  Description of Artificial Sequence: Synthetic oligonucleotide
ccuacggcaacucuugagu

SEQ ID NO: 2053865 - RNA, 19 nt, Artificial Sequence
  Description of Artificial Sequence: Synthetic oligonucleotide
ccggagggcaguacacacc

SEQ ID NO: 2053866 - RNA, 19 nt, Artificial Sequence
  Description of Artificial Sequence: Synthetic oligonucleotide
auuccggagcguacucgca

SEQ ID NO: 2053867 - RNA, 19 nt, Artificial Sequence
  Description of Artificial Sequence: Synthetic oligonucleotide
gcuaggcggucagagagga

SEQ ID NO: 2053868 - RNA, 19 nt, Artificial Sequence
  Description of Artificial Sequence: Synthetic oligonucleotide
gagcguacucgcagagcca

SEQ ID NO: 2053869 - RNA, 19 nt, Artificial Sequence
  Description of Artificial Sequence: Synthetic oligonucleotide
gaguaaccauccagccaga

SEQ ID NO: 2053870 - RNA, 19 nt, Artificial Sequence
  Description of Artificial Sequence: Synthetic oligonucleotide
acucgcagagccaccgcau

SEQ ID NO: 2053871 - RNA, 19 nt, Artificial Sequence
  Description of Artificial Sequence: Synthetic oligonucleotide
cucaaugaggagcgccugu

SEQ ID NO: 2053872 - RNA, 19 nt, Artificial Sequence
  Description of Artificial Sequence: Synthetic oligonucleotide
caucuauaagggucguguu

SEQ ID NO: 2053873 - RNA, 19 nt, Artificial Sequence
  Description of Artificial Sequence: Synthetic oligonucleotide
guacccuuggacagcuucu

SEQ ID NO: 2053874 - RNA, 19 nt, Artificial Sequence
  Description of Artificial Sequence: Synthetic oligonucleotide
gcaugugaaaggugcggua

SEQ ID NO: 2053875 - RNA, 19 nt, Artificial Sequence
  Description of Artificial Sequence: Synthetic oligonucleotide
gcagcuucggcggcgcaug

SEQ ID NO: 2053876 - RNA, 19 nt, Artificial Sequence
  Description of Artificial Sequence: Synthetic oligonucleotide
ccaaggguccaguucugga

SEQ ID NO: 2053877 - RNA, 19 nt, Artificial Sequence
  Description of Artificial Sequence: Synthetic oligonucleotide
agcuuuccccggagggcag

SEQ ID NO: 2053878 - RNA, 19 nt, Artificial Sequence
  Description of Artificial Sequence: Synthetic oligonucleotide
cagaggaccuggugccgga

SEQ ID NO: 2053879 - RNA, 19 nt, Artificial Sequence
  Description of Artificial Sequence: Synthetic oligonucleotide
cagcuucggcggcgcaugc

SEQ ID NO: 2053880 - RNA, 19 nt, Artificial Sequence
  Description of Artificial Sequence: Synthetic oligonucleotide
gagccaccgcaucguucac

SEQ ID NO: 2053881 - RNA, 19 nt, Artificial Sequence
  Description of Artificial Sequence: Synthetic oligonucleotide
caguauuccggagcguacu

SEQ ID NO: 2053882 - RNA, 19 nt, Artificial Sequence
  Description of Artificial Sequence: Synthetic oligonucleotide
ucagaacggcaggguucca

SEQ ID NO: 2053883 - RNA, 19 nt, Artificial Sequence
  Description of Artificial Sequence: Synthetic oligonucleotide
gcacaucacucaguggcca

SEQ ID NO: 2053884 - RNA, 19 nt, Artificial Sequence
  Description of Artificial Sequence: Synthetic oligonucleotide
aguacacaccaggcucuua

SEQ ID NO: 2053885 - RNA, 19 nt, Artificial Sequence
  Description of Artificial Sequence: Synthetic oligonucleotide
gcaggguuccacaaacugu

SEQ ID NO: 2053886 - RNA, 19 nt, Artificial Sequence
  Description of Artificial Sequence: Synthetic oligonucleotide
gcgccugucgggagggagg

SEQ ID NO: 2053887 - RNA, 19 nt, Artificial Sequence
  Description of Artificial Sequence: Synthetic oligonucleotide
gggagucgacggcuccaag

SEQ ID NO: 2053888 - RNA, 19 nt, Artificial Sequence
  Description of Artificial Sequence: Synthetic oligonucleotide
ccauggugucgcucugcag

SEQ ID NO: 2053889 - RNA, 19 nt, Artificial Sequence
  Description of Artificial Sequence: Synthetic oligonucleotide
agcuucggcggcgcaugca

SEQ ID NO: 2053890 - RNA, 19 nt, Artificial Sequence
  Description of Artificial Sequence: Synthetic oligonucleotide
cugggagucgacggcucca

SEQ ID NO: 2053891 - RNA, 19 nt, Artificial Sequence
  Description of Artificial Sequence: Synthetic oligonucleotide
cccgcauuucuuccaccac

SEQ ID NO: 2053892 - RNA, 19 nt, Artificial Sequence
  Description of Artificial Sequence: Synthetic oligonucleotide
cagggagccccgcauuucu

SEQ ID NO: 2053893 - RNA, 19 nt, Artificial Sequence
  Description of Artificial Sequence: Synthetic oligonucleotide
gggcaguacacaccaggcu

SEQ ID NO: 2053894 - RNA, 19 nt, Artificial Sequence
  Description of Artificial Sequence: Synthetic oligonucleotide
gggacagauucuugaaguu

SEQ ID NO: 2053895 - RNA, 19 nt, Artificial Sequence
  Description of Artificial Sequence: Synthetic oligonucleotide
ccggagcguacucgcagag

SEQ ID NO: 2053896 - RNA, 19 nt, Artificial Sequence
  Description of Artificial Sequence: Synthetic oligonucleotide
gugguccauggugucgcuc

SEQ ID NO: 2053897 - RNA, 19 nt, Artificial Sequence
  Description of Artificial Sequence: Synthetic oligonucleotide
guggucagaacggcagggu

SEQ ID NO: 2053898 - RNA, 19 nt, Artificial Sequence
  Description of Artificial Sequence: Synthetic oligonucleotide
gucgggagggagggaucug

SEQ ID NO: 2053899 - RNA, 19 nt, Artificial Sequence
  Description of Artificial Sequence: Synthetic oligonucleotide
cauccagccagaggcgaua

SEQ ID NO: 2053900 - RNA, 19 nt, Artificial Sequence
  Description of Artificial Sequence: Synthetic oligonucleotide
cccacgaaaaugucuaguu

SEQ ID NO: 2053901 - RNA, 19 nt, Artificial Sequence
  Description of Artificial Sequence: Synthetic oligonucleotide
cggcgcaugcagcagucgc

SEQ ID NO: 2053902 - RNA, 19 nt, Artificial Sequence
  Description of Artificial Sequence: Synthetic oligonucleotide
gccacggaggguacccaug

SEQ ID NO: 2053903 - RNA, 19 nt, Artificial Sequence
  Description of Artificial Sequence: Synthetic oligonucleotide
cuucaucuauaagggucgu

SEQ ID NO: 2053904 - RNA, 19 nt, Artificial Sequence
  Description of Artificial Sequence: Synthetic oligonucleotide
ugguacccuuggacagcuu

SEQ ID NO: 2053905 - RNA, 19 nt, Artificial Sequence
  Description of Artificial Sequence: Synthetic oligonucleotide
gcgcaugcagcagucgcuc

SEQ ID NO: 2053906 - RNA, 19 nt, Artificial Sequence
  Description of Artificial Sequence: Synthetic oligonucleotide
gccagaggcgauacacguc

SEQ ID NO: 2053907 - RNA, 19 nt, Artificial Sequence
  Description of Artificial Sequence: Synthetic oligonucleotide
gggaguggacagacaguga

SEQ ID NO: 2053908 - RNA, 19 nt, Artificial Sequence
  Description of Artificial Sequence: Synthetic oligonucleotide
cccagaggaccuggugccg

SEQ ID NO: 2053909 - RNA, 19 nt, Artificial Sequence
  Description of Artificial Sequence: Synthetic oligonucleotide
ggacagcuucuugcccaag

SEQ ID NO: 2053910 - RNA, 19 nt, Artificial Sequence
  Description of Artificial Sequence: Synthetic oligonucleotide
uccugcgguggcgccuguc

SEQ ID NO: 2053911 - RNA, 19 nt, Artificial Sequence
  Description of Artificial Sequence: Synthetic oligonucleotide
cgauacacgucuucaucua

SEQ ID NO: 2053912 - RNA, 19 nt, Artificial Sequence
  Description of Artificial Sequence: Synthetic oligonucleotide
gcagucgcucaagcaugug

SEQ ID NO: 2053913 - RNA, 19 nt, Artificial Sequence
  Description of Artificial Sequence: Synthetic oligonucleotide
ccucgucaaagguguagua

SEQ ID NO: 2053914 - RNA, 19 nt, Artificial Sequence
  Description of Artificial Sequence: Synthetic oligonucleotide
cacggaggguacccaugua

SEQ ID NO: 2053915 - RNA, 19 nt, Artificial Sequence
  Description of Artificial Sequence: Synthetic oligonucleotide
agggagccccgcauuucuu

SEQ ID NO: 2053916 - RNA, 19 nt, Artificial Sequence
  Description of Artificial Sequence: Synthetic oligonucleotide
gcccacgaaaaugucuagu

SEQ ID NO: 2053917 - RNA, 19 nt, Artificial Sequence
  Description of Artificial Sequence: Synthetic oligonucleotide
cuuuccccggagggcagua

SEQ ID NO: 2053918 - RNA, 19 nt, Artificial Sequence
  Description of Artificial Sequence: Synthetic oligonucleotide
ccaucucagagaagacacu

SEQ ID NO: 2053919 - RNA, 19 nt, Artificial Sequence
  Description of Artificial Sequence: Synthetic oligonucleotide
ggcggcgcaugcagcaguc

SEQ ID NO: 2053920 - RNA, 19 nt, Artificial Sequence
  Description of Artificial Sequence: Synthetic oligonucleotide
ggcgcaugcagcagucgcu

SEQ ID NO: 2053921 - RNA, 19 nt, Artificial Sequence
  Description of Artificial Sequence: Synthetic oligonucleotide
gcguacucgcagagccacc

SEQ ID NO: 2053922 - RNA, 19 nt, Artificial Sequence
  Description of Artificial Sequence: Synthetic oligonucleotide
gguccacaaacaggucucu

SEQ ID NO: 2053923 - RNA, 19 nt, Artificial Sequence
  Description of Artificial Sequence: Synthetic oligonucleotide
ccagggagccccgcauuuc

SEQ ID NO: 2053924 - RNA, 19 nt, Artificial Sequence
  Description of Artificial Sequence: Synthetic oligonucleotide
cagccacggaggguaccca

SEQ ID NO: 2053925 - RNA, 19 nt, Artificial Sequence
  Description of Artificial Sequence: Synthetic oligonucleotide
cggucagagaggaggaagu

SEQ ID NO: 2053926 - RNA, 19 nt, Artificial Sequence
  Description of Artificial Sequence: Synthetic oligonucleotide
cuguuucaaaucgguuguu

SEQ ID NO: 2053927 - RNA, 19 nt, Artificial Sequence
  Description of Artificial Sequence: Synthetic oligonucleotide
cggagcguacucgcagagc

SEQ ID NO: 2053928 - RNA, 19 nt, Artificial Sequence
  Description of Artificial Sequence: Synthetic oligonucleotide
cgcaucguucacugaguaa

SEQ ID NO: 2053929 - RNA, 19 nt, Artificial Sequence
  Description of Artificial Sequence: Synthetic oligonucleotide
ccgcaucguucacugagua

SEQ ID NO: 2053930 - RNA, 19 nt, Artificial Sequence
  Description of Artificial Sequence: Synthetic oligonucleotide
cgucuucaucuauaagggu

SEQ ID NO: 2053931 - RNA, 19 nt, Artificial Sequence
  Description of Artificial Sequence: Synthetic oligonucleotide
gggucguguugcccacgaa

SEQ ID NO: 2053932 - RNA, 19 nt, Artificial Sequence
  Description of Artificial Sequence: Synthetic oligonucleotide
ggguacccauguagcgguc

SEQ ID NO: 2053933 - RNA, 19 nt, Artificial Sequence
  Description of Artificial Sequence: Synthetic oligonucleotide
ccaagaccucccgaacaaa

SEQ ID NO: 2053934 - RNA, 19 nt, Artificial Sequence
  Description of Artificial Sequence: Synthetic oligonucleotide
gagcgccugucgggaggga

SEQ ID NO: 2053935 - RNA, 19 nt, Artificial Sequence
  Description of Artificial Sequence: Synthetic oligonucleotide
cuccaguauuccggagcgu

SEQ ID NO: 2053936 - RNA, 19 nt, Artificial Sequence
  Description of Artificial Sequence: Synthetic oligonucleotide
ccugucgggagggagggau

SEQ ID NO: 2053937 - RNA, 19 nt, Artificial Sequence
  Description of Artificial Sequence: Synthetic oligonucleotide
cagaggcgauacacgucuu

SEQ ID NO: 2053938 - RNA, 19 nt, Artificial Sequence
  Description of Artificial Sequence: Synthetic oligonucleotide
ccccggagggcaguacaca

SEQ ID NO: 2053939 - RNA, 19 nt, Artificial Sequence
  Description of Artificial Sequence: Synthetic oligonucleotide
gcaagucuagaagguccuu

SEQ ID NO: 2053940 - RNA, 19 nt, Artificial Sequence
  Description of Artificial Sequence: Synthetic oligonucleotide
cgcagaaggcagccacgga

SEQ ID NO: 2053941 - RNA, 19 nt, Artificial Sequence
  Description of Artificial Sequence: Synthetic oligonucleotide
ccauccagccagaggcgau

SEQ ID NO: 2053942 - RNA, 19 nt, Artificial Sequence
  Description of Artificial Sequence: Synthetic oligonucleotide
cggcaacucuugaguguaa

SEQ ID NO: 2053943 - RNA, 19 nt, Artificial Sequence
  Description of Artificial Sequence: Synthetic oligonucleotide
gccugucgggagggaggga

SEQ ID NO: 2053944 - RNA, 19 nt, Artificial Sequence
  Description of Artificial Sequence: Synthetic oligonucleotide
cggcaggguuccacaaacu

SEQ ID NO: 2053945 - RNA, 19 nt, Artificial Sequence
  Description of Artificial Sequence: Synthetic oligonucleotide
cgacggcuccaagggucca

SEQ ID NO: 2053946 - RNA, 19 nt, Artificial Sequence
  Description of Artificial Sequence: Synthetic oligonucleotide
cggcggcgcaugcagcagu

SEQ ID NO: 2053947 - RNA, 19 nt, Artificial Sequence
  Description of Artificial Sequence: Synthetic oligonucleotide
uguacaucuaaauagccgg

SEQ ID NO: 2053948 - RNA, 19 nt, Artificial Sequence
  Description of Artificial Sequence: Synthetic oligonucleotide
aaacgaucacuccacaugc

SEQ ID NO: 2053949 - RNA, 19 nt, Artificial Sequence
  Description of Artificial Sequence: Synthetic oligonucleotide
aaagcaguggugcagagca

SEQ ID NO: 2053950 - RNA, 19 nt, Artificial Sequence
  Description of Artificial Sequence: Synthetic oligonucleotide
uuauguaggaucuucugcc

SEQ ID NO: 2053951 - RNA, 19 nt, Artificial Sequence
  Description of Artificial Sequence: Synthetic oligonucleotide
uuugccuuucuuauguagg

SEQ ID NO: 2053952 - RNA, 19 nt, Artificial Sequence
  Description of Artificial Sequence: Synthetic oligonucleotide
aagaucaggggccacguuc

SEQ ID NO: 2053953 - RNA, 19 nt, Artificial Sequence
  Description of Artificial Sequence: Synthetic oligonucleotide
acuaaccuuguuuucauuc

SEQ ID NO: 2053954 - RNA, 19 nt, Artificial Sequence
  Description of Artificial Sequence: Synthetic oligonucleotide
cacaaaaucccuuucgugc

SEQ ID NO: 2053955 - RNA, 19 nt, Artificial Sequence
  Description of Artificial Sequence: Synthetic oligonucleotide
ugucacaaaaucccuuucg

SEQ ID NO: 2053956 - RNA, 19 nt, Artificial Sequence
  Description of Artificial Sequence: Synthetic oligonucleotide
acaucuaaauagccggucc

SEQ ID NO: 2053957 - RNA, 19 nt, Artificial Sequence
  Description of Artificial Sequence: Synthetic oligonucleotide
uagaaaccuauccuggagg

SEQ ID NO: 2053958 - RNA, 19 nt, Artificial Sequence
  Description of Artificial Sequence: Synthetic oligonucleotide
uguaccaguauacuuugcc

SEQ ID NO: 2053959 - RNA, 19 nt, Artificial Sequence
  Description of Artificial Sequence: Synthetic oligonucleotide
aauucauagcagaagucac

SEQ ID NO: 2053960 - RNA, 19 nt, Artificial Sequence
  Description of Artificial Sequence: Synthetic oligonucleotide
ucaagcaacaccagcgcgg

SEQ ID NO: 2053961 - RNA, 19 nt, Artificial Sequence
  Description of Artificial Sequence: Synthetic oligonucleotide
gaaacgaucacuccacaug

SEQ ID NO: 2053962 - RNA, 19 nt, Artificial Sequence
  Description of Artificial Sequence: Synthetic oligonucleotide
uauacuuugccuuucuuau

SEQ ID NO: 2053963 - RNA, 19 nt, Artificial Sequence
  Description of Artificial Sequence: Synthetic oligonucleotide
aaauagccgguccaggcag

SEQ ID NO: 2053964 - RNA, 19 nt, Artificial Sequence
  Description of Artificial Sequence: Synthetic oligonucleotide
uguaucggcgucuucgggg

SEQ ID NO: 2053965 - RNA, 19 nt, Artificial Sequence
  Description of Artificial Sequence: Synthetic oligonucleotide
cacucaagcaacaccagcg

SEQ ID NO: 2053966 - RNA, 19 nt, Artificial Sequence
  Description of Artificial Sequence: Synthetic oligonucleotide
uccagauggacgcaggccc

SEQ ID NO: 2053967 - RNA, 19 nt, Artificial Sequence
  Description of Artificial Sequence: Synthetic oligonucleotide
uacuuugccuuucuuaugu

SEQ ID NO: 2053968 - RNA, 19 nt, Artificial Sequence
  Description of Artificial Sequence: Synthetic oligonucleotide
aaucucaugggccgccacg

SEQ ID NO: 2053969 - RNA, 19 nt, Artificial Sequence
  Description of Artificial Sequence: Synthetic oligonucleotide
aaaccuauccuggagguca

SEQ ID NO: 2053970 - RNA, 19 nt, Artificial Sequence
  Description of Artificial Sequence: Synthetic oligonucleotide
acaguggaaggucauguuc

SEQ ID NO: 2053971 - RNA, 19 nt, Artificial Sequence
  Description of Artificial Sequence: Synthetic oligonucleotide
uggguagaaaccuauccug

SEQ ID NO: 2053972 - RNA, 19 nt, Artificial Sequence
  Description of Artificial Sequence: Synthetic oligonucleotide
aaaggagagaauccuguau

SEQ ID NO: 2053973 - RNA, 19 nt, Artificial Sequence
  Description of Artificial Sequence: Synthetic oligonucleotide
cuaaauagccgguccaggc

SEQ ID NO: 2053974 - RNA, 19 nt, Artificial Sequence
  Description of Artificial Sequence: Synthetic oligonucleotide
uuuaaaagguuccggggaa

SEQ ID NO: 2053975 - RNA, 19 nt, Artificial Sequence
  Description of Artificial Sequence: Synthetic oligonucleotide
gaucccuccagauggacgc

SEQ ID NO: 2053976 - RNA, 19 nt, Artificial Sequence
  Description of Artificial Sequence: Synthetic oligonucleotide
acccgaucccuccagaugg

SEQ ID NO: 2053977 - RNA, 19 nt, Artificial Sequence
  Description of Artificial Sequence: Synthetic oligonucleotide
uaaauagccgguccaggca

SEQ ID NO: 2053978 - RNA, 19 nt, Artificial Sequence
  Description of Artificial Sequence: Synthetic oligonucleotide
uugaagugguuccagcgca

SEQ ID NO: 2053979 - RNA, 19 nt, Artificial Sequence
  Description of Artificial Sequence: Synthetic oligonucleotide
ggugcagccacauuccucg

SEQ ID NO: 2053980 - RNA, 19 nt, Artificial Sequence
  Description of Artificial Sequence: Synthetic oligonucleotide
ugcugugagugcaucagcc

SEQ ID NO: 2053981 - RNA, 19 nt, Artificial Sequence
  Description of Artificial Sequence: Synthetic oligonucleotide
ucacaaaaucccuuucgug

SEQ ID NO: 2053982 - RNA, 19 nt, Artificial Sequence
  Description of Artificial Sequence: Synthetic oligonucleotide
gagugcaucagccccagug

SEQ ID NO: 2053983 - RNA, 19 nt, Artificial Sequence
  Description of Artificial Sequence: Synthetic oligonucleotide
accaguauggucagugugc

SEQ ID NO: 2053984 - RNA, 19 nt, Artificial Sequence
  Description of Artificial Sequence: Synthetic oligonucleotide
gguuuaaaagguuccgggg

SEQ ID NO: 2053985 - RNA, 19 nt, Artificial Sequence
  Description of Artificial Sequence: Synthetic oligonucleotide
guaggagaauuccaggggc

SEQ ID NO: 2053986 - RNA, 19 nt, Artificial Sequence
  Description of Artificial Sequence: Synthetic oligonucleotide
gauguacaucuaaauagcc

SEQ ID NO: 2053987 - RNA, 19 nt, Artificial Sequence
  Description of Artificial Sequence: Synthetic oligonucleotide
auguacaucuaaauagccg

SEQ ID NO: 2053988 - RNA, 19 nt, Artificial Sequence
  Description of Artificial Sequence: Synthetic oligonucleotide
auugaugugcaugagugcu

SEQ ID NO: 2053989 - RNA, 19 nt, Artificial Sequence
  Description of Artificial Sequence: Synthetic oligonucleotide
cucaggacagccccgaacc

SEQ ID NO: 2053990 - RNA, 19 nt, Artificial Sequence
  Description of Artificial Sequence: Synthetic oligonucleotide
ugguugguuggguagaaac

SEQ ID NO: 2053991 - RNA, 19 nt, Artificial Sequence
  Description of Artificial Sequence: Synthetic oligonucleotide
uaaccuuguuuucauucug

SEQ ID NO: 2053992 - RNA, 19 nt, Artificial Sequence
  Description of Artificial Sequence: Synthetic oligonucleotide
aaccuuguuuucauucugg

SEQ ID NO: 2053993 - RNA, 19 nt, Artificial Sequence
  Description of Artificial Sequence: Synthetic oligonucleotide
gucgguguaauccccacag

SEQ ID NO: 2053994 - RNA, 19 nt, Artificial Sequence
  Description of Artificial Sequence: Synthetic oligonucleotide
uauguaggaucuucugccc

SEQ ID NO: 2053995 - RNA, 19 nt, Artificial Sequence
  Description of Artificial Sequence: Synthetic oligonucleotide
uucuuauguaggaucuucu

SEQ ID NO: 2053996 - RNA, 19 nt, Artificial Sequence
  Description of Artificial Sequence: Synthetic oligonucleotide
aucaaagugaaugccacca

SEQ ID NO: 2053997 - RNA, 19 nt, Artificial Sequence
  Description of Artificial Sequence: Synthetic oligonucleotide
agcguguggggccuaagac

SEQ ID NO: 2053998 - RNA, 19 nt, Artificial Sequence
  Description of Artificial Sequence: Synthetic oligonucleotide
cucuuccggguuuaaaagg

SEQ ID NO: 2053999 - RNA, 19 nt, Artificial Sequence
  Description of Artificial Sequence: Synthetic oligonucleotide
uccggguuuaaaagguucc

SEQ ID NO: 2054000 - RNA, 19 nt, Artificial Sequence
  Description of Artificial Sequence: Synthetic oligonucleotide
ggagagaaggcacaacccg

SEQ ID NO: 2054001 - RNA, 19 nt, Artificial Sequence
  Description of Artificial Sequence: Synthetic oligonucleotide
cuuguaccaguauacuuug

SEQ ID NO: 2054002 - RNA, 19 nt, Artificial Sequence
  Description of Artificial Sequence: Synthetic oligonucleotide
aggcauucucugcaggcgc

SEQ ID NO: 2054003 - RNA, 19 nt, Artificial Sequence
  Description of Artificial Sequence: Synthetic oligonucleotide
ggguuuaaaagguuccggg

SEQ ID NO: 2054004 - RNA, 19 nt, Artificial Sequence
  Description of Artificial Sequence: Synthetic oligonucleotide
ucacggaagcggaaugggg

SEQ ID NO: 2054005 - RNA, 19 nt, Artificial Sequence
  Description of Artificial Sequence: Synthetic oligonucleotide
ggaaugggaauucauagca

SEQ ID NO: 2054006 - RNA, 19 nt, Artificial Sequence
  Description of Artificial Sequence: Synthetic oligonucleotide
guagagucgguguaauccc

SEQ ID NO: 2054007 - RNA, 19 nt, Artificial Sequence
  Description of Artificial Sequence: Synthetic oligonucleotide
agaaaccuauccuggaggu

SEQ ID NO: 2054008 - RNA, 19 nt, Artificial Sequence
  Description of Artificial Sequence: Synthetic oligonucleotide
gaaggcacaacccgcucag

SEQ ID NO: 2054009 - RNA, 19 nt, Artificial Sequence
  Description of Artificial Sequence: Synthetic oligonucleotide
guugaagugguuccagcgc

SEQ ID NO: 2054010 - RNA, 19 nt, Artificial Sequence
  Description of Artificial Sequence: Synthetic oligonucleotide
auggggaaacgaucacucc

SEQ ID NO: 2054011 - RNA, 19 nt, Artificial Sequence
  Description of Artificial Sequence: Synthetic oligonucleotide
agagaauccuguaugugag

SEQ ID NO: 2054012 - RNA, 19 nt, Artificial Sequence
  Description of Artificial Sequence: Synthetic oligonucleotide
cuucguguugcugugagug

SEQ ID NO: 2054013 - RNA, 19 nt, Artificial Sequence
  Description of Artificial Sequence: Synthetic oligonucleotide
aggccacucaagcaacacc

SEQ ID NO: 2054014 - RNA, 19 nt, Artificial Sequence
  Description of Artificial Sequence: Synthetic oligonucleotide
aguggacaccccuggaggg

SEQ ID NO: 2054015 - RNA, 19 nt, Artificial Sequence
  Description of Artificial Sequence: Synthetic oligonucleotide
gugggugucacaaaauccc

SEQ ID NO: 2054016 - RNA, 19 nt, Artificial Sequence
  Description of Artificial Sequence: Synthetic oligonucleotide
uaauccccacagcucaucc

SEQ ID NO: 2054017 - RNA, 19 nt, Artificial Sequence
  Description of Artificial Sequence: Synthetic oligonucleotide
ugcgaaaggcggcagccag

SEQ ID NO: 2054018 - RNA, 19 nt, Artificial Sequence
  Description of Artificial Sequence: Synthetic oligonucleotide
ucuucggggcaccaguaug

SEQ ID NO: 2054019 - RNA, 19 nt, Artificial Sequence
  Description of Artificial Sequence: Synthetic oligonucleotide
uuucuuauguaggaucuuc

SEQ ID NO: 2054020 - RNA, 19 nt, Artificial Sequence
  Description of Artificial Sequence: Synthetic oligonucleotide
gagaauccuguaugugagg

SEQ ID NO: 2054021 - RNA, 19 nt, Artificial Sequence
  Description of Artificial Sequence: Synthetic oligonucleotide
acaugcgaaaggcggcagc

SEQ ID NO: 2054022 - RNA, 19 nt, Artificial Sequence
  Description of Artificial Sequence: Synthetic oligonucleotide
cugugagugcaucagcccc

SEQ ID NO: 2054023 - RNA, 19 nt, Artificial Sequence
  Description of Artificial Sequence: Synthetic oligonucleotide
cuggugucagcguguaucg

SEQ ID NO: 2054024 - RNA, 19 nt, Artificial Sequence
  Description of Artificial Sequence: Synthetic oligonucleotide
cauugaugugcaugagugc

SEQ ID NO: 2054025 - RNA, 19 nt, Artificial Sequence
  Description of Artificial Sequence: Synthetic oligonucleotide
uucacggaagcggaauggg

SEQ ID NO: 2054026 - RNA, 19 nt, Artificial Sequence
  Description of Artificial Sequence: Synthetic oligonucleotide
uaagacccaguacucgcug

SEQ ID NO: 2054027 - RNA, 19 nt, Artificial Sequence
  Description of Artificial Sequence: Synthetic oligonucleotide
uccacaugcgaaaggcggc

SEQ ID NO: 2054028 - RNA, 19 nt, Artificial Sequence
  Description of Artificial Sequence: Synthetic oligonucleotide
uguaggaucuucugcccac

SEQ ID NO: 2054029 - RNA, 19 nt, Artificial Sequence
  Description of Artificial Sequence: Synthetic oligonucleotide
cuauccuggaggucacugg

SEQ ID NO: 2054030 - RNA, 19 nt, Artificial Sequence
  Description of Artificial Sequence: Synthetic oligonucleotide
agaccaagcagucggugug

SEQ ID NO: 2054031 - RNA, 19 nt, Artificial Sequence
  Description of Artificial Sequence: Synthetic oligonucleotide
uggugggugucacaaaauc

SEQ ID NO: 2054032 - RNA, 19 nt, Artificial Sequence
  Description of Artificial Sequence: Synthetic oligonucleotide
cucaagcaacaccagcgcg

SEQ ID NO: 2054033 - RNA, 19 nt, Artificial Sequence
  Description of Artificial Sequence: Synthetic oligonucleotide
aagcaugggccaguucccc

SEQ ID NO: 2054034 - RNA, 19 nt, Artificial Sequence
  Description of Artificial Sequence: Synthetic oligonucleotide
acgccuuucuuccagcugu

SEQ ID NO: 2054035 - RNA, 19 nt, Artificial Sequence
  Description of Artificial Sequence: Synthetic oligonucleotide
ugggacagugccuuccagc

SEQ ID NO: 2054036 - RNA, 19 nt, Artificial Sequence
  Description of Artificial Sequence: Synthetic oligonucleotide
uaccaguauacuuugccuu

SEQ ID NO: 2054037 - RNA, 19 nt, Artificial Sequence
  Description of Artificial Sequence: Synthetic oligonucleotide
uaggagaauuccaggggcu

SEQ ID NO: 2054038 - RNA, 19 nt, Artificial Sequence
  Description of Artificial Sequence: Synthetic oligonucleotide
uuccggguuuaaaagguuc

SEQ ID NO: 2054039 - RNA, 19 nt, Artificial Sequence
  Description of Artificial Sequence: Synthetic oligonucleotide
uagagucgguguaaucccc

SEQ ID NO: 2054040 - RNA, 19 nt, Artificial Sequence
  Description of Artificial Sequence: Synthetic oligonucleotide
gagagaaggcacaacccgc

SEQ ID NO: 2054041 - RNA, 19 nt, Artificial Sequence
  Description of Artificial Sequence: Synthetic oligonucleotide
uguugcugugagugcauca

SEQ ID NO: 2054042 - RNA, 19 nt, Artificial Sequence
  Description of Artificial Sequence: Synthetic oligonucleotide
cucccuucuuucacuaacc

SEQ ID NO: 2054043 - RNA, 19 nt, Artificial Sequence
  Description of Artificial Sequence: Synthetic oligonucleotide
aauagccgguccaggcagc

SEQ ID NO: 2054044 - RNA, 19 nt, Artificial Sequence
  Description of Artificial Sequence: Synthetic oligonucleotide
caugagugcuucguguugc

SEQ ID NO: 2054045 - RNA, 19 nt, Artificial Sequence
  Description of Artificial Sequence: Synthetic oligonucleotide
guuuucauucuggugggug

SEQ ID NO: 2054046 - RNA, 19 nt, Artificial Sequence
  Description of Artificial Sequence: Synthetic oligonucleotide
agaaggcacaacccgcuca

SEQ ID NO: 2054047 - RNA, 19 nt, Artificial Sequence
  Description of Artificial Sequence: Synthetic oligonucleotide
uucgugcccaggauguaca

SEQ ID NO: 2054048 - RNA, 19 nt, Artificial Sequence
  Description of Artificial Sequence: Synthetic oligonucleotide
acgaucacuccacaugcga

SEQ ID NO: 2054049 - RNA, 19 nt, Artificial Sequence
  Description of Artificial Sequence: Synthetic oligonucleotide
aacgaucacuccacaugcg

SEQ ID NO: 2054050 - RNA, 19 nt, Artificial Sequence
  Description of Artificial Sequence: Synthetic oligonucleotide
agugcuucguguugcugug

SEQ ID NO: 2054051 - RNA, 19 nt, Artificial Sequence
  Description of Artificial Sequence: Synthetic oligonucleotide
guucacggaagcggaaugg

SEQ ID NO: 2054052 - RNA, 19 nt, Artificial Sequence
  Description of Artificial Sequence: Synthetic oligonucleotide
ucccuucuuucacuaaccu

SEQ ID NO: 2054053 - RNA, 19 nt, Artificial Sequence
  Description of Artificial Sequence: Synthetic oligonucleotide
aagacccaguacucgcugu

SEQ ID NO: 2054054 - RNA, 19 nt, Artificial Sequence
  Description of Artificial Sequence: Synthetic oligonucleotide
guacucgcugucaucaaag

SEQ ID NO: 2054055 - RNA, 19 nt, Artificial Sequence
  Description of Artificial Sequence: Synthetic oligonucleotide
guaucggcgucuucggggc

SEQ ID NO: 2054056 - RNA, 19 nt, Artificial Sequence
  Description of Artificial Sequence: Synthetic oligonucleotide
guccagauagccaggguag

SEQ ID NO: 2054057 - RNA, 19 nt, Artificial Sequence
  Description of Artificial Sequence: Synthetic oligonucleotide
gaugugcaugagugcuucg

SEQ ID NO: 2054058 - RNA, 19 nt, Artificial Sequence
  Description of Artificial Sequence: Synthetic oligonucleotide
ucacuaaccuuguuuucau

SEQ ID NO: 2054059 - RNA, 19 nt, Artificial Sequence
  Description of Artificial Sequence: Synthetic oligonucleotide
gggaccaucaaagcagugg

SEQ ID NO: 2054060 - RNA, 19 nt, Artificial Sequence
  Description of Artificial Sequence: Synthetic oligonucleotide
uccuuguaccaguauacuu

SEQ ID NO: 2054061 - RNA, 19 nt, Artificial Sequence
  Description of Artificial Sequence: Synthetic oligonucleotide
acauuccucgcugcacucc

SEQ ID NO: 2054062 - RNA, 19 nt, Artificial Sequence
  Description of Artificial Sequence: Synthetic oligonucleotide
caugcgaaaggcggcagcc

SEQ ID NO: 2054063 - RNA, 19 nt, Artificial Sequence
  Description of Artificial Sequence: Synthetic oligonucleotide
ucgcugucaucaaagugaa

SEQ ID NO: 2054064 - RNA, 19 nt, Artificial Sequence
  Description of Artificial Sequence: Synthetic oligonucleotide
uucguguugcugugagugc

SEQ ID NO: 2054065 - RNA, 19 nt, Artificial Sequence
  Description of Artificial Sequence: Synthetic oligonucleotide
aaucccuuucgugcccagg

SEQ ID NO: 2054066 - RNA, 19 nt, Artificial Sequence
  Description of Artificial Sequence: Synthetic oligonucleotide
aagguuccggggaaaggag

SEQ ID NO: 2054067 - RNA, 19 nt, Artificial Sequence
  Description of Artificial Sequence: Synthetic oligonucleotide
ggugucagcguguaucggc

SEQ ID NO: 2054068 - RNA, 19 nt, Artificial Sequence
  Description of Artificial Sequence: Synthetic oligonucleotide
uacaucuaaauagccgguc

SEQ ID NO: 2054069 - RNA, 19 nt, Artificial Sequence
  Description of Artificial Sequence: Synthetic oligonucleotide
aggacagccccgaaccagc

SEQ ID NO: 2054070 - RNA, 19 nt, Artificial Sequence
  Description of Artificial Sequence: Synthetic oligonucleotide
cauacgccuuucuuccagc

SEQ ID NO: 2054071 - RNA, 19 nt, Artificial Sequence
  Description of Artificial Sequence: Synthetic oligonucleotide
uacgccuuucuuccagcug

SEQ ID NO: 2054072 - RNA, 19 nt, Artificial Sequence
  Description of Artificial Sequence: Synthetic oligonucleotide
auguaggaucuucugccca

SEQ ID NO: 2054073 - RNA, 19 nt, Artificial Sequence
  Description of Artificial Sequence: Synthetic oligonucleotide
uuguaccaguauacuuugc

SEQ ID NO: 2054074 - RNA, 19 nt, Artificial Sequence
  Description of Artificial Sequence: Synthetic oligonucleotide
cucaugggccgccacgugc

SEQ ID NO: 2054075 - RNA, 19 nt, Artificial Sequence
  Description of Artificial Sequence: Synthetic oligonucleotide
gcggagagaaggcacaacc

SEQ ID NO: 2054076 - RNA, 19 nt, Artificial Sequence
  Description of Artificial Sequence: Synthetic oligonucleotide
caccaguauggucagugug

SEQ ID NO: 2054077 - RNA, 19 nt, Artificial Sequence
  Description of Artificial Sequence: Synthetic oligonucleotide
ucguguugcugugagugca

SEQ ID NO: 2054078 - RNA, 19 nt, Artificial Sequence
  Description of Artificial Sequence: Synthetic oligonucleotide
ugaugugcaugagugcuuc

SEQ ID NO: 2054079 - RNA, 19 nt, Artificial Sequence
  Description of Artificial Sequence: Synthetic oligonucleotide
ccuaagacccaguacucgc

SEQ ID NO: 2054080 - RNA, 19 nt, Artificial Sequence
  Description of Artificial Sequence: Synthetic oligonucleotide
aagcggaauggggaaacga

SEQ ID NO: 2054081 - RNA, 19 nt, Artificial Sequence
  Description of Artificial Sequence: Synthetic oligonucleotide
gaaaggagagaauccugua

SEQ ID NO: 2054082 - RNA, 19 nt, Artificial Sequence
  Description of Artificial Sequence: Synthetic oligonucleotide
uccaggcagccguagaguc

SEQ ID NO: 2054083 - RNA, 19 nt, Artificial Sequence
  Description of Artificial Sequence: Synthetic oligonucleotide
uagcguguggggccuaaga

SEQ ID NO: 2054084 - RNA, 19 nt, Artificial Sequence
  Description of Artificial Sequence: Synthetic oligonucleotide
caucuaaauagccggucca

SEQ ID NO: 2054085 - RNA, 19 nt, Artificial Sequence
  Description of Artificial Sequence: Synthetic oligonucleotide
ugcaugagugcuucguguu

SEQ ID NO: 2054086 - RNA, 19 nt, Artificial Sequence
  Description of Artificial Sequence: Synthetic oligonucleotide
gaagcggaauggggaaacg

SEQ ID NO: 2054087 - RNA, 19 nt, Artificial Sequence
  Description of Artificial Sequence: Synthetic oligonucleotide
cuucugcccacaguggaag

SEQ ID NO: 2054088 - RNA, 19 nt, Artificial Sequence
  Description of Artificial Sequence: Synthetic oligonucleotide
cacggaagcggaaugggga

SEQ ID NO: 2054089 - RNA, 19 nt, Artificial Sequence
  Description of Artificial Sequence: Synthetic oligonucleotide
uuucgugcccaggauguac

SEQ ID NO: 2054090 - RNA, 19 nt, Artificial Sequence
  Description of Artificial Sequence: Synthetic oligonucleotide
ucugugagccauacgccuu

SEQ ID NO: 2054091 - RNA, 19 nt, Artificial Sequence
  Description of Artificial Sequence: Synthetic oligonucleotide
aggcacaacccgcucagga

SEQ ID NO: 2054092 - RNA, 19 nt, Artificial Sequence
  Description of Artificial Sequence: Synthetic oligonucleotide
ucgguguaauccccacagc

SEQ ID NO: 2054093 - RNA, 19 nt, Artificial Sequence
  Description of Artificial Sequence: Synthetic oligonucleotide
ggugggugucacaaaaucc

SEQ ID NO: 2054094 - RNA, 19 nt, Artificial Sequence
  Description of Artificial Sequence: Synthetic oligonucleotide
aaccuauccuggaggucac

SEQ ID NO: 2054095 - RNA, 19 nt, Artificial Sequence
  Description of Artificial Sequence: Synthetic oligonucleotide
aacccgcucaggacagccc

SEQ ID NO: 2054096 - RNA, 19 nt, Artificial Sequence
  Description of Artificial Sequence: Synthetic oligonucleotide
cguagagucgguguaaucc

SEQ ID NO: 2054097 - RNA, 19 nt, Artificial Sequence
  Description of Artificial Sequence: Synthetic oligonucleotide
ggacagagccucuucauga

SEQ ID NO: 2054098 - RNA, 19 nt, Artificial Sequence
  Description of Artificial Sequence: Synthetic oligonucleotide
caggauguacaucuaaaua

SEQ ID NO: 2054099 - RNA, 19 nt, Artificial Sequence
  Description of Artificial Sequence: Synthetic oligonucleotide
auagccgguccaggcagcc

SEQ ID NO: 2054100 - RNA, 19 nt, Artificial Sequence
  Description of Artificial Sequence: Synthetic oligonucleotide
gaccaagcagucggugugg

SEQ ID NO: 2054101 - RNA, 19 nt, Artificial Sequence
  Description of Artificial Sequence: Synthetic oligonucleotide
cacaacccgcucaggacag

SEQ ID NO: 2054102 - RNA, 19 nt, Artificial Sequence
  Description of Artificial Sequence: Synthetic oligonucleotide
acgugcaccaggucuguga

SEQ ID NO: 2054103 - RNA, 19 nt, Artificial Sequence
  Description of Artificial Sequence: Synthetic oligonucleotide
gccacguucacggaagcgg

SEQ ID NO: 2054104 - RNA, 19 nt, Artificial Sequence
  Description of Artificial Sequence: Synthetic oligonucleotide
gguugguuggguagaaacc

SEQ ID NO: 2054105 - RNA, 19 nt, Artificial Sequence
  Description of Artificial Sequence: Synthetic oligonucleotide
uugguuggguagaaaccua

SEQ ID NO: 2054106 - RNA, 19 nt, Artificial Sequence
  Description of Artificial Sequence: Synthetic oligonucleotide
gucacaaaaucccuuucgu

SEQ ID NO: 2054107 - RNA, 19 nt, Artificial Sequence
  Description of Artificial Sequence: Synthetic oligonucleotide
acaguagggaaugggaauu

SEQ ID NO: 2054108 - RNA, 19 nt, Artificial Sequence
  Description of Artificial Sequence: Synthetic oligonucleotide
auacgccuuucuuccagcu

SEQ ID NO: 2054109 - RNA, 19 nt, Artificial Sequence
  Description of Artificial Sequence: Synthetic oligonucleotide
guugguuggguagaaaccu

SEQ ID NO: 2054110 - RNA, 19 nt, Artificial Sequence
  Description of Artificial Sequence: Synthetic oligonucleotide
gaaugccaccauggggugg

SEQ ID NO: 2054111 - RNA, 19 nt, Artificial Sequence
  Description of Artificial Sequence: Synthetic oligonucleotide
cuaaccuuguuuucauucu

SEQ ID NO: 2054112 - RNA, 19 nt, Artificial Sequence
  Description of Artificial Sequence: Synthetic oligonucleotide
agagaaggcacaacccgcu

SEQ ID NO: 2054113 - RNA, 19 nt, Artificial Sequence
  Description of Artificial Sequence: Synthetic oligonucleotide
guaccaguauacuuugccu

SEQ ID NO: 2054114 - RNA, 19 nt, Artificial Sequence
  Description of Artificial Sequence: Synthetic oligonucleotide
agcgcagccuggcuggugu

SEQ ID NO: 2054115 - RNA, 19 nt, Artificial Sequence
  Description of Artificial Sequence: Synthetic oligonucleotide
agaucaggggccacguuca

SEQ ID NO: 2054116 - RNA, 19 nt, Artificial Sequence
  Description of Artificial Sequence: Synthetic oligonucleotide
ugggacagagccucuucau

SEQ ID NO: 2054117 - RNA, 19 nt, Artificial Sequence
  Description of Artificial Sequence: Synthetic oligonucleotide
gguccuuguaccaguauac

SEQ ID NO: 2054118 - RNA, 19 nt, Artificial Sequence
  Description of Artificial Sequence: Synthetic oligonucleotide
gccuuucuuauguaggauc

SEQ ID NO: 2054119 - RNA, 19 nt, Artificial Sequence
  Description of Artificial Sequence: Synthetic oligonucleotide
augugcaugagugcuucgu

SEQ ID NO: 2054120 - RNA, 19 nt, Artificial Sequence
  Description of Artificial Sequence: Synthetic oligonucleotide
auguuccucccuucuuuca

SEQ ID NO: 2054121 - RNA, 19 nt, Artificial Sequence
  Description of Artificial Sequence: Synthetic oligonucleotide
acggaagcggaauggggaa

SEQ ID NO: 2054122 - RNA, 19 nt, Artificial Sequence
  Description of Artificial Sequence: Synthetic oligonucleotide
gagucgguguaauccccac

SEQ ID NO: 2054123 - RNA, 19 nt, Artificial Sequence
  Description of Artificial Sequence: Synthetic oligonucleotide
agagaccaagcagucggug

SEQ ID NO: 2054124 - RNA, 19 nt, Artificial Sequence
  Description of Artificial Sequence: Synthetic oligonucleotide
ucagcguguaucggcgucu

SEQ ID NO: 2054125 - RNA, 19 nt, Artificial Sequence
  Description of Artificial Sequence: Synthetic oligonucleotide
gaccaucaaagcaguggug

SEQ ID NO: 2054126 - RNA, 19 nt, Artificial Sequence
  Description of Artificial Sequence: Synthetic oligonucleotide
gagaccaagcagucggugu

SEQ ID NO: 2054127 - RNA, 19 nt, Artificial Sequence
  Description of Artificial Sequence: Synthetic oligonucleotide
uucauucugguggguggug

SEQ ID NO: 2054128 - RNA, 19 nt, Artificial Sequence
  Description of Artificial Sequence: Synthetic oligonucleotide
agccgguccaggcagccgu

SEQ ID NO: 2054129 - RNA, 19 nt, Artificial Sequence
  Description of Artificial Sequence: Synthetic oligonucleotide
aaggcacaacccgcucagg

SEQ ID NO: 2054130 - RNA, 19 nt, Artificial Sequence
  Description of Artificial Sequence: Synthetic oligonucleotide
gcguguggggccuaagacc

SEQ ID NO: 2054131 - RNA, 19 nt, Artificial Sequence
  Description of Artificial Sequence: Synthetic oligonucleotide
gggccuaagacccaguacu

SEQ ID NO: 2054132 - RNA, 19 nt, Artificial Sequence
  Description of Artificial Sequence: Synthetic oligonucleotide
gguuccggggaaaggagag

SEQ ID NO: 2054133 - RNA, 19 nt, Artificial Sequence
  Description of Artificial Sequence: Synthetic oligonucleotide
ggccacucaagcaacacca

SEQ ID NO: 2054134 - RNA, 19 nt, Artificial Sequence
  Description of Artificial Sequence: Synthetic oligonucleotide
gguccagauagccagggua

SEQ ID NO: 2054135 - RNA, 19 nt, Artificial Sequence
  Description of Artificial Sequence: Synthetic oligonucleotide
gcuggugucagcguguauc

SEQ ID NO: 2054136 - RNA, 19 nt, Artificial Sequence
  Description of Artificial Sequence: Synthetic oligonucleotide
agcggaauggggaaacgau

SEQ ID NO: 2054137 - RNA, 19 nt, Artificial Sequence
  Description of Artificial Sequence: Synthetic oligonucleotide
uuccagccucgcagugugg

SEQ ID NO: 2054138 - RNA, 19 nt, Artificial Sequence
  Description of Artificial Sequence: Synthetic oligonucleotide
accagcggcccuguuguag

SEQ ID NO: 2054139 - RNA, 19 nt, Artificial Sequence
  Description of Artificial Sequence: Synthetic oligonucleotide
ugguuccagcgcagccugg

SEQ ID NO: 2054140 - RNA, 19 nt, Artificial Sequence
  Description of Artificial Sequence: Synthetic oligonucleotide
caacccgcucaggacagcc

SEQ ID NO: 2054141 - RNA, 19 nt, Artificial Sequence
  Description of Artificial Sequence: Synthetic oligonucleotide
ugugguugguuggguagaa

SEQ ID NO: 2054142 - RNA, 19 nt, Artificial Sequence
  Description of Artificial Sequence: Synthetic oligonucleotide
gguguaauccccacagcuc

SEQ ID NO: 2054143 - RNA, 19 nt, Artificial Sequence
  Description of Artificial Sequence: Synthetic oligonucleotide
ugucagcguguaucggcgu

SEQ ID NO: 2054144 - RNA, 19 nt, Artificial Sequence
  Description of Artificial Sequence: Synthetic oligonucleotide
cacccgaucccuccagaug

SEQ ID NO: 2054145 - RNA, 19 nt, Artificial Sequence
  Description of Artificial Sequence: Synthetic oligonucleotide
uguuuucauucuggugggu

SEQ ID NO: 2054146 - RNA, 19 nt, Artificial Sequence
  Description of Artificial Sequence: Synthetic oligonucleotide
ugccuuucuuauguaggau

SEQ ID NO: 2054147 - RNA, 19 nt, Artificial Sequence
  Description of Artificial Sequence: Synthetic oligonucleotide
ggcacaacccgcucaggac

SEQ ID NO: 2054148 - RNA, 19 nt, Artificial Sequence
  Description of Artificial Sequence: Synthetic oligonucleotide
cagcgcggagagaaggcac

SEQ ID NO: 2054149 - RNA, 19 nt, Artificial Sequence
  Description of Artificial Sequence: Synthetic oligonucleotide
ggaccaucaaagcaguggu

SEQ ID NO: 2054150 - RNA, 19 nt, Artificial Sequence
  Description of Artificial Sequence: Synthetic oligonucleotide
gccuaagacccaguacucg

SEQ ID NO: 2054151 - RNA, 19 nt, Artificial Sequence
  Description of Artificial Sequence: Synthetic oligonucleotide
agugcauggccaaucucau

SEQ ID NO: 2054152 - RNA, 19 nt, Artificial Sequence
  Description of Artificial Sequence: Synthetic oligonucleotide
ggagaauuccaggggcucc

SEQ ID NO: 2054153 - RNA, 19 nt, Artificial Sequence
  Description of Artificial Sequence: Synthetic oligonucleotide
uccuguaugugagguugaa

SEQ ID NO: 2054154 - RNA, 19 nt, Artificial Sequence
  Description of Artificial Sequence: Synthetic oligonucleotide
gcacaacccgcucaggaca

SEQ ID NO: 2054155 - RNA, 19 nt, Artificial Sequence
  Description of Artificial Sequence: Synthetic oligonucleotide
gucagcguguaucggcguc

SEQ ID NO: 2054156 - RNA, 19 nt, Artificial Sequence
  Description of Artificial Sequence: Synthetic oligonucleotide
caggucugugagccauacg

SEQ ID NO: 2054157 - RNA, 19 nt, Artificial Sequence
  Description of Artificial Sequence: Synthetic oligonucleotide
ccacucaagcaacaccagc

SEQ ID NO: 2054158 - RNA, 19 nt, Artificial Sequence
  Description of Artificial Sequence: Synthetic oligonucleotide
ggggaaacgaucacuccac

SEQ ID NO: 2054159 - RNA, 19 nt, Artificial Sequence
  Description of Artificial Sequence: Synthetic oligonucleotide
gauggacgcaggcccggca

SEQ ID NO: 2054160 - RNA, 19 nt, Artificial Sequence
  Description of Artificial Sequence: Synthetic oligonucleotide
agccccgaaccagcggccc

SEQ ID NO: 2054161 - RNA, 19 nt, Artificial Sequence
  Description of Artificial Sequence: Synthetic oligonucleotide
uccggggaaaggagagaau

SEQ ID NO: 2054162 - RNA, 19 nt, Artificial Sequence
  Description of Artificial Sequence: Synthetic oligonucleotide
agagucgguguaaucccca

SEQ ID NO: 2054163 - RNA, 19 nt, Artificial Sequence
  Description of Artificial Sequence: Synthetic oligonucleotide
agccaggguaggagaauuc

SEQ ID NO: 2054164 - RNA, 19 nt, Artificial Sequence
  Description of Artificial Sequence: Synthetic oligonucleotide
ccucccuucuuucacuaac

SEQ ID NO: 2054165 - RNA, 19 nt, Artificial Sequence
  Description of Artificial Sequence: Synthetic oligonucleotide
gcucagcugugccucaccc

SEQ ID NO: 2054166 - RNA, 19 nt, Artificial Sequence
  Description of Artificial Sequence: Synthetic oligonucleotide
caaucucaugggccgccac

SEQ ID NO: 2054167 - RNA, 19 nt, Artificial Sequence
  Description of Artificial Sequence: Synthetic oligonucleotide
gccaggguaggagaauucc

SEQ ID NO: 2054168 - RNA, 19 nt, Artificial Sequence
  Description of Artificial Sequence: Synthetic oligonucleotide
caguagggaaugggaauuc

SEQ ID NO: 2054169 - RNA, 19 nt, Artificial Sequence
  Description of Artificial Sequence: Synthetic oligonucleotide
ccagcggcccuguuguagg

SEQ ID NO: 2054170 - RNA, 19 nt, Artificial Sequence
  Description of Artificial Sequence: Synthetic oligonucleotide
ccauacgccuuucuuccag

SEQ ID NO: 2054171 - RNA, 19 nt, Artificial Sequence
  Description of Artificial Sequence: Synthetic oligonucleotide
acaacccgcucaggacagc

SEQ ID NO: 2054172 - RNA, 19 nt, Artificial Sequence
  Description of Artificial Sequence: Synthetic oligonucleotide
ggaagcggaauggggaaac

SEQ ID NO: 2054173 - RNA, 19 nt, Artificial Sequence
  Description of Artificial Sequence: Synthetic oligonucleotide
gaucaggggccacguucac

SEQ ID NO: 2054174 - RNA, 19 nt, Artificial Sequence
  Description of Artificial Sequence: Synthetic oligonucleotide
ccagauggacgcaggcccg

SEQ ID NO: 2054175 - RNA, 19 nt, Artificial Sequence
  Description of Artificial Sequence: Synthetic oligonucleotide
cagauggacgcaggcccgg

SEQ ID NO: 2054176 - RNA, 19 nt, Artificial Sequence
  Description of Artificial Sequence: Synthetic oligonucleotide
cacaguagggaaugggaau

SEQ ID NO: 2054177 - RNA, 19 nt, Artificial Sequence
  Description of Artificial Sequence: Synthetic oligonucleotide
guaauccccacagcucauc

SEQ ID NO: 2054178 - RNA, 19 nt, Artificial Sequence
  Description of Artificial Sequence: Synthetic oligonucleotide
uaucggcgucuucggggca

SEQ ID NO: 2054179 - RNA, 19 nt, Artificial Sequence
  Description of Artificial Sequence: Synthetic oligonucleotide
acguucacggaagcggaau

SEQ ID NO: 2054180 - RNA, 19 nt, Artificial Sequence
  Description of Artificial Sequence: Synthetic oligonucleotide
gcaugggccaguuccccug

SEQ ID NO: 2054181 - RNA, 19 nt, Artificial Sequence
  Description of Artificial Sequence: Synthetic oligonucleotide
uccucccuucuuucacuaa

SEQ ID NO: 2054182 - RNA, 19 nt, Artificial Sequence
  Description of Artificial Sequence: Synthetic oligonucleotide
cguguaucggcgucuucgg

SEQ ID NO: 2054183 - RNA, 19 nt, Artificial Sequence
  Description of Artificial Sequence: Synthetic oligonucleotide
gacccaguacucgcuguca

SEQ ID NO: 2054184 - RNA, 19 nt, Artificial Sequence
  Description of Artificial Sequence: Synthetic oligonucleotide
cacaugcgaaaggcggcag

SEQ ID NO: 2054185 - RNA, 19 nt, Artificial Sequence
  Description of Artificial Sequence: Synthetic oligonucleotide
ccggguuuaaaagguuccg

SEQ ID NO: 2054186 - RNA, 19 nt, Artificial Sequence
  Description of Artificial Sequence: Synthetic oligonucleotide
ggggccuaagacccaguac

SEQ ID NO: 2054187 - RNA, 19 nt, Artificial Sequence
  Description of Artificial Sequence: Synthetic oligonucleotide
uagccgguccaggcagccg

SEQ ID NO: 2054188 - RNA, 19 nt, Artificial Sequence
  Description of Artificial Sequence: Synthetic oligonucleotide
agguuccggggaaaggaga

SEQ ID NO: 2054189 - RNA, 19 nt, Artificial Sequence
  Description of Artificial Sequence: Synthetic oligonucleotide
agcgcggagagaaggcaca

SEQ ID NO: 2054190 - RNA, 19 nt, Artificial Sequence
  Description of Artificial Sequence: Synthetic oligonucleotide
ucggggcaccaguaugguc

SEQ ID NO: 2054191 - RNA, 19 nt, Artificial Sequence
  Description of Artificial Sequence: Synthetic oligonucleotide
cgaucccuccagauggacg

SEQ ID NO: 2054192 - RNA, 19 nt, Artificial Sequence
  Description of Artificial Sequence: Synthetic oligonucleotide
agggcacccgaucccucca

SEQ ID NO: 2054193 - RNA, 19 nt, Artificial Sequence
  Description of Artificial Sequence: Synthetic oligonucleotide
ccuuguaccaguauacuuu

SEQ ID NO: 2054194 - RNA, 19 nt, Artificial Sequence
  Description of Artificial Sequence: Synthetic oligonucleotide
ggggccacguucacggaag

SEQ ID NO: 2054195 - RNA, 19 nt, Artificial Sequence
  Description of Artificial Sequence: Synthetic oligonucleotide
gcucaggacagccccgaac

SEQ ID NO: 2054196 - RNA, 19 nt, Artificial Sequence
  Description of Artificial Sequence: Synthetic oligonucleotide
ucggugugguugguugggu

SEQ ID NO: 2054197 - RNA, 19 nt, Artificial Sequence
  Description of Artificial Sequence: Synthetic oligonucleotide
caugagccucuggugggug

SEQ ID NO: 2054198 - RNA, 19 nt, Artificial Sequence
  Description of Artificial Sequence: Synthetic oligonucleotide
uguagcguguggggccuaa

SEQ ID NO: 2054199 - RNA, 19 nt, Artificial Sequence
  Description of Artificial Sequence: Synthetic oligonucleotide
gugugguugguuggguaga

SEQ ID NO: 2054200 - RNA, 19 nt, Artificial Sequence
  Description of Artificial Sequence: Synthetic oligonucleotide
cggguuuaaaagguuccgg

SEQ ID NO: 2054201 - RNA, 19 nt, Artificial Sequence
  Description of Artificial Sequence: Synthetic oligonucleotide
ccuguaugugagguugaag

SEQ ID NO: 2054202 - RNA, 19 nt, Artificial Sequence
  Description of Artificial Sequence: Synthetic oligonucleotide
gacaccccuggaggguuug

SEQ ID NO: 2054203 - RNA, 19 nt, Artificial Sequence
  Description of Artificial Sequence: Synthetic oligonucleotide
ugugagccauacgccuuuc

SEQ ID NO: 2054204 - RNA, 19 nt, Artificial Sequence
  Description of Artificial Sequence: Synthetic oligonucleotide
augcgaaaggcggcagcca

SEQ ID NO: 2054205 - RNA, 19 nt, Artificial Sequence
  Description of Artificial Sequence: Synthetic oligonucleotide
ggcauucucugcaggcgcc

SEQ ID NO: 2054206 - RNA, 19 nt, Artificial Sequence
  Description of Artificial Sequence: Synthetic oligonucleotide
accaagcagucgguguggu

SEQ ID NO: 2054207 - RNA, 19 nt, Artificial Sequence
  Description of Artificial Sequence: Synthetic oligonucleotide
cccuuucgugcccaggaug

SEQ ID NO: 2054208 - RNA, 19 nt, Artificial Sequence
  Description of Artificial Sequence: Synthetic oligonucleotide
cgugcaccaggucugugag

SEQ ID NO: 2054209 - RNA, 19 nt, Artificial Sequence
  Description of Artificial Sequence: Synthetic oligonucleotide
gcaguggugcagagcagag

SEQ ID NO: 2054210 - RNA, 19 nt, Artificial Sequence
  Description of Artificial Sequence: Synthetic oligonucleotide
ggaaacgaucacuccacau

SEQ ID NO: 2054211 - RNA, 19 nt, Artificial Sequence
  Description of Artificial Sequence: Synthetic oligonucleotide
gcggaauggggaaacgauc

SEQ ID NO: 2054212 - RNA, 19 nt, Artificial Sequence
  Description of Artificial Sequence: Synthetic oligonucleotide
ggggaaaggagagaauccu

SEQ ID NO: 2054213 - RNA, 19 nt, Artificial Sequence
  Description of Artificial Sequence: Synthetic oligonucleotide
gggaaacgaucacuccaca

SEQ ID NO: 2054214 - RNA, 19 nt, Artificial Sequence
  Description of Artificial Sequence: Synthetic oligonucleotide
agccguagagucgguguaa

SEQ ID NO: 2054215 - RNA, 19 nt, Artificial Sequence
  Description of Artificial Sequence: Synthetic oligonucleotide
ccaggguaggagaauucca

SEQ ID NO: 2054216 - RNA, 19 nt, Artificial Sequence
  Description of Artificial Sequence: Synthetic oligonucleotide
acaccccuggaggguuugg

SEQ ID NO: 2054217 - RNA, 19 nt, Artificial Sequence
  Description of Artificial Sequence: Synthetic oligonucleotide
guagcguguggggccuaag

SEQ ID NO: 2054218 - RNA, 19 nt, Artificial Sequence
  Description of Artificial Sequence: Synthetic oligonucleotide
cgcccaaggccacucaagc

SEQ ID NO: 2054219 - RNA, 19 nt, Artificial Sequence
  Description of Artificial Sequence: Synthetic oligonucleotide
ggacagccccgaaccagcg

SEQ ID NO: 2054220 - RNA, 19 nt, Artificial Sequence
  Description of Artificial Sequence: Synthetic oligonucleotide
ccaguuccccugugggacc

SEQ ID NO: 2054221 - RNA, 19 nt, Artificial Sequence
  Description of Artificial Sequence: Synthetic oligonucleotide
guguugcugugagugcauc

SEQ ID NO: 2054222 - RNA, 19 nt, Artificial Sequence
  Description of Artificial Sequence: Synthetic oligonucleotide
gccacucaagcaacaccag

SEQ ID NO: 2054223 - RNA, 19 nt, Artificial Sequence
  Description of Artificial Sequence: Synthetic oligonucleotide
ucggcgucuucggggcacc

SEQ ID NO: 2054224 - RNA, 19 nt, Artificial Sequence
  Description of Artificial Sequence: Synthetic oligonucleotide
ccuuucgugcccaggaugu

SEQ ID NO: 2054225 - RNA, 19 nt, Artificial Sequence
  Description of Artificial Sequence: Synthetic oligonucleotide
cguucacggaagcggaaug

SEQ ID NO: 2054226 - RNA, 19 nt, Artificial Sequence
  Description of Artificial Sequence: Synthetic oligonucleotide
gccacauuccucgcugcac

SEQ ID NO: 2054227 - RNA, 19 nt, Artificial Sequence
  Description of Artificial Sequence: Synthetic oligonucleotide
gccaaucucaugggccgcc

SEQ ID NO: 2054228 - RNA, 19 nt, Artificial Sequence
  Description of Artificial Sequence: Synthetic oligonucleotide
caugggccgccacgugcac

SEQ ID NO: 2054229 - RNA, 19 nt, Artificial Sequence
  Description of Artificial Sequence: Synthetic oligonucleotide
cacguucacggaagcggaa

SEQ ID NO: 2054230 - RNA, 19 nt, Artificial Sequence
  Description of Artificial Sequence: Synthetic oligonucleotide
ccacguucacggaagcgga

SEQ ID NO: 2054231 - RNA, 19 nt, Artificial Sequence
  Description of Artificial Sequence: Synthetic oligonucleotide
ggccuaagacccaguacuc

SEQ ID NO: 2054232 - RNA, 19 nt, Artificial Sequence
  Description of Artificial Sequence: Synthetic oligonucleotide
agccucgcaguguggcauu

SEQ ID NO: 2054233 - RNA, 19 nt, Artificial Sequence
  Description of Artificial Sequence: Synthetic oligonucleotide
ggcccuguuguagggcacc

SEQ ID NO: 2054234 - RNA, 19 nt, Artificial Sequence
  Description of Artificial Sequence: Synthetic oligonucleotide
cagccguagagucggugua

SEQ ID NO: 2054235 - RNA, 19 nt, Artificial Sequence
  Description of Artificial Sequence: Synthetic oligonucleotide
cucgcaguguggcauugau

SEQ ID NO: 2054236 - RNA, 19 nt, Artificial Sequence
  Description of Artificial Sequence: Synthetic oligonucleotide
gaagaucaggggccacguu

SEQ ID NO: 2054237 - RNA, 19 nt, Artificial Sequence
  Description of Artificial Sequence: Synthetic oligonucleotide
cuuccggguuuaaaagguu

SEQ ID NO: 2054238 - RNA, 19 nt, Artificial Sequence
  Description of Artificial Sequence: Synthetic oligonucleotide
gcccaggauguacaucuaa

SEQ ID NO: 2054239 - RNA, 19 nt, Artificial Sequence
  Description of Artificial Sequence: Synthetic oligonucleotide
cagagaccaagcagucggu

SEQ ID NO: 2054240 - RNA, 19 nt, Artificial Sequence
  Description of Artificial Sequence: Synthetic oligonucleotide
ggaagaucaggggccacgu

SEQ ID NO: 2054241 - RNA, 19 nt, Artificial Sequence
  Description of Artificial Sequence: Synthetic oligonucleotide
gugagccauacgccuuucu

SEQ ID NO: 2054242 - RNA, 19 nt, Artificial Sequence
  Description of Artificial Sequence: Synthetic oligonucleotide
gcgcccaaggccacucaag

SEQ ID NO: 2054243 - RNA, 19 nt, Artificial Sequence
  Description of Artificial Sequence: Synthetic oligonucleotide
gccuuccagccucgcagug

SEQ ID NO: 2054244 - RNA, 19 nt, Artificial Sequence
  Description of Artificial Sequence: Synthetic oligonucleotide
gucuucggggcaccaguau

SEQ ID NO: 2054245 - RNA, 19 nt, Artificial Sequence
  Description of Artificial Sequence: Synthetic oligonucleotide
ggcagccguagagucggug

SEQ ID NO: 2054246 - RNA, 19 nt, Artificial Sequence
  Description of Artificial Sequence: Synthetic oligonucleotide
cgaaaggcggcagccaguc

SEQ ID NO: 2054247 - RNA, 19 nt, Artificial Sequence
  Description of Artificial Sequence: Synthetic oligonucleotide
ggcgucuucggggcaccag

SEQ ID NO: 2054248 - RNA, 19 nt, Artificial Sequence
  Description of Artificial Sequence: Synthetic oligonucleotide
cuguuguagggcacccgau

SEQ ID NO: 2054249 - RNA, 19 nt, Artificial Sequence
  Description of Artificial Sequence: Synthetic oligonucleotide
ccguagagucgguguaauc

SEQ ID NO: 2054250 - RNA, 19 nt, Artificial Sequence
  Description of Artificial Sequence: Synthetic oligonucleotide
gccauacgccuuucuucca

SEQ ID NO: 2054251 - RNA, 19 nt, Artificial Sequence
  Description of Artificial Sequence: Synthetic oligonucleotide
cgaucacuccacaugcgaa

SEQ ID NO: 2054252 - RNA, 19 nt, Artificial Sequence
  Description of Artificial Sequence: Synthetic oligonucleotide
agcagucggugugguuggu

SEQ ID NO: 2054253 - RNA, 19 nt, Artificial Sequence
  Description of Artificial Sequence: Synthetic oligonucleotide
ccagauagccaggguagga

SEQ ID NO: 2054254 - RNA, 19 nt, Artificial Sequence
  Description of Artificial Sequence: Synthetic oligonucleotide
cgguguaauccccacagcu

SEQ ID NO: 2054255 - RNA, 19 nt, Artificial Sequence
  Description of Artificial Sequence: Synthetic oligonucleotide
ggcacccgaucccuccaga

SEQ ID NO: 2054256 - RNA, 19 nt, Artificial Sequence
  Description of Artificial Sequence: Synthetic oligonucleotide
cccuguuguagggcacccg

SEQ ID NO: 2054257 - RNA, 19 nt, Artificial Sequence
  Description of Artificial Sequence: Synthetic oligonucleotide
gugcuucguguugcuguga

SEQ ID NO: 2054258 - RNA, 19 nt, Artificial Sequence
  Description of Artificial Sequence: Synthetic oligonucleotide
gcaccaguauggucagugu

SEQ ID NO: 2054259 - RNA, 19 nt, Artificial Sequence
  Description of Artificial Sequence: Synthetic oligonucleotide
gcgucuucggggcaccagu

SEQ ID NO: 2054260 - RNA, 19 nt, Artificial Sequence
  Description of Artificial Sequence: Synthetic oligonucleotide
ggcgcccaaggccacucaa

SEQ ID NO: 2054261 - RNA, 19 nt, Artificial Sequence
  Description of Artificial Sequence: Synthetic oligonucleotide
ccacaugcgaaaggcggca

SEQ ID NO: 2054262 - RNA, 19 nt, Artificial Sequence
  Description of Artificial Sequence: Synthetic oligonucleotide
gcccuguuguagggcaccc

SEQ ID NO: 2054263 - RNA, 19 nt, Artificial Sequence
  Description of Artificial Sequence: Synthetic oligonucleotide
cuuucgugcccaggaugua

SEQ ID NO: 2054264 - RNA, 19 nt, Artificial Sequence
  Description of Artificial Sequence: Synthetic oligonucleotide
ccacaguggaaggucaugu

SEQ ID NO: 2054265 - RNA, 19 nt, Artificial Sequence
  Description of Artificial Sequence: Synthetic oligonucleotide
ccaguauggucagugugcu

SEQ ID NO: 2054266 - RNA, 19 nt, Artificial Sequence
  Description of Artificial Sequence: Synthetic oligonucleotide
ccgaucccuccagauggac

SEQ ID NO: 2054267 - RNA, 19 nt, Artificial Sequence
  Description of Artificial Sequence: Synthetic oligonucleotide
ccagcgcggagagaaggca

SEQ ID NO: 2054268 - RNA, 19 nt, Artificial Sequence
  Description of Artificial Sequence: Synthetic oligonucleotide
ggugcagagcagagaccaa

SEQ ID NO: 2054269 - RNA, 19 nt, Artificial Sequence
  Description of Artificial Sequence: Synthetic oligonucleotide
cagccucgcaguguggcau

SEQ ID NO: 2054270 - RNA, 19 nt, Artificial Sequence
  Description of Artificial Sequence: Synthetic oligonucleotide
gggugucacaaaaucccuu

SEQ ID NO: 2054271 - RNA, 19 nt, Artificial Sequence
  Description of Artificial Sequence: Synthetic oligonucleotide
gcuguagcguguggggccu

SEQ ID NO: 2054272 - RNA, 19 nt, Artificial Sequence
  Description of Artificial Sequence: Synthetic oligonucleotide
ccccugugggaccaucaaa

SEQ ID NO: 2054273 - RNA, 19 nt, Artificial Sequence
  Description of Artificial Sequence: Synthetic oligonucleotide
gcacccgaucccuccagau

SEQ ID NO: 2054274 - RNA, 19 nt, Artificial Sequence
  Description of Artificial Sequence: Synthetic oligonucleotide
ccccgaaccagcggcccug

SEQ ID NO: 2054275 - RNA, 19 nt, Artificial Sequence
  Description of Artificial Sequence: Synthetic oligonucleotide
cccgaucccuccagaugga

SEQ ID NO: 2054276 - RNA, 19 nt, Artificial Sequence
  Description of Artificial Sequence: Synthetic oligonucleotide
cgccacgugcaccaggucu

SEQ ID NO: 2054277 - RNA, 19 nt, Artificial Sequence
  Description of Artificial Sequence: Synthetic oligonucleotide
ccgguccaggcagccguag

SEQ ID NO: 2054278 - RNA, 19 nt, Artificial Sequence
  Description of Artificial Sequence: Synthetic oligonucleotide
cgcggagagaaggcacaac

SEQ ID NO: 2054279 - RNA, 19 nt, Artificial Sequence
  Description of Artificial Sequence: Synthetic oligonucleotide
guguggcauugaugugcau

SEQ ID NO: 2054280 - RNA, 19 nt, Artificial Sequence
  Description of Artificial Sequence: Synthetic oligonucleotide
gccguagagucgguguaau

SEQ ID NO: 2054281 - RNA, 19 nt, Artificial Sequence
  Description of Artificial Sequence: Synthetic oligonucleotide
ccuugucucuuccggguuu

SEQ ID NO: 2054282 - RNA, 19 nt, Artificial Sequence
  Description of Artificial Sequence: Synthetic oligonucleotide
gcgcggagagaaggcacaa

SEQ ID NO: 2054283 - RNA, 19 nt, Artificial Sequence
  Description of Artificial Sequence: Synthetic oligonucleotide
gcgaaaggcggcagccagu

SEQ ID NO: 2054284 - RNA, 19 nt, Artificial Sequence
  Description of Artificial Sequence: Synthetic oligonucleotide
cgucuucggggcaccagua

SEQ ID NO: 2054285 - RNA, 19 nt, Artificial Sequence
  Description of Artificial Sequence: Synthetic oligonucleotide
gggccgccacgugcaccag

SEQ ID NO: 2054286 - RNA, 19 nt, Artificial Sequence
  Description of Artificial Sequence: Synthetic oligonucleotide
gcagucggugugguugguu

SEQ ID NO: 2054287 - RNA, 19 nt, Artificial Sequence
  Description of Artificial Sequence: Synthetic oligonucleotide
cuguagcguguggggccua

SEQ ID NO: 2054288 - RNA, 19 nt, Artificial Sequence
  Description of Artificial Sequence: Synthetic oligonucleotide
cggaagcggaauggggaaa

SEQ ID NO: 2054289 - RNA, 19 nt, Artificial Sequence
  Description of Artificial Sequence: Synthetic oligonucleotide
gcccacaguggaaggucau

SEQ ID NO: 2054290 - RNA, 19 nt, Artificial Sequence
  Description of Artificial Sequence: Synthetic oligonucleotide
ccaagcagucggugugguu

SEQ ID NO: 2054291 - RNA, 19 nt, Artificial Sequence
  Description of Artificial Sequence: Synthetic oligonucleotide
gccgguccaggcagccgua

SEQ ID NO: 2054292 - RNA, 19 nt, Artificial Sequence
  Description of Artificial Sequence: Synthetic oligonucleotide
ggacaccccuggaggguuu

SEQ ID NO: 2054293 - RNA, 19 nt, Artificial Sequence
  Description of Artificial Sequence: Synthetic oligonucleotide
gccccagugcauggccaau

SEQ ID NO: 2054294 - RNA, 19 nt, Artificial Sequence
  Description of Artificial Sequence: Synthetic oligonucleotide
cggcgucuucggggcacca

SEQ ID NO: 2054295 - RNA, 19 nt, Artificial Sequence
  Description of Artificial Sequence: Synthetic oligonucleotide
ccgaaccagcggcccuguu

SEQ ID NO: 2054296 - RNA, 19 nt, Artificial Sequence
  Description of Artificial Sequence: Synthetic oligonucleotide
  modified_base (6)..(6): a, c, u, g, unknown or other
aaaacngccaucuaaaacu

SEQ ID NO: 2054297 - RNA, 19 nt, Artificial Sequence
  Description of Artificial Sequence: Synthetic oligonucleotide
ucuguaaacacuauuauug

SEQ ID NO: 2054298 - RNA, 19 nt, Artificial Sequence
  Description of Artificial Sequence: Synthetic oligonucleotide
uuuaugaaaucugagaggg

SEQ ID NO: 2054299 - RNA, 19 nt, Artificial Sequence
  Description of Artificial Sequence: Synthetic oligonucleotide
aauucuacacacugggacc

SEQ ID NO: 2054300 - RNA, 19 nt, Artificial Sequence
  Description of Artificial Sequence: Synthetic oligonucleotide
  modified_base (4)..(4): a, c, u, g, unknown or other
uucnccauuacauugcugg

SEQ ID NO: 2054301 - RNA, 19 nt, Artificial Sequence
  Description of Artificial Sequence: Synthetic oligonucleotide
uuaaaucaaauuuuauugg

SEQ ID NO: 2054302 - RNA, 19 nt, Artificial Sequence
  Description of Artificial Sequence: Synthetic oligonucleotide
aauaaaguaguccuggagu

SEQ ID NO: 2054303 - RNA, 19 nt, Artificial Sequence
  Description of Artificial Sequence: Synthetic oligonucleotide
ucuaugacaacuuuuauuc

SEQ ID NO: 2054304 - RNA, 19 nt, Artificial Sequence
  Description of Artificial Sequence: Synthetic oligonucleotide
  modified_base (18)..(18): a, c, u, g, unknown or other
cuuaauaacuugaaaacng

SEQ ID NO: 2054305 - RNA, 19 nt, Artificial Sequence
  Description of Artificial Sequence: Synthetic oligonucleotide
uuuucaucuauuucuaagg

SEQ ID NO: 2054306 - RNA, 19 nt, Artificial Sequence
  Description of Artificial Sequence: Synthetic oligonucleotide
aaacuuuucagucuuauau

SEQ ID NO: 2054307 - RNA, 19 nt, Artificial Sequence
  Description of Artificial Sequence: Synthetic oligonucleotide
aacacuauuauuggaaugg

SEQ ID NO: 2054308 - RNA, 19 nt, Artificial Sequence
  Description of Artificial Sequence: Synthetic oligonucleotide
ugaaguaguaucuuacugg

SEQ ID NO: 2054309 - RNA, 19 nt, Artificial Sequence
  Description of Artificial Sequence: Synthetic oligonucleotide
acuuugaucauuuccaagg

SEQ ID NO: 2054310 - RNA, 19 nt, Artificial Sequence
  Description of Artificial Sequence: Synthetic oligonucleotide
acguaaagcauuuugacuc

SEQ ID NO: 2054311 - RNA, 19 nt, Artificial Sequence
  Description of Artificial Sequence: Synthetic oligonucleotide
agcuuaauaacuugaaaac

SEQ ID NO: 2054312 - RNA, 19 nt, Artificial Sequence
  Description of Artificial Sequence: Synthetic oligonucleotide
ucuuuaacagcauuuauga

SEQ ID NO: 2054313 - RNA, 19 nt, Artificial Sequence
  Description of Artificial Sequence: Synthetic oligonucleotide
acuaguauuaauuuuaaau

SEQ ID NO: 2054314 - RNA, 19 nt, Artificial Sequence
  Description of Artificial Sequence: Synthetic oligonucleotide
aacuucugaaagaauaucc

SEQ ID NO: 2054315 - RNA, 19 nt, Artificial Sequence
  Description of Artificial Sequence: Synthetic oligonucleotide
uuuauaaaacuuuucaguc

SEQ ID NO: 2054316 - RNA, 19 nt, Artificial Sequence
  Description of Artificial Sequence: Synthetic oligonucleotide
uuaaucguguuucaagagg

SEQ ID NO: 2054317 - RNA, 19 nt, Artificial Sequence
  Description of Artificial Sequence: Synthetic oligonucleotide
aaauuguaaaugauauucc

SEQ ID NO: 2054318 - RNA, 19 nt, Artificial Sequence
  Description of Artificial Sequence: Synthetic oligonucleotide
cauuuaugaaaucugagag

SEQ ID NO: 2054319 - RNA, 19 nt, Artificial Sequence
  Description of Artificial Sequence: Synthetic oligonucleotide
uuuaacagcauuuaugaaa

SEQ ID NO: 2054320 - RNA, 19 nt, Artificial Sequence
  Description of Artificial Sequence: Synthetic oligonucleotide
aguuuaaauaaaguagucc

SEQ ID NO: 2054321 - RNA, 19 nt, Artificial Sequence
  Description of Artificial Sequence: Synthetic oligonucleotide
aauauaccauagcauauag

SEQ ID NO: 2054322 - RNA, 19 nt, Artificial Sequence
  Description of Artificial Sequence: Synthetic oligonucleotide
uuuaacuucugaaagaaua

SEQ ID NO: 2054323 - RNA, 19 nt, Artificial Sequence
  Description of Artificial Sequence: Synthetic oligonucleotide
aaucugagaggguaaaauc

SEQ ID NO: 2054324 - RNA, 19 nt, Artificial Sequence
  Description of Artificial Sequence: Synthetic oligonucleotide
auuauaggaacguaaagca

SEQ ID NO: 2054325 - RNA, 19 nt, Artificial Sequence
  Description of Artificial Sequence: Synthetic oligonucleotide
  modified_base (16)..(16): a, c, u, g, unknown or other
uaauaacuugaaaacngcc

SEQ ID NO: 2054326 - RNA, 19 nt, Artificial Sequence
  Description of Artificial Sequence: Synthetic oligonucleotide
acuaguuuaaauaaaguag

SEQ ID NO: 2054327 - RNA, 19 nt, Artificial Sequence
  Description of Artificial Sequence: Synthetic oligonucleotide
uguuugaacaaccuuguug

SEQ ID NO: 2054328 - RNA, 19 nt, Artificial Sequence
  Description of Artificial Sequence: Synthetic oligonucleotide
aauuuuaacuucugaaaga

SEQ ID NO: 2054329 - RNA, 19 nt, Artificial Sequence
  Description of Artificial Sequence: Synthetic oligonucleotide
uauaccauagcauauaguu

SEQ ID NO: 2054330 - RNA, 19 nt, Artificial Sequence
  Description of Artificial Sequence: Synthetic oligonucleotide
aaauaaaguaguccuggag

SEQ ID NO: 2054331 - RNA, 19 nt, Artificial Sequence
  Description of Artificial Sequence: Synthetic oligonucleotide
uuuauaagcuucaaaggga

SEQ ID NO: 2054332 - RNA, 19 nt, Artificial Sequence
  Description of Artificial Sequence: Synthetic oligonucleotide
aaggauauucccuuuauaa

SEQ ID NO: 2054333 - RNA, 19 nt, Artificial Sequence
  Description of Artificial Sequence: Synthetic oligonucleotide
  modified_base (17)..(17): a, c, u, g, unknown or other
uuaauaacuugaaaacngc

SEQ ID NO: 2054334 - RNA, 19 nt, Artificial Sequence
  Description of Artificial Sequence: Synthetic oligonucleotide
auuuaugaaaucugagagg

SEQ ID NO: 2054335 - RNA, 19 nt, Artificial Sequence
  Description of Artificial Sequence: Synthetic oligonucleotide
ucugaaagaauauccauga

SEQ ID NO: 2054336 - RNA, 19 nt, Artificial Sequence
  Description of Artificial Sequence: Synthetic oligonucleotide
uaaaugauauuccaucucu

SEQ ID NO: 2054337 - RNA, 19 nt, Artificial Sequence
  Description of Artificial Sequence: Synthetic oligonucleotide
aauuuuauuggagaaggug

SEQ ID NO: 2054338 - RNA, 19 nt, Artificial Sequence
  Description of Artificial Sequence: Synthetic oligonucleotide
caaauuuuauuggagaagg

SEQ ID NO: 2054339 - RNA, 19 nt, Artificial Sequence
  Description of Artificial Sequence: Synthetic oligonucleotide
uuuccuugcaguuucaucu

SEQ ID NO: 2054340 - RNA, 19 nt, Artificial Sequence
  Description of Artificial Sequence: Synthetic oligonucleotide
uaauucuacacacugggac

SEQ ID NO: 2054341 - RNA, 19 nt, Artificial Sequence
  Description of Artificial Sequence: Synthetic oligonucleotide
uuuuaaucguguuucaaga

SEQ ID NO: 2054342 - RNA, 19 nt, Artificial Sequence
  Description of Artificial Sequence: Synthetic oligonucleotide
ucuacuaguauuaauuuua

SEQ ID NO: 2054343 - RNA, 19 nt, Artificial Sequence
  Description of Artificial Sequence: Synthetic oligonucleotide
aauuccugaauuuuaacuu

SEQ ID NO: 2054344 - RNA, 19 nt, Artificial Sequence
  Description of Artificial Sequence: Synthetic oligonucleotide
  modified_base (9)..(9): a, c, u, g, unknown or other
uguaaaacnucuucugcag

SEQ ID NO: 2054345 - RNA, 19 nt, Artificial Sequence
  Description of Artificial Sequence: Synthetic oligonucleotide
aaauuaaggaaacuaguuu

SEQ ID NO: 2054346 - RNA, 19 nt, Artificial Sequence
  Description of Artificial Sequence: Synthetic oligonucleotide
uggaauggcuaaauuaagg

SEQ ID NO: 2054347 - RNA, 19 nt, Artificial Sequence
  Description of Artificial Sequence: Synthetic oligonucleotide
uuaacagcauuuaugaaau

SEQ ID NO: 2054348 - RNA, 19 nt, Artificial Sequence
  Description of Artificial Sequence: Synthetic oligonucleotide
auagcauauaguuuugcag

SEQ ID NO: 2054349 - RNA, 19 nt, Artificial Sequence
  Description of Artificial Sequence: Synthetic oligonucleotide
ugaacaaccuuguuggaag

SEQ ID NO: 2054350 - RNA, 19 nt, Artificial Sequence
  Description of Artificial Sequence: Synthetic oligonucleotide
  modified_base (11)..(11): a, c, u, g, unknown or other
ucuguaaaacnucuucugc

SEQ ID NO: 2054351 - RNA, 19 nt, Artificial Sequence
  Description of Artificial Sequence: Synthetic oligonucleotide
aagaggaaaacagugaaga

SEQ ID NO: 2054352 - RNA, 19 nt, Artificial Sequence
  Description of Artificial Sequence: Synthetic oligonucleotide
cauuauaggaacguaaagc

SEQ ID NO: 2054353 - RNA, 19 nt, Artificial Sequence
  Description of Artificial Sequence: Synthetic oligonucleotide
aaugauauuccaucucuga

SEQ ID NO: 2054354 - RNA, 19 nt, Artificial Sequence
  Description of Artificial Sequence: Synthetic oligonucleotide
uagcuuaauaacuugaaaa

SEQ ID NO: 2054355 - RNA, 19 nt, Artificial Sequence
  Description of Artificial Sequence: Synthetic oligonucleotide
  modified_base (7)..(7): a, c, u, g, unknown or other
gaaaacngccaucuaaaac

SEQ ID NO: 2054356 - RNA, 19 nt, Artificial Sequence
  Description of Artificial Sequence: Synthetic oligonucleotide
uuuuauuggagaagguggc

SEQ ID NO: 2054357 - RNA, 19 nt, Artificial Sequence
  Description of Artificial Sequence: Synthetic oligonucleotide
ucaucuauuucuaaggaua

SEQ ID NO: 2054358 - RNA, 19 nt, Artificial Sequence
  Description of Artificial Sequence: Synthetic oligonucleotide
agucuugcuaauucuacac

SEQ ID NO: 2054359 - RNA, 19 nt, Artificial Sequence
  Description of Artificial Sequence: Synthetic oligonucleotide
uggaguaagucuaugacaa

SEQ ID NO: 2054360 - RNA, 19 nt, Artificial Sequence
  Description of Artificial Sequence: Synthetic oligonucleotide
uaaauuaaggaaacuaguu

SEQ ID NO: 2054361 - RNA, 19 nt, Artificial Sequence
  Description of Artificial Sequence: Synthetic oligonucleotide
ucuuauauacuaugacuag

SEQ ID NO: 2054362 - RNA, 19 nt, Artificial Sequence
  Description of Artificial Sequence: Synthetic oligonucleotide
cuuuuaaucguguuucaag

SEQ ID NO: 2054363 - RNA, 19 nt, Artificial Sequence
  Description of Artificial Sequence: Synthetic oligonucleotide
aacguaaagcauuuugacu

SEQ ID NO: 2054364 - RNA, 19 nt, Artificial Sequence
  Description of Artificial Sequence: Synthetic oligonucleotide
agucuuauauacuaugacu

SEQ ID NO: 2054365 - RNA, 19 nt, Artificial Sequence
  Description of Artificial Sequence: Synthetic oligonucleotide
  modified_base (13)..(13): a, c, u, g, unknown or other
uuucuguaaaacnucuucu

SEQ ID NO: 2054366 - RNA, 19 nt, Artificial Sequence
  Description of Artificial Sequence: Synthetic oligonucleotide
uuauaaaacuuuucagucu

SEQ ID NO: 2054367 - RNA, 19 nt, Artificial Sequence
  Description of Artificial Sequence: Synthetic oligonucleotide
uaaucguguuucaagagga

SEQ ID NO: 2054368 - RNA, 19 nt, Artificial Sequence
  Description of Artificial Sequence: Synthetic oligonucleotide
  modified_base (15)..(15): a, c, u, g, unknown or other
aauaacuugaaaacngcca

SEQ ID NO: 2054369 - RNA, 19 nt, Artificial Sequence
  Description of Artificial Sequence: Synthetic oligonucleotide
uuuggugauugccaaaaca

SEQ ID NO: 2054370 - RNA, 19 nt, Artificial Sequence
  Description of Artificial Sequence: Synthetic oligonucleotide
uuuaaucguguuucaagag

SEQ ID NO: 2054371 - RNA, 19 nt, Artificial Sequence
  Description of Artificial Sequence: Synthetic oligonucleotide
aaacacuauuauuggaaug

SEQ ID NO: 2054372 - RNA, 19 nt, Artificial Sequence
  Description of Artificial Sequence: Synthetic oligonucleotide
ugcaauauaccauagcaua

SEQ ID NO: 2054373 - RNA, 19 nt, Artificial Sequence
  Description of Artificial Sequence: Synthetic oligonucleotide
accauugucggcucaauuc

SEQ ID NO: 2054374 - RNA, 19 nt, Artificial Sequence
  Description of Artificial Sequence: Synthetic oligonucleotide
uaguauuaauuuuaaauuu

SEQ ID NO: 2054375 - RNA, 19 nt, Artificial Sequence
  Description of Artificial Sequence: Synthetic oligonucleotide
guuuaaauaaaguaguccu

SEQ ID NO: 2054376 - RNA, 19 nt, Artificial Sequence
  Description of Artificial Sequence: Synthetic oligonucleotide
uauuggaauggcuaaauua

SEQ ID NO: 2054377 - RNA, 19 nt, Artificial Sequence
  Description of Artificial Sequence: Synthetic oligonucleotide
uugaucauuuccaaggcaa

SEQ ID NO: 2054378 - RNA, 19 nt, Artificial Sequence
  Description of Artificial Sequence: Synthetic oligonucleotide
uuucaucuauuucuaagga

SEQ ID NO: 2054379 - RNA, 19 nt, Artificial Sequence
  Description of Artificial Sequence: Synthetic oligonucleotide
aggcuucacaaguuuaugc

SEQ ID NO: 2054380 - RNA, 19 nt, Artificial Sequence
  Description of Artificial Sequence: Synthetic oligonucleotide
  modified_base (9)..(9): a, c, u, g, unknown or other
uugaaaacngccaucuaaa

SEQ ID NO: 2054381 - RNA, 19 nt, Artificial Sequence
  Description of Artificial Sequence: Synthetic oligonucleotide
agggauagccaccagcuac

SEQ ID NO: 2054382 - RNA, 19 nt, Artificial Sequence
  Description of Artificial Sequence: Synthetic oligonucleotide
uauaggaacguaaagcauu

SEQ ID NO: 2054383 - RNA, 19 nt, Artificial Sequence
  Description of Artificial Sequence: Synthetic oligonucleotide
aacugccaucuuuuaaucg

SEQ ID NO: 2054384 - RNA, 19 nt, Artificial Sequence
  Description of Artificial Sequence: Synthetic oligonucleotide
aagcuucaaagggauagcc

SEQ ID NO: 2054385 - RNA, 19 nt, Artificial Sequence
  Description of Artificial Sequence: Synthetic oligonucleotide
uugcuaauucuacacacug

SEQ ID NO: 2054386 - RNA, 19 nt, Artificial Sequence
  Description of Artificial Sequence: Synthetic oligonucleotide
uuauauacuaugacuaguu

SEQ ID NO: 2054387 - RNA, 19 nt, Artificial Sequence
  Description of Artificial Sequence: Synthetic oligonucleotide
aagaauauccaugagggua

SEQ ID NO: 2054388 - RNA, 19 nt, Artificial Sequence
  Description of Artificial Sequence: Synthetic oligonucleotide
uuaacuucugaaagaauau

SEQ ID NO: 2054389 - RNA, 19 nt, Artificial Sequence
  Description of Artificial Sequence: Synthetic oligonucleotide
gcuaauucuacacacuggg

SEQ ID NO: 2054390 - RNA, 19 nt, Artificial Sequence
  Description of Artificial Sequence: Synthetic oligonucleotide
uucaagaggaaaacaguga

SEQ ID NO: 2054391 - RNA, 19 nt, Artificial Sequence
  Description of Artificial Sequence: Synthetic oligonucleotide
ucuugcuaauucuacacac

SEQ ID NO: 2054392 - RNA, 19 nt, Artificial Sequence
  Description of Artificial Sequence: Synthetic oligonucleotide
ugcuaauucuacacacugg

SEQ ID NO: 2054393 - RNA, 19 nt, Artificial Sequence
  Description of Artificial Sequence: Synthetic oligonucleotide
  modified_base (12)..(12): a, c, u, g, unknown or other
aacuugaaaacngccaucu

SEQ ID NO: 2054394 - RNA, 19 nt, Artificial Sequence
  Description of Artificial Sequence: Synthetic oligonucleotide
ugcuaaguagcuuaauaac

SEQ ID NO: 2054395 - RNA, 19 nt, Artificial Sequence
  Description of Artificial Sequence: Synthetic oligonucleotide
ucugaaaauggaaugcaau

SEQ ID NO: 2054396 - RNA, 19 nt, Artificial Sequence
  Description of Artificial Sequence: Synthetic oligonucleotide
aguaagauccacauacuuc

SEQ ID NO: 2054397 - RNA, 19 nt, Artificial Sequence
  Description of Artificial Sequence: Synthetic oligonucleotide
gaacguaaagcauuuugac

SEQ ID NO: 2054398 - RNA, 19 nt, Artificial Sequence
  Description of Artificial Sequence: Synthetic oligonucleotide
uauuccaucucugauuuca

SEQ ID NO: 2054399 - RNA, 19 nt, Artificial Sequence
  Description of Artificial Sequence: Synthetic oligonucleotide
uaccauagcauauaguuuu

SEQ ID NO: 2054400 - RNA, 19 nt, Artificial Sequence
  Description of Artificial Sequence: Synthetic oligonucleotide
gaaguaguaucuuacugga

SEQ ID NO: 2054401 - RNA, 19 nt, Artificial Sequence
  Description of Artificial Sequence: Synthetic oligonucleotide
uucaucuguuugaacaacc

SEQ ID NO: 2054402 - RNA, 19 nt, Artificial Sequence
  Description of Artificial Sequence: Synthetic oligonucleotide
uaaguagcuuaauaacuug

SEQ ID NO: 2054403 - RNA, 19 nt, Artificial Sequence
  Description of Artificial Sequence: Synthetic oligonucleotide
aguuuaugcauuguuaacu

SEQ ID NO: 2054404 - RNA, 19 nt, Artificial Sequence
  Description of Artificial Sequence: Synthetic oligonucleotide
caaacuuuagucuugcuaa

SEQ ID NO: 2054405 - RNA, 19 nt, Artificial Sequence
  Description of Artificial Sequence: Synthetic oligonucleotide
cauuuugacucccuguacc

SEQ ID NO: 2054406 - RNA, 19 nt, Artificial Sequence
  Description of Artificial Sequence: Synthetic oligonucleotide
ucuguuugaacaaccuugu

SEQ ID NO: 2054407 - RNA, 19 nt, Artificial Sequence
  Description of Artificial Sequence: Synthetic oligonucleotide
ugauugccaaaacaacugc

SEQ ID NO: 2054408 - RNA, 19 nt, Artificial Sequence
  Description of Artificial Sequence: Synthetic oligonucleotide
acugcagcaguagauuucc

SEQ ID NO: 2054409 - RNA, 19 nt, Artificial Sequence
  Description of Artificial Sequence: Synthetic oligonucleotide
aauauccaugaggguaucc

SEQ ID NO: 2054410 - RNA, 19 nt, Artificial Sequence
  Description of Artificial Sequence: Synthetic oligonucleotide
ugacuaguuuaaauaaagu

SEQ ID NO: 2054411 - RNA, 19 nt, Artificial Sequence
  Description of Artificial Sequence: Synthetic oligonucleotide
uuggaauggcuaaauuaag

SEQ ID NO: 2054412 - RNA, 19 nt, Artificial Sequence
  Description of Artificial Sequence: Synthetic oligonucleotide
aguggaaggcuucacaagu

SEQ ID NO: 2054413 - RNA, 19 nt, Artificial Sequence
  Description of Artificial Sequence: Synthetic oligonucleotide
  modified_base (10)..(10): a, c, u, g, unknown or other
cuugaaaacngccaucuaa

SEQ ID NO: 2054414 - RNA, 19 nt, Artificial Sequence
  Description of Artificial Sequence: Synthetic oligonucleotide
ucuucugcuaaguagcuua

SEQ ID NO: 2054415 - RNA, 19 nt, Artificial Sequence
  Description of Artificial Sequence: Synthetic oligonucleotide
aaagggauagccaccagcu

SEQ ID NO: 2054416 - RNA, 19 nt, Artificial Sequence
  Description of Artificial Sequence: Synthetic oligonucleotide
aaagaauauccaugagggu

SEQ ID NO: 2054417 - RNA, 19 nt, Artificial Sequence
  Description of Artificial Sequence: Synthetic oligonucleotide
acaacugccaucuuuuaau

SEQ ID NO: 2054418 - RNA, 19 nt, Artificial Sequence
  Description of Artificial Sequence: Synthetic oligonucleotide
uugaauuccugaauuuuaa

SEQ ID NO: 2054419 - RNA, 19 nt, Artificial Sequence
  Description of Artificial Sequence: Synthetic oligonucleotide
uucacaaguuuaugcauug

SEQ ID NO: 2054420 - RNA, 19 nt, Artificial Sequence
  Description of Artificial Sequence: Synthetic oligonucleotide
aacuuuucagucuuauaua

SEQ ID NO: 2054421 - RNA, 19 nt, Artificial Sequence
  Description of Artificial Sequence: Synthetic oligonucleotide
ucugcuaaguagcuuaaua

SEQ ID NO: 2054422 - RNA, 19 nt, Artificial Sequence
  Description of Artificial Sequence: Synthetic oligonucleotide
ugaaaauggaaugcaauau

SEQ ID NO: 2054423 - RNA, 19 nt, Artificial Sequence
  Description of Artificial Sequence: Synthetic oligonucleotide
ugagaggguaaaaucuuca

SEQ ID NO: 2054424 - RNA, 19 nt, Artificial Sequence
  Description of Artificial Sequence: Synthetic oligonucleotide
  modified_base (5)..(5): a, c, u, g, unknown or other
aaacngccaucuaaaacuc

SEQ ID NO: 2054425 - RNA, 19 nt, Artificial Sequence
  Description of Artificial Sequence: Synthetic oligonucleotide
uuuagucuugcuaauucua

SEQ ID NO: 2054426 - RNA, 19 nt, Artificial Sequence
  Description of Artificial Sequence: Synthetic oligonucleotide
  modified_base (10)..(10): a, c, u, g, unknown or other
cuguaaaacnucuucugca

SEQ ID NO: 2054427 - RNA, 19 nt, Artificial Sequence
  Description of Artificial Sequence: Synthetic oligonucleotide
uggaaugcaauauaccaua

SEQ ID NO: 2054428 - RNA, 19 nt, Artificial Sequence
  Description of Artificial Sequence: Synthetic oligonucleotide
uaaacacuauuauuggaau

SEQ ID NO: 2054429 - RNA, 19 nt, Artificial Sequence
  Description of Artificial Sequence: Synthetic oligonucleotide
cauuacauugcuggaaagg

SEQ ID NO: 2054430 - RNA, 19 nt, Artificial Sequence
  Description of Artificial Sequence: Synthetic oligonucleotide
auaguuuugcagcacucug

SEQ ID NO: 2054431 - RNA, 19 nt, Artificial Sequence
  Description of Artificial Sequence: Synthetic oligonucleotide
uguuggaagguuugaauuc

SEQ ID NO: 2054432 - RNA, 19 nt, Artificial Sequence
  Description of Artificial Sequence: Synthetic oligonucleotide
ucguguuucaagaggaaaa

SEQ ID NO: 2054433 - RNA, 19 nt, Artificial Sequence
  Description of Artificial Sequence: Synthetic oligonucleotide
auuacauugcuggaaagga

SEQ ID NO: 2054434 - RNA, 19 nt, Artificial Sequence
  Description of Artificial Sequence: Synthetic oligonucleotide
uuugacucccuguaccacc

SEQ ID NO: 2054435 - RNA, 19 nt, Artificial Sequence
  Description of Artificial Sequence: Synthetic oligonucleotide
cuuugaucauuuccaaggc

SEQ ID NO: 2054436 - RNA, 19 nt, Artificial Sequence
  Description of Artificial Sequence: Synthetic oligonucleotide
ucaucacugaaguaguauc

SEQ ID NO: 2054437 - RNA, 19 nt, Artificial Sequence
  Description of Artificial Sequence: Synthetic oligonucleotide
gaaugcaauauaccauagc

SEQ ID NO: 2054438 - RNA, 19 nt, Artificial Sequence
  Description of Artificial Sequence: Synthetic oligonucleotide
ugaggguauccacugauaa

SEQ ID NO: 2054439 - RNA, 19 nt, Artificial Sequence
  Description of Artificial Sequence: Synthetic oligonucleotide
caucuuuuaaucguguuuc

SEQ ID NO: 2054440 - RNA, 19 nt, Artificial Sequence
  Description of Artificial Sequence: Synthetic oligonucleotide
gcuaaauuaaggaaacuag

SEQ ID NO: 2054441 - RNA, 19 nt, Artificial Sequence
  Description of Artificial Sequence: Synthetic oligonucleotide
cuaguuuaaauaaaguagu

SEQ ID NO: 2054442 - RNA, 19 nt, Artificial Sequence
  Description of Artificial Sequence: Synthetic oligonucleotide
guaagauccacauacuucu

SEQ ID NO: 2054443 - RNA, 19 nt, Artificial Sequence
  Description of Artificial Sequence: Synthetic oligonucleotide
auuggaauggcuaaauuaa

SEQ ID NO: 2054444 - RNA, 19 nt, Artificial Sequence
  Description of Artificial Sequence: Synthetic oligonucleotide
uacuuugaucauuuccaag

SEQ ID NO: 2054445 - RNA, 19 nt, Artificial Sequence
  Description of Artificial Sequence: Synthetic oligonucleotide
aagguuugaauuccugaau

SEQ ID NO: 2054446 - RNA, 19 nt, Artificial Sequence
  Description of Artificial Sequence: Synthetic oligonucleotide
uuucugaaaauggaaugca

SEQ ID NO: 2054447 - RNA, 19 nt, Artificial Sequence
  Description of Artificial Sequence: Synthetic oligonucleotide
uuauaggaacguaaagcau

SEQ ID NO: 2054448 - RNA, 19 nt, Artificial Sequence
  Description of Artificial Sequence: Synthetic oligonucleotide
gaagguuugaauuccugaa

SEQ ID NO: 2054449 - RNA, 19 nt, Artificial Sequence
  Description of Artificial Sequence: Synthetic oligonucleotide
cugaaguaguaucuuacug

SEQ ID NO: 2054450 - RNA, 19 nt, Artificial Sequence
  Description of Artificial Sequence: Synthetic oligonucleotide
auaaaguaguccuggagua

SEQ ID NO: 2054451 - RNA, 19 nt, Artificial Sequence
  Description of Artificial Sequence: Synthetic oligonucleotide
cugaauuuuaacuucugaa

SEQ ID NO: 2054452 - RNA, 19 nt, Artificial Sequence
  Description of Artificial Sequence: Synthetic oligonucleotide
gaauggcuaaauuaaggaa

SEQ ID NO: 2054453 - RNA, 19 nt, Artificial Sequence
  Description of Artificial Sequence: Synthetic oligonucleotide
aggguauccacugauaagu

SEQ ID NO: 2054454 - RNA, 19 nt, Artificial Sequence
  Description of Artificial Sequence: Synthetic oligonucleotide
aacaacugccaucuuuuaa

SEQ ID NO: 2054455 - RNA, 19 nt, Artificial Sequence
  Description of Artificial Sequence: Synthetic oligonucleotide
  modified_base (6)..(6): a, c, u, g, unknown or other
uuuucnccauuacauugcu

SEQ ID NO: 2054456 - RNA, 19 nt, Artificial Sequence
  Description of Artificial Sequence: Synthetic oligonucleotide
uaagucuaugacaacuuuu

SEQ ID NO: 2054457 - RNA, 19 nt, Artificial Sequence
  Description of Artificial Sequence: Synthetic oligonucleotide
gaacaaccuuguuggaagg

SEQ ID NO: 2054458 - RNA, 19 nt, Artificial Sequence
  Description of Artificial Sequence: Synthetic oligonucleotide
cuaguauuaauuuuaaauu

SEQ ID NO: 2054459 - RNA, 19 nt, Artificial Sequence
  Description of Artificial Sequence: Synthetic oligonucleotide
ucccaaauuguaaaugaua

SEQ ID NO: 2054460 - RNA, 19 nt, Artificial Sequence
  Description of Artificial Sequence: Synthetic oligonucleotide
uacuucuucucaguggaag

SEQ ID NO: 2054461 - RNA, 19 nt, Artificial Sequence
  Description of Artificial Sequence: Synthetic oligonucleotide
uacuaugacuaguuuaaau

SEQ ID NO: 2054462 - RNA, 19 nt, Artificial Sequence
  Description of Artificial Sequence: Synthetic oligonucleotide
cuggcaaaucuucaucucc

SEQ ID NO: 2054463 - RNA, 19 nt, Artificial Sequence
  Description of Artificial Sequence: Synthetic oligonucleotide
aaaugauauuccaucucug

SEQ ID NO: 2054464 - RNA, 19 nt, Artificial Sequence
  Description of Artificial Sequence: Synthetic oligonucleotide
agcauauaguuuugcagca

SEQ ID NO: 2054465 - RNA, 19 nt, Artificial Sequence
  Description of Artificial Sequence: Synthetic oligonucleotide
uuccugaauuuuaacuucu

SEQ ID NO: 2054466 - RNA, 19 nt, Artificial Sequence
  Description of Artificial Sequence: Synthetic oligonucleotide
acacuauuauuggaauggc

SEQ ID NO: 2054467 - RNA, 19 nt, Artificial Sequence
  Description of Artificial Sequence: Synthetic oligonucleotide
uauauacuaugacuaguuu

SEQ ID NO: 2054468 - RNA, 19 nt, Artificial Sequence
  Description of Artificial Sequence: Synthetic oligonucleotide
uuucaaacuuuagucuugc

SEQ ID NO: 2054469 - RNA, 19 nt, Artificial Sequence
  Description of Artificial Sequence: Synthetic oligonucleotide
cacugaaguaguaucuuac

SEQ ID NO: 2054470 - RNA, 19 nt, Artificial Sequence
  Description of Artificial Sequence: Synthetic oligonucleotide
auuuugacucccuguacca

SEQ ID NO: 2054471 - RNA, 19 nt, Artificial Sequence
  Description of Artificial Sequence: Synthetic oligonucleotide
acugaaguaguaucuuacu

SEQ ID NO: 2054472 - RNA, 19 nt, Artificial Sequence
  Description of Artificial Sequence: Synthetic oligonucleotide
gauugccaaaacaacugcc

SEQ ID NO: 2054473 - RNA, 19 nt, Artificial Sequence
  Description of Artificial Sequence: Synthetic oligonucleotide
uucaucuauuucuaaggau

SEQ ID NO: 2054474 - RNA, 19 nt, Artificial Sequence
  Description of Artificial Sequence: Synthetic oligonucleotide
caaacgacacaguaagauc

SEQ ID NO: 2054475 - RNA, 19 nt, Artificial Sequence
  Description of Artificial Sequence: Synthetic oligonucleotide
uggugauugccaaaacaac

SEQ ID NO: 2054476 - RNA, 19 nt, Artificial Sequence
  Description of Artificial Sequence: Synthetic oligonucleotide
guaaaugauauuccaucuc

SEQ ID NO: 2054477 - RNA, 19 nt, Artificial Sequence
  Description of Artificial Sequence: Synthetic oligonucleotide
uauaguuuugcagcacucu

SEQ ID NO: 2054478 - RNA, 19 nt, Artificial Sequence
  Description of Artificial Sequence: Synthetic oligonucleotide
aggauauucccuuuauaaa

SEQ ID NO: 2054479 - RNA, 19 nt, Artificial Sequence
  Description of Artificial Sequence: Synthetic oligonucleotide
gaucauuuccaaggcaacc

SEQ ID NO: 2054480 - RNA, 19 nt, Artificial Sequence
  Description of Artificial Sequence: Synthetic oligonucleotide
ucuaaggauauucccuuua

SEQ ID NO: 2054481 - RNA, 19 nt, Artificial Sequence
  Description of Artificial Sequence: Synthetic oligonucleotide
ugagaugcaaaguuucauu

SEQ ID NO: 2054482 - RNA, 19 nt, Artificial Sequence
  Description of Artificial Sequence: Synthetic oligonucleotide
uuuucuuacuucagauguc

SEQ ID NO: 2054483 - RNA, 19 nt, Artificial Sequence
  Description of Artificial Sequence: Synthetic oligonucleotide
aagucuaugacaacuuuua

SEQ ID NO: 2054484 - RNA, 19 nt, Artificial Sequence
  Description of Artificial Sequence: Synthetic oligonucleotide
aaguagcuuaauaacuuga

SEQ ID NO: 2054485 - RNA, 19 nt, Artificial Sequence
  Description of Artificial Sequence: Synthetic oligonucleotide
gggcaaacgacacaguaag

SEQ ID NO: 2054486 - RNA, 19 nt, Artificial Sequence
  Description of Artificial Sequence: Synthetic oligonucleotide
uuacauugcuggaaaggaa

SEQ ID NO: 2054487 - RNA, 19 nt, Artificial Sequence
  Description of Artificial Sequence: Synthetic oligonucleotide
uccauguacaguccaccug

SEQ ID NO: 2054488 - RNA, 19 nt, Artificial Sequence
  Description of Artificial Sequence: Synthetic oligonucleotide
gaggguauccacugauaag

SEQ ID NO: 2054489 - RNA, 19 nt, Artificial Sequence
  Description of Artificial Sequence: Synthetic oligonucleotide
uuuauuggagaagguggcc

SEQ ID NO: 2054490 - RNA, 19 nt, Artificial Sequence
  Description of Artificial Sequence: Synthetic oligonucleotide
ugaagaaaacugagaugca

SEQ ID NO: 2054491 - RNA, 19 nt, Artificial Sequence
  Description of Artificial Sequence: Synthetic oligonucleotide
ugaucauuuccaaggcaac

SEQ ID NO: 2054492 - RNA, 19 nt, Artificial Sequence
  Description of Artificial Sequence: Synthetic oligonucleotide
  modified_base (13)..(13): a, c, u, g, unknown or other
uaacuugaaaacngccauc

SEQ ID NO: 2054493 - RNA, 19 nt, Artificial Sequence
  Description of Artificial Sequence: Synthetic oligonucleotide
gugauugccaaaacaacug

SEQ ID NO: 2054494 - RNA, 19 nt, Artificial Sequence
  Description of Artificial Sequence: Synthetic oligonucleotide
  modified_base (8)..(8): a, c, u, g, unknown or other
ugaaaacngccaucuaaaa

SEQ ID NO: 2054495 - RNA, 19 nt, Artificial Sequence
  Description of Artificial Sequence: Synthetic oligonucleotide
ggaauggcuaaauuaagga

SEQ ID NO: 2054496 - RNA, 19 nt, Artificial Sequence
  Description of Artificial Sequence: Synthetic oligonucleotide
ggauauucccuuuauaaaa

SEQ ID NO: 2054497 - RNA, 19 nt, Artificial Sequence
  Description of Artificial Sequence: Synthetic oligonucleotide
uagucuugcuaauucuaca

SEQ ID NO: 2054498 - RNA, 19 nt, Artificial Sequence
  Description of Artificial Sequence: Synthetic oligonucleotide
uuuccauguacaguccacc

SEQ ID NO: 2054499 - RNA, 19 nt, Artificial Sequence
  Description of Artificial Sequence: Synthetic oligonucleotide
uucccuuuauaaaacuuuu

SEQ ID NO: 2054500 - RNA, 19 nt, Artificial Sequence
  Description of Artificial Sequence: Synthetic oligonucleotide
uuuuaacuucugaaagaau

SEQ ID NO: 2054501 - RNA, 19 nt, Artificial Sequence
  Description of Artificial Sequence: Synthetic oligonucleotide
auuguuaacuuuaaccuuu

SEQ ID NO: 2054502 - RNA, 19 nt, Artificial Sequence
  Description of Artificial Sequence: Synthetic oligonucleotide
caugacccggcauuauagg

SEQ ID NO: 2054503 - RNA, 19 nt, Artificial Sequence
  Description of Artificial Sequence: Synthetic oligonucleotide
acucuacuaguauuaauuu

SEQ ID NO: 2054504 - RNA, 19 nt, Artificial Sequence
  Description of Artificial Sequence: Synthetic oligonucleotide
gucuuauauacuaugacua

SEQ ID NO: 2054505 - RNA, 19 nt, Artificial Sequence
  Description of Artificial Sequence: Synthetic oligonucleotide
agguuugaauuccugaauu

SEQ ID NO: 2054506 - RNA, 19 nt, Artificial Sequence
  Description of Artificial Sequence: Synthetic oligonucleotide
uaaagcauuuugacucccu

SEQ ID NO: 2054507 - RNA, 19 nt, Artificial Sequence
  Description of Artificial Sequence: Synthetic oligonucleotide
uggaagguuugaauuccug

SEQ ID NO: 2054508 - RNA, 19 nt, Artificial Sequence
  Description of Artificial Sequence: Synthetic oligonucleotide
agcauuuugacucccugua

SEQ ID NO: 2054509 - RNA, 19 nt, Artificial Sequence
  Description of Artificial Sequence: Synthetic oligonucleotide
aaauuuuauuggagaaggu

SEQ ID NO: 2054510 - RNA, 19 nt, Artificial Sequence
  Description of Artificial Sequence: Synthetic oligonucleotide
aguaguccuggaguaaguc

SEQ ID NO: 2054511 - RNA, 19 nt, Artificial Sequence
  Description of Artificial Sequence: Synthetic oligonucleotide
uauccaugaggguauccac

SEQ ID NO: 2054512 - RNA, 19 nt, Artificial Sequence
  Description of Artificial Sequence: Synthetic oligonucleotide
uguagagccuuaugguuaa

SEQ ID NO: 2054513 - RNA, 19 nt, Artificial Sequence
  Description of Artificial Sequence: Synthetic oligonucleotide
auugccaaaacaacugcca

SEQ ID NO: 2054514 - RNA, 19 nt, Artificial Sequence
  Description of Artificial Sequence: Synthetic oligonucleotide
auauaguuuugcagcacuc

SEQ ID NO: 2054515 - RNA, 19 nt, Artificial Sequence
  Description of Artificial Sequence: Synthetic oligonucleotide
aaagccaacucuacuagua

SEQ ID NO: 2054516 - RNA, 19 nt, Artificial Sequence
  Description of Artificial Sequence: Synthetic oligonucleotide
ugacccggcauuauaggaa

SEQ ID NO: 2054517 - RNA, 19 nt, Artificial Sequence
  Description of Artificial Sequence: Synthetic oligonucleotide
auuuccauguacaguccac

SEQ ID NO: 2054518 - RNA, 19 nt, Artificial Sequence
  Description of Artificial Sequence: Synthetic oligonucleotide
aagccaacucuacuaguau

SEQ ID NO: 2054519 - RNA, 19 nt, Artificial Sequence
  Description of Artificial Sequence: Synthetic oligonucleotide
ggguaaaaucuucauuucc

SEQ ID NO: 2054520 - RNA, 19 nt, Artificial Sequence
  Description of Artificial Sequence: Synthetic oligonucleotide
uuuuggugauugccaaaac

SEQ ID NO: 2054521 - RNA, 19 nt, Artificial Sequence
  Description of Artificial Sequence: Synthetic oligonucleotide
  modified_base (5)..(5): a, c, u, g, unknown or other
uuucnccauuacauugcug

SEQ ID NO: 2054522 - RNA, 19 nt, Artificial Sequence
  Description of Artificial Sequence: Synthetic oligonucleotide
auauccaugaggguaucca

SEQ ID NO: 2054523 - RNA, 19 nt, Artificial Sequence
  Description of Artificial Sequence: Synthetic oligonucleotide
cuauuauuggaauggcuaa

SEQ ID NO: 2054524 - RNA, 19 nt, Artificial Sequence
  Description of Artificial Sequence: Synthetic oligonucleotide
  modified_base (3)..(3): a, c, u, g, unknown or other
acngccaucuaaaacucug

SEQ ID NO: 2054525 - RNA, 19 nt, Artificial Sequence
  Description of Artificial Sequence: Synthetic oligonucleotide
uauuauuggaauggcuaaa

SEQ ID NO: 2054526 - RNA, 19 nt, Artificial Sequence
  Description of Artificial Sequence: Synthetic oligonucleotide
uuaugaaaucugagagggu

SEQ ID NO: 2054527 - RNA, 19 nt, Artificial Sequence
  Description of Artificial Sequence: Synthetic oligonucleotide
agaggguaaaaucuucauu

SEQ ID NO: 2054528 - RNA, 19 nt, Artificial Sequence
  Description of Artificial Sequence: Synthetic oligonucleotide
cugcuaaguagcuuaauaa

SEQ ID NO: 2054529 - RNA, 19 nt, Artificial Sequence
  Description of Artificial Sequence: Synthetic oligonucleotide
gguaaaaucuucauuucca

SEQ ID NO: 2054530 - RNA, 19 nt, Artificial Sequence
  Description of Artificial Sequence: Synthetic oligonucleotide
cuggaguaagucuaugaca

SEQ ID NO: 2054531 - RNA, 19 nt, Artificial Sequence
  Description of Artificial Sequence: Synthetic oligonucleotide
cagcaguagauuuccuugc

SEQ ID NO: 2054532 - RNA, 19 nt, Artificial Sequence
  Description of Artificial Sequence: Synthetic oligonucleotide
uugaacaaccuuguuggaa

SEQ ID NO: 2054533 - RNA, 19 nt, Artificial Sequence
  Description of Artificial Sequence: Synthetic oligonucleotide
ucccuuuauaaaacuuuuc

SEQ ID NO: 2054534 - RNA, 19 nt, Artificial Sequence
  Description of Artificial Sequence: Synthetic oligonucleotide
  modified_base (3)..(3): a, c, u, g, unknown or other
ucnccauuacauugcugga

SEQ ID NO: 2054535 - RNA, 19 nt, Artificial Sequence
  Description of Artificial Sequence: Synthetic oligonucleotide
cugaaagaauauccaugag

SEQ ID NO: 2054536 - RNA, 19 nt, Artificial Sequence
  Description of Artificial Sequence: Synthetic oligonucleotide
ugucggcucaauuccauau

SEQ ID NO: 2054537 - RNA, 19 nt, Artificial Sequence
  Description of Artificial Sequence: Synthetic oligonucleotide
ucuuuuaaucguguuucaa

SEQ ID NO: 2054538 - RNA, 19 nt, Artificial Sequence
  Description of Artificial Sequence: Synthetic oligonucleotide
uuccauguacaguccaccu

SEQ ID NO: 2054539 - RNA, 19 nt, Artificial Sequence
  Description of Artificial Sequence: Synthetic oligonucleotide
uacuaguauuaauuuuaaa

SEQ ID NO: 2054540 - RNA, 19 nt, Artificial Sequence
  Description of Artificial Sequence: Synthetic oligonucleotide
gcagcaguagauuuccuug

SEQ ID NO: 2054541 - RNA, 19 nt, Artificial Sequence
  Description of Artificial Sequence: Synthetic oligonucleotide
ugccaaaacaacugccauc

SEQ ID NO: 2054542 - RNA, 19 nt, Artificial Sequence
  Description of Artificial Sequence: Synthetic oligonucleotide
gguauccacugauaagucc

SEQ ID NO: 2054543 - RNA, 19 nt, Artificial Sequence
  Description of Artificial Sequence: Synthetic oligonucleotide
agaauauccaugaggguau

SEQ ID NO: 2054544 - RNA, 19 nt, Artificial Sequence
  Description of Artificial Sequence: Synthetic oligonucleotide
  modified_base (8)..(8): a, c, u, g, unknown or other
guaaaacnucuucugcaga

SEQ ID NO: 2054545 - RNA, 19 nt, Artificial Sequence
  Description of Artificial Sequence: Synthetic oligonucleotide
augacccggcauuauagga

SEQ ID NO: 2054546 - RNA, 19 nt, Artificial Sequence
  Description of Artificial Sequence: Synthetic oligonucleotide
gacccggcauuauaggaac

SEQ ID NO: 2054547 - RNA, 19 nt, Artificial Sequence
  Description of Artificial Sequence: Synthetic oligonucleotide
ugaaaucugagaggguaaa

SEQ ID NO: 2054548 - RNA, 19 nt, Artificial Sequence
  Description of Artificial Sequence: Synthetic oligonucleotide
aaguaguaucuuacuggag

SEQ ID NO: 2054549 - RNA, 19 nt, Artificial Sequence
  Description of Artificial Sequence: Synthetic oligonucleotide
agaugcaaaguuucauuua

SEQ ID NO: 2054550 - RNA, 19 nt, Artificial Sequence
  Description of Artificial Sequence: Synthetic oligonucleotide
ucggcucaauuccauauuu

SEQ ID NO: 2054551 - RNA, 19 nt, Artificial Sequence
  Description of Artificial Sequence: Synthetic oligonucleotide
uuacuucagaugucucugu

SEQ ID NO: 2054552 - RNA, 19 nt, Artificial Sequence
  Description of Artificial Sequence: Synthetic oligonucleotide
acaaguuuaugcauuguua

SEQ ID NO: 2054553 - RNA, 19 nt, Artificial Sequence
  Description of Artificial Sequence: Synthetic oligonucleotide
auucuacacacugggacca

SEQ ID NO: 2054554 - RNA, 19 nt, Artificial Sequence
  Description of Artificial Sequence: Synthetic oligonucleotide
accugucccaaauuguaaa

SEQ ID NO: 2054555 - RNA, 19 nt, Artificial Sequence
  Description of Artificial Sequence: Synthetic oligonucleotide
uggaaggcuucacaaguuu

SEQ ID NO: 2054556 - RNA, 19 nt, Artificial Sequence
  Description of Artificial Sequence: Synthetic oligonucleotide
agaaacugcagcaguagau

SEQ ID NO: 2054557 - RNA, 19 nt, Artificial Sequence
  Description of Artificial Sequence: Synthetic oligonucleotide
  modified_base (19)..(19): a, c, u, g, unknown or other
gcuuaauaacuugaaaacn

SEQ ID NO: 2054558 - RNA, 19 nt, Artificial Sequence
  Description of Artificial Sequence: Synthetic oligonucleotide
ugccaucuuuuaaucgugu

SEQ ID NO: 2054559 - RNA, 19 nt, Artificial Sequence
  Description of Artificial Sequence: Synthetic oligonucleotide
caguggaaggcuucacaag

SEQ ID NO: 2054560 - RNA, 19 nt, Artificial Sequence
  Description of Artificial Sequence: Synthetic oligonucleotide
aaacaacugccaucuuuua

SEQ ID NO: 2054561 - RNA, 19 nt, Artificial Sequence
  Description of Artificial Sequence: Synthetic oligonucleotide
aguagcuuaauaacuugaa

SEQ ID NO: 2054562 - RNA, 19 nt, Artificial Sequence
  Description of Artificial Sequence: Synthetic oligonucleotide
agucuaugacaacuuuuau

SEQ ID NO: 2054563 - RNA, 19 nt, Artificial Sequence
  Description of Artificial Sequence: Synthetic oligonucleotide
ggcuucacaaguuuaugca

SEQ ID NO: 2054564 - RNA, 19 nt, Artificial Sequence
  Description of Artificial Sequence: Synthetic oligonucleotide
ccauugucggcucaauucc

SEQ ID NO: 2054565 - RNA, 19 nt, Artificial Sequence
  Description of Artificial Sequence: Synthetic oligonucleotide
cugccaucuuuuaaucgug

SEQ ID NO: 2054566 - RNA, 19 nt, Artificial Sequence
  Description of Artificial Sequence: Synthetic oligonucleotide
cuacuaguauuaauuuuaa

SEQ ID NO: 2054567 - RNA, 19 nt, Artificial Sequence
  Description of Artificial Sequence: Synthetic oligonucleotide
auauuccaucucugauuuc

SEQ ID NO: 2054568 - RNA, 19 nt, Artificial Sequence
  Description of Artificial Sequence: Synthetic oligonucleotide
cacugggaccaauuucuag

SEQ ID NO: 2054569 - RNA, 19 nt, Artificial Sequence
  Description of Artificial Sequence: Synthetic oligonucleotide
ccaccagcuacuuugauca

SEQ ID NO: 2054570 - RNA, 19 nt, Artificial Sequence
  Description of Artificial Sequence: Synthetic oligonucleotide
cuaauucuacacacuggga

SEQ ID NO: 2054571 - RNA, 19 nt, Artificial Sequence
  Description of Artificial Sequence: Synthetic oligonucleotide
uucuuacuucagaugucuc

SEQ ID NO: 2054572 - RNA, 19 nt, Artificial Sequence
  Description of Artificial Sequence: Synthetic oligonucleotide
ggaacguaaagcauuuuga

SEQ ID NO: 2054573 - RNA, 19 nt, Artificial Sequence
  Description of Artificial Sequence: Synthetic oligonucleotide
auggaaugcaauauaccau

SEQ ID NO: 2054574 - RNA, 19 nt, Artificial Sequence
  Description of Artificial Sequence: Synthetic oligonucleotide
cuaugacaacuuuuauuca

SEQ ID NO: 2054575 - RNA, 19 nt, Artificial Sequence
  Description of Artificial Sequence: Synthetic oligonucleotide
gucuugcuaauucuacaca

SEQ ID NO: 2054576 - RNA, 19 nt, Artificial Sequence
  Description of Artificial Sequence: Synthetic oligonucleotide
guaguaucuuacuggaggu

SEQ ID NO: 2054577 - RNA, 19 nt, Artificial Sequence
  Description of Artificial Sequence: Synthetic oligonucleotide
uccacugauaaguccuuuu

SEQ ID NO: 2054578 - RNA, 19 nt, Artificial Sequence
  Description of Artificial Sequence: Synthetic oligonucleotide
uucaaacuuuagucuugcu

SEQ ID NO: 2054579 - RNA, 19 nt, Artificial Sequence
  Description of Artificial Sequence: Synthetic oligonucleotide
guaaagcauuuugacuccc

SEQ ID NO: 2054580 - RNA, 19 nt, Artificial Sequence
  Description of Artificial Sequence: Synthetic oligonucleotide
augcaauauaccauagcau

SEQ ID NO: 2054581 - RNA, 19 nt, Artificial Sequence
  Description of Artificial Sequence: Synthetic oligonucleotide
uaucuuacuggagguccug

SEQ ID NO: 2054582 - RNA, 19 nt, Artificial Sequence
  Description of Artificial Sequence: Synthetic oligonucleotide
auauaccauagcauauagu

SEQ ID NO: 2054583 - RNA, 19 nt, Artificial Sequence
  Description of Artificial Sequence: Synthetic oligonucleotide
uuugcaugacccggcauua

SEQ ID NO: 2054584 - RNA, 19 nt, Artificial Sequence
  Description of Artificial Sequence: Synthetic oligonucleotide
  modified_base (4)..(4): a, c, u, g, unknown or other
aacngccaucuaaaacucu

SEQ ID NO: 2054585 - RNA, 19 nt, Artificial Sequence
  Description of Artificial Sequence: Synthetic oligonucleotide
agaugucucuguaaacacu

SEQ ID NO: 2054586 - RNA, 19 nt, Artificial Sequence
  Description of Artificial Sequence: Synthetic oligonucleotide
cuuuaacagcauuuaugaa

SEQ ID NO: 2054587 - RNA, 19 nt, Artificial Sequence
  Description of Artificial Sequence: Synthetic oligonucleotide
ugucaucacugaaguagua

SEQ ID NO: 2054588 - RNA, 19 nt, Artificial Sequence
  Description of Artificial Sequence: Synthetic oligonucleotide
cuguagagccuuaugguua

SEQ ID NO: 2054589 - RNA, 19 nt, Artificial Sequence
  Description of Artificial Sequence: Synthetic oligonucleotide
guuuaugcauuguuaacuu

SEQ ID NO: 2054590 - RNA, 19 nt, Artificial Sequence
  Description of Artificial Sequence: Synthetic oligonucleotide
ucccuguaccaccauuguc

SEQ ID NO: 2054591 - RNA, 19 nt, Artificial Sequence
  Description of Artificial Sequence: Synthetic oligonucleotide
acgacacaguaagauccac

SEQ ID NO: 2054592 - RNA, 19 nt, Artificial Sequence
  Description of Artificial Sequence: Synthetic oligonucleotide
guuucaagaggaaaacagu

SEQ ID NO: 2054593 - RNA, 19 nt, Artificial Sequence
  Description of Artificial Sequence: Synthetic oligonucleotide
aucuaaaacucuguccauu

SEQ ID NO: 2054594 - RNA, 19 nt, Artificial Sequence
  Description of Artificial Sequence: Synthetic oligonucleotide
uucuaaggauauucccuuu

SEQ ID NO: 2054595 - RNA, 19 nt, Artificial Sequence
  Description of Artificial Sequence: Synthetic oligonucleotide
auaggaacguaaagcauuu

SEQ ID NO: 2054596 - RNA, 19 nt, Artificial Sequence
  Description of Artificial Sequence: Synthetic oligonucleotide
cuuauauacuaugacuagu

SEQ ID NO: 2054597 - RNA, 19 nt, Artificial Sequence
  Description of Artificial Sequence: Synthetic oligonucleotide
aagggauagccaccagcua

SEQ ID NO: 2054598 - RNA, 19 nt, Artificial Sequence
  Description of Artificial Sequence: Synthetic oligonucleotide
uaagauccacauacuucuu

SEQ ID NO: 2054599 - RNA, 19 nt, Artificial Sequence
  Description of Artificial Sequence: Synthetic oligonucleotide
ggcuaaauuaaggaaacua

SEQ ID NO: 2054600 - RNA, 19 nt, Artificial Sequence
  Description of Artificial Sequence: Synthetic oligonucleotide
aaguaguccuggaguaagu

SEQ ID NO: 2054601 - RNA, 19 nt, Artificial Sequence
  Description of Artificial Sequence: Synthetic oligonucleotide
ucacaaguuuaugcauugu

SEQ ID NO: 2054602 - RNA, 19 nt, Artificial Sequence
  Description of Artificial Sequence: Synthetic oligonucleotide
auaccauagcauauaguuu

SEQ ID NO: 2054603 - RNA, 19 nt, Artificial Sequence
  Description of Artificial Sequence: Synthetic oligonucleotide
acaguaagauccacauacu

SEQ ID NO: 2054604 - RNA, 19 nt, Artificial Sequence
  Description of Artificial Sequence: Synthetic oligonucleotide
ugggaccaauuucuagguc

SEQ ID NO: 2054605 - RNA, 19 nt, Artificial Sequence
  Description of Artificial Sequence: Synthetic oligonucleotide
cucaguggaaggcuucaca

SEQ ID NO: 2054606 - RNA, 19 nt, Artificial Sequence
  Description of Artificial Sequence: Synthetic oligonucleotide
caguagauuuccuugcagu

SEQ ID NO: 2054607 - RNA, 19 nt, Artificial Sequence
  Description of Artificial Sequence: Synthetic oligonucleotide
cuuguuggaagguuugaau

SEQ ID NO: 2054608 - RNA, 19 nt, Artificial Sequence
  Description of Artificial Sequence: Synthetic oligonucleotide
guaguccuggaguaagucu

SEQ ID NO: 2054609 - RNA, 19 nt, Artificial Sequence
  Description of Artificial Sequence: Synthetic oligonucleotide
gcaugacccggcauuauag

SEQ ID NO: 2054610 - RNA, 19 nt, Artificial Sequence
  Description of Artificial Sequence: Synthetic oligonucleotide
gcuaaguagcuuaauaacu

SEQ ID NO: 2054611 - RNA, 19 nt, Artificial Sequence
  Description of Artificial Sequence: Synthetic oligonucleotide
augaaaucugagaggguaa

SEQ ID NO: 2054612 - RNA, 19 nt, Artificial Sequence
  Description of Artificial Sequence: Synthetic oligonucleotide
ggcucaauuccauauuucu

SEQ ID NO: 2054613 - RNA, 19 nt, Artificial Sequence
  Description of Artificial Sequence: Synthetic oligonucleotide
ggugauugccaaaacaacu

SEQ ID NO: 2054614 - RNA, 19 nt, Artificial Sequence
  Description of Artificial Sequence: Synthetic oligonucleotide
cguaaagcauuuugacucc

SEQ ID NO: 2054615 - RNA, 19 nt, Artificial Sequence
  Description of Artificial Sequence: Synthetic oligonucleotide
gagaggguaaaaucuucau

SEQ ID NO: 2054616 - RNA, 19 nt, Artificial Sequence
  Description of Artificial Sequence: Synthetic oligonucleotide
gaaacugcagcaguagauu

SEQ ID NO: 2054617 - RNA, 19 nt, Artificial Sequence
  Description of Artificial Sequence: Synthetic oligonucleotide
cauugucggcucaauucca

SEQ ID NO: 2054618 - RNA, 19 nt, Artificial Sequence
  Description of Artificial Sequence: Synthetic oligonucleotide
ggcauuauaggaacguaaa

SEQ ID NO: 2054619 - RNA, 19 nt, Artificial Sequence
  Description of Artificial Sequence: Synthetic oligonucleotide
cccaaauuguaaaugauau

SEQ ID NO: 2054620 - RNA, 19 nt, Artificial Sequence
  Description of Artificial Sequence: Synthetic oligonucleotide
acauugcuggaaaggaaaa

SEQ ID NO: 2054621 - RNA, 19 nt, Artificial Sequence
  Description of Artificial Sequence: Synthetic oligonucleotide
gaaggcuucacaaguuuau

SEQ ID NO: 2054622 - RNA, 19 nt, Artificial Sequence
  Description of Artificial Sequence: Synthetic oligonucleotide
cacuauuauuggaauggcu

SEQ ID NO: 2054623 - RNA, 19 nt, Artificial Sequence
  Description of Artificial Sequence: Synthetic oligonucleotide
uugucggcucaauuccaua

SEQ ID NO: 2054624 - RNA, 19 nt, Artificial Sequence
  Description of Artificial Sequence: Synthetic oligonucleotide
auacuaugacuaguuuaaa

SEQ ID NO: 2054625 - RNA, 19 nt, Artificial Sequence
  Description of Artificial Sequence: Synthetic oligonucleotide
gcauuuugacucccuguac

SEQ ID NO: 2054626 - RNA, 19 nt, Artificial Sequence
  Description of Artificial Sequence: Synthetic oligonucleotide
ggaguaagucuaugacaac

SEQ ID NO: 2054627 - RNA, 19 nt, Artificial Sequence
  Description of Artificial Sequence: Synthetic oligonucleotide
auugucggcucaauuccau

SEQ ID NO: 2054628 - RNA, 19 nt, Artificial Sequence
  Description of Artificial Sequence: Synthetic oligonucleotide
agaagcuguagagccuuau

SEQ ID NO: 2054629 - RNA, 19 nt, Artificial Sequence
  Description of Artificial Sequence: Synthetic oligonucleotide
gcucaauuccauauuucuc

SEQ ID NO: 2054630 - RNA, 19 nt, Artificial Sequence
  Description of Artificial Sequence: Synthetic oligonucleotide
cuucugcuaaguagcuuaa

SEQ ID NO: 2054631 - RNA, 19 nt, Artificial Sequence
  Description of Artificial Sequence: Synthetic oligonucleotide
cacaaguuuaugcauuguu

SEQ ID NO: 2054632 - RNA, 19 nt, Artificial Sequence
  Description of Artificial Sequence: Synthetic oligonucleotide
augcaaaguuucauuuaaa

SEQ ID NO: 2054633 - RNA, 19 nt, Artificial Sequence
  Description of Artificial Sequence: Synthetic oligonucleotide
uucugcuaaguagcuuaau

SEQ ID NO: 2054634 - RNA, 19 nt, Artificial Sequence
  Description of Artificial Sequence: Synthetic oligonucleotide
  modified_base (2)..(2): a, c, u, g, unknown or other
cnccauuacauugcuggaa

SEQ ID NO: 2054635 - RNA, 19 nt, Artificial Sequence
  Description of Artificial Sequence: Synthetic oligonucleotide
cuaggucuucugcuaagua

SEQ ID NO: 2054636 - RNA, 19 nt, Artificial Sequence
  Description of Artificial Sequence: Synthetic oligonucleotide
gcaaacgacacaguaagau

SEQ ID NO: 2054637 - RNA, 19 nt, Artificial Sequence
  Description of Artificial Sequence: Synthetic oligonucleotide
accagcuacuuugaucauu

SEQ ID NO: 2054638 - RNA, 19 nt, Artificial Sequence
  Description of Artificial Sequence: Synthetic oligonucleotide
caugaggguauccacugau

SEQ ID NO: 2054639 - RNA, 19 nt, Artificial Sequence
  Description of Artificial Sequence: Synthetic oligonucleotide
caccugucccaaauuguaa

SEQ ID NO: 2054640 - RNA, 19 nt, Artificial Sequence
  Description of Artificial Sequence: Synthetic oligonucleotide
ccauagcauauaguuuugc

SEQ ID NO: 2054641 - RNA, 19 nt, Artificial Sequence
  Description of Artificial Sequence: Synthetic oligonucleotide
gguuugaauuccugaauuu

SEQ ID NO: 2054642 - RNA, 19 nt, Artificial Sequence
  Description of Artificial Sequence: Synthetic oligonucleotide
gcauauaguuuugcagcac

SEQ ID NO: 2054643 - RNA, 19 nt, Artificial Sequence
  Description of Artificial Sequence: Synthetic oligonucleotide
acccggcauuauaggaacg

SEQ ID NO: 2054644 - RNA, 19 nt, Artificial Sequence
  Description of Artificial Sequence: Synthetic oligonucleotide
gucuggggcaaacgacaca

SEQ ID NO: 2054645 - RNA, 19 nt, Artificial Sequence
  Description of Artificial Sequence: Synthetic oligonucleotide
caucucugauuucaguuuu

SEQ ID NO: 2054646 - RNA, 19 nt, Artificial Sequence
  Description of Artificial Sequence: Synthetic oligonucleotide
accaccauugucggcucaa

SEQ ID NO: 2054647 - RNA, 19 nt, Artificial Sequence
  Description of Artificial Sequence: Synthetic oligonucleotide
ccauguacaguccaccugu

SEQ ID NO: 2054648 - RNA, 19 nt, Artificial Sequence
  Description of Artificial Sequence: Synthetic oligonucleotide
augaggguauccacugaua

SEQ ID NO: 2054649 - RNA, 19 nt, Artificial Sequence
  Description of Artificial Sequence: Synthetic oligonucleotide
  modified_base (2)..(2): a, c, u, g, unknown or other
cngccaucuaaaacucugu

SEQ ID NO: 2054650 - RNA, 19 nt, Artificial Sequence
  Description of Artificial Sequence: Synthetic oligonucleotide
uaggaacguaaagcauuuu

SEQ ID NO: 2054651 - RNA, 19 nt, Artificial Sequence
  Description of Artificial Sequence: Synthetic oligonucleotide
caaccuuguuggaagguuu

SEQ ID NO: 2054652 - RNA, 19 nt, Artificial Sequence
  Description of Artificial Sequence: Synthetic oligonucleotide
caucuguuugaacaaccuu

SEQ ID NO: 2054653 - RNA, 19 nt, Artificial Sequence
  Description of Artificial Sequence: Synthetic oligonucleotide
guaucuuacuggagguccu

SEQ ID NO: 2054654 - RNA, 19 nt, Artificial Sequence
  Description of Artificial Sequence: Synthetic oligonucleotide
gcuguagagccuuaugguu

SEQ ID NO: 2054655 - RNA, 19 nt, Artificial Sequence
  Description of Artificial Sequence: Synthetic oligonucleotide
aagaagcuguagagccuua

SEQ ID NO: 2054656 - RNA, 19 nt, Artificial Sequence
  Description of Artificial Sequence: Synthetic oligonucleotide
uugcaugacccggcauuau

SEQ ID NO: 2054657 - RNA, 19 nt, Artificial Sequence
  Description of Artificial Sequence: Synthetic oligonucleotide
ggguauccacugauaaguc

SEQ ID NO: 2054658 - RNA, 19 nt, Artificial Sequence
  Description of Artificial Sequence: Synthetic oligonucleotide
ggaaggcuucacaaguuua

SEQ ID NO: 2054659 - RNA, 19 nt, Artificial Sequence
  Description of Artificial Sequence: Synthetic oligonucleotide
gauagccaccagcuacuuu

SEQ ID NO: 2054660 - RNA, 19 nt, Artificial Sequence
  Description of Artificial Sequence: Synthetic oligonucleotide
cuacacacugggaccaauu

SEQ ID NO: 2054661 - RNA, 19 nt, Artificial Sequence
  Description of Artificial Sequence: Synthetic oligonucleotide
ccaccugucccaaauugua

SEQ ID NO: 2054662 - RNA, 19 nt, Artificial Sequence
  Description of Artificial Sequence: Synthetic oligonucleotide
gucggcucaauuccauauu

SEQ ID NO: 2054663 - RNA, 19 nt, Artificial Sequence
  Description of Artificial Sequence: Synthetic oligonucleotide
cagugucaucacugaagua

SEQ ID NO: 2054664 - RNA, 19 nt, Artificial Sequence
  Description of Artificial Sequence: Synthetic oligonucleotide
gguccuggcaaaucuucau

SEQ ID NO: 2054665 - RNA, 19 nt, Artificial Sequence
  Description of Artificial Sequence: Synthetic oligonucleotide
acacugggaccaauuucua

SEQ ID NO: 2054666 - RNA, 19 nt, Artificial Sequence
  Description of Artificial Sequence: Synthetic oligonucleotide
cggcauuauaggaacguaa

SEQ ID NO: 2054667 - RNA, 19 nt, Artificial Sequence
  Description of Artificial Sequence: Synthetic oligonucleotide
ggcaaaucuucaucuccau

SEQ ID NO: 2054668 - RNA, 19 nt, Artificial Sequence
  Description of Artificial Sequence: Synthetic oligonucleotide
cggcucaauuccauauuuc

SEQ ID NO: 2054669 - RNA, 19 nt, Artificial Sequence
  Description of Artificial Sequence: Synthetic oligonucleotide
gggauagccaccagcuacu

SEQ ID NO: 2054670 - RNA, 19 nt, Artificial Sequence
  Description of Artificial Sequence: Synthetic oligonucleotide
ccaacucuacuaguauuaa

SEQ ID NO: 2054671 - RNA, 19 nt, Artificial Sequence
  Description of Artificial Sequence: Synthetic oligonucleotide
gccaucuuuuaaucguguu

SEQ ID NO: 2054672 - RNA, 19 nt, Artificial Sequence
  Description of Artificial Sequence: Synthetic oligonucleotide
ccugucccaaauuguaaau

SEQ ID NO: 2054673 - RNA, 19 nt, Artificial Sequence
  Description of Artificial Sequence: Synthetic oligonucleotide
caccauugucggcucaauu

SEQ ID NO: 2054674 - RNA, 19 nt, Artificial Sequence
  Description of Artificial Sequence: Synthetic oligonucleotide
cuggggcaaacgacacagu

SEQ ID NO: 2054675 - RNA, 19 nt, Artificial Sequence
  Description of Artificial Sequence: Synthetic oligonucleotide
caucagugucuggggcaaa

SEQ ID NO: 2054676 - RNA, 19 nt, Artificial Sequence
  Description of Artificial Sequence: Synthetic oligonucleotide
cccggcauuauaggaacgu

SEQ ID NO: 2054677 - RNA, 19 nt, Artificial Sequence
  Description of Artificial Sequence: Synthetic oligonucleotide
ccggcauuauaggaacgua

SEQ ID NO: 2054678 - RNA, 19 nt, Artificial Sequence
  Description of Artificial Sequence: Synthetic oligonucleotide
caccagcuacuuugaucau

SEQ ID NO: 2054679 - RNA, 19 nt, Artificial Sequence
  Description of Artificial Sequence: Synthetic oligonucleotide
ggauagccaccagcuacuu

SEQ ID NO: 2054680 - RNA, 19 nt, Artificial Sequence
  Description of Artificial Sequence: Synthetic oligonucleotide
ccaccauugucggcucaau

SEQ ID NO: 2054681 - RNA, 19 nt, Artificial Sequence
  Description of Artificial Sequence: Synthetic oligonucleotide
  modified_base (1)..(1): a, c, u, g, unknown or other
nccauuacauugcuggaaa

SEQ ID NO: 2054682 - RNA, 19 nt, Artificial Sequence
  Description of Artificial Sequence: Synthetic oligonucleotide
agaaaaguagacuuuacac

SEQ ID NO: 2054683 - RNA, 19 nt, Artificial Sequence
  Description of Artificial Sequence: Synthetic oligonucleotide
ucacagaacaauuucaggg

SEQ ID NO: 2054684 - RNA, 19 nt, Artificial Sequence
  Description of Artificial Sequence: Synthetic oligonucleotide
aaagaaugggaagacacgc

SEQ ID NO: 2054685 - RNA, 19 nt, Artificial Sequence
  Description of Artificial Sequence: Synthetic oligonucleotide
aaaauaauuuauuggguga

SEQ ID NO: 2054686 - RNA, 19 nt, Artificial Sequence
  Description of Artificial Sequence: Synthetic oligonucleotide
cucaguaacaaacaguggg

SEQ ID NO: 2054687 - RNA, 19 nt, Artificial Sequence
  Description of Artificial Sequence: Synthetic oligonucleotide
uuauugggugauauaaugg

SEQ ID NO: 2054688 - RNA, 19 nt, Artificial Sequence
  Description of Artificial Sequence: Synthetic oligonucleotide
auuauagaacccuuggcuc

SEQ ID NO: 2054689 - RNA, 19 nt, Artificial Sequence
  Description of Artificial Sequence: Synthetic oligonucleotide
uuuauugggugauauaaug

SEQ ID NO: 2054690 - RNA, 19 nt, Artificial Sequence
  Description of Artificial Sequence: Synthetic oligonucleotide
ugaagcuaaauucuggcca

SEQ ID NO: 2054691 - RNA, 19 nt, Artificial Sequence
  Description of Artificial Sequence: Synthetic oligonucleotide
aauuuauugggugauauaa

SEQ ID NO: 2054692 - RNA, 19 nt, Artificial Sequence
  Description of Artificial Sequence: Synthetic oligonucleotide
uaggguauccgcauuauag

SEQ ID NO: 2054693 - RNA, 19 nt, Artificial Sequence
  Description of Artificial Sequence: Synthetic oligonucleotide
uuuaagaguuccuacuucc

SEQ ID NO: 2054694 - RNA, 19 nt, Artificial Sequence
  Description of Artificial Sequence: Synthetic oligonucleotide
gauauaauggugugcagug

SEQ ID NO: 2054695 - RNA, 19 nt, Artificial Sequence
  Description of Artificial Sequence: Synthetic oligonucleotide
uguuuuaggcuccuauugg

SEQ ID NO: 2054696 - RNA, 19 nt, Artificial Sequence
  Description of Artificial Sequence: Synthetic oligonucleotide
ucuagaaguuguuuuaggc

SEQ ID NO: 2054697 - RNA, 19 nt, Artificial Sequence
  Description of Artificial Sequence: Synthetic oligonucleotide
ugucagacaaaguagguga

SEQ ID NO: 2054698 - RNA, 19 nt, Artificial Sequence
  Description of Artificial Sequence: Synthetic oligonucleotide
uauggagguagaaauuggg

SEQ ID NO: 2054699 - RNA, 19 nt, Artificial Sequence
  Description of Artificial Sequence: Synthetic oligonucleotide
acuuuacacagcucuaccc

SEQ ID NO: 2054700 - RNA, 19 nt, Artificial Sequence
  Description of Artificial Sequence: Synthetic oligonucleotide
aauggcaccacacuaugcu

SEQ ID NO: 2054701 - RNA, 19 nt, Artificial Sequence
  Description of Artificial Sequence: Synthetic oligonucleotide
gaaaaguagacuuuacaca

SEQ ID NO: 2054702 - RNA, 19 nt, Artificial Sequence
  Description of Artificial Sequence: Synthetic oligonucleotide
ugggcaaucauccaccacc

SEQ ID NO: 2054703 - RNA, 19 nt, Artificial Sequence
  Description of Artificial Sequence: Synthetic oligonucleotide
aaguagacuuuacacagcu

SEQ ID NO: 2054704 - RNA, 19 nt, Artificial Sequence
  Description of Artificial Sequence: Synthetic oligonucleotide
uuuuaggcuccuauugggg

SEQ ID NO: 2054705 - RNA, 19 nt, Artificial Sequence
  Description of Artificial Sequence: Synthetic oligonucleotide
auagugggcaaucauccac

SEQ ID NO: 2054706 - RNA, 19 nt, Artificial Sequence
  Description of Artificial Sequence: Synthetic oligonucleotide
guauccgcauuauagaacc

SEQ ID NO: 2054707 - RNA, 19 nt, Artificial Sequence
  Description of Artificial Sequence: Synthetic oligonucleotide
acauagugggcaaucaucc

SEQ ID NO: 2054708 - RNA, 19 nt, Artificial Sequence
  Description of Artificial Sequence: Synthetic oligonucleotide
uauugggugauauaauggu

SEQ ID NO: 2054709 - RNA, 19 nt, Artificial Sequence
  Description of Artificial Sequence: Synthetic oligonucleotide
cacacuaugcuguuugugg

SEQ ID NO: 2054710 - RNA, 19 nt, Artificial Sequence
  Description of Artificial Sequence: Synthetic oligonucleotide
agcucacaaacauaguggg

SEQ ID NO: 2054711 - RNA, 19 nt, Artificial Sequence
  Description of Artificial Sequence: Synthetic oligonucleotide
ucuucagccagaaaccgug

SEQ ID NO: 2054712 - RNA, 19 nt, Artificial Sequence
  Description of Artificial Sequence: Synthetic oligonucleotide
aacauagugggcaaucauc

SEQ ID NO: 2054713 - RNA, 19 nt, Artificial Sequence
  Description of Artificial Sequence: Synthetic oligonucleotide
uuauagaacccuuggcucc

SEQ ID NO: 2054714 - RNA, 19 nt, Artificial Sequence
  Description of Artificial Sequence: Synthetic oligonucleotide
uccuacuuccccaagaaaa

SEQ ID NO: 2054715 - RNA, 19 nt, Artificial Sequence
  Description of Artificial Sequence: Synthetic oligonucleotide
ucuauggagguagaaauug

SEQ ID NO: 2054716 - RNA, 19 nt, Artificial Sequence
  Description of Artificial Sequence: Synthetic oligonucleotide
acacuaugcuguuuguggc

SEQ ID NO: 2054717 - RNA, 19 nt, Artificial Sequence
  Description of Artificial Sequence: Synthetic oligonucleotide
agaaugggaagacacgcuc

SEQ ID NO: 2054718 - RNA, 19 nt, Artificial Sequence
  Description of Artificial Sequence: Synthetic oligonucleotide
uugggugauauaauggugu

SEQ ID NO: 2054719 - RNA, 19 nt, Artificial Sequence
  Description of Artificial Sequence: Synthetic oligonucleotide
cuaggugcuuccuaagugg

SEQ ID NO: 2054720 - RNA, 19 nt, Artificial Sequence
  Description of Artificial Sequence: Synthetic oligonucleotide
uauuaucagggacccaugc

SEQ ID NO: 2054721 - RNA, 19 nt, Artificial Sequence
  Description of Artificial Sequence: Synthetic oligonucleotide
aauuucagggcuucuuggu

SEQ ID NO: 2054722 - RNA, 19 nt, Artificial Sequence
  Description of Artificial Sequence: Synthetic oligonucleotide
uauaauggugugcaguguc

SEQ ID NO: 2054723 - RNA, 19 nt, Artificial Sequence
  Description of Artificial Sequence: Synthetic oligonucleotide
ucaugcaucucucgaaggc

SEQ ID NO: 2054724 - RNA, 19 nt, Artificial Sequence
  Description of Artificial Sequence: Synthetic oligonucleotide
uggagcuugcaccaaagca

SEQ ID NO: 2054725 - RNA, 19 nt, Artificial Sequence
  Description of Artificial Sequence: Synthetic oligonucleotide
aauggugugcagugucacg

SEQ ID NO: 2054726 - RNA, 19 nt, Artificial Sequence
  Description of Artificial Sequence: Synthetic oligonucleotide
agucuauggagguagaaau

SEQ ID NO: 2054727 - RNA, 19 nt, Artificial Sequence
  Description of Artificial Sequence: Synthetic oligonucleotide
aagaguuccuacuucccca

SEQ ID NO: 2054728 - RNA, 19 nt, Artificial Sequence
  Description of Artificial Sequence: Synthetic oligonucleotide
uccaaaucccuuaacugga

SEQ ID NO: 2054729 - RNA, 19 nt, Artificial Sequence
  Description of Artificial Sequence: Synthetic oligonucleotide
cugcucuucagccagaaac

SEQ ID NO: 2054730 - RNA, 19 nt, Artificial Sequence
  Description of Artificial Sequence: Synthetic oligonucleotide
ucccaacugagcuucaugc

SEQ ID NO: 2054731 - RNA, 19 nt, Artificial Sequence
  Description of Artificial Sequence: Synthetic oligonucleotide
ugaucaagggcagagcuug

SEQ ID NO: 2054732 - RNA, 19 nt, Artificial Sequence
  Description of Artificial Sequence: Synthetic oligonucleotide
uguuagucgcccaaacucu

SEQ ID NO: 2054733 - RNA, 19 nt, Artificial Sequence
  Description of Artificial Sequence: Synthetic oligonucleotide
aaauaauuuauugggugau

SEQ ID NO: 2054734 - RNA, 19 nt, Artificial Sequence
  Description of Artificial Sequence: Synthetic oligonucleotide
uuaagaguuccuacuuccc

SEQ ID NO: 2054735 - RNA, 19 nt, Artificial Sequence
  Description of Artificial Sequence: Synthetic oligonucleotide
ugcucuucagccagaaacc

SEQ ID NO: 2054736 - RNA, 19 nt, Artificial Sequence
  Description of Artificial Sequence: Synthetic oligonucleotide
ugaccuuggagcuuggccu

SEQ ID NO: 2054737 - RNA, 19 nt, Artificial Sequence
  Description of Artificial Sequence: Synthetic oligonucleotide
aaagcaacucaguaacaaa

SEQ ID NO: 2054738 - RNA, 19 nt, Artificial Sequence
  Description of Artificial Sequence: Synthetic oligonucleotide
agaagacugagcuggagga

SEQ ID NO: 2054739 - RNA, 19 nt, Artificial Sequence
  Description of Artificial Sequence: Synthetic oligonucleotide
ugauauaauggugugcagu

SEQ ID NO: 2054740 - RNA, 19 nt, Artificial Sequence
  Description of Artificial Sequence: Synthetic oligonucleotide
agaccugucagacaaagua

SEQ ID NO: 2054741 - RNA, 19 nt, Artificial Sequence
  Description of Artificial Sequence: Synthetic oligonucleotide
cuauggagguagaaauugg

SEQ ID NO: 2054742 - RNA, 19 nt, Artificial Sequence
  Description of Artificial Sequence: Synthetic oligonucleotide
cucacagaacaauuucagg

SEQ ID NO: 2054743 - RNA, 19 nt, Artificial Sequence
  Description of Artificial Sequence: Synthetic oligonucleotide
guaacaaacagugggagga

SEQ ID NO: 2054744 - RNA, 19 nt, Artificial Sequence
  Description of Artificial Sequence: Synthetic oligonucleotide
aaagcacccgaaagaaugg

SEQ ID NO: 2054745 - RNA, 19 nt, Artificial Sequence
  Description of Artificial Sequence: Synthetic oligonucleotide
aaguaggugagagaagacu

SEQ ID NO: 2054746 - RNA, 19 nt, Artificial Sequence
  Description of Artificial Sequence: Synthetic oligonucleotide
gagcuaggcagacagggag

SEQ ID NO: 2054747 - RNA, 19 nt, Artificial Sequence
  Description of Artificial Sequence: Synthetic oligonucleotide
uucuuauuaucagggaccc

SEQ ID NO: 2054748 - RNA, 19 nt, Artificial Sequence
  Description of Artificial Sequence: Synthetic oligonucleotide
aggaggagcagaaagcaac

SEQ ID NO: 2054749 - RNA, 19 nt, Artificial Sequence
  Description of Artificial Sequence: Synthetic oligonucleotide
ucuuccaauggcaccacac

SEQ ID NO: 2054750 - RNA, 19 nt, Artificial Sequence
  Description of Artificial Sequence: Synthetic oligonucleotide
agcuuuaagaguuccuacu

SEQ ID NO: 2054751 - RNA, 19 nt, Artificial Sequence
  Description of Artificial Sequence: Synthetic oligonucleotide
aagucuagaaguuguuuua

SEQ ID NO: 2054752 - RNA, 19 nt, Artificial Sequence
  Description of Artificial Sequence: Synthetic oligonucleotide
uucaugcaucucucgaagg

SEQ ID NO: 2054753 - RNA, 19 nt, Artificial Sequence
  Description of Artificial Sequence: Synthetic oligonucleotide
gaaggcgccgcucuagucc

SEQ ID NO: 2054754 - RNA, 19 nt, Artificial Sequence
  Description of Artificial Sequence: Synthetic oligonucleotide
aaaguaggugagagaagac

SEQ ID NO: 2054755 - RNA, 19 nt, Artificial Sequence
  Description of Artificial Sequence: Synthetic oligonucleotide
aaacauagugggcaaucau

SEQ ID NO: 2054756 - RNA, 19 nt, Artificial Sequence
  Description of Artificial Sequence: Synthetic oligonucleotide
cugaagcuaaauucuggcc

SEQ ID NO: 2054757 - RNA, 19 nt, Artificial Sequence
  Description of Artificial Sequence: Synthetic oligonucleotide
accauuccagaucuuacug

SEQ ID NO: 2054758 - RNA, 19 nt, Artificial Sequence
  Description of Artificial Sequence: Synthetic oligonucleotide
agaaguuguuuuaggcucc

SEQ ID NO: 2054759 - RNA, 19 nt, Artificial Sequence
  Description of Artificial Sequence: Synthetic oligonucleotide
uagugggcaaucauccacc

SEQ ID NO: 2054760 - RNA, 19 nt, Artificial Sequence
  Description of Artificial Sequence: Synthetic oligonucleotide
guguuagucgcccaaacuc

SEQ ID NO: 2054761 - RNA, 19 nt, Artificial Sequence
  Description of Artificial Sequence: Synthetic oligonucleotide
acagaacaauuucagggcu

SEQ ID NO: 2054762 - RNA, 19 nt, Artificial Sequence
  Description of Artificial Sequence: Synthetic oligonucleotide
agcucuacccuuuugccca

SEQ ID NO: 2054763 - RNA, 19 nt, Artificial Sequence
  Description of Artificial Sequence: Synthetic oligonucleotide
acguugaccauuccagauc

SEQ ID NO: 2054764 - RNA, 19 nt, Artificial Sequence
  Description of Artificial Sequence: Synthetic oligonucleotide
uauagaacccuuggcuccg

SEQ ID NO: 2054765 - RNA, 19 nt, Artificial Sequence
  Description of Artificial Sequence: Synthetic oligonucleotide
auaauuuauugggugauau

SEQ ID NO: 2054766 - RNA, 19 nt, Artificial Sequence
  Description of Artificial Sequence: Synthetic oligonucleotide
ugcuccucaaggugguucg

SEQ ID NO: 2054767 - RNA, 19 nt, Artificial Sequence
  Description of Artificial Sequence: Synthetic oligonucleotide
agacuuuacacagcucuac

SEQ ID NO: 2054768 - RNA, 19 nt, Artificial Sequence
  Description of Artificial Sequence: Synthetic oligonucleotide
aacugagcuucaugcaucu

SEQ ID NO: 2054769 - RNA, 19 nt, Artificial Sequence
  Description of Artificial Sequence: Synthetic oligonucleotide
gucgcccaaacucugaggc

SEQ ID NO: 2054770 - RNA, 19 nt, Artificial Sequence
  Description of Artificial Sequence: Synthetic oligonucleotide
cuucaugcaucucucgaag

SEQ ID NO: 2054771 - RNA, 19 nt, Artificial Sequence
  Description of Artificial Sequence: Synthetic oligonucleotide
uuauuaucagggacccaug

SEQ ID NO: 2054772 - RNA, 19 nt, Artificial Sequence
  Description of Artificial Sequence: Synthetic oligonucleotide
gaagacacgcucgccaagg

SEQ ID NO: 2054773 - RNA, 19 nt, Artificial Sequence
  Description of Artificial Sequence: Synthetic oligonucleotide
aaucauccaccaccacccg

SEQ ID NO: 2054774 - RNA, 19 nt, Artificial Sequence
  Description of Artificial Sequence: Synthetic oligonucleotide
gucacguugaccauuccag

SEQ ID NO: 2054775 - RNA, 19 nt, Artificial Sequence
  Description of Artificial Sequence: Synthetic oligonucleotide
gcuguucuuauuaucaggg

SEQ ID NO: 2054776 - RNA, 19 nt, Artificial Sequence
  Description of Artificial Sequence: Synthetic oligonucleotide
cagacaaaguaggugagag

SEQ ID NO: 2054777 - RNA, 19 nt, Artificial Sequence
  Description of Artificial Sequence: Synthetic oligonucleotide
aguuguuuuaggcuccuau

SEQ ID NO: 2054778 - RNA, 19 nt, Artificial Sequence
  Description of Artificial Sequence: Synthetic oligonucleotide
ccugagcucacaaacauag

SEQ ID NO: 2054779 - RNA, 19 nt, Artificial Sequence
  Description of Artificial Sequence: Synthetic oligonucleotide
aguucugacuucaucugac

SEQ ID NO: 2054780 - RNA, 19 nt, Artificial Sequence
  Description of Artificial Sequence: Synthetic oligonucleotide
gacacgcucgccaaggaag

SEQ ID NO: 2054781 - RNA, 19 nt, Artificial Sequence
  Description of Artificial Sequence: Synthetic oligonucleotide
cuuggcuccguucuugggc

SEQ ID NO: 2054782 - RNA, 19 nt, Artificial Sequence
  Description of Artificial Sequence: Synthetic oligonucleotide
ccagaaaccguguuagucg

SEQ ID NO: 2054783 - RNA, 19 nt, Artificial Sequence
  Description of Artificial Sequence: Synthetic oligonucleotide
ugaccauuccagaucuuac

SEQ ID NO: 2054784 - RNA, 19 nt, Artificial Sequence
  Description of Artificial Sequence: Synthetic oligonucleotide
cagaaaccguguuagucgc

SEQ ID NO: 2054785 - RNA, 19 nt, Artificial Sequence
  Description of Artificial Sequence: Synthetic oligonucleotide
cauuauagaacccuuggcu

SEQ ID NO: 2054786 - RNA, 19 nt, Artificial Sequence
  Description of Artificial Sequence: Synthetic oligonucleotide
ugagcuucaugcaucucuc

SEQ ID NO: 2054787 - RNA, 19 nt, Artificial Sequence
  Description of Artificial Sequence: Synthetic oligonucleotide
gaccugucagacaaaguag

SEQ ID NO: 2054788 - RNA, 19 nt, Artificial Sequence
  Description of Artificial Sequence: Synthetic oligonucleotide
cuuccuaaguggcuccacg

SEQ ID NO: 2054789 - RNA, 19 nt, Artificial Sequence
  Description of Artificial Sequence: Synthetic oligonucleotide
uccuaaguggcuccacgug

SEQ ID NO: 2054790 - RNA, 19 nt, Artificial Sequence
  Description of Artificial Sequence: Synthetic oligonucleotide
uaggugcuuccuaaguggc

SEQ ID NO: 2054791 - RNA, 19 nt, Artificial Sequence
  Description of Artificial Sequence: Synthetic oligonucleotide
gaaaccguguuagucgccc

SEQ ID NO: 2054792 - RNA, 19 nt, Artificial Sequence
  Description of Artificial Sequence: Synthetic oligonucleotide
accugucagacaaaguagg

SEQ ID NO: 2054793 - RNA, 19 nt, Artificial Sequence
  Description of Artificial Sequence: Synthetic oligonucleotide
uaucagggacccaugcaga

SEQ ID NO: 2054794 - RNA, 19 nt, Artificial Sequence
  Description of Artificial Sequence: Synthetic oligonucleotide
ugggugauauaauggugug

SEQ ID NO: 2054795 - RNA, 19 nt, Artificial Sequence
  Description of Artificial Sequence: Synthetic oligonucleotide
uucuggccagucuauggag

SEQ ID NO: 2054796 - RNA, 19 nt, Artificial Sequence
  Description of Artificial Sequence: Synthetic oligonucleotide
auucuggccagucuaugga

SEQ ID NO: 2054797 - RNA, 19 nt, Artificial Sequence
  Description of Artificial Sequence: Synthetic oligonucleotide
gaaagcaacucaguaacaa

SEQ ID NO: 2054798 - RNA, 19 nt, Artificial Sequence
  Description of Artificial Sequence: Synthetic oligonucleotide
cuugcaccaaagcauggac

SEQ ID NO: 2054799 - RNA, 19 nt, Artificial Sequence
  Description of Artificial Sequence: Synthetic oligonucleotide
caugcaucucucgaaggcg

SEQ ID NO: 2054800 - RNA, 19 nt, Artificial Sequence
  Description of Artificial Sequence: Synthetic oligonucleotide
ggugauauaauggugugca

SEQ ID NO: 2054801 - RNA, 19 nt, Artificial Sequence
  Description of Artificial Sequence: Synthetic oligonucleotide
agucuagaaguuguuuuag

SEQ ID NO: 2054802 - RNA, 19 nt, Artificial Sequence
  Description of Artificial Sequence: Synthetic oligonucleotide
aggguauccgcauuauaga

SEQ ID NO: 2054803 - RNA, 19 nt, Artificial Sequence
  Description of Artificial Sequence: Synthetic oligonucleotide
uggaaagcacccgaaagaa

SEQ ID NO: 2054804 - RNA, 19 nt, Artificial Sequence
  Description of Artificial Sequence: Synthetic oligonucleotide
uaauuuauugggugauaua

SEQ ID NO: 2054805 - RNA, 19 nt, Artificial Sequence
  Description of Artificial Sequence: Synthetic oligonucleotide
aauaauuuauugggugaua

SEQ ID NO: 2054806 - RNA, 19 nt, Artificial Sequence
  Description of Artificial Sequence: Synthetic oligonucleotide
uagucgcccaaacucugag

SEQ ID NO: 2054807 - RNA, 19 nt, Artificial Sequence
  Description of Artificial Sequence: Synthetic oligonucleotide
cuaaguggcuccacgugac

SEQ ID NO: 2054808 - RNA, 19 nt, Artificial Sequence
  Description of Artificial Sequence: Synthetic oligonucleotide
cuaaauucuggccagucua

SEQ ID NO: 2054809 - RNA, 19 nt, Artificial Sequence
  Description of Artificial Sequence: Synthetic oligonucleotide
agaacccuuggcuccguuc

SEQ ID NO: 2054810 - RNA, 19 nt, Artificial Sequence
  Description of Artificial Sequence: Synthetic oligonucleotide
aguuccuacuuccccaaga

SEQ ID NO: 2054811 - RNA, 19 nt, Artificial Sequence
  Description of Artificial Sequence: Synthetic oligonucleotide
gugaccuuggagcuuggcc

SEQ ID NO: 2054812 - RNA, 19 nt, Artificial Sequence
  Description of Artificial Sequence: Synthetic oligonucleotide
acuaugcuguuuguggcuc

SEQ ID NO: 2054813 - RNA, 19 nt, Artificial Sequence
  Description of Artificial Sequence: Synthetic oligonucleotide
uuccaauggcaccacacua

SEQ ID NO: 2054814 - RNA, 19 nt, Artificial Sequence
  Description of Artificial Sequence: Synthetic oligonucleotide
aagcacccgaaagaauggg

SEQ ID NO: 2054815 - RNA, 19 nt, Artificial Sequence
  Description of Artificial Sequence: Synthetic oligonucleotide
aucuuacugaagcuaaauu

SEQ ID NO: 2054816 - RNA, 19 nt, Artificial Sequence
  Description of Artificial Sequence: Synthetic oligonucleotide
augcaucucucgaaggcgc

SEQ ID NO: 2054817 - RNA, 19 nt, Artificial Sequence
  Description of Artificial Sequence: Synthetic oligonucleotide
ugcccgucccaacugagcu

SEQ ID NO: 2054818 - RNA, 19 nt, Artificial Sequence
  Description of Artificial Sequence: Synthetic oligonucleotide
ucuacccuuuugcccagcc

SEQ ID NO: 2054819 - RNA, 19 nt, Artificial Sequence
  Description of Artificial Sequence: Synthetic oligonucleotide
agugucacguugaccauuc

SEQ ID NO: 2054820 - RNA, 19 nt, Artificial Sequence
  Description of Artificial Sequence: Synthetic oligonucleotide
agcuucaugcaucucucga

SEQ ID NO: 2054821 - RNA, 19 nt, Artificial Sequence
  Description of Artificial Sequence: Synthetic oligonucleotide
agagagaaaauaauuuauu

SEQ ID NO: 2054822 - RNA, 19 nt, Artificial Sequence
  Description of Artificial Sequence: Synthetic oligonucleotide
uuagucgcccaaacucuga

SEQ ID NO: 2054823 - RNA, 19 nt, Artificial Sequence
  Description of Artificial Sequence: Synthetic oligonucleotide
ugagcuaggcagacaggga

SEQ ID NO: 2054824 - RNA, 19 nt, Artificial Sequence
  Description of Artificial Sequence: Synthetic oligonucleotide
uuccuaaguggcuccacgu

SEQ ID NO: 2054825 - RNA, 19 nt, Artificial Sequence
  Description of Artificial Sequence: Synthetic oligonucleotide
gaagucuagaaguuguuuu

SEQ ID NO: 2054826 - RNA, 19 nt, Artificial Sequence
  Description of Artificial Sequence: Synthetic oligonucleotide
ggagccugagcucacaaac

SEQ ID NO: 2054827 - RNA, 19 nt, Artificial Sequence
  Description of Artificial Sequence: Synthetic oligonucleotide
ucacguugaccauuccaga

SEQ ID NO: 2054828 - RNA, 19 nt, Artificial Sequence
  Description of Artificial Sequence: Synthetic oligonucleotide
aagaaugggaagacacgcu

SEQ ID NO: 2054829 - RNA, 19 nt, Artificial Sequence
  Description of Artificial Sequence: Synthetic oligonucleotide
caccacacuaugcuguuug

SEQ ID NO: 2054830 - RNA, 19 nt, Artificial Sequence
  Description of Artificial Sequence: Synthetic oligonucleotide
agcuuccaaaucccuuaac

SEQ ID NO: 2054831 - RNA, 19 nt, Artificial Sequence
  Description of Artificial Sequence: Synthetic oligonucleotide
agucgcccaaacucugagg

SEQ ID NO: 2054832 - RNA, 19 nt, Artificial Sequence
  Description of Artificial Sequence: Synthetic oligonucleotide
agcuugcuccucaaggugg

SEQ ID NO: 2054833 - RNA, 19 nt, Artificial Sequence
  Description of Artificial Sequence: Synthetic oligonucleotide
uccccaagaaaaguagacu

SEQ ID NO: 2054834 - RNA, 19 nt, Artificial Sequence
  Description of Artificial Sequence: Synthetic oligonucleotide
agcuaaauucuggccaguc

SEQ ID NO: 2054835 - RNA, 19 nt, Artificial Sequence
  Description of Artificial Sequence: Synthetic oligonucleotide
uccucaaggugguucgcug

SEQ ID NO: 2054836 - RNA, 19 nt, Artificial Sequence
  Description of Artificial Sequence: Synthetic oligonucleotide
caacugagcuucaugcauc

SEQ ID NO: 2054837 - RNA, 19 nt, Artificial Sequence
  Description of Artificial Sequence: Synthetic oligonucleotide
aaggcgccgcucuaguccu

SEQ ID NO: 2054838 - RNA, 19 nt, Artificial Sequence
  Description of Artificial Sequence: Synthetic oligonucleotide
gggagggaagaucaggcag

SEQ ID NO: 2054839 - RNA, 19 nt, Artificial Sequence
  Description of Artificial Sequence: Synthetic oligonucleotide
cagccagaaaccguguuag

SEQ ID NO: 2054840 - RNA, 19 nt, Artificial Sequence
  Description of Artificial Sequence: Synthetic oligonucleotide
cagcucuacccuuuugccc

SEQ ID NO: 2054841 - RNA, 19 nt, Artificial Sequence
  Description of Artificial Sequence: Synthetic oligonucleotide
agacaaaguaggugagaga

SEQ ID NO: 2054842 - RNA, 19 nt, Artificial Sequence
  Description of Artificial Sequence: Synthetic oligonucleotide
uauccgcauuauagaaccc

SEQ ID NO: 2054843 - RNA, 19 nt, Artificial Sequence
  Description of Artificial Sequence: Synthetic oligonucleotide
caauggcaccacacuaugc

SEQ ID NO: 2054844 - RNA, 19 nt, Artificial Sequence
  Description of Artificial Sequence: Synthetic oligonucleotide
gagcuugcaccaaagcaug

SEQ ID NO: 2054845 - RNA, 19 nt, Artificial Sequence
  Description of Artificial Sequence: Synthetic oligonucleotide
cacccgaaagaaugggaag

SEQ ID NO: 2054846 - RNA, 19 nt, Artificial Sequence
  Description of Artificial Sequence: Synthetic oligonucleotide
gugauauaauggugugcag

SEQ ID NO: 2054847 - RNA, 19 nt, Artificial Sequence
  Description of Artificial Sequence: Synthetic oligonucleotide
gcauuauagaacccuuggc

SEQ ID NO: 2054848 - RNA, 19 nt, Artificial Sequence
  Description of Artificial Sequence: Synthetic oligonucleotide
gagaagguguggacguggg

SEQ ID NO: 2054849 - RNA, 19 nt, Artificial Sequence
  Description of Artificial Sequence: Synthetic oligonucleotide
aaucccuuaacuggagcuu

SEQ ID NO: 2054850 - RNA, 19 nt, Artificial Sequence
  Description of Artificial Sequence: Synthetic oligonucleotide
cuggguucaaggaggagca

SEQ ID NO: 2054851 - RNA, 19 nt, Artificial Sequence
  Description of Artificial Sequence: Synthetic oligonucleotide
auggcaccacacuaugcug

SEQ ID NO: 2054852 - RNA, 19 nt, Artificial Sequence
  Description of Artificial Sequence: Synthetic oligonucleotide
ccuacuuccccaagaaaag

SEQ ID NO: 2054853 - RNA, 19 nt, Artificial Sequence
  Description of Artificial Sequence: Synthetic oligonucleotide
uuuugcccagccugccucc

SEQ ID NO: 2054854 - RNA, 19 nt, Artificial Sequence
  Description of Artificial Sequence: Synthetic oligonucleotide
ugcaucucucgaaggcgcc

SEQ ID NO: 2054855 - RNA, 19 nt, Artificial Sequence
  Description of Artificial Sequence: Synthetic oligonucleotide
ccucacagaacaauuucag

SEQ ID NO: 2054856 - RNA, 19 nt, Artificial Sequence
  Description of Artificial Sequence: Synthetic oligonucleotide
cuuuugcccagccugccuc

SEQ ID NO: 2054857 - RNA, 19 nt, Artificial Sequence
  Description of Artificial Sequence: Synthetic oligonucleotide
acucaguaacaaacagugg

SEQ ID NO: 2054858 - RNA, 19 nt, Artificial Sequence
  Description of Artificial Sequence: Synthetic oligonucleotide
uccgcauuauagaacccuu

SEQ ID NO: 2054859 - RNA, 19 nt, Artificial Sequence
  Description of Artificial Sequence: Synthetic oligonucleotide
aagacacgcucgccaagga

SEQ ID NO: 2054860 - RNA, 19 nt, Artificial Sequence
  Description of Artificial Sequence: Synthetic oligonucleotide
auuuauugggugauauaau

SEQ ID NO: 2054861 - RNA, 19 nt, Artificial Sequence
  Description of Artificial Sequence: Synthetic oligonucleotide
gacuggaggggccccugcg

SEQ ID NO: 2054862 - RNA, 19 nt, Artificial Sequence
  Description of Artificial Sequence: Synthetic oligonucleotide
uggauucucggcacaccac

SEQ ID NO: 2054863 - RNA, 19 nt, Artificial Sequence
  Description of Artificial Sequence: Synthetic oligonucleotide
ugggaggagccugagcuca

SEQ ID NO: 2054864 - RNA, 19 nt, Artificial Sequence
  Description of Artificial Sequence: Synthetic oligonucleotide
ucccuuaacuggagcuugc

SEQ ID NO: 2054865 - RNA, 19 nt, Artificial Sequence
  Description of Artificial Sequence: Synthetic oligonucleotide
uuacacagcucuacccuuu

SEQ ID NO: 2054866 - RNA, 19 nt, Artificial Sequence
  Description of Artificial Sequence: Synthetic oligonucleotide
aaaccguguuagucgccca

SEQ ID NO: 2054867 - RNA, 19 nt, Artificial Sequence
  Description of Artificial Sequence: Synthetic oligonucleotide
auccgcauuauagaacccu

SEQ ID NO: 2054868 - RNA, 19 nt, Artificial Sequence
  Description of Artificial Sequence: Synthetic oligonucleotide
uccguucuugggcuucagc

SEQ ID NO: 2054869 - RNA, 19 nt, Artificial Sequence
  Description of Artificial Sequence: Synthetic oligonucleotide
acaaaguaggugagagaag

SEQ ID NO: 2054870 - RNA, 19 nt, Artificial Sequence
  Description of Artificial Sequence: Synthetic oligonucleotide
aaccguguuagucgcccaa

SEQ ID NO: 2054871 - RNA, 19 nt, Artificial Sequence
  Description of Artificial Sequence: Synthetic oligonucleotide
cuuauuaucagggacccau

SEQ ID NO: 2054872 - RNA, 19 nt, Artificial Sequence
  Description of Artificial Sequence: Synthetic oligonucleotide
uuccuacuuccccaagaaa

SEQ ID NO: 2054873 - RNA, 19 nt, Artificial Sequence
  Description of Artificial Sequence: Synthetic oligonucleotide
ggugguucgcugcugcucc

SEQ ID NO: 2054874 - RNA, 19 nt, Artificial Sequence
  Description of Artificial Sequence: Synthetic oligonucleotide
ugcccuuggaaagcacccg

SEQ ID NO: 2054875 - RNA, 19 nt, Artificial Sequence
  Description of Artificial Sequence: Synthetic oligonucleotide
gucagacaaaguaggugag

SEQ ID NO: 2054876 - RNA, 19 nt, Artificial Sequence
  Description of Artificial Sequence: Synthetic oligonucleotide
augggaagacacgcucgcc

SEQ ID NO: 2054877 - RNA, 19 nt, Artificial Sequence
  Description of Artificial Sequence: Synthetic oligonucleotide
auauaauggugugcagugu

SEQ ID NO: 2054878 - RNA, 19 nt, Artificial Sequence
  Description of Artificial Sequence: Synthetic oligonucleotide
agaguuccuacuuccccaa

SEQ ID NO: 2054879 - RNA, 19 nt, Artificial Sequence
  Description of Artificial Sequence: Synthetic oligonucleotide
aucccuuaacuggagcuug

SEQ ID NO: 2054880 - RNA, 19 nt, Artificial Sequence
  Description of Artificial Sequence: Synthetic oligonucleotide
ccugccuccccacaaaagc

SEQ ID NO: 2054881 - RNA, 19 nt, Artificial Sequence
  Description of Artificial Sequence: Synthetic oligonucleotide
gacccaugcagaccuguca

SEQ ID NO: 2054882 - RNA, 19 nt, Artificial Sequence
  Description of Artificial Sequence: Synthetic oligonucleotide
cuggagcuugcaccaaagc

SEQ ID NO: 2054883 - RNA, 19 nt, Artificial Sequence
  Description of Artificial Sequence: Synthetic oligonucleotide
ugccaguucugacuucauc

SEQ ID NO: 2054884 - RNA, 19 nt, Artificial Sequence
  Description of Artificial Sequence: Synthetic oligonucleotide
agaaaccguguuagucgcc

SEQ ID NO: 2054885 - RNA, 19 nt, Artificial Sequence
  Description of Artificial Sequence: Synthetic oligonucleotide
aguagacuuuacacagcuc

SEQ ID NO: 2054886 - RNA, 19 nt, Artificial Sequence
  Description of Artificial Sequence: Synthetic oligonucleotide
aaggugguucgcugcugcu

SEQ ID NO: 2054887 - RNA, 19 nt, Artificial Sequence
  Description of Artificial Sequence: Synthetic oligonucleotide
gggaagaucaggcagcugu

SEQ ID NO: 2054888 - RNA, 19 nt, Artificial Sequence
  Description of Artificial Sequence: Synthetic oligonucleotide
agugggcaaucauccacca

SEQ ID NO: 2054889 - RNA, 19 nt, Artificial Sequence
  Description of Artificial Sequence: Synthetic oligonucleotide
cgcauuauagaacccuugg

SEQ ID NO: 2054890 - RNA, 19 nt, Artificial Sequence
  Description of Artificial Sequence: Synthetic oligonucleotide
ucagggacccaugcagacc

SEQ ID NO: 2054891 - RNA, 19 nt, Artificial Sequence
  Description of Artificial Sequence: Synthetic oligonucleotide
guuagucgcccaaacucug

SEQ ID NO: 2054892 - RNA, 19 nt, Artificial Sequence
  Description of Artificial Sequence: Synthetic oligonucleotide
acccuuuugcccagccugc

SEQ ID NO: 2054893 - RNA, 19 nt, Artificial Sequence
  Description of Artificial Sequence: Synthetic oligonucleotide
agcuaggcagacagggagg

SEQ ID NO: 2054894 - RNA, 19 nt, Artificial Sequence
  Description of Artificial Sequence: Synthetic oligonucleotide
ugggcuaggguauccgcau

SEQ ID NO: 2054895 - RNA, 19 nt, Artificial Sequence
  Description of Artificial Sequence: Synthetic oligonucleotide
gaccauuccagaucuuacu

SEQ ID NO: 2054896 - RNA, 19 nt, Artificial Sequence
  Description of Artificial Sequence: Synthetic oligonucleotide
cuggauucucggcacacca

SEQ ID NO: 2054897 - RNA, 19 nt, Artificial Sequence
  Description of Artificial Sequence: Synthetic oligonucleotide
ucgcccaaacucugaggcc

SEQ ID NO: 2054898 - RNA, 19 nt, Artificial Sequence
  Description of Artificial Sequence: Synthetic oligonucleotide
cacagauggcuucuucauc

SEQ ID NO: 2054899 - RNA, 19 nt, Artificial Sequence
  Description of Artificial Sequence: Synthetic oligonucleotide
gaugcgggugcccuuggaa

SEQ ID NO: 2054900 - RNA, 19 nt, Artificial Sequence
  Description of Artificial Sequence: Synthetic oligonucleotide
ucucggcacaccacacaga

SEQ ID NO: 2054901 - RNA, 19 nt, Artificial Sequence
  Description of Artificial Sequence: Synthetic oligonucleotide
aacagugggaggagccuga

SEQ ID NO: 2054902 - RNA, 19 nt, Artificial Sequence
  Description of Artificial Sequence: Synthetic oligonucleotide
gauucucggcacaccacac

SEQ ID NO: 2054903 - RNA, 19 nt, Artificial Sequence
  Description of Artificial Sequence: Synthetic oligonucleotide
gucccaacugagcuucaug

SEQ ID NO: 2054904 - RNA, 19 nt, Artificial Sequence
  Description of Artificial Sequence: Synthetic oligonucleotide
gaagaucaggcagcuguuc

SEQ ID NO: 2054905 - RNA, 19 nt, Artificial Sequence
  Description of Artificial Sequence: Synthetic oligonucleotide
agaucaggcagcuguucuu

SEQ ID NO: 2054906 - RNA, 19 nt, Artificial Sequence
  Description of Artificial Sequence: Synthetic oligonucleotide
uucagggcuucuugguguc

SEQ ID NO: 2054907 - RNA, 19 nt, Artificial Sequence
  Description of Artificial Sequence: Synthetic oligonucleotide
ggauucucggcacaccaca

SEQ ID NO: 2054908 - RNA, 19 nt, Artificial Sequence
  Description of Artificial Sequence: Synthetic oligonucleotide
ucgaaggcgccgcucuagu

SEQ ID NO: 2054909 - RNA, 19 nt, Artificial Sequence
  Description of Artificial Sequence: Synthetic oligonucleotide
uaugcuguuuguggcuccu

SEQ ID NO: 2054910 - RNA, 19 nt, Artificial Sequence
  Description of Artificial Sequence: Synthetic oligonucleotide
uggacugagcuaggcagac

SEQ ID NO: 2054911 - RNA, 19 nt, Artificial Sequence
  Description of Artificial Sequence: Synthetic oligonucleotide
caaacauagugggcaauca

SEQ ID NO: 2054912 - RNA, 19 nt, Artificial Sequence
  Description of Artificial Sequence: Synthetic oligonucleotide
gguauccgcauuauagaac

SEQ ID NO: 2054913 - RNA, 19 nt, Artificial Sequence
  Description of Artificial Sequence: Synthetic oligonucleotide
ucuuauuaucagggaccca

SEQ ID NO: 2054914 - RNA, 19 nt, Artificial Sequence
  Description of Artificial Sequence: Synthetic oligonucleotide
aggugguucgcugcugcuc

SEQ ID NO: 2054915 - RNA, 19 nt, Artificial Sequence
  Description of Artificial Sequence: Synthetic oligonucleotide
guaggugagagaagacuga

SEQ ID NO: 2054916 - RNA, 19 nt, Artificial Sequence
  Description of Artificial Sequence: Synthetic oligonucleotide
cauagugggcaaucaucca

SEQ ID NO: 2054917 - RNA, 19 nt, Artificial Sequence
  Description of Artificial Sequence: Synthetic oligonucleotide
ugccuccccacaaaagcuu

SEQ ID NO: 2054918 - RNA, 19 nt, Artificial Sequence
  Description of Artificial Sequence: Synthetic oligonucleotide
accacacuaugcuguuugu

SEQ ID NO: 2054919 - RNA, 19 nt, Artificial Sequence
  Description of Artificial Sequence: Synthetic oligonucleotide
uccugcccgucccaacuga

SEQ ID NO: 2054920 - RNA, 19 nt, Artificial Sequence
  Description of Artificial Sequence: Synthetic oligonucleotide
agaaagcaacucaguaaca

SEQ ID NO: 2054921 - RNA, 19 nt, Artificial Sequence
  Description of Artificial Sequence: Synthetic oligonucleotide
aagcuaaauucuggccagu

SEQ ID NO: 2054922 - RNA, 19 nt, Artificial Sequence
  Description of Artificial Sequence: Synthetic oligonucleotide
gcuuccaaaucccuuaacu

SEQ ID NO: 2054923 - RNA, 19 nt, Artificial Sequence
  Description of Artificial Sequence: Synthetic oligonucleotide
ugacuggaggggccccugc

SEQ ID NO: 2054924 - RNA, 19 nt, Artificial Sequence
  Description of Artificial Sequence: Synthetic oligonucleotide
uguggacgugggcuagggu

SEQ ID NO: 2054925 - RNA, 19 nt, Artificial Sequence
  Description of Artificial Sequence: Synthetic oligonucleotide
cagacagggagggaagauc

SEQ ID NO: 2054926 - RNA, 19 nt, Artificial Sequence
  Description of Artificial Sequence: Synthetic oligonucleotide
caucucucgaaggcgccgc

SEQ ID NO: 2054927 - RNA, 19 nt, Artificial Sequence
  Description of Artificial Sequence: Synthetic oligonucleotide
ggugugcagugucacguug

SEQ ID NO: 2054928 - RNA, 19 nt, Artificial Sequence
  Description of Artificial Sequence: Synthetic oligonucleotide
gaucuuacugaagcuaaau

SEQ ID NO: 2054929 - RNA, 19 nt, Artificial Sequence
  Description of Artificial Sequence: Synthetic oligonucleotide
uacacagcucuacccuuuu

SEQ ID NO: 2054930 - RNA, 19 nt, Artificial Sequence
  Description of Artificial Sequence: Synthetic oligonucleotide
acacagcucuacccuuuug

SEQ ID NO: 2054931 - RNA, 19 nt, Artificial Sequence
  Description of Artificial Sequence: Synthetic oligonucleotide
acugagcuaggcagacagg

SEQ ID NO: 2054932 - RNA, 19 nt, Artificial Sequence
  Description of Artificial Sequence: Synthetic oligonucleotide
agacacgcucgccaaggaa

SEQ ID NO: 2054933 - RNA, 19 nt, Artificial Sequence
  Description of Artificial Sequence: Synthetic oligonucleotide
aagcauggacugagcuagg

SEQ ID NO: 2054934 - RNA, 19 nt, Artificial Sequence
  Description of Artificial Sequence: Synthetic oligonucleotide
gaaagcuuuaagaguuccu

SEQ ID NO: 2054935 - RNA, 19 nt, Artificial Sequence
  Description of Artificial Sequence: Synthetic oligonucleotide
uuuguggcuccuggauucu

SEQ ID NO: 2054936 - RNA, 19 nt, Artificial Sequence
  Description of Artificial Sequence: Synthetic oligonucleotide
ugaugcgggugcccuugga

SEQ ID NO: 2054937 - RNA, 19 nt, Artificial Sequence
  Description of Artificial Sequence: Synthetic oligonucleotide
uccuggauucucggcacac

SEQ ID NO: 2054938 - RNA, 19 nt, Artificial Sequence
  Description of Artificial Sequence: Synthetic oligonucleotide
cugcccgucccaacugagc

SEQ ID NO: 2054939 - RNA, 19 nt, Artificial Sequence
  Description of Artificial Sequence: Synthetic oligonucleotide
caugcagaccugucagaca

SEQ ID NO: 2054940 - RNA, 19 nt, Artificial Sequence
  Description of Artificial Sequence: Synthetic oligonucleotide
gaucaggcagcuguucuua

SEQ ID NO: 2054941 - RNA, 19 nt, Artificial Sequence
  Description of Artificial Sequence: Synthetic oligonucleotide
uggcuccuggauucucggc

SEQ ID NO: 2054942 - RNA, 19 nt, Artificial Sequence
  Description of Artificial Sequence: Synthetic oligonucleotide
gcggguggcaggcugauca

SEQ ID NO: 2054943 - RNA, 19 nt, Artificial Sequence
  Description of Artificial Sequence: Synthetic oligonucleotide
aggcggcuuagcugggcag

SEQ ID NO: 2054944 - RNA, 19 nt, Artificial Sequence
  Description of Artificial Sequence: Synthetic oligonucleotide
agcaagcaggcggcuuagc

SEQ ID NO: 2054945 - RNA, 19 nt, Artificial Sequence
  Description of Artificial Sequence: Synthetic oligonucleotide
ccaaaucccuuaacuggag

SEQ ID NO: 2054946 - RNA, 19 nt, Artificial Sequence
  Description of Artificial Sequence: Synthetic oligonucleotide
caaaagcuuccaaaucccu

SEQ ID NO: 2054947 - RNA, 19 nt, Artificial Sequence
  Description of Artificial Sequence: Synthetic oligonucleotide
cagucuauggagguagaaa

SEQ ID NO: 2054948 - RNA, 19 nt, Artificial Sequence
  Description of Artificial Sequence: Synthetic oligonucleotide
ggaagacacgcucgccaag

SEQ ID NO: 2054949 - RNA, 19 nt, Artificial Sequence
  Description of Artificial Sequence: Synthetic oligonucleotide
ucgccaaggaaggcagcug

SEQ ID NO: 2054950 - RNA, 19 nt, Artificial Sequence
  Description of Artificial Sequence: Synthetic oligonucleotide
cucgaaggcgccgcucuag

SEQ ID NO: 2054951 - RNA, 19 nt, Artificial Sequence
  Description of Artificial Sequence: Synthetic oligonucleotide
ggcagcuguucuuauuauc

SEQ ID NO: 2054952 - RNA, 19 nt, Artificial Sequence
  Description of Artificial Sequence: Synthetic oligonucleotide
cuuccaauggcaccacacu

SEQ ID NO: 2054953 - RNA, 19 nt, Artificial Sequence
  Description of Artificial Sequence: Synthetic oligonucleotide
acgugggcuaggguauccg

SEQ ID NO: 2054954 - RNA, 19 nt, Artificial Sequence
  Description of Artificial Sequence: Synthetic oligonucleotide
gggugauauaauggugugc

SEQ ID NO: 2054955 - RNA, 19 nt, Artificial Sequence
  Description of Artificial Sequence: Synthetic oligonucleotide
agaucuuacugaagcuaaa

SEQ ID NO: 2054956 - RNA, 19 nt, Artificial Sequence
  Description of Artificial Sequence: Synthetic oligonucleotide
uggguucaaggaggagcag

SEQ ID NO: 2054957 - RNA, 19 nt, Artificial Sequence
  Description of Artificial Sequence: Synthetic oligonucleotide
aucaggcagcuguucuuau

SEQ ID NO: 2054958 - RNA, 19 nt, Artificial Sequence
  Description of Artificial Sequence: Synthetic oligonucleotide
guucugacuucaucugacu

SEQ ID NO: 2054959 - RNA, 19 nt, Artificial Sequence
  Description of Artificial Sequence: Synthetic oligonucleotide
aacccuuggcuccguucuu

SEQ ID NO: 2054960 - RNA, 19 nt, Artificial Sequence
  Description of Artificial Sequence: Synthetic oligonucleotide
gccgcucuaguccugccug

SEQ ID NO: 2054961 - RNA, 19 nt, Artificial Sequence
  Description of Artificial Sequence: Synthetic oligonucleotide
gguucaaggaggagcagaa

SEQ ID NO: 2054962 - RNA, 19 nt, Artificial Sequence
  Description of Artificial Sequence: Synthetic oligonucleotide
ggagcuugcaccaaagcau

SEQ ID NO: 2054963 - RNA, 19 nt, Artificial Sequence
  Description of Artificial Sequence: Synthetic oligonucleotide
ccuaaguggcuccacguga

SEQ ID NO: 2054964 - RNA, 19 nt, Artificial Sequence
  Description of Artificial Sequence: Synthetic oligonucleotide
gugggcaaucauccaccac

SEQ ID NO: 2054965 - RNA, 19 nt, Artificial Sequence
  Description of Artificial Sequence: Synthetic oligonucleotide
ccaugcagaccugucagac

SEQ ID NO: 2054966 - RNA, 19 nt, Artificial Sequence
  Description of Artificial Sequence: Synthetic oligonucleotide
uggugugcagugucacguu

SEQ ID NO: 2054967 - RNA, 19 nt, Artificial Sequence
  Description of Artificial Sequence: Synthetic oligonucleotide
cucggcacaccacacagau

SEQ ID NO: 2054968 - RNA, 19 nt, Artificial Sequence
  Description of Artificial Sequence: Synthetic oligonucleotide
gcauggacugagcuaggca

SEQ ID NO: 2054969 - RNA, 19 nt, Artificial Sequence
  Description of Artificial Sequence: Synthetic oligonucleotide
ucucgaaggcgccgcucua

SEQ ID NO: 2054970 - RNA, 19 nt, Artificial Sequence
  Description of Artificial Sequence: Synthetic oligonucleotide
gcucacaaacauagugggc

SEQ ID NO: 2054971 - RNA, 19 nt, Artificial Sequence
  Description of Artificial Sequence: Synthetic oligonucleotide
uucagcaagcaggcggcuu

SEQ ID NO: 2054972 - RNA, 19 nt, Artificial Sequence
  Description of Artificial Sequence: Synthetic oligonucleotide
ccgcauuauagaacccuug

SEQ ID NO: 2054973 - RNA, 19 nt, Artificial Sequence
  Description of Artificial Sequence: Synthetic oligonucleotide
guggcuccacgugaccuug

SEQ ID NO: 2054974 - RNA, 19 nt, Artificial Sequence
  Description of Artificial Sequence: Synthetic oligonucleotide
cacuaugcuguuuguggcu

SEQ ID NO: 2054975 - RNA, 19 nt, Artificial Sequence
  Description of Artificial Sequence: Synthetic oligonucleotide
gguucgcugcugcuccugc

SEQ ID NO: 2054976 - RNA, 19 nt, Artificial Sequence
  Description of Artificial Sequence: Synthetic oligonucleotide
cacguugaccauuccagau

SEQ ID NO: 2054977 - RNA, 19 nt, Artificial Sequence
  Description of Artificial Sequence: Synthetic oligonucleotide
gugcagugucacguugacc

SEQ ID NO: 2054978 - RNA, 19 nt, Artificial Sequence
  Description of Artificial Sequence: Synthetic oligonucleotide
cuccugcccgucccaacug

SEQ ID NO: 2054979 - RNA, 19 nt, Artificial Sequence
  Description of Artificial Sequence: Synthetic oligonucleotide
ggguucaaggaggagcaga

SEQ ID NO: 2054980 - RNA, 19 nt, Artificial Sequence
  Description of Artificial Sequence: Synthetic oligonucleotide
cugccuccccacaaaagcu

SEQ ID NO: 2054981 - RNA, 19 nt, Artificial Sequence
  Description of Artificial Sequence: Synthetic oligonucleotide
agccucuaggugcuuccua

SEQ ID NO: 2054982 - RNA, 19 nt, Artificial Sequence
  Description of Artificial Sequence: Synthetic oligonucleotide
cuaggguauccgcauuaua

SEQ ID NO: 2054983 - RNA, 19 nt, Artificial Sequence
  Description of Artificial Sequence: Synthetic oligonucleotide
gcuccacgugaccuuggag

SEQ ID NO: 2054984 - RNA, 19 nt, Artificial Sequence
  Description of Artificial Sequence: Synthetic oligonucleotide
cccgaaagaaugggaagac

SEQ ID NO: 2054985 - RNA, 19 nt, Artificial Sequence
  Description of Artificial Sequence: Synthetic oligonucleotide
gugucacguugaccauucc

SEQ ID NO: 2054986 - RNA, 19 nt, Artificial Sequence
  Description of Artificial Sequence: Synthetic oligonucleotide
gggaagacacgcucgccaa

SEQ ID NO: 2054987 - RNA, 19 nt, Artificial Sequence
  Description of Artificial Sequence: Synthetic oligonucleotide
cagcaagcaggcggcuuag

SEQ ID NO: 2054988 - RNA, 19 nt, Artificial Sequence
  Description of Artificial Sequence: Synthetic oligonucleotide
cucaaggugguucgcugcu

SEQ ID NO: 2054989 - RNA, 19 nt, Artificial Sequence
  Description of Artificial Sequence: Synthetic oligonucleotide
gcacccgaaagaaugggaa

SEQ ID NO: 2054990 - RNA, 19 nt, Artificial Sequence
  Description of Artificial Sequence: Synthetic oligonucleotide
accguguuagucgcccaaa

SEQ ID NO: 2054991 - RNA, 19 nt, Artificial Sequence
  Description of Artificial Sequence: Synthetic oligonucleotide
aucugacucuucagcucug

SEQ ID NO: 2054992 - RNA, 19 nt, Artificial Sequence
  Description of Artificial Sequence: Synthetic oligonucleotide
cacgcucgccaaggaaggc

SEQ ID NO: 2054993 - RNA, 19 nt, Artificial Sequence
  Description of Artificial Sequence: Synthetic oligonucleotide
ggcggcuuagcugggcagc

SEQ ID NO: 2054994 - RNA, 19 nt, Artificial Sequence
  Description of Artificial Sequence: Synthetic oligonucleotide
gggcaaucauccaccacca

SEQ ID NO: 2054995 - RNA, 19 nt, Artificial Sequence
  Description of Artificial Sequence: Synthetic oligonucleotide
ccacacuaugcuguuugug

SEQ ID NO: 2054996 - RNA, 19 nt, Artificial Sequence
  Description of Artificial Sequence: Synthetic oligonucleotide
agggaagaucaggcagcug

SEQ ID NO: 2054997 - RNA, 19 nt, Artificial Sequence
  Description of Artificial Sequence: Synthetic oligonucleotide
ggcuaggguauccgcauua

SEQ ID NO: 2054998 - RNA, 19 nt, Artificial Sequence
  Description of Artificial Sequence: Synthetic oligonucleotide
gcccuuggaaagcacccga

SEQ ID NO: 2054999 - RNA, 19 nt, Artificial Sequence
  Description of Artificial Sequence: Synthetic oligonucleotide
ccguguuagucgcccaaac

SEQ ID NO: 2055000 - RNA, 19 nt, Artificial Sequence
  Description of Artificial Sequence: Synthetic oligonucleotide
cccaacugagcuucaugca

SEQ ID NO: 2055001 - RNA, 19 nt, Artificial Sequence
  Description of Artificial Sequence: Synthetic oligonucleotide
uggccagucuauggaggua

SEQ ID NO: 2055002 - RNA, 19 nt, Artificial Sequence
  Description of Artificial Sequence: Synthetic oligonucleotide
ccccaagaaaaguagacuu

SEQ ID NO: 2055003 - RNA, 19 nt, Artificial Sequence
  Description of Artificial Sequence: Synthetic oligonucleotide
gcuuagcugggcagcuugc

SEQ ID NO: 2055004 - RNA, 19 nt, Artificial Sequence
  Description of Artificial Sequence: Synthetic oligonucleotide
gcucuacccuuuugcccag

SEQ ID NO: 2055005 - RNA, 19 nt, Artificial Sequence
  Description of Artificial Sequence: Synthetic oligonucleotide
gucuauggagguagaaauu

SEQ ID NO: 2055006 - RNA, 19 nt, Artificial Sequence
  Description of Artificial Sequence: Synthetic oligonucleotide
cuucagccagaaaccgugu

SEQ ID NO: 2055007 - RNA, 19 nt, Artificial Sequence
  Description of Artificial Sequence: Synthetic oligonucleotide
ccaaagcauggacugagcu

SEQ ID NO: 2055008 - RNA, 19 nt, Artificial Sequence
  Description of Artificial Sequence: Synthetic oligonucleotide
ggguggcaggcugaucaag

SEQ ID NO: 2055009 - RNA, 19 nt, Artificial Sequence
  Description of Artificial Sequence: Synthetic oligonucleotide
cgugggcuaggguauccgc

SEQ ID NO: 2055010 - RNA, 19 nt, Artificial Sequence
  Description of Artificial Sequence: Synthetic oligonucleotide
ccuggauucucggcacacc

SEQ ID NO: 2055011 - RNA, 19 nt, Artificial Sequence
  Description of Artificial Sequence: Synthetic oligonucleotide
cucuacccuuuugcccagc

SEQ ID NO: 2055012 - RNA, 19 nt, Artificial Sequence
  Description of Artificial Sequence: Synthetic oligonucleotide
ccugcccgucccaacugag

SEQ ID NO: 2055013 - RNA, 19 nt, Artificial Sequence
  Description of Artificial Sequence: Synthetic oligonucleotide
cuccuggauucucggcaca

SEQ ID NO: 2055014 - RNA, 19 nt, Artificial Sequence
  Description of Artificial Sequence: Synthetic oligonucleotide
cucgccaaggaaggcagcu

SEQ ID NO: 2055015 - RNA, 19 nt, Artificial Sequence
  Description of Artificial Sequence: Synthetic oligonucleotide
ggcggaaggaaagcuuuaa

SEQ ID NO: 2055016 - RNA, 19 nt, Artificial Sequence
  Description of Artificial Sequence: Synthetic oligonucleotide
ggaagucuagaaguuguuu

SEQ ID NO: 2055017 - RNA, 19 nt, Artificial Sequence
  Description of Artificial Sequence: Synthetic oligonucleotide
cagaccugucagacaaagu

SEQ ID NO: 2055018 - RNA, 19 nt, Artificial Sequence
  Description of Artificial Sequence: Synthetic oligonucleotide
ccaacugagcuucaugcau

SEQ ID NO: 2055019 - RNA, 19 nt, Artificial Sequence
  Description of Artificial Sequence: Synthetic oligonucleotide
cuuagcugggcagcuugcu

SEQ ID NO: 2055020 - RNA, 19 nt, Artificial Sequence
  Description of Artificial Sequence: Synthetic oligonucleotide
ccgccucuccuccuuggcc

SEQ ID NO: 2055021 - RNA, 19 nt, Artificial Sequence
  Description of Artificial Sequence: Synthetic oligonucleotide
ggcuccacgugaccuugga

SEQ ID NO: 2055022 - RNA, 19 nt, Artificial Sequence
  Description of Artificial Sequence: Synthetic oligonucleotide
cguugaccauuccagaucu

SEQ ID NO: 2055023 - RNA, 19 nt, Artificial Sequence
  Description of Artificial Sequence: Synthetic oligonucleotide
ccgcucuaguccugccugc

SEQ ID NO: 2055024 - RNA, 19 nt, Artificial Sequence
  Description of Artificial Sequence: Synthetic oligonucleotide
cuaggcagacagggaggga

SEQ ID NO: 2055025 - RNA, 19 nt, Artificial Sequence
  Description of Artificial Sequence: Synthetic oligonucleotide
gcuuccuaaguggcuccac

SEQ ID NO: 2055026 - RNA, 19 nt, Artificial Sequence
  Description of Artificial Sequence: Synthetic oligonucleotide
ccgaaagaaugggaagaca

SEQ ID NO: 2055027 - RNA, 19 nt, Artificial Sequence
  Description of Artificial Sequence: Synthetic oligonucleotide
acgugaccuuggagcuugg

SEQ ID NO: 2055028 - RNA, 19 nt, Artificial Sequence
  Description of Artificial Sequence: Synthetic oligonucleotide
cuuggagcuuggccuugua

SEQ ID NO: 2055029 - RNA, 19 nt, Artificial Sequence
  Description of Artificial Sequence: Synthetic oligonucleotide
cccaagaaaaguagacuuu

SEQ ID NO: 2055030 - RNA, 19 nt, Artificial Sequence
  Description of Artificial Sequence: Synthetic oligonucleotide
gcuccugcccgucccaacu

SEQ ID NO: 2055031 - RNA, 19 nt, Artificial Sequence
  Description of Artificial Sequence: Synthetic oligonucleotide
cuccucaaggugguucgcu

SEQ ID NO: 2055032 - RNA, 19 nt, Artificial Sequence
  Description of Artificial Sequence: Synthetic oligonucleotide
cgcccaaacucugaggcca

SEQ ID NO: 2055033 - RNA, 19 nt, Artificial Sequence
  Description of Artificial Sequence: Synthetic oligonucleotide
gccccugcggguggcaggc

SEQ ID NO: 2055034 - RNA, 19 nt, Artificial Sequence
  Description of Artificial Sequence: Synthetic oligonucleotide
ggaaagcacccgaaagaau

SEQ ID NO: 2055035 - RNA, 19 nt, Artificial Sequence
  Description of Artificial Sequence: Synthetic oligonucleotide
ugcggguggcaggcugauc

SEQ ID NO: 2055036 - RNA, 19 nt, Artificial Sequence
  Description of Artificial Sequence: Synthetic oligonucleotide
agggacccaugcagaccug

SEQ ID NO: 2055037 - RNA, 19 nt, Artificial Sequence
  Description of Artificial Sequence: Synthetic oligonucleotide
gcuccucaaggugguucgc

SEQ ID NO: 2055038 - RNA, 19 nt, Artificial Sequence
  Description of Artificial Sequence: Synthetic oligonucleotide
cccuuggaaagcacccgaa

SEQ ID NO: 2055039 - RNA, 19 nt, Artificial Sequence
  Description of Artificial Sequence: Synthetic oligonucleotide
ggcuccguucuugggcuuc

SEQ ID NO: 2055040 - RNA, 19 nt, Artificial Sequence
  Description of Artificial Sequence: Synthetic oligonucleotide
cccugcggguggcaggcug

SEQ ID NO: 2055041 - RNA, 19 nt, Artificial Sequence
  Description of Artificial Sequence: Synthetic oligonucleotide
ggggcggaaggaaagcuuu

SEQ ID NO: 2055042 - RNA, 19 nt, Artificial Sequence
  Description of Artificial Sequence: Synthetic oligonucleotide
ggcagagcuugaugcgggu

SEQ ID NO: 2055043 - RNA, 19 nt, Artificial Sequence
  Description of Artificial Sequence: Synthetic oligonucleotide
gccuggguucaaggaggag

SEQ ID NO: 2055044 - RNA, 19 nt, Artificial Sequence
  Description of Artificial Sequence: Synthetic oligonucleotide
cguguuagucgcccaaacu

SEQ ID NO: 2055045 - RNA, 19 nt, Artificial Sequence
  Description of Artificial Sequence: Synthetic oligonucleotide
gcucgccaaggaaggcagc

SEQ ID NO: 2055046 - RNA, 19 nt, Artificial Sequence
  Description of Artificial Sequence: Synthetic oligonucleotide
cgaaggcgccgcucuaguc

SEQ ID NO: 2055047 - RNA, 19 nt, Artificial Sequence
  Description of Artificial Sequence: Synthetic oligonucleotide
gcccaaacucugaggccac

SEQ ID NO: 2055048 - RNA, 19 nt, Artificial Sequence
  Description of Artificial Sequence: Synthetic oligonucleotide
ccagucuauggagguagaa

SEQ ID NO: 2055049 - RNA, 19 nt, Artificial Sequence
  Description of Artificial Sequence: Synthetic oligonucleotide
cccuuaacuggagcuugca

SEQ ID NO: 2055050 - RNA, 19 nt, Artificial Sequence
  Description of Artificial Sequence: Synthetic oligonucleotide
ggacgugggcuaggguauc

SEQ ID NO: 2055051 - RNA, 19 nt, Artificial Sequence
  Description of Artificial Sequence: Synthetic oligonucleotide
gccagucuauggagguaga

SEQ ID NO: 2055052 - RNA, 19 nt, Artificial Sequence
  Description of Artificial Sequence: Synthetic oligonucleotide
gcuaggguauccgcauuau

SEQ ID NO: 2055053 - RNA, 19 nt, Artificial Sequence
  Description of Artificial Sequence: Synthetic oligonucleotide
cuucagcaagcaggcggcu

SEQ ID NO: 2055054 - RNA, 19 nt, Artificial Sequence
  Description of Artificial Sequence: Synthetic oligonucleotide
gcuccguucuugggcuuca

SEQ ID NO: 2055055 - RNA, 19 nt, Artificial Sequence
  Description of Artificial Sequence: Synthetic oligonucleotide
gcagacagggagggaagau

SEQ ID NO: 2055056 - RNA, 19 nt, Artificial Sequence
  Description of Artificial Sequence: Synthetic oligonucleotide
gggccccugcggguggcag

SEQ ID NO: 2055057 - RNA, 19 nt, Artificial Sequence
  Description of Artificial Sequence: Synthetic oligonucleotide
gggcggaaggaaagcuuua

SEQ ID NO: 2055058 - RNA, 19 nt, Artificial Sequence
  Description of Artificial Sequence: Synthetic oligonucleotide
guugaccauuccagaucuu

SEQ ID NO: 2055059 - RNA, 19 nt, Artificial Sequence
  Description of Artificial Sequence: Synthetic oligonucleotide
ccugcucuucagccagaaa

SEQ ID NO: 2055060 - RNA, 19 nt, Artificial Sequence
  Description of Artificial Sequence: Synthetic oligonucleotide
gcuugaugcgggugcccuu

SEQ ID NO: 2055061 - RNA, 19 nt, Artificial Sequence
  Description of Artificial Sequence: Synthetic oligonucleotide
cuugcuccucaaggugguu

SEQ ID NO: 2055062 - RNA, 19 nt, Artificial Sequence
  Description of Artificial Sequence: Synthetic oligonucleotide
gggcuaggguauccgcauu

SEQ ID NO: 2055063 - RNA, 19 nt, Artificial Sequence
  Description of Artificial Sequence: Synthetic oligonucleotide
gcccgucccaacugagcuu

SEQ ID NO: 2055064 - RNA, 19 nt, Artificial Sequence
  Description of Artificial Sequence: Synthetic oligonucleotide
ccgucccaacugagcuuca

SEQ ID NO: 2055065 - RNA, 19 nt, Artificial Sequence
  Description of Artificial Sequence: Synthetic oligonucleotide
cugcggguggcaggcugau

SEQ ID NO: 2055066 - RNA, 19 nt, Artificial Sequence
  Description of Artificial Sequence: Synthetic oligonucleotide
cgcucuaguccugccugcu

SEQ ID NO: 2055067 - RNA, 19 nt, Artificial Sequence
  Description of Artificial Sequence: Synthetic oligonucleotide
ccacgugaccuuggagcuu

SEQ ID NO: 2055068 - RNA, 19 nt, Artificial Sequence
  Description of Artificial Sequence: Synthetic oligonucleotide
cgucccaacugagcuucau

SEQ ID NO: 2055069 - RNA, 19 nt, Artificial Sequence
  Description of Artificial Sequence: Synthetic oligonucleotide
ccccugcggguggcaggcu

SEQ ID NO: 2055070 - RNA, 19 nt, Artificial Sequence
  Description of Artificial Sequence: Synthetic oligonucleotide
aaggauaucagacacccgc

SEQ ID NO: 2055071 - RNA, 19 nt, Artificial Sequence
  Description of Artificial Sequence: Synthetic oligonucleotide
auaacuugagcucaaaucg

SEQ ID NO: 2055072 - RNA, 19 nt, Artificial Sequence
  Description of Artificial Sequence: Synthetic oligonucleotide
uuuauuuaaauccuuccag

SEQ ID NO: 2055073 - RNA, 19 nt, Artificial Sequence
  Description of Artificial Sequence: Synthetic oligonucleotide
aaucauguauaacuugagc

SEQ ID NO: 2055074 - RNA, 19 nt, Artificial Sequence
  Description of Artificial Sequence: Synthetic oligonucleotide
aacgaaggauaucagacac

SEQ ID NO: 2055075 - RNA, 19 nt, Artificial Sequence
  Description of Artificial Sequence: Synthetic oligonucleotide
ucauggacaaccaagaggu

SEQ ID NO: 2055076 - RNA, 19 nt, Artificial Sequence
  Description of Artificial Sequence: Synthetic oligonucleotide
aaaggugaugacccgaugg

SEQ ID NO: 2055077 - RNA, 19 nt, Artificial Sequence
  Description of Artificial Sequence: Synthetic oligonucleotide
aauggaucgcugugcaucc

SEQ ID NO: 2055078 - RNA, 19 nt, Artificial Sequence
  Description of Artificial Sequence: Synthetic oligonucleotide
aucgauauucaucaucuac

SEQ ID NO: 2055079 - RNA, 19 nt, Artificial Sequence
  Description of Artificial Sequence: Synthetic oligonucleotide
cuuaggauuaguaaaucug

SEQ ID NO: 2055080 - RNA, 19 nt, Artificial Sequence
  Description of Artificial Sequence: Synthetic oligonucleotide
aaagccgugagugaugagg

SEQ ID NO: 2055081 - RNA, 19 nt, Artificial Sequence
  Description of Artificial Sequence: Synthetic oligonucleotide
ucgauauucaucaucuaca

SEQ ID NO: 2055082 - RNA, 19 nt, Artificial Sequence
  Description of Artificial Sequence: Synthetic oligonucleotide
aauguagucguccugguuu

SEQ ID NO: 2055083 - RNA, 19 nt, Artificial Sequence
  Description of Artificial Sequence: Synthetic oligonucleotide
gaugaggugaggcuuagcc

SEQ ID NO: 2055084 - RNA, 19 nt, Artificial Sequence
  Description of Artificial Sequence: Synthetic oligonucleotide
auaucagacacccgcuugc

SEQ ID NO: 2055085 - RNA, 19 nt, Artificial Sequence
  Description of Artificial Sequence: Synthetic oligonucleotide
ugagguaaagccgugagug

SEQ ID NO: 2055086 - RNA, 19 nt, Artificial Sequence
  Description of Artificial Sequence: Synthetic oligonucleotide
aaccacauugcacagugug

SEQ ID NO: 2055087 - RNA, 19 nt, Artificial Sequence
  Description of Artificial Sequence: Synthetic oligonucleotide
uuagccucugacauggugc

SEQ ID NO: 2055088 - RNA, 19 nt, Artificial Sequence
  Description of Artificial Sequence: Synthetic oligonucleotide
cacagugugaaguaggcag

SEQ ID NO: 2055089 - RNA, 19 nt, Artificial Sequence
  Description of Artificial Sequence: Synthetic oligonucleotide
aaggcuagcgccucccggc

SEQ ID NO: 2055090 - RNA, 19 nt, Artificial Sequence
  Description of Artificial Sequence: Synthetic oligonucleotide
cuugagcucaaaucgaggc

SEQ ID NO: 2055091 - RNA, 19 nt, Artificial Sequence
  Description of Artificial Sequence: Synthetic oligonucleotide
gaaguaggcaguaggaccg

SEQ ID NO: 2055092 - RNA, 19 nt, Artificial Sequence
  Description of Artificial Sequence: Synthetic oligonucleotide
uccacuuaggauuaguaaa

SEQ ID NO: 2055093 - RNA, 19 nt, Artificial Sequence
  Description of Artificial Sequence: Synthetic oligonucleotide
ucaucuacauggcugguca

SEQ ID NO: 2055094 - RNA, 19 nt, Artificial Sequence
  Description of Artificial Sequence: Synthetic oligonucleotide
aguucuugccccaagaguc

SEQ ID NO: 2055095 - RNA, 19 nt, Artificial Sequence
  Description of Artificial Sequence: Synthetic oligonucleotide
cucauggacaaccaagagg

SEQ ID NO: 2055096 - RNA, 19 nt, Artificial Sequence
  Description of Artificial Sequence: Synthetic oligonucleotide
aggcgaaucauguauaacu

SEQ ID NO: 2055097 - RNA, 19 nt, Artificial Sequence
  Description of Artificial Sequence: Synthetic oligonucleotide
cucagugggaaucaacugg

SEQ ID NO: 2055098 - RNA, 19 nt, Artificial Sequence
  Description of Artificial Sequence: Synthetic oligonucleotide
uaaacauggugccggaaug

SEQ ID NO: 2055099 - RNA, 19 nt, Artificial Sequence
  Description of Artificial Sequence: Synthetic oligonucleotide
agugcuccaaccucaugcc

SEQ ID NO: 2055100 - RNA, 19 nt, Artificial Sequence
  Description of Artificial Sequence: Synthetic oligonucleotide
ugaucaugaucuuaggauc

SEQ ID NO: 2055101 - RNA, 19 nt, Artificial Sequence
  Description of Artificial Sequence: Synthetic oligonucleotide
aggauccucaaccccagcc

SEQ ID NO: 2055102 - RNA, 19 nt, Artificial Sequence
  Description of Artificial Sequence: Synthetic oligonucleotide
uucaagagcacgcuugacu

SEQ ID NO: 2055103 - RNA, 19 nt, Artificial Sequence
  Description of Artificial Sequence: Synthetic oligonucleotide
ugugugaucuuuaggcgcc

SEQ ID NO: 2055104 - RNA, 19 nt, Artificial Sequence
  Description of Artificial Sequence: Synthetic oligonucleotide
gaaucaacugguuuucuuc

SEQ ID NO: 2055105 - RNA, 19 nt, Artificial Sequence
  Description of Artificial Sequence: Synthetic oligonucleotide
aaauagguaacgaaggaua

SEQ ID NO: 2055106 - RNA, 19 nt, Artificial Sequence
  Description of Artificial Sequence: Synthetic oligonucleotide
guaacgaaggauaucagac

SEQ ID NO: 2055107 - RNA, 19 nt, Artificial Sequence
  Description of Artificial Sequence: Synthetic oligonucleotide
aggaaauagguaacgaagg

SEQ ID NO: 2055108 - RNA, 19 nt, Artificial Sequence
  Description of Artificial Sequence: Synthetic oligonucleotide
uggacaaccaagaggucag

SEQ ID NO: 2055109 - RNA, 19 nt, Artificial Sequence
  Description of Artificial Sequence: Synthetic oligonucleotide
ucaagagcacgcuugacuc

SEQ ID NO: 2055110 - RNA, 19 nt, Artificial Sequence
  Description of Artificial Sequence: Synthetic oligonucleotide
agcccaucgauauucauca

SEQ ID NO: 2055111 - RNA, 19 nt, Artificial Sequence
  Description of Artificial Sequence: Synthetic oligonucleotide
acuuaggauuaguaaaucu

SEQ ID NO: 2055112 - RNA, 19 nt, Artificial Sequence
  Description of Artificial Sequence: Synthetic oligonucleotide
cuucagacgagaacugggg

SEQ ID NO: 2055113 - RNA, 19 nt, Artificial Sequence
  Description of Artificial Sequence: Synthetic oligonucleotide
ugagcucaaaucgaggccc

SEQ ID NO: 2055114 - RNA, 19 nt, Artificial Sequence
  Description of Artificial Sequence: Synthetic oligonucleotide
ucacucggcgcucaggaag

SEQ ID NO: 2055115 - RNA, 19 nt, Artificial Sequence
  Description of Artificial Sequence: Synthetic oligonucleotide
ucaucgaacuccagggacc

SEQ ID NO: 2055116 - RNA, 19 nt, Artificial Sequence
  Description of Artificial Sequence: Synthetic oligonucleotide
agugaucaugaucuuagga

SEQ ID NO: 2055117 - RNA, 19 nt, Artificial Sequence
  Description of Artificial Sequence: Synthetic oligonucleotide
ucuuaggauccucaacccc

SEQ ID NO: 2055118 - RNA, 19 nt, Artificial Sequence
  Description of Artificial Sequence: Synthetic oligonucleotide
ucagugggaaucaacuggu

SEQ ID NO: 2055119 - RNA, 19 nt, Artificial Sequence
  Description of Artificial Sequence: Synthetic oligonucleotide
gugugaaguaggcaguagg

SEQ ID NO: 2055120 - RNA, 19 nt, Artificial Sequence
  Description of Artificial Sequence: Synthetic oligonucleotide
uaacgaaggauaucagaca

SEQ ID NO: 2055121 - RNA, 19 nt, Artificial Sequence
  Description of Artificial Sequence: Synthetic oligonucleotide
aaaucugucugugaccagu

SEQ ID NO: 2055122 - RNA, 19 nt, Artificial Sequence
  Description of Artificial Sequence: Synthetic oligonucleotide
ucggcgcucaggaagaccc

SEQ ID NO: 2055123 - RNA, 19 nt, Artificial Sequence
  Description of Artificial Sequence: Synthetic oligonucleotide
accccuguaaggcuagcgc

SEQ ID NO: 2055124 - RNA, 19 nt, Artificial Sequence
  Description of Artificial Sequence: Synthetic oligonucleotide
gaucuuuaggcgccgccgg

SEQ ID NO: 2055125 - RNA, 19 nt, Artificial Sequence
  Description of Artificial Sequence: Synthetic oligonucleotide
ugacaaugagccccacagg

SEQ ID NO: 2055126 - RNA, 19 nt, Artificial Sequence
  Description of Artificial Sequence: Synthetic oligonucleotide
ugguauaggggugccagcg

SEQ ID NO: 2055127 - RNA, 19 nt, Artificial Sequence
  Description of Artificial Sequence: Synthetic oligonucleotide
ucuuguaaacauggugccg

SEQ ID NO: 2055128 - RNA, 19 nt, Artificial Sequence
  Description of Artificial Sequence: Synthetic oligonucleotide
ugaucuuaggauccucaac

SEQ ID NO: 2055129 - RNA, 19 nt, Artificial Sequence
  Description of Artificial Sequence: Synthetic oligonucleotide
ucucgagagguagugauca

SEQ ID NO: 2055130 - RNA, 19 nt, Artificial Sequence
  Description of Artificial Sequence: Synthetic oligonucleotide
aacuugagcucaaaucgag

SEQ ID NO: 2055131 - RNA, 19 nt, Artificial Sequence
  Description of Artificial Sequence: Synthetic oligonucleotide
caaccgugagguaaagccg

SEQ ID NO: 2055132 - RNA, 19 nt, Artificial Sequence
  Description of Artificial Sequence: Synthetic oligonucleotide
ugccgcauaaccacauugc

SEQ ID NO: 2055133 - RNA, 19 nt, Artificial Sequence
  Description of Artificial Sequence: Synthetic oligonucleotide
ccaaccgugagguaaagcc

SEQ ID NO: 2055134 - RNA, 19 nt, Artificial Sequence
  Description of Artificial Sequence: Synthetic oligonucleotide
auugcgguggucugucuuc

SEQ ID NO: 2055135 - RNA, 19 nt, Artificial Sequence
  Description of Artificial Sequence: Synthetic oligonucleotide
aaggcgaaucauguauaac

SEQ ID NO: 2055136 - RNA, 19 nt, Artificial Sequence
  Description of Artificial Sequence: Synthetic oligonucleotide
uaaggcuagcgccucccgg

SEQ ID NO: 2055137 - RNA, 19 nt, Artificial Sequence
  Description of Artificial Sequence: Synthetic oligonucleotide
agcacgcuugacucgcucc

SEQ ID NO: 2055138 - RNA, 19 nt, Artificial Sequence
  Description of Artificial Sequence: Synthetic oligonucleotide
ugagugaugaggugaggcu

SEQ ID NO: 2055139 - RNA, 19 nt, Artificial Sequence
  Description of Artificial Sequence: Synthetic oligonucleotide
guaaaucugucugugacca

SEQ ID NO: 2055140 - RNA, 19 nt, Artificial Sequence
  Description of Artificial Sequence: Synthetic oligonucleotide
acaggaaauagguaacgaa

SEQ ID NO: 2055141 - RNA, 19 nt, Artificial Sequence
  Description of Artificial Sequence: Synthetic oligonucleotide
aaccaagaggucagugacc

SEQ ID NO: 2055142 - RNA, 19 nt, Artificial Sequence
  Description of Artificial Sequence: Synthetic oligonucleotide
ugaggcuuagccucugaca

SEQ ID NO: 2055143 - RNA, 19 nt, Artificial Sequence
  Description of Artificial Sequence: Synthetic oligonucleotide
uuccacuuaggauuaguaa

SEQ ID NO: 2055144 - RNA, 19 nt, Artificial Sequence
  Description of Artificial Sequence: Synthetic oligonucleotide
gaauggaucgcugugcauc

SEQ ID NO: 2055145 - RNA, 19 nt, Artificial Sequence
  Description of Artificial Sequence: Synthetic oligonucleotide
uuuccacuuaggauuagua

SEQ ID NO: 2055146 - RNA, 19 nt, Artificial Sequence
  Description of Artificial Sequence: Synthetic oligonucleotide
gcgugugugaucuuuaggc

SEQ ID NO: 2055147 - RNA, 19 nt, Artificial Sequence
  Description of Artificial Sequence: Synthetic oligonucleotide
ugcuccaaccucaugccga

SEQ ID NO: 2055148 - RNA, 19 nt, Artificial Sequence
  Description of Artificial Sequence: Synthetic oligonucleotide
uagugaucaugaucuuagg

SEQ ID NO: 2055149 - RNA, 19 nt, Artificial Sequence
  Description of Artificial Sequence: Synthetic oligonucleotide
aaccccagcccaucgauau

SEQ ID NO: 2055150 - RNA, 19 nt, Artificial Sequence
  Description of Artificial Sequence: Synthetic oligonucleotide
gacaaugagccccacaggu

SEQ ID NO: 2055151 - RNA, 19 nt, Artificial Sequence
  Description of Artificial Sequence: Synthetic oligonucleotide
ucgcugugcauccucccgg

SEQ ID NO: 2055152 - RNA, 19 nt, Artificial Sequence
  Description of Artificial Sequence: Synthetic oligonucleotide
ucccgacggagcaugauga

SEQ ID NO: 2055153 - RNA, 19 nt, Artificial Sequence
  Description of Artificial Sequence: Synthetic oligonucleotide
cuuuuggcacaggaaauag

SEQ ID NO: 2055154 - RNA, 19 nt, Artificial Sequence
  Description of Artificial Sequence: Synthetic oligonucleotide
uucagacgagaacuggggu

SEQ ID NO: 2055155 - RNA, 19 nt, Artificial Sequence
  Description of Artificial Sequence: Synthetic oligonucleotide
ucagugaccccauuggcuu

SEQ ID NO: 2055156 - RNA, 19 nt, Artificial Sequence
  Description of Artificial Sequence: Synthetic oligonucleotide
aucuuuaggcgccgccggc

SEQ ID NO: 2055157 - RNA, 19 nt, Artificial Sequence
  Description of Artificial Sequence: Synthetic oligonucleotide
augccgcauaaccacauug

SEQ ID NO: 2055158 - RNA, 19 nt, Artificial Sequence
  Description of Artificial Sequence: Synthetic oligonucleotide
aucgcugugcauccucccg

SEQ ID NO: 2055159 - RNA, 19 nt, Artificial Sequence
  Description of Artificial Sequence: Synthetic oligonucleotide
agcgccauucuacgucugc

SEQ ID NO: 2055160 - RNA, 19 nt, Artificial Sequence
  Description of Artificial Sequence: Synthetic oligonucleotide
guauaggggugccagcgcc

SEQ ID NO: 2055161 - RNA, 19 nt, Artificial Sequence
  Description of Artificial Sequence: Synthetic oligonucleotide
agcaugaugagcgccgcuc

SEQ ID NO: 2055162 - RNA, 19 nt, Artificial Sequence
  Description of Artificial Sequence: Synthetic oligonucleotide
aaacauggugccggaauga

SEQ ID NO: 2055163 - RNA, 19 nt, Artificial Sequence
  Description of Artificial Sequence: Synthetic oligonucleotide
gugaucaugaucuuaggau

SEQ ID NO: 2055164 - RNA, 19 nt, Artificial Sequence
  Description of Artificial Sequence: Synthetic oligonucleotide
aggcaguaggaccgaaggg

SEQ ID NO: 2055165 - RNA, 19 nt, Artificial Sequence
  Description of Artificial Sequence: Synthetic oligonucleotide
uucuacgucugcuguggcc

SEQ ID NO: 2055166 - RNA, 19 nt, Artificial Sequence
  Description of Artificial Sequence: Synthetic oligonucleotide
ugccggaaugaaauguagu

SEQ ID NO: 2055167 - RNA, 19 nt, Artificial Sequence
  Description of Artificial Sequence: Synthetic oligonucleotide
uccgcccucaaccaagaaa

SEQ ID NO: 2055168 - RNA, 19 nt, Artificial Sequence
  Description of Artificial Sequence: Synthetic oligonucleotide
aaccgugagguaaagccgu

SEQ ID NO: 2055169 - RNA, 19 nt, Artificial Sequence
  Description of Artificial Sequence: Synthetic oligonucleotide
auguagucguccugguuug

SEQ ID NO: 2055170 - RNA, 19 nt, Artificial Sequence
  Description of Artificial Sequence: Synthetic oligonucleotide
uggcuuugcacgcucgcac

SEQ ID NO: 2055171 - RNA, 19 nt, Artificial Sequence
  Description of Artificial Sequence: Synthetic oligonucleotide
aacuucagucagcuccaca

SEQ ID NO: 2055172 - RNA, 19 nt, Artificial Sequence
  Description of Artificial Sequence: Synthetic oligonucleotide
aucaucuacauggcugguc

SEQ ID NO: 2055173 - RNA, 19 nt, Artificial Sequence
  Description of Artificial Sequence: Synthetic oligonucleotide
ucgagagguagugaucaug

SEQ ID NO: 2055174 - RNA, 19 nt, Artificial Sequence
  Description of Artificial Sequence: Synthetic oligonucleotide
agcucagugggaaucaacu

SEQ ID NO: 2055175 - RNA, 19 nt, Artificial Sequence
  Description of Artificial Sequence: Synthetic oligonucleotide
uauaggggugccagcgcca

SEQ ID NO: 2055176 - RNA, 19 nt, Artificial Sequence
  Description of Artificial Sequence: Synthetic oligonucleotide
uggucacaccuucaccgcc

SEQ ID NO: 2055177 - RNA, 19 nt, Artificial Sequence
  Description of Artificial Sequence: Synthetic oligonucleotide
ucaaccccagcccaucgau

SEQ ID NO: 2055178 - RNA, 19 nt, Artificial Sequence
  Description of Artificial Sequence: Synthetic oligonucleotide
ccgcccucaaccaagaaag

SEQ ID NO: 2055179 - RNA, 19 nt, Artificial Sequence
  Description of Artificial Sequence: Synthetic oligonucleotide
uguaaggcuagcgccuccc

SEQ ID NO: 2055180 - RNA, 19 nt, Artificial Sequence
  Description of Artificial Sequence: Synthetic oligonucleotide
ggcaguaggaccgaagggc

SEQ ID NO: 2055181 - RNA, 19 nt, Artificial Sequence
  Description of Artificial Sequence: Synthetic oligonucleotide
ggaaauagguaacgaagga

SEQ ID NO: 2055182 - RNA, 19 nt, Artificial Sequence
  Description of Artificial Sequence: Synthetic oligonucleotide
aagacccucuugcgggcag

SEQ ID NO: 2055183 - RNA, 19 nt, Artificial Sequence
  Description of Artificial Sequence: Synthetic oligonucleotide
aagccgugagugaugaggu

SEQ ID NO: 2055184 - RNA, 19 nt, Artificial Sequence
  Description of Artificial Sequence: Synthetic oligonucleotide
ugcacgcucgcaccagugc

SEQ ID NO: 2055185 - RNA, 19 nt, Artificial Sequence
  Description of Artificial Sequence: Synthetic oligonucleotide
cagcccaucgauauucauc

SEQ ID NO: 2055186 - RNA, 19 nt, Artificial Sequence
  Description of Artificial Sequence: Synthetic oligonucleotide
agguacucgcggcgcaggc

SEQ ID NO: 2055187 - RNA, 19 nt, Artificial Sequence
  Description of Artificial Sequence: Synthetic oligonucleotide
acggagcaugaugagcgcc

SEQ ID NO: 2055188 - RNA, 19 nt, Artificial Sequence
  Description of Artificial Sequence: Synthetic oligonucleotide
ucgguucaugcgcugggca

SEQ ID NO: 2055189 - RNA, 19 nt, Artificial Sequence
  Description of Artificial Sequence: Synthetic oligonucleotide
gaggcuuagccucugacau

SEQ ID NO: 2055190 - RNA, 19 nt, Artificial Sequence
  Description of Artificial Sequence: Synthetic oligonucleotide
augaucuuaggauccucaa

SEQ ID NO: 2055191 - RNA, 19 nt, Artificial Sequence
  Description of Artificial Sequence: Synthetic oligonucleotide
uuguaaacauggugccgga

SEQ ID NO: 2055192 - RNA, 19 nt, Artificial Sequence
  Description of Artificial Sequence: Synthetic oligonucleotide
aucugucugugaccaguuc

SEQ ID NO: 2055193 - RNA, 19 nt, Artificial Sequence
  Description of Artificial Sequence: Synthetic oligonucleotide
gucguccugguuugcaaag

SEQ ID NO: 2055194 - RNA, 19 nt, Artificial Sequence
  Description of Artificial Sequence: Synthetic oligonucleotide
caggcgagccucccgacgg

SEQ ID NO: 2055195 - RNA, 19 nt, Artificial Sequence
  Description of Artificial Sequence: Synthetic oligonucleotide
cuggucacaccuucaccgc

SEQ ID NO: 2055196 - RNA, 19 nt, Artificial Sequence
  Description of Artificial Sequence: Synthetic oligonucleotide
ucacuuccgcccucaacca

SEQ ID NO: 2055197 - RNA, 19 nt, Artificial Sequence
  Description of Artificial Sequence: Synthetic oligonucleotide
gaaauagguaacgaaggau

SEQ ID NO: 2055198 - RNA, 19 nt, Artificial Sequence
  Description of Artificial Sequence: Synthetic oligonucleotide
gugccagcgccauucuacg

SEQ ID NO: 2055199 - RNA, 19 nt, Artificial Sequence
  Description of Artificial Sequence: Synthetic oligonucleotide
cacgcagcggucacuuccg

SEQ ID NO: 2055200 - RNA, 19 nt, Artificial Sequence
  Description of Artificial Sequence: Synthetic oligonucleotide
uuugcacgcucgcaccagu

SEQ ID NO: 2055201 - RNA, 19 nt, Artificial Sequence
  Description of Artificial Sequence: Synthetic oligonucleotide
cgacggagcaugaugagcg

SEQ ID NO: 2055202 - RNA, 19 nt, Artificial Sequence
  Description of Artificial Sequence: Synthetic oligonucleotide
ggauccucaaccccagccc

SEQ ID NO: 2055203 - RNA, 19 nt, Artificial Sequence
  Description of Artificial Sequence: Synthetic oligonucleotide
gccggaaugaaauguaguc

SEQ ID NO: 2055204 - RNA, 19 nt, Artificial Sequence
  Description of Artificial Sequence: Synthetic oligonucleotide
caucgaacuccagggaccc

SEQ ID NO: 2055205 - RNA, 19 nt, Artificial Sequence
  Description of Artificial Sequence: Synthetic oligonucleotide
gagguaaagccgugaguga

SEQ ID NO: 2055206 - RNA, 19 nt, Artificial Sequence
  Description of Artificial Sequence: Synthetic oligonucleotide
ugggaaucaacugguuuuc

SEQ ID NO: 2055207 - RNA, 19 nt, Artificial Sequence
  Description of Artificial Sequence: Synthetic oligonucleotide
aacauggugccggaaugaa

SEQ ID NO: 2055208 - RNA, 19 nt, Artificial Sequence
  Description of Artificial Sequence: Synthetic oligonucleotide
uagcucagugggaaucaac

SEQ ID NO: 2055209 - RNA, 19 nt, Artificial Sequence
  Description of Artificial Sequence: Synthetic oligonucleotide
acgcuugacucgcuccuuc

SEQ ID NO: 2055210 - RNA, 19 nt, Artificial Sequence
  Description of Artificial Sequence: Synthetic oligonucleotide
gaucgcugugcauccuccc

SEQ ID NO: 2055211 - RNA, 19 nt, Artificial Sequence
  Description of Artificial Sequence: Synthetic oligonucleotide
uacagguacucgcggcgca

SEQ ID NO: 2055212 - RNA, 19 nt, Artificial Sequence
  Description of Artificial Sequence: Synthetic oligonucleotide
cauggugccggaaugaaau

SEQ ID NO: 2055213 - RNA, 19 nt, Artificial Sequence
  Description of Artificial Sequence: Synthetic oligonucleotide
caaccucaugccgaccucg

SEQ ID NO: 2055214 - RNA, 19 nt, Artificial Sequence
  Description of Artificial Sequence: Synthetic oligonucleotide
acacccgcuugcccaaccg

SEQ ID NO: 2055215 - RNA, 19 nt, Artificial Sequence
  Description of Artificial Sequence: Synthetic oligonucleotide
aaccucaugccgaccucgg

SEQ ID NO: 2055216 - RNA, 19 nt, Artificial Sequence
  Description of Artificial Sequence: Synthetic oligonucleotide
guaaggcuagcgccucccg

SEQ ID NO: 2055217 - RNA, 19 nt, Artificial Sequence
  Description of Artificial Sequence: Synthetic oligonucleotide
gugaucuuuaggcgccgcc

SEQ ID NO: 2055218 - RNA, 19 nt, Artificial Sequence
  Description of Artificial Sequence: Synthetic oligonucleotide
ccggaaugaaauguagucg

SEQ ID NO: 2055219 - RNA, 19 nt, Artificial Sequence
  Description of Artificial Sequence: Synthetic oligonucleotide
caaacaucuucagacgaga

SEQ ID NO: 2055220 - RNA, 19 nt, Artificial Sequence
  Description of Artificial Sequence: Synthetic oligonucleotide
cgaaggauaucagacaccc

SEQ ID NO: 2055221 - RNA, 19 nt, Artificial Sequence
  Description of Artificial Sequence: Synthetic oligonucleotide
agggaugucaugccgcaua

SEQ ID NO: 2055222 - RNA, 19 nt, Artificial Sequence
  Description of Artificial Sequence: Synthetic oligonucleotide
gaccccuguaaggcuagcg

SEQ ID NO: 2055223 - RNA, 19 nt, Artificial Sequence
  Description of Artificial Sequence: Synthetic oligonucleotide
gcgaaucauguauaacuug

SEQ ID NO: 2055224 - RNA, 19 nt, Artificial Sequence
  Description of Artificial Sequence: Synthetic oligonucleotide
guaaacauggugccggaau

SEQ ID NO: 2055225 - RNA, 19 nt, Artificial Sequence
  Description of Artificial Sequence: Synthetic oligonucleotide
cugaauggaucgcugugca

SEQ ID NO: 2055226 - RNA, 19 nt, Artificial Sequence
  Description of Artificial Sequence: Synthetic oligonucleotide
gacccgauggcugucaucu

SEQ ID NO: 2055227 - RNA, 19 nt, Artificial Sequence
  Description of Artificial Sequence: Synthetic oligonucleotide
aaucgaggcccaacuucag

SEQ ID NO: 2055228 - RNA, 19 nt, Artificial Sequence
  Description of Artificial Sequence: Synthetic oligonucleotide
gacggagcaugaugagcgc

SEQ ID NO: 2055229 - RNA, 19 nt, Artificial Sequence
  Description of Artificial Sequence: Synthetic oligonucleotide
acgcgugugugaucuuuag

SEQ ID NO: 2055230 - RNA, 19 nt, Artificial Sequence
  Description of Artificial Sequence: Synthetic oligonucleotide
acgcucgcaccagugcucc

SEQ ID NO: 2055231 - RNA, 19 nt, Artificial Sequence
  Description of Artificial Sequence: Synthetic oligonucleotide
uugcacgcucgcaccagug

SEQ ID NO: 2055232 - RNA, 19 nt, Artificial Sequence
  Description of Artificial Sequence: Synthetic oligonucleotide
ggugaugacccgauggcug

SEQ ID NO: 2055233 - RNA, 19 nt, Artificial Sequence
  Description of Artificial Sequence: Synthetic oligonucleotide
cucccgacggagcaugaug

SEQ ID NO: 2055234 - RNA, 19 nt, Artificial Sequence
  Description of Artificial Sequence: Synthetic oligonucleotide
cacuuaggauuaguaaauc

SEQ ID NO: 2055235 - RNA, 19 nt, Artificial Sequence
  Description of Artificial Sequence: Synthetic oligonucleotide
guucuugccccaagagucc

SEQ ID NO: 2055236 - RNA, 19 nt, Artificial Sequence
  Description of Artificial Sequence: Synthetic oligonucleotide
uaaccacauugcacagugu

SEQ ID NO: 2055237 - RNA, 19 nt, Artificial Sequence
  Description of Artificial Sequence: Synthetic oligonucleotide
ugagcgccgcucccacacg

SEQ ID NO: 2055238 - RNA, 19 nt, Artificial Sequence
  Description of Artificial Sequence: Synthetic oligonucleotide
gcuccagcgugccaaggcg

SEQ ID NO: 2055239 - RNA, 19 nt, Artificial Sequence
  Description of Artificial Sequence: Synthetic oligonucleotide
ugcccaaccgugagguaaa

SEQ ID NO: 2055240 - RNA, 19 nt, Artificial Sequence
  Description of Artificial Sequence: Synthetic oligonucleotide
guaggcaguaggaccgaag

SEQ ID NO: 2055241 - RNA, 19 nt, Artificial Sequence
  Description of Artificial Sequence: Synthetic oligonucleotide
ugaauggaucgcugugcau

SEQ ID NO: 2055242 - RNA, 19 nt, Artificial Sequence
  Description of Artificial Sequence: Synthetic oligonucleotide
gugaggcuuagccucugac

SEQ ID NO: 2055243 - RNA, 19 nt, Artificial Sequence
  Description of Artificial Sequence: Synthetic oligonucleotide
aggcuagcgccucccggcg

SEQ ID NO: 2055244 - RNA, 19 nt, Artificial Sequence
  Description of Artificial Sequence: Synthetic oligonucleotide
caaaggugaugacccgaug

SEQ ID NO: 2055245 - RNA, 19 nt, Artificial Sequence
  Description of Artificial Sequence: Synthetic oligonucleotide
uccagcgugccaaggcgaa

SEQ ID NO: 2055246 - RNA, 19 nt, Artificial Sequence
  Description of Artificial Sequence: Synthetic oligonucleotide
caguaggaccgaagggcag

SEQ ID NO: 2055247 - RNA, 19 nt, Artificial Sequence
  Description of Artificial Sequence: Synthetic oligonucleotide
guacucgcggcgcaggcga

SEQ ID NO: 2055248 - RNA, 19 nt, Artificial Sequence
  Description of Artificial Sequence: Synthetic oligonucleotide
ugugaucuuuaggcgccgc

SEQ ID NO: 2055249 - RNA, 19 nt, Artificial Sequence
  Description of Artificial Sequence: Synthetic oligonucleotide
cucaaaucgaggcccaacu

SEQ ID NO: 2055250 - RNA, 19 nt, Artificial Sequence
  Description of Artificial Sequence: Synthetic oligonucleotide
aggcuuagccucugacaug

SEQ ID NO: 2055251 - RNA, 19 nt, Artificial Sequence
  Description of Artificial Sequence: Synthetic oligonucleotide
cuuuaggcgccgccggcac

SEQ ID NO: 2055252 - RNA, 19 nt, Artificial Sequence
  Description of Artificial Sequence: Synthetic oligonucleotide
cccggcguagcucaguggg

SEQ ID NO: 2055253 - RNA, 19 nt, Artificial Sequence
  Description of Artificial Sequence: Synthetic oligonucleotide
ucaugccgaccucgguuca

SEQ ID NO: 2055254 - RNA, 19 nt, Artificial Sequence
  Description of Artificial Sequence: Synthetic oligonucleotide
caaggcgaaucauguauaa

SEQ ID NO: 2055255 - RNA, 19 nt, Artificial Sequence
  Description of Artificial Sequence: Synthetic oligonucleotide
ggugccagcgccauucuac

SEQ ID NO: 2055256 - RNA, 19 nt, Artificial Sequence
  Description of Artificial Sequence: Synthetic oligonucleotide
gcucagugggaaucaacug

SEQ ID NO: 2055257 - RNA, 19 nt, Artificial Sequence
  Description of Artificial Sequence: Synthetic oligonucleotide
caucuacauggcuggucac

SEQ ID NO: 2055258 - RNA, 19 nt, Artificial Sequence
  Description of Artificial Sequence: Synthetic oligonucleotide
accucgguucaugcgcugg

SEQ ID NO: 2055259 - RNA, 19 nt, Artificial Sequence
  Description of Artificial Sequence: Synthetic oligonucleotide
gguauaggggugccagcgc

SEQ ID NO: 2055260 - RNA, 19 nt, Artificial Sequence
  Description of Artificial Sequence: Synthetic oligonucleotide
caucaucgaacuccaggga

SEQ ID NO: 2055261 - RNA, 19 nt, Artificial Sequence
  Description of Artificial Sequence: Synthetic oligonucleotide
ccaucgauauucaucaucu

SEQ ID NO: 2055262 - RNA, 19 nt, Artificial Sequence
  Description of Artificial Sequence: Synthetic oligonucleotide
ccccuguaaggcuagcgcc

SEQ ID NO: 2055263 - RNA, 19 nt, Artificial Sequence
  Description of Artificial Sequence: Synthetic oligonucleotide
agcgugccaaggcgaauca

SEQ ID NO: 2055264 - RNA, 19 nt, Artificial Sequence
  Description of Artificial Sequence: Synthetic oligonucleotide
agugaccccauuggcuuug

SEQ ID NO: 2055265 - RNA, 19 nt, Artificial Sequence
  Description of Artificial Sequence: Synthetic oligonucleotide
ucccggcguagcucagugg

SEQ ID NO: 2055266 - RNA, 19 nt, Artificial Sequence
  Description of Artificial Sequence: Synthetic oligonucleotide
ccgaccucgguucaugcgc

SEQ ID NO: 2055267 - RNA, 19 nt, Artificial Sequence
  Description of Artificial Sequence: Synthetic oligonucleotide
gucacaccuucaccgccag

SEQ ID NO: 2055268 - RNA, 19 nt, Artificial Sequence
  Description of Artificial Sequence: Synthetic oligonucleotide
guacagguacucgcggcgc

SEQ ID NO: 2055269 - RNA, 19 nt, Artificial Sequence
  Description of Artificial Sequence: Synthetic oligonucleotide
gagcgccgcucccacacgc

SEQ ID NO: 2055270 - RNA, 19 nt, Artificial Sequence
  Description of Artificial Sequence: Synthetic oligonucleotide
acgcagcggucacuuccgc

SEQ ID NO: 2055271 - RNA, 19 nt, Artificial Sequence
  Description of Artificial Sequence: Synthetic oligonucleotide
aaguaggcaguaggaccga

SEQ ID NO: 2055272 - RNA, 19 nt, Artificial Sequence
  Description of Artificial Sequence: Synthetic oligonucleotide
cuuugcacgcucgcaccag

SEQ ID NO: 2055273 - RNA, 19 nt, Artificial Sequence
  Description of Artificial Sequence: Synthetic oligonucleotide
ggcacaggaaauagguaac

SEQ ID NO: 2055274 - RNA, 19 nt, Artificial Sequence
  Description of Artificial Sequence: Synthetic oligonucleotide
augaugagcgccgcuccca

SEQ ID NO: 2055275 - RNA, 19 nt, Artificial Sequence
  Description of Artificial Sequence: Synthetic oligonucleotide
cuguaaggcuagcgccucc

SEQ ID NO: 2055276 - RNA, 19 nt, Artificial Sequence
  Description of Artificial Sequence: Synthetic oligonucleotide
cacauugcgguggucuguc

SEQ ID NO: 2055277 - RNA, 19 nt, Artificial Sequence
  Description of Artificial Sequence: Synthetic oligonucleotide
gaugacccgauggcuguca

SEQ ID NO: 2055278 - RNA, 19 nt, Artificial Sequence
  Description of Artificial Sequence: Synthetic oligonucleotide
agugaugaggugaggcuua

SEQ ID NO: 2055279 - RNA, 19 nt, Artificial Sequence
  Description of Artificial Sequence: Synthetic oligonucleotide
cuucaagagcacgcuugac

SEQ ID NO: 2055280 - RNA, 19 nt, Artificial Sequence
  Description of Artificial Sequence: Synthetic oligonucleotide
ggaagacccucuugcgggc

SEQ ID NO: 2055281 - RNA, 19 nt, Artificial Sequence
  Description of Artificial Sequence: Synthetic oligonucleotide
ugccaaggcgaaucaugua

SEQ ID NO: 2055282 - RNA, 19 nt, Artificial Sequence
  Description of Artificial Sequence: Synthetic oligonucleotide
cacgcucgcaccagugcuc

SEQ ID NO: 2055283 - RNA, 19 nt, Artificial Sequence
  Description of Artificial Sequence: Synthetic oligonucleotide
gcgguacagguacucgcgg

SEQ ID NO: 2055284 - RNA, 19 nt, Artificial Sequence
  Description of Artificial Sequence: Synthetic oligonucleotide
agcucacucggcgcucagg

SEQ ID NO: 2055285 - RNA, 19 nt, Artificial Sequence
  Description of Artificial Sequence: Synthetic oligonucleotide
cagcgugccaaggcgaauc

SEQ ID NO: 2055286 - RNA, 19 nt, Artificial Sequence
  Description of Artificial Sequence: Synthetic oligonucleotide
uacgucugcuguggccucc

SEQ ID NO: 2055287 - RNA, 19 nt, Artificial Sequence
  Description of Artificial Sequence: Synthetic oligonucleotide
cacucggcgcucaggaaga

SEQ ID NO: 2055288 - RNA, 19 nt, Artificial Sequence
  Description of Artificial Sequence: Synthetic oligonucleotide
cgugagguaaagccgugag

SEQ ID NO: 2055289 - RNA, 19 nt, Artificial Sequence
  Description of Artificial Sequence: Synthetic oligonucleotide
cgagagguagugaucauga

SEQ ID NO: 2055290 - RNA, 19 nt, Artificial Sequence
  Description of Artificial Sequence: Synthetic oligonucleotide
gcucacucggcgcucagga

SEQ ID NO: 2055291 - RNA, 19 nt, Artificial Sequence
  Description of Artificial Sequence: Synthetic oligonucleotide
gccgcauaaccacauugca

SEQ ID NO: 2055292 - RNA, 19 nt, Artificial Sequence
  Description of Artificial Sequence: Synthetic oligonucleotide
guagucguccugguuugca

SEQ ID NO: 2055293 - RNA, 19 nt, Artificial Sequence
  Description of Artificial Sequence: Synthetic oligonucleotide
uacucgcggcgcaggcgag

SEQ ID NO: 2055294 - RNA, 19 nt, Artificial Sequence
  Description of Artificial Sequence: Synthetic oligonucleotide
cggagcaugaugagcgccg

SEQ ID NO: 2055295 - RNA, 19 nt, Artificial Sequence
  Description of Artificial Sequence: Synthetic oligonucleotide
ugacccgauggcugucauc

SEQ ID NO: 2055296 - RNA, 19 nt, Artificial Sequence
  Description of Artificial Sequence: Synthetic oligonucleotide
accacgcagcggucacuuc

SEQ ID NO: 2055297 - RNA, 19 nt, Artificial Sequence
  Description of Artificial Sequence: Synthetic oligonucleotide
agcggucacuuccgcccuc

SEQ ID NO: 2055298 - RNA, 19 nt, Artificial Sequence
  Description of Artificial Sequence: Synthetic oligonucleotide
ccauucuacgucugcugug

SEQ ID NO: 2055299 - RNA, 19 nt, Artificial Sequence
  Description of Artificial Sequence: Synthetic oligonucleotide
gccaaggcgaaucauguau

SEQ ID NO: 2055300 - RNA, 19 nt, Artificial Sequence
  Description of Artificial Sequence: Synthetic oligonucleotide
gguacucgcggcgcaggcg

SEQ ID NO: 2055301 - RNA, 19 nt, Artificial Sequence
  Description of Artificial Sequence: Synthetic oligonucleotide
agcgccucccggcguagcu

SEQ ID NO: 2055302 - RNA, 19 nt, Artificial Sequence
  Description of Artificial Sequence: Synthetic oligonucleotide
gaccucgguucaugcgcug

SEQ ID NO: 2055303 - RNA, 19 nt, Artificial Sequence
  Description of Artificial Sequence: Synthetic oligonucleotide
gguagugaucaugaucuua

SEQ ID NO: 2055304 - RNA, 19 nt, Artificial Sequence
  Description of Artificial Sequence: Synthetic oligonucleotide
gcaggcgagccucccgacg

SEQ ID NO: 2055305 - RNA, 19 nt, Artificial Sequence
  Description of Artificial Sequence: Synthetic oligonucleotide
cuccagcgugccaaggcga

SEQ ID NO: 2055306 - RNA, 19 nt, Artificial Sequence
  Description of Artificial Sequence: Synthetic oligonucleotide
gucucgagagguagugauc

SEQ ID NO: 2055307 - RNA, 19 nt, Artificial Sequence
  Description of Artificial Sequence: Synthetic oligonucleotide
gguuugcaaaggugaugac

SEQ ID NO: 2055308 - RNA, 19 nt, Artificial Sequence
  Description of Artificial Sequence: Synthetic oligonucleotide
cuuccgcccucaaccaaga

SEQ ID NO: 2055309 - RNA, 19 nt, Artificial Sequence
  Description of Artificial Sequence: Synthetic oligonucleotide
gaagacccucuugcgggca

SEQ ID NO: 2055310 - RNA, 19 nt, Artificial Sequence
  Description of Artificial Sequence: Synthetic oligonucleotide
cucggcgcucaggaagacc

SEQ ID NO: 2055311 - RNA, 19 nt, Artificial Sequence
  Description of Artificial Sequence: Synthetic oligonucleotide
gccgugagugaugagguga

SEQ ID NO: 2055312 - RNA, 19 nt, Artificial Sequence
  Description of Artificial Sequence: Synthetic oligonucleotide
gcuccaaccucaugccgac

SEQ ID NO: 2055313 - RNA, 19 nt, Artificial Sequence
  Description of Artificial Sequence: Synthetic oligonucleotide
agccucccgacggagcaug

SEQ ID NO: 2055314 - RNA, 19 nt, Artificial Sequence
  Description of Artificial Sequence: Synthetic oligonucleotide
ggggucucgagagguagug

SEQ ID NO: 2055315 - RNA, 19 nt, Artificial Sequence
  Description of Artificial Sequence: Synthetic oligonucleotide
cucaaccccagcccaucga

SEQ ID NO: 2055316 - RNA, 19 nt, Artificial Sequence
  Description of Artificial Sequence: Synthetic oligonucleotide
guuuccacuuaggauuagu

SEQ ID NO: 2055317 - RNA, 19 nt, Artificial Sequence
  Description of Artificial Sequence: Synthetic oligonucleotide
ggucacuuccgcccucaac

SEQ ID NO: 2055318 - RNA, 19 nt, Artificial Sequence
  Description of Artificial Sequence: Synthetic oligonucleotide
gugccaaggcgaaucaugu

SEQ ID NO: 2055319 - RNA, 19 nt, Artificial Sequence
  Description of Artificial Sequence: Synthetic oligonucleotide
ggucucgagagguagugau

SEQ ID NO: 2055320 - RNA, 19 nt, Artificial Sequence
  Description of Artificial Sequence: Synthetic oligonucleotide
acacgcgugugugaucuuu

SEQ ID NO: 2055321 - RNA, 19 nt, Artificial Sequence
  Description of Artificial Sequence: Synthetic oligonucleotide
caucgauauucaucaucua

SEQ ID NO: 2055322 - RNA, 19 nt, Artificial Sequence
  Description of Artificial Sequence: Synthetic oligonucleotide
uuccgcccucaaccaagaa

SEQ ID NO: 2055323 - RNA, 19 nt, Artificial Sequence
  Description of Artificial Sequence: Synthetic oligonucleotide
cuccugaauggaucgcugu

SEQ ID NO: 2055324 - RNA, 19 nt, Artificial Sequence
  Description of Artificial Sequence: Synthetic oligonucleotide
cggaaugaaauguagucgu

SEQ ID NO: 2055325 - RNA, 19 nt, Artificial Sequence
  Description of Artificial Sequence: Synthetic oligonucleotide
agacacccgcuugcccaac

SEQ ID NO: 2055326 - RNA, 19 nt, Artificial Sequence
  Description of Artificial Sequence: Synthetic oligonucleotide
gcuuugcacgcucgcacca

SEQ ID NO: 2055327 - RNA, 19 nt, Artificial Sequence
  Description of Artificial Sequence: Synthetic oligonucleotide
ccucaaccccagcccaucg

SEQ ID NO: 2055328 - RNA, 19 nt, Artificial Sequence
  Description of Artificial Sequence: Synthetic oligonucleotide
aguaggcaguaggaccgaa

SEQ ID NO: 2055329 - RNA, 19 nt, Artificial Sequence
  Description of Artificial Sequence: Synthetic oligonucleotide
ggaccgaagggcagauggc

SEQ ID NO: 2055330 - RNA, 19 nt, Artificial Sequence
  Description of Artificial Sequence: Synthetic oligonucleotide
gcucaaaucgaggcccaac

SEQ ID NO: 2055331 - RNA, 19 nt, Artificial Sequence
  Description of Artificial Sequence: Synthetic oligonucleotide
ccacuuaggauuaguaaau

SEQ ID NO: 2055332 - RNA, 19 nt, Artificial Sequence
  Description of Artificial Sequence: Synthetic oligonucleotide
accgugagguaaagccgug

SEQ ID NO: 2055333 - RNA, 19 nt, Artificial Sequence
  Description of Artificial Sequence: Synthetic oligonucleotide
ccgacggagcaugaugagc

SEQ ID NO: 2055334 - RNA, 19 nt, Artificial Sequence
  Description of Artificial Sequence: Synthetic oligonucleotide
gccauucuacgucugcugu

SEQ ID NO: 2055335 - RNA, 19 nt, Artificial Sequence
  Description of Artificial Sequence: Synthetic oligonucleotide
cauaaccacauugcacagu

SEQ ID NO: 2055336 - RNA, 19 nt, Artificial Sequence
  Description of Artificial Sequence: Synthetic oligonucleotide
ggugccggaaugaaaugua

SEQ ID NO: 2055337 - RNA, 19 nt, Artificial Sequence
  Description of Artificial Sequence: Synthetic oligonucleotide
gcgggcaguguugguauag

SEQ ID NO: 2055338 - RNA, 19 nt, Artificial Sequence
  Description of Artificial Sequence: Synthetic oligonucleotide
ggucacaccuucaccgcca

SEQ ID NO: 2055339 - RNA, 19 nt, Artificial Sequence
  Description of Artificial Sequence: Synthetic oligonucleotide
agggaccccuguaaggcua

SEQ ID NO: 2055340 - RNA, 19 nt, Artificial Sequence
  Description of Artificial Sequence: Synthetic oligonucleotide
cacgcgugugugaucuuua

SEQ ID NO: 2055341 - RNA, 19 nt, Artificial Sequence
  Description of Artificial Sequence: Synthetic oligonucleotide
ggcaccacgcagcggucac

SEQ ID NO: 2055342 - RNA, 19 nt, Artificial Sequence
  Description of Artificial Sequence: Synthetic oligonucleotide
ugcgggcaguguugguaua

SEQ ID NO: 2055343 - RNA, 19 nt, Artificial Sequence
  Description of Artificial Sequence: Synthetic oligonucleotide
gcuugcccaaccgugaggu

SEQ ID NO: 2055344 - RNA, 19 nt, Artificial Sequence
  Description of Artificial Sequence: Synthetic oligonucleotide
aggcgagccucccgacgga

SEQ ID NO: 2055345 - RNA, 19 nt, Artificial Sequence
  Description of Artificial Sequence: Synthetic oligonucleotide
gugugccucgaugcucaug

SEQ ID NO: 2055346 - RNA, 19 nt, Artificial Sequence
  Description of Artificial Sequence: Synthetic oligonucleotide
cuccaaccucaugccgacc

SEQ ID NO: 2055347 - RNA, 19 nt, Artificial Sequence
  Description of Artificial Sequence: Synthetic oligonucleotide
gcguagcucagugggaauc

SEQ ID NO: 2055348 - RNA, 19 nt, Artificial Sequence
  Description of Artificial Sequence: Synthetic oligonucleotide
cagcgccauucuacgucug

SEQ ID NO: 2055349 - RNA, 19 nt, Artificial Sequence
  Description of Artificial Sequence: Synthetic oligonucleotide
gccggcaccacgcagcggu

SEQ ID NO: 2055350 - RNA, 19 nt, Artificial Sequence
  Description of Artificial Sequence: Synthetic oligonucleotide
cagugugaaguaggcagua

SEQ ID NO: 2055351 - RNA, 19 nt, Artificial Sequence
  Description of Artificial Sequence: Synthetic oligonucleotide
ccaaggcgaaucauguaua

SEQ ID NO: 2055352 - RNA, 19 nt, Artificial Sequence
  Description of Artificial Sequence: Synthetic oligonucleotide
ggcgaaucauguauaacuu

SEQ ID NO: 2055353 - RNA, 19 nt, Artificial Sequence
  Description of Artificial Sequence: Synthetic oligonucleotide
auggaucgcugugcauccu

SEQ ID NO: 2055354 - RNA, 19 nt, Artificial Sequence
  Description of Artificial Sequence: Synthetic oligonucleotide
ccccagcccaucgauauuc

SEQ ID NO: 2055355 - RNA, 19 nt, Artificial Sequence
  Description of Artificial Sequence: Synthetic oligonucleotide
cucccacacgcguguguga

SEQ ID NO: 2055356 - RNA, 19 nt, Artificial Sequence
  Description of Artificial Sequence: Synthetic oligonucleotide
cuagcgccucccggcguag

SEQ ID NO: 2055357 - RNA, 19 nt, Artificial Sequence
  Description of Artificial Sequence: Synthetic oligonucleotide
cccgacggagcaugaugag

SEQ ID NO: 2055358 - RNA, 19 nt, Artificial Sequence
  Description of Artificial Sequence: Synthetic oligonucleotide
cgccauucuacgucugcug

SEQ ID NO: 2055359 - RNA, 19 nt, Artificial Sequence
  Description of Artificial Sequence: Synthetic oligonucleotide
cacagcucacucggcgcuc

SEQ ID NO: 2055360 - RNA, 19 nt, Artificial Sequence
  Description of Artificial Sequence: Synthetic oligonucleotide
agcucaaaucgaggcccaa

SEQ ID NO: 2055361 - RNA, 19 nt, Artificial Sequence
  Description of Artificial Sequence: Synthetic oligonucleotide
gagcaugaugagcgccgcu

SEQ ID NO: 2055362 - RNA, 19 nt, Artificial Sequence
  Description of Artificial Sequence: Synthetic oligonucleotide
caaccccagcccaucgaua

SEQ ID NO: 2055363 - RNA, 19 nt, Artificial Sequence
  Description of Artificial Sequence: Synthetic oligonucleotide
gggaccccuguaaggcuag

SEQ ID NO: 2055364 - RNA, 19 nt, Artificial Sequence
  Description of Artificial Sequence: Synthetic oligonucleotide
auccucaaccccagcccau

SEQ ID NO: 2055365 - RNA, 19 nt, Artificial Sequence
  Description of Artificial Sequence: Synthetic oligonucleotide
gugaccccauuggcuuugc

SEQ ID NO: 2055366 - RNA, 19 nt, Artificial Sequence
  Description of Artificial Sequence: Synthetic oligonucleotide
accccagcccaucgauauu

SEQ ID NO: 2055367 - RNA, 19 nt, Artificial Sequence
  Description of Artificial Sequence: Synthetic oligonucleotide
ggaugucaugccgcauaac

SEQ ID NO: 2055368 - RNA, 19 nt, Artificial Sequence
  Description of Artificial Sequence: Synthetic oligonucleotide
cauugcgguggucugucuu

SEQ ID NO: 2055369 - RNA, 19 nt, Artificial Sequence
  Description of Artificial Sequence: Synthetic oligonucleotide
cccaaccgugagguaaagc

SEQ ID NO: 2055370 - RNA, 19 nt, Artificial Sequence
  Description of Artificial Sequence: Synthetic oligonucleotide
agagcacgcuugacucgcu

SEQ ID NO: 2055371 - RNA, 19 nt, Artificial Sequence
  Description of Artificial Sequence: Synthetic oligonucleotide
ccuguaaggcuagcgccuc

SEQ ID NO: 2055372 - RNA, 19 nt, Artificial Sequence
  Description of Artificial Sequence: Synthetic oligonucleotide
guucaugcgcugggcaccu

SEQ ID NO: 2055373 - RNA, 19 nt, Artificial Sequence
  Description of Artificial Sequence: Synthetic oligonucleotide
gcacgcucgcaccagugcu

SEQ ID NO: 2055374 - RNA, 19 nt, Artificial Sequence
  Description of Artificial Sequence: Synthetic oligonucleotide
uaggggugccagcgccauu

SEQ ID NO: 2055375 - RNA, 19 nt, Artificial Sequence
  Description of Artificial Sequence: Synthetic oligonucleotide
ccgcuugcccaaccgugag

SEQ ID NO: 2055376 - RNA, 19 nt, Artificial Sequence
  Description of Artificial Sequence: Synthetic oligonucleotide
acauggcuggucacaccuu

SEQ ID NO: 2055377 - RNA, 19 nt, Artificial Sequence
  Description of Artificial Sequence: Synthetic oligonucleotide
cagggaccccuguaaggcu

SEQ ID NO: 2055378 - RNA, 19 nt, Artificial Sequence
  Description of Artificial Sequence: Synthetic oligonucleotide
gcacgcuugacucgcuccu

SEQ ID NO: 2055379 - RNA, 19 nt, Artificial Sequence
  Description of Artificial Sequence: Synthetic oligonucleotide
cuugcccaaccgugaggua

SEQ ID NO: 2055380 - RNA, 19 nt, Artificial Sequence
  Description of Artificial Sequence: Synthetic oligonucleotide
cgcuugcccaaccgugagg

SEQ ID NO: 2055381 - RNA, 19 nt, Artificial Sequence
  Description of Artificial Sequence: Synthetic oligonucleotide
guaggaccgaagggcagau

SEQ ID NO: 2055382 - RNA, 19 nt, Artificial Sequence
  Description of Artificial Sequence: Synthetic oligonucleotide
gggucucgagagguaguga

SEQ ID NO: 2055383 - RNA, 19 nt, Artificial Sequence
  Description of Artificial Sequence: Synthetic oligonucleotide
cccuguaaggcuagcgccu

SEQ ID NO: 2055384 - RNA, 19 nt, Artificial Sequence
  Description of Artificial Sequence: Synthetic oligonucleotide
gcuagcgccucccggcgua

SEQ ID NO: 2055385 - RNA, 19 nt, Artificial Sequence
  Description of Artificial Sequence: Synthetic oligonucleotide
cucgagagguagugaucau

SEQ ID NO: 2055386 - RNA, 19 nt, Artificial Sequence
  Description of Artificial Sequence: Synthetic oligonucleotide
ccagcgccauucuacgucu

SEQ ID NO: 2055387 - RNA, 19 nt, Artificial Sequence
  Description of Artificial Sequence: Synthetic oligonucleotide
caucaucuacauggcuggu

SEQ ID NO: 2055388 - RNA, 19 nt, Artificial Sequence
  Description of Artificial Sequence: Synthetic oligonucleotide
ccacacgcgugugugaucu

SEQ ID NO: 2055389 - RNA, 19 nt, Artificial Sequence
  Description of Artificial Sequence: Synthetic oligonucleotide
cacccgcuugcccaaccgu

SEQ ID NO: 2055390 - RNA, 19 nt, Artificial Sequence
  Description of Artificial Sequence: Synthetic oligonucleotide
cagugggaaucaacugguu

SEQ ID NO: 2055391 - RNA, 19 nt, Artificial Sequence
  Description of Artificial Sequence: Synthetic oligonucleotide
gcccaaccgugagguaaag

SEQ ID NO: 2055392 - RNA, 19 nt, Artificial Sequence
  Description of Artificial Sequence: Synthetic oligonucleotide
ggaccccuguaaggcuagc

SEQ ID NO: 2055393 - RNA, 19 nt, Artificial Sequence
  Description of Artificial Sequence: Synthetic oligonucleotide
ccucaugccgaccucgguu

SEQ ID NO: 2055394 - RNA, 19 nt, Artificial Sequence
  Description of Artificial Sequence: Synthetic oligonucleotide
gccgcucccacacgcgugu

SEQ ID NO: 2055395 - RNA, 19 nt, Artificial Sequence
  Description of Artificial Sequence: Synthetic oligonucleotide
gcgccauucuacgucugcu

SEQ ID NO: 2055396 - RNA, 19 nt, Artificial Sequence
  Description of Artificial Sequence: Synthetic oligonucleotide
ccggcguagcucaguggga

SEQ ID NO: 2055397 - RNA, 19 nt, Artificial Sequence
  Description of Artificial Sequence: Synthetic oligonucleotide
ggcguagcucagugggaau

SEQ ID NO: 2055398 - RNA, 19 nt, Artificial Sequence
  Description of Artificial Sequence: Synthetic oligonucleotide
caccacgcagcggucacuu

SEQ ID NO: 2055399 - RNA, 19 nt, Artificial Sequence
  Description of Artificial Sequence: Synthetic oligonucleotide
ccgggccuugcgguacagg

SEQ ID NO: 2055400 - RNA, 19 nt, Artificial Sequence
  Description of Artificial Sequence: Synthetic oligonucleotide
ccgugagguaaagccguga

SEQ ID NO: 2055401 - RNA, 19 nt, Artificial Sequence
  Description of Artificial Sequence: Synthetic oligonucleotide
gggugccagcgccauucua

SEQ ID NO: 2055402 - RNA, 19 nt, Artificial Sequence
  Description of Artificial Sequence: Synthetic oligonucleotide
ccgauggcugucaucuuuu

SEQ ID NO: 2055403 - RNA, 19 nt, Artificial Sequence
  Description of Artificial Sequence: Synthetic oligonucleotide
cccucuugcgggcaguguu

SEQ ID NO: 2055404 - RNA, 19 nt, Artificial Sequence
  Description of Artificial Sequence: Synthetic oligonucleotide
cgcaggcgagccucccgac

SEQ ID NO: 2055405 - RNA, 19 nt, Artificial Sequence
  Description of Artificial Sequence: Synthetic oligonucleotide
ggcuagcgccucccggcgu

SEQ ID NO: 2055406 - RNA, 19 nt, Artificial Sequence
  Description of Artificial Sequence: Synthetic oligonucleotide
cggcguagcucagugggaa

SEQ ID NO: 2055407 - RNA, 19 nt, Artificial Sequence
  Description of Artificial Sequence: Synthetic oligonucleotide
ggggugccagcgccauucu

SEQ ID NO: 2055408 - RNA, 19 nt, Artificial Sequence
  Description of Artificial Sequence: Synthetic oligonucleotide
cacgcuugacucgcuccuu

SEQ ID NO: 2055409 - RNA, 19 nt, Artificial Sequence
  Description of Artificial Sequence: Synthetic oligonucleotide
cagggaugucaugccgcau

SEQ ID NO: 2055410 - RNA, 19 nt, Artificial Sequence
  Description of Artificial Sequence: Synthetic oligonucleotide
cacacgcgugugugaucuu

SEQ ID NO: 2055411 - RNA, 19 nt, Artificial Sequence
  Description of Artificial Sequence: Synthetic oligonucleotide
gcaccacgcagcggucacu

SEQ ID NO: 2055412 - RNA, 19 nt, Artificial Sequence
  Description of Artificial Sequence: Synthetic oligonucleotide
gcgugccaaggcgaaucau

SEQ ID NO: 2055413 - RNA, 19 nt, Artificial Sequence
  Description of Artificial Sequence: Synthetic oligonucleotide
ccgcucccacacgcgugug

SEQ ID NO: 2055414 - RNA, 19 nt, Artificial Sequence
  Description of Artificial Sequence: Synthetic oligonucleotide
cccacaggugugccucgau

SEQ ID NO: 2055415 - RNA, 19 nt, Artificial Sequence
  Description of Artificial Sequence: Synthetic oligonucleotide
cgccggcaccacgcagcgg

SEQ ID NO: 2055416 - RNA, 19 nt, Artificial Sequence
  Description of Artificial Sequence: Synthetic oligonucleotide
cgcucccacacgcgugugu

SEQ ID NO: 2055417 - RNA, 19 nt, Artificial Sequence
  Description of Artificial Sequence: Synthetic oligonucleotide
ccagcgugccaaggcgaau

SEQ ID NO: 2055418 - RNA, 19 nt, Artificial Sequence
  Description of Artificial Sequence: Synthetic oligonucleotide
cggcgcucaggaagacccu

SEQ ID NO: 2055419 - RNA, 19 nt, Artificial Sequence
  Description of Artificial Sequence: Synthetic oligonucleotide
uuugacuacagcuuacucg

SEQ ID NO: 2055420 - RNA, 19 nt, Artificial Sequence
  Description of Artificial Sequence: Synthetic oligonucleotide
gauauaggcagccacacag

SEQ ID NO: 2055421 - RNA, 19 nt, Artificial Sequence
  Description of Artificial Sequence: Synthetic oligonucleotide
uuuauacuuggacuggugg

SEQ ID NO: 2055422 - RNA, 19 nt, Artificial Sequence
  Description of Artificial Sequence: Synthetic oligonucleotide
aaggaccccauccugacgc

SEQ ID NO: 2055423 - RNA, 19 nt, Artificial Sequence
  Description of Artificial Sequence: Synthetic oligonucleotide
ucuuuaaaaucccaggcca

SEQ ID NO: 2055424 - RNA, 19 nt, Artificial Sequence
  Description of Artificial Sequence: Synthetic oligonucleotide
uuuauuagauaugaggggc

SEQ ID NO: 2055425 - RNA, 19 nt, Artificial Sequence
  Description of Artificial Sequence: Synthetic oligonucleotide
aaaguagcagugcagggag

SEQ ID NO: 2055426 - RNA, 19 nt, Artificial Sequence
  Description of Artificial Sequence: Synthetic oligonucleotide
aagagauccucaucuagcg

SEQ ID NO: 2055427 - RNA, 19 nt, Artificial Sequence
  Description of Artificial Sequence: Synthetic oligonucleotide
aguucuuuaaaaucccagg

SEQ ID NO: 2055428 - RNA, 19 nt, Artificial Sequence
  Description of Artificial Sequence: Synthetic oligonucleotide
acagcuuacucgcugauac

SEQ ID NO: 2055429 - RNA, 19 nt, Artificial Sequence
  Description of Artificial Sequence: Synthetic oligonucleotide
uagucagagauauaggcag

SEQ ID NO: 2055430 - RNA, 19 nt, Artificial Sequence
  Description of Artificial Sequence: Synthetic oligonucleotide
cuuuauuagauaugagggg

SEQ ID NO: 2055431 - RNA, 19 nt, Artificial Sequence
  Description of Artificial Sequence: Synthetic oligonucleotide
uucuuuaaaaucccaggcc

SEQ ID NO: 2055432 - RNA, 19 nt, Artificial Sequence
  Description of Artificial Sequence: Synthetic oligonucleotide
uucacuuuauacuuggacu

SEQ ID NO: 2055433 - RNA, 19 nt, Artificial Sequence
  Description of Artificial Sequence: Synthetic oligonucleotide
uuauacuuggacugguggg

SEQ ID NO: 2055434 - RNA, 19 nt, Artificial Sequence
  Description of Artificial Sequence: Synthetic oligonucleotide
ucauagagcauccaguggu

SEQ ID NO: 2055435 - RNA, 19 nt, Artificial Sequence
  Description of Artificial Sequence: Synthetic oligonucleotide
uagauacuggucaaugagg

SEQ ID NO: 2055436 - RNA, 19 nt, Artificial Sequence
  Description of Artificial Sequence: Synthetic oligonucleotide
aaugcuguacccaggaagg

SEQ ID NO: 2055437 - RNA, 19 nt, Artificial Sequence
  Description of Artificial Sequence: Synthetic oligonucleotide
ucacuuuauacuuggacug

SEQ ID NO: 2055438 - RNA, 19 nt, Artificial Sequence
  Description of Artificial Sequence: Synthetic oligonucleotide
aauagguaccuccugggca

SEQ ID NO: 2055439 - RNA, 19 nt, Artificial Sequence
  Description of Artificial Sequence: Synthetic oligonucleotide
uuagcaguuucuuuauuag

SEQ ID NO: 2055440 - RNA, 19 nt, Artificial Sequence
  Description of Artificial Sequence: Synthetic oligonucleotide
cuucaaucggaucacaccc

SEQ ID NO: 2055441 - RNA, 19 nt, Artificial Sequence
  Description of Artificial Sequence: Synthetic oligonucleotide
aaugcaucuugaugucgcc

SEQ ID NO: 2055442 - RNA, 19 nt, Artificial Sequence
  Description of Artificial Sequence: Synthetic oligonucleotide
ugaagagauccucaucuag

SEQ ID NO: 2055443 - RNA, 19 nt, Artificial Sequence
  Description of Artificial Sequence: Synthetic oligonucleotide
gacaaaguagcagugcagg

SEQ ID NO: 2055444 - RNA, 19 nt, Artificial Sequence
  Description of Artificial Sequence: Synthetic oligonucleotide
gagauccucaucuagcggc

SEQ ID NO: 2055445 - RNA, 19 nt, Artificial Sequence
  Description of Artificial Sequence: Synthetic oligonucleotide
ucgguauuucuccuggagg

SEQ ID NO: 2055446 - RNA, 19 nt, Artificial Sequence
  Description of Artificial Sequence: Synthetic oligonucleotide
ucaauagguaccuccuggg

SEQ ID NO: 2055447 - RNA, 19 nt, Artificial Sequence
  Description of Artificial Sequence: Synthetic oligonucleotide
uauacuuggacuggugggg

SEQ ID NO: 2055448 - RNA, 19 nt, Artificial Sequence
  Description of Artificial Sequence: Synthetic oligonucleotide
uuagauaugaggggcaggc

SEQ ID NO: 2055449 - RNA, 19 nt, Artificial Sequence
  Description of Artificial Sequence: Synthetic oligonucleotide
uuaucuuugacuacagcuu

SEQ ID NO: 2055450 - RNA, 19 nt, Artificial Sequence
  Description of Artificial Sequence: Synthetic oligonucleotide
ucaucuagcggcucgaggu

SEQ ID NO: 2055451 - RNA, 19 nt, Artificial Sequence
  Description of Artificial Sequence: Synthetic oligonucleotide
auacccgaggcuucaaucg

SEQ ID NO: 2055452 - RNA, 19 nt, Artificial Sequence
  Description of Artificial Sequence: Synthetic oligonucleotide
agaaacaguucuuuaaaau

SEQ ID NO: 2055453 - RNA, 19 nt, Artificial Sequence
  Description of Artificial Sequence: Synthetic oligonucleotide
aguuaucuuugacuacagc

SEQ ID NO: 2055454 - RNA, 19 nt, Artificial Sequence
  Description of Artificial Sequence: Synthetic oligonucleotide
uuauuagauaugaggggca

SEQ ID NO: 2055455 - RNA, 19 nt, Artificial Sequence
  Description of Artificial Sequence: Synthetic oligonucleotide
agcuuacucgcugauaccc

SEQ ID NO: 2055456 - RNA, 19 nt, Artificial Sequence
  Description of Artificial Sequence: Synthetic oligonucleotide
cucaauagguaccuccugg

SEQ ID NO: 2055457 - RNA, 19 nt, Artificial Sequence
  Description of Artificial Sequence: Synthetic oligonucleotide
aguguuagcaguuucuuua

SEQ ID NO: 2055458 - RNA, 19 nt, Artificial Sequence
  Description of Artificial Sequence: Synthetic oligonucleotide
uggacgucuucacacacag

SEQ ID NO: 2055459 - RNA, 19 nt, Artificial Sequence
  Description of Artificial Sequence: Synthetic oligonucleotide
agauacuggucaaugaggg

SEQ ID NO: 2055460 - RNA, 19 nt, Artificial Sequence
  Description of Artificial Sequence: Synthetic oligonucleotide
aaucggaucacacccuccu

SEQ ID NO: 2055461 - RNA, 19 nt, Artificial Sequence
  Description of Artificial Sequence: Synthetic oligonucleotide
auucgguucagccccacuc

SEQ ID NO: 2055462 - RNA, 19 nt, Artificial Sequence
  Description of Artificial Sequence: Synthetic oligonucleotide
uggcaguagaaacaguucu

SEQ ID NO: 2055463 - RNA, 19 nt, Artificial Sequence
  Description of Artificial Sequence: Synthetic oligonucleotide
guuaucuuugacuacagcu

SEQ ID NO: 2055464 - RNA, 19 nt, Artificial Sequence
  Description of Artificial Sequence: Synthetic oligonucleotide
auagguaccuccugggcag

SEQ ID NO: 2055465 - RNA, 19 nt, Artificial Sequence
  Description of Artificial Sequence: Synthetic oligonucleotide
aaaacuggugcugcagggg

SEQ ID NO: 2055466 - RNA, 19 nt, Artificial Sequence
  Description of Artificial Sequence: Synthetic oligonucleotide
aaggaggccuggcagauga

SEQ ID NO: 2055467 - RNA, 19 nt, Artificial Sequence
  Description of Artificial Sequence: Synthetic oligonucleotide
uccggaagggucaucgcgg

SEQ ID NO: 2055468 - RNA, 19 nt, Artificial Sequence
  Description of Artificial Sequence: Synthetic oligonucleotide
uucgguucagccccacucg

SEQ ID NO: 2055469 - RNA, 19 nt, Artificial Sequence
  Description of Artificial Sequence: Synthetic oligonucleotide
uauaggcagccacacagca

SEQ ID NO: 2055470 - RNA, 19 nt, Artificial Sequence
  Description of Artificial Sequence: Synthetic oligonucleotide
gaagagauccucaucuagc

SEQ ID NO: 2055471 - RNA, 19 nt, Artificial Sequence
  Description of Artificial Sequence: Synthetic oligonucleotide
caaugcaucuugaugucgc

SEQ ID NO: 2055472 - RNA, 19 nt, Artificial Sequence
  Description of Artificial Sequence: Synthetic oligonucleotide
auccugacgccacagccgc

SEQ ID NO: 2055473 - RNA, 19 nt, Artificial Sequence
  Description of Artificial Sequence: Synthetic oligonucleotide
uauuagauaugaggggcag

SEQ ID NO: 2055474 - RNA, 19 nt, Artificial Sequence
  Description of Artificial Sequence: Synthetic oligonucleotide
cacauggacgucuucacac

SEQ ID NO: 2055475 - RNA, 19 nt, Artificial Sequence
  Description of Artificial Sequence: Synthetic oligonucleotide
acacucauagagcauccag

SEQ ID NO: 2055476 - RNA, 19 nt, Artificial Sequence
  Description of Artificial Sequence: Synthetic oligonucleotide
caguucuuuaaaaucccag

SEQ ID NO: 2055477 - RNA, 19 nt, Artificial Sequence
  Description of Artificial Sequence: Synthetic oligonucleotide
acucgcugauacccgaggc

SEQ ID NO: 2055478 - RNA, 19 nt, Artificial Sequence
  Description of Artificial Sequence: Synthetic oligonucleotide
acccagaacaucuguuugg

SEQ ID NO: 2055479 - RNA, 19 nt, Artificial Sequence
  Description of Artificial Sequence: Synthetic oligonucleotide
ugcgucugcuggaaggagg

SEQ ID NO: 2055480 - RNA, 19 nt, Artificial Sequence
  Description of Artificial Sequence: Synthetic oligonucleotide
cagggagugcacauggacg

SEQ ID NO: 2055481 - RNA, 19 nt, Artificial Sequence
  Description of Artificial Sequence: Synthetic oligonucleotide
aaggcguagucagagauau

SEQ ID NO: 2055482 - RNA, 19 nt, Artificial Sequence
  Description of Artificial Sequence: Synthetic oligonucleotide
uagagcauccaguggucgg

SEQ ID NO: 2055483 - RNA, 19 nt, Artificial Sequence
  Description of Artificial Sequence: Synthetic oligonucleotide
aauauagccccgggcucgc

SEQ ID NO: 2055484 - RNA, 19 nt, Artificial Sequence
  Description of Artificial Sequence: Synthetic oligonucleotide
agagauccucaucuagcgg

SEQ ID NO: 2055485 - RNA, 19 nt, Artificial Sequence
  Description of Artificial Sequence: Synthetic oligonucleotide
gucccuuagauacugguca

SEQ ID NO: 2055486 - RNA, 19 nt, Artificial Sequence
  Description of Artificial Sequence: Synthetic oligonucleotide
agcggcucgagguugagca

SEQ ID NO: 2055487 - RNA, 19 nt, Artificial Sequence
  Description of Artificial Sequence: Synthetic oligonucleotide
ggcguagucagagauauag

SEQ ID NO: 2055488 - RNA, 19 nt, Artificial Sequence
  Description of Artificial Sequence: Synthetic oligonucleotide
uggguacccaguaaugccu

SEQ ID NO: 2055489 - RNA, 19 nt, Artificial Sequence
  Description of Artificial Sequence: Synthetic oligonucleotide
gauacccgaggcuucaauc

SEQ ID NO: 2055490 - RNA, 19 nt, Artificial Sequence
  Description of Artificial Sequence: Synthetic oligonucleotide
auaugaggggcaggcagcc

SEQ ID NO: 2055491 - RNA, 19 nt, Artificial Sequence
  Description of Artificial Sequence: Synthetic oligonucleotide
uacucgcugauacccgagg

SEQ ID NO: 2055492 - RNA, 19 nt, Artificial Sequence
  Description of Artificial Sequence: Synthetic oligonucleotide
augcacuagcccucgagag

SEQ ID NO: 2055493 - RNA, 19 nt, Artificial Sequence
  Description of Artificial Sequence: Synthetic oligonucleotide
ucucaauagguaccuccug

SEQ ID NO: 2055494 - RNA, 19 nt, Artificial Sequence
  Description of Artificial Sequence: Synthetic oligonucleotide
uacagcaccggcaccuuug

SEQ ID NO: 2055495 - RNA, 19 nt, Artificial Sequence
  Description of Artificial Sequence: Synthetic oligonucleotide
agccaguuaucuuugacua

SEQ ID NO: 2055496 - RNA, 19 nt, Artificial Sequence
  Description of Artificial Sequence: Synthetic oligonucleotide
ugcacuagcccucgagagc

SEQ ID NO: 2055497 - RNA, 19 nt, Artificial Sequence
  Description of Artificial Sequence: Synthetic oligonucleotide
cagagauauaggcagccac

SEQ ID NO: 2055498 - RNA, 19 nt, Artificial Sequence
  Description of Artificial Sequence: Synthetic oligonucleotide
agggagugcacauggacgu

SEQ ID NO: 2055499 - RNA, 19 nt, Artificial Sequence
  Description of Artificial Sequence: Synthetic oligonucleotide
uagcaguuucuuuauuaga

SEQ ID NO: 2055500 - RNA, 19 nt, Artificial Sequence
  Description of Artificial Sequence: Synthetic oligonucleotide
ggaaaacuggugcugcagg

SEQ ID NO: 2055501 - RNA, 19 nt, Artificial Sequence
  Description of Artificial Sequence: Synthetic oligonucleotide
cuuuauacuuggacuggug

SEQ ID NO: 2055502 - RNA, 19 nt, Artificial Sequence
  Description of Artificial Sequence: Synthetic oligonucleotide
uugaucucaauagguaccu

SEQ ID NO: 2055503 - RNA, 19 nt, Artificial Sequence
  Description of Artificial Sequence: Synthetic oligonucleotide
gacuacagcuuacucgcug

SEQ ID NO: 2055504 - RNA, 19 nt, Artificial Sequence
  Description of Artificial Sequence: Synthetic oligonucleotide
gauaugaggggcaggcagc

SEQ ID NO: 2055505 - RNA, 19 nt, Artificial Sequence
  Description of Artificial Sequence: Synthetic oligonucleotide
aucgcggucguugucgccc

SEQ ID NO: 2055506 - RNA, 19 nt, Artificial Sequence
  Description of Artificial Sequence: Synthetic oligonucleotide
agcgagaccaugaaguuca

SEQ ID NO: 2055507 - RNA, 19 nt, Artificial Sequence
  Description of Artificial Sequence: Synthetic oligonucleotide
ucgcguccgcuccacaugg

SEQ ID NO: 2055508 - RNA, 19 nt, Artificial Sequence
  Description of Artificial Sequence: Synthetic oligonucleotide
cuuagauacuggucaauga

SEQ ID NO: 2055509 - RNA, 19 nt, Artificial Sequence
  Description of Artificial Sequence: Synthetic oligonucleotide
acuacagcuuacucgcuga

SEQ ID NO: 2055510 - RNA, 19 nt, Artificial Sequence
  Description of Artificial Sequence: Synthetic oligonucleotide
gagugguccagcgagacca

SEQ ID NO: 2055511 - RNA, 19 nt, Artificial Sequence
  Description of Artificial Sequence: Synthetic oligonucleotide
caauauagccccgggcucg

SEQ ID NO: 2055512 - RNA, 19 nt, Artificial Sequence
  Description of Artificial Sequence: Synthetic oligonucleotide
auacuuggacugguggggc

SEQ ID NO: 2055513 - RNA, 19 nt, Artificial Sequence
  Description of Artificial Sequence: Synthetic oligonucleotide
agcaaugcuguacccagga

SEQ ID NO: 2055514 - RNA, 19 nt, Artificial Sequence
  Description of Artificial Sequence: Synthetic oligonucleotide
auagccccgggcucgcacc

SEQ ID NO: 2055515 - RNA, 19 nt, Artificial Sequence
  Description of Artificial Sequence: Synthetic oligonucleotide
uucaaucggaucacacccu

SEQ ID NO: 2055516 - RNA, 19 nt, Artificial Sequence
  Description of Artificial Sequence: Synthetic oligonucleotide
cauggaaaacuggugcugc

SEQ ID NO: 2055517 - RNA, 19 nt, Artificial Sequence
  Description of Artificial Sequence: Synthetic oligonucleotide
auuagauaugaggggcagg

SEQ ID NO: 2055518 - RNA, 19 nt, Artificial Sequence
  Description of Artificial Sequence: Synthetic oligonucleotide
guggguacccaguaaugcc

SEQ ID NO: 2055519 - RNA, 19 nt, Artificial Sequence
  Description of Artificial Sequence: Synthetic oligonucleotide
cguagucagagauauaggc

SEQ ID NO: 2055520 - RNA, 19 nt, Artificial Sequence
  Description of Artificial Sequence: Synthetic oligonucleotide
ucgguucagccccacucgg

SEQ ID NO: 2055521 - RNA, 19 nt, Artificial Sequence
  Description of Artificial Sequence: Synthetic oligonucleotide
ugugaccccugccucagga

SEQ ID NO: 2055522 - RNA, 19 nt, Artificial Sequence
  Description of Artificial Sequence: Synthetic oligonucleotide
ucaaucggaucacacccuc

SEQ ID NO: 2055523 - RNA, 19 nt, Artificial Sequence
  Description of Artificial Sequence: Synthetic oligonucleotide
cacucgguauuucuccugg

SEQ ID NO: 2055524 - RNA, 19 nt, Artificial Sequence
  Description of Artificial Sequence: Synthetic oligonucleotide
auccucaucuagcggcucg

SEQ ID NO: 2055525 - RNA, 19 nt, Artificial Sequence
  Description of Artificial Sequence: Synthetic oligonucleotide
cucgguauuucuccuggag

SEQ ID NO: 2055526 - RNA, 19 nt, Artificial Sequence
  Description of Artificial Sequence: Synthetic oligonucleotide
acuggcuccuguucgcguc

SEQ ID NO: 2055527 - RNA, 19 nt, Artificial Sequence
  Description of Artificial Sequence: Synthetic oligonucleotide
gcagcaauucgguucagcc

SEQ ID NO: 2055528 - RNA, 19 nt, Artificial Sequence
  Description of Artificial Sequence: Synthetic oligonucleotide
auagagcauccaguggucg

SEQ ID NO: 2055529 - RNA, 19 nt, Artificial Sequence
  Description of Artificial Sequence: Synthetic oligonucleotide
uuacucgcugauacccgag

SEQ ID NO: 2055530 - RNA, 19 nt, Artificial Sequence
  Description of Artificial Sequence: Synthetic oligonucleotide
ugguccagcgagaccauga

SEQ ID NO: 2055531 - RNA, 19 nt, Artificial Sequence
  Description of Artificial Sequence: Synthetic oligonucleotide
cuccggaagggucaucgcg

SEQ ID NO: 2055532 - RNA, 19 nt, Artificial Sequence
  Description of Artificial Sequence: Synthetic oligonucleotide
ugcggaggucuccggaagg

SEQ ID NO: 2055533 - RNA, 19 nt, Artificial Sequence
  Description of Artificial Sequence: Synthetic oligonucleotide
cacuuuauacuuggacugg

SEQ ID NO: 2055534 - RNA, 19 nt, Artificial Sequence
  Description of Artificial Sequence: Synthetic oligonucleotide
aguuucuuuauuagauaug

SEQ ID NO: 2055535 - RNA, 19 nt, Artificial Sequence
  Description of Artificial Sequence: Synthetic oligonucleotide
uccuguucgcguccgcucc

SEQ ID NO: 2055536 - RNA, 19 nt, Artificial Sequence
  Description of Artificial Sequence: Synthetic oligonucleotide
gucaucgcggucguugucg

SEQ ID NO: 2055537 - RNA, 19 nt, Artificial Sequence
  Description of Artificial Sequence: Synthetic oligonucleotide
uccccaauauagccccggg

SEQ ID NO: 2055538 - RNA, 19 nt, Artificial Sequence
  Description of Artificial Sequence: Synthetic oligonucleotide
gcuucaaucggaucacacc

SEQ ID NO: 2055539 - RNA, 19 nt, Artificial Sequence
  Description of Artificial Sequence: Synthetic oligonucleotide
gucuccggaagggucaucg

SEQ ID NO: 2055540 - RNA, 19 nt, Artificial Sequence
  Description of Artificial Sequence: Synthetic oligonucleotide
gggcauggaaaacuggugc

SEQ ID NO: 2055541 - RNA, 19 nt, Artificial Sequence
  Description of Artificial Sequence: Synthetic oligonucleotide
ugguggguacccaguaaug

SEQ ID NO: 2055542 - RNA, 19 nt, Artificial Sequence
  Description of Artificial Sequence: Synthetic oligonucleotide
uucaccagcuugaucucaa

SEQ ID NO: 2055543 - RNA, 19 nt, Artificial Sequence
  Description of Artificial Sequence: Synthetic oligonucleotide
uggggcauggaaccacaug

SEQ ID NO: 2055544 - RNA, 19 nt, Artificial Sequence
  Description of Artificial Sequence: Synthetic oligonucleotide
cuuugacuacagcuuacuc

SEQ ID NO: 2055545 - RNA, 19 nt, Artificial Sequence
  Description of Artificial Sequence: Synthetic oligonucleotide
caguuaucuuugacuacag

SEQ ID NO: 2055546 - RNA, 19 nt, Artificial Sequence
  Description of Artificial Sequence: Synthetic oligonucleotide
aauucgguucagccccacu

SEQ ID NO: 2055547 - RNA, 19 nt, Artificial Sequence
  Description of Artificial Sequence: Synthetic oligonucleotide
gagccaccagcccaggggc

SEQ ID NO: 2055548 - RNA, 19 nt, Artificial Sequence
  Description of Artificial Sequence: Synthetic oligonucleotide
uggucggcucggaaugggg

SEQ ID NO: 2055549 - RNA, 19 nt, Artificial Sequence
  Description of Artificial Sequence: Synthetic oligonucleotide
uuagggucccuuagauacu

SEQ ID NO: 2055550 - RNA, 19 nt, Artificial Sequence
  Description of Artificial Sequence: Synthetic oligonucleotide
cacaugguacagcaccggc

SEQ ID NO: 2055551 - RNA, 19 nt, Artificial Sequence
  Description of Artificial Sequence: Synthetic oligonucleotide
uucgcguccgcuccacaug

SEQ ID NO: 2055552 - RNA, 19 nt, Artificial Sequence
  Description of Artificial Sequence: Synthetic oligonucleotide
acagcaccggcaccuuugg

SEQ ID NO: 2055553 - RNA, 19 nt, Artificial Sequence
  Description of Artificial Sequence: Synthetic oligonucleotide
aucuuugacuacagcuuac

SEQ ID NO: 2055554 - RNA, 19 nt, Artificial Sequence
  Description of Artificial Sequence: Synthetic oligonucleotide
acauggacgucuucacaca

SEQ ID NO: 2055555 - RNA, 19 nt, Artificial Sequence
  Description of Artificial Sequence: Synthetic oligonucleotide
cuucacacacagacuuggc

SEQ ID NO: 2055556 - RNA, 19 nt, Artificial Sequence
  Description of Artificial Sequence: Synthetic oligonucleotide
cauagagcauccagugguc

SEQ ID NO: 2055557 - RNA, 19 nt, Artificial Sequence
  Description of Artificial Sequence: Synthetic oligonucleotide
uacccaguaaugccuuccu

SEQ ID NO: 2055558 - RNA, 19 nt, Artificial Sequence
  Description of Artificial Sequence: Synthetic oligonucleotide
agauauaggcagccacaca

SEQ ID NO: 2055559 - RNA, 19 nt, Artificial Sequence
  Description of Artificial Sequence: Synthetic oligonucleotide
agguuagggucccuuagau

SEQ ID NO: 2055560 - RNA, 19 nt, Artificial Sequence
  Description of Artificial Sequence: Synthetic oligonucleotide
cuggcagaugaagauggcc

SEQ ID NO: 2055561 - RNA, 19 nt, Artificial Sequence
  Description of Artificial Sequence: Synthetic oligonucleotide
ugaccagcacacugcggag

SEQ ID NO: 2055562 - RNA, 19 nt, Artificial Sequence
  Description of Artificial Sequence: Synthetic oligonucleotide
cagcugucugcugugaccc

SEQ ID NO: 2055563 - RNA, 19 nt, Artificial Sequence
  Description of Artificial Sequence: Synthetic oligonucleotide
gaacaucuguuuggguucc

SEQ ID NO: 2055564 - RNA, 19 nt, Artificial Sequence
  Description of Artificial Sequence: Synthetic oligonucleotide
ucuagcggcucgagguuga

SEQ ID NO: 2055565 - RNA, 19 nt, Artificial Sequence
  Description of Artificial Sequence: Synthetic oligonucleotide
uagggucccuuagauacug

SEQ ID NO: 2055566 - RNA, 19 nt, Artificial Sequence
  Description of Artificial Sequence: Synthetic oligonucleotide
ugaccccugccucaggaau

SEQ ID NO: 2055567 - RNA, 19 nt, Artificial Sequence
  Description of Artificial Sequence: Synthetic oligonucleotide
uggaaccacauggaguggu

SEQ ID NO: 2055568 - RNA, 19 nt, Artificial Sequence
  Description of Artificial Sequence: Synthetic oligonucleotide
guaaugccuuccucugaag

SEQ ID NO: 2055569 - RNA, 19 nt, Artificial Sequence
  Description of Artificial Sequence: Synthetic oligonucleotide
ggcauggaaccacauggag

SEQ ID NO: 2055570 - RNA, 19 nt, Artificial Sequence
  Description of Artificial Sequence: Synthetic oligonucleotide
gagguuagggucccuuaga

SEQ ID NO: 2055571 - RNA, 19 nt, Artificial Sequence
  Description of Artificial Sequence: Synthetic oligonucleotide
ugcccggacaaaguagcag

SEQ ID NO: 2055572 - RNA, 19 nt, Artificial Sequence
  Description of Artificial Sequence: Synthetic oligonucleotide
caaaguagcagugcaggga

SEQ ID NO: 2055573 - RNA, 19 nt, Artificial Sequence
  Description of Artificial Sequence: Synthetic oligonucleotide
uauagccccgggcucgcac

SEQ ID NO: 2055574 - RNA, 19 nt, Artificial Sequence
  Description of Artificial Sequence: Synthetic oligonucleotide
cuucacagaacgcacugaa

SEQ ID NO: 2055575 - RNA, 19 nt, Artificial Sequence
  Description of Artificial Sequence: Synthetic oligonucleotide
aauggggcauggaaccaca

SEQ ID NO: 2055576 - RNA, 19 nt, Artificial Sequence
  Description of Artificial Sequence: Synthetic oligonucleotide
ggagguuagggucccuuag

SEQ ID NO: 2055577 - RNA, 19 nt, Artificial Sequence
  Description of Artificial Sequence: Synthetic oligonucleotide
aacuggcuccuguucgcgu

SEQ ID NO: 2055578 - RNA, 19 nt, Artificial Sequence
  Description of Artificial Sequence: Synthetic oligonucleotide
uagcagugcagggagugca

SEQ ID NO: 2055579 - RNA, 19 nt, Artificial Sequence
  Description of Artificial Sequence: Synthetic oligonucleotide
cucgagguugagcacgcug

SEQ ID NO: 2055580 - RNA, 19 nt, Artificial Sequence
  Description of Artificial Sequence: Synthetic oligonucleotide
auggaaaacuggugcugca

SEQ ID NO: 2055581 - RNA, 19 nt, Artificial Sequence
  Description of Artificial Sequence: Synthetic oligonucleotide
ucgcccuccccaauauagc

SEQ ID NO: 2055582 - RNA, 19 nt, Artificial Sequence
  Description of Artificial Sequence: Synthetic oligonucleotide
caguggucggcucggaaug

SEQ ID NO: 2055583 - RNA, 19 nt, Artificial Sequence
  Description of Artificial Sequence: Synthetic oligonucleotide
cagugggcauggaaaacug

SEQ ID NO: 2055584 - RNA, 19 nt, Artificial Sequence
  Description of Artificial Sequence: Synthetic oligonucleotide
gaccagcacacugcggagg

SEQ ID NO: 2055585 - RNA, 19 nt, Artificial Sequence
  Description of Artificial Sequence: Synthetic oligonucleotide
guugucgcccugcgcaucc

SEQ ID NO: 2055586 - RNA, 19 nt, Artificial Sequence
  Description of Artificial Sequence: Synthetic oligonucleotide
aggaccccauccugacgcc

SEQ ID NO: 2055587 - RNA, 19 nt, Artificial Sequence
  Description of Artificial Sequence: Synthetic oligonucleotide
caguuucuuuauuagauau

SEQ ID NO: 2055588 - RNA, 19 nt, Artificial Sequence
  Description of Artificial Sequence: Synthetic oligonucleotide
gaauggggcauggaaccac

SEQ ID NO: 2055589 - RNA, 19 nt, Artificial Sequence
  Description of Artificial Sequence: Synthetic oligonucleotide
cuuacucgcugauacccga

SEQ ID NO: 2055590 - RNA, 19 nt, Artificial Sequence
  Description of Artificial Sequence: Synthetic oligonucleotide
cacacugcggaggucuccg

SEQ ID NO: 2055591 - RNA, 19 nt, Artificial Sequence
  Description of Artificial Sequence: Synthetic oligonucleotide
ugaggggcaggcagcccag

SEQ ID NO: 2055592 - RNA, 19 nt, Artificial Sequence
  Description of Artificial Sequence: Synthetic oligonucleotide
caugcacuagcccucgaga

SEQ ID NO: 2055593 - RNA, 19 nt, Artificial Sequence
  Description of Artificial Sequence: Synthetic oligonucleotide
ucaucgcggucguugucgc

SEQ ID NO: 2055594 - RNA, 19 nt, Artificial Sequence
  Description of Artificial Sequence: Synthetic oligonucleotide
ucccuuagauacuggucaa

SEQ ID NO: 2055595 - RNA, 19 nt, Artificial Sequence
  Description of Artificial Sequence: Synthetic oligonucleotide
gguggguacccaguaaugc

SEQ ID NO: 2055596 - RNA, 19 nt, Artificial Sequence
  Description of Artificial Sequence: Synthetic oligonucleotide
cagccuucacagaacgcac

SEQ ID NO: 2055597 - RNA, 19 nt, Artificial Sequence
  Description of Artificial Sequence: Synthetic oligonucleotide
agcugucugcugugacccc

SEQ ID NO: 2055598 - RNA, 19 nt, Artificial Sequence
  Description of Artificial Sequence: Synthetic oligonucleotide
guuuggguuccagugucug

SEQ ID NO: 2055599 - RNA, 19 nt, Artificial Sequence
  Description of Artificial Sequence: Synthetic oligonucleotide
accuccugggcagcaauuc

SEQ ID NO: 2055600 - RNA, 19 nt, Artificial Sequence
  Description of Artificial Sequence: Synthetic oligonucleotide
acaucuguuuggguuccag

SEQ ID NO: 2055601 - RNA, 19 nt, Artificial Sequence
  Description of Artificial Sequence: Synthetic oligonucleotide
gaggcuucaaucggaucac

SEQ ID NO: 2055602 - RNA, 19 nt, Artificial Sequence
  Description of Artificial Sequence: Synthetic oligonucleotide
uacuuggacugguggggca

SEQ ID NO: 2055603 - RNA, 19 nt, Artificial Sequence
  Description of Artificial Sequence: Synthetic oligonucleotide
cagcaaugcuguacccagg

SEQ ID NO: 2055604 - RNA, 19 nt, Artificial Sequence
  Description of Artificial Sequence: Synthetic oligonucleotide
uacccaggaaggcguaguc

SEQ ID NO: 2055605 - RNA, 19 nt, Artificial Sequence
  Description of Artificial Sequence: Synthetic oligonucleotide
accggcaccuuuggguccc

SEQ ID NO: 2055606 - RNA, 19 nt, Artificial Sequence
  Description of Artificial Sequence: Synthetic oligonucleotide
cucgagagccaccagccca

SEQ ID NO: 2055607 - RNA, 19 nt, Artificial Sequence
  Description of Artificial Sequence: Synthetic oligonucleotide
ucgcacccagaacaucugu

SEQ ID NO: 2055608 - RNA, 19 nt, Artificial Sequence
  Description of Artificial Sequence: Synthetic oligonucleotide
cagcuuacucgcugauacc

SEQ ID NO: 2055609 - RNA, 19 nt, Artificial Sequence
  Description of Artificial Sequence: Synthetic oligonucleotide
cucggaauggggcauggaa

SEQ ID NO: 2055610 - RNA, 19 nt, Artificial Sequence
  Description of Artificial Sequence: Synthetic oligonucleotide
uagauaugaggggcaggca

SEQ ID NO: 2055611 - RNA, 19 nt, Artificial Sequence
  Description of Artificial Sequence: Synthetic oligonucleotide
cucaggaauggcaguagaa

SEQ ID NO: 2055612 - RNA, 19 nt, Artificial Sequence
  Description of Artificial Sequence: Synthetic oligonucleotide
agugcagggagugcacaug

SEQ ID NO: 2055613 - RNA, 19 nt, Artificial Sequence
  Description of Artificial Sequence: Synthetic oligonucleotide
ugacuacagcuuacucgcu

SEQ ID NO: 2055614 - RNA, 19 nt, Artificial Sequence
  Description of Artificial Sequence: Synthetic oligonucleotide
gcacuagcccucgagagcc

SEQ ID NO: 2055615 - RNA, 19 nt, Artificial Sequence
  Description of Artificial Sequence: Synthetic oligonucleotide
agcauccaguggucggcuc

SEQ ID NO: 2055616 - RNA, 19 nt, Artificial Sequence
  Description of Artificial Sequence: Synthetic oligonucleotide
ucuccggaagggucaucgc

SEQ ID NO: 2055617 - RNA, 19 nt, Artificial Sequence
  Description of Artificial Sequence: Synthetic oligonucleotide
uucagccccacucgguauu

SEQ ID NO: 2055618 - RNA, 19 nt, Artificial Sequence
  Description of Artificial Sequence: Synthetic oligonucleotide
agcuugaucucaauaggua

SEQ ID NO: 2055619 - RNA, 19 nt, Artificial Sequence
  Description of Artificial Sequence: Synthetic oligonucleotide
acgccacagccgcccaugc

SEQ ID NO: 2055620 - RNA, 19 nt, Artificial Sequence
  Description of Artificial Sequence: Synthetic oligonucleotide
aguggucggcucggaaugg

SEQ ID NO: 2055621 - RNA, 19 nt, Artificial Sequence
  Description of Artificial Sequence: Synthetic oligonucleotide
gaugucgcccuccccaaua

SEQ ID NO: 2055622 - RNA, 19 nt, Artificial Sequence
  Description of Artificial Sequence: Synthetic oligonucleotide
cacucauagagcauccagu

SEQ ID NO: 2055623 - RNA, 19 nt, Artificial Sequence
  Description of Artificial Sequence: Synthetic oligonucleotide
ucgcugauacccgaggcuu

SEQ ID NO: 2055624 - RNA, 19 nt, Artificial Sequence
  Description of Artificial Sequence: Synthetic oligonucleotide
ggacaaaguagcagugcag

SEQ ID NO: 2055625 - RNA, 19 nt, Artificial Sequence
  Description of Artificial Sequence: Synthetic oligonucleotide
cggaauggggcauggaacc

SEQ ID NO: 2055626 - RNA, 19 nt, Artificial Sequence
  Description of Artificial Sequence: Synthetic oligonucleotide
ccuuagauacuggucaaug

SEQ ID NO: 2055627 - RNA, 19 nt, Artificial Sequence
  Description of Artificial Sequence: Synthetic oligonucleotide
gacugguggggcagcaaug

SEQ ID NO: 2055628 - RNA, 19 nt, Artificial Sequence
  Description of Artificial Sequence: Synthetic oligonucleotide
gugcacauggacgucuuca

SEQ ID NO: 2055629 - RNA, 19 nt, Artificial Sequence
  Description of Artificial Sequence: Synthetic oligonucleotide
caccuuuggguccccugcc

SEQ ID NO: 2055630 - RNA, 19 nt, Artificial Sequence
  Description of Artificial Sequence: Synthetic oligonucleotide
agcagugcagggagugcac

SEQ ID NO: 2055631 - RNA, 19 nt, Artificial Sequence
  Description of Artificial Sequence: Synthetic oligonucleotide
cucgcacccagaacaucug

SEQ ID NO: 2055632 - RNA, 19 nt, Artificial Sequence
  Description of Artificial Sequence: Synthetic oligonucleotide
cuagcccucgagagccacc

SEQ ID NO: 2055633 - RNA, 19 nt, Artificial Sequence
  Description of Artificial Sequence: Synthetic oligonucleotide
uggguucaccagcuugauc

SEQ ID NO: 2055634 - RNA, 19 nt, Artificial Sequence
  Description of Artificial Sequence: Synthetic oligonucleotide
cuccccaauauagccccgg

SEQ ID NO: 2055635 - RNA, 19 nt, Artificial Sequence
  Description of Artificial Sequence: Synthetic oligonucleotide
gccacagccgcccaugcac

SEQ ID NO: 2055636 - RNA, 19 nt, Artificial Sequence
  Description of Artificial Sequence: Synthetic oligonucleotide
aucuagcggcucgagguug

SEQ ID NO: 2055637 - RNA, 19 nt, Artificial Sequence
  Description of Artificial Sequence: Synthetic oligonucleotide
gcagggagugcacauggac

SEQ ID NO: 2055638 - RNA, 19 nt, Artificial Sequence
  Description of Artificial Sequence: Synthetic oligonucleotide
caugcugcacagccuucac

SEQ ID NO: 2055639 - RNA, 19 nt, Artificial Sequence
  Description of Artificial Sequence: Synthetic oligonucleotide
guccgcuccacaugguaca

SEQ ID NO: 2055640 - RNA, 19 nt, Artificial Sequence
  Description of Artificial Sequence: Synthetic oligonucleotide
gaccccugccucaggaaug

SEQ ID NO: 2055641 - RNA, 19 nt, Artificial Sequence
  Description of Artificial Sequence: Synthetic oligonucleotide
uccccugcccggacaaagu

SEQ ID NO: 2055642 - RNA, 19 nt, Artificial Sequence
  Description of Artificial Sequence: Synthetic oligonucleotide
ccagcugucugcugugacc

SEQ ID NO: 2055643 - RNA, 19 nt, Artificial Sequence
  Description of Artificial Sequence: Synthetic oligonucleotide
gcuggcucggggugggugg

SEQ ID NO: 2055644 - RNA, 19 nt, Artificial Sequence
  Description of Artificial Sequence: Synthetic oligonucleotide
agauccucaucuagcggcu

SEQ ID NO: 2055645 - RNA, 19 nt, Artificial Sequence
  Description of Artificial Sequence: Synthetic oligonucleotide
gcuuacucgcugauacccg

SEQ ID NO: 2055646 - RNA, 19 nt, Artificial Sequence
  Description of Artificial Sequence: Synthetic oligonucleotide
gucggcucggaauggggca

SEQ ID NO: 2055647 - RNA, 19 nt, Artificial Sequence
  Description of Artificial Sequence: Synthetic oligonucleotide
uccucaucuagcggcucga

SEQ ID NO: 2055648 - RNA, 19 nt, Artificial Sequence
  Description of Artificial Sequence: Synthetic oligonucleotide
gacgccacagccgcccaug

SEQ ID NO: 2055649 - RNA, 19 nt, Artificial Sequence
  Description of Artificial Sequence: Synthetic oligonucleotide
guagcagugcagggagugc

SEQ ID NO: 2055650 - RNA, 19 nt, Artificial Sequence
  Description of Artificial Sequence: Synthetic oligonucleotide
acacugcggaggucuccgg

SEQ ID NO: 2055651 - RNA, 19 nt, Artificial Sequence
  Description of Artificial Sequence: Synthetic oligonucleotide
ccaguuaucuuugacuaca

SEQ ID NO: 2055652 - RNA, 19 nt, Artificial Sequence
  Description of Artificial Sequence: Synthetic oligonucleotide
cagcuugaucucaauaggu

SEQ ID NO: 2055653 - RNA, 19 nt, Artificial Sequence
  Description of Artificial Sequence: Synthetic oligonucleotide
uacagcuuacucgcugaua

SEQ ID NO: 2055654 - RNA, 19 nt, Artificial Sequence
  Description of Artificial Sequence: Synthetic oligonucleotide
cgaggcuucaaucggauca

SEQ ID NO: 2055655 - RNA, 19 nt, Artificial Sequence
  Description of Artificial Sequence: Synthetic oligonucleotide
uguucgcguccgcuccaca

SEQ ID NO: 2055656 - RNA, 19 nt, Artificial Sequence
  Description of Artificial Sequence: Synthetic oligonucleotide
ccccacucgguauuucucc

SEQ ID NO: 2055657 - RNA, 19 nt, Artificial Sequence
  Description of Artificial Sequence: Synthetic oligonucleotide
aguucacuuuauacuugga

SEQ ID NO: 2055658 - RNA, 19 nt, Artificial Sequence
  Description of Artificial Sequence: Synthetic oligonucleotide
augucgcccuccccaauau

SEQ ID NO: 2055659 - RNA, 19 nt, Artificial Sequence
  Description of Artificial Sequence: Synthetic oligonucleotide
aaguagcagugcagggagu

SEQ ID NO: 2055660 - RNA, 19 nt, Artificial Sequence
  Description of Artificial Sequence: Synthetic oligonucleotide
guggucggcucggaauggg

SEQ ID NO: 2055661 - RNA, 19 nt, Artificial Sequence
  Description of Artificial Sequence: Synthetic oligonucleotide
ggcacaggucacagcaagg

SEQ ID NO: 2055662 - RNA, 19 nt, Artificial Sequence
  Description of Artificial Sequence: Synthetic oligonucleotide
guccccugcccggacaaag

SEQ ID NO: 2055663 - RNA, 19 nt, Artificial Sequence
  Description of Artificial Sequence: Synthetic oligonucleotide
cugaagagauccucaucua

SEQ ID NO: 2055664 - RNA, 19 nt, Artificial Sequence
  Description of Artificial Sequence: Synthetic oligonucleotide
gaaggcguagucagagaua

SEQ ID NO: 2055665 - RNA, 19 nt, Artificial Sequence
  Description of Artificial Sequence: Synthetic oligonucleotide
acccaggaaggcguaguca

SEQ ID NO: 2055666 - RNA, 19 nt, Artificial Sequence
  Description of Artificial Sequence: Synthetic oligonucleotide
cagcgagaccaugaaguuc

SEQ ID NO: 2055667 - RNA, 19 nt, Artificial Sequence
  Description of Artificial Sequence: Synthetic oligonucleotide
cagccgcccaugcacuagc

SEQ ID NO: 2055668 - RNA, 19 nt, Artificial Sequence
  Description of Artificial Sequence: Synthetic oligonucleotide
ggaaggcguagucagagau

SEQ ID NO: 2055669 - RNA, 19 nt, Artificial Sequence
  Description of Artificial Sequence: Synthetic oligonucleotide
ccaauauagccccgggcuc

SEQ ID NO: 2055670 - RNA, 19 nt, Artificial Sequence
  Description of Artificial Sequence: Synthetic oligonucleotide
auggacgucuucacacaca

SEQ ID NO: 2055671 - RNA, 19 nt, Artificial Sequence
  Description of Artificial Sequence: Synthetic oligonucleotide
uaccuccugggcagcaauu

SEQ ID NO: 2055672 - RNA, 19 nt, Artificial Sequence
  Description of Artificial Sequence: Synthetic oligonucleotide
gaccccauccugacgccac

SEQ ID NO: 2055673 - RNA, 19 nt, Artificial Sequence
  Description of Artificial Sequence: Synthetic oligonucleotide
ucguugucgcccugcgcau

SEQ ID NO: 2055674 - RNA, 19 nt, Artificial Sequence
  Description of Artificial Sequence: Synthetic oligonucleotide
gccaguuaucuuugacuac

SEQ ID NO: 2055675 - RNA, 19 nt, Artificial Sequence
  Description of Artificial Sequence: Synthetic oligonucleotide
gugguggguacccaguaau

SEQ ID NO: 2055676 - RNA, 19 nt, Artificial Sequence
  Description of Artificial Sequence: Synthetic oligonucleotide
caccggcaccuuugggucc

SEQ ID NO: 2055677 - RNA, 19 nt, Artificial Sequence
  Description of Artificial Sequence: Synthetic oligonucleotide
ccaugcacuagcccucgag

SEQ ID NO: 2055678 - RNA, 19 nt, Artificial Sequence
  Description of Artificial Sequence: Synthetic oligonucleotide
ggcuucaaucggaucacac

SEQ ID NO: 2055679 - RNA, 19 nt, Artificial Sequence
  Description of Artificial Sequence: Synthetic oligonucleotide
ugucgcccuccccaauaua

SEQ ID NO: 2055680 - RNA, 19 nt, Artificial Sequence
  Description of Artificial Sequence: Synthetic oligonucleotide
ggucacagcaaggacccca

SEQ ID NO: 2055681 - RNA, 19 nt, Artificial Sequence
  Description of Artificial Sequence: Synthetic oligonucleotide
uggcuccuguucgcguccg

SEQ ID NO: 2055682 - RNA, 19 nt, Artificial Sequence
  Description of Artificial Sequence: Synthetic oligonucleotide
aggucacagcaaggacccc

SEQ ID NO: 2055683 - RNA, 19 nt, Artificial Sequence
  Description of Artificial Sequence: Synthetic oligonucleotide
agccgcccaugcacuagcc

SEQ ID NO: 2055684 - RNA, 19 nt, Artificial Sequence
  Description of Artificial Sequence: Synthetic oligonucleotide
auaggcagccacacagcaa

SEQ ID NO: 2055685 - RNA, 19 nt, Artificial Sequence
  Description of Artificial Sequence: Synthetic oligonucleotide
uccugacgccacagccgcc

SEQ ID NO: 2055686 - RNA, 19 nt, Artificial Sequence
  Description of Artificial Sequence: Synthetic oligonucleotide
ggucccuuagauacugguc

SEQ ID NO: 2055687 - RNA, 19 nt, Artificial Sequence
  Description of Artificial Sequence: Synthetic oligonucleotide
caucgcggucguugucgcc

SEQ ID NO: 2055688 - RNA, 19 nt, Artificial Sequence
  Description of Artificial Sequence: Synthetic oligonucleotide
cccaauauagccccgggcu

SEQ ID NO: 2055689 - RNA, 19 nt, Artificial Sequence
  Description of Artificial Sequence: Synthetic oligonucleotide
ggucggcucggaauggggc

SEQ ID NO: 2055690 - RNA, 19 nt, Artificial Sequence
  Description of Artificial Sequence: Synthetic oligonucleotide
uagcggcucgagguugagc

SEQ ID NO: 2055691 - RNA, 19 nt, Artificial Sequence
  Description of Artificial Sequence: Synthetic oligonucleotide
gccaagccaguuaucuuug

SEQ ID NO: 2055692 - RNA, 19 nt, Artificial Sequence
  Description of Artificial Sequence: Synthetic oligonucleotide
cagcaccggcaccuuuggg

SEQ ID NO: 2055693 - RNA, 19 nt, Artificial Sequence
  Description of Artificial Sequence: Synthetic oligonucleotide
ggcaccuuuggguccccug

SEQ ID NO: 2055694 - RNA, 19 nt, Artificial Sequence
  Description of Artificial Sequence: Synthetic oligonucleotide
gguucagccccacucggua

SEQ ID NO: 2055695 - RNA, 19 nt, Artificial Sequence
  Description of Artificial Sequence: Synthetic oligonucleotide
gcgucugcuggaaggaggc

SEQ ID NO: 2055696 - RNA, 19 nt, Artificial Sequence
  Description of Artificial Sequence: Synthetic oligonucleotide
agggucccuuagauacugg

SEQ ID NO: 2055697 - RNA, 19 nt, Artificial Sequence
  Description of Artificial Sequence: Synthetic oligonucleotide
ccccaauauagccccgggc

SEQ ID NO: 2055698 - RNA, 19 nt, Artificial Sequence
  Description of Artificial Sequence: Synthetic oligonucleotide
gguuagggucccuuagaua

SEQ ID NO: 2055699 - RNA, 19 nt, Artificial Sequence
  Description of Artificial Sequence: Synthetic oligonucleotide
cccggacaaaguagcagug

SEQ ID NO: 2055700 - RNA, 19 nt, Artificial Sequence
  Description of Artificial Sequence: Synthetic oligonucleotide
agcuggcucggggugggug

SEQ ID NO: 2055701 - RNA, 19 nt, Artificial Sequence
  Description of Artificial Sequence: Synthetic oligonucleotide
cugcgucugcuggaaggag

SEQ ID NO: 2055702 - RNA, 19 nt, Artificial Sequence
  Description of Artificial Sequence: Synthetic oligonucleotide
caccagcuugaucucaaua

SEQ ID NO: 2055703 - RNA, 19 nt, Artificial Sequence
  Description of Artificial Sequence: Synthetic oligonucleotide
gcggaggucuccggaaggg

SEQ ID NO: 2055704 - RNA, 19 nt, Artificial Sequence
  Description of Artificial Sequence: Synthetic oligonucleotide
gcacauggacgucuucaca

SEQ ID NO: 2055705 - RNA, 19 nt, Artificial Sequence
  Description of Artificial Sequence: Synthetic oligonucleotide
ucgcggucguugucgcccu

SEQ ID NO: 2055706 - RNA, 19 nt, Artificial Sequence
  Description of Artificial Sequence: Synthetic oligonucleotide
ggccaagccaguuaucuuu

SEQ ID NO: 2055707 - RNA, 19 nt, Artificial Sequence
  Description of Artificial Sequence: Synthetic oligonucleotide
ccggacaaaguagcagugc

SEQ ID NO: 2055708 - RNA, 19 nt, Artificial Sequence
  Description of Artificial Sequence: Synthetic oligonucleotide
cuggcucgggguggguggg

SEQ ID NO: 2055709 - RNA, 19 nt, Artificial Sequence
  Description of Artificial Sequence: Synthetic oligonucleotide
ccugacgccacagccgccc

SEQ ID NO: 2055710 - RNA, 19 nt, Artificial Sequence
  Description of Artificial Sequence: Synthetic oligonucleotide
aggcuucaaucggaucaca

SEQ ID NO: 2055711 - RNA, 19 nt, Artificial Sequence
  Description of Artificial Sequence: Synthetic oligonucleotide
agcccucgagagccaccag

SEQ ID NO: 2055712 - RNA, 19 nt, Artificial Sequence
  Description of Artificial Sequence: Synthetic oligonucleotide
ccacaugguacagcaccgg

SEQ ID NO: 2055713 - RNA, 19 nt, Artificial Sequence
  Description of Artificial Sequence: Synthetic oligonucleotide
cugcccggacaaaguagca

SEQ ID NO: 2055714 - RNA, 19 nt, Artificial Sequence
  Description of Artificial Sequence: Synthetic oligonucleotide
gguccagcgagaccaugaa

SEQ ID NO: 2055715 - RNA, 19 nt, Artificial Sequence
  Description of Artificial Sequence: Synthetic oligonucleotide
ggugguggguacccaguaa

SEQ ID NO: 2055716 - RNA, 19 nt, Artificial Sequence
  Description of Artificial Sequence: Synthetic oligonucleotide
cacacucauagagcaucca

SEQ ID NO: 2055717 - RNA, 19 nt, Artificial Sequence
  Description of Artificial Sequence: Synthetic oligonucleotide
caauucgguucagccccac

SEQ ID NO: 2055718 - RNA, 19 nt, Artificial Sequence
  Description of Artificial Sequence: Synthetic oligonucleotide
gcccggacaaaguagcagu

SEQ ID NO: 2055719 - RNA, 19 nt, Artificial Sequence
  Description of Artificial Sequence: Synthetic oligonucleotide
uggacugguggggcagcaa

SEQ ID NO: 2055720 - RNA, 19 nt, Artificial Sequence
  Description of Artificial Sequence: Synthetic oligonucleotide
guucgcguccgcuccacau

SEQ ID NO: 2055721 - RNA, 19 nt, Artificial Sequence
  Description of Artificial Sequence: Synthetic oligonucleotide
cuagcggcucgagguugag

SEQ ID NO: 2055722 - RNA, 19 nt, Artificial Sequence
  Description of Artificial Sequence: Synthetic oligonucleotide
ccacucgguauuucuccug

SEQ ID NO: 2055723 - RNA, 19 nt, Artificial Sequence
  Description of Artificial Sequence: Synthetic oligonucleotide
cguccgcuccacaugguac

SEQ ID NO: 2055724 - RNA, 19 nt, Artificial Sequence
  Description of Artificial Sequence: Synthetic oligonucleotide
cucgggguggguggguuca

SEQ ID NO: 2055725 - RNA, 19 nt, Artificial Sequence
  Description of Artificial Sequence: Synthetic oligonucleotide
uugucgcccugcgcauccc

SEQ ID NO: 2055726 - RNA, 19 nt, Artificial Sequence
  Description of Artificial Sequence: Synthetic oligonucleotide
gggucccuuagauacuggu

SEQ ID NO: 2055727 - RNA, 19 nt, Artificial Sequence
  Description of Artificial Sequence: Synthetic oligonucleotide
ggcucgagguugagcacgc

SEQ ID NO: 2055728 - RNA, 19 nt, Artificial Sequence
  Description of Artificial Sequence: Synthetic oligonucleotide
cuguucgcguccgcuccac

SEQ ID NO: 2055729 - RNA, 19 nt, Artificial Sequence
  Description of Artificial Sequence: Synthetic oligonucleotide
cccauccugacgccacagc

SEQ ID NO: 2055730 - RNA, 19 nt, Artificial Sequence
  Description of Artificial Sequence: Synthetic oligonucleotide
gccgcccaugcacuagccc

SEQ ID NO: 2055731 - RNA, 19 nt, Artificial Sequence
  Description of Artificial Sequence: Synthetic oligonucleotide
gcugcgucugcuggaagga

SEQ ID NO: 2055732 - RNA, 19 nt, Artificial Sequence
  Description of Artificial Sequence: Synthetic oligonucleotide
guucagccccacucgguau

SEQ ID NO: 2055733 - RNA, 19 nt, Artificial Sequence
  Description of Artificial Sequence: Synthetic oligonucleotide
guaccuccugggcagcaau

SEQ ID NO: 2055734 - RNA, 19 nt, Artificial Sequence
  Description of Artificial Sequence: Synthetic oligonucleotide
gcccaugcacuagcccucg

SEQ ID NO: 2055735 - RNA, 19 nt, Artificial Sequence
  Description of Artificial Sequence: Synthetic oligonucleotide
gcaaugcuguacccaggaa

SEQ ID NO: 2055736 - RNA, 19 nt, Artificial Sequence
  Description of Artificial Sequence: Synthetic oligonucleotide
guggguggguucaccagcu

SEQ ID NO: 2055737 - RNA, 19 nt, Artificial Sequence
  Description of Artificial Sequence: Synthetic oligonucleotide
aggcagccacacagcaaug

SEQ ID NO: 2055738 - RNA, 19 nt, Artificial Sequence
  Description of Artificial Sequence: Synthetic oligonucleotide
gggccucaugguccagcag

SEQ ID NO: 2055739 - RNA, 19 nt, Artificial Sequence
  Description of Artificial Sequence: Synthetic oligonucleotide
ggagugcacauggacgucu

SEQ ID NO: 2055740 - RNA, 19 nt, Artificial Sequence
  Description of Artificial Sequence: Synthetic oligonucleotide
cggcucgagguugagcacg

SEQ ID NO: 2055741 - RNA, 19 nt, Artificial Sequence
  Description of Artificial Sequence: Synthetic oligonucleotide
auauagccccgggcucgca

SEQ ID NO: 2055742 - RNA, 19 nt, Artificial Sequence
  Description of Artificial Sequence: Synthetic oligonucleotide
ggacugguggggcagcaau

SEQ ID NO: 2055743 - RNA, 19 nt, Artificial Sequence
  Description of Artificial Sequence: Synthetic oligonucleotide
ccuccccaauauagccccg

SEQ ID NO: 2055744 - RNA, 19 nt, Artificial Sequence
  Description of Artificial Sequence: Synthetic oligonucleotide
ggucaucgcggucguuguc

SEQ ID NO: 2055745 - RNA, 19 nt, Artificial Sequence
  Description of Artificial Sequence: Synthetic oligonucleotide
cuguacccaggaaggcgua

SEQ ID NO: 2055746 - RNA, 19 nt, Artificial Sequence
  Description of Artificial Sequence: Synthetic oligonucleotide
auggggcauggaaccacau

SEQ ID NO: 2055747 - RNA, 19 nt, Artificial Sequence
  Description of Artificial Sequence: Synthetic oligonucleotide
gggcucucacacucauaga

SEQ ID NO: 2055748 - RNA, 19 nt, Artificial Sequence
  Description of Artificial Sequence: Synthetic oligonucleotide
gucacagcaaggaccccau

SEQ ID NO: 2055749 - RNA, 19 nt, Artificial Sequence
  Description of Artificial Sequence: Synthetic oligonucleotide
cuacagcuuacucgcugau

SEQ ID NO: 2055750 - RNA, 19 nt, Artificial Sequence
  Description of Artificial Sequence: Synthetic oligonucleotide
cacuagcccucgagagcca

SEQ ID NO: 2055751 - RNA, 19 nt, Artificial Sequence
  Description of Artificial Sequence: Synthetic oligonucleotide
gggugguggguacccagua

SEQ ID NO: 2055752 - RNA, 19 nt, Artificial Sequence
  Description of Artificial Sequence: Synthetic oligonucleotide
caucuagcggcucgagguu

SEQ ID NO: 2055753 - RNA, 19 nt, Artificial Sequence
  Description of Artificial Sequence: Synthetic oligonucleotide
cacccuccugggcacaggu

SEQ ID NO: 2055754 - RNA, 19 nt, Artificial Sequence
  Description of Artificial Sequence: Synthetic oligonucleotide
auccaguggucggcucgga

SEQ ID NO: 2055755 - RNA, 19 nt, Artificial Sequence
  Description of Artificial Sequence: Synthetic oligonucleotide
cugccucaggaauggcagu

SEQ ID NO: 2055756 - RNA, 19 nt, Artificial Sequence
  Description of Artificial Sequence: Synthetic oligonucleotide
cugacgccacagccgccca

SEQ ID NO: 2055757 - RNA, 19 nt, Artificial Sequence
  Description of Artificial Sequence: Synthetic oligonucleotide
ccgaggcuucaaucggauc

SEQ ID NO: 2055758 - RNA, 19 nt, Artificial Sequence
  Description of Artificial Sequence: Synthetic oligonucleotide
aagggucaucgcggucguu

SEQ ID NO: 2055759 - RNA, 19 nt, Artificial Sequence
  Description of Artificial Sequence: Synthetic oligonucleotide
cacagccgcccaugcacua

SEQ ID NO: 2055760 - RNA, 19 nt, Artificial Sequence
  Description of Artificial Sequence: Synthetic oligonucleotide
gcggucguugucgcccugc

SEQ ID NO: 2055761 - RNA, 19 nt, Artificial Sequence
  Description of Artificial Sequence: Synthetic oligonucleotide
ccaugcugcacagccuuca

SEQ ID NO: 2055762 - RNA, 19 nt, Artificial Sequence
  Description of Artificial Sequence: Synthetic oligonucleotide
gggcugcgucugcuggaag

SEQ ID NO: 2055763 - RNA, 19 nt, Artificial Sequence
  Description of Artificial Sequence: Synthetic oligonucleotide
ccgcccaugcacuagcccu

SEQ ID NO: 2055764 - RNA, 19 nt, Artificial Sequence
  Description of Artificial Sequence: Synthetic oligonucleotide
cggucguugucgcccugcg

SEQ ID NO: 2055765 - RNA, 19 nt, Artificial Sequence
  Description of Artificial Sequence: Synthetic oligonucleotide
gggagugcacauggacguc

SEQ ID NO: 2055766 - RNA, 19 nt, Artificial Sequence
  Description of Artificial Sequence: Synthetic oligonucleotide
gccccacucgguauuucuc

SEQ ID NO: 2055767 - RNA, 19 nt, Artificial Sequence
  Description of Artificial Sequence: Synthetic oligonucleotide
ggcuccuguucgcguccgc

SEQ ID NO: 2055768 - RNA, 19 nt, Artificial Sequence
  Description of Artificial Sequence: Synthetic oligonucleotide
ccaguggucggcucggaau

SEQ ID NO: 2055769 - RNA, 19 nt, Artificial Sequence
  Description of Artificial Sequence: Synthetic oligonucleotide
gcguccgcuccacauggua

SEQ ID NO: 2055770 - RNA, 19 nt, Artificial Sequence
  Description of Artificial Sequence: Synthetic oligonucleotide
ggaccccauccugacgcca

SEQ ID NO: 2055771 - RNA, 19 nt, Artificial Sequence
  Description of Artificial Sequence: Synthetic oligonucleotide
guacagcaccggcaccuuu

SEQ ID NO: 2055772 - RNA, 19 nt, Artificial Sequence
  Description of Artificial Sequence: Synthetic oligonucleotide
ggacgucuucacacacaga

SEQ ID NO: 2055773 - RNA, 19 nt, Artificial Sequence
  Description of Artificial Sequence: Synthetic oligonucleotide
aggggcucucacacucaua

SEQ ID NO: 2055774 - RNA, 19 nt, Artificial Sequence
  Description of Artificial Sequence: Synthetic oligonucleotide
ccccauccugacgccacag

SEQ ID NO: 2055775 - RNA, 19 nt, Artificial Sequence
  Description of Artificial Sequence: Synthetic oligonucleotide
aggcguagucagagauaua

SEQ ID NO: 2055776 - RNA, 19 nt, Artificial Sequence
  Description of Artificial Sequence: Synthetic oligonucleotide
ccagcgagaccaugaaguu

SEQ ID NO: 2055777 - RNA, 19 nt, Artificial Sequence
  Description of Artificial Sequence: Synthetic oligonucleotide
gccaugcugcacagccuuc

SEQ ID NO: 2055778 - RNA, 19 nt, Artificial Sequence
  Description of Artificial Sequence: Synthetic oligonucleotide
gcgagaccaugaaguucac

SEQ ID NO: 2055779 - RNA, 19 nt, Artificial Sequence
  Description of Artificial Sequence: Synthetic oligonucleotide
ccaguguuagcaguuucuu

SEQ ID NO: 2055780 - RNA, 19 nt, Artificial Sequence
  Description of Artificial Sequence: Synthetic oligonucleotide
gcucggaauggggcaugga

SEQ ID NO: 2055781 - RNA, 19 nt, Artificial Sequence
  Description of Artificial Sequence: Synthetic oligonucleotide
ggguacccaguaaugccuu

SEQ ID NO: 2055782 - RNA, 19 nt, Artificial Sequence
  Description of Artificial Sequence: Synthetic oligonucleotide
ccggaagggucaucgcggu

SEQ ID NO: 2055783 - RNA, 19 nt, Artificial Sequence
  Description of Artificial Sequence: Synthetic oligonucleotide
ccacagccgcccaugcacu

SEQ ID NO: 2055784 - RNA, 19 nt, Artificial Sequence
  Description of Artificial Sequence: Synthetic oligonucleotide
gcccagcugucugcuguga

SEQ ID NO: 2055785 - RNA, 19 nt, Artificial Sequence
  Description of Artificial Sequence: Synthetic oligonucleotide
cccgaggcuucaaucggau

SEQ ID NO: 2055786 - RNA, 19 nt, Artificial Sequence
  Description of Artificial Sequence: Synthetic oligonucleotide
cguugucgcccugcgcauc

SEQ ID NO: 2055787 - RNA, 19 nt, Artificial Sequence
  Description of Artificial Sequence: Synthetic oligonucleotide
caccagggccuggcccaca

SEQ ID NO: 2055788 - RNA, 19 nt, Artificial Sequence
  Description of Artificial Sequence: Synthetic oligonucleotide
gggcucgcacccagaacau

SEQ ID NO: 2055789 - RNA, 19 nt, Artificial Sequence
  Description of Artificial Sequence: Synthetic oligonucleotide
cccuuagauacuggucaau

SEQ ID NO: 2055790 - RNA, 19 nt, Artificial Sequence
  Description of Artificial Sequence: Synthetic oligonucleotide
cccaugcacuagcccucga

SEQ ID NO: 2055791 - RNA, 19 nt, Artificial Sequence
  Description of Artificial Sequence: Synthetic oligonucleotide
gguccccugcccggacaaa

SEQ ID NO: 2055792 - RNA, 19 nt, Artificial Sequence
  Description of Artificial Sequence: Synthetic oligonucleotide
cgguucagccccacucggu

SEQ ID NO: 2055793 - RNA, 19 nt, Artificial Sequence
  Description of Artificial Sequence: Synthetic oligonucleotide
ccggcaccuuugggucccc

SEQ ID NO: 2055794 - RNA, 19 nt, Artificial Sequence
  Description of Artificial Sequence: Synthetic oligonucleotide
gcucgagguugagcacgcu

SEQ ID NO: 2055795 - RNA, 19 nt, Artificial Sequence
  Description of Artificial Sequence: Synthetic oligonucleotide
cgcggucguugucgcccug

SEQ ID NO: 2055796 - RNA, 19 nt, Artificial Sequence
  Description of Artificial Sequence: Synthetic oligonucleotide
cgcguccgcuccacauggu

SEQ ID NO: 2055797 - RNA, 19 nt, Artificial Sequence
  Description of Artificial Sequence: Synthetic oligonucleotide
cggcaccuuuggguccccu

SEQ ID NO: 2055798 - RNA, 19 nt, Artificial Sequence
  Description of Artificial Sequence: Synthetic oligonucleotide
aauaggauaugccaaaugc

SEQ ID NO: 2055799 - RNA, 19 nt, Artificial Sequence
  Description of Artificial Sequence: Synthetic oligonucleotide
accuaguacaaacaggacc

SEQ ID NO: 2055800 - RNA, 19 nt, Artificial Sequence
  Description of Artificial Sequence: Synthetic oligonucleotide
aaggcaaagaggcaggguc

SEQ ID NO: 2055801 - RNA, 19 nt, Artificial Sequence
  Description of Artificial Sequence: Synthetic oligonucleotide
ugcacaaccagccaauagg

SEQ ID NO: 2055802 - RNA, 19 nt, Artificial Sequence
  Description of Artificial Sequence: Synthetic oligonucleotide
aaugcuauggguguaguag

SEQ ID NO: 2055803 - RNA, 19 nt, Artificial Sequence
  Description of Artificial Sequence: Synthetic oligonucleotide
uauaccuaguacaaacagg

SEQ ID NO: 2055804 - RNA, 19 nt, Artificial Sequence
  Description of Artificial Sequence: Synthetic oligonucleotide
uauucagauggaaaccugg

SEQ ID NO: 2055805 - RNA, 19 nt, Artificial Sequence
  Description of Artificial Sequence: Synthetic oligonucleotide
aaagauuuugggguggagg

SEQ ID NO: 2055806 - RNA, 19 nt, Artificial Sequence
  Description of Artificial Sequence: Synthetic oligonucleotide
aaagucgcaguacugaagu

SEQ ID NO: 2055807 - RNA, 19 nt, Artificial Sequence
  Description of Artificial Sequence: Synthetic oligonucleotide
ugaagugugucauagcuga

SEQ ID NO: 2055808 - RNA, 19 nt, Artificial Sequence
  Description of Artificial Sequence: Synthetic oligonucleotide
aaguguagauggcaaugcc

SEQ ID NO: 2055809 - RNA, 19 nt, Artificial Sequence
  Description of Artificial Sequence: Synthetic oligonucleotide
uaucagguguccuugagcc

SEQ ID NO: 2055810 - RNA, 19 nt, Artificial Sequence
  Description of Artificial Sequence: Synthetic oligonucleotide
uucaggauugucuucagac

SEQ ID NO: 2055811 - RNA, 19 nt, Artificial Sequence
  Description of Artificial Sequence: Synthetic oligonucleotide
aacucaucccgaucauucc

SEQ ID NO: 2055812 - RNA, 19 nt, Artificial Sequence
  Description of Artificial Sequence: Synthetic oligonucleotide
uaguaauuuucacugguca

SEQ ID NO: 2055813 - RNA, 19 nt, Artificial Sequence
  Description of Artificial Sequence: Synthetic oligonucleotide
aaucuuugaaacagggcac

SEQ ID NO: 2055814 - RNA, 19 nt, Artificial Sequence
  Description of Artificial Sequence: Synthetic oligonucleotide
cugaguguaagcagaagcg

SEQ ID NO: 2055815 - RNA, 19 nt, Artificial Sequence
  Description of Artificial Sequence: Synthetic oligonucleotide
aauagccgugucuacguag

SEQ ID NO: 2055816 - RNA, 19 nt, Artificial Sequence
  Description of Artificial Sequence: Synthetic oligonucleotide
uuugaaacagggcaccaga

SEQ ID NO: 2055817 - RNA, 19 nt, Artificial Sequence
  Description of Artificial Sequence: Synthetic oligonucleotide
cuacagaggacauuggcag

SEQ ID NO: 2055818 - RNA, 19 nt, Artificial Sequence
  Description of Artificial Sequence: Synthetic oligonucleotide
ucaucagaguaucaggugu

SEQ ID NO: 2055819 - RNA, 19 nt, Artificial Sequence
  Description of Artificial Sequence: Synthetic oligonucleotide
ucaggauugucuucagacg

SEQ ID NO: 2055820 - RNA, 19 nt, Artificial Sequence
  Description of Artificial Sequence: Synthetic oligonucleotide
gaacaugguauaaaaguag

SEQ ID NO: 2055821 - RNA, 19 nt, Artificial Sequence
  Description of Artificial Sequence: Synthetic oligonucleotide
gguauaaaaguagacagag

SEQ ID NO: 2055822 - RNA, 19 nt, Artificial Sequence
  Description of Artificial Sequence: Synthetic oligonucleotide
gaggccaugaucacaaagg

SEQ ID NO: 2055823 - RNA, 19 nt, Artificial Sequence
  Description of Artificial Sequence: Synthetic oligonucleotide
auaggcaccucucuuguuc

SEQ ID NO: 2055824 - RNA, 19 nt, Artificial Sequence
  Description of Artificial Sequence: Synthetic oligonucleotide
agaucugguagugacaggg

SEQ ID NO: 2055825 - RNA, 19 nt, Artificial Sequence
  Description of Artificial Sequence: Synthetic oligonucleotide
gguacauccacauggaggc

SEQ ID NO: 2055826 - RNA, 19 nt, Artificial Sequence
  Description of Artificial Sequence: Synthetic oligonucleotide
guauaccuaguacaaacag

SEQ ID NO: 2055827 - RNA, 19 nt, Artificial Sequence
  Description of Artificial Sequence: Synthetic oligonucleotide
aggaacggugcacugacac

SEQ ID NO: 2055828 - RNA, 19 nt, Artificial Sequence
  Description of Artificial Sequence: Synthetic oligonucleotide
augcaaagaauggucaccc

SEQ ID NO: 2055829 - RNA, 19 nt, Artificial Sequence
  Description of Artificial Sequence: Synthetic oligonucleotide
agaagaacaugguauaaaa

SEQ ID NO: 2055830 - RNA, 19 nt, Artificial Sequence
  Description of Artificial Sequence: Synthetic oligonucleotide
caggauugucuucagacgg

SEQ ID NO: 2055831 - RNA, 19 nt, Artificial Sequence
  Description of Artificial Sequence: Synthetic oligonucleotide
caguauaccuaguacaaac

SEQ ID NO: 2055832 - RNA, 19 nt, Artificial Sequence
  Description of Artificial Sequence: Synthetic oligonucleotide
agaaagaagccaaggagcg

SEQ ID NO: 2055833 - RNA, 19 nt, Artificial Sequence
  Description of Artificial Sequence: Synthetic oligonucleotide
auuuucacuggucaucaug

SEQ ID NO: 2055834 - RNA, 19 nt, Artificial Sequence
  Description of Artificial Sequence: Synthetic oligonucleotide
guagacagaggccucaacc

SEQ ID NO: 2055835 - RNA, 19 nt, Artificial Sequence
  Description of Artificial Sequence: Synthetic oligonucleotide
ugguauaaaaguagacaga

SEQ ID NO: 2055836 - RNA, 19 nt, Artificial Sequence
  Description of Artificial Sequence: Synthetic oligonucleotide
auggccaugaccaguauac

SEQ ID NO: 2055837 - RNA, 19 nt, Artificial Sequence
  Description of Artificial Sequence: Synthetic oligonucleotide
aagugugucauagcugagg

SEQ ID NO: 2055838 - RNA, 19 nt, Artificial Sequence
  Description of Artificial Sequence: Synthetic oligonucleotide
uggcaaugccuacagaggc

SEQ ID NO: 2055839 - RNA, 19 nt, Artificial Sequence
  Description of Artificial Sequence: Synthetic oligonucleotide
auaccuaguacaaacagga

SEQ ID NO: 2055840 - RNA, 19 nt, Artificial Sequence
  Description of Artificial Sequence: Synthetic oligonucleotide
gugucuacguagcaggagg

SEQ ID NO: 2055841 - RNA, 19 nt, Artificial Sequence
  Description of Artificial Sequence: Synthetic oligonucleotide
cagcgguacauccacaugg

SEQ ID NO: 2055842 - RNA, 19 nt, Artificial Sequence
  Description of Artificial Sequence: Synthetic oligonucleotide
uaauuuucacuggucauca

SEQ ID NO: 2055843 - RNA, 19 nt, Artificial Sequence
  Description of Artificial Sequence: Synthetic oligonucleotide
ggauguagaagacccagcg

SEQ ID NO: 2055844 - RNA, 19 nt, Artificial Sequence
  Description of Artificial Sequence: Synthetic oligonucleotide
uaguaguaauuuucacugg

SEQ ID NO: 2055845 - RNA, 19 nt, Artificial Sequence
  Description of Artificial Sequence: Synthetic oligonucleotide
ucuuguucccauccuagcu

SEQ ID NO: 2055846 - RNA, 19 nt, Artificial Sequence
  Description of Artificial Sequence: Synthetic oligonucleotide
aucuuugaaacagggcacc

SEQ ID NO: 2055847 - RNA, 19 nt, Artificial Sequence
  Description of Artificial Sequence: Synthetic oligonucleotide
acaaauagccgugucuacg

SEQ ID NO: 2055848 - RNA, 19 nt, Artificial Sequence
  Description of Artificial Sequence: Synthetic oligonucleotide
uagacagaggccucaacca

SEQ ID NO: 2055849 - RNA, 19 nt, Artificial Sequence
  Description of Artificial Sequence: Synthetic oligonucleotide
aucaaguuccagaugcccc

SEQ ID NO: 2055850 - RNA, 19 nt, Artificial Sequence
  Description of Artificial Sequence: Synthetic oligonucleotide
uuggggauagauaggcacc

SEQ ID NO: 2055851 - RNA, 19 nt, Artificial Sequence
  Description of Artificial Sequence: Synthetic oligonucleotide
gaacggugcacugacacag

SEQ ID NO: 2055852 - RNA, 19 nt, Artificial Sequence
  Description of Artificial Sequence: Synthetic oligonucleotide
acaaucuuugaaacagggc

SEQ ID NO: 2055853 - RNA, 19 nt, Artificial Sequence
  Description of Artificial Sequence: Synthetic oligonucleotide
gguaggauagcacugucgc

SEQ ID NO: 2055854 - RNA, 19 nt, Artificial Sequence
  Description of Artificial Sequence: Synthetic oligonucleotide
ggaggcacuggccauaugg

SEQ ID NO: 2055855 - RNA, 19 nt, Artificial Sequence
  Description of Artificial Sequence: Synthetic oligonucleotide
auagcacugucgccggugc

SEQ ID NO: 2055856 - RNA, 19 nt, Artificial Sequence
  Description of Artificial Sequence: Synthetic oligonucleotide
gaaguguagauggcaaugc

SEQ ID NO: 2055857 - RNA, 19 nt, Artificial Sequence
  Description of Artificial Sequence: Synthetic oligonucleotide
gaaggaacggugcacugac

SEQ ID NO: 2055858 - RNA, 19 nt, Artificial Sequence
  Description of Artificial Sequence: Synthetic oligonucleotide
gauggaaaccugguugggg

SEQ ID NO: 2055859 - RNA, 19 nt, Artificial Sequence
  Description of Artificial Sequence: Synthetic oligonucleotide
gcagccugcauacaaauag

SEQ ID NO: 2055860 - RNA, 19 nt, Artificial Sequence
  Description of Artificial Sequence: Synthetic oligonucleotide
aguaauuuucacuggucau

SEQ ID NO: 2055861 - RNA, 19 nt, Artificial Sequence
  Description of Artificial Sequence: Synthetic oligonucleotide
uucccauccuagcugaaga

SEQ ID NO: 2055862 - RNA, 19 nt, Artificial Sequence
  Description of Artificial Sequence: Synthetic oligonucleotide
ucaaguuccagaugccccu

SEQ ID NO: 2055863 - RNA, 19 nt, Artificial Sequence
  Description of Artificial Sequence: Synthetic oligonucleotide
ugaguguaagcagaagcgc

SEQ ID NO: 2055864 - RNA, 19 nt, Artificial Sequence
  Description of Artificial Sequence: Synthetic oligonucleotide
ugcaagcaagcccaggacu

SEQ ID NO: 2055865 - RNA, 19 nt, Artificial Sequence
  Description of Artificial Sequence: Synthetic oligonucleotide
ccugguuggggauagauag

SEQ ID NO: 2055866 - RNA, 19 nt, Artificial Sequence
  Description of Artificial Sequence: Synthetic oligonucleotide
uguagaagacccagcgcug

SEQ ID NO: 2055867 - RNA, 19 nt, Artificial Sequence
  Description of Artificial Sequence: Synthetic oligonucleotide
acaugguauaaaaguagac

SEQ ID NO: 2055868 - RNA, 19 nt, Artificial Sequence
  Description of Artificial Sequence: Synthetic oligonucleotide
caacucaucccgaucauuc

SEQ ID NO: 2055869 - RNA, 19 nt, Artificial Sequence
  Description of Artificial Sequence: Synthetic oligonucleotide
gaggacauuggcaggagcc

SEQ ID NO: 2055870 - RNA, 19 nt, Artificial Sequence
  Description of Artificial Sequence: Synthetic oligonucleotide
gagccacaaagauuuuggg

SEQ ID NO: 2055871 - RNA, 19 nt, Artificial Sequence
  Description of Artificial Sequence: Synthetic oligonucleotide
cugcgauccaucugcaagg

SEQ ID NO: 2055872 - RNA, 19 nt, Artificial Sequence
  Description of Artificial Sequence: Synthetic oligonucleotide
acaaccagccaauaggaua

SEQ ID NO: 2055873 - RNA, 19 nt, Artificial Sequence
  Description of Artificial Sequence: Synthetic oligonucleotide
auggaaaccugguugggga

SEQ ID NO: 2055874 - RNA, 19 nt, Artificial Sequence
  Description of Artificial Sequence: Synthetic oligonucleotide
cuuguucccauccuagcug

SEQ ID NO: 2055875 - RNA, 19 nt, Artificial Sequence
  Description of Artificial Sequence: Synthetic oligonucleotide
gguacaagcagcugagacc

SEQ ID NO: 2055876 - RNA, 19 nt, Artificial Sequence
  Description of Artificial Sequence: Synthetic oligonucleotide
gcugaguguaagcagaagc

SEQ ID NO: 2055877 - RNA, 19 nt, Artificial Sequence
  Description of Artificial Sequence: Synthetic oligonucleotide
accgguggucuccagguac

SEQ ID NO: 2055878 - RNA, 19 nt, Artificial Sequence
  Description of Artificial Sequence: Synthetic oligonucleotide
auagccgugucuacguagc

SEQ ID NO: 2055879 - RNA, 19 nt, Artificial Sequence
  Description of Artificial Sequence: Synthetic oligonucleotide
ugguuggggauagauaggc

SEQ ID NO: 2055880 - RNA, 19 nt, Artificial Sequence
  Description of Artificial Sequence: Synthetic oligonucleotide
agccugcauacaaauagcc

SEQ ID NO: 2055881 - RNA, 19 nt, Artificial Sequence
  Description of Artificial Sequence: Synthetic oligonucleotide
ugucuacguagcaggaggc

SEQ ID NO: 2055882 - RNA, 19 nt, Artificial Sequence
  Description of Artificial Sequence: Synthetic oligonucleotide
aguaucagguguccuugag

SEQ ID NO: 2055883 - RNA, 19 nt, Artificial Sequence
  Description of Artificial Sequence: Synthetic oligonucleotide
guacugaagugugucauag

SEQ ID NO: 2055884 - RNA, 19 nt, Artificial Sequence
  Description of Artificial Sequence: Synthetic oligonucleotide
aaaguagacagaggccuca

SEQ ID NO: 2055885 - RNA, 19 nt, Artificial Sequence
  Description of Artificial Sequence: Synthetic oligonucleotide
uugucugugcagcuccacc

SEQ ID NO: 2055886 - RNA, 19 nt, Artificial Sequence
  Description of Artificial Sequence: Synthetic oligonucleotide
guaauuuucacuggucauc

SEQ ID NO: 2055887 - RNA, 19 nt, Artificial Sequence
  Description of Artificial Sequence: Synthetic oligonucleotide
gaaagucgcaguacugaag

SEQ ID NO: 2055888 - RNA, 19 nt, Artificial Sequence
  Description of Artificial Sequence: Synthetic oligonucleotide
uggagaagaacaugguaua

SEQ ID NO: 2055889 - RNA, 19 nt, Artificial Sequence
  Description of Artificial Sequence: Synthetic oligonucleotide
cauggagaugccaggcagg

SEQ ID NO: 2055890 - RNA, 19 nt, Artificial Sequence
  Description of Artificial Sequence: Synthetic oligonucleotide
accagauacaagguggucu

SEQ ID NO: 2055891 - RNA, 19 nt, Artificial Sequence
  Description of Artificial Sequence: Synthetic oligonucleotide
ugaaacagggcaccagaua

SEQ ID NO: 2055892 - RNA, 19 nt, Artificial Sequence
  Description of Artificial Sequence: Synthetic oligonucleotide
guaucagguguccuugagc

SEQ ID NO: 2055893 - RNA, 19 nt, Artificial Sequence
  Description of Artificial Sequence: Synthetic oligonucleotide
uggcccacaaucuuugaaa

SEQ ID NO: 2055894 - RNA, 19 nt, Artificial Sequence
  Description of Artificial Sequence: Synthetic oligonucleotide
ggagccacaaagauuuugg

SEQ ID NO: 2055895 - RNA, 19 nt, Artificial Sequence
  Description of Artificial Sequence: Synthetic oligonucleotide
ucauggaaguguagauggc

SEQ ID NO: 2055896 - RNA, 19 nt, Artificial Sequence
  Description of Artificial Sequence: Synthetic oligonucleotide
agaacaugguauaaaagua

SEQ ID NO: 2055897 - RNA, 19 nt, Artificial Sequence
  Description of Artificial Sequence: Synthetic oligonucleotide
caauaggauaugccaaaug

SEQ ID NO: 2055898 - RNA, 19 nt, Artificial Sequence
  Description of Artificial Sequence: Synthetic oligonucleotide
ugagguugcugaguguaag

SEQ ID NO: 2055899 - RNA, 19 nt, Artificial Sequence
  Description of Artificial Sequence: Synthetic oligonucleotide
auaggauaugccaaaugcu

SEQ ID NO: 2055900 - RNA, 19 nt, Artificial Sequence
  Description of Artificial Sequence: Synthetic oligonucleotide
ggcaccagauacaaggugg

SEQ ID NO: 2055901 - RNA, 19 nt, Artificial Sequence
  Description of Artificial Sequence: Synthetic oligonucleotide
auacaaauagccgugucua

SEQ ID NO: 2055902 - RNA, 19 nt, Artificial Sequence
  Description of Artificial Sequence: Synthetic oligonucleotide
ucagacgggccaugcaaag

SEQ ID NO: 2055903 - RNA, 19 nt, Artificial Sequence
  Description of Artificial Sequence: Synthetic oligonucleotide
ggccauauggcccacaauc

SEQ ID NO: 2055904 - RNA, 19 nt, Artificial Sequence
  Description of Artificial Sequence: Synthetic oligonucleotide
cugaagugugucauagcug

SEQ ID NO: 2055905 - RNA, 19 nt, Artificial Sequence
  Description of Artificial Sequence: Synthetic oligonucleotide
aagaggcagggucccauca

SEQ ID NO: 2055906 - RNA, 19 nt, Artificial Sequence
  Description of Artificial Sequence: Synthetic oligonucleotide
gaaaccugguuggggauag

SEQ ID NO: 2055907 - RNA, 19 nt, Artificial Sequence
  Description of Artificial Sequence: Synthetic oligonucleotide
agaaagucgcaguacugaa

SEQ ID NO: 2055908 - RNA, 19 nt, Artificial Sequence
  Description of Artificial Sequence: Synthetic oligonucleotide
aaugccuacagaggccaug

SEQ ID NO: 2055909 - RNA, 19 nt, Artificial Sequence
  Description of Artificial Sequence: Synthetic oligonucleotide
acaagguggucuccacacg

SEQ ID NO: 2055910 - RNA, 19 nt, Artificial Sequence
  Description of Artificial Sequence: Synthetic oligonucleotide
agaguaucagguguccuug

SEQ ID NO: 2055911 - RNA, 19 nt, Artificial Sequence
  Description of Artificial Sequence: Synthetic oligonucleotide
aaaugcuauggguguagua

SEQ ID NO: 2055912 - RNA, 19 nt, Artificial Sequence
  Description of Artificial Sequence: Synthetic oligonucleotide
aggcaaagaggcagggucc

SEQ ID NO: 2055913 - RNA, 19 nt, Artificial Sequence
  Description of Artificial Sequence: Synthetic oligonucleotide
ucuacguagcaggaggcac

SEQ ID NO: 2055914 - RNA, 19 nt, Artificial Sequence
  Description of Artificial Sequence: Synthetic oligonucleotide
augccaaaugcuaugggug

SEQ ID NO: 2055915 - RNA, 19 nt, Artificial Sequence
  Description of Artificial Sequence: Synthetic oligonucleotide
uucagauggaaaccugguu

SEQ ID NO: 2055916 - RNA, 19 nt, Artificial Sequence
  Description of Artificial Sequence: Synthetic oligonucleotide
aguauaccuaguacaaaca

SEQ ID NO: 2055917 - RNA, 19 nt, Artificial Sequence
  Description of Artificial Sequence: Synthetic oligonucleotide
cagccaauaggauaugcca

SEQ ID NO: 2055918 - RNA, 19 nt, Artificial Sequence
  Description of Artificial Sequence: Synthetic oligonucleotide
accagccaauaggauaugc

SEQ ID NO: 2055919 - RNA, 19 nt, Artificial Sequence
  Description of Artificial Sequence: Synthetic oligonucleotide
uguagauggcaaugccuac

SEQ ID NO: 2055920 - RNA, 19 nt, Artificial Sequence
  Description of Artificial Sequence: Synthetic oligonucleotide
augaucacaaaggcaaaga

SEQ ID NO: 2055921 - RNA, 19 nt, Artificial Sequence
  Description of Artificial Sequence: Synthetic oligonucleotide
augaccaguauaccuagua

SEQ ID NO: 2055922 - RNA, 19 nt, Artificial Sequence
  Description of Artificial Sequence: Synthetic oligonucleotide
augcuauggguguaguagu

SEQ ID NO: 2055923 - RNA, 19 nt, Artificial Sequence
  Description of Artificial Sequence: Synthetic oligonucleotide
aggauagcacugucgccgg

SEQ ID NO: 2055924 - RNA, 19 nt, Artificial Sequence
  Description of Artificial Sequence: Synthetic oligonucleotide
ucccauccuagcugaagag

SEQ ID NO: 2055925 - RNA, 19 nt, Artificial Sequence
  Description of Artificial Sequence: Synthetic oligonucleotide
aggauguagaagacccagc

SEQ ID NO: 2055926 - RNA, 19 nt, Artificial Sequence
  Description of Artificial Sequence: Synthetic oligonucleotide
aagucgcaguacugaagug

SEQ ID NO: 2055927 - RNA, 19 nt, Artificial Sequence
  Description of Artificial Sequence: Synthetic oligonucleotide
gaggcagggucccaucaag

SEQ ID NO: 2055928 - RNA, 19 nt, Artificial Sequence
  Description of Artificial Sequence: Synthetic oligonucleotide
uuugggguggaggaguccu

SEQ ID NO: 2055929 - RNA, 19 nt, Artificial Sequence
  Description of Artificial Sequence: Synthetic oligonucleotide
acgccaaccugcuuugcag

SEQ ID NO: 2055930 - RNA, 19 nt, Artificial Sequence
  Description of Artificial Sequence: Synthetic oligonucleotide
gaucugguagugacagggg

SEQ ID NO: 2055931 - RNA, 19 nt, Artificial Sequence
  Description of Artificial Sequence: Synthetic oligonucleotide
aagcgcugcugcccucugc

SEQ ID NO: 2055932 - RNA, 19 nt, Artificial Sequence
  Description of Artificial Sequence: Synthetic oligonucleotide
agucgcaguacugaagugu

SEQ ID NO: 2055933 - RNA, 19 nt, Artificial Sequence
  Description of Artificial Sequence: Synthetic oligonucleotide
cagccugcauacaaauagc

SEQ ID NO: 2055934 - RNA, 19 nt, Artificial Sequence
  Description of Artificial Sequence: Synthetic oligonucleotide
caucagaguaucagguguc

SEQ ID NO: 2055935 - RNA, 19 nt, Artificial Sequence
  Description of Artificial Sequence: Synthetic oligonucleotide
gucaucauggaaguguaga

SEQ ID NO: 2055936 - RNA, 19 nt, Artificial Sequence
  Description of Artificial Sequence: Synthetic oligonucleotide
aguguagauggcaaugccu

SEQ ID NO: 2055937 - RNA, 19 nt, Artificial Sequence
  Description of Artificial Sequence: Synthetic oligonucleotide
uucagacgggccaugcaaa

SEQ ID NO: 2055938 - RNA, 19 nt, Artificial Sequence
  Description of Artificial Sequence: Synthetic oligonucleotide
guugcugaguguaagcaga

SEQ ID NO: 2055939 - RNA, 19 nt, Artificial Sequence
  Description of Artificial Sequence: Synthetic oligonucleotide
cccacaaucuuugaaacag

SEQ ID NO: 2055940 - RNA, 19 nt, Artificial Sequence
  Description of Artificial Sequence: Synthetic oligonucleotide
cucuuguucccauccuagc

SEQ ID NO: 2055941 - RNA, 19 nt, Artificial Sequence
  Description of Artificial Sequence: Synthetic oligonucleotide
ucccgaucauuccugcaga

SEQ ID NO: 2055942 - RNA, 19 nt, Artificial Sequence
  Description of Artificial Sequence: Synthetic oligonucleotide
aguguaagcagaagcgcug

SEQ ID NO: 2055943 - RNA, 19 nt, Artificial Sequence
  Description of Artificial Sequence: Synthetic oligonucleotide
aucugcaaggacauggcca

SEQ ID NO: 2055944 - RNA, 19 nt, Artificial Sequence
  Description of Artificial Sequence: Synthetic oligonucleotide
cugguuggggauagauagg

SEQ ID NO: 2055945 - RNA, 19 nt, Artificial Sequence
  Description of Artificial Sequence: Synthetic oligonucleotide
auacaagguggucuccaca

SEQ ID NO: 2055946 - RNA, 19 nt, Artificial Sequence
  Description of Artificial Sequence: Synthetic oligonucleotide
uacugaagugugucauagc

SEQ ID NO: 2055947 - RNA, 19 nt, Artificial Sequence
  Description of Artificial Sequence: Synthetic oligonucleotide
acaauuuuauucagaugga

SEQ ID NO: 2055948 - RNA, 19 nt, Artificial Sequence
  Description of Artificial Sequence: Synthetic oligonucleotide
cuuugaaacagggcaccag

SEQ ID NO: 2055949 - RNA, 19 nt, Artificial Sequence
  Description of Artificial Sequence: Synthetic oligonucleotide
caugucacuguguacaacu

SEQ ID NO: 2055950 - RNA, 19 nt, Artificial Sequence
  Description of Artificial Sequence: Synthetic oligonucleotide
uaccuaguacaaacaggac

SEQ ID NO: 2055951 - RNA, 19 nt, Artificial Sequence
  Description of Artificial Sequence: Synthetic oligonucleotide
gccgugucuacguagcagg

SEQ ID NO: 2055952 - RNA, 19 nt, Artificial Sequence
  Description of Artificial Sequence: Synthetic oligonucleotide
gauagcacugucgccggug

SEQ ID NO: 2055953 - RNA, 19 nt, Artificial Sequence
  Description of Artificial Sequence: Synthetic oligonucleotide
acgucugcaagcaagccca

SEQ ID NO: 2055954 - RNA, 19 nt, Artificial Sequence
  Description of Artificial Sequence: Synthetic oligonucleotide
guaggauagcacugucgcc

SEQ ID NO: 2055955 - RNA, 19 nt, Artificial Sequence
  Description of Artificial Sequence: Synthetic oligonucleotide
ucaucccgaucauuccugc

SEQ ID NO: 2055956 - RNA, 19 nt, Artificial Sequence
  Description of Artificial Sequence: Synthetic oligonucleotide
gaaagaagccaaggagcgc

SEQ ID NO: 2055957 - RNA, 19 nt, Artificial Sequence
  Description of Artificial Sequence: Synthetic oligonucleotide
uagugacaggggaacgucu

SEQ ID NO: 2055958 - RNA, 19 nt, Artificial Sequence
  Description of Artificial Sequence: Synthetic oligonucleotide
gguugcugaguguaagcag

SEQ ID NO: 2055959 - RNA, 19 nt, Artificial Sequence
  Description of Artificial Sequence: Synthetic oligonucleotide
aauuuucacuggucaucau

SEQ ID NO: 2055960 - RNA, 19 nt, Artificial Sequence
  Description of Artificial Sequence: Synthetic oligonucleotide
aacggugcacugacacagc

SEQ ID NO: 2055961 - RNA, 19 nt, Artificial Sequence
  Description of Artificial Sequence: Synthetic oligonucleotide
gagaagaacaugguauaaa

SEQ ID NO: 2055962 - RNA, 19 nt, Artificial Sequence
  Description of Artificial Sequence: Synthetic oligonucleotide
agguaggauagcacugucg

SEQ ID NO: 2055963 - RNA, 19 nt, Artificial Sequence
  Description of Artificial Sequence: Synthetic oligonucleotide
gaacguggagaagaacaug

SEQ ID NO: 2055964 - RNA, 19 nt, Artificial Sequence
  Description of Artificial Sequence: Synthetic oligonucleotide
auggguguaguaguaauuu

SEQ ID NO: 2055965 - RNA, 19 nt, Artificial Sequence
  Description of Artificial Sequence: Synthetic oligonucleotide
agccaaggagcgcaggaca

SEQ ID NO: 2055966 - RNA, 19 nt, Artificial Sequence
  Description of Artificial Sequence: Synthetic oligonucleotide
ucuuugaaacagggcacca

SEQ ID NO: 2055967 - RNA, 19 nt, Artificial Sequence
  Description of Artificial Sequence: Synthetic oligonucleotide
aggauugucuucagacggg

SEQ ID NO: 2055968 - RNA, 19 nt, Artificial Sequence
  Description of Artificial Sequence: Synthetic oligonucleotide
guacaagcagcugagaccu

SEQ ID NO: 2055969 - RNA, 19 nt, Artificial Sequence
  Description of Artificial Sequence: Synthetic oligonucleotide
aaauagccgugucuacgua

SEQ ID NO: 2055970 - RNA, 19 nt, Artificial Sequence
  Description of Artificial Sequence: Synthetic oligonucleotide
guaagcagaagcgcugcug

SEQ ID NO: 2055971 - RNA, 19 nt, Artificial Sequence
  Description of Artificial Sequence: Synthetic oligonucleotide
ugguagugacaggggaacg

SEQ ID NO: 2055972 - RNA, 19 nt, Artificial Sequence
  Description of Artificial Sequence: Synthetic oligonucleotide
auauggcccacaaucuuug

SEQ ID NO: 2055973 - RNA, 19 nt, Artificial Sequence
  Description of Artificial Sequence: Synthetic oligonucleotide
uggggauagauaggcaccu

SEQ ID NO: 2055974 - RNA, 19 nt, Artificial Sequence
  Description of Artificial Sequence: Synthetic oligonucleotide
agauuuugggguggaggag

SEQ ID NO: 2055975 - RNA, 19 nt, Artificial Sequence
  Description of Artificial Sequence: Synthetic oligonucleotide
gaagacccagcgcugccac

SEQ ID NO: 2055976 - RNA, 19 nt, Artificial Sequence
  Description of Artificial Sequence: Synthetic oligonucleotide
ggaggccaugaucacaaag

SEQ ID NO: 2055977 - RNA, 19 nt, Artificial Sequence
  Description of Artificial Sequence: Synthetic oligonucleotide
agauggaaaccugguuggg

SEQ ID NO: 2055978 - RNA, 19 nt, Artificial Sequence
  Description of Artificial Sequence: Synthetic oligonucleotide
aguccucuccucuggagaa

SEQ ID NO: 2055979 - RNA, 19 nt, Artificial Sequence
  Description of Artificial Sequence: Synthetic oligonucleotide
ugcuauggguguaguagua

SEQ ID NO: 2055980 - RNA, 19 nt, Artificial Sequence
  Description of Artificial Sequence: Synthetic oligonucleotide
agguugcugaguguaagca

SEQ ID NO: 2055981 - RNA, 19 nt, Artificial Sequence
  Description of Artificial Sequence: Synthetic oligonucleotide
gucgcaguacugaagugug

SEQ ID NO: 2055982 - RNA, 19 nt, Artificial Sequence
  Description of Artificial Sequence: Synthetic oligonucleotide
ucacuguguacaacucauc

SEQ ID NO: 2055983 - RNA, 19 nt, Artificial Sequence
  Description of Artificial Sequence: Synthetic oligonucleotide
cugguagugacaggggaac

SEQ ID NO: 2055984 - RNA, 19 nt, Artificial Sequence
  Description of Artificial Sequence: Synthetic oligonucleotide
acagucugggcugugcugu

SEQ ID NO: 2055985 - RNA, 19 nt, Artificial Sequence
  Description of Artificial Sequence: Synthetic oligonucleotide
ugagaccuacagaggacau

SEQ ID NO: 2055986 - RNA, 19 nt, Artificial Sequence
  Description of Artificial Sequence: Synthetic oligonucleotide
auucagauggaaaccuggu

SEQ ID NO: 2055987 - RNA, 19 nt, Artificial Sequence
  Description of Artificial Sequence: Synthetic oligonucleotide
gauugucuucagacgggcc

SEQ ID NO: 2055988 - RNA, 19 nt, Artificial Sequence
  Description of Artificial Sequence: Synthetic oligonucleotide
guagaagacccagcgcugc

SEQ ID NO: 2055989 - RNA, 19 nt, Artificial Sequence
  Description of Artificial Sequence: Synthetic oligonucleotide
ucugugcagcuccacccac

SEQ ID NO: 2055990 - RNA, 19 nt, Artificial Sequence
  Description of Artificial Sequence: Synthetic oligonucleotide
ccugcgauccaucugcaag

SEQ ID NO: 2055991 - RNA, 19 nt, Artificial Sequence
  Description of Artificial Sequence: Synthetic oligonucleotide
ugcauacaaauagccgugu

SEQ ID NO: 2055992 - RNA, 19 nt, Artificial Sequence
  Description of Artificial Sequence: Synthetic oligonucleotide
aguacugaagugugucaua

SEQ ID NO: 2055993 - RNA, 19 nt, Artificial Sequence
  Description of Artificial Sequence: Synthetic oligonucleotide
ggucccaucaaguuccaga

SEQ ID NO: 2055994 - RNA, 19 nt, Artificial Sequence
  Description of Artificial Sequence: Synthetic oligonucleotide
ccagccaauaggauaugcc

SEQ ID NO: 2055995 - RNA, 19 nt, Artificial Sequence
  Description of Artificial Sequence: Synthetic oligonucleotide
gcgcaggacaauuuuauuc

SEQ ID NO: 2055996 - RNA, 19 nt, Artificial Sequence
  Description of Artificial Sequence: Synthetic oligonucleotide
acagcgguacauccacaug

SEQ ID NO: 2055997 - RNA, 19 nt, Artificial Sequence
  Description of Artificial Sequence: Synthetic oligonucleotide
agagcccagaaagucgcag

SEQ ID NO: 2055998 - RNA, 19 nt, Artificial Sequence
  Description of Artificial Sequence: Synthetic oligonucleotide
gggaacgucugcaagcaag

SEQ ID NO: 2055999 - RNA, 19 nt, Artificial Sequence
  Description of Artificial Sequence: Synthetic oligonucleotide
aaccugguuggggauagau

SEQ ID NO: 2056000 - RNA, 19 nt, Artificial Sequence
  Description of Artificial Sequence: Synthetic oligonucleotide
aggagccacaaagauuuug

SEQ ID NO: 2056001 - RNA, 19 nt, Artificial Sequence
  Description of Artificial Sequence: Synthetic oligonucleotide
cauggaaguguagauggca

SEQ ID NO: 2056002 - RNA, 19 nt, Artificial Sequence
  Description of Artificial Sequence: Synthetic oligonucleotide
agugacaggggaacgucug

SEQ ID NO: 2056003 - RNA, 19 nt, Artificial Sequence
  Description of Artificial Sequence: Synthetic oligonucleotide
gccuacagaggccauggag

SEQ ID NO: 2056004 - RNA, 19 nt, Artificial Sequence
  Description of Artificial Sequence: Synthetic oligonucleotide
ucagaguaucagguguccu

SEQ ID NO: 2056005 - RNA, 19 nt, Artificial Sequence
  Description of Artificial Sequence: Synthetic oligonucleotide
caagguggucuccacacga

SEQ ID NO: 2056006 - RNA, 19 nt, Artificial Sequence
  Description of Artificial Sequence: Synthetic oligonucleotide
guggagaagaacaugguau

SEQ ID NO: 2056007 - RNA, 19 nt, Artificial Sequence
  Description of Artificial Sequence: Synthetic oligonucleotide
gagccagccauaucauguc

SEQ ID NO: 2056008 - RNA, 19 nt, Artificial Sequence
  Description of Artificial Sequence: Synthetic oligonucleotide
uacguagcaggaggcacug

SEQ ID NO: 2056009 - RNA, 19 nt, Artificial Sequence
  Description of Artificial Sequence: Synthetic oligonucleotide
uccacauggaggccaugau

SEQ ID NO: 2056010 - RNA, 19 nt, Artificial Sequence
  Description of Artificial Sequence: Synthetic oligonucleotide
cugccacgagguaggauag

SEQ ID NO: 2056011 - RNA, 19 nt, Artificial Sequence
  Description of Artificial Sequence: Synthetic oligonucleotide
agcgcugccacgagguagg

SEQ ID NO: 2056012 - RNA, 19 nt, Artificial Sequence
  Description of Artificial Sequence: Synthetic oligonucleotide
uggguguaguaguaauuuu

SEQ ID NO: 2056013 - RNA, 19 nt, Artificial Sequence
  Description of Artificial Sequence: Synthetic oligonucleotide
gaacgucugcaagcaagcc

SEQ ID NO: 2056014 - RNA, 19 nt, Artificial Sequence
  Description of Artificial Sequence: Synthetic oligonucleotide
uggucacccagguggcugc

SEQ ID NO: 2056015 - RNA, 19 nt, Artificial Sequence
  Description of Artificial Sequence: Synthetic oligonucleotide
ugcuggcccacagucuggg

SEQ ID NO: 2056016 - RNA, 19 nt, Artificial Sequence
  Description of Artificial Sequence: Synthetic oligonucleotide
guagauggcaaugccuaca

SEQ ID NO: 2056017 - RNA, 19 nt, Artificial Sequence
  Description of Artificial Sequence: Synthetic oligonucleotide
cauccuagcugaagagguc

SEQ ID NO: 2056018 - RNA, 19 nt, Artificial Sequence
  Description of Artificial Sequence: Synthetic oligonucleotide
auggcccacaaucuuugaa

SEQ ID NO: 2056019 - RNA, 19 nt, Artificial Sequence
  Description of Artificial Sequence: Synthetic oligonucleotide
gcaggacaauuuuauucag

SEQ ID NO: 2056020 - RNA, 19 nt, Artificial Sequence
  Description of Artificial Sequence: Synthetic oligonucleotide
uguccuugagccagccaua

SEQ ID NO: 2056021 - RNA, 19 nt, Artificial Sequence
  Description of Artificial Sequence: Synthetic oligonucleotide
caaccagccaauaggauau

SEQ ID NO: 2056022 - RNA, 19 nt, Artificial Sequence
  Description of Artificial Sequence: Synthetic oligonucleotide
acccacgccaaccugcuuu

SEQ ID NO: 2056023 - RNA, 19 nt, Artificial Sequence
  Description of Artificial Sequence: Synthetic oligonucleotide
uauggcccacaaucuuuga

SEQ ID NO: 2056024 - RNA, 19 nt, Artificial Sequence
  Description of Artificial Sequence: Synthetic oligonucleotide
gagguaggauagcacuguc

SEQ ID NO: 2056025 - RNA, 19 nt, Artificial Sequence
  Description of Artificial Sequence: Synthetic oligonucleotide
cucaaccaggaaggaacgg

SEQ ID NO: 2056026 - RNA, 19 nt, Artificial Sequence
  Description of Artificial Sequence: Synthetic oligonucleotide
guucccauccuagcugaag

SEQ ID NO: 2056027 - RNA, 19 nt, Artificial Sequence
  Description of Artificial Sequence: Synthetic oligonucleotide
ggguguaguaguaauuuuc

SEQ ID NO: 2056028 - RNA, 19 nt, Artificial Sequence
  Description of Artificial Sequence: Synthetic oligonucleotide
uccugcagaucugguagug

SEQ ID NO: 2056029 - RNA, 19 nt, Artificial Sequence
  Description of Artificial Sequence: Synthetic oligonucleotide
gugacaggggaacgucugc

SEQ ID NO: 2056030 - RNA, 19 nt, Artificial Sequence
  Description of Artificial Sequence: Synthetic oligonucleotide
ugucauagcugaggaugca

SEQ ID NO: 2056031 - RNA, 19 nt, Artificial Sequence
  Description of Artificial Sequence: Synthetic oligonucleotide
ugcagccugcauacaaaua

SEQ ID NO: 2056032 - RNA, 19 nt, Artificial Sequence
  Description of Artificial Sequence: Synthetic oligonucleotide
guagcaggaggcacuggcc

SEQ ID NO: 2056033 - RNA, 19 nt, Artificial Sequence
  Description of Artificial Sequence: Synthetic oligonucleotide
gcagaaggaaagcugcaca

SEQ ID NO: 2056034 - RNA, 19 nt, Artificial Sequence
  Description of Artificial Sequence: Synthetic oligonucleotide
aggagcgcaggacaauuuu

SEQ ID NO: 2056035 - RNA, 19 nt, Artificial Sequence
  Description of Artificial Sequence: Synthetic oligonucleotide
agccaauaggauaugccaa

SEQ ID NO: 2056036 - RNA, 19 nt, Artificial Sequence
  Description of Artificial Sequence: Synthetic oligonucleotide
uggaaaccugguuggggau

SEQ ID NO: 2056037 - RNA, 19 nt, Artificial Sequence
  Description of Artificial Sequence: Synthetic oligonucleotide
auggaaguguagauggcaa

SEQ ID NO: 2056038 - RNA, 19 nt, Artificial Sequence
  Description of Artificial Sequence: Synthetic oligonucleotide
acgagguaggauagcacug

SEQ ID NO: 2056039 - RNA, 19 nt, Artificial Sequence
  Description of Artificial Sequence: Synthetic oligonucleotide
gaguguaagcagaagcgcu

SEQ ID NO: 2056040 - RNA, 19 nt, Artificial Sequence
  Description of Artificial Sequence: Synthetic oligonucleotide
ggcacuggccauauggccc

SEQ ID NO: 2056041 - RNA, 19 nt, Artificial Sequence
  Description of Artificial Sequence: Synthetic oligonucleotide
aggggaacgucugcaagca

SEQ ID NO: 2056042 - RNA, 19 nt, Artificial Sequence
  Description of Artificial Sequence: Synthetic oligonucleotide
ugcgauccaucugcaagga

SEQ ID NO: 2056043 - RNA, 19 nt, Artificial Sequence
  Description of Artificial Sequence: Synthetic oligonucleotide
cacagucugggcugugcug

SEQ ID NO: 2056044 - RNA, 19 nt, Artificial Sequence
  Description of Artificial Sequence: Synthetic oligonucleotide
ucaugucacuguguacaac

SEQ ID NO: 2056045 - RNA, 19 nt, Artificial Sequence
  Description of Artificial Sequence: Synthetic oligonucleotide
ccucaaccaggaaggaacg

SEQ ID NO: 2056046 - RNA, 19 nt, Artificial Sequence
  Description of Artificial Sequence: Synthetic oligonucleotide
agccgugucuacguagcag

SEQ ID NO: 2056047 - RNA, 19 nt, Artificial Sequence
  Description of Artificial Sequence: Synthetic oligonucleotide
guguccuugagccagccau

SEQ ID NO: 2056048 - RNA, 19 nt, Artificial Sequence
  Description of Artificial Sequence: Synthetic oligonucleotide
gcugccacgagguaggaua

SEQ ID NO: 2056049 - RNA, 19 nt, Artificial Sequence
  Description of Artificial Sequence: Synthetic oligonucleotide
uuuugggguggaggagucc

SEQ ID NO: 2056050 - RNA, 19 nt, Artificial Sequence
  Description of Artificial Sequence: Synthetic oligonucleotide
guagugacaggggaacguc

SEQ ID NO: 2056051 - RNA, 19 nt, Artificial Sequence
  Description of Artificial Sequence: Synthetic oligonucleotide
uccuagcugaagaggucau

SEQ ID NO: 2056052 - RNA, 19 nt, Artificial Sequence
  Description of Artificial Sequence: Synthetic oligonucleotide
ucgcaguacugaagugugu

SEQ ID NO: 2056053 - RNA, 19 nt, Artificial Sequence
  Description of Artificial Sequence: Synthetic oligonucleotide
gccccugcgauccaucugc

SEQ ID NO: 2056054 - RNA, 19 nt, Artificial Sequence
  Description of Artificial Sequence: Synthetic oligonucleotide
gcaagcccaggacucagcc

SEQ ID NO: 2056055 - RNA, 19 nt, Artificial Sequence
  Description of Artificial Sequence: Synthetic oligonucleotide
ccugcauacaaauagccgu

SEQ ID NO: 2056056 - RNA, 19 nt, Artificial Sequence
  Description of Artificial Sequence: Synthetic oligonucleotide
cuaguacaaacaggaccug

SEQ ID NO: 2056057 - RNA, 19 nt, Artificial Sequence
  Description of Artificial Sequence: Synthetic oligonucleotide
uagccgugucuacguagca

SEQ ID NO: 2056058 - RNA, 19 nt, Artificial Sequence
  Description of Artificial Sequence: Synthetic oligonucleotide
gacaggggaacgucugcaa

SEQ ID NO: 2056059 - RNA, 19 nt, Artificial Sequence
  Description of Artificial Sequence: Synthetic oligonucleotide
ggauugucuucagacgggc

SEQ ID NO: 2056060 - RNA, 19 nt, Artificial Sequence
  Description of Artificial Sequence: Synthetic oligonucleotide
agaggcagggucccaucaa

SEQ ID NO: 2056061 - RNA, 19 nt, Artificial Sequence
  Description of Artificial Sequence: Synthetic oligonucleotide
agacccagcgcugccacga

SEQ ID NO: 2056062 - RNA, 19 nt, Artificial Sequence
  Description of Artificial Sequence: Synthetic oligonucleotide
uagcacugucgccggugcc

SEQ ID NO: 2056063 - RNA, 19 nt, Artificial Sequence
  Description of Artificial Sequence: Synthetic oligonucleotide
agcgcaggacaauuuuauu

SEQ ID NO: 2056064 - RNA, 19 nt, Artificial Sequence
  Description of Artificial Sequence: Synthetic oligonucleotide
guuccagaugccccugcga

SEQ ID NO: 2056065 - RNA, 19 nt, Artificial Sequence
  Description of Artificial Sequence: Synthetic oligonucleotide
acccagcgcugccacgagg

SEQ ID NO: 2056066 - RNA, 19 nt, Artificial Sequence
  Description of Artificial Sequence: Synthetic oligonucleotide
gccaauaggauaugccaaa

SEQ ID NO: 2056067 - RNA, 19 nt, Artificial Sequence
  Description of Artificial Sequence: Synthetic oligonucleotide
aaccagccaauaggauaug

SEQ ID NO: 2056068 - RNA, 19 nt, Artificial Sequence
  Description of Artificial Sequence: Synthetic oligonucleotide
gcaggagccacaaagauuu

SEQ ID NO: 2056069 - RNA, 19 nt, Artificial Sequence
  Description of Artificial Sequence: Synthetic oligonucleotide
ggauagauaggcaccucuc

SEQ ID NO: 2056070 - RNA, 19 nt, Artificial Sequence
  Description of Artificial Sequence: Synthetic oligonucleotide
augccccugcgauccaucu

SEQ ID NO: 2056071 - RNA, 19 nt, Artificial Sequence
  Description of Artificial Sequence: Synthetic oligonucleotide
cuauggguguaguaguaau

SEQ ID NO: 2056072 - RNA, 19 nt, Artificial Sequence
  Description of Artificial Sequence: Synthetic oligonucleotide
agcugaggaugcacagcac

SEQ ID NO: 2056073 - RNA, 19 nt, Artificial Sequence
  Description of Artificial Sequence: Synthetic oligonucleotide
agcgguacauccacaugga

SEQ ID NO: 2056074 - RNA, 19 nt, Artificial Sequence
  Description of Artificial Sequence: Synthetic oligonucleotide
cauauggcccacaaucuuu

SEQ ID NO: 2056075 - RNA, 19 nt, Artificial Sequence
  Description of Artificial Sequence: Synthetic oligonucleotide
cagcgcugccacgagguag

SEQ ID NO: 2056076 - RNA, 19 nt, Artificial Sequence
  Description of Artificial Sequence: Synthetic oligonucleotide
ugccuacagaggccaugga

SEQ ID NO: 2056077 - RNA, 19 nt, Artificial Sequence
  Description of Artificial Sequence: Synthetic oligonucleotide
agaagcgcugcugcccucu

SEQ ID NO: 2056078 - RNA, 19 nt, Artificial Sequence
  Description of Artificial Sequence: Synthetic oligonucleotide
uguucccauccuagcugaa

SEQ ID NO: 2056079 - RNA, 19 nt, Artificial Sequence
  Description of Artificial Sequence: Synthetic oligonucleotide
cgggccaugcaaagaaugg

SEQ ID NO: 2056080 - RNA, 19 nt, Artificial Sequence
  Description of Artificial Sequence: Synthetic oligonucleotide
uccuugagccagccauauc

SEQ ID NO: 2056081 - RNA, 19 nt, Artificial Sequence
  Description of Artificial Sequence: Synthetic oligonucleotide
ggcaaugccuacagaggcc

SEQ ID NO: 2056082 - RNA, 19 nt, Artificial Sequence
  Description of Artificial Sequence: Synthetic oligonucleotide
cccauccuagcugaagagg

SEQ ID NO: 2056083 - RNA, 19 nt, Artificial Sequence
  Description of Artificial Sequence: Synthetic oligonucleotide
acauuggcaggagccacaa

SEQ ID NO: 2056084 - RNA, 19 nt, Artificial Sequence
  Description of Artificial Sequence: Synthetic oligonucleotide
cauggaggccaugaucaca

SEQ ID NO: 2056085 - RNA, 19 nt, Artificial Sequence
  Description of Artificial Sequence: Synthetic oligonucleotide
gcaguacugaaguguguca

SEQ ID NO: 2056086 - RNA, 19 nt, Artificial Sequence
  Description of Artificial Sequence: Synthetic oligonucleotide
gcaagcaagcccaggacuc

SEQ ID NO: 2056087 - RNA, 19 nt, Artificial Sequence
  Description of Artificial Sequence: Synthetic oligonucleotide
aaggagcgcaggacaauuu

SEQ ID NO: 2056088 - RNA, 19 nt, Artificial Sequence
  Description of Artificial Sequence: Synthetic oligonucleotide
gucacuguguacaacucau

SEQ ID NO: 2056089 - RNA, 19 nt, Artificial Sequence
  Description of Artificial Sequence: Synthetic oligonucleotide
gcacaaccagccaauagga

SEQ ID NO: 2056090 - RNA, 19 nt, Artificial Sequence
  Description of Artificial Sequence: Synthetic oligonucleotide
gcauacaaauagccguguc

SEQ ID NO: 2056091 - RNA, 19 nt, Artificial Sequence
  Description of Artificial Sequence: Synthetic oligonucleotide
ggcaaagaggcaggguccc

SEQ ID NO: 2056092 - RNA, 19 nt, Artificial Sequence
  Description of Artificial Sequence: Synthetic oligonucleotide
agggcaccagauacaaggu

SEQ ID NO: 2056093 - RNA, 19 nt, Artificial Sequence
  Description of Artificial Sequence: Synthetic oligonucleotide
gcaaugccuacagaggcca

SEQ ID NO: 2056094 - RNA, 19 nt, Artificial Sequence
  Description of Artificial Sequence: Synthetic oligonucleotide
cagguguccuugagccagc

SEQ ID NO: 2056095 - RNA, 19 nt, Artificial Sequence
  Description of Artificial Sequence: Synthetic oligonucleotide
acaacucaucccgaucauu

SEQ ID NO: 2056096 - RNA, 19 nt, Artificial Sequence
  Description of Artificial Sequence: Synthetic oligonucleotide
cuacguagcaggaggcacu

SEQ ID NO: 2056097 - RNA, 19 nt, Artificial Sequence
  Description of Artificial Sequence: Synthetic oligonucleotide
gaagcgcugcugcccucug

SEQ ID NO: 2056098 - RNA, 19 nt, Artificial Sequence
  Description of Artificial Sequence: Synthetic oligonucleotide
cccacagcgguacauccac

SEQ ID NO: 2056099 - RNA, 19 nt, Artificial Sequence
  Description of Artificial Sequence: Synthetic oligonucleotide
gggauagauaggcaccucu

SEQ ID NO: 2056100 - RNA, 19 nt, Artificial Sequence
  Description of Artificial Sequence: Synthetic oligonucleotide
ggaacggugcacugacaca

SEQ ID NO: 2056101 - RNA, 19 nt, Artificial Sequence
  Description of Artificial Sequence: Synthetic oligonucleotide
cacgccaaccugcuuugca

SEQ ID NO: 2056102 - RNA, 19 nt, Artificial Sequence
  Description of Artificial Sequence: Synthetic oligonucleotide
gaccuguuucaggauuguc

SEQ ID NO: 2056103 - RNA, 19 nt, Artificial Sequence
  Description of Artificial Sequence: Synthetic oligonucleotide
ccacauggaggccaugauc

SEQ ID NO: 2056104 - RNA, 19 nt, Artificial Sequence
  Description of Artificial Sequence: Synthetic oligonucleotide
guacauccacauggaggcc

SEQ ID NO: 2056105 - RNA, 19 nt, Artificial Sequence
  Description of Artificial Sequence: Synthetic oligonucleotide
agcugcacaaccagccaau

SEQ ID NO: 2056106 - RNA, 19 nt, Artificial Sequence
  Description of Artificial Sequence: Synthetic oligonucleotide
agaggucaucagaguauca

SEQ ID NO: 2056107 - RNA, 19 nt, Artificial Sequence
  Description of Artificial Sequence: Synthetic oligonucleotide
cacuggucaucauggaagu

SEQ ID NO: 2056108 - RNA, 19 nt, Artificial Sequence
  Description of Artificial Sequence: Synthetic oligonucleotide
gagaugccaggcaggaugu

SEQ ID NO: 2056109 - RNA, 19 nt, Artificial Sequence
  Description of Artificial Sequence: Synthetic oligonucleotide
gucuacguagcaggaggca

SEQ ID NO: 2056110 - RNA, 19 nt, Artificial Sequence
  Description of Artificial Sequence: Synthetic oligonucleotide
cauggccaugaccaguaua

SEQ ID NO: 2056111 - RNA, 19 nt, Artificial Sequence
  Description of Artificial Sequence: Synthetic oligonucleotide
ggccaugaccaguauaccu

SEQ ID NO: 2056112 - RNA, 19 nt, Artificial Sequence
  Description of Artificial Sequence: Synthetic oligonucleotide
gcgguacauccacauggag

SEQ ID NO: 2056113 - RNA, 19 nt, Artificial Sequence
  Description of Artificial Sequence: Synthetic oligonucleotide
gagcgcaggacaauuuuau

SEQ ID NO: 2056114 - RNA, 19 nt, Artificial Sequence
  Description of Artificial Sequence: Synthetic oligonucleotide
ggaaggaacggugcacuga

SEQ ID NO: 2056115 - RNA, 19 nt, Artificial Sequence
  Description of Artificial Sequence: Synthetic oligonucleotide
gaugccccugcgauccauc

SEQ ID NO: 2056116 - RNA, 19 nt, Artificial Sequence
  Description of Artificial Sequence: Synthetic oligonucleotide
agccugcuccucucguggu

SEQ ID NO: 2056117 - RNA, 19 nt, Artificial Sequence
  Description of Artificial Sequence: Synthetic oligonucleotide
cugucgccggugcccacag

SEQ ID NO: 2056118 - RNA, 19 nt, Artificial Sequence
  Description of Artificial Sequence: Synthetic oligonucleotide
ugccacgagguaggauagc

SEQ ID NO: 2056119 - RNA, 19 nt, Artificial Sequence
  Description of Artificial Sequence: Synthetic oligonucleotide
cgaucauuccugcagaucu

SEQ ID NO: 2056120 - RNA, 19 nt, Artificial Sequence
  Description of Artificial Sequence: Synthetic oligonucleotide
ggacauuggcaggagccac

SEQ ID NO: 2056121 - RNA, 19 nt, Artificial Sequence
  Description of Artificial Sequence: Synthetic oligonucleotide
caucccgaucauuccugca

SEQ ID NO: 2056122 - RNA, 19 nt, Artificial Sequence
  Description of Artificial Sequence: Synthetic oligonucleotide
acugucgccggugcccaca

SEQ ID NO: 2056123 - RNA, 19 nt, Artificial Sequence
  Description of Artificial Sequence: Synthetic oligonucleotide
cagaguaucagguguccuu

SEQ ID NO: 2056124 - RNA, 19 nt, Artificial Sequence
  Description of Artificial Sequence: Synthetic oligonucleotide
aggcagggucccaucaagu

SEQ ID NO: 2056125 - RNA, 19 nt, Artificial Sequence
  Description of Artificial Sequence: Synthetic oligonucleotide
gcuccucucgugguggcag

SEQ ID NO: 2056126 - RNA, 19 nt, Artificial Sequence
  Description of Artificial Sequence: Synthetic oligonucleotide
caccagauacaaggugguc

SEQ ID NO: 2056127 - RNA, 19 nt, Artificial Sequence
  Description of Artificial Sequence: Synthetic oligonucleotide
acagggcaccagauacaag

SEQ ID NO: 2056128 - RNA, 19 nt, Artificial Sequence
  Description of Artificial Sequence: Synthetic oligonucleotide
cuggcccacagucugggcu

SEQ ID NO: 2056129 - RNA, 19 nt, Artificial Sequence
  Description of Artificial Sequence: Synthetic oligonucleotide
gcacuggccauauggccca

SEQ ID NO: 2056130 - RNA, 19 nt, Artificial Sequence
  Description of Artificial Sequence: Synthetic oligonucleotide
gguggucuccagguacaag

SEQ ID NO: 2056131 - RNA, 19 nt, Artificial Sequence
  Description of Artificial Sequence: Synthetic oligonucleotide
ccauccuagcugaagaggu

SEQ ID NO: 2056132 - RNA, 19 nt, Artificial Sequence
  Description of Artificial Sequence: Synthetic oligonucleotide
ccacgagguaggauagcac

SEQ ID NO: 2056133 - RNA, 19 nt, Artificial Sequence
  Description of Artificial Sequence: Synthetic oligonucleotide
cacagcgguacauccacau

SEQ ID NO: 2056134 - RNA, 19 nt, Artificial Sequence
  Description of Artificial Sequence: Synthetic oligonucleotide
uacaagcagcugagaccua

SEQ ID NO: 2056135 - RNA, 19 nt, Artificial Sequence
  Description of Artificial Sequence: Synthetic oligonucleotide
acguagcaggaggcacugg

SEQ ID NO: 2056136 - RNA, 19 nt, Artificial Sequence
  Description of Artificial Sequence: Synthetic oligonucleotide
gcaaggacauggccaugac

SEQ ID NO: 2056137 - RNA, 19 nt, Artificial Sequence
  Description of Artificial Sequence: Synthetic oligonucleotide
uccucucgugguggcagaa

SEQ ID NO: 2056138 - RNA, 19 nt, Artificial Sequence
  Description of Artificial Sequence: Synthetic oligonucleotide
gguagugacaggggaacgu

SEQ ID NO: 2056139 - RNA, 19 nt, Artificial Sequence
  Description of Artificial Sequence: Synthetic oligonucleotide
cgcaguacugaaguguguc

SEQ ID NO: 2056140 - RNA, 19 nt, Artificial Sequence
  Description of Artificial Sequence: Synthetic oligonucleotide
gugcccacagcgguacauc

SEQ ID NO: 2056141 - RNA, 19 nt, Artificial Sequence
  Description of Artificial Sequence: Synthetic oligonucleotide
cagacgggccaugcaaaga

SEQ ID NO: 2056142 - RNA, 19 nt, Artificial Sequence
  Description of Artificial Sequence: Synthetic oligonucleotide
cugcagccugcauacaaau

SEQ ID NO: 2056143 - RNA, 19 nt, Artificial Sequence
  Description of Artificial Sequence: Synthetic oligonucleotide
gguuggggauagauaggca

SEQ ID NO: 2056144 - RNA, 19 nt, Artificial Sequence
  Description of Artificial Sequence: Synthetic oligonucleotide
cacaaccagccaauaggau

SEQ ID NO: 2056145 - RNA, 19 nt, Artificial Sequence
  Description of Artificial Sequence: Synthetic oligonucleotide
aggccucaaccaggaagga

SEQ ID NO: 2056146 - RNA, 19 nt, Artificial Sequence
  Description of Artificial Sequence: Synthetic oligonucleotide
cccagaaagucgcaguacu

SEQ ID NO: 2056147 - RNA, 19 nt, Artificial Sequence
  Description of Artificial Sequence: Synthetic oligonucleotide
cagaagcgcugcugcccuc

SEQ ID NO: 2056148 - RNA, 19 nt, Artificial Sequence
  Description of Artificial Sequence: Synthetic oligonucleotide
gccugcuccucucguggug

SEQ ID NO: 2056149 - RNA, 19 nt, Artificial Sequence
  Description of Artificial Sequence: Synthetic oligonucleotide
gccauauggcccacaaucu

SEQ ID NO: 2056150 - RNA, 19 nt, Artificial Sequence
  Description of Artificial Sequence: Synthetic oligonucleotide
cgugucuacguagcaggag

SEQ ID NO: 2056151 - RNA, 19 nt, Artificial Sequence
  Description of Artificial Sequence: Synthetic oligonucleotide
ggaaaccugguuggggaua

SEQ ID NO: 2056152 - RNA, 19 nt, Artificial Sequence
  Description of Artificial Sequence: Synthetic oligonucleotide
gcgauccaucugcaaggac

SEQ ID NO: 2056153 - RNA, 19 nt, Artificial Sequence
  Description of Artificial Sequence: Synthetic oligonucleotide
cguggagaagaacauggua

SEQ ID NO: 2056154 - RNA, 19 nt, Artificial Sequence
  Description of Artificial Sequence: Synthetic oligonucleotide
ccgaucauuccugcagauc

SEQ ID NO: 2056155 - RNA, 19 nt, Artificial Sequence
  Description of Artificial Sequence: Synthetic oligonucleotide
ccuagcugaagaggucauc

SEQ ID NO: 2056156 - RNA, 19 nt, Artificial Sequence
  Description of Artificial Sequence: Synthetic oligonucleotide
caaggagcgcaggacaauu

SEQ ID NO: 2056157 - RNA, 19 nt, Artificial Sequence
  Description of Artificial Sequence: Synthetic oligonucleotide
ggcagggucccaucaaguu

SEQ ID NO: 2056158 - RNA, 19 nt, Artificial Sequence
  Description of Artificial Sequence: Synthetic oligonucleotide
gccaaggagcgcaggacaa

SEQ ID NO: 2056159 - RNA, 19 nt, Artificial Sequence
  Description of Artificial Sequence: Synthetic oligonucleotide
guccuugagccagccauau

SEQ ID NO: 2056160 - RNA, 19 nt, Artificial Sequence
  Description of Artificial Sequence: Synthetic oligonucleotide
gcuggcccacagucugggc

SEQ ID NO: 2056161 - RNA, 19 nt, Artificial Sequence
  Description of Artificial Sequence: Synthetic oligonucleotide
cacugucgccggugcccac

SEQ ID NO: 2056162 - RNA, 19 nt, Artificial Sequence
  Description of Artificial Sequence: Synthetic oligonucleotide
gacgggccaugcaaagaau

SEQ ID NO: 2056163 - RNA, 19 nt, Artificial Sequence
  Description of Artificial Sequence: Synthetic oligonucleotide
ccauaucaugucacugugu

SEQ ID NO: 2056164 - RNA, 19 nt, Artificial Sequence
  Description of Artificial Sequence: Synthetic oligonucleotide
ggggauagauaggcaccuc

SEQ ID NO: 2056165 - RNA, 19 nt, Artificial Sequence
  Description of Artificial Sequence: Synthetic oligonucleotide
ggccucaaccaggaaggaa

SEQ ID NO: 2056166 - RNA, 19 nt, Artificial Sequence
  Description of Artificial Sequence: Synthetic oligonucleotide
ccgguggucuccagguaca

SEQ ID NO: 2056167 - RNA, 19 nt, Artificial Sequence
  Description of Artificial Sequence: Synthetic oligonucleotide
gcuccacccacgccaaccu

SEQ ID NO: 2056168 - RNA, 19 nt, Artificial Sequence
  Description of Artificial Sequence: Synthetic oligonucleotide
guccucuccucuggagaaa

SEQ ID NO: 2056169 - RNA, 19 nt, Artificial Sequence
  Description of Artificial Sequence: Synthetic oligonucleotide
ccgugucuacguagcagga

SEQ ID NO: 2056170 - RNA, 19 nt, Artificial Sequence
  Description of Artificial Sequence: Synthetic oligonucleotide
gcaaagaggcaggguccca

SEQ ID NO: 2056171 - RNA, 19 nt, Artificial Sequence
  Description of Artificial Sequence: Synthetic oligonucleotide
ggggaacgucugcaagcaa

SEQ ID NO: 2056172 - RNA, 19 nt, Artificial Sequence
  Description of Artificial Sequence: Synthetic oligonucleotide
cccagcgcugccacgaggu

SEQ ID NO: 2056173 - RNA, 19 nt, Artificial Sequence
  Description of Artificial Sequence: Synthetic oligonucleotide
gcacugucgccggugccca

SEQ ID NO: 2056174 - RNA, 19 nt, Artificial Sequence
  Description of Artificial Sequence: Synthetic oligonucleotide
cacuggccauauggcccac

SEQ ID NO: 2056175 - RNA, 19 nt, Artificial Sequence
  Description of Artificial Sequence: Synthetic oligonucleotide
gcccacagcgguacaucca

SEQ ID NO: 2056176 - RNA, 19 nt, Artificial Sequence
  Description of Artificial Sequence: Synthetic oligonucleotide
cgucugcaagcaagcccag

SEQ ID NO: 2056177 - RNA, 19 nt, Artificial Sequence
  Description of Artificial Sequence: Synthetic oligonucleotide
caaugccuacagaggccau

SEQ ID NO: 2056178 - RNA, 19 nt, Artificial Sequence
  Description of Artificial Sequence: Synthetic oligonucleotide
ccauauggcccacaaucuu

SEQ ID NO: 2056179 - RNA, 19 nt, Artificial Sequence
  Description of Artificial Sequence: Synthetic oligonucleotide
cccaggacucagccugcuc

SEQ ID NO: 2056180 - RNA, 19 nt, Artificial Sequence
  Description of Artificial Sequence: Synthetic oligonucleotide
ggaccuguuucaggauugu

SEQ ID NO: 2056181 - RNA, 19 nt, Artificial Sequence
  Description of Artificial Sequence: Synthetic oligonucleotide
ccacagcgguacauccaca

SEQ ID NO: 2056182 - RNA, 19 nt, Artificial Sequence
  Description of Artificial Sequence: Synthetic oligonucleotide
ggugcccacagcgguacau

SEQ ID NO: 2056183 - RNA, 19 nt, Artificial Sequence
  Description of Artificial Sequence: Synthetic oligonucleotide
ggauagcacugucgccggu

SEQ ID NO: 2056184 - RNA, 19 nt, Artificial Sequence
  Description of Artificial Sequence: Synthetic oligonucleotide
ccacgccaaccugcuuugc

SEQ ID NO: 2056185 - RNA, 19 nt, Artificial Sequence
  Description of Artificial Sequence: Synthetic oligonucleotide
cccugcgauccaucugcaa

SEQ ID NO: 2056186 - RNA, 19 nt, Artificial Sequence
  Description of Artificial Sequence: Synthetic oligonucleotide
ccccugcgauccaucugca

SEQ ID NO: 2056187 - RNA, 19 nt, Artificial Sequence
  Description of Artificial Sequence: Synthetic oligonucleotide
cccgaucauuccugcagau

SEQ ID NO: 2056188 - RNA, 19 nt, Artificial Sequence
  Description of Artificial Sequence: Synthetic oligonucleotide
ccccggcuggucacaggca

SEQ ID NO: 2056189 - RNA, 19 nt, Artificial Sequence
  Description of Artificial Sequence: Synthetic oligonucleotide
cccagguggcugccccaga

SEQ ID NO: 2056190 - RNA, 19 nt, Artificial Sequence
  Description of Artificial Sequence: Synthetic oligonucleotide
ccaaggagcgcaggacaau

SEQ ID NO: 2056191 - RNA, 19 nt, Artificial Sequence
  Description of Artificial Sequence: Synthetic oligonucleotide
cgguggucuccagguacaa

SEQ ID NO: 2056192 - RNA, 19 nt, Artificial Sequence
  Description of Artificial Sequence: Synthetic oligonucleotide
cgcugccacgagguaggau

SEQ ID NO: 2056193 - RNA, 19 nt, Artificial Sequence
  Description of Artificial Sequence: Synthetic oligonucleotide
aaagagaucacccuguagc

SEQ ID NO: 2056194 - RNA, 19 nt, Artificial Sequence
  Description of Artificial Sequence: Synthetic oligonucleotide
aaacuaaacacacacacac

SEQ ID NO: 2056195 - RNA, 19 nt, Artificial Sequence
  Description of Artificial Sequence: Synthetic oligonucleotide
gaauacacgggcuagaagg

SEQ ID NO: 2056196 - RNA, 19 nt, Artificial Sequence
  Description of Artificial Sequence: Synthetic oligonucleotide
uuaauuuacacaucagugg

SEQ ID NO: 2056197 - RNA, 19 nt, Artificial Sequence
  Description of Artificial Sequence: Synthetic oligonucleotide
agacaauuaaagcuuaacc

SEQ ID NO: 2056198 - RNA, 19 nt, Artificial Sequence
  Description of Artificial Sequence: Synthetic oligonucleotide
aacacacacacacacacac

SEQ ID NO: 2056199 - RNA, 19 nt, Artificial Sequence
  Description of Artificial Sequence: Synthetic oligonucleotide
uguuguucaauuuuaaaug

SEQ ID NO: 2056200 - RNA, 19 nt, Artificial Sequence
  Description of Artificial Sequence: Synthetic oligonucleotide
uuuaacaucucauuggcug

SEQ ID NO: 2056201 - RNA, 19 nt, Artificial Sequence
  Description of Artificial Sequence: Synthetic oligonucleotide
ugaguuauaacuacaauuc

SEQ ID NO: 2056202 - RNA, 19 nt, Artificial Sequence
  Description of Artificial Sequence: Synthetic oligonucleotide
acuaaacacacacacacac

SEQ ID NO: 2056203 - RNA, 19 nt, Artificial Sequence
  Description of Artificial Sequence: Synthetic oligonucleotide
uugucuacaagccuagucg

SEQ ID NO: 2056204 - RNA, 19 nt, Artificial Sequence
  Description of Artificial Sequence: Synthetic oligonucleotide
uaauuuacacaucaguggc

SEQ ID NO: 2056205 - RNA, 19 nt, Artificial Sequence
  Description of Artificial Sequence: Synthetic oligonucleotide
uuuguuaguggucaaagga

SEQ ID NO: 2056206 - RNA, 19 nt, Artificial Sequence
  Description of Artificial Sequence: Synthetic oligonucleotide
gaaaugucggauuuacucg

SEQ ID NO: 2056207 - RNA, 19 nt, Artificial Sequence
  Description of Artificial Sequence: Synthetic oligonucleotide
aucgagguuuaacagaugc

SEQ ID NO: 2056208 - RNA, 19 nt, Artificial Sequence
  Description of Artificial Sequence: Synthetic oligonucleotide
uuagaguucaacaauuaac

SEQ ID NO: 2056209 - RNA, 19 nt, Artificial Sequence
  Description of Artificial Sequence: Synthetic oligonucleotide
uagaguucaacaauuaacu

SEQ ID NO: 2056210 - RNA, 19 nt, Artificial Sequence
  Description of Artificial Sequence: Synthetic oligonucleotide
auaacuacaauucacguuu

SEQ ID NO: 2056211 - RNA, 19 nt, Artificial Sequence
  Description of Artificial Sequence: Synthetic oligonucleotide
uaaacacacacacacacac

SEQ ID NO: 2056212 - RNA, 19 nt, Artificial Sequence
  Description of Artificial Sequence: Synthetic oligonucleotide
uacuugguggaauacacgg

SEQ ID NO: 2056213 - RNA, 19 nt, Artificial Sequence
  Description of Artificial Sequence: Synthetic oligonucleotide
guuauaacuacaauucacg

SEQ ID NO: 2056214 - RNA, 19 nt, Artificial Sequence
  Description of Artificial Sequence: Synthetic oligonucleotide
ucuacugcagccauucuag

SEQ ID NO: 2056215 - RNA, 19 nt, Artificial Sequence
  Description of Artificial Sequence: Synthetic oligonucleotide
auuguuuuacucuuagcag

SEQ ID NO: 2056216 - RNA, 19 nt, Artificial Sequence
  Description of Artificial Sequence: Synthetic oligonucleotide
acaaguuaaacagaaggac

SEQ ID NO: 2056217 - RNA, 19 nt, Artificial Sequence
  Description of Artificial Sequence: Synthetic oligonucleotide
aacuguaucucugggaaac

SEQ ID NO: 2056218 - RNA, 19 nt, Artificial Sequence
  Description of Artificial Sequence: Synthetic oligonucleotide
uuaaagcuuaaccagugcu

SEQ ID NO: 2056219 - RNA, 19 nt, Artificial Sequence
  Description of Artificial Sequence: Synthetic oligonucleotide
caaguuaaacagaaggacc

SEQ ID NO: 2056220 - RNA, 19 nt, Artificial Sequence
  Description of Artificial Sequence: Synthetic oligonucleotide
uguauuagaguucaacaau

SEQ ID NO: 2056221 - RNA, 19 nt, Artificial Sequence
  Description of Artificial Sequence: Synthetic oligonucleotide
guuucaauugaaaugucgg

SEQ ID NO: 2056222 - RNA, 19 nt, Artificial Sequence
  Description of Artificial Sequence: Synthetic oligonucleotide
ucaacaauuaacugugaac

SEQ ID NO: 2056223 - RNA, 19 nt, Artificial Sequence
  Description of Artificial Sequence: Synthetic oligonucleotide
auuaacugugaacuguauc

SEQ ID NO: 2056224 - RNA, 19 nt, Artificial Sequence
  Description of Artificial Sequence: Synthetic oligonucleotide
uugaguuauaacuacaauu

SEQ ID NO: 2056225 - RNA, 19 nt, Artificial Sequence
  Description of Artificial Sequence: Synthetic oligonucleotide
ucacguuucaauugaaaug

SEQ ID NO: 2056226 - RNA, 19 nt, Artificial Sequence
  Description of Artificial Sequence: Synthetic oligonucleotide
ucuuguaggaaaauauuuc

SEQ ID NO: 2056227 - RNA, 19 nt, Artificial Sequence
  Description of Artificial Sequence: Synthetic oligonucleotide
uuuuacucuuagcagaagu

SEQ ID NO: 2056228 - RNA, 19 nt, Artificial Sequence
  Description of Artificial Sequence: Synthetic oligonucleotide
uuuuguuaguggucaaagg

SEQ ID NO: 2056229 - RNA, 19 nt, Artificial Sequence
  Description of Artificial Sequence: Synthetic oligonucleotide
auugaaaugucggauuuac

SEQ ID NO: 2056230 - RNA, 19 nt, Artificial Sequence
  Description of Artificial Sequence: Synthetic oligonucleotide
uguucaauuuuaaaugguc

SEQ ID NO: 2056231 - RNA, 19 nt, Artificial Sequence
  Description of Artificial Sequence: Synthetic oligonucleotide
aaugguaagucuguguuca

SEQ ID NO: 2056232 - RNA, 19 nt, Artificial Sequence
  Description of Artificial Sequence: Synthetic oligonucleotide
uuguuuuacucuuagcaga

SEQ ID NO: 2056233 - RNA, 19 nt, Artificial Sequence
  Description of Artificial Sequence: Synthetic oligonucleotide
aacaauuaacugugaacug

SEQ ID NO: 2056234 - RNA, 19 nt, Artificial Sequence
  Description of Artificial Sequence: Synthetic oligonucleotide
guauguuacaggcagagca

SEQ ID NO: 2056235 - RNA, 19 nt, Artificial Sequence
  Description of Artificial Sequence: Synthetic oligonucleotide
aguuguauuagaguucaac

SEQ ID NO: 2056236 - RNA, 19 nt, Artificial Sequence
  Description of Artificial Sequence: Synthetic oligonucleotide
uguguucaaagucuacugc

SEQ ID NO: 2056237 - RNA, 19 nt, Artificial Sequence
  Description of Artificial Sequence: Synthetic oligonucleotide
aaaugucggauuuacucga

SEQ ID NO: 2056238 - RNA, 19 nt, Artificial Sequence
  Description of Artificial Sequence: Synthetic oligonucleotide
aacuguuguaauuugucau

SEQ ID NO: 2056239 - RNA, 19 nt, Artificial Sequence
  Description of Artificial Sequence: Synthetic oligonucleotide
uaaauggucaguuguauua

SEQ ID NO: 2056240 - RNA, 19 nt, Artificial Sequence
  Description of Artificial Sequence: Synthetic oligonucleotide
aauacacgggcuagaaggc

SEQ ID NO: 2056241 - RNA, 19 nt, Artificial Sequence
  Description of Artificial Sequence: Synthetic oligonucleotide
aaugacaaguuaaacagaa

SEQ ID NO: 2056242 - RNA, 19 nt, Artificial Sequence
  Description of Artificial Sequence: Synthetic oligonucleotide
aaccccaaauccauaaugg

SEQ ID NO: 2056243 - RNA, 19 nt, Artificial Sequence
  Description of Artificial Sequence: Synthetic oligonucleotide
acaaaguggagacugguca

SEQ ID NO: 2056244 - RNA, 19 nt, Artificial Sequence
  Description of Artificial Sequence: Synthetic oligonucleotide
aauggcguagacaagguga

SEQ ID NO: 2056245 - RNA, 19 nt, Artificial Sequence
  Description of Artificial Sequence: Synthetic oligonucleotide
ugcuauuguauguuacagg

SEQ ID NO: 2056246 - RNA, 19 nt, Artificial Sequence
  Description of Artificial Sequence: Synthetic oligonucleotide
uuauaacuacaauucacgu

SEQ ID NO: 2056247 - RNA, 19 nt, Artificial Sequence
  Description of Artificial Sequence: Synthetic oligonucleotide
ucuagaaacccugaucgag

SEQ ID NO: 2056248 - RNA, 19 nt, Artificial Sequence
  Description of Artificial Sequence: Synthetic oligonucleotide
gacucagaggcaucaaggg

SEQ ID NO: 2056249 - RNA, 19 nt, Artificial Sequence
  Description of Artificial Sequence: Synthetic oligonucleotide
ucucucaugauuauucuua

SEQ ID NO: 2056250 - RNA, 19 nt, Artificial Sequence
  Description of Artificial Sequence: Synthetic oligonucleotide
uuuacucuuagcagaaguc

SEQ ID NO: 2056251 - RNA, 19 nt, Artificial Sequence
  Description of Artificial Sequence: Synthetic oligonucleotide
uuucaauugaaaugucgga

SEQ ID NO: 2056252 - RNA, 19 nt, Artificial Sequence
  Description of Artificial Sequence: Synthetic oligonucleotide
guuuaacagaugcacaaug

SEQ ID NO: 2056253 - RNA, 19 nt, Artificial Sequence
  Description of Artificial Sequence: Synthetic oligonucleotide
gagaucacccuguagcucc

SEQ ID NO: 2056254 - RNA, 19 nt, Artificial Sequence
  Description of Artificial Sequence: Synthetic oligonucleotide
aaagaguucguccaccauu

SEQ ID NO: 2056255 - RNA, 19 nt, Artificial Sequence
  Description of Artificial Sequence: Synthetic oligonucleotide
uaacucaguggccauacca

SEQ ID NO: 2056256 - RNA, 19 nt, Artificial Sequence
  Description of Artificial Sequence: Synthetic oligonucleotide
auaaugguaagucuguguu

SEQ ID NO: 2056257 - RNA, 19 nt, Artificial Sequence
  Description of Artificial Sequence: Synthetic oligonucleotide
uuacuugguggaauacacg

SEQ ID NO: 2056258 - RNA, 19 nt, Artificial Sequence
  Description of Artificial Sequence: Synthetic oligonucleotide
acaccacccacccuaaaac

SEQ ID NO: 2056259 - RNA, 19 nt, Artificial Sequence
  Description of Artificial Sequence: Synthetic oligonucleotide
uucacguuucaauugaaau

SEQ ID NO: 2056260 - RNA, 19 nt, Artificial Sequence
  Description of Artificial Sequence: Synthetic oligonucleotide
ucggauuuacucgacauug

SEQ ID NO: 2056261 - RNA, 19 nt, Artificial Sequence
  Description of Artificial Sequence: Synthetic oligonucleotide
ugaucgagguuuaacagau

SEQ ID NO: 2056262 - RNA, 19 nt, Artificial Sequence
  Description of Artificial Sequence: Synthetic oligonucleotide
cacucuucggccaaggcgc

SEQ ID NO: 2056263 - RNA, 19 nt, Artificial Sequence
  Description of Artificial Sequence: Synthetic oligonucleotide
uuguuaguggucaaaggaa

SEQ ID NO: 2056264 - RNA, 19 nt, Artificial Sequence
  Description of Artificial Sequence: Synthetic oligonucleotide
cacaaugacaaguuaaaca

SEQ ID NO: 2056265 - RNA, 19 nt, Artificial Sequence
  Description of Artificial Sequence: Synthetic oligonucleotide
cacacacacacacacacgc

SEQ ID NO: 2056266 - RNA, 19 nt, Artificial Sequence
  Description of Artificial Sequence: Synthetic oligonucleotide
agcaauggcguagacaagg

SEQ ID NO: 2056267 - RNA, 19 nt, Artificial Sequence
  Description of Artificial Sequence: Synthetic oligonucleotide
cuuaaccagugcuaagggg

SEQ ID NO: 2056268 - RNA, 19 nt, Artificial Sequence
  Description of Artificial Sequence: Synthetic oligonucleotide
ucauugaguuauaacuaca

SEQ ID NO: 2056269 - RNA, 19 nt, Artificial Sequence
  Description of Artificial Sequence: Synthetic oligonucleotide
uucaacaauuaacugugaa

SEQ ID NO: 2056270 - RNA, 19 nt, Artificial Sequence
  Description of Artificial Sequence: Synthetic oligonucleotide
uagaaggcccaucaacucc

SEQ ID NO: 2056271 - RNA, 19 nt, Artificial Sequence
  Description of Artificial Sequence: Synthetic oligonucleotide
ugauuauucuuaauuuaau

SEQ ID NO: 2056272 - RNA, 19 nt, Artificial Sequence
  Description of Artificial Sequence: Synthetic oligonucleotide
uauaacuacaauucacguu

SEQ ID NO: 2056273 - RNA, 19 nt, Artificial Sequence
  Description of Artificial Sequence: Synthetic oligonucleotide
ucacccuguagcuccaugg

SEQ ID NO: 2056274 - RNA, 19 nt, Artificial Sequence
  Description of Artificial Sequence: Synthetic oligonucleotide
uuaacaucucauuggcuga

SEQ ID NO: 2056275 - RNA, 19 nt, Artificial Sequence
  Description of Artificial Sequence: Synthetic oligonucleotide
ugcacaaugacaaguuaaa

SEQ ID NO: 2056276 - RNA, 19 nt, Artificial Sequence
  Description of Artificial Sequence: Synthetic oligonucleotide
uggaaaacugagaaacuaa

SEQ ID NO: 2056277 - RNA, 19 nt, Artificial Sequence
  Description of Artificial Sequence: Synthetic oligonucleotide
agcuuaaccagugcuaagg

SEQ ID NO: 2056278 - RNA, 19 nt, Artificial Sequence
  Description of Artificial Sequence: Synthetic oligonucleotide
uguuuuacucuuagcagaa

SEQ ID NO: 2056279 - RNA, 19 nt, Artificial Sequence
  Description of Artificial Sequence: Synthetic oligonucleotide
aacugugaacuguaucucu

SEQ ID NO: 2056280 - RNA, 19 nt, Artificial Sequence
  Description of Artificial Sequence: Synthetic oligonucleotide
uguuaguggucaaaggaau

SEQ ID NO: 2056281 - RNA, 19 nt, Artificial Sequence
  Description of Artificial Sequence: Synthetic oligonucleotide
uagacaaggugacuguugu

SEQ ID NO: 2056282 - RNA, 19 nt, Artificial Sequence
  Description of Artificial Sequence: Synthetic oligonucleotide
aacuccugacuucaguacu

SEQ ID NO: 2056283 - RNA, 19 nt, Artificial Sequence
  Description of Artificial Sequence: Synthetic oligonucleotide
ucaauuuuaaauggucagu

SEQ ID NO: 2056284 - RNA, 19 nt, Artificial Sequence
  Description of Artificial Sequence: Synthetic oligonucleotide
agaguucaacaauuaacug

SEQ ID NO: 2056285 - RNA, 19 nt, Artificial Sequence
  Description of Artificial Sequence: Synthetic oligonucleotide
aguuaaacagaaggacccc

SEQ ID NO: 2056286 - RNA, 19 nt, Artificial Sequence
  Description of Artificial Sequence: Synthetic oligonucleotide
uaaagcuuaaccagugcua

SEQ ID NO: 2056287 - RNA, 19 nt, Artificial Sequence
  Description of Artificial Sequence: Synthetic oligonucleotide
uuguucaauuuuaaauggu

SEQ ID NO: 2056288 - RNA, 19 nt, Artificial Sequence
  Description of Artificial Sequence: Synthetic oligonucleotide
ggucacuggacccacaggg

SEQ ID NO: 2056289 - RNA, 19 nt, Artificial Sequence
  Description of Artificial Sequence: Synthetic oligonucleotide
gaggacaaaguggagacug

SEQ ID NO: 2056290 - RNA, 19 nt, Artificial Sequence
  Description of Artificial Sequence: Synthetic oligonucleotide
cacccuaaaacuagcaaug

SEQ ID NO: 2056291 - RNA, 19 nt, Artificial Sequence
  Description of Artificial Sequence: Synthetic oligonucleotide
accauuguuuuacucuuag

SEQ ID NO: 2056292 - RNA, 19 nt, Artificial Sequence
  Description of Artificial Sequence: Synthetic oligonucleotide
uauguuacaggcagagcaa

SEQ ID NO: 2056293 - RNA, 19 nt, Artificial Sequence
  Description of Artificial Sequence: Synthetic oligonucleotide
auuagaguucaacaauuaa

SEQ ID NO: 2056294 - RNA, 19 nt, Artificial Sequence
  Description of Artificial Sequence: Synthetic oligonucleotide
ugcacuguggauucacacc

SEQ ID NO: 2056295 - RNA, 19 nt, Artificial Sequence
  Description of Artificial Sequence: Synthetic oligonucleotide
gaguucaacaauuaacugu

SEQ ID NO: 2056296 - RNA, 19 nt, Artificial Sequence
  Description of Artificial Sequence: Synthetic oligonucleotide
uucaauugaaaugucggau

SEQ ID NO: 2056297 - RNA, 19 nt, Artificial Sequence
  Description of Artificial Sequence: Synthetic oligonucleotide
cacacacacacacacacac

SEQ ID NO: 2056298 - RNA, 19 nt, Artificial Sequence
  Description of Artificial Sequence: Synthetic oligonucleotide
acgcuguuuuacuuggugg

SEQ ID NO: 2056299 - RNA, 19 nt, Artificial Sequence
  Description of Artificial Sequence: Synthetic oligonucleotide
uuuuacuugguggaauaca

SEQ ID NO: 2056300 - RNA, 19 nt, Artificial Sequence
  Description of Artificial Sequence: Synthetic oligonucleotide
aaagcuuaaccagugcuaa

SEQ ID NO: 2056301 - RNA, 19 nt, Artificial Sequence
  Description of Artificial Sequence: Synthetic oligonucleotide
uuacucuuagcagaagucu

SEQ ID NO: 2056302 - RNA, 19 nt, Artificial Sequence
  Description of Artificial Sequence: Synthetic oligonucleotide
uauuagaguucaacaauua

SEQ ID NO: 2056303 - RNA, 19 nt, Artificial Sequence
  Description of Artificial Sequence: Synthetic oligonucleotide
caucaagggaccauccagc

SEQ ID NO: 2056304 - RNA, 19 nt, Artificial Sequence
  Description of Artificial Sequence: Synthetic oligonucleotide
gguaagucuguguucaaag

SEQ ID NO: 2056305 - RNA, 19 nt, Artificial Sequence
  Description of Artificial Sequence: Synthetic oligonucleotide
aaggaccgaggacaaagug

SEQ ID NO: 2056306 - RNA, 19 nt, Artificial Sequence
  Description of Artificial Sequence: Synthetic oligonucleotide
aagaguucguccaccauug

SEQ ID NO: 2056307 - RNA, 19 nt, Artificial Sequence
  Description of Artificial Sequence: Synthetic oligonucleotide
uacaacuguuguaauuugu

SEQ ID NO: 2056308 - RNA, 19 nt, Artificial Sequence
  Description of Artificial Sequence: Synthetic oligonucleotide
aauggucaguuguauuaga

SEQ ID NO: 2056309 - RNA, 19 nt, Artificial Sequence
  Description of Artificial Sequence: Synthetic oligonucleotide
ugucuacaagccuagucga

SEQ ID NO: 2056310 - RNA, 19 nt, Artificial Sequence
  Description of Artificial Sequence: Synthetic oligonucleotide
acaugggucgucuuuguca

SEQ ID NO: 2056311 - RNA, 19 nt, Artificial Sequence
  Description of Artificial Sequence: Synthetic oligonucleotide
ucuguguucaaagucuacu

SEQ ID NO: 2056312 - RNA, 19 nt, Artificial Sequence
  Description of Artificial Sequence: Synthetic oligonucleotide
cugcugauggaaaacugag

SEQ ID NO: 2056313 - RNA, 19 nt, Artificial Sequence
  Description of Artificial Sequence: Synthetic oligonucleotide
caugggucgucuuugucag

SEQ ID NO: 2056314 - RNA, 19 nt, Artificial Sequence
  Description of Artificial Sequence: Synthetic oligonucleotide
aucucauuggcugaggaga

SEQ ID NO: 2056315 - RNA, 19 nt, Artificial Sequence
  Description of Artificial Sequence: Synthetic oligonucleotide
ucugccucacaauuucagc

SEQ ID NO: 2056316 - RNA, 19 nt, Artificial Sequence
  Description of Artificial Sequence: Synthetic oligonucleotide
gaguuauaacuacaauuca

SEQ ID NO: 2056317 - RNA, 19 nt, Artificial Sequence
  Description of Artificial Sequence: Synthetic oligonucleotide
cuguguucaaagucuacug

SEQ ID NO: 2056318 - RNA, 19 nt, Artificial Sequence
  Description of Artificial Sequence: Synthetic oligonucleotide
uuaguggucaaaggaauuc

SEQ ID NO: 2056319 - RNA, 19 nt, Artificial Sequence
  Description of Artificial Sequence: Synthetic oligonucleotide
uacucuuagcagaagucuc

SEQ ID NO: 2056320 - RNA, 19 nt, Artificial Sequence
  Description of Artificial Sequence: Synthetic oligonucleotide
auugaguuauaacuacaau

SEQ ID NO: 2056321 - RNA, 19 nt, Artificial Sequence
  Description of Artificial Sequence: Synthetic oligonucleotide
agcaaagaguucguccacc

SEQ ID NO: 2056322 - RNA, 19 nt, Artificial Sequence
  Description of Artificial Sequence: Synthetic oligonucleotide
aacuacaauucacguuuca

SEQ ID NO: 2056323 - RNA, 19 nt, Artificial Sequence
  Description of Artificial Sequence: Synthetic oligonucleotide
uguuuuacuugguggaaua

SEQ ID NO: 2056324 - RNA, 19 nt, Artificial Sequence
  Description of Artificial Sequence: Synthetic oligonucleotide
uguuguaauuugucauuga

SEQ ID NO: 2056325 - RNA, 19 nt, Artificial Sequence
  Description of Artificial Sequence: Synthetic oligonucleotide
cugugaacuguaucucugg

SEQ ID NO: 2056326 - RNA, 19 nt, Artificial Sequence
  Description of Artificial Sequence: Synthetic oligonucleotide
uguuacaggcagagcaaca

SEQ ID NO: 2056327 - RNA, 19 nt, Artificial Sequence
  Description of Artificial Sequence: Synthetic oligonucleotide
uccaaauacaacuguugua

SEQ ID NO: 2056328 - RNA, 19 nt, Artificial Sequence
  Description of Artificial Sequence: Synthetic oligonucleotide
auacaacuguuguaauuug

SEQ ID NO: 2056329 - RNA, 19 nt, Artificial Sequence
  Description of Artificial Sequence: Synthetic oligonucleotide
guucaauuuuaaaugguca

SEQ ID NO: 2056330 - RNA, 19 nt, Artificial Sequence
  Description of Artificial Sequence: Synthetic oligonucleotide
ucgaguccuguccaggaca

SEQ ID NO: 2056331 - RNA, 19 nt, Artificial Sequence
  Description of Artificial Sequence: Synthetic oligonucleotide
gagacaauuaaagcuuaac

SEQ ID NO: 2056332 - RNA, 19 nt, Artificial Sequence
  Description of Artificial Sequence: Synthetic oligonucleotide
ucgagguuuaacagaugca

SEQ ID NO: 2056333 - RNA, 19 nt, Artificial Sequence
  Description of Artificial Sequence: Synthetic oligonucleotide
aaugucggauuuacucgac

SEQ ID NO: 2056334 - RNA, 19 nt, Artificial Sequence
  Description of Artificial Sequence: Synthetic oligonucleotide
guguucaaagucuacugca

SEQ ID NO: 2056335 - RNA, 19 nt, Artificial Sequence
  Description of Artificial Sequence: Synthetic oligonucleotide
aggaccgaggacaaagugg

SEQ ID NO: 2056336 - RNA, 19 nt, Artificial Sequence
  Description of Artificial Sequence: Synthetic oligonucleotide
aacuagcaauggcguagac

SEQ ID NO: 2056337 - RNA, 19 nt, Artificial Sequence
  Description of Artificial Sequence: Synthetic oligonucleotide
cacacacacacacgcaugc

SEQ ID NO: 2056338 - RNA, 19 nt, Artificial Sequence
  Description of Artificial Sequence: Synthetic oligonucleotide
ugcugauggaaaacugaga

SEQ ID NO: 2056339 - RNA, 19 nt, Artificial Sequence
  Description of Artificial Sequence: Synthetic oligonucleotide
cauaccaucaucacuucaa

SEQ ID NO: 2056340 - RNA, 19 nt, Artificial Sequence
  Description of Artificial Sequence: Synthetic oligonucleotide
ugucggauuuacucgacau

SEQ ID NO: 2056341 - RNA, 19 nt, Artificial Sequence
  Description of Artificial Sequence: Synthetic oligonucleotide
cuuguaggaaaauauuucu

SEQ ID NO: 2056342 - RNA, 19 nt, Artificial Sequence
  Description of Artificial Sequence: Synthetic oligonucleotide
guugucuacaagccuaguc

SEQ ID NO: 2056343 - RNA, 19 nt, Artificial Sequence
  Description of Artificial Sequence: Synthetic oligonucleotide
ucuacaagccuagucgagu

SEQ ID NO: 2056344 - RNA, 19 nt, Artificial Sequence
  Description of Artificial Sequence: Synthetic oligonucleotide
uagaaacccugaucgaggu

SEQ ID NO: 2056345 - RNA, 19 nt, Artificial Sequence
  Description of Artificial Sequence: Synthetic oligonucleotide
uaaugguaagucuguguuc

SEQ ID NO: 2056346 - RNA, 19 nt, Artificial Sequence
  Description of Artificial Sequence: Synthetic oligonucleotide
acuguuguucaauuuuaaa

SEQ ID NO: 2056347 - RNA, 19 nt, Artificial Sequence
  Description of Artificial Sequence: Synthetic oligonucleotide
aggcagagcaacauggguc

SEQ ID NO: 2056348 - RNA, 19 nt, Artificial Sequence
  Description of Artificial Sequence: Synthetic oligonucleotide
cauugaguuauaacuacaa

SEQ ID NO: 2056349 - RNA, 19 nt, Artificial Sequence
  Description of Artificial Sequence: Synthetic oligonucleotide
uacaagccuagucgagucc

SEQ ID NO: 2056350 - RNA, 19 nt, Artificial Sequence
  Description of Artificial Sequence: Synthetic oligonucleotide
auguuacaggcagagcaac

SEQ ID NO: 2056351 - RNA, 19 nt, Artificial Sequence
  Description of Artificial Sequence: Synthetic oligonucleotide
caauucacguuucaauuga

SEQ ID NO: 2056352 - RNA, 19 nt, Artificial Sequence
  Description of Artificial Sequence: Synthetic oligonucleotide
auacacgggcuagaaggcc

SEQ ID NO: 2056353 - RNA, 19 nt, Artificial Sequence
  Description of Artificial Sequence: Synthetic oligonucleotide
gugcuauuguauguuacag

SEQ ID NO: 2056354 - RNA, 19 nt, Artificial Sequence
  Description of Artificial Sequence: Synthetic oligonucleotide
acuccaaauacaacuguug

SEQ ID NO: 2056355 - RNA, 19 nt, Artificial Sequence
  Description of Artificial Sequence: Synthetic oligonucleotide
acuguaucucugggaaacc

SEQ ID NO: 2056356 - RNA, 19 nt, Artificial Sequence
  Description of Artificial Sequence: Synthetic oligonucleotide
aaacuguuguucaauuuua

SEQ ID NO: 2056357 - RNA, 19 nt, Artificial Sequence
  Description of Artificial Sequence: Synthetic oligonucleotide
cuaaaacuagcaauggcgu

SEQ ID NO: 2056358 - RNA, 19 nt, Artificial Sequence
  Description of Artificial Sequence: Synthetic oligonucleotide
aacuaaacacacacacaca

SEQ ID NO: 2056359 - RNA, 19 nt, Artificial Sequence
  Description of Artificial Sequence: Synthetic oligonucleotide
uaacaucucauuggcugag

SEQ ID NO: 2056360 - RNA, 19 nt, Artificial Sequence
  Description of Artificial Sequence: Synthetic oligonucleotide
cuguuguucaauuuuaaau

SEQ ID NO: 2056361 - RNA, 19 nt, Artificial Sequence
  Description of Artificial Sequence: Synthetic oligonucleotide
ugggucgucuuugucaggc

SEQ ID NO: 2056362 - RNA, 19 nt, Artificial Sequence
  Description of Artificial Sequence: Synthetic oligonucleotide
uuuacucgacauugucaca

SEQ ID NO: 2056363 - RNA, 19 nt, Artificial Sequence
  Description of Artificial Sequence: Synthetic oligonucleotide
ugcucaggugcuauuguau

SEQ ID NO: 2056364 - RNA, 19 nt, Artificial Sequence
  Description of Artificial Sequence: Synthetic oligonucleotide
uggccauaccaucaucacu

SEQ ID NO: 2056365 - RNA, 19 nt, Artificial Sequence
  Description of Artificial Sequence: Synthetic oligonucleotide
uucaguacucuuguaggaa

SEQ ID NO: 2056366 - RNA, 19 nt, Artificial Sequence
  Description of Artificial Sequence: Synthetic oligonucleotide
cuacaagccuagucgaguc

SEQ ID NO: 2056367 - RNA, 19 nt, Artificial Sequence
  Description of Artificial Sequence: Synthetic oligonucleotide
auggcguagacaaggugac

SEQ ID NO: 2056368 - RNA, 19 nt, Artificial Sequence
  Description of Artificial Sequence: Synthetic oligonucleotide
gcuuaaccagugcuaaggg

SEQ ID NO: 2056369 - RNA, 19 nt, Artificial Sequence
  Description of Artificial Sequence: Synthetic oligonucleotide
caacuccugacuucaguac

SEQ ID NO: 2056370 - RNA, 19 nt, Artificial Sequence
  Description of Artificial Sequence: Synthetic oligonucleotide
acaucucauuggcugagga

SEQ ID NO: 2056371 - RNA, 19 nt, Artificial Sequence
  Description of Artificial Sequence: Synthetic oligonucleotide
aacucaguggccauaccau

SEQ ID NO: 2056372 - RNA, 19 nt, Artificial Sequence
  Description of Artificial Sequence: Synthetic oligonucleotide
ucaaagagaucacccugua

SEQ ID NO: 2056373 - RNA, 19 nt, Artificial Sequence
  Description of Artificial Sequence: Synthetic oligonucleotide
cuguugucuacaagccuag

SEQ ID NO: 2056374 - RNA, 19 nt, Artificial Sequence
  Description of Artificial Sequence: Synthetic oligonucleotide
cuaaacacacacacacaca

SEQ ID NO: 2056375 - RNA, 19 nt, Artificial Sequence
  Description of Artificial Sequence: Synthetic oligonucleotide
auuuacacaucaguggcuu

SEQ ID NO: 2056376 - RNA, 19 nt, Artificial Sequence
  Description of Artificial Sequence: Synthetic oligonucleotide
cugaucgagguuuaacaga

SEQ ID NO: 2056377 - RNA, 19 nt, Artificial Sequence
  Description of Artificial Sequence: Synthetic oligonucleotide
cguuucaauugaaaugucg

SEQ ID NO: 2056378 - RNA, 19 nt, Artificial Sequence
  Description of Artificial Sequence: Synthetic oligonucleotide
aggugcuauuguauguuac

SEQ ID NO: 2056379 - RNA, 19 nt, Artificial Sequence
  Description of Artificial Sequence: Synthetic oligonucleotide
acuagcaauggcguagaca

SEQ ID NO: 2056380 - RNA, 19 nt, Artificial Sequence
  Description of Artificial Sequence: Synthetic oligonucleotide
aacuccaaauacaacuguu

SEQ ID NO: 2056381 - RNA, 19 nt, Artificial Sequence
  Description of Artificial Sequence: Synthetic oligonucleotide
guggauucacaccacccac

SEQ ID NO: 2056382 - RNA, 19 nt, Artificial Sequence
  Description of Artificial Sequence: Synthetic oligonucleotide
aauugaaaugucggauuua

SEQ ID NO: 2056383 - RNA, 19 nt, Artificial Sequence
  Description of Artificial Sequence: Synthetic oligonucleotide
uaacugugaacuguaucuc

SEQ ID NO: 2056384 - RNA, 19 nt, Artificial Sequence
  Description of Artificial Sequence: Synthetic oligonucleotide
aaguggagacuggucacug

SEQ ID NO: 2056385 - RNA, 19 nt, Artificial Sequence
  Description of Artificial Sequence: Synthetic oligonucleotide
cacguuucaauugaaaugu

SEQ ID NO: 2056386 - RNA, 19 nt, Artificial Sequence
  Description of Artificial Sequence: Synthetic oligonucleotide
auaccaucaucacuucaaa

SEQ ID NO: 2056387 - RNA, 19 nt, Artificial Sequence
  Description of Artificial Sequence: Synthetic oligonucleotide
cuguaucucugggaaaccc

SEQ ID NO: 2056388 - RNA, 19 nt, Artificial Sequence
  Description of Artificial Sequence: Synthetic oligonucleotide
acugugaacuguaucucug

SEQ ID NO: 2056389 - RNA, 19 nt, Artificial Sequence
  Description of Artificial Sequence: Synthetic oligonucleotide
aauuaacugugaacuguau

SEQ ID NO: 2056390 - RNA, 19 nt, Artificial Sequence
  Description of Artificial Sequence: Synthetic oligonucleotide
uaacuacaauucacguuuc

SEQ ID NO: 2056391 - RNA, 19 nt, Artificial Sequence
  Description of Artificial Sequence: Synthetic oligonucleotide
acuguugucuacaagccua

SEQ ID NO: 2056392 - RNA, 19 nt, Artificial Sequence
  Description of Artificial Sequence: Synthetic oligonucleotide
cacgcuguuuuacuuggug

SEQ ID NO: 2056393 - RNA, 19 nt, Artificial Sequence
  Description of Artificial Sequence: Synthetic oligonucleotide
aaacacacacacacacaca

SEQ ID NO: 2056394 - RNA, 19 nt, Artificial Sequence
  Description of Artificial Sequence: Synthetic oligonucleotide
ugcagccauucuagaaacc

SEQ ID NO: 2056395 - RNA, 19 nt, Artificial Sequence
  Description of Artificial Sequence: Synthetic oligonucleotide
ggauucacaccacccaccc

SEQ ID NO: 2056396 - RNA, 19 nt, Artificial Sequence
  Description of Artificial Sequence: Synthetic oligonucleotide
caaggugacuguugucuac

SEQ ID NO: 2056397 - RNA, 19 nt, Artificial Sequence
  Description of Artificial Sequence: Synthetic oligonucleotide
uagucgaguccuguccagg

SEQ ID NO: 2056398 - RNA, 19 nt, Artificial Sequence
  Description of Artificial Sequence: Synthetic oligonucleotide
ccugaucgagguuuaacag

SEQ ID NO: 2056399 - RNA, 19 nt, Artificial Sequence
  Description of Artificial Sequence: Synthetic oligonucleotide
ugguggaauacacgggcua

SEQ ID NO: 2056400 - RNA, 19 nt, Artificial Sequence
  Description of Artificial Sequence: Synthetic oligonucleotide
agccauucuagaaacccug

SEQ ID NO: 2056401 - RNA, 19 nt, Artificial Sequence
  Description of Artificial Sequence: Synthetic oligonucleotide
accgaggacaaaguggaga

SEQ ID NO: 2056402 - RNA, 19 nt, Artificial Sequence
  Description of Artificial Sequence: Synthetic oligonucleotide
agguugcacagaaggaccg

SEQ ID NO: 2056403 - RNA, 19 nt, Artificial Sequence
  Description of Artificial Sequence: Synthetic oligonucleotide
agucgaguccuguccagga

SEQ ID NO: 2056404 - RNA, 19 nt, Artificial Sequence
  Description of Artificial Sequence: Synthetic oligonucleotide
gaugcacaaugacaaguua

SEQ ID NO: 2056405 - RNA, 19 nt, Artificial Sequence
  Description of Artificial Sequence: Synthetic oligonucleotide
augcacaaugacaaguuaa

SEQ ID NO: 2056406 - RNA, 19 nt, Artificial Sequence
  Description of Artificial Sequence: Synthetic oligonucleotide
acaagccuagucgaguccu

SEQ ID NO: 2056407 - RNA, 19 nt, Artificial Sequence
  Description of Artificial Sequence: Synthetic oligonucleotide
agccuagucgaguccuguc

SEQ ID NO: 2056408 - RNA, 19 nt, Artificial Sequence
  Description of Artificial Sequence: Synthetic oligonucleotide
ggugcuauuguauguuaca

SEQ ID NO: 2056409 - RNA, 19 nt, Artificial Sequence
  Description of Artificial Sequence: Synthetic oligonucleotide
uuuacacaucaguggcuuc

SEQ ID NO: 2056410 - RNA, 19 nt, Artificial Sequence
  Description of Artificial Sequence: Synthetic oligonucleotide
agcaacaugggucgucuuu

SEQ ID NO: 2056411 - RNA, 19 nt, Artificial Sequence
  Description of Artificial Sequence: Synthetic oligonucleotide
agagcaacaugggucgucu

SEQ ID NO: 2056412 - RNA, 19 nt, Artificial Sequence
  Description of Artificial Sequence: Synthetic oligonucleotide
uggaauacacgggcuagaa

SEQ ID NO: 2056413 - RNA, 19 nt, Artificial Sequence
  Description of Artificial Sequence: Synthetic oligonucleotide
cuagucgaguccuguccag

SEQ ID NO: 2056414 - RNA, 19 nt, Artificial Sequence
  Description of Artificial Sequence: Synthetic oligonucleotide
ggcuagaaggcccaucaac

SEQ ID NO: 2056415 - RNA, 19 nt, Artificial Sequence
  Description of Artificial Sequence: Synthetic oligonucleotide
gcagccauucuagaaaccc

SEQ ID NO: 2056416 - RNA, 19 nt, Artificial Sequence
  Description of Artificial Sequence: Synthetic oligonucleotide
ccaaauacaacuguuguaa

SEQ ID NO: 2056417 - RNA, 19 nt, Artificial Sequence
  Description of Artificial Sequence: Synthetic oligonucleotide
acgcacgcuguuuuacuug

SEQ ID NO: 2056418 - RNA, 19 nt, Artificial Sequence
  Description of Artificial Sequence: Synthetic oligonucleotide
gugcacuguggauucacac

SEQ ID NO: 2056419 - RNA, 19 nt, Artificial Sequence
  Description of Artificial Sequence: Synthetic oligonucleotide
ggcguagacaaggugacug

SEQ ID NO: 2056420 - RNA, 19 nt, Artificial Sequence
  Description of Artificial Sequence: Synthetic oligonucleotide
aauucacguuucaauugaa

SEQ ID NO: 2056421 - RNA, 19 nt, Artificial Sequence
  Description of Artificial Sequence: Synthetic oligonucleotide
acccuguagcuccauggug

SEQ ID NO: 2056422 - RNA, 19 nt, Artificial Sequence
  Description of Artificial Sequence: Synthetic oligonucleotide
gcacuguggauucacacca

SEQ ID NO: 2056423 - RNA, 19 nt, Artificial Sequence
  Description of Artificial Sequence: Synthetic oligonucleotide
ggaauacacgggcuagaag

SEQ ID NO: 2056424 - RNA, 19 nt, Artificial Sequence
  Description of Artificial Sequence: Synthetic oligonucleotide
ccacucuucggccaaggcg

SEQ ID NO: 2056425 - RNA, 19 nt, Artificial Sequence
  Description of Artificial Sequence: Synthetic oligonucleotide
aggcaucaagggaccaucc

SEQ ID NO: 2056426 - RNA, 19 nt, Artificial Sequence
  Description of Artificial Sequence: Synthetic oligonucleotide
caauggcguagacaaggug

SEQ ID NO: 2056427 - RNA, 19 nt, Artificial Sequence
  Description of Artificial Sequence: Synthetic oligonucleotide
augucggauuuacucgaca

SEQ ID NO: 2056428 - RNA, 19 nt, Artificial Sequence
  Description of Artificial Sequence: Synthetic oligonucleotide
acacacacacacacacacg

SEQ ID NO: 2056429 - RNA, 19 nt, Artificial Sequence
  Description of Artificial Sequence: Synthetic oligonucleotide
gaaacccugaucgagguuu

SEQ ID NO: 2056430 - RNA, 19 nt, Artificial Sequence
  Description of Artificial Sequence: Synthetic oligonucleotide
ucgucuuugucaggcugag

SEQ ID NO: 2056431 - RNA, 19 nt, Artificial Sequence
  Description of Artificial Sequence: Synthetic oligonucleotide
gucguuggugcacugugga

SEQ ID NO: 2056432 - RNA, 19 nt, Artificial Sequence
  Description of Artificial Sequence: Synthetic oligonucleotide
guaagucuguguucaaagu

SEQ ID NO: 2056433 - RNA, 19 nt, Artificial Sequence
  Description of Artificial Sequence: Synthetic oligonucleotide
ugguaagucuguguucaaa

SEQ ID NO: 2056434 - RNA, 19 nt, Artificial Sequence
  Description of Artificial Sequence: Synthetic oligonucleotide
guaucucugggaaacccca

SEQ ID NO: 2056435 - RNA, 19 nt, Artificial Sequence
  Description of Artificial Sequence: Synthetic oligonucleotide
cucuuguaggaaaauauuu

SEQ ID NO: 2056436 - RNA, 19 nt, Artificial Sequence
  Description of Artificial Sequence: Synthetic oligonucleotide
aggacaaaguggagacugg

SEQ ID NO: 2056437 - RNA, 19 nt, Artificial Sequence
  Description of Artificial Sequence: Synthetic oligonucleotide
agaugcacaaugacaaguu

SEQ ID NO: 2056438 - RNA, 19 nt, Artificial Sequence
  Description of Artificial Sequence: Synthetic oligonucleotide
acaaggugacuguugucua

SEQ ID NO: 2056439 - RNA, 19 nt, Artificial Sequence
  Description of Artificial Sequence: Synthetic oligonucleotide
auuucagcaaagaguucgu

SEQ ID NO: 2056440 - RNA, 19 nt, Artificial Sequence
  Description of Artificial Sequence: Synthetic oligonucleotide
uuucagcaaagaguucguc

SEQ ID NO: 2056441 - RNA, 19 nt, Artificial Sequence
  Description of Artificial Sequence: Synthetic oligonucleotide
gguggaauacacgggcuag

SEQ ID NO: 2056442 - RNA, 19 nt, Artificial Sequence
  Description of Artificial Sequence: Synthetic oligonucleotide
ggugacuguugucuacaag

SEQ ID NO: 2056443 - RNA, 19 nt, Artificial Sequence
  Description of Artificial Sequence: Synthetic oligonucleotide
ggaaaacugagaaacuaaa

SEQ ID NO: 2056444 - RNA, 19 nt, Artificial Sequence
  Description of Artificial Sequence: Synthetic oligonucleotide
cuccaaauacaacuguugu

SEQ ID NO: 2056445 - RNA, 19 nt, Artificial Sequence
  Description of Artificial Sequence: Synthetic oligonucleotide
caaucuuuaacaucucauu

SEQ ID NO: 2056446 - RNA, 19 nt, Artificial Sequence
  Description of Artificial Sequence: Synthetic oligonucleotide
aguacucuuguaggaaaau

SEQ ID NO: 2056447 - RNA, 19 nt, Artificial Sequence
  Description of Artificial Sequence: Synthetic oligonucleotide
ccgaggacaaaguggagac

SEQ ID NO: 2056448 - RNA, 19 nt, Artificial Sequence
  Description of Artificial Sequence: Synthetic oligonucleotide
uucacaccacccacccuaa

SEQ ID NO: 2056449 - RNA, 19 nt, Artificial Sequence
  Description of Artificial Sequence: Synthetic oligonucleotide
gucuacaagccuagucgag

SEQ ID NO: 2056450 - RNA, 19 nt, Artificial Sequence
  Description of Artificial Sequence: Synthetic oligonucleotide
cccuaaaacuagcaauggc

SEQ ID NO: 2056451 - RNA, 19 nt, Artificial Sequence
  Description of Artificial Sequence: Synthetic oligonucleotide
gucuacugcagccauucua

SEQ ID NO: 2056452 - RNA, 19 nt, Artificial Sequence
  Description of Artificial Sequence: Synthetic oligonucleotide
uggacccacagggacucag

SEQ ID NO: 2056453 - RNA, 19 nt, Artificial Sequence
  Description of Artificial Sequence: Synthetic oligonucleotide
aagccuagucgaguccugu

SEQ ID NO: 2056454 - RNA, 19 nt, Artificial Sequence
  Description of Artificial Sequence: Synthetic oligonucleotide
gaacuguaucucugggaaa

SEQ ID NO: 2056455 - RNA, 19 nt, Artificial Sequence
  Description of Artificial Sequence: Synthetic oligonucleotide
ucuucggccaaggcgcgac

SEQ ID NO: 2056456 - RNA, 19 nt, Artificial Sequence
  Description of Artificial Sequence: Synthetic oligonucleotide
auucacguuucaauugaaa

SEQ ID NO: 2056457 - RNA, 19 nt, Artificial Sequence
  Description of Artificial Sequence: Synthetic oligonucleotide
uacucgacauugucacaaa

SEQ ID NO: 2056458 - RNA, 19 nt, Artificial Sequence
  Description of Artificial Sequence: Synthetic oligonucleotide
ggaccgaggacaaagugga

SEQ ID NO: 2056459 - RNA, 19 nt, Artificial Sequence
  Description of Artificial Sequence: Synthetic oligonucleotide
acguuucaauugaaauguc

SEQ ID NO: 2056460 - RNA, 19 nt, Artificial Sequence
  Description of Artificial Sequence: Synthetic oligonucleotide
gggaccauccagccugagg

SEQ ID NO: 2056461 - RNA, 19 nt, Artificial Sequence
  Description of Artificial Sequence: Synthetic oligonucleotide
uguuaacucaguggccaua

SEQ ID NO: 2056462 - RNA, 19 nt, Artificial Sequence
  Description of Artificial Sequence: Synthetic oligonucleotide
ggcuucuguuaacucagug

SEQ ID NO: 2056463 - RNA, 19 nt, Artificial Sequence
  Description of Artificial Sequence: Synthetic oligonucleotide
ggucgucuuugucaggcug

SEQ ID NO: 2056464 - RNA, 19 nt, Artificial Sequence
  Description of Artificial Sequence: Synthetic oligonucleotide
gccuagucgaguccugucc

SEQ ID NO: 2056465 - RNA, 19 nt, Artificial Sequence
  Description of Artificial Sequence: Synthetic oligonucleotide
caucaacuccugacuucag

SEQ ID NO: 2056466 - RNA, 19 nt, Artificial Sequence
  Description of Artificial Sequence: Synthetic oligonucleotide
guagcuccaugguggugcc

SEQ ID NO: 2056467 - RNA, 19 nt, Artificial Sequence
  Description of Artificial Sequence: Synthetic oligonucleotide
ugagggucguuggugcacu

SEQ ID NO: 2056468 - RNA, 19 nt, Artificial Sequence
  Description of Artificial Sequence: Synthetic oligonucleotide
acacacacacacacgcaug

SEQ ID NO: 2056469 - RNA, 19 nt, Artificial Sequence
  Description of Artificial Sequence: Synthetic oligonucleotide
augcucaggugcuauugua

SEQ ID NO: 2056470 - RNA, 19 nt, Artificial Sequence
  Description of Artificial Sequence: Synthetic oligonucleotide
ccucacaauuucagcaaag

SEQ ID NO: 2056471 - RNA, 19 nt, Artificial Sequence
  Description of Artificial Sequence: Synthetic oligonucleotide
gagcugcauaguucaucug

SEQ ID NO: 2056472 - RNA, 19 nt, Artificial Sequence
  Description of Artificial Sequence: Synthetic oligonucleotide
cuuuaacaucucauuggcu

SEQ ID NO: 2056473 - RNA, 19 nt, Artificial Sequence
  Description of Artificial Sequence: Synthetic oligonucleotide
caguacucuuguaggaaaa

SEQ ID NO: 2056474 - RNA, 19 nt, Artificial Sequence
  Description of Artificial Sequence: Synthetic oligonucleotide
augggucgucuuugucagg

SEQ ID NO: 2056475 - RNA, 19 nt, Artificial Sequence
  Description of Artificial Sequence: Synthetic oligonucleotide
cacuguggauucacaccac

SEQ ID NO: 2056476 - RNA, 19 nt, Artificial Sequence
  Description of Artificial Sequence: Synthetic oligonucleotide
cacaccacccacccuaaaa

SEQ ID NO: 2056477 - RNA, 19 nt, Artificial Sequence
  Description of Artificial Sequence: Synthetic oligonucleotide
caagccuagucgaguccug

SEQ ID NO: 2056478 - RNA, 19 nt, Artificial Sequence
  Description of Artificial Sequence: Synthetic oligonucleotide
gucgaguccuguccaggac

SEQ ID NO: 2056479 - RNA, 19 nt, Artificial Sequence
  Description of Artificial Sequence: Synthetic oligonucleotide
ucguuggugcacuguggau

SEQ ID NO: 2056480 - RNA, 19 nt, Artificial Sequence
  Description of Artificial Sequence: Synthetic oligonucleotide
uguugucuacaagccuagu

SEQ ID NO: 2056481 - RNA, 19 nt, Artificial Sequence
  Description of Artificial Sequence: Synthetic oligonucleotide
aguggucaaaggaauucuu

SEQ ID NO: 2056482 - RNA, 19 nt, Artificial Sequence
  Description of Artificial Sequence: Synthetic oligonucleotide
agaguucguccaccauugu

SEQ ID NO: 2056483 - RNA, 19 nt, Artificial Sequence
  Description of Artificial Sequence: Synthetic oligonucleotide
ggcgcgaccuucauuggag

SEQ ID NO: 2056484 - RNA, 19 nt, Artificial Sequence
  Description of Artificial Sequence: Synthetic oligonucleotide
agccugagggucguuggug

SEQ ID NO: 2056485 - RNA, 19 nt, Artificial Sequence
  Description of Artificial Sequence: Synthetic oligonucleotide
aggcgcgaccuucauugga

SEQ ID NO: 2056486 - RNA, 19 nt, Artificial Sequence
  Description of Artificial Sequence: Synthetic oligonucleotide
ugacuucaguacucuugua

SEQ ID NO: 2056487 - RNA, 19 nt, Artificial Sequence
  Description of Artificial Sequence: Synthetic oligonucleotide
cccugaucgagguuuaaca

SEQ ID NO: 2056488 - RNA, 19 nt, Artificial Sequence
  Description of Artificial Sequence: Synthetic oligonucleotide
agaaacccugaucgagguu

SEQ ID NO: 2056489 - RNA, 19 nt, Artificial Sequence
  Description of Artificial Sequence: Synthetic oligonucleotide
gcacaaugacaaguuaaac

SEQ ID NO: 2056490 - RNA, 19 nt, Artificial Sequence
  Description of Artificial Sequence: Synthetic oligonucleotide
guuacaggcagagcaacau

SEQ ID NO: 2056491 - RNA, 19 nt, Artificial Sequence
  Description of Artificial Sequence: Synthetic oligonucleotide
agaggcaucaagggaccau

SEQ ID NO: 2056492 - RNA, 19 nt, Artificial Sequence
  Description of Artificial Sequence: Synthetic oligonucleotide
cagaugcacaaugacaagu

SEQ ID NO: 2056493 - RNA, 19 nt, Artificial Sequence
  Description of Artificial Sequence: Synthetic oligonucleotide
gcugcugauggaaaacuga

SEQ ID NO: 2056494 - RNA, 19 nt, Artificial Sequence
  Description of Artificial Sequence: Synthetic oligonucleotide
uucggccaaggcgcgaccu

SEQ ID NO: 2056495 - RNA, 19 nt, Artificial Sequence
  Description of Artificial Sequence: Synthetic oligonucleotide
acacacacacacacacaca

SEQ ID NO: 2056496 - RNA, 19 nt, Artificial Sequence
  Description of Artificial Sequence: Synthetic oligonucleotide
cugagggucguuggugcac

SEQ ID NO: 2056497 - RNA, 19 nt, Artificial Sequence
  Description of Artificial Sequence: Synthetic oligonucleotide
acacacacacacacacgca

SEQ ID NO: 2056498 - RNA, 19 nt, Artificial Sequence
  Description of Artificial Sequence: Synthetic oligonucleotide
agucuguguucaaagucua

SEQ ID NO: 2056499 - RNA, 19 nt, Artificial Sequence
  Description of Artificial Sequence: Synthetic oligonucleotide
augguaagucuguguucaa

SEQ ID NO: 2056500 - RNA, 19 nt, Artificial Sequence
  Description of Artificial Sequence: Synthetic oligonucleotide
accacccacccuaaaacua

SEQ ID NO: 2056501 - RNA, 19 nt, Artificial Sequence
  Description of Artificial Sequence: Synthetic oligonucleotide
acacacacacacgcaugca

SEQ ID NO: 2056502 - RNA, 19 nt, Artificial Sequence
  Description of Artificial Sequence: Synthetic oligonucleotide
gaguucguccaccauuguu

SEQ ID NO: 2056503 - RNA, 19 nt, Artificial Sequence
  Description of Artificial Sequence: Synthetic oligonucleotide
cacacacacacacacgcau

SEQ ID NO: 2056504 - RNA, 19 nt, Artificial Sequence
  Description of Artificial Sequence: Synthetic oligonucleotide
uccugacuucaguacucuu

SEQ ID NO: 2056505 - RNA, 19 nt, Artificial Sequence
  Description of Artificial Sequence: Synthetic oligonucleotide
acucuucggccaaggcgcg

SEQ ID NO: 2056506 - RNA, 19 nt, Artificial Sequence
  Description of Artificial Sequence: Synthetic oligonucleotide
ggcaucaagggaccaucca

SEQ ID NO: 2056507 - RNA, 19 nt, Artificial Sequence
  Description of Artificial Sequence: Synthetic oligonucleotide
gaccgaggacaaaguggag

SEQ ID NO: 2056508 - RNA, 19 nt, Artificial Sequence
  Description of Artificial Sequence: Synthetic oligonucleotide
aaacccugaucgagguuua

SEQ ID NO: 2056509 - RNA, 19 nt, Artificial Sequence
  Description of Artificial Sequence: Synthetic oligonucleotide
acgggcuagaaggcccauc

SEQ ID NO: 2056510 - RNA, 19 nt, Artificial Sequence
  Description of Artificial Sequence: Synthetic oligonucleotide
guggaauacacgggcuaga

SEQ ID NO: 2056511 - RNA, 19 nt, Artificial Sequence
  Description of Artificial Sequence: Synthetic oligonucleotide
gaaggaccgaggacaaagu

SEQ ID NO: 2056512 - RNA, 19 nt, Artificial Sequence
  Description of Artificial Sequence: Synthetic oligonucleotide
gagggucguuggugcacug

SEQ ID NO: 2056513 - RNA, 19 nt, Artificial Sequence
  Description of Artificial Sequence: Synthetic oligonucleotide
ucacaccacccacccuaaa

SEQ ID NO: 2056514 - RNA, 19 nt, Artificial Sequence
  Description of Artificial Sequence: Synthetic oligonucleotide
cuucggccaaggcgcgacc

SEQ ID NO: 2056515 - RNA, 19 nt, Artificial Sequence
  Description of Artificial Sequence: Synthetic oligonucleotide
gauucacaccacccacccu

SEQ ID NO: 2056516 - RNA, 19 nt, Artificial Sequence
  Description of Artificial Sequence: Synthetic oligonucleotide
aagggaccauccagccuga

SEQ ID NO: 2056517 - RNA, 19 nt, Artificial Sequence
  Description of Artificial Sequence: Synthetic oligonucleotide
gcgcgaccuucauuggagg

SEQ ID NO: 2056518 - RNA, 19 nt, Artificial Sequence
  Description of Artificial Sequence: Synthetic oligonucleotide
gcgaccuucauuggaggac

SEQ ID NO: 2056519 - RNA, 19 nt, Artificial Sequence
  Description of Artificial Sequence: Synthetic oligonucleotide
caguggccauaccaucauc

SEQ ID NO: 2056520 - RNA, 19 nt, Artificial Sequence
  Description of Artificial Sequence: Synthetic oligonucleotide
ccccaaauccauaauggua

SEQ ID NO: 2056521 - RNA, 19 nt, Artificial Sequence
  Description of Artificial Sequence: Synthetic oligonucleotide
uggcguagacaaggugacu

SEQ ID NO: 2056522 - RNA, 19 nt, Artificial Sequence
  Description of Artificial Sequence: Synthetic oligonucleotide
cagccauucuagaaacccu

SEQ ID NO: 2056523 - RNA, 19 nt, Artificial Sequence
  Description of Artificial Sequence: Synthetic oligonucleotide
caggugcuauuguauguua

SEQ ID NO: 2056524 - RNA, 19 nt, Artificial Sequence
  Description of Artificial Sequence: Synthetic oligonucleotide
caaauccauaaugguaagu

SEQ ID NO: 2056525 - RNA, 19 nt, Artificial Sequence
  Description of Artificial Sequence: Synthetic oligonucleotide
caugcucaggugcuauugu

SEQ ID NO: 2056526 - RNA, 19 nt, Artificial Sequence
  Description of Artificial Sequence: Synthetic oligonucleotide
aacccugaucgagguuuaa

SEQ ID NO: 2056527 - RNA, 19 nt, Artificial Sequence
  Description of Artificial Sequence: Synthetic oligonucleotide
ugcacgcacgcacgcuguu

SEQ ID NO: 2056528 - RNA, 19 nt, Artificial Sequence
  Description of Artificial Sequence: Synthetic oligonucleotide
ccuagucgaguccugucca

SEQ ID NO: 2056529 - RNA, 19 nt, Artificial Sequence
  Description of Artificial Sequence: Synthetic oligonucleotide
uuggugcacuguggauuca

SEQ ID NO: 2056530 - RNA, 19 nt, Artificial Sequence
  Description of Artificial Sequence: Synthetic oligonucleotide
ccacccuaaaacuagcaau

SEQ ID NO: 2056531 - RNA, 19 nt, Artificial Sequence
  Description of Artificial Sequence: Synthetic oligonucleotide
cacuggacccacagggacu

SEQ ID NO: 2056532 - RNA, 19 nt, Artificial Sequence
  Description of Artificial Sequence: Synthetic oligonucleotide
gcuguuuuacuugguggaa

SEQ ID NO: 2056533 - RNA, 19 nt, Artificial Sequence
  Description of Artificial Sequence: Synthetic oligonucleotide
cuguuuuacuugguggaau

SEQ ID NO: 2056534 - RNA, 19 nt, Artificial Sequence
  Description of Artificial Sequence: Synthetic oligonucleotide
augcacgcacgcacgcugu

SEQ ID NO: 2056535 - RNA, 19 nt, Artificial Sequence
  Description of Artificial Sequence: Synthetic oligonucleotide
ggcccaucaacuccugacu

SEQ ID NO: 2056536 - RNA, 19 nt, Artificial Sequence
  Description of Artificial Sequence: Synthetic oligonucleotide
gccauaccaucaucacuuc

SEQ ID NO: 2056537 - RNA, 19 nt, Artificial Sequence
  Description of Artificial Sequence: Synthetic oligonucleotide
gccauucuagaaacccuga

SEQ ID NO: 2056538 - RNA, 19 nt, Artificial Sequence
  Description of Artificial Sequence: Synthetic oligonucleotide
cacccuguagcuccauggu

SEQ ID NO: 2056539 - RNA, 19 nt, Artificial Sequence
  Description of Artificial Sequence: Synthetic oligonucleotide
ccauaccaucaucacuuca

SEQ ID NO: 2056540 - RNA, 19 nt, Artificial Sequence
  Description of Artificial Sequence: Synthetic oligonucleotide
cuguuaacucaguggccau

SEQ ID NO: 2056541 - RNA, 19 nt, Artificial Sequence
  Description of Artificial Sequence: Synthetic oligonucleotide
acgcacgcacgcuguuuua

SEQ ID NO: 2056542 - RNA, 19 nt, Artificial Sequence
  Description of Artificial Sequence: Synthetic oligonucleotide
cacagggacucagaggcau

SEQ ID NO: 2056543 - RNA, 19 nt, Artificial Sequence
  Description of Artificial Sequence: Synthetic oligonucleotide
cacgcacgcuguuuuacuu

SEQ ID NO: 2056544 - RNA, 19 nt, Artificial Sequence
  Description of Artificial Sequence: Synthetic oligonucleotide
agggaccauccagccugag

SEQ ID NO: 2056545 - RNA, 19 nt, Artificial Sequence
  Description of Artificial Sequence: Synthetic oligonucleotide
uagcuccaugguggugccu

SEQ ID NO: 2056546 - RNA, 19 nt, Artificial Sequence
  Description of Artificial Sequence: Synthetic oligonucleotide
cuccugacuucaguacucu

SEQ ID NO: 2056547 - RNA, 19 nt, Artificial Sequence
  Description of Artificial Sequence: Synthetic oligonucleotide
cacgcacgcacgcuguuuu

SEQ ID NO: 2056548 - RNA, 19 nt, Artificial Sequence
  Description of Artificial Sequence: Synthetic oligonucleotide
ggacccacagggacucaga

SEQ ID NO: 2056549 - RNA, 19 nt, Artificial Sequence
  Description of Artificial Sequence: Synthetic oligonucleotide
gcaauggcguagacaaggu

SEQ ID NO: 2056550 - RNA, 19 nt, Artificial Sequence
  Description of Artificial Sequence: Synthetic oligonucleotide
gcacgcacgcuguuuuacu

SEQ ID NO: 2056551 - RNA, 19 nt, Artificial Sequence
  Description of Artificial Sequence: Synthetic oligonucleotide
ccauucuagaaacccugau

SEQ ID NO: 2056552 - RNA, 19 nt, Artificial Sequence
  Description of Artificial Sequence: Synthetic oligonucleotide
gcccaucaacuccugacuu

SEQ ID NO: 2056553 - RNA, 19 nt, Artificial Sequence
  Description of Artificial Sequence: Synthetic oligonucleotide
ggccaaggcgcgaccuuca

SEQ ID NO: 2056554 - RNA, 19 nt, Artificial Sequence
  Description of Artificial Sequence: Synthetic oligonucleotide
cucuucggccaaggcgcga

SEQ ID NO: 2056555 - RNA, 19 nt, Artificial Sequence
  Description of Artificial Sequence: Synthetic oligonucleotide
cgcgaccuucauuggagga

SEQ ID NO: 2056556 - RNA, 19 nt, Artificial Sequence
  Description of Artificial Sequence: Synthetic oligonucleotide
gggucgucuuugucaggcu

SEQ ID NO: 2056557 - RNA, 19 nt, Artificial Sequence
  Description of Artificial Sequence: Synthetic oligonucleotide
guggugccuucagguugca

SEQ ID NO: 2056558 - RNA, 19 nt, Artificial Sequence
  Description of Artificial Sequence: Synthetic oligonucleotide
cggccaaggcgcgaccuuc

SEQ ID NO: 2056559 - RNA, 19 nt, Artificial Sequence
  Description of Artificial Sequence: Synthetic oligonucleotide
gccaaggcgcgaccuucau

SEQ ID NO: 2056560 - RNA, 19 nt, Artificial Sequence
  Description of Artificial Sequence: Synthetic oligonucleotide
gcacgcuguuuuacuuggu

SEQ ID NO: 2056561 - RNA, 19 nt, Artificial Sequence
  Description of Artificial Sequence: Synthetic oligonucleotide
cguagacaaggugacuguu

SEQ ID NO: 2056562 - RNA, 19 nt, Artificial Sequence
  Description of Artificial Sequence: Synthetic oligonucleotide
gcacgcacgcacgcuguuu

SEQ ID NO: 2056563 - RNA, 19 nt, Artificial Sequence
  Description of Artificial Sequence: Synthetic oligonucleotide
cacgggcuagaaggcccau

SEQ ID NO: 2056564 - RNA, 19 nt, Artificial Sequence
  Description of Artificial Sequence: Synthetic oligonucleotide
aauaaaacgcugcaguggc

SEQ ID NO: 2056565 - RNA, 19 nt, Artificial Sequence
  Description of Artificial Sequence: Synthetic oligonucleotide
aauaaauugucaaagaucu

SEQ ID NO: 2056566 - RNA, 19 nt, Artificial Sequence
  Description of Artificial Sequence: Synthetic oligonucleotide
aguaguaggaguaaaagcc

SEQ ID NO: 2056567 - RNA, 19 nt, Artificial Sequence
  Description of Artificial Sequence: Synthetic oligonucleotide
uacauguuacaauaaaacg

SEQ ID NO: 2056568 - RNA, 19 nt, Artificial Sequence
  Description of Artificial Sequence: Synthetic oligonucleotide
acauguuacaauaaaacgc

SEQ ID NO: 2056569 - RNA, 19 nt, Artificial Sequence
  Description of Artificial Sequence: Synthetic oligonucleotide
aagggaucgaugcagcagc

SEQ ID NO: 2056570 - RNA, 19 nt, Artificial Sequence
  Description of Artificial Sequence: Synthetic oligonucleotide
ugugaaauaugcuuggggc

SEQ ID NO: 2056571 - RNA, 19 nt, Artificial Sequence
  Description of Artificial Sequence: Synthetic oligonucleotide
aauagugucuaauuauugu

SEQ ID NO: 2056572 - RNA, 19 nt, Artificial Sequence
  Description of Artificial Sequence: Synthetic oligonucleotide
uugcuuaugugaaauaugc

SEQ ID NO: 2056573 - RNA, 19 nt, Artificial Sequence
  Description of Artificial Sequence: Synthetic oligonucleotide
uuauuguagacuuaagggu

SEQ ID NO: 2056574 - RNA, 19 nt, Artificial Sequence
  Description of Artificial Sequence: Synthetic oligonucleotide
ucgacaggaacaaagcccg

SEQ ID NO: 2056575 - RNA, 19 nt, Artificial Sequence
  Description of Artificial Sequence: Synthetic oligonucleotide
agacuuaaggguuuguuuc

SEQ ID NO: 2056576 - RNA, 19 nt, Artificial Sequence
  Description of Artificial Sequence: Synthetic oligonucleotide
agugaaguuagcucugccc

SEQ ID NO: 2056577 - RNA, 19 nt, Artificial Sequence
  Description of Artificial Sequence: Synthetic oligonucleotide
auggacauguagcauaucg

SEQ ID NO: 2056578 - RNA, 19 nt, Artificial Sequence
  Description of Artificial Sequence: Synthetic oligonucleotide
uuguaaauaaauagugucu

SEQ ID NO: 2056579 - RNA, 19 nt, Artificial Sequence
  Description of Artificial Sequence: Synthetic oligonucleotide
aaccuacagcuacugaugc

SEQ ID NO: 2056580 - RNA, 19 nt, Artificial Sequence
  Description of Artificial Sequence: Synthetic oligonucleotide
uuaugugaaauaugcuugg

SEQ ID NO: 2056581 - RNA, 19 nt, Artificial Sequence
  Description of Artificial Sequence: Synthetic oligonucleotide
uguauaugcuguuauucag

SEQ ID NO: 2056582 - RNA, 19 nt, Artificial Sequence
  Description of Artificial Sequence: Synthetic oligonucleotide
uagugucuaauuauuguag

SEQ ID NO: 2056583 - RNA, 19 nt, Artificial Sequence
  Description of Artificial Sequence: Synthetic oligonucleotide
agauaaagaauaaauuguc

SEQ ID NO: 2056584 - RNA, 19 nt, Artificial Sequence
  Description of Artificial Sequence: Synthetic oligonucleotide
uauccuaaccuacagcuac

SEQ ID NO: 2056585 - RNA, 19 nt, Artificial Sequence
  Description of Artificial Sequence: Synthetic oligonucleotide
cagguauccauuuuacucg

SEQ ID NO: 2056586 - RNA, 19 nt, Artificial Sequence
  Description of Artificial Sequence: Synthetic oligonucleotide
cauaucguggaaaugauca

SEQ ID NO: 2056587 - RNA, 19 nt, Artificial Sequence
  Description of Artificial Sequence: Synthetic oligonucleotide
cucauugaggacaucgugg

SEQ ID NO: 2056588 - RNA, 19 nt, Artificial Sequence
  Description of Artificial Sequence: Synthetic oligonucleotide
aaagcccgggacuucuugc

SEQ ID NO: 2056589 - RNA, 19 nt, Artificial Sequence
  Description of Artificial Sequence: Synthetic oligonucleotide
uauuguagacuuaaggguu

SEQ ID NO: 2056590 - RNA, 19 nt, Artificial Sequence
  Description of Artificial Sequence: Synthetic oligonucleotide
aagugaaguuagcucugcc

SEQ ID NO: 2056591 - RNA, 19 nt, Artificial Sequence
  Description of Artificial Sequence: Synthetic oligonucleotide
uucuuugcagcacaagaug

SEQ ID NO: 2056592 - RNA, 19 nt, Artificial Sequence
  Description of Artificial Sequence: Synthetic oligonucleotide
guaguaguaaaucaaggga

SEQ ID NO: 2056593 - RNA, 19 nt, Artificial Sequence
  Description of Artificial Sequence: Synthetic oligonucleotide
aaucaagggaucgaugcag

SEQ ID NO: 2056594 - RNA, 19 nt, Artificial Sequence
  Description of Artificial Sequence: Synthetic oligonucleotide
uacacgacugccaggaacc

SEQ ID NO: 2056595 - RNA, 19 nt, Artificial Sequence
  Description of Artificial Sequence: Synthetic oligonucleotide
uuguauaugcuguuauuca

SEQ ID NO: 2056596 - RNA, 19 nt, Artificial Sequence
  Description of Artificial Sequence: Synthetic oligonucleotide
uuuguauaugcuguuauuc

SEQ ID NO: 2056597 - RNA, 19 nt, Artificial Sequence
  Description of Artificial Sequence: Synthetic oligonucleotide
ugaaauaugcuuggggccc

SEQ ID NO: 2056598 - RNA, 19 nt, Artificial Sequence
  Description of Artificial Sequence: Synthetic oligonucleotide
uauaugcuguuauucaggu

SEQ ID NO: 2056599 - RNA, 19 nt, Artificial Sequence
  Description of Artificial Sequence: Synthetic oligonucleotide
ugucuaauuauuguagacu

SEQ ID NO: 2056600 - RNA, 19 nt, Artificial Sequence
  Description of Artificial Sequence: Synthetic oligonucleotide
uaauuauuguagacuuaag

SEQ ID NO: 2056601 - RNA, 19 nt, Artificial Sequence
  Description of Artificial Sequence: Synthetic oligonucleotide
uagcauaucguggaaauga

SEQ ID NO: 2056602 - RNA, 19 nt, Artificial Sequence
  Description of Artificial Sequence: Synthetic oligonucleotide
uaugugaccuucuagcaau

SEQ ID NO: 2056603 - RNA, 19 nt, Artificial Sequence
  Description of Artificial Sequence: Synthetic oligonucleotide
aacgcugcaguggcgaagc

SEQ ID NO: 2056604 - RNA, 19 nt, Artificial Sequence
  Description of Artificial Sequence: Synthetic oligonucleotide
aaaucaagggaucgaugca

SEQ ID NO: 2056605 - RNA, 19 nt, Artificial Sequence
  Description of Artificial Sequence: Synthetic oligonucleotide
aaguaggccuucucugugg

SEQ ID NO: 2056606 - RNA, 19 nt, Artificial Sequence
  Description of Artificial Sequence: Synthetic oligonucleotide
uaaauaaauagugucuaau

SEQ ID NO: 2056607 - RNA, 19 nt, Artificial Sequence
  Description of Artificial Sequence: Synthetic oligonucleotide
gaaugauggacauguagca

SEQ ID NO: 2056608 - RNA, 19 nt, Artificial Sequence
  Description of Artificial Sequence: Synthetic oligonucleotide
augcuuaugacagucauga

SEQ ID NO: 2056609 - RNA, 19 nt, Artificial Sequence
  Description of Artificial Sequence: Synthetic oligonucleotide
ucucauugaggacaucgug

SEQ ID NO: 2056610 - RNA, 19 nt, Artificial Sequence
  Description of Artificial Sequence: Synthetic oligonucleotide
ucguggaaaugaucaaugg

SEQ ID NO: 2056611 - RNA, 19 nt, Artificial Sequence
  Description of Artificial Sequence: Synthetic oligonucleotide
aaccggucaaugcuuauga

SEQ ID NO: 2056612 - RNA, 19 nt, Artificial Sequence
  Description of Artificial Sequence: Synthetic oligonucleotide
aggacaucguggcaggugg

SEQ ID NO: 2056613 - RNA, 19 nt, Artificial Sequence
  Description of Artificial Sequence: Synthetic oligonucleotide
uauacaucuuaaacugugu

SEQ ID NO: 2056614 - RNA, 19 nt, Artificial Sequence
  Description of Artificial Sequence: Synthetic oligonucleotide
caauaaaacgcugcagugg

SEQ ID NO: 2056615 - RNA, 19 nt, Artificial Sequence
  Description of Artificial Sequence: Synthetic oligonucleotide
ugucgacaggaacaaagcc

SEQ ID NO: 2056616 - RNA, 19 nt, Artificial Sequence
  Description of Artificial Sequence: Synthetic oligonucleotide
acauguagcauaucgugga

SEQ ID NO: 2056617 - RNA, 19 nt, Artificial Sequence
  Description of Artificial Sequence: Synthetic oligonucleotide
augauggaggcguacaugu

SEQ ID NO: 2056618 - RNA, 19 nt, Artificial Sequence
  Description of Artificial Sequence: Synthetic oligonucleotide
ucuccaaagcuguuuagcu

SEQ ID NO: 2056619 - RNA, 19 nt, Artificial Sequence
  Description of Artificial Sequence: Synthetic oligonucleotide
uuuuacucggcaucagcug

SEQ ID NO: 2056620 - RNA, 19 nt, Artificial Sequence
  Description of Artificial Sequence: Synthetic oligonucleotide
uguuauucaggugacuaga

SEQ ID NO: 2056621 - RNA, 19 nt, Artificial Sequence
  Description of Artificial Sequence: Synthetic oligonucleotide
aucuccaaagcuguuuagc

SEQ ID NO: 2056622 - RNA, 19 nt, Artificial Sequence
  Description of Artificial Sequence: Synthetic oligonucleotide
agguaagcgaaguaggccu

SEQ ID NO: 2056623 - RNA, 19 nt, Artificial Sequence
  Description of Artificial Sequence: Synthetic oligonucleotide
uguagcauaucguggaaau

SEQ ID NO: 2056624 - RNA, 19 nt, Artificial Sequence
  Description of Artificial Sequence: Synthetic oligonucleotide
guauaugcuguuauucagg

SEQ ID NO: 2056625 - RNA, 19 nt, Artificial Sequence
  Description of Artificial Sequence: Synthetic oligonucleotide
aagcgacacaucccagacc

SEQ ID NO: 2056626 - RNA, 19 nt, Artificial Sequence
  Description of Artificial Sequence: Synthetic oligonucleotide
uuaggccuugcuuauguga

SEQ ID NO: 2056627 - RNA, 19 nt, Artificial Sequence
  Description of Artificial Sequence: Synthetic oligonucleotide
uguuaggccuugcuuaugu

SEQ ID NO: 2056628 - RNA, 19 nt, Artificial Sequence
  Description of Artificial Sequence: Synthetic oligonucleotide
aggcaagugaaguuagcuc

SEQ ID NO: 2056629 - RNA, 19 nt, Artificial Sequence
  Description of Artificial Sequence: Synthetic oligonucleotide
agugucuaauuauuguaga

SEQ ID NO: 2056630 - RNA, 19 nt, Artificial Sequence
  Description of Artificial Sequence: Synthetic oligonucleotide
gcuuaugacagucaugagc

SEQ ID NO: 2056631 - RNA, 19 nt, Artificial Sequence
  Description of Artificial Sequence: Synthetic oligonucleotide
auagugucuaauuauugua

SEQ ID NO: 2056632 - RNA, 19 nt, Artificial Sequence
  Description of Artificial Sequence: Synthetic oligonucleotide
guuguaacuguuggggucg

SEQ ID NO: 2056633 - RNA, 19 nt, Artificial Sequence
  Description of Artificial Sequence: Synthetic oligonucleotide
uaugugaaauaugcuuggg

SEQ ID NO: 2056634 - RNA, 19 nt, Artificial Sequence
  Description of Artificial Sequence: Synthetic oligonucleotide
ugaccuucuagcaauccuc

SEQ ID NO: 2056635 - RNA, 19 nt, Artificial Sequence
  Description of Artificial Sequence: Synthetic oligonucleotide
cuuugcagcacaagaugcc

SEQ ID NO: 2056636 - RNA, 19 nt, Artificial Sequence
  Description of Artificial Sequence: Synthetic oligonucleotide
ugcgguuggcaacugagga

SEQ ID NO: 2056637 - RNA, 19 nt, Artificial Sequence
  Description of Artificial Sequence: Synthetic oligonucleotide
cauguuacaauaaaacgcu

SEQ ID NO: 2056638 - RNA, 19 nt, Artificial Sequence
  Description of Artificial Sequence: Synthetic oligonucleotide
agguauccauuuuacucgg

SEQ ID NO: 2056639 - RNA, 19 nt, Artificial Sequence
  Description of Artificial Sequence: Synthetic oligonucleotide
caaaugaccaggcaaguga

SEQ ID NO: 2056640 - RNA, 19 nt, Artificial Sequence
  Description of Artificial Sequence: Synthetic oligonucleotide
cacacagacgcagaggagg

SEQ ID NO: 2056641 - RNA, 19 nt, Artificial Sequence
  Description of Artificial Sequence: Synthetic oligonucleotide
uggacauguagcauaucgu

SEQ ID NO: 2056642 - RNA, 19 nt, Artificial Sequence
  Description of Artificial Sequence: Synthetic oligonucleotide
ugggguacacgacugccag

SEQ ID NO: 2056643 - RNA, 19 nt, Artificial Sequence
  Description of Artificial Sequence: Synthetic oligonucleotide
cauuuuacucggcaucagc

SEQ ID NO: 2056644 - RNA, 19 nt, Artificial Sequence
  Description of Artificial Sequence: Synthetic oligonucleotide
uaaaacgcugcaguggcga

SEQ ID NO: 2056645 - RNA, 19 nt, Artificial Sequence
  Description of Artificial Sequence: Synthetic oligonucleotide
gugaaguuagcucugccca

SEQ ID NO: 2056646 - RNA, 19 nt, Artificial Sequence
  Description of Artificial Sequence: Synthetic oligonucleotide
gaguaaaagcccugcagca

SEQ ID NO: 2056647 - RNA, 19 nt, Artificial Sequence
  Description of Artificial Sequence: Synthetic oligonucleotide
gucgacaggaacaaagccc

SEQ ID NO: 2056648 - RNA, 19 nt, Artificial Sequence
  Description of Artificial Sequence: Synthetic oligonucleotide
uagcaauccuccccuaagc

SEQ ID NO: 2056649 - RNA, 19 nt, Artificial Sequence
  Description of Artificial Sequence: Synthetic oligonucleotide
agcacaagaugccguagag

SEQ ID NO: 2056650 - RNA, 19 nt, Artificial Sequence
  Description of Artificial Sequence: Synthetic oligonucleotide
gacgcagaggagguaagcg

SEQ ID NO: 2056651 - RNA, 19 nt, Artificial Sequence
  Description of Artificial Sequence: Synthetic oligonucleotide
caucccagacccaaacugc

SEQ ID NO: 2056652 - RNA, 19 nt, Artificial Sequence
  Description of Artificial Sequence: Synthetic oligonucleotide
cugucgacaggaacaaagc

SEQ ID NO: 2056653 - RNA, 19 nt, Artificial Sequence
  Description of Artificial Sequence: Synthetic oligonucleotide
cuaauuauuguagacuuaa

SEQ ID NO: 2056654 - RNA, 19 nt, Artificial Sequence
  Description of Artificial Sequence: Synthetic oligonucleotide
ucuaauuauuguagacuua

SEQ ID NO: 2056655 - RNA, 19 nt, Artificial Sequence
  Description of Artificial Sequence: Synthetic oligonucleotide
uccauuuuacucggcauca

SEQ ID NO: 2056656 - RNA, 19 nt, Artificial Sequence
  Description of Artificial Sequence: Synthetic oligonucleotide
uagacuuaaggguuuguuu

SEQ ID NO: 2056657 - RNA, 19 nt, Artificial Sequence
  Description of Artificial Sequence: Synthetic oligonucleotide
ugcuuaugugaaauaugcu

SEQ ID NO: 2056658 - RNA, 19 nt, Artificial Sequence
  Description of Artificial Sequence: Synthetic oligonucleotide
ggacauguagcauaucgug

SEQ ID NO: 2056659 - RNA, 19 nt, Artificial Sequence
  Description of Artificial Sequence: Synthetic oligonucleotide
ugagacaccgaaugaugga

SEQ ID NO: 2056660 - RNA, 19 nt, Artificial Sequence
  Description of Artificial Sequence: Synthetic oligonucleotide
aggaacaaagcccgggacu

SEQ ID NO: 2056661 - RNA, 19 nt, Artificial Sequence
  Description of Artificial Sequence: Synthetic oligonucleotide
ucaauggcacaagaaagaa

SEQ ID NO: 2056662 - RNA, 19 nt, Artificial Sequence
  Description of Artificial Sequence: Synthetic oligonucleotide
cuagcaauccuccccuaag

SEQ ID NO: 2056663 - RNA, 19 nt, Artificial Sequence
  Description of Artificial Sequence: Synthetic oligonucleotide
aguaaaucaagggaucgau

SEQ ID NO: 2056664 - RNA, 19 nt, Artificial Sequence
  Description of Artificial Sequence: Synthetic oligonucleotide
aguaaaagcccugcagcag

SEQ ID NO: 2056665 - RNA, 19 nt, Artificial Sequence
  Description of Artificial Sequence: Synthetic oligonucleotide
acucagaucuccaaagcug

SEQ ID NO: 2056666 - RNA, 19 nt, Artificial Sequence
  Description of Artificial Sequence: Synthetic oligonucleotide
gugacuagagcagguaucc

SEQ ID NO: 2056667 - RNA, 19 nt, Artificial Sequence
  Description of Artificial Sequence: Synthetic oligonucleotide
accuucuagcaauccuccc

SEQ ID NO: 2056668 - RNA, 19 nt, Artificial Sequence
  Description of Artificial Sequence: Synthetic oligonucleotide
uauccauuuuacucggcau

SEQ ID NO: 2056669 - RNA, 19 nt, Artificial Sequence
  Description of Artificial Sequence: Synthetic oligonucleotide
cucacacagacgcagagga

SEQ ID NO: 2056670 - RNA, 19 nt, Artificial Sequence
  Description of Artificial Sequence: Synthetic oligonucleotide
aucaauggcacaagaaaga

SEQ ID NO: 2056671 - RNA, 19 nt, Artificial Sequence
  Description of Artificial Sequence: Synthetic oligonucleotide
agcuguuaggccuugcuua

SEQ ID NO: 2056672 - RNA, 19 nt, Artificial Sequence
  Description of Artificial Sequence: Synthetic oligonucleotide
aucaagggaucgaugcagc

SEQ ID NO: 2056673 - RNA, 19 nt, Artificial Sequence
  Description of Artificial Sequence: Synthetic oligonucleotide
uaugcuuggggcccaguau

SEQ ID NO: 2056674 - RNA, 19 nt, Artificial Sequence
  Description of Artificial Sequence: Synthetic oligonucleotide
aucacccaaaugaccaggc

SEQ ID NO: 2056675 - RNA, 19 nt, Artificial Sequence
  Description of Artificial Sequence: Synthetic oligonucleotide
gaucuccaaagcuguuuag

SEQ ID NO: 2056676 - RNA, 19 nt, Artificial Sequence
  Description of Artificial Sequence: Synthetic oligonucleotide
cacaagaugccguagaggu

SEQ ID NO: 2056677 - RNA, 19 nt, Artificial Sequence
  Description of Artificial Sequence: Synthetic oligonucleotide
auguugagcccuggaaccc

SEQ ID NO: 2056678 - RNA, 19 nt, Artificial Sequence
  Description of Artificial Sequence: Synthetic oligonucleotide
agcaauccuccccuaagcu

SEQ ID NO: 2056679 - RNA, 19 nt, Artificial Sequence
  Description of Artificial Sequence: Synthetic oligonucleotide
acugccaaucacugaccgg

SEQ ID NO: 2056680 - RNA, 19 nt, Artificial Sequence
  Description of Artificial Sequence: Synthetic oligonucleotide
ucuagcaauccuccccuaa

SEQ ID NO: 2056681 - RNA, 19 nt, Artificial Sequence
  Description of Artificial Sequence: Synthetic oligonucleotide
uuacucggcaucagcuggc

SEQ ID NO: 2056682 - RNA, 19 nt, Artificial Sequence
  Description of Artificial Sequence: Synthetic oligonucleotide
gacccaaacugccaaucac

SEQ ID NO: 2056683 - RNA, 19 nt, Artificial Sequence
  Description of Artificial Sequence: Synthetic oligonucleotide
uaguaaaucaagggaucga

SEQ ID NO: 2056684 - RNA, 19 nt, Artificial Sequence
  Description of Artificial Sequence: Synthetic oligonucleotide
aggcguacauguuacaaua

SEQ ID NO: 2056685 - RNA, 19 nt, Artificial Sequence
  Description of Artificial Sequence: Synthetic oligonucleotide
auggaggcguacauguuac

SEQ ID NO: 2056686 - RNA, 19 nt, Artificial Sequence
  Description of Artificial Sequence: Synthetic oligonucleotide
gagacaccgaaugauggac

SEQ ID NO: 2056687 - RNA, 19 nt, Artificial Sequence
  Description of Artificial Sequence: Synthetic oligonucleotide
gaugggguacacgacugcc

SEQ ID NO: 2056688 - RNA, 19 nt, Artificial Sequence
  Description of Artificial Sequence: Synthetic oligonucleotide
aucccagacccaaacugcc

SEQ ID NO: 2056689 - RNA, 19 nt, Artificial Sequence
  Description of Artificial Sequence: Synthetic oligonucleotide
uuauccuaaccuacagcua

SEQ ID NO: 2056690 - RNA, 19 nt, Artificial Sequence
  Description of Artificial Sequence: Synthetic oligonucleotide
uguugagcccuggaacccg

SEQ ID NO: 2056691 - RNA, 19 nt, Artificial Sequence
  Description of Artificial Sequence: Synthetic oligonucleotide
ucggaggaggcguaguagu

SEQ ID NO: 2056692 - RNA, 19 nt, Artificial Sequence
  Description of Artificial Sequence: Synthetic oligonucleotide
cugaccggaaaaguaguag

SEQ ID NO: 2056693 - RNA, 19 nt, Artificial Sequence
  Description of Artificial Sequence: Synthetic oligonucleotide
guaggaguaaaagcccugc

SEQ ID NO: 2056694 - RNA, 19 nt, Artificial Sequence
  Description of Artificial Sequence: Synthetic oligonucleotide
guaaaucaagggaucgaug

SEQ ID NO: 2056695 - RNA, 19 nt, Artificial Sequence
  Description of Artificial Sequence: Synthetic oligonucleotide
auaugcuguuauucaggug

SEQ ID NO: 2056696 - RNA, 19 nt, Artificial Sequence
  Description of Artificial Sequence: Synthetic oligonucleotide
uuggggcccaguauccacc

SEQ ID NO: 2056697 - RNA, 19 nt, Artificial Sequence
  Description of Artificial Sequence: Synthetic oligonucleotide
caauccuccccuaagcuaa

SEQ ID NO: 2056698 - RNA, 19 nt, Artificial Sequence
  Description of Artificial Sequence: Synthetic oligonucleotide
gucuaauuauuguagacuu

SEQ ID NO: 2056699 - RNA, 19 nt, Artificial Sequence
  Description of Artificial Sequence: Synthetic oligonucleotide
ugcuuggggcccaguaucc

SEQ ID NO: 2056700 - RNA, 19 nt, Artificial Sequence
  Description of Artificial Sequence: Synthetic oligonucleotide
ugucaaagaucugccuacc

SEQ ID NO: 2056701 - RNA, 19 nt, Artificial Sequence
  Description of Artificial Sequence: Synthetic oligonucleotide
aagcccgggacuucuugcu

SEQ ID NO: 2056702 - RNA, 19 nt, Artificial Sequence
  Description of Artificial Sequence: Synthetic oligonucleotide
agacgcagaggagguaagc

SEQ ID NO: 2056703 - RNA, 19 nt, Artificial Sequence
  Description of Artificial Sequence: Synthetic oligonucleotide
gcugucgacaggaacaaag

SEQ ID NO: 2056704 - RNA, 19 nt, Artificial Sequence
  Description of Artificial Sequence: Synthetic oligonucleotide
uguuuagcuguuaggccuu

SEQ ID NO: 2056705 - RNA, 19 nt, Artificial Sequence
  Description of Artificial Sequence: Synthetic oligonucleotide
aaacgcugcaguggcgaag

SEQ ID NO: 2056706 - RNA, 19 nt, Artificial Sequence
  Description of Artificial Sequence: Synthetic oligonucleotide
gcuguuuagcuguuaggcc

SEQ ID NO: 2056707 - RNA, 19 nt, Artificial Sequence
  Description of Artificial Sequence: Synthetic oligonucleotide
acgcagaggagguaagcga

SEQ ID NO: 2056708 - RNA, 19 nt, Artificial Sequence
  Description of Artificial Sequence: Synthetic oligonucleotide
cuguuuagcuguuaggccu

SEQ ID NO: 2056709 - RNA, 19 nt, Artificial Sequence
  Description of Artificial Sequence: Synthetic oligonucleotide
ugcuuaugacagucaugag

SEQ ID NO: 2056710 - RNA, 19 nt, Artificial Sequence
  Description of Artificial Sequence: Synthetic oligonucleotide
ugugaccuucuagcaaucc

SEQ ID NO: 2056711 - RNA, 19 nt, Artificial Sequence
  Description of Artificial Sequence: Synthetic oligonucleotide
agaaguaguaggaguaaaa

SEQ ID NO: 2056712 - RNA, 19 nt, Artificial Sequence
  Description of Artificial Sequence: Synthetic oligonucleotide
gaaccggucaaugcuuaug

SEQ ID NO: 2056713 - RNA, 19 nt, Artificial Sequence
  Description of Artificial Sequence: Synthetic oligonucleotide
aaaacgcugcaguggcgaa

SEQ ID NO: 2056714 - RNA, 19 nt, Artificial Sequence
  Description of Artificial Sequence: Synthetic oligonucleotide
ugcaguggcgaagcgacac

SEQ ID NO: 2056715 - RNA, 19 nt, Artificial Sequence
  Description of Artificial Sequence: Synthetic oligonucleotide
cugcgguuggcaacugagg

SEQ ID NO: 2056716 - RNA, 19 nt, Artificial Sequence
  Description of Artificial Sequence: Synthetic oligonucleotide
ggcaagugaaguuagcucu

SEQ ID NO: 2056717 - RNA, 19 nt, Artificial Sequence
  Description of Artificial Sequence: Synthetic oligonucleotide
aggugacuagagcagguau

SEQ ID NO: 2056718 - RNA, 19 nt, Artificial Sequence
  Description of Artificial Sequence: Synthetic oligonucleotide
aagaugccguagaggugcc

SEQ ID NO: 2056719 - RNA, 19 nt, Artificial Sequence
  Description of Artificial Sequence: Synthetic oligonucleotide
uccccuaagcuaauagcuu

SEQ ID NO: 2056720 - RNA, 19 nt, Artificial Sequence
  Description of Artificial Sequence: Synthetic oligonucleotide
agggcugucgacaggaaca

SEQ ID NO: 2056721 - RNA, 19 nt, Artificial Sequence
  Description of Artificial Sequence: Synthetic oligonucleotide
auggcacaagaaagaagac

SEQ ID NO: 2056722 - RNA, 19 nt, Artificial Sequence
  Description of Artificial Sequence: Synthetic oligonucleotide
uccuaaccuacagcuacug

SEQ ID NO: 2056723 - RNA, 19 nt, Artificial Sequence
  Description of Artificial Sequence: Synthetic oligonucleotide
auaaaacgcugcaguggcg

SEQ ID NO: 2056724 - RNA, 19 nt, Artificial Sequence
  Description of Artificial Sequence: Synthetic oligonucleotide
acuggaugggguacacgac

SEQ ID NO: 2056725 - RNA, 19 nt, Artificial Sequence
  Description of Artificial Sequence: Synthetic oligonucleotide
uagcuguuaggccuugcuu

SEQ ID NO: 2056726 - RNA, 19 nt, Artificial Sequence
  Description of Artificial Sequence: Synthetic oligonucleotide
caagugaaguuagcucugc

SEQ ID NO: 2056727 - RNA, 19 nt, Artificial Sequence
  Description of Artificial Sequence: Synthetic oligonucleotide
gacuuaaggguuuguuucu

SEQ ID NO: 2056728 - RNA, 19 nt, Artificial Sequence
  Description of Artificial Sequence: Synthetic oligonucleotide
auaugcuuggggcccagua

SEQ ID NO: 2056729 - RNA, 19 nt, Artificial Sequence
  Description of Artificial Sequence: Synthetic oligonucleotide
cuuggggcccaguauccac

SEQ ID NO: 2056730 - RNA, 19 nt, Artificial Sequence
  Description of Artificial Sequence: Synthetic oligonucleotide
gcuacugaugcagaaacuc

SEQ ID NO: 2056731 - RNA, 19 nt, Artificial Sequence
  Description of Artificial Sequence: Synthetic oligonucleotide
gaaggccgagaaguaguag

SEQ ID NO: 2056732 - RNA, 19 nt, Artificial Sequence
  Description of Artificial Sequence: Synthetic oligonucleotide
caguauccaccagagugcc

SEQ ID NO: 2056733 - RNA, 19 nt, Artificial Sequence
  Description of Artificial Sequence: Synthetic oligonucleotide
augcuguuauucaggugac

SEQ ID NO: 2056734 - RNA, 19 nt, Artificial Sequence
  Description of Artificial Sequence: Synthetic oligonucleotide
cuccccuaagcuaauagcu

SEQ ID NO: 2056735 - RNA, 19 nt, Artificial Sequence
  Description of Artificial Sequence: Synthetic oligonucleotide
guagcauaucguggaaaug

SEQ ID NO: 2056736 - RNA, 19 nt, Artificial Sequence
  Description of Artificial Sequence: Synthetic oligonucleotide
gaaguuagcucugcccaga

SEQ ID NO: 2056737 - RNA, 19 nt, Artificial Sequence
  Description of Artificial Sequence: Synthetic oligonucleotide
gaggaggcguaguaguaaa

SEQ ID NO: 2056738 - RNA, 19 nt, Artificial Sequence
  Description of Artificial Sequence: Synthetic oligonucleotide
cuaugugaccuucuagcaa

SEQ ID NO: 2056739 - RNA, 19 nt, Artificial Sequence
  Description of Artificial Sequence: Synthetic oligonucleotide
gacaucguggcagguggug

SEQ ID NO: 2056740 - RNA, 19 nt, Artificial Sequence
  Description of Artificial Sequence: Synthetic oligonucleotide
uguagacuuaaggguuugu

SEQ ID NO: 2056741 - RNA, 19 nt, Artificial Sequence
  Description of Artificial Sequence: Synthetic oligonucleotide
agcaugauggaggcguaca

SEQ ID NO: 2056742 - RNA, 19 nt, Artificial Sequence
  Description of Artificial Sequence: Synthetic oligonucleotide
caaagcccgggacuucuug

SEQ ID NO: 2056743 - RNA, 19 nt, Artificial Sequence
  Description of Artificial Sequence: Synthetic oligonucleotide
acgacugccaggaaccggu

SEQ ID NO: 2056744 - RNA, 19 nt, Artificial Sequence
  Description of Artificial Sequence: Synthetic oligonucleotide
accuacagcuacugaugca

SEQ ID NO: 2056745 - RNA, 19 nt, Artificial Sequence
  Description of Artificial Sequence: Synthetic oligonucleotide
ggcgaagcgacacauccca

SEQ ID NO: 2056746 - RNA, 19 nt, Artificial Sequence
  Description of Artificial Sequence: Synthetic oligonucleotide
uuuagcuguuaggccuugc

SEQ ID NO: 2056747 - RNA, 19 nt, Artificial Sequence
  Description of Artificial Sequence: Synthetic oligonucleotide
uuguaacuguuggggucgg

SEQ ID NO: 2056748 - RNA, 19 nt, Artificial Sequence
  Description of Artificial Sequence: Synthetic oligonucleotide
agagugcgccaggacaggg

SEQ ID NO: 2056749 - RNA, 19 nt, Artificial Sequence
  Description of Artificial Sequence: Synthetic oligonucleotide
gaucgaugcagcagcucac

SEQ ID NO: 2056750 - RNA, 19 nt, Artificial Sequence
  Description of Artificial Sequence: Synthetic oligonucleotide
aguuagcucugcccagagu

SEQ ID NO: 2056751 - RNA, 19 nt, Artificial Sequence
  Description of Artificial Sequence: Synthetic oligonucleotide
guguuuccaaccuuuucua

SEQ ID NO: 2056752 - RNA, 19 nt, Artificial Sequence
  Description of Artificial Sequence: Synthetic oligonucleotide
agaggagguaagcgaagua

SEQ ID NO: 2056753 - RNA, 19 nt, Artificial Sequence
  Description of Artificial Sequence: Synthetic oligonucleotide
acucggcaucagcuggccg

SEQ ID NO: 2056754 - RNA, 19 nt, Artificial Sequence
  Description of Artificial Sequence: Synthetic oligonucleotide
cucggaggaggcguaguag

SEQ ID NO: 2056755 - RNA, 19 nt, Artificial Sequence
  Description of Artificial Sequence: Synthetic oligonucleotide
gccaucacccaaaugacca

SEQ ID NO: 2056756 - RNA, 19 nt, Artificial Sequence
  Description of Artificial Sequence: Synthetic oligonucleotide
ugauggccaucacccaaau

SEQ ID NO: 2056757 - RNA, 19 nt, Artificial Sequence
  Description of Artificial Sequence: Synthetic oligonucleotide
cccaaacugccaaucacug

SEQ ID NO: 2056758 - RNA, 19 nt, Artificial Sequence
  Description of Artificial Sequence: Synthetic oligonucleotide
uggccggugcuguuguaac

SEQ ID NO: 2056759 - RNA, 19 nt, Artificial Sequence
  Description of Artificial Sequence: Synthetic oligonucleotide
caccgaaugauggacaugu

SEQ ID NO: 2056760 - RNA, 19 nt, Artificial Sequence
  Description of Artificial Sequence: Synthetic oligonucleotide
acaagaugccguagaggug

SEQ ID NO: 2056761 - RNA, 19 nt, Artificial Sequence
  Description of Artificial Sequence: Synthetic oligonucleotide
gaccaggcaagugaaguua

SEQ ID NO: 2056762 - RNA, 19 nt, Artificial Sequence
  Description of Artificial Sequence: Synthetic oligonucleotide
gcugcaguggcgaagcgac

SEQ ID NO: 2056763 - RNA, 19 nt, Artificial Sequence
  Description of Artificial Sequence: Synthetic oligonucleotide
ggggucggagcuuucuuug

SEQ ID NO: 2056764 - RNA, 19 nt, Artificial Sequence
  Description of Artificial Sequence: Synthetic oligonucleotide
gaggcguacauguuacaau

SEQ ID NO: 2056765 - RNA, 19 nt, Artificial Sequence
  Description of Artificial Sequence: Synthetic oligonucleotide
ggaggcguaguaguaaauc

SEQ ID NO: 2056766 - RNA, 19 nt, Artificial Sequence
  Description of Artificial Sequence: Synthetic oligonucleotide
gacaccgaaugauggacau

SEQ ID NO: 2056767 - RNA, 19 nt, Artificial Sequence
  Description of Artificial Sequence: Synthetic oligonucleotide
agcauaucguggaaaugau

SEQ ID NO: 2056768 - RNA, 19 nt, Artificial Sequence
  Description of Artificial Sequence: Synthetic oligonucleotide
cuuaaggguuuguuucuua

SEQ ID NO: 2056769 - RNA, 19 nt, Artificial Sequence
  Description of Artificial Sequence: Synthetic oligonucleotide
gcgguuggcaacugaggag

SEQ ID NO: 2056770 - RNA, 19 nt, Artificial Sequence
  Description of Artificial Sequence: Synthetic oligonucleotide
ugcugcgguuggcaacuga

SEQ ID NO: 2056771 - RNA, 19 nt, Artificial Sequence
  Description of Artificial Sequence: Synthetic oligonucleotide
uggaggcguacauguuaca

SEQ ID NO: 2056772 - RNA, 19 nt, Artificial Sequence
  Description of Artificial Sequence: Synthetic oligonucleotide
ugccaaucacugaccggaa

SEQ ID NO: 2056773 - RNA, 19 nt, Artificial Sequence
  Description of Artificial Sequence: Synthetic oligonucleotide
uggguguguuuccaaccuu

SEQ ID NO: 2056774 - RNA, 19 nt, Artificial Sequence
  Description of Artificial Sequence: Synthetic oligonucleotide
aguggcgaagcgacacauc

SEQ ID NO: 2056775 - RNA, 19 nt, Artificial Sequence
  Description of Artificial Sequence: Synthetic oligonucleotide
gcugcgguuggcaacugag

SEQ ID NO: 2056776 - RNA, 19 nt, Artificial Sequence
  Description of Artificial Sequence: Synthetic oligonucleotide
ggugacuagagcagguauc

SEQ ID NO: 2056777 - RNA, 19 nt, Artificial Sequence
  Description of Artificial Sequence: Synthetic oligonucleotide
acucggaggaggcguagua

SEQ ID NO: 2056778 - RNA, 19 nt, Artificial Sequence
  Description of Artificial Sequence: Synthetic oligonucleotide
ugcuguuauucaggugacu

SEQ ID NO: 2056779 - RNA, 19 nt, Artificial Sequence
  Description of Artificial Sequence: Synthetic oligonucleotide
augugaccuucuagcaauc

SEQ ID NO: 2056780 - RNA, 19 nt, Artificial Sequence
  Description of Artificial Sequence: Synthetic oligonucleotide
caaugcuuaugacagucau

SEQ ID NO: 2056781 - RNA, 19 nt, Artificial Sequence
  Description of Artificial Sequence: Synthetic oligonucleotide
cacgacugccaggaaccgg

SEQ ID NO: 2056782 - RNA, 19 nt, Artificial Sequence
  Description of Artificial Sequence: Synthetic oligonucleotide
gcuguuauucaggugacua

SEQ ID NO: 2056783 - RNA, 19 nt, Artificial Sequence
  Description of Artificial Sequence: Synthetic oligonucleotide
agcccgggacuucuugcug

SEQ ID NO: 2056784 - RNA, 19 nt, Artificial Sequence
  Description of Artificial Sequence: Synthetic oligonucleotide
cguacauguuacaauaaaa

SEQ ID NO: 2056785 - RNA, 19 nt, Artificial Sequence
  Description of Artificial Sequence: Synthetic oligonucleotide
cauguagcauaucguggaa

SEQ ID NO: 2056786 - RNA, 19 nt, Artificial Sequence
  Description of Artificial Sequence: Synthetic oligonucleotide
augauggccaucacccaaa

SEQ ID NO: 2056787 - RNA, 19 nt, Artificial Sequence
  Description of Artificial Sequence: Synthetic oligonucleotide
augggguacacgacugcca

SEQ ID NO: 2056788 - RNA, 19 nt, Artificial Sequence
  Description of Artificial Sequence: Synthetic oligonucleotide
gcguacauguuacaauaaa

SEQ ID NO: 2056789 - RNA, 19 nt, Artificial Sequence
  Description of Artificial Sequence: Synthetic oligonucleotide
gcaagugaaguuagcucug

SEQ ID NO: 2056790 - RNA, 19 nt, Artificial Sequence
  Description of Artificial Sequence: Synthetic oligonucleotide
cuggaugggguacacgacu

SEQ ID NO: 2056791 - RNA, 19 nt, Artificial Sequence
  Description of Artificial Sequence: Synthetic oligonucleotide
cauugaggacaucguggca

SEQ ID NO: 2056792 - RNA, 19 nt, Artificial Sequence
  Description of Artificial Sequence: Synthetic oligonucleotide
acaccgaaugauggacaug

SEQ ID NO: 2056793 - RNA, 19 nt, Artificial Sequence
  Description of Artificial Sequence: Synthetic oligonucleotide
auccuaaccuacagcuacu

SEQ ID NO: 2056794 - RNA, 19 nt, Artificial Sequence
  Description of Artificial Sequence: Synthetic oligonucleotide
gacagcggagaaggccgag

SEQ ID NO: 2056795 - RNA, 19 nt, Artificial Sequence
  Description of Artificial Sequence: Synthetic oligonucleotide
guaagcgaaguaggccuuc

SEQ ID NO: 2056796 - RNA, 19 nt, Artificial Sequence
  Description of Artificial Sequence: Synthetic oligonucleotide
uucuagcaauccuccccua

SEQ ID NO: 2056797 - RNA, 19 nt, Artificial Sequence
  Description of Artificial Sequence: Synthetic oligonucleotide
gaacaaagcccgggacuuc

SEQ ID NO: 2056798 - RNA, 19 nt, Artificial Sequence
  Description of Artificial Sequence: Synthetic oligonucleotide
cagagugcgccaggacagg

SEQ ID NO: 2056799 - RNA, 19 nt, Artificial Sequence
  Description of Artificial Sequence: Synthetic oligonucleotide
cuggaacccggguggucug

SEQ ID NO: 2056800 - RNA, 19 nt, Artificial Sequence
  Description of Artificial Sequence: Synthetic oligonucleotide
ccccaugauggccaucacc

SEQ ID NO: 2056801 - RNA, 19 nt, Artificial Sequence
  Description of Artificial Sequence: Synthetic oligonucleotide
gggguacacgacugccagg

SEQ ID NO: 2056802 - RNA, 19 nt, Artificial Sequence
  Description of Artificial Sequence: Synthetic oligonucleotide
gccguagaggugccucugg

SEQ ID NO: 2056803 - RNA, 19 nt, Artificial Sequence
  Description of Artificial Sequence: Synthetic oligonucleotide
acugaccggaaaaguagua

SEQ ID NO: 2056804 - RNA, 19 nt, Artificial Sequence
  Description of Artificial Sequence: Synthetic oligonucleotide
gauggacauguagcauauc

SEQ ID NO: 2056805 - RNA, 19 nt, Artificial Sequence
  Description of Artificial Sequence: Synthetic oligonucleotide
caggcaagugaaguuagcu

SEQ ID NO: 2056806 - RNA, 19 nt, Artificial Sequence
  Description of Artificial Sequence: Synthetic oligonucleotide
guagacuuaaggguuuguu

SEQ ID NO: 2056807 - RNA, 19 nt, Artificial Sequence
  Description of Artificial Sequence: Synthetic oligonucleotide
cacugaccggaaaaguagu

SEQ ID NO: 2056808 - RNA, 19 nt, Artificial Sequence
  Description of Artificial Sequence: Synthetic oligonucleotide
uggaacccggguggucugc

SEQ ID NO: 2056809 - RNA, 19 nt, Artificial Sequence
  Description of Artificial Sequence: Synthetic oligonucleotide
ggaggcguacauguuacaa

SEQ ID NO: 2056810 - RNA, 19 nt, Artificial Sequence
  Description of Artificial Sequence: Synthetic oligonucleotide
gcggagaaggccgagaagu

SEQ ID NO: 2056811 - RNA, 19 nt, Artificial Sequence
  Description of Artificial Sequence: Synthetic oligonucleotide
ccgagaaguaguaggagua

SEQ ID NO: 2056812 - RNA, 19 nt, Artificial Sequence
  Description of Artificial Sequence: Synthetic oligonucleotide
acgcugcaguggcgaagcg

SEQ ID NO: 2056813 - RNA, 19 nt, Artificial Sequence
  Description of Artificial Sequence: Synthetic oligonucleotide
gggcccaguauccaccaga

SEQ ID NO: 2056814 - RNA, 19 nt, Artificial Sequence
  Description of Artificial Sequence: Synthetic oligonucleotide
gcccgggacuucuugcugc

SEQ ID NO: 2056815 - RNA, 19 nt, Artificial Sequence
  Description of Artificial Sequence: Synthetic oligonucleotide
aauccuccccuaagcuaau

SEQ ID NO: 2056816 - RNA, 19 nt, Artificial Sequence
  Description of Artificial Sequence: Synthetic oligonucleotide
guaggccuucucuguggca

SEQ ID NO: 2056817 - RNA, 19 nt, Artificial Sequence
  Description of Artificial Sequence: Synthetic oligonucleotide
cuguuaggccuugcuuaug

SEQ ID NO: 2056818 - RNA, 19 nt, Artificial Sequence
  Description of Artificial Sequence: Synthetic oligonucleotide
uguuggggucggagcuuuc

SEQ ID NO: 2056819 - RNA, 19 nt, Artificial Sequence
  Description of Artificial Sequence: Synthetic oligonucleotide
gcauaucguggaaaugauc

SEQ ID NO: 2056820 - RNA, 19 nt, Artificial Sequence
  Description of Artificial Sequence: Synthetic oligonucleotide
gucucauugaggacaucgu

SEQ ID NO: 2056821 - RNA, 19 nt, Artificial Sequence
  Description of Artificial Sequence: Synthetic oligonucleotide
gcagcacaagaugccguag

SEQ ID NO: 2056822 - RNA, 19 nt, Artificial Sequence
  Description of Artificial Sequence: Synthetic oligonucleotide
ggacuggaugggguacacg

SEQ ID NO: 2056823 - RNA, 19 nt, Artificial Sequence
  Description of Artificial Sequence: Synthetic oligonucleotide
ccguagaggugccucuggc

SEQ ID NO: 2056824 - RNA, 19 nt, Artificial Sequence
  Description of Artificial Sequence: Synthetic oligonucleotide
aggaaccggucaaugcuua

SEQ ID NO: 2056825 - RNA, 19 nt, Artificial Sequence
  Description of Artificial Sequence: Synthetic oligonucleotide
aggaggcguaguaguaaau

SEQ ID NO: 2056826 - RNA, 19 nt, Artificial Sequence
  Description of Artificial Sequence: Synthetic oligonucleotide
ccauuuuacucggcaucag

SEQ ID NO: 2056827 - RNA, 19 nt, Artificial Sequence
  Description of Artificial Sequence: Synthetic oligonucleotide
ggaacaaagcccgggacuu

SEQ ID NO: 2056828 - RNA, 19 nt, Artificial Sequence
  Description of Artificial Sequence: Synthetic oligonucleotide
agacagcggagaaggccga

SEQ ID NO: 2056829 - RNA, 19 nt, Artificial Sequence
  Description of Artificial Sequence: Synthetic oligonucleotide
cagaggagguaagcgaagu

SEQ ID NO: 2056830 - RNA, 19 nt, Artificial Sequence
  Description of Artificial Sequence: Synthetic oligonucleotide
guuggggucggagcuuucu

SEQ ID NO: 2056831 - RNA, 19 nt, Artificial Sequence
  Description of Artificial Sequence: Synthetic oligonucleotide
cagcuggccggugcuguug

SEQ ID NO: 2056832 - RNA, 19 nt, Artificial Sequence
  Description of Artificial Sequence: Synthetic oligonucleotide
gcuguuaggccuugcuuau

SEQ ID NO: 2056833 - RNA, 19 nt, Artificial Sequence
  Description of Artificial Sequence: Synthetic oligonucleotide
ggcguacauguuacaauaa

SEQ ID NO: 2056834 - RNA, 19 nt, Artificial Sequence
  Description of Artificial Sequence: Synthetic oligonucleotide
cgaagcgacacaucccaga

SEQ ID NO: 2056835 - RNA, 19 nt, Artificial Sequence
  Description of Artificial Sequence: Synthetic oligonucleotide
cuggccggugcuguuguaa

SEQ ID NO: 2056836 - RNA, 19 nt, Artificial Sequence
  Description of Artificial Sequence: Synthetic oligonucleotide
agggcacauggguguguuu

SEQ ID NO: 2056837 - RNA, 19 nt, Artificial Sequence
  Description of Artificial Sequence: Synthetic oligonucleotide
caucguggcagguggugau

SEQ ID NO: 2056838 - RNA, 19 nt, Artificial Sequence
  Description of Artificial Sequence: Synthetic oligonucleotide
gcaguggcgaagcgacaca

SEQ ID NO: 2056839 - RNA, 19 nt, Artificial Sequence
  Description of Artificial Sequence: Synthetic oligonucleotide
gccaaucacugaccggaaa

SEQ ID NO: 2056840 - RNA, 19 nt, Artificial Sequence
  Description of Artificial Sequence: Synthetic oligonucleotide
ccuugcuuaugugaaauau

SEQ ID NO: 2056841 - RNA, 19 nt, Artificial Sequence
  Description of Artificial Sequence: Synthetic oligonucleotide
caggugacuagagcaggua

SEQ ID NO: 2056842 - RNA, 19 nt, Artificial Sequence
  Description of Artificial Sequence: Synthetic oligonucleotide
uugcugcgguuggcaacug

SEQ ID NO: 2056843 - RNA, 19 nt, Artificial Sequence
  Description of Artificial Sequence: Synthetic oligonucleotide
cguagaggugccucuggca

SEQ ID NO: 2056844 - RNA, 19 nt, Artificial Sequence
  Description of Artificial Sequence: Synthetic oligonucleotide
cccagacccaaacugccaa

SEQ ID NO: 2056845 - RNA, 19 nt, Artificial Sequence
  Description of Artificial Sequence: Synthetic oligonucleotide
gcgaagcgacacaucccag

SEQ ID NO: 2056846 - RNA, 19 nt, Artificial Sequence
  Description of Artificial Sequence: Synthetic oligonucleotide
ggccuugcuuaugugaaau

SEQ ID NO: 2056847 - RNA, 19 nt, Artificial Sequence
  Description of Artificial Sequence: Synthetic oligonucleotide
cucugcccagagugcgcca

SEQ ID NO: 2056848 - RNA, 19 nt, Artificial Sequence
  Description of Artificial Sequence: Synthetic oligonucleotide
ggggcccaguauccaccag

SEQ ID NO: 2056849 - RNA, 19 nt, Artificial Sequence
  Description of Artificial Sequence: Synthetic oligonucleotide
gguacacgacugccaggaa

SEQ ID NO: 2056850 - RNA, 19 nt, Artificial Sequence
  Description of Artificial Sequence: Synthetic oligonucleotide
gggcugucgacaggaacaa

SEQ ID NO: 2056851 - RNA, 19 nt, Artificial Sequence
  Description of Artificial Sequence: Synthetic oligonucleotide
auccuccccuaagcuaaua

SEQ ID NO: 2056852 - RNA, 19 nt, Artificial Sequence
  Description of Artificial Sequence: Synthetic oligonucleotide
caguggcgaagcgacacau

SEQ ID NO: 2056853 - RNA, 19 nt, Artificial Sequence
  Description of Artificial Sequence: Synthetic oligonucleotide
ggaaccggucaaugcuuau

SEQ ID NO: 2056854 - RNA, 19 nt, Artificial Sequence
  Description of Artificial Sequence: Synthetic oligonucleotide
cacagacgcagaggaggua

SEQ ID NO: 2056855 - RNA, 19 nt, Artificial Sequence
  Description of Artificial Sequence: Synthetic oligonucleotide
ccggguggucugcuccuug

SEQ ID NO: 2056856 - RNA, 19 nt, Artificial Sequence
  Description of Artificial Sequence: Synthetic oligonucleotide
ggccggugcuguuguaacu

SEQ ID NO: 2056857 - RNA, 19 nt, Artificial Sequence
  Description of Artificial Sequence: Synthetic oligonucleotide
cccuaagcuaauagcuuuu

SEQ ID NO: 2056858 - RNA, 19 nt, Artificial Sequence
  Description of Artificial Sequence: Synthetic oligonucleotide
cggaggaggcguaguagua

SEQ ID NO: 2056859 - RNA, 19 nt, Artificial Sequence
  Description of Artificial Sequence: Synthetic oligonucleotide
ggcugucgacaggaacaaa

SEQ ID NO: 2056860 - RNA, 19 nt, Artificial Sequence
  Description of Artificial Sequence: Synthetic oligonucleotide
ggacaucguggcagguggu

SEQ ID NO: 2056861 - RNA, 19 nt, Artificial Sequence
  Description of Artificial Sequence: Synthetic oligonucleotide
ccagacccaaacugccaau

SEQ ID NO: 2056862 - RNA, 19 nt, Artificial Sequence
  Description of Artificial Sequence: Synthetic oligonucleotide
ccggugcuguuguaacugu

SEQ ID NO: 2056863 - RNA, 19 nt, Artificial Sequence
  Description of Artificial Sequence: Synthetic oligonucleotide
cccuggaacccgggugguc

SEQ ID NO: 2056864 - RNA, 19 nt, Artificial Sequence
  Description of Artificial Sequence: Synthetic oligonucleotide
cccggguggucugcuccuu

SEQ ID NO: 2056865 - RNA, 19 nt, Artificial Sequence
  Description of Artificial Sequence: Synthetic oligonucleotide
aaugaaguucaauuaaacc

SEQ ID NO: 2056866 - RNA, 19 nt, Artificial Sequence
  Description of Artificial Sequence: Synthetic oligonucleotide
uaaccuaagaauuauaggg

SEQ ID NO: 2056867 - RNA, 19 nt, Artificial Sequence
  Description of Artificial Sequence: Synthetic oligonucleotide
aagaaaucaaauuauaacu

SEQ ID NO: 2056868 - RNA, 19 nt, Artificial Sequence
  Description of Artificial Sequence: Synthetic oligonucleotide
aaaguaucugcauaaaguc

SEQ ID NO: 2056869 - RNA, 19 nt, Artificial Sequence
  Description of Artificial Sequence: Synthetic oligonucleotide
aauuccaucacuaaaagca

SEQ ID NO: 2056870 - RNA, 19 nt, Artificial Sequence
  Description of Artificial Sequence: Synthetic oligonucleotide
auaaacuuccuauuguggc

SEQ ID NO: 2056871 - RNA, 19 nt, Artificial Sequence
  Description of Artificial Sequence: Synthetic oligonucleotide
uucaacuuaauauaccggg

SEQ ID NO: 2056872 - RNA, 19 nt, Artificial Sequence
  Description of Artificial Sequence: Synthetic oligonucleotide
uuuagaauaugucuguuug

SEQ ID NO: 2056873 - RNA, 19 nt, Artificial Sequence
  Description of Artificial Sequence: Synthetic oligonucleotide
agcaacuuaauuuauaucu

SEQ ID NO: 2056874 - RNA, 19 nt, Artificial Sequence
  Description of Artificial Sequence: Synthetic oligonucleotide
uuaauuuauaguuaaagua

SEQ ID NO: 2056875 - RNA, 19 nt, Artificial Sequence
  Description of Artificial Sequence: Synthetic oligonucleotide
uguaaccuaagaauuauag

SEQ ID NO: 2056876 - RNA, 19 nt, Artificial Sequence
  Description of Artificial Sequence: Synthetic oligonucleotide
uguaccaugaaaacuaagc

SEQ ID NO: 2056877 - RNA, 19 nt, Artificial Sequence
  Description of Artificial Sequence: Synthetic oligonucleotide
ugaaguucaauuaaacccc

SEQ ID NO: 2056878 - RNA, 19 nt, Artificial Sequence
  Description of Artificial Sequence: Synthetic oligonucleotide
acuuaauuuauaucucucc

SEQ ID NO: 2056879 - RNA, 19 nt, Artificial Sequence
  Description of Artificial Sequence: Synthetic oligonucleotide
agaauuauagggaaagucc

SEQ ID NO: 2056880 - RNA, 19 nt, Artificial Sequence
  Description of Artificial Sequence: Synthetic oligonucleotide
ugugguuuaagaaaacugc

SEQ ID NO: 2056881 - RNA, 19 nt, Artificial Sequence
  Description of Artificial Sequence: Synthetic oligonucleotide
cuuucaacuuaauauaccg

SEQ ID NO: 2056882 - RNA, 19 nt, Artificial Sequence
  Description of Artificial Sequence: Synthetic oligonucleotide
aaacuaagcucugagauuc

SEQ ID NO: 2056883 - RNA, 19 nt, Artificial Sequence
  Description of Artificial Sequence: Synthetic oligonucleotide
uuauaguuaaaguaucugc

SEQ ID NO: 2056884 - RNA, 19 nt, Artificial Sequence
  Description of Artificial Sequence: Synthetic oligonucleotide
uuuauaucucuccuuagag

SEQ ID NO: 2056885 - RNA, 19 nt, Artificial Sequence
  Description of Artificial Sequence: Synthetic oligonucleotide
uuaucuugguuuuaaauug

SEQ ID NO: 2056886 - RNA, 19 nt, Artificial Sequence
  Description of Artificial Sequence: Synthetic oligonucleotide
auuaauuuauaguuaaagu

SEQ ID NO: 2056887 - RNA, 19 nt, Artificial Sequence
  Description of Artificial Sequence: Synthetic oligonucleotide
uuauucugaauaaacuucc

SEQ ID NO: 2056888 - RNA, 19 nt, Artificial Sequence
  Description of Artificial Sequence: Synthetic oligonucleotide
uaauuguuuaucaucauaa

SEQ ID NO: 2056889 - RNA, 19 nt, Artificial Sequence
  Description of Artificial Sequence: Synthetic oligonucleotide
uuuauucugaauaaacuuc

SEQ ID NO: 2056890 - RNA, 19 nt, Artificial Sequence
  Description of Artificial Sequence: Synthetic oligonucleotide
aaauggcuuuuccucaucc

SEQ ID NO: 2056891 - RNA, 19 nt, Artificial Sequence
  Description of Artificial Sequence: Synthetic oligonucleotide
cacauuauagggaaaaggc

SEQ ID NO: 2056892 - RNA, 19 nt, Artificial Sequence
  Description of Artificial Sequence: Synthetic oligonucleotide
aauuauaacucucacuaau

SEQ ID NO: 2056893 - RNA, 19 nt, Artificial Sequence
  Description of Artificial Sequence: Synthetic oligonucleotide
acuaaaagcaacuuaauuu

SEQ ID NO: 2056894 - RNA, 19 nt, Artificial Sequence
  Description of Artificial Sequence: Synthetic oligonucleotide
uuuuguaccaugaaaacua

SEQ ID NO: 2056895 - RNA, 19 nt, Artificial Sequence
  Description of Artificial Sequence: Synthetic oligonucleotide
uuuuggaacaacacgaccu

SEQ ID NO: 2056896 - RNA, 19 nt, Artificial Sequence
  Description of Artificial Sequence: Synthetic oligonucleotide
uauuggaaagaauauauaa

SEQ ID NO: 2056897 - RNA, 19 nt, Artificial Sequence
  Description of Artificial Sequence: Synthetic oligonucleotide
ugcaaguuaaucuaauuca

SEQ ID NO: 2056898 - RNA, 19 nt, Artificial Sequence
  Description of Artificial Sequence: Synthetic oligonucleotide
aaauaaguguagcaguuca

SEQ ID NO: 2056899 - RNA, 19 nt, Artificial Sequence
  Description of Artificial Sequence: Synthetic oligonucleotide
aaagcaacuuaauuuauau

SEQ ID NO: 2056900 - RNA, 19 nt, Artificial Sequence
  Description of Artificial Sequence: Synthetic oligonucleotide
aguuggaagaacuugauaa

SEQ ID NO: 2056901 - RNA, 19 nt, Artificial Sequence
  Description of Artificial Sequence: Synthetic oligonucleotide
uaauauaccggguaugagc

SEQ ID NO: 2056902 - RNA, 19 nt, Artificial Sequence
  Description of Artificial Sequence: Synthetic oligonucleotide
aaguuaaucuaauucaaaa

SEQ ID NO: 2056903 - RNA, 19 nt, Artificial Sequence
  Description of Artificial Sequence: Synthetic oligonucleotide
gaauaugucuguuuguggc

SEQ ID NO: 2056904 - RNA, 19 nt, Artificial Sequence
  Description of Artificial Sequence: Synthetic oligonucleotide
ugaaacucaaguuuguaac

SEQ ID NO: 2056905 - RNA, 19 nt, Artificial Sequence
  Description of Artificial Sequence: Synthetic oligonucleotide
uuuagaaacauucaccauu

SEQ ID NO: 2056906 - RNA, 19 nt, Artificial Sequence
  Description of Artificial Sequence: Synthetic oligonucleotide
uucuuaucccacauuauag

SEQ ID NO: 2056907 - RNA, 19 nt, Artificial Sequence
  Description of Artificial Sequence: Synthetic oligonucleotide
uuuaaauggucuuaauugu

SEQ ID NO: 2056908 - RNA, 19 nt, Artificial Sequence
  Description of Artificial Sequence: Synthetic oligonucleotide
aaacaauccaaguacugca

SEQ ID NO: 2056909 - RNA, 19 nt, Artificial Sequence
  Description of Artificial Sequence: Synthetic oligonucleotide
ucuacaaacaauccaagua

SEQ ID NO: 2056910 - RNA, 19 nt, Artificial Sequence
  Description of Artificial Sequence: Synthetic oligonucleotide
gaaacauucaccauuuuac

SEQ ID NO: 2056911 - RNA, 19 nt, Artificial Sequence
  Description of Artificial Sequence: Synthetic oligonucleotide
uuuguguucuuaaagaaua

SEQ ID NO: 2056912 - RNA, 19 nt, Artificial Sequence
  Description of Artificial Sequence: Synthetic oligonucleotide
uucaaaaccaguucuuaag

SEQ ID NO: 2056913 - RNA, 19 nt, Artificial Sequence
  Description of Artificial Sequence: Synthetic oligonucleotide
ugauugauugcauaaguga

SEQ ID NO: 2056914 - RNA, 19 nt, Artificial Sequence
  Description of Artificial Sequence: Synthetic oligonucleotide
ucuuaucccacauuauagg

SEQ ID NO: 2056915 - RNA, 19 nt, Artificial Sequence
  Description of Artificial Sequence: Synthetic oligonucleotide
uuucaacuuaauauaccgg

SEQ ID NO: 2056916 - RNA, 19 nt, Artificial Sequence
  Description of Artificial Sequence: Synthetic oligonucleotide
aauggcuuuuccucauccc

SEQ ID NO: 2056917 - RNA, 19 nt, Artificial Sequence
  Description of Artificial Sequence: Synthetic oligonucleotide
aaaacuaguuuuccuuguc

SEQ ID NO: 2056918 - RNA, 19 nt, Artificial Sequence
  Description of Artificial Sequence: Synthetic oligonucleotide
acucucacuaaucuaaguc

SEQ ID NO: 2056919 - RNA, 19 nt, Artificial Sequence
  Description of Artificial Sequence: Synthetic oligonucleotide
aucuuuaaaucauucacug

SEQ ID NO: 2056920 - RNA, 19 nt, Artificial Sequence
  Description of Artificial Sequence: Synthetic oligonucleotide
uccuuuagaaacauucacc

SEQ ID NO: 2056921 - RNA, 19 nt, Artificial Sequence
  Description of Artificial Sequence: Synthetic oligonucleotide
aaaucaaauuauaacucuc

SEQ ID NO: 2056922 - RNA, 19 nt, Artificial Sequence
  Description of Artificial Sequence: Synthetic oligonucleotide
agaaaucaaauuauaacuc

SEQ ID NO: 2056923 - RNA, 19 nt, Artificial Sequence
  Description of Artificial Sequence: Synthetic oligonucleotide
cuacaaacaauccaaguac

SEQ ID NO: 2056924 - RNA, 19 nt, Artificial Sequence
  Description of Artificial Sequence: Synthetic oligonucleotide
uuauaacucucacuaaucu

SEQ ID NO: 2056925 - RNA, 19 nt, Artificial Sequence
  Description of Artificial Sequence: Synthetic oligonucleotide
aauuuauaucucuccuuag

SEQ ID NO: 2056926 - RNA, 19 nt, Artificial Sequence
  Description of Artificial Sequence: Synthetic oligonucleotide
aaaucauucacugauugau

SEQ ID NO: 2056927 - RNA, 19 nt, Artificial Sequence
  Description of Artificial Sequence: Synthetic oligonucleotide
ugcuuuuguaccaugaaaa

SEQ ID NO: 2056928 - RNA, 19 nt, Artificial Sequence
  Description of Artificial Sequence: Synthetic oligonucleotide
cauuauagggaaaaggcuc

SEQ ID NO: 2056929 - RNA, 19 nt, Artificial Sequence
  Description of Artificial Sequence: Synthetic oligonucleotide
guaaccuaagaauuauagg

SEQ ID NO: 2056930 - RNA, 19 nt, Artificial Sequence
  Description of Artificial Sequence: Synthetic oligonucleotide
ucugucuacaaacaaucca

SEQ ID NO: 2056931 - RNA, 19 nt, Artificial Sequence
  Description of Artificial Sequence: Synthetic oligonucleotide
uaauuuauaucucuccuua

SEQ ID NO: 2056932 - RNA, 19 nt, Artificial Sequence
  Description of Artificial Sequence: Synthetic oligonucleotide
uccuauucacaucuuuugg

SEQ ID NO: 2056933 - RNA, 19 nt, Artificial Sequence
  Description of Artificial Sequence: Synthetic oligonucleotide
ugucuugaugcauugacca

SEQ ID NO: 2056934 - RNA, 19 nt, Artificial Sequence
  Description of Artificial Sequence: Synthetic oligonucleotide
uuacccagggauauaauga

SEQ ID NO: 2056935 - RNA, 19 nt, Artificial Sequence
  Description of Artificial Sequence: Synthetic oligonucleotide
uaugucuugaugcauugac

SEQ ID NO: 2056936 - RNA, 19 nt, Artificial Sequence
  Description of Artificial Sequence: Synthetic oligonucleotide
acauuauuaggcugguaac

SEQ ID NO: 2056937 - RNA, 19 nt, Artificial Sequence
  Description of Artificial Sequence: Synthetic oligonucleotide
ugguuuuaaauugacacca

SEQ ID NO: 2056938 - RNA, 19 nt, Artificial Sequence
  Description of Artificial Sequence: Synthetic oligonucleotide
ugucagagaaaauaaaaua

SEQ ID NO: 2056939 - RNA, 19 nt, Artificial Sequence
  Description of Artificial Sequence: Synthetic oligonucleotide
uuuauaguuaaaguaucug

SEQ ID NO: 2056940 - RNA, 19 nt, Artificial Sequence
  Description of Artificial Sequence: Synthetic oligonucleotide
aaacauucaccauuuuaca

SEQ ID NO: 2056941 - RNA, 19 nt, Artificial Sequence
  Description of Artificial Sequence: Synthetic oligonucleotide
ucuuucaacuuaauauacc

SEQ ID NO: 2056942 - RNA, 19 nt, Artificial Sequence
  Description of Artificial Sequence: Synthetic oligonucleotide
aauauaccggguaugagca

SEQ ID NO: 2056943 - RNA, 19 nt, Artificial Sequence
  Description of Artificial Sequence: Synthetic oligonucleotide
ucaaguuuguaaccuaaga

SEQ ID NO: 2056944 - RNA, 19 nt, Artificial Sequence
  Description of Artificial Sequence: Synthetic oligonucleotide
agcaguucacauuauuagg

SEQ ID NO: 2056945 - RNA, 19 nt, Artificial Sequence
  Description of Artificial Sequence: Synthetic oligonucleotide
aaaauaaguguagcaguuc

SEQ ID NO: 2056946 - RNA, 19 nt, Artificial Sequence
  Description of Artificial Sequence: Synthetic oligonucleotide
uuauaucucuccuuagagc

SEQ ID NO: 2056947 - RNA, 19 nt, Artificial Sequence
  Description of Artificial Sequence: Synthetic oligonucleotide
cagucuaaacuuuaguagc

SEQ ID NO: 2056948 - RNA, 19 nt, Artificial Sequence
  Description of Artificial Sequence: Synthetic oligonucleotide
uugguuuuaaauugacacc

SEQ ID NO: 2056949 - RNA, 19 nt, Artificial Sequence
  Description of Artificial Sequence: Synthetic oligonucleotide
ucaaaaccaguucuuaagu

SEQ ID NO: 2056950 - RNA, 19 nt, Artificial Sequence
  Description of Artificial Sequence: Synthetic oligonucleotide
uauuuguacucccauauuu

SEQ ID NO: 2056951 - RNA, 19 nt, Artificial Sequence
  Description of Artificial Sequence: Synthetic oligonucleotide
uaagugaauaagauucugu

SEQ ID NO: 2056952 - RNA, 19 nt, Artificial Sequence
  Description of Artificial Sequence: Synthetic oligonucleotide
aauauuugaacagucuaaa

SEQ ID NO: 2056953 - RNA, 19 nt, Artificial Sequence
  Description of Artificial Sequence: Synthetic oligonucleotide
uucuuaaguuggaagaacu

SEQ ID NO: 2056954 - RNA, 19 nt, Artificial Sequence
  Description of Artificial Sequence: Synthetic oligonucleotide
aaaaggcucggcuacuaug

SEQ ID NO: 2056955 - RNA, 19 nt, Artificial Sequence
  Description of Artificial Sequence: Synthetic oligonucleotide
aauaugucuguuuguggca

SEQ ID NO: 2056956 - RNA, 19 nt, Artificial Sequence
  Description of Artificial Sequence: Synthetic oligonucleotide
agucuuuguguucuuaaag

SEQ ID NO: 2056957 - RNA, 19 nt, Artificial Sequence
  Description of Artificial Sequence: Synthetic oligonucleotide
uucuuucaacuuaauauac

SEQ ID NO: 2056958 - RNA, 19 nt, Artificial Sequence
  Description of Artificial Sequence: Synthetic oligonucleotide
uugucagagaaaauaaaau

SEQ ID NO: 2056959 - RNA, 19 nt, Artificial Sequence
  Description of Artificial Sequence: Synthetic oligonucleotide
uauagggaaaguccggugu

SEQ ID NO: 2056960 - RNA, 19 nt, Artificial Sequence
  Description of Artificial Sequence: Synthetic oligonucleotide
aauuauagggaaaguccgg

SEQ ID NO: 2056961 - RNA, 19 nt, Artificial Sequence
  Description of Artificial Sequence: Synthetic oligonucleotide
cuaaaacuaguuuuccuug

SEQ ID NO: 2056962 - RNA, 19 nt, Artificial Sequence
  Description of Artificial Sequence: Synthetic oligonucleotide
aaauugacaccaaaagucu

SEQ ID NO: 2056963 - RNA, 19 nt, Artificial Sequence
  Description of Artificial Sequence: Synthetic oligonucleotide
auauaaugaaguucaauua

SEQ ID NO: 2056964 - RNA, 19 nt, Artificial Sequence
  Description of Artificial Sequence: Synthetic oligonucleotide
auaagauucuguuuucccu

SEQ ID NO: 2056965 - RNA, 19 nt, Artificial Sequence
  Description of Artificial Sequence: Synthetic oligonucleotide
aaucaaauuauaacucuca

SEQ ID NO: 2056966 - RNA, 19 nt, Artificial Sequence
  Description of Artificial Sequence: Synthetic oligonucleotide
aaguauuuauucacucuac

SEQ ID NO: 2056967 - RNA, 19 nt, Artificial Sequence
  Description of Artificial Sequence: Synthetic oligonucleotide
gacugaaauucccugaaac

SEQ ID NO: 2056968 - RNA, 19 nt, Artificial Sequence
  Description of Artificial Sequence: Synthetic oligonucleotide
auuuauaucucuccuuaga

SEQ ID NO: 2056969 - RNA, 19 nt, Artificial Sequence
  Description of Artificial Sequence: Synthetic oligonucleotide
accaaguauuuauucacuc

SEQ ID NO: 2056970 - RNA, 19 nt, Artificial Sequence
  Description of Artificial Sequence: Synthetic oligonucleotide
uuuggaacaacacgaccug

SEQ ID NO: 2056971 - RNA, 19 nt, Artificial Sequence
  Description of Artificial Sequence: Synthetic oligonucleotide
aaggcucuguguguuaccc

SEQ ID NO: 2056972 - RNA, 19 nt, Artificial Sequence
  Description of Artificial Sequence: Synthetic oligonucleotide
aacaacacgaccugucuau

SEQ ID NO: 2056973 - RNA, 19 nt, Artificial Sequence
  Description of Artificial Sequence: Synthetic oligonucleotide
ucaugaauucuauuggaaa

SEQ ID NO: 2056974 - RNA, 19 nt, Artificial Sequence
  Description of Artificial Sequence: Synthetic oligonucleotide
uuagaaacauucaccauuu

SEQ ID NO: 2056975 - RNA, 19 nt, Artificial Sequence
  Description of Artificial Sequence: Synthetic oligonucleotide
acuguuuagaauaugucug

SEQ ID NO: 2056976 - RNA, 19 nt, Artificial Sequence
  Description of Artificial Sequence: Synthetic oligonucleotide
cugaauaaacuuccuauug

SEQ ID NO: 2056977 - RNA, 19 nt, Artificial Sequence
  Description of Artificial Sequence: Synthetic oligonucleotide
cugucaugaauucuauugg

SEQ ID NO: 2056978 - RNA, 19 nt, Artificial Sequence
  Description of Artificial Sequence: Synthetic oligonucleotide
auuauagggaaaaggcucg

SEQ ID NO: 2056979 - RNA, 19 nt, Artificial Sequence
  Description of Artificial Sequence: Synthetic oligonucleotide
uuuguggcaggcagaaucc

SEQ ID NO: 2056980 - RNA, 19 nt, Artificial Sequence
  Description of Artificial Sequence: Synthetic oligonucleotide
uggucuuaauuguuuauca

SEQ ID NO: 2056981 - RNA, 19 nt, Artificial Sequence
  Description of Artificial Sequence: Synthetic oligonucleotide
accaugaaaacuaagcucu

SEQ ID NO: 2056982 - RNA, 19 nt, Artificial Sequence
  Description of Artificial Sequence: Synthetic oligonucleotide
ugaaaacuaagcucugaga

SEQ ID NO: 2056983 - RNA, 19 nt, Artificial Sequence
  Description of Artificial Sequence: Synthetic oligonucleotide
auuauaacucucacuaauc

SEQ ID NO: 2056984 - RNA, 19 nt, Artificial Sequence
  Description of Artificial Sequence: Synthetic oligonucleotide
uuaucccacauuauaggga

SEQ ID NO: 2056985 - RNA, 19 nt, Artificial Sequence
  Description of Artificial Sequence: Synthetic oligonucleotide
agggaaaaggcucggcuac

SEQ ID NO: 2056986 - RNA, 19 nt, Artificial Sequence
  Description of Artificial Sequence: Synthetic oligonucleotide
ugagauucuuucaacuuaa

SEQ ID NO: 2056987 - RNA, 19 nt, Artificial Sequence
  Description of Artificial Sequence: Synthetic oligonucleotide
aaucuaagucuuuauuuua

SEQ ID NO: 2056988 - RNA, 19 nt, Artificial Sequence
  Description of Artificial Sequence: Synthetic oligonucleotide
ugucuacaaacaauccaag

SEQ ID NO: 2056989 - RNA, 19 nt, Artificial Sequence
  Description of Artificial Sequence: Synthetic oligonucleotide
aaaacuaagcucugagauu

SEQ ID NO: 2056990 - RNA, 19 nt, Artificial Sequence
  Description of Artificial Sequence: Synthetic oligonucleotide
gcauaagugaauaagauuc

SEQ ID NO: 2056991 - RNA, 19 nt, Artificial Sequence
  Description of Artificial Sequence: Synthetic oligonucleotide
uaccaugaaaacuaagcuc

SEQ ID NO: 2056992 - RNA, 19 nt, Artificial Sequence
  Description of Artificial Sequence: Synthetic oligonucleotide
ucaacuuaauauaccgggu

SEQ ID NO: 2056993 - RNA, 19 nt, Artificial Sequence
  Description of Artificial Sequence: Synthetic oligonucleotide
acgaccugucuauaaauuc

SEQ ID NO: 2056994 - RNA, 19 nt, Artificial Sequence
  Description of Artificial Sequence: Synthetic oligonucleotide
aaagucugucuacaaacaa

SEQ ID NO: 2056995 - RNA, 19 nt, Artificial Sequence
  Description of Artificial Sequence: Synthetic oligonucleotide
aaauuauaacucucacuaa

SEQ ID NO: 2056996 - RNA, 19 nt, Artificial Sequence
  Description of Artificial Sequence: Synthetic oligonucleotide
ugauaagcuucuuauccca

SEQ ID NO: 2056997 - RNA, 19 nt, Artificial Sequence
  Description of Artificial Sequence: Synthetic oligonucleotide
uaguugucagagaaaauaa

SEQ ID NO: 2056998 - RNA, 19 nt, Artificial Sequence
  Description of Artificial Sequence: Synthetic oligonucleotide
acugauugauugcauaagu

SEQ ID NO: 2056999 - RNA, 19 nt, Artificial Sequence
  Description of Artificial Sequence: Synthetic oligonucleotide
ugucaugaauucuauugga

SEQ ID NO: 2057000 - RNA, 19 nt, Artificial Sequence
  Description of Artificial Sequence: Synthetic oligonucleotide
ucaccuaaaacuaguuuuc

SEQ ID NO: 2057001 - RNA, 19 nt, Artificial Sequence
  Description of Artificial Sequence: Synthetic oligonucleotide
aaacucaaguuuguaaccu

SEQ ID NO: 2057002 - RNA, 19 nt, Artificial Sequence
  Description of Artificial Sequence: Synthetic oligonucleotide
uaucccacauuauagggaa

SEQ ID NO: 2057003 - RNA, 19 nt, Artificial Sequence
  Description of Artificial Sequence: Synthetic oligonucleotide
uaaacuuccuauuguggcu

SEQ ID NO: 2057004 - RNA, 19 nt, Artificial Sequence
  Description of Artificial Sequence: Synthetic oligonucleotide
acaccaaaagucugucuac

SEQ ID NO: 2057005 - RNA, 19 nt, Artificial Sequence
  Description of Artificial Sequence: Synthetic oligonucleotide
ucuaaacuuuaguagcacu

SEQ ID NO: 2057006 - RNA, 19 nt, Artificial Sequence
  Description of Artificial Sequence: Synthetic oligonucleotide
caaacaauccaaguacugc

SEQ ID NO: 2057007 - RNA, 19 nt, Artificial Sequence
  Description of Artificial Sequence: Synthetic oligonucleotide
aaguacugcaaauuugguu

SEQ ID NO: 2057008 - RNA, 19 nt, Artificial Sequence
  Description of Artificial Sequence: Synthetic oligonucleotide
guuacccagggauauaaug

SEQ ID NO: 2057009 - RNA, 19 nt, Artificial Sequence
  Description of Artificial Sequence: Synthetic oligonucleotide
guuuguggcaggcagaauc

SEQ ID NO: 2057010 - RNA, 19 nt, Artificial Sequence
  Description of Artificial Sequence: Synthetic oligonucleotide
guaaccaaguauuuauuca

SEQ ID NO: 2057011 - RNA, 19 nt, Artificial Sequence
  Description of Artificial Sequence: Synthetic oligonucleotide
cauuauuaggcugguaacc

SEQ ID NO: 2057012 - RNA, 19 nt, Artificial Sequence
  Description of Artificial Sequence: Synthetic oligonucleotide
uaagcucugagauucuuuc

SEQ ID NO: 2057013 - RNA, 19 nt, Artificial Sequence
  Description of Artificial Sequence: Synthetic oligonucleotide
aaccuaagaauuauaggga

SEQ ID NO: 2057014 - RNA, 19 nt, Artificial Sequence
  Description of Artificial Sequence: Synthetic oligonucleotide
ugcauaaagucuuuguguu

SEQ ID NO: 2057015 - RNA, 19 nt, Artificial Sequence
  Description of Artificial Sequence: Synthetic oligonucleotide
aauggucuuaauuguuuau

SEQ ID NO: 2057016 - RNA, 19 nt, Artificial Sequence
  Description of Artificial Sequence: Synthetic oligonucleotide
cugauugauugcauaagug

SEQ ID NO: 2057017 - RNA, 19 nt, Artificial Sequence
  Description of Artificial Sequence: Synthetic oligonucleotide
auugcauaagugaauaaga

SEQ ID NO: 2057018 - RNA, 19 nt, Artificial Sequence
  Description of Artificial Sequence: Synthetic oligonucleotide
aguucacauuauuaggcug

SEQ ID NO: 2057019 - RNA, 19 nt, Artificial Sequence
  Description of Artificial Sequence: Synthetic oligonucleotide
uuaaauggucuuaauuguu

SEQ ID NO: 2057020 - RNA, 19 nt, Artificial Sequence
  Description of Artificial Sequence: Synthetic oligonucleotide
uauuguggcuccuauucac

SEQ ID NO: 2057021 - RNA, 19 nt, Artificial Sequence
  Description of Artificial Sequence: Synthetic oligonucleotide
uuaucacacaugcuuuugu

SEQ ID NO: 2057022 - RNA, 19 nt, Artificial Sequence
  Description of Artificial Sequence: Synthetic oligonucleotide
aaaacugcagaagcuguca

SEQ ID NO: 2057023 - RNA, 19 nt, Artificial Sequence
  Description of Artificial Sequence: Synthetic oligonucleotide
uuagaauaugucuguuugu

SEQ ID NO: 2057024 - RNA, 19 nt, Artificial Sequence
  Description of Artificial Sequence: Synthetic oligonucleotide
acuuuaguagcacuguuua

SEQ ID NO: 2057025 - RNA, 19 nt, Artificial Sequence
  Description of Artificial Sequence: Synthetic oligonucleotide
agaaacauucaccauuuua

SEQ ID NO: 2057026 - RNA, 19 nt, Artificial Sequence
  Description of Artificial Sequence: Synthetic oligonucleotide
uuuaaaucauucacugauu

SEQ ID NO: 2057027 - RNA, 19 nt, Artificial Sequence
  Description of Artificial Sequence: Synthetic oligonucleotide
auagggaaaguccgguguc

SEQ ID NO: 2057028 - RNA, 19 nt, Artificial Sequence
  Description of Artificial Sequence: Synthetic oligonucleotide
auaacucucacuaaucuaa

SEQ ID NO: 2057029 - RNA, 19 nt, Artificial Sequence
  Description of Artificial Sequence: Synthetic oligonucleotide
aaaagucugucuacaaaca

SEQ ID NO: 2057030 - RNA, 19 nt, Artificial Sequence
  Description of Artificial Sequence: Synthetic oligonucleotide
cuuuuggaacaacacgacc

SEQ ID NO: 2057031 - RNA, 19 nt, Artificial Sequence
  Description of Artificial Sequence: Synthetic oligonucleotide
cugaaauucccugaaacuc

SEQ ID NO: 2057032 - RNA, 19 nt, Artificial Sequence
  Description of Artificial Sequence: Synthetic oligonucleotide
auagggaaaaggcucggcu

SEQ ID NO: 2057033 - RNA, 19 nt, Artificial Sequence
  Description of Artificial Sequence: Synthetic oligonucleotide
ggcuacuaugucuugaugc

SEQ ID NO: 2057034 - RNA, 19 nt, Artificial Sequence
  Description of Artificial Sequence: Synthetic oligonucleotide
auggucuuaauuguuuauc

SEQ ID NO: 2057035 - RNA, 19 nt, Artificial Sequence
  Description of Artificial Sequence: Synthetic oligonucleotide
uauaacucucacuaaucua

SEQ ID NO: 2057036 - RNA, 19 nt, Artificial Sequence
  Description of Artificial Sequence: Synthetic oligonucleotide
uauucacaucuuuuggaac

SEQ ID NO: 2057037 - RNA, 19 nt, Artificial Sequence
  Description of Artificial Sequence: Synthetic oligonucleotide
cuuagagcucucuucuagc

SEQ ID NO: 2057038 - RNA, 19 nt, Artificial Sequence
  Description of Artificial Sequence: Synthetic oligonucleotide
auuauuaggcugguaacca

SEQ ID NO: 2057039 - RNA, 19 nt, Artificial Sequence
  Description of Artificial Sequence: Synthetic oligonucleotide
aacugcagaagcugucaug

SEQ ID NO: 2057040 - RNA, 19 nt, Artificial Sequence
  Description of Artificial Sequence: Synthetic oligonucleotide
aacacgaccugucuauaaa

SEQ ID NO: 2057041 - RNA, 19 nt, Artificial Sequence
  Description of Artificial Sequence: Synthetic oligonucleotide
guaugagcagcuucaaaac

SEQ ID NO: 2057042 - RNA, 19 nt, Artificial Sequence
  Description of Artificial Sequence: Synthetic oligonucleotide
uauucacucuaccgguugc

SEQ ID NO: 2057043 - RNA, 19 nt, Artificial Sequence
  Description of Artificial Sequence: Synthetic oligonucleotide
uauucugaauaaacuuccu

SEQ ID NO: 2057044 - RNA, 19 nt, Artificial Sequence
  Description of Artificial Sequence: Synthetic oligonucleotide
gauugauugcauaagugaa

SEQ ID NO: 2057045 - RNA, 19 nt, Artificial Sequence
  Description of Artificial Sequence: Synthetic oligonucleotide
uaggcugguaaccaaguau

SEQ ID NO: 2057046 - RNA, 19 nt, Artificial Sequence
  Description of Artificial Sequence: Synthetic oligonucleotide
uuauagggaaaguccggug

SEQ ID NO: 2057047 - RNA, 19 nt, Artificial Sequence
  Description of Artificial Sequence: Synthetic oligonucleotide
acuaugucuugaugcauug

SEQ ID NO: 2057048 - RNA, 19 nt, Artificial Sequence
  Description of Artificial Sequence: Synthetic oligonucleotide
aacucucacuaaucuaagu

SEQ ID NO: 2057049 - RNA, 19 nt, Artificial Sequence
  Description of Artificial Sequence: Synthetic oligonucleotide
uuuguacucccauauuuua

SEQ ID NO: 2057050 - RNA, 19 nt, Artificial Sequence
  Description of Artificial Sequence: Synthetic oligonucleotide
aaaggcucggcuacuaugu

SEQ ID NO: 2057051 - RNA, 19 nt, Artificial Sequence
  Description of Artificial Sequence: Synthetic oligonucleotide
aauugacaccaaaagucug

SEQ ID NO: 2057052 - RNA, 19 nt, Artificial Sequence
  Description of Artificial Sequence: Synthetic oligonucleotide
cuccuauucacaucuuuug

SEQ ID NO: 2057053 - RNA, 19 nt, Artificial Sequence
  Description of Artificial Sequence: Synthetic oligonucleotide
uuuugugguuuaagaaaac

SEQ ID NO: 2057054 - RNA, 19 nt, Artificial Sequence
  Description of Artificial Sequence: Synthetic oligonucleotide
uauaccggguaugagcagc

SEQ ID NO: 2057055 - RNA, 19 nt, Artificial Sequence
  Description of Artificial Sequence: Synthetic oligonucleotide
auaaguguagcaguucaca

SEQ ID NO: 2057056 - RNA, 19 nt, Artificial Sequence
  Description of Artificial Sequence: Synthetic oligonucleotide
accuaagaauuauagggaa

SEQ ID NO: 2057057 - RNA, 19 nt, Artificial Sequence
  Description of Artificial Sequence: Synthetic oligonucleotide
gguuuaagaaaacugcaga

SEQ ID NO: 2057058 - RNA, 19 nt, Artificial Sequence
  Description of Artificial Sequence: Synthetic oligonucleotide
agcucggcuuuucaucacc

SEQ ID NO: 2057059 - RNA, 19 nt, Artificial Sequence
  Description of Artificial Sequence: Synthetic oligonucleotide
aaguguagcaguucacauu

SEQ ID NO: 2057060 - RNA, 19 nt, Artificial Sequence
  Description of Artificial Sequence: Synthetic oligonucleotide
uuguaccaugaaaacuaag

SEQ ID NO: 2057061 - RNA, 19 nt, Artificial Sequence
  Description of Artificial Sequence: Synthetic oligonucleotide
uaagcuucuuaucccacau

SEQ ID NO: 2057062 - RNA, 19 nt, Artificial Sequence
  Description of Artificial Sequence: Synthetic oligonucleotide
caucaucuuuaaaucauuc

SEQ ID NO: 2057063 - RNA, 19 nt, Artificial Sequence
  Description of Artificial Sequence: Synthetic oligonucleotide
auaagugaauaagauucug

SEQ ID NO: 2057064 - RNA, 19 nt, Artificial Sequence
  Description of Artificial Sequence: Synthetic oligonucleotide
aucugcauaaagucuuugu

SEQ ID NO: 2057065 - RNA, 19 nt, Artificial Sequence
  Description of Artificial Sequence: Synthetic oligonucleotide
uugauugcauaagugaaua

SEQ ID NO: 2057066 - RNA, 19 nt, Artificial Sequence
  Description of Artificial Sequence: Synthetic oligonucleotide
uaaguguagcaguucacau

SEQ ID NO: 2057067 - RNA, 19 nt, Artificial Sequence
  Description of Artificial Sequence: Synthetic oligonucleotide
caguucuuaaguuggaaga

SEQ ID NO: 2057068 - RNA, 19 nt, Artificial Sequence
  Description of Artificial Sequence: Synthetic oligonucleotide
ugcagaagcugucaugaau

SEQ ID NO: 2057069 - RNA, 19 nt, Artificial Sequence
  Description of Artificial Sequence: Synthetic oligonucleotide
uaaguuggaagaacuugau

SEQ ID NO: 2057070 - RNA, 19 nt, Artificial Sequence
  Description of Artificial Sequence: Synthetic oligonucleotide
cuuuaguagcacuguuuag

SEQ ID NO: 2057071 - RNA, 19 nt, Artificial Sequence
  Description of Artificial Sequence: Synthetic oligonucleotide
guaguugucagagaaaaua

SEQ ID NO: 2057072 - RNA, 19 nt, Artificial Sequence
  Description of Artificial Sequence: Synthetic oligonucleotide
ucggcuuuucaucaccuaa

SEQ ID NO: 2057073 - RNA, 19 nt, Artificial Sequence
  Description of Artificial Sequence: Synthetic oligonucleotide
aguuuguaaccuaagaauu

SEQ ID NO: 2057074 - RNA, 19 nt, Artificial Sequence
  Description of Artificial Sequence: Synthetic oligonucleotide
auuauagggaaaguccggu

SEQ ID NO: 2057075 - RNA, 19 nt, Artificial Sequence
  Description of Artificial Sequence: Synthetic oligonucleotide
ucuccuuagagcucucuuc

SEQ ID NO: 2057076 - RNA, 19 nt, Artificial Sequence
  Description of Artificial Sequence: Synthetic oligonucleotide
auaagcuucuuaucccaca

SEQ ID NO: 2057077 - RNA, 19 nt, Artificial Sequence
  Description of Artificial Sequence: Synthetic oligonucleotide
cucaaguuuguaaccuaag

SEQ ID NO: 2057078 - RNA, 19 nt, Artificial Sequence
  Description of Artificial Sequence: Synthetic oligonucleotide
ugcugacugaaauucccug

SEQ ID NO: 2057079 - RNA, 19 nt, Artificial Sequence
  Description of Artificial Sequence: Synthetic oligonucleotide
guugucagagaaaauaaaa

SEQ ID NO: 2057080 - RNA, 19 nt, Artificial Sequence
  Description of Artificial Sequence: Synthetic oligonucleotide
agauucuuucaacuuaaua

SEQ ID NO: 2057081 - RNA, 19 nt, Artificial Sequence
  Description of Artificial Sequence: Synthetic oligonucleotide
uuauagggaaaaggcucgg

SEQ ID NO: 2057082 - RNA, 19 nt, Artificial Sequence
  Description of Artificial Sequence: Synthetic oligonucleotide
ucuguuuguggcaggcaga

SEQ ID NO: 2057083 - RNA, 19 nt, Artificial Sequence
  Description of Artificial Sequence: Synthetic oligonucleotide
acuuaauauaccggguaug

SEQ ID NO: 2057084 - RNA, 19 nt, Artificial Sequence
  Description of Artificial Sequence: Synthetic oligonucleotide
uggaacaacacgaccuguc

SEQ ID NO: 2057085 - RNA, 19 nt, Artificial Sequence
  Description of Artificial Sequence: Synthetic oligonucleotide
uucuauuggaaagaauaua

SEQ ID NO: 2057086 - RNA, 19 nt, Artificial Sequence
  Description of Artificial Sequence: Synthetic oligonucleotide
cuuaauauaccggguauga

SEQ ID NO: 2057087 - RNA, 19 nt, Artificial Sequence
  Description of Artificial Sequence: Synthetic oligonucleotide
uaugucuguuuguggcagg

SEQ ID NO: 2057088 - RNA, 19 nt, Artificial Sequence
  Description of Artificial Sequence: Synthetic oligonucleotide
cuuaauuuauaucucuccu

SEQ ID NO: 2057089 - RNA, 19 nt, Artificial Sequence
  Description of Artificial Sequence: Synthetic oligonucleotide
uacuaugucuugaugcauu

SEQ ID NO: 2057090 - RNA, 19 nt, Artificial Sequence
  Description of Artificial Sequence: Synthetic oligonucleotide
auaugucuguuuguggcag

SEQ ID NO: 2057091 - RNA, 19 nt, Artificial Sequence
  Description of Artificial Sequence: Synthetic oligonucleotide
guugcugacugaaauuccc

SEQ ID NO: 2057092 - RNA, 19 nt, Artificial Sequence
  Description of Artificial Sequence: Synthetic oligonucleotide
gguaaccaaguauuuauuc

SEQ ID NO: 2057093 - RNA, 19 nt, Artificial Sequence
  Description of Artificial Sequence: Synthetic oligonucleotide
agcacuguuuagaauaugu

SEQ ID NO: 2057094 - RNA, 19 nt, Artificial Sequence
  Description of Artificial Sequence: Synthetic oligonucleotide
ucuaagucuuuauuuuauu

SEQ ID NO: 2057095 - RNA, 19 nt, Artificial Sequence
  Description of Artificial Sequence: Synthetic oligonucleotide
cuauucacaucuuuuggaa

SEQ ID NO: 2057096 - RNA, 19 nt, Artificial Sequence
  Description of Artificial Sequence: Synthetic oligonucleotide
ggaaagaauauauaaaauu

SEQ ID NO: 2057097 - RNA, 19 nt, Artificial Sequence
  Description of Artificial Sequence: Synthetic oligonucleotide
aagucugucuacaaacaau

SEQ ID NO: 2057098 - RNA, 19 nt, Artificial Sequence
  Description of Artificial Sequence: Synthetic oligonucleotide
aacucaaguuuguaaccua

SEQ ID NO: 2057099 - RNA, 19 nt, Artificial Sequence
  Description of Artificial Sequence: Synthetic oligonucleotide
uacccagggauauaaugaa

SEQ ID NO: 2057100 - RNA, 19 nt, Artificial Sequence
  Description of Artificial Sequence: Synthetic oligonucleotide
accggguaugagcagcuuc

SEQ ID NO: 2057101 - RNA, 19 nt, Artificial Sequence
  Description of Artificial Sequence: Synthetic oligonucleotide
aaggcucggcuacuauguc

SEQ ID NO: 2057102 - RNA, 19 nt, Artificial Sequence
  Description of Artificial Sequence: Synthetic oligonucleotide
auugacaccaaaagucugu

SEQ ID NO: 2057103 - RNA, 19 nt, Artificial Sequence
  Description of Artificial Sequence: Synthetic oligonucleotide
uuauuaggcugguaaccaa

SEQ ID NO: 2057104 - RNA, 19 nt, Artificial Sequence
  Description of Artificial Sequence: Synthetic oligonucleotide
uguguguuacccagggaua

SEQ ID NO: 2057105 - RNA, 19 nt, Artificial Sequence
  Description of Artificial Sequence: Synthetic oligonucleotide
ccuuuagaaacauucacca

SEQ ID NO: 2057106 - RNA, 19 nt, Artificial Sequence
  Description of Artificial Sequence: Synthetic oligonucleotide
aggcagaauccaaaauggc

SEQ ID NO: 2057107 - RNA, 19 nt, Artificial Sequence
  Description of Artificial Sequence: Synthetic oligonucleotide
ucacucuaccgguugcuga

SEQ ID NO: 2057108 - RNA, 19 nt, Artificial Sequence
  Description of Artificial Sequence: Synthetic oligonucleotide
auucuauuggaaagaauau

SEQ ID NO: 2057109 - RNA, 19 nt, Artificial Sequence
  Description of Artificial Sequence: Synthetic oligonucleotide
cugaaacucaaguuuguaa

SEQ ID NO: 2057110 - RNA, 19 nt, Artificial Sequence
  Description of Artificial Sequence: Synthetic oligonucleotide
agucuaaacuuuaguagca

SEQ ID NO: 2057111 - RNA, 19 nt, Artificial Sequence
  Description of Artificial Sequence: Synthetic oligonucleotide
uauagggaaaaggcucggc

SEQ ID NO: 2057112 - RNA, 19 nt, Artificial Sequence
  Description of Artificial Sequence: Synthetic oligonucleotide
uagggaaaaggcucggcua

SEQ ID NO: 2057113 - RNA, 19 nt, Artificial Sequence
  Description of Artificial Sequence: Synthetic oligonucleotide
ugauugcauaagugaauaa

SEQ ID NO: 2057114 - RNA, 19 nt, Artificial Sequence
  Description of Artificial Sequence: Synthetic oligonucleotide
aguucuuaaguuggaagaa

SEQ ID NO: 2057115 - RNA, 19 nt, Artificial Sequence
  Description of Artificial Sequence: Synthetic oligonucleotide
aaguccggugucccagcuc

SEQ ID NO: 2057116 - RNA, 19 nt, Artificial Sequence
  Description of Artificial Sequence: Synthetic oligonucleotide
uuguaaccuaagaauuaua

SEQ ID NO: 2057117 - RNA, 19 nt, Artificial Sequence
  Description of Artificial Sequence: Synthetic oligonucleotide
aaaguaguugucagagaaa

SEQ ID NO: 2057118 - RNA, 19 nt, Artificial Sequence
  Description of Artificial Sequence: Synthetic oligonucleotide
ucccacauuauagggaaaa

SEQ ID NO: 2057119 - RNA, 19 nt, Artificial Sequence
  Description of Artificial Sequence: Synthetic oligonucleotide
aaaguccggugucccagcu

SEQ ID NO: 2057120 - RNA, 19 nt, Artificial Sequence
  Description of Artificial Sequence: Synthetic oligonucleotide
aacaauccaaguacugcaa

SEQ ID NO: 2057121 - RNA, 19 nt, Artificial Sequence
  Description of Artificial Sequence: Synthetic oligonucleotide
ucacuaaucuaagucuuua

SEQ ID NO: 2057122 - RNA, 19 nt, Artificial Sequence
  Description of Artificial Sequence: Synthetic oligonucleotide
accgguugcugacugaaau

SEQ ID NO: 2057123 - RNA, 19 nt, Artificial Sequence
  Description of Artificial Sequence: Synthetic oligonucleotide
acaauccaaguacugcaaa

SEQ ID NO: 2057124 - RNA, 19 nt, Artificial Sequence
  Description of Artificial Sequence: Synthetic oligonucleotide
auugauugcauaagugaau

SEQ ID NO: 2057125 - RNA, 19 nt, Artificial Sequence
  Description of Artificial Sequence: Synthetic oligonucleotide
agcaucaucuuuaaaucau

SEQ ID NO: 2057126 - RNA, 19 nt, Artificial Sequence
  Description of Artificial Sequence: Synthetic oligonucleotide
guucuuaaguuggaagaac

SEQ ID NO: 2057127 - RNA, 19 nt, Artificial Sequence
  Description of Artificial Sequence: Synthetic oligonucleotide
gauaagcuucuuaucccac

SEQ ID NO: 2057128 - RNA, 19 nt, Artificial Sequence
  Description of Artificial Sequence: Synthetic oligonucleotide
cuucuuaucccacauuaua

SEQ ID NO: 2057129 - RNA, 19 nt, Artificial Sequence
  Description of Artificial Sequence: Synthetic oligonucleotide
ccacauuauagggaaaagg

SEQ ID NO: 2057130 - RNA, 19 nt, Artificial Sequence
  Description of Artificial Sequence: Synthetic oligonucleotide
aaucauucacugauugauu

SEQ ID NO: 2057131 - RNA, 19 nt, Artificial Sequence
  Description of Artificial Sequence: Synthetic oligonucleotide
cacucuaccgguugcugac

SEQ ID NO: 2057132 - RNA, 19 nt, Artificial Sequence
  Description of Artificial Sequence: Synthetic oligonucleotide
uuaggcugguaaccaagua

SEQ ID NO: 2057133 - RNA, 19 nt, Artificial Sequence
  Description of Artificial Sequence: Synthetic oligonucleotide
cucucacuaaucuaagucu

SEQ ID NO: 2057134 - RNA, 19 nt, Artificial Sequence
  Description of Artificial Sequence: Synthetic oligonucleotide
auauuuguacucccauauu

SEQ ID NO: 2057135 - RNA, 19 nt, Artificial Sequence
  Description of Artificial Sequence: Synthetic oligonucleotide
caccuaaaacuaguuuucc

SEQ ID NO: 2057136 - RNA, 19 nt, Artificial Sequence
  Description of Artificial Sequence: Synthetic oligonucleotide
acacgaccugucuauaaau

SEQ ID NO: 2057137 - RNA, 19 nt, Artificial Sequence
  Description of Artificial Sequence: Synthetic oligonucleotide
gcuacuaugucuugaugca

SEQ ID NO: 2057138 - RNA, 19 nt, Artificial Sequence
  Description of Artificial Sequence: Synthetic oligonucleotide
aucuaagucuuuauuuuau

SEQ ID NO: 2057139 - RNA, 19 nt, Artificial Sequence
  Description of Artificial Sequence: Synthetic oligonucleotide
caacuuaauuuauaucucu

SEQ ID NO: 2057140 - RNA, 19 nt, Artificial Sequence
  Description of Artificial Sequence: Synthetic oligonucleotide
ugacaccaaaagucugucu

SEQ ID NO: 2057141 - RNA, 19 nt, Artificial Sequence
  Description of Artificial Sequence: Synthetic oligonucleotide
auauaccggguaugagcag

SEQ ID NO: 2057142 - RNA, 19 nt, Artificial Sequence
  Description of Artificial Sequence: Synthetic oligonucleotide
accaaaagucugucuacaa

SEQ ID NO: 2057143 - RNA, 19 nt, Artificial Sequence
  Description of Artificial Sequence: Synthetic oligonucleotide
gaacagucuaaacuuuagu

SEQ ID NO: 2057144 - RNA, 19 nt, Artificial Sequence
  Description of Artificial Sequence: Synthetic oligonucleotide
cugcauaaagucuuugugu

SEQ ID NO: 2057145 - RNA, 19 nt, Artificial Sequence
  Description of Artificial Sequence: Synthetic oligonucleotide
uuccuauuguggcuccuau

SEQ ID NO: 2057146 - RNA, 19 nt, Artificial Sequence
  Description of Artificial Sequence: Synthetic oligonucleotide
guagcaguucacauuauua

SEQ ID NO: 2057147 - RNA, 19 nt, Artificial Sequence
  Description of Artificial Sequence: Synthetic oligonucleotide
caacuuaauauaccgggua

SEQ ID NO: 2057148 - RNA, 19 nt, Artificial Sequence
  Description of Artificial Sequence: Synthetic oligonucleotide
gaccugucuauaaauucca

SEQ ID NO: 2057149 - RNA, 19 nt, Artificial Sequence
  Description of Artificial Sequence: Synthetic oligonucleotide
uguuuagaauaugucuguu

SEQ ID NO: 2057150 - RNA, 19 nt, Artificial Sequence
  Description of Artificial Sequence: Synthetic oligonucleotide
uugacaccaaaagucuguc

SEQ ID NO: 2057151 - RNA, 19 nt, Artificial Sequence
  Description of Artificial Sequence: Synthetic oligonucleotide
uucacauuauuaggcuggu

SEQ ID NO: 2057152 - RNA, 19 nt, Artificial Sequence
  Description of Artificial Sequence: Synthetic oligonucleotide
auaucucuccuuagagcuc

SEQ ID NO: 2057153 - RNA, 19 nt, Artificial Sequence
  Description of Artificial Sequence: Synthetic oligonucleotide
guuuguaaccuaagaauua

SEQ ID NO: 2057154 - RNA, 19 nt, Artificial Sequence
  Description of Artificial Sequence: Synthetic oligonucleotide
cauaagugaauaagauucu

SEQ ID NO: 2057155 - RNA, 19 nt, Artificial Sequence
  Description of Artificial Sequence: Synthetic oligonucleotide
uucacucuaccgguugcug

SEQ ID NO: 2057156 - RNA, 19 nt, Artificial Sequence
  Description of Artificial Sequence: Synthetic oligonucleotide
cugguaaccaaguauuuau

SEQ ID NO: 2057157 - RNA, 19 nt, Artificial Sequence
  Description of Artificial Sequence: Synthetic oligonucleotide
ucaucccaaggcucugugu

SEQ ID NO: 2057158 - RNA, 19 nt, Artificial Sequence
  Description of Artificial Sequence: Synthetic oligonucleotide
gaaauucccugaaacucaa

SEQ ID NO: 2057159 - RNA, 19 nt, Artificial Sequence
  Description of Artificial Sequence: Synthetic oligonucleotide
caucacuaaaagcaacuua

SEQ ID NO: 2057160 - RNA, 19 nt, Artificial Sequence
  Description of Artificial Sequence: Synthetic oligonucleotide
acaugcuuuuguaccauga

SEQ ID NO: 2057161 - RNA, 19 nt, Artificial Sequence
  Description of Artificial Sequence: Synthetic oligonucleotide
uguuacccagggauauaau

SEQ ID NO: 2057162 - RNA, 19 nt, Artificial Sequence
  Description of Artificial Sequence: Synthetic oligonucleotide
ccuuagagcucucuucuag

SEQ ID NO: 2057163 - RNA, 19 nt, Artificial Sequence
  Description of Artificial Sequence: Synthetic oligonucleotide
aggcucggcuacuaugucu

SEQ ID NO: 2057164 - RNA, 19 nt, Artificial Sequence
  Description of Artificial Sequence: Synthetic oligonucleotide
cgaccugucuauaaauucc

SEQ ID NO: 2057165 - RNA, 19 nt, Artificial Sequence
  Description of Artificial Sequence: Synthetic oligonucleotide
ucuaccgguugcugacuga

SEQ ID NO: 2057166 - RNA, 19 nt, Artificial Sequence
  Description of Artificial Sequence: Synthetic oligonucleotide
cuauuguggcuccuauuca

SEQ ID NO: 2057167 - RNA, 19 nt, Artificial Sequence
  Description of Artificial Sequence: Synthetic oligonucleotide
acucaaguuuguaaccuaa

SEQ ID NO: 2057168 - RNA, 19 nt, Artificial Sequence
  Description of Artificial Sequence: Synthetic oligonucleotide
caaggcucuguguguuacc

SEQ ID NO: 2057169 - RNA, 19 nt, Artificial Sequence
  Description of Artificial Sequence: Synthetic oligonucleotide
cugacugaaauucccugaa

SEQ ID NO: 2057170 - RNA, 19 nt, Artificial Sequence
  Description of Artificial Sequence: Synthetic oligonucleotide
cuguguguuacccagggau

SEQ ID NO: 2057171 - RNA, 19 nt, Artificial Sequence
  Description of Artificial Sequence: Synthetic oligonucleotide
gucuacaaacaauccaagu

SEQ ID NO: 2057172 - RNA, 19 nt, Artificial Sequence
  Description of Artificial Sequence: Synthetic oligonucleotide
ccuauucacaucuuuugga

SEQ ID NO: 2057173 - RNA, 19 nt, Artificial Sequence
  Description of Artificial Sequence: Synthetic oligonucleotide
uuggaacaacacgaccugu

SEQ ID NO: 2057174 - RNA, 19 nt, Artificial Sequence
  Description of Artificial Sequence: Synthetic oligonucleotide
agauucuguuuucccuccu

SEQ ID NO: 2057175 - RNA, 19 nt, Artificial Sequence
  Description of Artificial Sequence: Synthetic oligonucleotide
cuguuuagaauaugucugu

SEQ ID NO: 2057176 - RNA, 19 nt, Artificial Sequence
  Description of Artificial Sequence: Synthetic oligonucleotide
caugaaaacuaagcucuga

SEQ ID NO: 2057177 - RNA, 19 nt, Artificial Sequence
  Description of Artificial Sequence: Synthetic oligonucleotide
auuguggcuccuauucaca

SEQ ID NO: 2057178 - RNA, 19 nt, Artificial Sequence
  Description of Artificial Sequence: Synthetic oligonucleotide
cucuaccgguugcugacug

SEQ ID NO: 2057179 - RNA, 19 nt, Artificial Sequence
  Description of Artificial Sequence: Synthetic oligonucleotide
uagaaacauucaccauuuu

SEQ ID NO: 2057180 - RNA, 19 nt, Artificial Sequence
  Description of Artificial Sequence: Synthetic oligonucleotide
uccuauuguggcuccuauu

SEQ ID NO: 2057181 - RNA, 19 nt, Artificial Sequence
  Description of Artificial Sequence: Synthetic oligonucleotide
gcauaaagucuuuguguuc

SEQ ID NO: 2057182 - RNA, 19 nt, Artificial Sequence
  Description of Artificial Sequence: Synthetic oligonucleotide
guguuacccagggauauaa

SEQ ID NO: 2057183 - RNA, 19 nt, Artificial Sequence
  Description of Artificial Sequence: Synthetic oligonucleotide
uccuuagagcucucuucua

SEQ ID NO: 2057184 - RNA, 19 nt, Artificial Sequence
  Description of Artificial Sequence: Synthetic oligonucleotide
uuguggcaggcagaaucca

SEQ ID NO: 2057185 - RNA, 19 nt, Artificial Sequence
  Description of Artificial Sequence: Synthetic oligonucleotide
cuccuuagagcucucuucu

SEQ ID NO: 2057186 - RNA, 19 nt, Artificial Sequence
  Description of Artificial Sequence: Synthetic oligonucleotide
cuuuagaaacauucaccau

SEQ ID NO: 2057187 - RNA, 19 nt, Artificial Sequence
  Description of Artificial Sequence: Synthetic oligonucleotide
gagcucucuucuagcauca

SEQ ID NO: 2057188 - RNA, 19 nt, Artificial Sequence
  Description of Artificial Sequence: Synthetic oligonucleotide
cuuaauuguuuaucaucau

SEQ ID NO: 2057189 - RNA, 19 nt, Artificial Sequence
  Description of Artificial Sequence: Synthetic oligonucleotide
caauccaaguacugcaaau

SEQ ID NO: 2057190 - RNA, 19 nt, Artificial Sequence
  Description of Artificial Sequence: Synthetic oligonucleotide
caccaaaagucugucuaca

SEQ ID NO: 2057191 - RNA, 19 nt, Artificial Sequence
  Description of Artificial Sequence: Synthetic oligonucleotide
ggcagaauccaaaauggcu

SEQ ID NO: 2057192 - RNA, 19 nt, Artificial Sequence
  Description of Artificial Sequence: Synthetic oligonucleotide
uguguuacccagggauaua

SEQ ID NO: 2057193 - RNA, 19 nt, Artificial Sequence
  Description of Artificial Sequence: Synthetic oligonucleotide
acuaagcucugagauucuu

SEQ ID NO: 2057194 - RNA, 19 nt, Artificial Sequence
  Description of Artificial Sequence: Synthetic oligonucleotide
uaccgguugcugacugaaa

SEQ ID NO: 2057195 - RNA, 19 nt, Artificial Sequence
  Description of Artificial Sequence: Synthetic oligonucleotide
auucacugauugauugcau

SEQ ID NO: 2057196 - RNA, 19 nt, Artificial Sequence
  Description of Artificial Sequence: Synthetic oligonucleotide
ccuccuuuagaaacauuca

SEQ ID NO: 2057197 - RNA, 19 nt, Artificial Sequence
  Description of Artificial Sequence: Synthetic oligonucleotide
ggaacaacacgaccugucu

SEQ ID NO: 2057198 - RNA, 19 nt, Artificial Sequence
  Description of Artificial Sequence: Synthetic oligonucleotide
caaguacugcaaauuuggu

SEQ ID NO: 2057199 - RNA, 19 nt, Artificial Sequence
  Description of Artificial Sequence: Synthetic oligonucleotide
auaccggguaugagcagcu

SEQ ID NO: 2057200 - RNA, 19 nt, Artificial Sequence
  Description of Artificial Sequence: Synthetic oligonucleotide
ccuaaaacuaguuuuccuu

SEQ ID NO: 2057201 - RNA, 19 nt, Artificial Sequence
  Description of Artificial Sequence: Synthetic oligonucleotide
cuaugucuugaugcauuga

SEQ ID NO: 2057202 - RNA, 19 nt, Artificial Sequence
  Description of Artificial Sequence: Synthetic oligonucleotide
gcagaauccaaaauggcuu

SEQ ID NO: 2057203 - RNA, 19 nt, Artificial Sequence
  Description of Artificial Sequence: Synthetic oligonucleotide
cccagcucggcuuuucauc

SEQ ID NO: 2057204 - RNA, 19 nt, Artificial Sequence
  Description of Artificial Sequence: Synthetic oligonucleotide
cacuaaucuaagucuuuau

SEQ ID NO: 2057205 - RNA, 19 nt, Artificial Sequence
  Description of Artificial Sequence: Synthetic oligonucleotide
caucaccuaaaacuaguuu

SEQ ID NO: 2057206 - RNA, 19 nt, Artificial Sequence
  Description of Artificial Sequence: Synthetic oligonucleotide
ccaaguauuuauucacucu

SEQ ID NO: 2057207 - RNA, 19 nt, Artificial Sequence
  Description of Artificial Sequence: Synthetic oligonucleotide
cuaccgguugcugacugaa

SEQ ID NO: 2057208 - RNA, 19 nt, Artificial Sequence
  Description of Artificial Sequence: Synthetic oligonucleotide
ccagcucggcuuuucauca

SEQ ID NO: 2057209 - RNA, 19 nt, Artificial Sequence
  Description of Artificial Sequence: Synthetic oligonucleotide
cuaagcucugagauucuuu

SEQ ID NO: 2057210 - RNA, 19 nt, Artificial Sequence
  Description of Artificial Sequence: Synthetic oligonucleotide
cucggcuacuaugucuuga

SEQ ID NO: 2057211 - RNA, 19 nt, Artificial Sequence
  Description of Artificial Sequence: Synthetic oligonucleotide
cccagucuaagaaaucaaa

SEQ ID NO: 2057212 - RNA, 19 nt, Artificial Sequence
  Description of Artificial Sequence: Synthetic oligonucleotide
ccggguaugagcagcuuca

SEQ ID NO: 2057213 - RNA, 19 nt, Artificial Sequence
  Description of Artificial Sequence: Synthetic oligonucleotide
cccacauuauagggaaaag

SEQ ID NO: 2057214 - RNA, 19 nt, Artificial Sequence
  Description of Artificial Sequence: Synthetic oligonucleotide
acuuccuauuguggcuccu

SEQ ID NO: 2057215 - RNA, 19 nt, Artificial Sequence
  Description of Artificial Sequence: Synthetic oligonucleotide
cagcucggcuuuucaucac

SEQ ID NO: 2057216 - RNA, 19 nt, Artificial Sequence
  Description of Artificial Sequence: Synthetic oligonucleotide
uguuuguggcaggcagaau

SEQ ID NO: 2057217 - RNA, 19 nt, Artificial Sequence
  Description of Artificial Sequence: Synthetic oligonucleotide
acucuaccgguugcugacu

SEQ ID NO: 2057218 - RNA, 19 nt, Artificial Sequence
  Description of Artificial Sequence: Synthetic oligonucleotide
accugucuauaaauuccau

SEQ ID NO: 2057219 - RNA, 19 nt, Artificial Sequence
  Description of Artificial Sequence: Synthetic oligonucleotide
ucccuccuuuagaaacauu

SEQ ID NO: 2057220 - RNA, 19 nt, Artificial Sequence
  Description of Artificial Sequence: Synthetic oligonucleotide
ccagucuaagaaaucaaau

SEQ ID NO: 2057221 - RNA, 19 nt, Artificial Sequence
  Description of Artificial Sequence: Synthetic oligonucleotide
cucacuaaucuaagucuuu

SEQ ID NO: 2057222 - RNA, 19 nt, Artificial Sequence
  Description of Artificial Sequence: Synthetic oligonucleotide
cgguugcugacugaaauuc

SEQ ID NO: 2057223 - RNA, 19 nt, Artificial Sequence
  Description of Artificial Sequence: Synthetic oligonucleotide
gcugguaaccaaguauuua

SEQ ID NO: 2057224 - RNA, 19 nt, Artificial Sequence
  Description of Artificial Sequence: Synthetic oligonucleotide
guguguuacccagggauau

SEQ ID NO: 2057225 - RNA, 19 nt, Artificial Sequence
  Description of Artificial Sequence: Synthetic oligonucleotide
ccaaggcucuguguguuac

SEQ ID NO: 2057226 - RNA, 19 nt, Artificial Sequence
  Description of Artificial Sequence: Synthetic oligonucleotide
ggguaugagcagcuucaaa

SEQ ID NO: 2057227 - RNA, 19 nt, Artificial Sequence
  Description of Artificial Sequence: Synthetic oligonucleotide
cuuccuauuguggcuccua

SEQ ID NO: 2057228 - RNA, 19 nt, Artificial Sequence
  Description of Artificial Sequence: Synthetic oligonucleotide
cugcagaagcugucaugaa

SEQ ID NO: 2057229 - RNA, 19 nt, Artificial Sequence
  Description of Artificial Sequence: Synthetic oligonucleotide
cuacuaugucuugaugcau

SEQ ID NO: 2057230 - RNA, 19 nt, Artificial Sequence
  Description of Artificial Sequence: Synthetic oligonucleotide
ggaaaaggcucggcuacua

SEQ ID NO: 2057231 - RNA, 19 nt, Artificial Sequence
  Description of Artificial Sequence: Synthetic oligonucleotide
gggauauaaugaaguucaa

SEQ ID NO: 2057232 - RNA, 19 nt, Artificial Sequence
  Description of Artificial Sequence: Synthetic oligonucleotide
guccggugucccagcucgg

SEQ ID NO: 2057233 - RNA, 19 nt, Artificial Sequence
  Description of Artificial Sequence: Synthetic oligonucleotide
aucccacauuauagggaaa

SEQ ID NO: 2057234 - RNA, 19 nt, Artificial Sequence
  Description of Artificial Sequence: Synthetic oligonucleotide
gcuccuauucacaucuuuu

SEQ ID NO: 2057235 - RNA, 19 nt, Artificial Sequence
  Description of Artificial Sequence: Synthetic oligonucleotide
ccccagucuaagaaaucaa

SEQ ID NO: 2057236 - RNA, 19 nt, Artificial Sequence
  Description of Artificial Sequence: Synthetic oligonucleotide
uaccggguaugagcagcuu

SEQ ID NO: 2057237 - RNA, 19 nt, Artificial Sequence
  Description of Artificial Sequence: Synthetic oligonucleotide
ggcuccuauucacaucuuu

SEQ ID NO: 2057238 - RNA, 19 nt, Artificial Sequence
  Description of Artificial Sequence: Synthetic oligonucleotide
cggcuuuucaucaccuaaa

SEQ ID NO: 2057239 - RNA, 19 nt, Artificial Sequence
  Description of Artificial Sequence: Synthetic oligonucleotide
ccagggauauaaugaaguu

SEQ ID NO: 2057240 - RNA, 19 nt, Artificial Sequence
  Description of Artificial Sequence: Synthetic oligonucleotide
gcuucuuaucccacauuau

SEQ ID NO: 2057241 - RNA, 19 nt, Artificial Sequence
  Description of Artificial Sequence: Synthetic oligonucleotide
gggaaaaggcucggcuacu

SEQ ID NO: 2057242 - RNA, 19 nt, Artificial Sequence
  Description of Artificial Sequence: Synthetic oligonucleotide
gcucggcuuuucaucaccu

SEQ ID NO: 2057243 - RNA, 19 nt, Artificial Sequence
  Description of Artificial Sequence: Synthetic oligonucleotide
ggugucccagcucggcuuu

SEQ ID NO: 2057244 - RNA, 19 nt, Artificial Sequence
  Description of Artificial Sequence: Synthetic oligonucleotide
ggcugguaaccaaguauuu

SEQ ID NO: 2057245 - RNA, 19 nt, Artificial Sequence
  Description of Artificial Sequence: Synthetic oligonucleotide
ccaucacuaaaagcaacuu

SEQ ID NO: 2057246 - RNA, 19 nt, Artificial Sequence
  Description of Artificial Sequence: Synthetic oligonucleotide
ccgguugcugacugaaauu

SEQ ID NO: 2057247 - RNA, 19 nt, Artificial Sequence
  Description of Artificial Sequence: Synthetic oligonucleotide
cccaaggcucuguguguua

SEQ ID NO: 2057248 - RNA, 19 nt, Artificial Sequence
  Description of Artificial Sequence: Synthetic oligonucleotide
cggguaugagcagcuucaa

SEQ ID NO: 2057249 - RNA, 19 nt, Artificial Sequence
  Description of Artificial Sequence: Synthetic oligonucleotide
cggugucccagcucggcuu

SEQ ID NO: 2057250 - RNA, 19 nt, Artificial Sequence
  Description of Artificial Sequence: Synthetic oligonucleotide
ugugauagaacucaggcgg

SEQ ID NO: 2057251 - RNA, 19 nt, Artificial Sequence
  Description of Artificial Sequence: Synthetic oligonucleotide
aacaagacaagcuugccgc

SEQ ID NO: 2057252 - RNA, 19 nt, Artificial Sequence
  Description of Artificial Sequence: Synthetic oligonucleotide
uucaauagaacccugagug

SEQ ID NO: 2057253 - RNA, 19 nt, Artificial Sequence
  Description of Artificial Sequence: Synthetic oligonucleotide
uuuaguuggaauuuuaaag

SEQ ID NO: 2057254 - RNA, 19 nt, Artificial Sequence
  Description of Artificial Sequence: Synthetic oligonucleotide
uguuuuggaaacuagaaag

SEQ ID NO: 2057255 - RNA, 19 nt, Artificial Sequence
  Description of Artificial Sequence: Synthetic oligonucleotide
aaaguggcagauuuuauac

SEQ ID NO: 2057256 - RNA, 19 nt, Artificial Sequence
  Description of Artificial Sequence: Synthetic oligonucleotide
aagauuuucaauagaaccc

SEQ ID NO: 2057257 - RNA, 19 nt, Artificial Sequence
  Description of Artificial Sequence: Synthetic oligonucleotide
uaauaaacacuuuugaaga

SEQ ID NO: 2057258 - RNA, 19 nt, Artificial Sequence
  Description of Artificial Sequence: Synthetic oligonucleotide
ucuucuuugauuaguaaag

SEQ ID NO: 2057259 - RNA, 19 nt, Artificial Sequence
  Description of Artificial Sequence: Synthetic oligonucleotide
aaaaguggcauuuuaauua

SEQ ID NO: 2057260 - RNA, 19 nt, Artificial Sequence
  Description of Artificial Sequence: Synthetic oligonucleotide
uuuucaaccagaaaauuac

SEQ ID NO: 2057261 - RNA, 19 nt, Artificial Sequence
  Description of Artificial Sequence: Synthetic oligonucleotide
uuggaaacuagaaagugag

SEQ ID NO: 2057262 - RNA, 19 nt, Artificial Sequence
  Description of Artificial Sequence: Synthetic oligonucleotide
ucuaauguauaaauuguca

SEQ ID NO: 2057263 - RNA, 19 nt, Artificial Sequence
  Description of Artificial Sequence: Synthetic oligonucleotide
uugaucaucaaauuggccu

SEQ ID NO: 2057264 - RNA, 19 nt, Artificial Sequence
  Description of Artificial Sequence: Synthetic oligonucleotide
aaauguaaugcagaccucg

SEQ ID NO: 2057265 - RNA, 19 nt, Artificial Sequence
  Description of Artificial Sequence: Synthetic oligonucleotide
aaauucaguaaauguaaug

SEQ ID NO: 2057266 - RNA, 19 nt, Artificial Sequence
  Description of Artificial Sequence: Synthetic oligonucleotide
agcauaaguauucuguggg

SEQ ID NO: 2057267 - RNA, 19 nt, Artificial Sequence
  Description of Artificial Sequence: Synthetic oligonucleotide
aagaugcauguauuguugc

SEQ ID NO: 2057268 - RNA, 19 nt, Artificial Sequence
  Description of Artificial Sequence: Synthetic oligonucleotide
auuuucugucugcagaccc

SEQ ID NO: 2057269 - RNA, 19 nt, Artificial Sequence
  Description of Artificial Sequence: Synthetic oligonucleotide
cuaauguauaaauugucag

SEQ ID NO: 2057270 - RNA, 19 nt, Artificial Sequence
  Description of Artificial Sequence: Synthetic oligonucleotide
uuuguuguacaguuaauga

SEQ ID NO: 2057271 - RNA, 19 nt, Artificial Sequence
  Description of Artificial Sequence: Synthetic oligonucleotide
aacauguauguucaggaca

SEQ ID NO: 2057272 - RNA, 19 nt, Artificial Sequence
  Description of Artificial Sequence: Synthetic oligonucleotide
ugugauaugcauuuucuac

SEQ ID NO: 2057273 - RNA, 19 nt, Artificial Sequence
  Description of Artificial Sequence: Synthetic oligonucleotide
guugcagcgacauagccgg

SEQ ID NO: 2057274 - RNA, 19 nt, Artificial Sequence
  Description of Artificial Sequence: Synthetic oligonucleotide
uuuucaauagaacccugag

SEQ ID NO: 2057275 - RNA, 19 nt, Artificial Sequence
  Description of Artificial Sequence: Synthetic oligonucleotide
auuaguaaagguuuuccca

SEQ ID NO: 2057276 - RNA, 19 nt, Artificial Sequence
  Description of Artificial Sequence: Synthetic oligonucleotide
auugucaguauacaaaagu

SEQ ID NO: 2057277 - RNA, 19 nt, Artificial Sequence
  Description of Artificial Sequence: Synthetic oligonucleotide
uguauuguugcacuuuuga

SEQ ID NO: 2057278 - RNA, 19 nt, Artificial Sequence
  Description of Artificial Sequence: Synthetic oligonucleotide
cacaguauuucucagagug

SEQ ID NO: 2057279 - RNA, 19 nt, Artificial Sequence
  Description of Artificial Sequence: Synthetic oligonucleotide
uagaaagugagcauaagua

SEQ ID NO: 2057280 - RNA, 19 nt, Artificial Sequence
  Description of Artificial Sequence: Synthetic oligonucleotide
uauaccauacaacauguau

SEQ ID NO: 2057281 - RNA, 19 nt, Artificial Sequence
  Description of Artificial Sequence: Synthetic oligonucleotide
agcacuauaaaauguauaa

SEQ ID NO: 2057282 - RNA, 19 nt, Artificial Sequence
  Description of Artificial Sequence: Synthetic oligonucleotide
uaauguauaaauugucagu

SEQ ID NO: 2057283 - RNA, 19 nt, Artificial Sequence
  Description of Artificial Sequence: Synthetic oligonucleotide
gauuaguaaagguuuuccc

SEQ ID NO: 2057284 - RNA, 19 nt, Artificial Sequence
  Description of Artificial Sequence: Synthetic oligonucleotide
ucuuugauuaguaaagguu

SEQ ID NO: 2057285 - RNA, 19 nt, Artificial Sequence
  Description of Artificial Sequence: Synthetic oligonucleotide
uguaaugcagaccucggcu

SEQ ID NO: 2057286 - RNA, 19 nt, Artificial Sequence
  Description of Artificial Sequence: Synthetic oligonucleotide
ucuggauaccuguugauca

SEQ ID NO: 2057287 - RNA, 19 nt, Artificial Sequence
  Description of Artificial Sequence: Synthetic oligonucleotide
uguauaaauugucaguaua

SEQ ID NO: 2057288 - RNA, 19 nt, Artificial Sequence
  Description of Artificial Sequence: Synthetic oligonucleotide
uucuacucuucgaauaucc

SEQ ID NO: 2057289 - RNA, 19 nt, Artificial Sequence
  Description of Artificial Sequence: Synthetic oligonucleotide
aauaagcacuauaaaaugu

SEQ ID NO: 2057290 - RNA, 19 nt, Artificial Sequence
  Description of Artificial Sequence: Synthetic oligonucleotide
uaccauacaacauguaugu

SEQ ID NO: 2057291 - RNA, 19 nt, Artificial Sequence
  Description of Artificial Sequence: Synthetic oligonucleotide
uccaugaacacccgcgacg

SEQ ID NO: 2057292 - RNA, 19 nt, Artificial Sequence
  Description of Artificial Sequence: Synthetic oligonucleotide
uguacaguuaaugaaccug

SEQ ID NO: 2057293 - RNA, 19 nt, Artificial Sequence
  Description of Artificial Sequence: Synthetic oligonucleotide
ugugggauuauguucaaaa

SEQ ID NO: 2057294 - RNA, 19 nt, Artificial Sequence
  Description of Artificial Sequence: Synthetic oligonucleotide
auuguugcacuuuugauuu

SEQ ID NO: 2057295 - RNA, 19 nt, Artificial Sequence
  Description of Artificial Sequence: Synthetic oligonucleotide
aaaaguggcagauuuuaua

SEQ ID NO: 2057296 - RNA, 19 nt, Artificial Sequence
  Description of Artificial Sequence: Synthetic oligonucleotide
acaacauguauguucagga

SEQ ID NO: 2057297 - RNA, 19 nt, Artificial Sequence
  Description of Artificial Sequence: Synthetic oligonucleotide
aaauuggccuuccaauucu

SEQ ID NO: 2057298 - RNA, 19 nt, Artificial Sequence
  Description of Artificial Sequence: Synthetic oligonucleotide
ucaguauacaaaaguggca

SEQ ID NO: 2057299 - RNA, 19 nt, Artificial Sequence
  Description of Artificial Sequence: Synthetic oligonucleotide
uauaaauugucaguauaca

SEQ ID NO: 2057300 - RNA, 19 nt, Artificial Sequence
  Description of Artificial Sequence: Synthetic oligonucleotide
gagcauaaguauucugugg

SEQ ID NO: 2057301 - RNA, 19 nt, Artificial Sequence
  Description of Artificial Sequence: Synthetic oligonucleotide
aauaaacacuuuugaagau

SEQ ID NO: 2057302 - RNA, 19 nt, Artificial Sequence
  Description of Artificial Sequence: Synthetic oligonucleotide
ugagcauaaguauucugug

SEQ ID NO: 2057303 - RNA, 19 nt, Artificial Sequence
  Description of Artificial Sequence: Synthetic oligonucleotide
uauuguugcacuuuugauu

SEQ ID NO: 2057304 - RNA, 19 nt, Artificial Sequence
  Description of Artificial Sequence: Synthetic oligonucleotide
agaacccugagugugauag

SEQ ID NO: 2057305 - RNA, 19 nt, Artificial Sequence
  Description of Artificial Sequence: Synthetic oligonucleotide
auaaauugucaguauacaa

SEQ ID NO: 2057306 - RNA, 19 nt, Artificial Sequence
  Description of Artificial Sequence: Synthetic oligonucleotide
uucuaauguauaaauuguc

SEQ ID NO: 2057307 - RNA, 19 nt, Artificial Sequence
  Description of Artificial Sequence: Synthetic oligonucleotide
ugauuaguaaagguuuucc

SEQ ID NO: 2057308 - RNA, 19 nt, Artificial Sequence
  Description of Artificial Sequence: Synthetic oligonucleotide
uuucaauagaacccugagu

SEQ ID NO: 2057309 - RNA, 19 nt, Artificial Sequence
  Description of Artificial Sequence: Synthetic oligonucleotide
cauacaacauguauguuca

SEQ ID NO: 2057310 - RNA, 19 nt, Artificial Sequence
  Description of Artificial Sequence: Synthetic oligonucleotide
accagaaaauuacaaauau

SEQ ID NO: 2057311 - RNA, 19 nt, Artificial Sequence
  Description of Artificial Sequence: Synthetic oligonucleotide
ucaauauaccauacaacau

SEQ ID NO: 2057312 - RNA, 19 nt, Artificial Sequence
  Description of Artificial Sequence: Synthetic oligonucleotide
gucaguauacaaaaguggc

SEQ ID NO: 2057313 - RNA, 19 nt, Artificial Sequence
  Description of Artificial Sequence: Synthetic oligonucleotide
guacaguuaaugaaccugg

SEQ ID NO: 2057314 - RNA, 19 nt, Artificial Sequence
  Description of Artificial Sequence: Synthetic oligonucleotide
caucaauauaccauacaac

SEQ ID NO: 2057315 - RNA, 19 nt, Artificial Sequence
  Description of Artificial Sequence: Synthetic oligonucleotide
acuguuacauuuucugucu

SEQ ID NO: 2057316 - RNA, 19 nt, Artificial Sequence
  Description of Artificial Sequence: Synthetic oligonucleotide
uucuuugauuaguaaaggu

SEQ ID NO: 2057317 - RNA, 19 nt, Artificial Sequence
  Description of Artificial Sequence: Synthetic oligonucleotide
guucaggacagaaauaagc

SEQ ID NO: 2057318 - RNA, 19 nt, Artificial Sequence
  Description of Artificial Sequence: Synthetic oligonucleotide
aauguaaugcagaccucgg

SEQ ID NO: 2057319 - RNA, 19 nt, Artificial Sequence
  Description of Artificial Sequence: Synthetic oligonucleotide
aucaaauuggccuuccaau

SEQ ID NO: 2057320 - RNA, 19 nt, Artificial Sequence
  Description of Artificial Sequence: Synthetic oligonucleotide
aacgaggucacagacuucu

SEQ ID NO: 2057321 - RNA, 19 nt, Artificial Sequence
  Description of Artificial Sequence: Synthetic oligonucleotide
guauaaauugucaguauac

SEQ ID NO: 2057322 - RNA, 19 nt, Artificial Sequence
  Description of Artificial Sequence: Synthetic oligonucleotide
augcauucucaacagcaac

SEQ ID NO: 2057323 - RNA, 19 nt, Artificial Sequence
  Description of Artificial Sequence: Synthetic oligonucleotide
uguuacauuuucugucugc

SEQ ID NO: 2057324 - RNA, 19 nt, Artificial Sequence
  Description of Artificial Sequence: Synthetic oligonucleotide
gaagaugcauguauuguug

SEQ ID NO: 2057325 - RNA, 19 nt, Artificial Sequence
  Description of Artificial Sequence: Synthetic oligonucleotide
uacucuucgaauauccuuu

SEQ ID NO: 2057326 - RNA, 19 nt, Artificial Sequence
  Description of Artificial Sequence: Synthetic oligonucleotide
auaaacacuuuugaagaug

SEQ ID NO: 2057327 - RNA, 19 nt, Artificial Sequence
  Description of Artificial Sequence: Synthetic oligonucleotide
gaucggguuguuuucccgg

SEQ ID NO: 2057328 - RNA, 19 nt, Artificial Sequence
  Description of Artificial Sequence: Synthetic oligonucleotide
aaugcagaccucggcuucc

SEQ ID NO: 2057329 - RNA, 19 nt, Artificial Sequence
  Description of Artificial Sequence: Synthetic oligonucleotide
uuuuaccucaaaaguaaua

SEQ ID NO: 2057330 - RNA, 19 nt, Artificial Sequence
  Description of Artificial Sequence: Synthetic oligonucleotide
uaagcacuauaaaauguau

SEQ ID NO: 2057331 - RNA, 19 nt, Artificial Sequence
  Description of Artificial Sequence: Synthetic oligonucleotide
acauguauguucaggacag

SEQ ID NO: 2057332 - RNA, 19 nt, Artificial Sequence
  Description of Artificial Sequence: Synthetic oligonucleotide
aguuccaugaacacccgcg

SEQ ID NO: 2057333 - RNA, 19 nt, Artificial Sequence
  Description of Artificial Sequence: Synthetic oligonucleotide
acaagacaagcuugccgcc

SEQ ID NO: 2057334 - RNA, 19 nt, Artificial Sequence
  Description of Artificial Sequence: Synthetic oligonucleotide
cuucuuugauuaguaaagg

SEQ ID NO: 2057335 - RNA, 19 nt, Artificial Sequence
  Description of Artificial Sequence: Synthetic oligonucleotide
ugaagaugcauguauuguu

SEQ ID NO: 2057336 - RNA, 19 nt, Artificial Sequence
  Description of Artificial Sequence: Synthetic oligonucleotide
cacuguuacauuuucuguc

SEQ ID NO: 2057337 - RNA, 19 nt, Artificial Sequence
  Description of Artificial Sequence: Synthetic oligonucleotide
cuucgaauauccuuuguca

SEQ ID NO: 2057338 - RNA, 19 nt, Artificial Sequence
  Description of Artificial Sequence: Synthetic oligonucleotide
ucgaauauccuuugucacu

SEQ ID NO: 2057339 - RNA, 19 nt, Artificial Sequence
  Description of Artificial Sequence: Synthetic oligonucleotide
ugaacacccgcgacggagg

SEQ ID NO: 2057340 - RNA, 19 nt, Artificial Sequence
  Description of Artificial Sequence: Synthetic oligonucleotide
acagcaucaauauaccaua

SEQ ID NO: 2057341 - RNA, 19 nt, Artificial Sequence
  Description of Artificial Sequence: Synthetic oligonucleotide
aguuaaugaaccugggauu

SEQ ID NO: 2057342 - RNA, 19 nt, Artificial Sequence
  Description of Artificial Sequence: Synthetic oligonucleotide
acauagccggggcagcugc

SEQ ID NO: 2057343 - RNA, 19 nt, Artificial Sequence
  Description of Artificial Sequence: Synthetic oligonucleotide
ucaaauuggccuuccaauu

SEQ ID NO: 2057344 - RNA, 19 nt, Artificial Sequence
  Description of Artificial Sequence: Synthetic oligonucleotide
aaguggcagauuuuauaca

SEQ ID NO: 2057345 - RNA, 19 nt, Artificial Sequence
  Description of Artificial Sequence: Synthetic oligonucleotide
uggaauuuuaaagaugcuu

SEQ ID NO: 2057346 - RNA, 19 nt, Artificial Sequence
  Description of Artificial Sequence: Synthetic oligonucleotide
uuuauacagcaucaauaua

SEQ ID NO: 2057347 - RNA, 19 nt, Artificial Sequence
  Description of Artificial Sequence: Synthetic oligonucleotide
cucacguggaccucgcggg

SEQ ID NO: 2057348 - RNA, 19 nt, Artificial Sequence
  Description of Artificial Sequence: Synthetic oligonucleotide
cuuugcgugauguagucca

SEQ ID NO: 2057349 - RNA, 19 nt, Artificial Sequence
  Description of Artificial Sequence: Synthetic oligonucleotide
ucaauagaacccugagugu

SEQ ID NO: 2057350 - RNA, 19 nt, Artificial Sequence
  Description of Artificial Sequence: Synthetic oligonucleotide
uuccaugugauaugcauuu

SEQ ID NO: 2057351 - RNA, 19 nt, Artificial Sequence
  Description of Artificial Sequence: Synthetic oligonucleotide
gaugcauguauuguugcac

SEQ ID NO: 2057352 - RNA, 19 nt, Artificial Sequence
  Description of Artificial Sequence: Synthetic oligonucleotide
uugaagaugcauguauugu

SEQ ID NO: 2057353 - RNA, 19 nt, Artificial Sequence
  Description of Artificial Sequence: Synthetic oligonucleotide
gcagauuuuauacagcauc

SEQ ID NO: 2057354 - RNA, 19 nt, Artificial Sequence
  Description of Artificial Sequence: Synthetic oligonucleotide
uuucucagaguguuuugga

SEQ ID NO: 2057355 - RNA, 19 nt, Artificial Sequence
  Description of Artificial Sequence: Synthetic oligonucleotide
agcuuugcgccaugcauuc

SEQ ID NO: 2057356 - RNA, 19 nt, Artificial Sequence
  Description of Artificial Sequence: Synthetic oligonucleotide
aucggguuguuuucccggc

SEQ ID NO: 2057357 - RNA, 19 nt, Artificial Sequence
  Description of Artificial Sequence: Synthetic oligonucleotide
acacuuuugaagaugcaug

SEQ ID NO: 2057358 - RNA, 19 nt, Artificial Sequence
  Description of Artificial Sequence: Synthetic oligonucleotide
auguucaggacagaaauaa

SEQ ID NO: 2057359 - RNA, 19 nt, Artificial Sequence
  Description of Artificial Sequence: Synthetic oligonucleotide
uaugcuuuaguuggaauuu

SEQ ID NO: 2057360 - RNA, 19 nt, Artificial Sequence
  Description of Artificial Sequence: Synthetic oligonucleotide
acaguuaaugaaccuggga

SEQ ID NO: 2057361 - RNA, 19 nt, Artificial Sequence
  Description of Artificial Sequence: Synthetic oligonucleotide
aauauccuuugucacuguu

SEQ ID NO: 2057362 - RNA, 19 nt, Artificial Sequence
  Description of Artificial Sequence: Synthetic oligonucleotide
ucuacucuucgaauauccu

SEQ ID NO: 2057363 - RNA, 19 nt, Artificial Sequence
  Description of Artificial Sequence: Synthetic oligonucleotide
uaaguauucugugggauua

SEQ ID NO: 2057364 - RNA, 19 nt, Artificial Sequence
  Description of Artificial Sequence: Synthetic oligonucleotide
uggaaacuagaaagugagc

SEQ ID NO: 2057365 - RNA, 19 nt, Artificial Sequence
  Description of Artificial Sequence: Synthetic oligonucleotide
ugcgugauguaguccaggc

SEQ ID NO: 2057366 - RNA, 19 nt, Artificial Sequence
  Description of Artificial Sequence: Synthetic oligonucleotide
agugagcauaaguauucug

SEQ ID NO: 2057367 - RNA, 19 nt, Artificial Sequence
  Description of Artificial Sequence: Synthetic oligonucleotide
caaauuggccuuccaauuc

SEQ ID NO: 2057368 - RNA, 19 nt, Artificial Sequence
  Description of Artificial Sequence: Synthetic oligonucleotide
uccuucgugcugcucaccc

SEQ ID NO: 2057369 - RNA, 19 nt, Artificial Sequence
  Description of Artificial Sequence: Synthetic oligonucleotide
guauguucaggacagaaau

SEQ ID NO: 2057370 - RNA, 19 nt, Artificial Sequence
  Description of Artificial Sequence: Synthetic oligonucleotide
aguuggaauuuuaaagaug

SEQ ID NO: 2057371 - RNA, 19 nt, Artificial Sequence
  Description of Artificial Sequence: Synthetic oligonucleotide
aagacaagcuugccgccga

SEQ ID NO: 2057372 - RNA, 19 nt, Artificial Sequence
  Description of Artificial Sequence: Synthetic oligonucleotide
auaaguauucugugggauu

SEQ ID NO: 2057373 - RNA, 19 nt, Artificial Sequence
  Description of Artificial Sequence: Synthetic oligonucleotide
aguguuuuggaaacuagaa

SEQ ID NO: 2057374 - RNA, 19 nt, Artificial Sequence
  Description of Artificial Sequence: Synthetic oligonucleotide
augcauguauuguugcacu

SEQ ID NO: 2057375 - RNA, 19 nt, Artificial Sequence
  Description of Artificial Sequence: Synthetic oligonucleotide
caacauguauguucaggac

SEQ ID NO: 2057376 - RNA, 19 nt, Artificial Sequence
  Description of Artificial Sequence: Synthetic oligonucleotide
acaagcuugccgccgaaga

SEQ ID NO: 2057377 - RNA, 19 nt, Artificial Sequence
  Description of Artificial Sequence: Synthetic oligonucleotide
acacccgcgacggaggggc

SEQ ID NO: 2057378 - RNA, 19 nt, Artificial Sequence
  Description of Artificial Sequence: Synthetic oligonucleotide
cuuugauuaguaaagguuu

SEQ ID NO: 2057379 - RNA, 19 nt, Artificial Sequence
  Description of Artificial Sequence: Synthetic oligonucleotide
agaugcauguauuguugca

SEQ ID NO: 2057380 - RNA, 19 nt, Artificial Sequence
  Description of Artificial Sequence: Synthetic oligonucleotide
gaaccugggauucuggaua

SEQ ID NO: 2057381 - RNA, 19 nt, Artificial Sequence
  Description of Artificial Sequence: Synthetic oligonucleotide
gaaccaguuccaugaacac

SEQ ID NO: 2057382 - RNA, 19 nt, Artificial Sequence
  Description of Artificial Sequence: Synthetic oligonucleotide
auaagcacuauaaaaugua

SEQ ID NO: 2057383 - RNA, 19 nt, Artificial Sequence
  Description of Artificial Sequence: Synthetic oligonucleotide
aucaccugcgcccgguccg

SEQ ID NO: 2057384 - RNA, 19 nt, Artificial Sequence
  Description of Artificial Sequence: Synthetic oligonucleotide
uuugcgugauguaguccag

SEQ ID NO: 2057385 - RNA, 19 nt, Artificial Sequence
  Description of Artificial Sequence: Synthetic oligonucleotide
gucacagacuucuugagcu

SEQ ID NO: 2057386 - RNA, 19 nt, Artificial Sequence
  Description of Artificial Sequence: Synthetic oligonucleotide
auguaguccaggcggcggg

SEQ ID NO: 2057387 - RNA, 19 nt, Artificial Sequence
  Description of Artificial Sequence: Synthetic oligonucleotide
auguauaaauugucaguau

SEQ ID NO: 2057388 - RNA, 19 nt, Artificial Sequence
  Description of Artificial Sequence: Synthetic oligonucleotide
cuucgugcugcucacccgc

SEQ ID NO: 2057389 - RNA, 19 nt, Artificial Sequence
  Description of Artificial Sequence: Synthetic oligonucleotide
uuugcgccaugcauucuca

SEQ ID NO: 2057390 - RNA, 19 nt, Artificial Sequence
  Description of Artificial Sequence: Synthetic oligonucleotide
aacuagaaagugagcauaa

SEQ ID NO: 2057391 - RNA, 19 nt, Artificial Sequence
  Description of Artificial Sequence: Synthetic oligonucleotide
augaacacccgcgacggag

SEQ ID NO: 2057392 - RNA, 19 nt, Artificial Sequence
  Description of Artificial Sequence: Synthetic oligonucleotide
guuacauuuucugucugca

SEQ ID NO: 2057393 - RNA, 19 nt, Artificial Sequence
  Description of Artificial Sequence: Synthetic oligonucleotide
uaaugcagaccucggcuuc

SEQ ID NO: 2057394 - RNA, 19 nt, Artificial Sequence
  Description of Artificial Sequence: Synthetic oligonucleotide
uugauuaguaaagguuuuc

SEQ ID NO: 2057395 - RNA, 19 nt, Artificial Sequence
  Description of Artificial Sequence: Synthetic oligonucleotide
acaacagagcuaucuaguu

SEQ ID NO: 2057396 - RNA, 19 nt, Artificial Sequence
  Description of Artificial Sequence: Synthetic oligonucleotide
ugaaccugggauucuggau

SEQ ID NO: 2057397 - RNA, 19 nt, Artificial Sequence
  Description of Artificial Sequence: Synthetic oligonucleotide
aacccugagugugauagaa

SEQ ID NO: 2057398 - RNA, 19 nt, Artificial Sequence
  Description of Artificial Sequence: Synthetic oligonucleotide
gguuaauuuuauuuucuaa

SEQ ID NO: 2057399 - RNA, 19 nt, Artificial Sequence
  Description of Artificial Sequence: Synthetic oligonucleotide
ugcuuuaguuggaauuuua

SEQ ID NO: 2057400 - RNA, 19 nt, Artificial Sequence
  Description of Artificial Sequence: Synthetic oligonucleotide
uuucccagaguuuggccaa

SEQ ID NO: 2057401 - RNA, 19 nt, Artificial Sequence
  Description of Artificial Sequence: Synthetic oligonucleotide
ucggcuuccaugugauaug

SEQ ID NO: 2057402 - RNA, 19 nt, Artificial Sequence
  Description of Artificial Sequence: Synthetic oligonucleotide
aguaugcuuuaguuggaau

SEQ ID NO: 2057403 - RNA, 19 nt, Artificial Sequence
  Description of Artificial Sequence: Synthetic oligonucleotide
gaguguuuuggaaacuaga

SEQ ID NO: 2057404 - RNA, 19 nt, Artificial Sequence
  Description of Artificial Sequence: Synthetic oligonucleotide
cuuugcgccaugcauucuc

SEQ ID NO: 2057405 - RNA, 19 nt, Artificial Sequence
  Description of Artificial Sequence: Synthetic oligonucleotide
aagugagcauaaguauucu

SEQ ID NO: 2057406 - RNA, 19 nt, Artificial Sequence
  Description of Artificial Sequence: Synthetic oligonucleotide
acucuucgaauauccuuug

SEQ ID NO: 2057407 - RNA, 19 nt, Artificial Sequence
  Description of Artificial Sequence: Synthetic oligonucleotide
ugauguaguccaggcggcg

SEQ ID NO: 2057408 - RNA, 19 nt, Artificial Sequence
  Description of Artificial Sequence: Synthetic oligonucleotide
aagcacuauaaaauguaua

SEQ ID NO: 2057409 - RNA, 19 nt, Artificial Sequence
  Description of Artificial Sequence: Synthetic oligonucleotide
acuagaaagugagcauaag

SEQ ID NO: 2057410 - RNA, 19 nt, Artificial Sequence
  Description of Artificial Sequence: Synthetic oligonucleotide
uuuucccggcccagguuag

SEQ ID NO: 2057411 - RNA, 19 nt, Artificial Sequence
  Description of Artificial Sequence: Synthetic oligonucleotide
gguugcagcgacauagccg

SEQ ID NO: 2057412 - RNA, 19 nt, Artificial Sequence
  Description of Artificial Sequence: Synthetic oligonucleotide
uugagcuuugcgccaugca

SEQ ID NO: 2057413 - RNA, 19 nt, Artificial Sequence
  Description of Artificial Sequence: Synthetic oligonucleotide
agaguuuggccaacgaggu

SEQ ID NO: 2057414 - RNA, 19 nt, Artificial Sequence
  Description of Artificial Sequence: Synthetic oligonucleotide
ucaggcgggcugaugacaa

SEQ ID NO: 2057415 - RNA, 19 nt, Artificial Sequence
  Description of Artificial Sequence: Synthetic oligonucleotide
aguauacaaaaguggcauu

SEQ ID NO: 2057416 - RNA, 19 nt, Artificial Sequence
  Description of Artificial Sequence: Synthetic oligonucleotide
caguuaaugaaccugggau

SEQ ID NO: 2057417 - RNA, 19 nt, Artificial Sequence
  Description of Artificial Sequence: Synthetic oligonucleotide
uuccaugaacacccgcgac

SEQ ID NO: 2057418 - RNA, 19 nt, Artificial Sequence
  Description of Artificial Sequence: Synthetic oligonucleotide
cugcagacccugcugcugg

SEQ ID NO: 2057419 - RNA, 19 nt, Artificial Sequence
  Description of Artificial Sequence: Synthetic oligonucleotide
caagacaagcuugccgccg

SEQ ID NO: 2057420 - RNA, 19 nt, Artificial Sequence
  Description of Artificial Sequence: Synthetic oligonucleotide
ugggccuucgcagcguggg

SEQ ID NO: 2057421 - RNA, 19 nt, Artificial Sequence
  Description of Artificial Sequence: Synthetic oligonucleotide
ggcugcgucuccaaggucg

SEQ ID NO: 2057422 - RNA, 19 nt, Artificial Sequence
  Description of Artificial Sequence: Synthetic oligonucleotide
gaacacccgcgacggaggg

SEQ ID NO: 2057423 - RNA, 19 nt, Artificial Sequence
  Description of Artificial Sequence: Synthetic oligonucleotide
gugauagaacucaggcggg

SEQ ID NO: 2057424 - RNA, 19 nt, Artificial Sequence
  Description of Artificial Sequence: Synthetic oligonucleotide
ugcgccaugcauucucaac

SEQ ID NO: 2057425 - RNA, 19 nt, Artificial Sequence
  Description of Artificial Sequence: Synthetic oligonucleotide
gacacacucuucuuggccu

SEQ ID NO: 2057426 - RNA, 19 nt, Artificial Sequence
  Description of Artificial Sequence: Synthetic oligonucleotide
agcgacauagccggggcag

SEQ ID NO: 2057427 - RNA, 19 nt, Artificial Sequence
  Description of Artificial Sequence: Synthetic oligonucleotide
augugauaugcauuuucua

SEQ ID NO: 2057428 - RNA, 19 nt, Artificial Sequence
  Description of Artificial Sequence: Synthetic oligonucleotide
uuaaugaaccugggauucu

SEQ ID NO: 2057429 - RNA, 19 nt, Artificial Sequence
  Description of Artificial Sequence: Synthetic oligonucleotide
aguauucugugggauuaug

SEQ ID NO: 2057430 - RNA, 19 nt, Artificial Sequence
  Description of Artificial Sequence: Synthetic oligonucleotide
auacaacauguauguucag

SEQ ID NO: 2057431 - RNA, 19 nt, Artificial Sequence
  Description of Artificial Sequence: Synthetic oligonucleotide
ucacaguauuucucagagu

SEQ ID NO: 2057432 - RNA, 19 nt, Artificial Sequence
  Description of Artificial Sequence: Synthetic oligonucleotide
cauuuucugucugcagacc

SEQ ID NO: 2057433 - RNA, 19 nt, Artificial Sequence
  Description of Artificial Sequence: Synthetic oligonucleotide
gugagcauaaguauucugu

SEQ ID NO: 2057434 - RNA, 19 nt, Artificial Sequence
  Description of Artificial Sequence: Synthetic oligonucleotide
caucaaauuggccuuccaa

SEQ ID NO: 2057435 - RNA, 19 nt, Artificial Sequence
  Description of Artificial Sequence: Synthetic oligonucleotide
ggucacagacuucuugagc

SEQ ID NO: 2057436 - RNA, 19 nt, Artificial Sequence
  Description of Artificial Sequence: Synthetic oligonucleotide
guaugcuuuaguuggaauu

SEQ ID NO: 2057437 - RNA, 19 nt, Artificial Sequence
  Description of Artificial Sequence: Synthetic oligonucleotide
ucggguuguuuucccggcc

SEQ ID NO: 2057438 - RNA, 19 nt, Artificial Sequence
  Description of Artificial Sequence: Synthetic oligonucleotide
uuucuacucuucgaauauc

SEQ ID NO: 2057439 - RNA, 19 nt, Artificial Sequence
  Description of Artificial Sequence: Synthetic oligonucleotide
gaaagugagcauaaguauu

SEQ ID NO: 2057440 - RNA, 19 nt, Artificial Sequence
  Description of Artificial Sequence: Synthetic oligonucleotide
guuccaugaacacccgcga

SEQ ID NO: 2057441 - RNA, 19 nt, Artificial Sequence
  Description of Artificial Sequence: Synthetic oligonucleotide
cuugccgccgaagauuuuc

SEQ ID NO: 2057442 - RNA, 19 nt, Artificial Sequence
  Description of Artificial Sequence: Synthetic oligonucleotide
uugccgccgaagauuuuca

SEQ ID NO: 2057443 - RNA, 19 nt, Artificial Sequence
  Description of Artificial Sequence: Synthetic oligonucleotide
gcucacguggaccucgcgg

SEQ ID NO: 2057444 - RNA, 19 nt, Artificial Sequence
  Description of Artificial Sequence: Synthetic oligonucleotide
aaacacuuuugaagaugca

SEQ ID NO: 2057445 - RNA, 19 nt, Artificial Sequence
  Description of Artificial Sequence: Synthetic oligonucleotide
aagcuugccgccgaagauu

SEQ ID NO: 2057446 - RNA, 19 nt, Artificial Sequence
  Description of Artificial Sequence: Synthetic oligonucleotide
ugcgucuccaaggucggga

SEQ ID NO: 2057447 - RNA, 19 nt, Artificial Sequence
  Description of Artificial Sequence: Synthetic oligonucleotide
gugggaacggcugccgacg

SEQ ID NO: 2057448 - RNA, 19 nt, Artificial Sequence
  Description of Artificial Sequence: Synthetic oligonucleotide
ugcauguauuguugcacuu

SEQ ID NO: 2057449 - RNA, 19 nt, Artificial Sequence
  Description of Artificial Sequence: Synthetic oligonucleotide
cuguuacauuuucugucug

SEQ ID NO: 2057450 - RNA, 19 nt, Artificial Sequence
  Description of Artificial Sequence: Synthetic oligonucleotide
cagacccugcugcuggagg

SEQ ID NO: 2057451 - RNA, 19 nt, Artificial Sequence
  Description of Artificial Sequence: Synthetic oligonucleotide
aaggucgggaucggguugu

SEQ ID NO: 2057452 - RNA, 19 nt, Artificial Sequence
  Description of Artificial Sequence: Synthetic oligonucleotide
aggggcggguugcagcgac

SEQ ID NO: 2057453 - RNA, 19 nt, Artificial Sequence
  Description of Artificial Sequence: Synthetic oligonucleotide
guuuucccggcccagguua

SEQ ID NO: 2057454 - RNA, 19 nt, Artificial Sequence
  Description of Artificial Sequence: Synthetic oligonucleotide
accuguugaucaucaaauu

SEQ ID NO: 2057455 - RNA, 19 nt, Artificial Sequence
  Description of Artificial Sequence: Synthetic oligonucleotide
gauaugcauuuucuacucu

SEQ ID NO: 2057456 - RNA, 19 nt, Artificial Sequence
  Description of Artificial Sequence: Synthetic oligonucleotide
gaccucgcgggcuccgggg

SEQ ID NO: 2057457 - RNA, 19 nt, Artificial Sequence
  Description of Artificial Sequence: Synthetic oligonucleotide
ggaucggguuguuuucccg

SEQ ID NO: 2057458 - RNA, 19 nt, Artificial Sequence
  Description of Artificial Sequence: Synthetic oligonucleotide
ggaauuuuaaagaugcuuu

SEQ ID NO: 2057459 - RNA, 19 nt, Artificial Sequence
  Description of Artificial Sequence: Synthetic oligonucleotide
uuagcccagggaaccaguu

SEQ ID NO: 2057460 - RNA, 19 nt, Artificial Sequence
  Description of Artificial Sequence: Synthetic oligonucleotide
aggacagaaauaagcacua

SEQ ID NO: 2057461 - RNA, 19 nt, Artificial Sequence
  Description of Artificial Sequence: Synthetic oligonucleotide
ccgaagauuuucaauagaa

SEQ ID NO: 2057462 - RNA, 19 nt, Artificial Sequence
  Description of Artificial Sequence: Synthetic oligonucleotide
ucgggaucggguuguuuuc

SEQ ID NO: 2057463 - RNA, 19 nt, Artificial Sequence
  Description of Artificial Sequence: Synthetic oligonucleotide
uguuuucccggcccagguu

SEQ ID NO: 2057464 - RNA, 19 nt, Artificial Sequence
  Description of Artificial Sequence: Synthetic oligonucleotide
caaggucgggaucggguug

SEQ ID NO: 2057465 - RNA, 19 nt, Artificial Sequence
  Description of Artificial Sequence: Synthetic oligonucleotide
gaccucggcuuccauguga

SEQ ID NO: 2057466 - RNA, 19 nt, Artificial Sequence
  Description of Artificial Sequence: Synthetic oligonucleotide
aacacccgcgacggagggg

SEQ ID NO: 2057467 - RNA, 19 nt, Artificial Sequence
  Description of Artificial Sequence: Synthetic oligonucleotide
aaguauucugugggauuau

SEQ ID NO: 2057468 - RNA, 19 nt, Artificial Sequence
  Description of Artificial Sequence: Synthetic oligonucleotide
ccaugaacacccgcgacgg

SEQ ID NO: 2057469 - RNA, 19 nt, Artificial Sequence
  Description of Artificial Sequence: Synthetic oligonucleotide
caguuccaugaacacccgc

SEQ ID NO: 2057470 - RNA, 19 nt, Artificial Sequence
  Description of Artificial Sequence: Synthetic oligonucleotide
agguuuucccagaguuugg

SEQ ID NO: 2057471 - RNA, 19 nt, Artificial Sequence
  Description of Artificial Sequence: Synthetic oligonucleotide
acguggaccucgcgggcuc

SEQ ID NO: 2057472 - RNA, 19 nt, Artificial Sequence
  Description of Artificial Sequence: Synthetic oligonucleotide
ccaugugauaugcauuuuc

SEQ ID NO: 2057473 - RNA, 19 nt, Artificial Sequence
  Description of Artificial Sequence: Synthetic oligonucleotide
acccugagugugauagaac

SEQ ID NO: 2057474 - RNA, 19 nt, Artificial Sequence
  Description of Artificial Sequence: Synthetic oligonucleotide
cuucgcagcgugggaacgg

SEQ ID NO: 2057475 - RNA, 19 nt, Artificial Sequence
  Description of Artificial Sequence: Synthetic oligonucleotide
cauagccggggcagcugcg

SEQ ID NO: 2057476 - RNA, 19 nt, Artificial Sequence
  Description of Artificial Sequence: Synthetic oligonucleotide
uggauaccuguugaucauc

SEQ ID NO: 2057477 - RNA, 19 nt, Artificial Sequence
  Description of Artificial Sequence: Synthetic oligonucleotide
gacgggcugcgucuccaag

SEQ ID NO: 2057478 - RNA, 19 nt, Artificial Sequence
  Description of Artificial Sequence: Synthetic oligonucleotide
uucgcagcgugggaacggc

SEQ ID NO: 2057479 - RNA, 19 nt, Artificial Sequence
  Description of Artificial Sequence: Synthetic oligonucleotide
ucugugggauuauguucaa

SEQ ID NO: 2057480 - RNA, 19 nt, Artificial Sequence
  Description of Artificial Sequence: Synthetic oligonucleotide
acccgcacgaucaccugcg

SEQ ID NO: 2057481 - RNA, 19 nt, Artificial Sequence
  Description of Artificial Sequence: Synthetic oligonucleotide
auguauuguugcacuuuug

SEQ ID NO: 2057482 - RNA, 19 nt, Artificial Sequence
  Description of Artificial Sequence: Synthetic oligonucleotide
gcgccaugcauucucaaca

SEQ ID NO: 2057483 - RNA, 19 nt, Artificial Sequence
  Description of Artificial Sequence: Synthetic oligonucleotide
caaauucaguaaauguaau

SEQ ID NO: 2057484 - RNA, 19 nt, Artificial Sequence
  Description of Artificial Sequence: Synthetic oligonucleotide
gcgugauguaguccaggcg

SEQ ID NO: 2057485 - RNA, 19 nt, Artificial Sequence
  Description of Artificial Sequence: Synthetic oligonucleotide
cacccgcacgaucaccugc

SEQ ID NO: 2057486 - RNA, 19 nt, Artificial Sequence
  Description of Artificial Sequence: Synthetic oligonucleotide
cagaccucggcuuccaugu

SEQ ID NO: 2057487 - RNA, 19 nt, Artificial Sequence
  Description of Artificial Sequence: Synthetic oligonucleotide
gcauaaguauucuguggga

SEQ ID NO: 2057488 - RNA, 19 nt, Artificial Sequence
  Description of Artificial Sequence: Synthetic oligonucleotide
ggccgcgccgcucacgugg

SEQ ID NO: 2057489 - RNA, 19 nt, Artificial Sequence
  Description of Artificial Sequence: Synthetic oligonucleotide
gaguaugcuuuaguuggaa

SEQ ID NO: 2057490 - RNA, 19 nt, Artificial Sequence
  Description of Artificial Sequence: Synthetic oligonucleotide
cauuuauuucucacaguau

SEQ ID NO: 2057491 - RNA, 19 nt, Artificial Sequence
  Description of Artificial Sequence: Synthetic oligonucleotide
agaguaugcuuuaguugga

SEQ ID NO: 2057492 - RNA, 19 nt, Artificial Sequence
  Description of Artificial Sequence: Synthetic oligonucleotide
cgaauauccuuugucacug

SEQ ID NO: 2057493 - RNA, 19 nt, Artificial Sequence
  Description of Artificial Sequence: Synthetic oligonucleotide
ggaacggcugccgacgggc

SEQ ID NO: 2057494 - RNA, 19 nt, Artificial Sequence
  Description of Artificial Sequence: Synthetic oligonucleotide
guauucugugggauuaugu

SEQ ID NO: 2057495 - RNA, 19 nt, Artificial Sequence
  Description of Artificial Sequence: Synthetic oligonucleotide
cauuuucuacucuucgaau

SEQ ID NO: 2057496 - RNA, 19 nt, Artificial Sequence
  Description of Artificial Sequence: Synthetic oligonucleotide
ggguugcagcgacauagcc

SEQ ID NO: 2057497 - RNA, 19 nt, Artificial Sequence
  Description of Artificial Sequence: Synthetic oligonucleotide
cacacucuucuuggccucg

SEQ ID NO: 2057498 - RNA, 19 nt, Artificial Sequence
  Description of Artificial Sequence: Synthetic oligonucleotide
gaacccugagugugauaga

SEQ ID NO: 2057499 - RNA, 19 nt, Artificial Sequence
  Description of Artificial Sequence: Synthetic oligonucleotide
cuacucuucgaauauccuu

SEQ ID NO: 2057500 - RNA, 19 nt, Artificial Sequence
  Description of Artificial Sequence: Synthetic oligonucleotide
agcgugggaacggcugccg

SEQ ID NO: 2057501 - RNA, 19 nt, Artificial Sequence
  Description of Artificial Sequence: Synthetic oligonucleotide
aggcuuugcgugauguagu

SEQ ID NO: 2057502 - RNA, 19 nt, Artificial Sequence
  Description of Artificial Sequence: Synthetic oligonucleotide
ucaccugcgcccgguccgg

SEQ ID NO: 2057503 - RNA, 19 nt, Artificial Sequence
  Description of Artificial Sequence: Synthetic oligonucleotide
gcagaccucggcuuccaug

SEQ ID NO: 2057504 - RNA, 19 nt, Artificial Sequence
  Description of Artificial Sequence: Synthetic oligonucleotide
accugggauucuggauacc

SEQ ID NO: 2057505 - RNA, 19 nt, Artificial Sequence
  Description of Artificial Sequence: Synthetic oligonucleotide
ggcagcugcguugccauag

SEQ ID NO: 2057506 - RNA, 19 nt, Artificial Sequence
  Description of Artificial Sequence: Synthetic oligonucleotide
guaaugcagaccucggcuu

SEQ ID NO: 2057507 - RNA, 19 nt, Artificial Sequence
  Description of Artificial Sequence: Synthetic oligonucleotide
aggcgggcugaugacaaca

SEQ ID NO: 2057508 - RNA, 19 nt, Artificial Sequence
  Description of Artificial Sequence: Synthetic oligonucleotide
cauguauuguugcacuuuu

SEQ ID NO: 2057509 - RNA, 19 nt, Artificial Sequence
  Description of Artificial Sequence: Synthetic oligonucleotide
ggccaacgaggucacagac

SEQ ID NO: 2057510 - RNA, 19 nt, Artificial Sequence
  Description of Artificial Sequence: Synthetic oligonucleotide
ccagguuagcccagggaac

SEQ ID NO: 2057511 - RNA, 19 nt, Artificial Sequence
  Description of Artificial Sequence: Synthetic oligonucleotide
cccuuuuaccucaaaagua

SEQ ID NO: 2057512 - RNA, 19 nt, Artificial Sequence
  Description of Artificial Sequence: Synthetic oligonucleotide
ggcuuugcgugauguaguc

SEQ ID NO: 2057513 - RNA, 19 nt, Artificial Sequence
  Description of Artificial Sequence: Synthetic oligonucleotide
gcuuuaguuggaauuuuaa

SEQ ID NO: 2057514 - RNA, 19 nt, Artificial Sequence
  Description of Artificial Sequence: Synthetic oligonucleotide
gggaucggguuguuuuccc

SEQ ID NO: 2057515 - RNA, 19 nt, Artificial Sequence
  Description of Artificial Sequence: Synthetic oligonucleotide
gaauauccuuugucacugu

SEQ ID NO: 2057516 - RNA, 19 nt, Artificial Sequence
  Description of Artificial Sequence: Synthetic oligonucleotide
gucgggaucggguuguuuu

SEQ ID NO: 2057517 - RNA, 19 nt, Artificial Sequence
  Description of Artificial Sequence: Synthetic oligonucleotide
cuuccaugugauaugcauu

SEQ ID NO: 2057518 - RNA, 19 nt, Artificial Sequence
  Description of Artificial Sequence: Synthetic oligonucleotide
ugccgccgaagauuuucaa

SEQ ID NO: 2057519 - RNA, 19 nt, Artificial Sequence
  Description of Artificial Sequence: Synthetic oligonucleotide
auauaccauacaacaugua

SEQ ID NO: 2057520 - RNA, 19 nt, Artificial Sequence
  Description of Artificial Sequence: Synthetic oligonucleotide
agcugcguugccauagcaa

SEQ ID NO: 2057521 - RNA, 19 nt, Artificial Sequence
  Description of Artificial Sequence: Synthetic oligonucleotide
agaccucggcuuccaugug

SEQ ID NO: 2057522 - RNA, 19 nt, Artificial Sequence
  Description of Artificial Sequence: Synthetic oligonucleotide
cucacccgcacgaucaccu

SEQ ID NO: 2057523 - RNA, 19 nt, Artificial Sequence
  Description of Artificial Sequence: Synthetic oligonucleotide
uugcgccaugcauucucaa

SEQ ID NO: 2057524 - RNA, 19 nt, Artificial Sequence
  Description of Artificial Sequence: Synthetic oligonucleotide
ggggugggccuucgcagcg

SEQ ID NO: 2057525 - RNA, 19 nt, Artificial Sequence
  Description of Artificial Sequence: Synthetic oligonucleotide
cucggcuuccaugugauau

SEQ ID NO: 2057526 - RNA, 19 nt, Artificial Sequence
  Description of Artificial Sequence: Synthetic oligonucleotide
cccagguuagcccagggaa

SEQ ID NO: 2057527 - RNA, 19 nt, Artificial Sequence
  Description of Artificial Sequence: Synthetic oligonucleotide
caguauuucucagaguguu

SEQ ID NO: 2057528 - RNA, 19 nt, Artificial Sequence
  Description of Artificial Sequence: Synthetic oligonucleotide
ccuucgugcugcucacccg

SEQ ID NO: 2057529 - RNA, 19 nt, Artificial Sequence
  Description of Artificial Sequence: Synthetic oligonucleotide
uagaacccugagugugaua

SEQ ID NO: 2057530 - RNA, 19 nt, Artificial Sequence
  Description of Artificial Sequence: Synthetic oligonucleotide
uggaccucgcgggcuccgg

SEQ ID NO: 2057531 - RNA, 19 nt, Artificial Sequence
  Description of Artificial Sequence: Synthetic oligonucleotide
cuccaaggucgggaucggg

SEQ ID NO: 2057532 - RNA, 19 nt, Artificial Sequence
  Description of Artificial Sequence: Synthetic oligonucleotide
uuucccggcccagguuagc

SEQ ID NO: 2057533 - RNA, 19 nt, Artificial Sequence
  Description of Artificial Sequence: Synthetic oligonucleotide
ucgcagcgugggaacggcu

SEQ ID NO: 2057534 - RNA, 19 nt, Artificial Sequence
  Description of Artificial Sequence: Synthetic oligonucleotide
caacgaggucacagacuuc

SEQ ID NO: 2057535 - RNA, 19 nt, Artificial Sequence
  Description of Artificial Sequence: Synthetic oligonucleotide
agcuugccgccgaagauuu

SEQ ID NO: 2057536 - RNA, 19 nt, Artificial Sequence
  Description of Artificial Sequence: Synthetic oligonucleotide
ccgccgaagauuuucaaua

SEQ ID NO: 2057537 - RNA, 19 nt, Artificial Sequence
  Description of Artificial Sequence: Synthetic oligonucleotide
cccugagugugauagaacu

SEQ ID NO: 2057538 - RNA, 19 nt, Artificial Sequence
  Description of Artificial Sequence: Synthetic oligonucleotide
gcuggcggacaccucggcc

SEQ ID NO: 2057539 - RNA, 19 nt, Artificial Sequence
  Description of Artificial Sequence: Synthetic oligonucleotide
agacaagcuugccgccgaa

SEQ ID NO: 2057540 - RNA, 19 nt, Artificial Sequence
  Description of Artificial Sequence: Synthetic oligonucleotide
uuggccucggcggcugccu

SEQ ID NO: 2057541 - RNA, 19 nt, Artificial Sequence
  Description of Artificial Sequence: Synthetic oligonucleotide
cacgaucaccugcgcccgg

SEQ ID NO: 2057542 - RNA, 19 nt, Artificial Sequence
  Description of Artificial Sequence: Synthetic oligonucleotide
accauacaacauguauguu

SEQ ID NO: 2057543 - RNA, 19 nt, Artificial Sequence
  Description of Artificial Sequence: Synthetic oligonucleotide
gagcuuugcgccaugcauu

SEQ ID NO: 2057544 - RNA, 19 nt, Artificial Sequence
  Description of Artificial Sequence: Synthetic oligonucleotide
cgaggucacagacuucuug

SEQ ID NO: 2057545 - RNA, 19 nt, Artificial Sequence
  Description of Artificial Sequence: Synthetic oligonucleotide
accucgcgggcuccggggu

SEQ ID NO: 2057546 - RNA, 19 nt, Artificial Sequence
  Description of Artificial Sequence: Synthetic oligonucleotide
gcuuugcgugauguagucc

SEQ ID NO: 2057547 - RNA, 19 nt, Artificial Sequence
  Description of Artificial Sequence: Synthetic oligonucleotide
ugcagaccucggcuuccau

SEQ ID NO: 2057548 - RNA, 19 nt, Artificial Sequence
  Description of Artificial Sequence: Synthetic oligonucleotide
cucggcggcugccuccuuc

SEQ ID NO: 2057549 - RNA, 19 nt, Artificial Sequence
  Description of Artificial Sequence: Synthetic oligonucleotide
cuuggccucggcggcugcc

SEQ ID NO: 2057550 - RNA, 19 nt, Artificial Sequence
  Description of Artificial Sequence: Synthetic oligonucleotide
gcugcgucuccaaggucgg

SEQ ID NO: 2057551 - RNA, 19 nt, Artificial Sequence
  Description of Artificial Sequence: Synthetic oligonucleotide
gcugaugacaacagagcua

SEQ ID NO: 2057552 - RNA, 19 nt, Artificial Sequence
  Description of Artificial Sequence: Synthetic oligonucleotide
acgaucaccugcgcccggu

SEQ ID NO: 2057553 - RNA, 19 nt, Artificial Sequence
  Description of Artificial Sequence: Synthetic oligonucleotide
cagcgugggaacggcugcc

SEQ ID NO: 2057554 - RNA, 19 nt, Artificial Sequence
  Description of Artificial Sequence: Synthetic oligonucleotide
ggcgggcugaugacaacag

SEQ ID NO: 2057555 - RNA, 19 nt, Artificial Sequence
  Description of Artificial Sequence: Synthetic oligonucleotide
ggaccucgcgggcuccggg

SEQ ID NO: 2057556 - RNA, 19 nt, Artificial Sequence
  Description of Artificial Sequence: Synthetic oligonucleotide
cucaggcgggcugaugaca

SEQ ID NO: 2057557 - RNA, 19 nt, Artificial Sequence
  Description of Artificial Sequence: Synthetic oligonucleotide
gccgcucacguggaccucg

SEQ ID NO: 2057558 - RNA, 19 nt, Artificial Sequence
  Description of Artificial Sequence: Synthetic oligonucleotide
uccaggcggcgggacacac

SEQ ID NO: 2057559 - RNA, 19 nt, Artificial Sequence
  Description of Artificial Sequence: Synthetic oligonucleotide
guaguccaggcggcgggac

SEQ ID NO: 2057560 - RNA, 19 nt, Artificial Sequence
  Description of Artificial Sequence: Synthetic oligonucleotide
cuggaggcuuugcgugaug

SEQ ID NO: 2057561 - RNA, 19 nt, Artificial Sequence
  Description of Artificial Sequence: Synthetic oligonucleotide
cgugcugcucacccgcacg

SEQ ID NO: 2057562 - RNA, 19 nt, Artificial Sequence
  Description of Artificial Sequence: Synthetic oligonucleotide
gcugccgacgggcugcguc

SEQ ID NO: 2057563 - RNA, 19 nt, Artificial Sequence
  Description of Artificial Sequence: Synthetic oligonucleotide
ccggggugggccuucgcag

SEQ ID NO: 2057564 - RNA, 19 nt, Artificial Sequence
  Description of Artificial Sequence: Synthetic oligonucleotide
gcccgguccgggcuggcgg

SEQ ID NO: 2057565 - RNA, 19 nt, Artificial Sequence
  Description of Artificial Sequence: Synthetic oligonucleotide
ccaacgaggucacagacuu

SEQ ID NO: 2057566 - RNA, 19 nt, Artificial Sequence
  Description of Artificial Sequence: Synthetic oligonucleotide
acccgcgacggaggggcgg

SEQ ID NO: 2057567 - RNA, 19 nt, Artificial Sequence
  Description of Artificial Sequence: Synthetic oligonucleotide
caagcuugccgccgaagau

SEQ ID NO: 2057568 - RNA, 19 nt, Artificial Sequence
  Description of Artificial Sequence: Synthetic oligonucleotide
cucuucgaauauccuuugu

SEQ ID NO: 2057569 - RNA, 19 nt, Artificial Sequence
  Description of Artificial Sequence: Synthetic oligonucleotide
cuccuucgugcugcucacc

SEQ ID NO: 2057570 - RNA, 19 nt, Artificial Sequence
  Description of Artificial Sequence: Synthetic oligonucleotide
augcagaccucggcuucca

SEQ ID NO: 2057571 - RNA, 19 nt, Artificial Sequence
  Description of Artificial Sequence: Synthetic oligonucleotide
gccuucgcagcgugggaac

SEQ ID NO: 2057572 - RNA, 19 nt, Artificial Sequence
  Description of Artificial Sequence: Synthetic oligonucleotide
cagcugcguugccauagca

SEQ ID NO: 2057573 - RNA, 19 nt, Artificial Sequence
  Description of Artificial Sequence: Synthetic oligonucleotide
acggaggggcggguugcag

SEQ ID NO: 2057574 - RNA, 19 nt, Artificial Sequence
  Description of Artificial Sequence: Synthetic oligonucleotide
ccuucgcagcgugggaacg

SEQ ID NO: 2057575 - RNA, 19 nt, Artificial Sequence
  Description of Artificial Sequence: Synthetic oligonucleotide
caugaacacccgcgacgga

SEQ ID NO: 2057576 - RNA, 19 nt, Artificial Sequence
  Description of Artificial Sequence: Synthetic oligonucleotide
ugcugcucacccgcacgau

SEQ ID NO: 2057577 - RNA, 19 nt, Artificial Sequence
  Description of Artificial Sequence: Synthetic oligonucleotide
ccuuccaauucuuuuguuu

SEQ ID NO: 2057578 - RNA, 19 nt, Artificial Sequence
  Description of Artificial Sequence: Synthetic oligonucleotide
ccgcacgaucaccugcgcc

SEQ ID NO: 2057579 - RNA, 19 nt, Artificial Sequence
  Description of Artificial Sequence: Synthetic oligonucleotide
cagcgacauagccggggca

SEQ ID NO: 2057580 - RNA, 19 nt, Artificial Sequence
  Description of Artificial Sequence: Synthetic oligonucleotide
cgugggaacggcugccgac

SEQ ID NO: 2057581 - RNA, 19 nt, Artificial Sequence
  Description of Artificial Sequence: Synthetic oligonucleotide
cgcagcgugggaacggcug

SEQ ID NO: 2057582 - RNA, 19 nt, Artificial Sequence
  Description of Artificial Sequence: Synthetic oligonucleotide
ggaggcuuugcgugaugua

SEQ ID NO: 2057583 - RNA, 19 nt, Artificial Sequence
  Description of Artificial Sequence: Synthetic oligonucleotide
gguccgggcuggcggacac

SEQ ID NO: 2057584 - RNA, 19 nt, Artificial Sequence
  Description of Artificial Sequence: Synthetic oligonucleotide
cacccgcgacggaggggcg

SEQ ID NO: 2057585 - RNA, 19 nt, Artificial Sequence
  Description of Artificial Sequence: Synthetic oligonucleotide
cggguugcagcgacauagc

SEQ ID NO: 2057586 - RNA, 19 nt, Artificial Sequence
  Description of Artificial Sequence: Synthetic oligonucleotide
cggcuuccaugugauaugc

SEQ ID NO: 2057587 - RNA, 19 nt, Artificial Sequence
  Description of Artificial Sequence: Synthetic oligonucleotide
gcccagguuagcccaggga

SEQ ID NO: 2057588 - RNA, 19 nt, Artificial Sequence
  Description of Artificial Sequence: Synthetic oligonucleotide
cugccgacgggcugcgucu

SEQ ID NO: 2057589 - RNA, 19 nt, Artificial Sequence
  Description of Artificial Sequence: Synthetic oligonucleotide
cugugggauuauguucaaa

SEQ ID NO: 2057590 - RNA, 19 nt, Artificial Sequence
  Description of Artificial Sequence: Synthetic oligonucleotide
gcgggcugaugacaacaga

SEQ ID NO: 2057591 - RNA, 19 nt, Artificial Sequence
  Description of Artificial Sequence: Synthetic oligonucleotide
ggccucggcggcugccucc

SEQ ID NO: 2057592 - RNA, 19 nt, Artificial Sequence
  Description of Artificial Sequence: Synthetic oligonucleotide
gcucacccgcacgaucacc

SEQ ID NO: 2057593 - RNA, 19 nt, Artificial Sequence
  Description of Artificial Sequence: Synthetic oligonucleotide
gcgacauagccggggcagc

SEQ ID NO: 2057594 - RNA, 19 nt, Artificial Sequence
  Description of Artificial Sequence: Synthetic oligonucleotide
cacagacuucuugagcuuu

SEQ ID NO: 2057595 - RNA, 19 nt, Artificial Sequence
  Description of Artificial Sequence: Synthetic oligonucleotide
gccgccgaagauuuucaau

SEQ ID NO: 2057596 - RNA, 19 nt, Artificial Sequence
  Description of Artificial Sequence: Synthetic oligonucleotide
ugccgacgggcugcgucuc

SEQ ID NO: 2057597 - RNA, 19 nt, Artificial Sequence
  Description of Artificial Sequence: Synthetic oligonucleotide
cgggaucggguuguuuucc

SEQ ID NO: 2057598 - RNA, 19 nt, Artificial Sequence
  Description of Artificial Sequence: Synthetic oligonucleotide
cggggugggccuucgcagc

SEQ ID NO: 2057599 - RNA, 19 nt, Artificial Sequence
  Description of Artificial Sequence: Synthetic oligonucleotide
ggccuucgcagcgugggaa

SEQ ID NO: 2057600 - RNA, 19 nt, Artificial Sequence
  Description of Artificial Sequence: Synthetic oligonucleotide
ccugggauucuggauaccu

SEQ ID NO: 2057601 - RNA, 19 nt, Artificial Sequence
  Description of Artificial Sequence: Synthetic oligonucleotide
gaacggcugccgacgggcu

SEQ ID NO: 2057602 - RNA, 19 nt, Artificial Sequence
  Description of Artificial Sequence: Synthetic oligonucleotide
acgaggucacagacuucuu

SEQ ID NO: 2057603 - RNA, 19 nt, Artificial Sequence
  Description of Artificial Sequence: Synthetic oligonucleotide
gaggggcggguugcagcga

SEQ ID NO: 2057604 - RNA, 19 nt, Artificial Sequence
  Description of Artificial Sequence: Synthetic oligonucleotide
gccaacgaggucacagacu

SEQ ID NO: 2057605 - RNA, 19 nt, Artificial Sequence
  Description of Artificial Sequence: Synthetic oligonucleotide
gcgugggaacggcugccga

SEQ ID NO: 2057606 - RNA, 19 nt, Artificial Sequence
  Description of Artificial Sequence: Synthetic oligonucleotide
ccgcucacguggaccucgc

SEQ ID NO: 2057607 - RNA, 19 nt, Artificial Sequence
  Description of Artificial Sequence: Synthetic oligonucleotide
cccgcacgaucaccugcgc

SEQ ID NO: 2057608 - RNA, 19 nt, Artificial Sequence
  Description of Artificial Sequence: Synthetic oligonucleotide
gccgacgggcugcgucucc

SEQ ID NO: 2057609 - RNA, 19 nt, Artificial Sequence
  Description of Artificial Sequence: Synthetic oligonucleotide
gggccuucgcagcguggga

SEQ ID NO: 2057610 - RNA, 19 nt, Artificial Sequence
  Description of Artificial Sequence: Synthetic oligonucleotide
ccaaggucgggaucggguu

SEQ ID NO: 2057611 - RNA, 19 nt, Artificial Sequence
  Description of Artificial Sequence: Synthetic oligonucleotide
cacguggaccucgcgggcu

SEQ ID NO: 2057612 - RNA, 19 nt, Artificial Sequence
  Description of Artificial Sequence: Synthetic oligonucleotide
cgcgccgcucacguggacc

SEQ ID NO: 2057613 - RNA, 19 nt, Artificial Sequence
  Description of Artificial Sequence: Synthetic oligonucleotide
gcgucuccaaggucgggau

SEQ ID NO: 2057614 - RNA, 19 nt, Artificial Sequence
  Description of Artificial Sequence: Synthetic oligonucleotide
guccaggcggcgggacaca

SEQ ID NO: 2057615 - RNA, 19 nt, Artificial Sequence
  Description of Artificial Sequence: Synthetic oligonucleotide
gcuccggggugggccuucg

SEQ ID NO: 2057616 - RNA, 19 nt, Artificial Sequence
  Description of Artificial Sequence: Synthetic oligonucleotide
caccucggccgcgccgcuc

SEQ ID NO: 2057617 - RNA, 19 nt, Artificial Sequence
  Description of Artificial Sequence: Synthetic oligonucleotide
aggucgggaucggguuguu

SEQ ID NO: 2057618 - RNA, 19 nt, Artificial Sequence
  Description of Artificial Sequence: Synthetic oligonucleotide
ggcggguugcagcgacaua

SEQ ID NO: 2057619 - RNA, 19 nt, Artificial Sequence
  Description of Artificial Sequence: Synthetic oligonucleotide
cgaucaccugcgcccgguc

SEQ ID NO: 2057620 - RNA, 19 nt, Artificial Sequence
  Description of Artificial Sequence: Synthetic oligonucleotide
gcggcgggacacacucuuc

SEQ ID NO: 2057621 - RNA, 19 nt, Artificial Sequence
  Description of Artificial Sequence: Synthetic oligonucleotide
cccgguccgggcuggcgga

SEQ ID NO: 2057622 - RNA, 19 nt, Artificial Sequence
  Description of Artificial Sequence: Synthetic oligonucleotide
gggcggguugcagcgacau

SEQ ID NO: 2057623 - RNA, 19 nt, Artificial Sequence
  Description of Artificial Sequence: Synthetic oligonucleotide
cguggaccucgcgggcucc

SEQ ID NO: 2057624 - RNA, 19 nt, Artificial Sequence
  Description of Artificial Sequence: Synthetic oligonucleotide
cgggcugcgucuccaaggu

SEQ ID NO: 2057625 - RNA, 19 nt, Artificial Sequence
  Description of Artificial Sequence: Synthetic oligonucleotide
ggcuccggggugggccuuc

SEQ ID NO: 2057626 - RNA, 19 nt, Artificial Sequence
  Description of Artificial Sequence: Synthetic oligonucleotide
gcuuugcgccaugcauucu

SEQ ID NO: 2057627 - RNA, 19 nt, Artificial Sequence
  Description of Artificial Sequence: Synthetic oligonucleotide
gccgcgccgcucacgugga

SEQ ID NO: 2057628 - RNA, 19 nt, Artificial Sequence
  Description of Artificial Sequence: Synthetic oligonucleotide
ccgggcuggcggacaccuc

SEQ ID NO: 2057629 - RNA, 19 nt, Artificial Sequence
  Description of Artificial Sequence: Synthetic oligonucleotide
ccucggcuuccaugugaua

SEQ ID NO: 2057630 - RNA, 19 nt, Artificial Sequence
  Description of Artificial Sequence: Synthetic oligonucleotide
gggugggccuucgcagcgu

SEQ ID NO: 2057631 - RNA, 19 nt, Artificial Sequence
  Description of Artificial Sequence: Synthetic oligonucleotide
ggucgggaucggguuguuu

SEQ ID NO: 2057632 - RNA, 19 nt, Artificial Sequence
  Description of Artificial Sequence: Synthetic oligonucleotide
ccaggcggcgggacacacu

SEQ ID NO: 2057633 - RNA, 19 nt, Artificial Sequence
  Description of Artificial Sequence: Synthetic oligonucleotide
ccgguccgggcuggcggac

SEQ ID NO: 2057634 - RNA, 19 nt, Artificial Sequence
  Description of Artificial Sequence: Synthetic oligonucleotide
cgcccgguccgggcuggcg

SEQ ID NO: 2057635 - RNA, 19 nt, Artificial Sequence
  Description of Artificial Sequence: Synthetic oligonucleotide
cgacauagccggggcagcu

SEQ ID NO: 2057636 - RNA, 19 nt, Artificial Sequence
  Description of Artificial Sequence: Synthetic oligonucleotide
ccgcgccgcucacguggac

SEQ ID NO: 2057637 - RNA, 19 nt, Artificial Sequence
  Description of Artificial Sequence: Synthetic oligonucleotide
cgacgggcugcgucuccaa

SEQ ID NO: 2057638 - RNA, 19 nt, Artificial Sequence
  Description of Artificial Sequence: Synthetic oligonucleotide
cggccgcgccgcucacgug

SEQ ID NO: 2057639 - RNA, 19 nt, Artificial Sequence
  Description of Artificial Sequence: Synthetic oligonucleotide
gcgcccgguccgggcuggc

SEQ ID NO: 2057640 - RNA, 19 nt, Artificial Sequence
  Description of Artificial Sequence: Synthetic oligonucleotide
gcuugccgccgaagauuuu

SEQ ID NO: 2057641 - RNA, 19 nt, Artificial Sequence
  Description of Artificial Sequence: Synthetic oligonucleotide
cgccgcucacguggaccuc

SEQ ID NO: 2057642 - RNA, 19 nt, Artificial Sequence
  Description of Artificial Sequence: Synthetic oligonucleotide
cgguccgggcuggcggaca

SEQ ID NO: 2057643 - RNA, 19 nt, Artificial Sequence
  Description of Artificial Sequence: Synthetic oligonucleotide
cgcgacggaggggcggguu

SEQ ID NO: 2057644 - RNA, 19 nt, Artificial Sequence
  Description of Artificial Sequence: Synthetic oligonucleotide
ccgcgacggaggggcgggu

SEQ ID NO: 2057645 - RNA, 19 nt, Artificial Sequence
  Description of Artificial Sequence: Synthetic oligonucleotide
aaacucacaguguagagcc

SEQ ID NO: 2057646 - RNA, 19 nt, Artificial Sequence
  Description of Artificial Sequence: Synthetic oligonucleotide
ugauacaugaaacugaccc

SEQ ID NO: 2057647 - RNA, 19 nt, Artificial Sequence
  Description of Artificial Sequence: Synthetic oligonucleotide
ucagaauucacgcagcugg

SEQ ID NO: 2057648 - RNA, 19 nt, Artificial Sequence
  Description of Artificial Sequence: Synthetic oligonucleotide
auuccuaacaucuuuuggg

SEQ ID NO: 2057649 - RNA, 19 nt, Artificial Sequence
  Description of Artificial Sequence: Synthetic oligonucleotide
ugagauuacuuuugcaugg

SEQ ID NO: 2057650 - RNA, 19 nt, Artificial Sequence
  Description of Artificial Sequence: Synthetic oligonucleotide
uguuucuauacacacagcu

SEQ ID NO: 2057651 - RNA, 19 nt, Artificial Sequence
  Description of Artificial Sequence: Synthetic oligonucleotide
uucaggaagaauaugugug

SEQ ID NO: 2057652 - RNA, 19 nt, Artificial Sequence
  Description of Artificial Sequence: Synthetic oligonucleotide
aggucuuugucacuaagcc

SEQ ID NO: 2057653 - RNA, 19 nt, Artificial Sequence
  Description of Artificial Sequence: Synthetic oligonucleotide
uccacuugaaacauuagga

SEQ ID NO: 2057654 - RNA, 19 nt, Artificial Sequence
  Description of Artificial Sequence: Synthetic oligonucleotide
uauuccuaacaucuuuugg

SEQ ID NO: 2057655 - RNA, 19 nt, Artificial Sequence
  Description of Artificial Sequence: Synthetic oligonucleotide
uuuucaguaaacacgugcu

SEQ ID NO: 2057656 - RNA, 19 nt, Artificial Sequence
  Description of Artificial Sequence: Synthetic oligonucleotide
aaacuaggaacauacccug

SEQ ID NO: 2057657 - RNA, 19 nt, Artificial Sequence
  Description of Artificial Sequence: Synthetic oligonucleotide
agaaugagcacaucggaag

SEQ ID NO: 2057658 - RNA, 19 nt, Artificial Sequence
  Description of Artificial Sequence: Synthetic oligonucleotide
uccagaaugagcacaucgg

SEQ ID NO: 2057659 - RNA, 19 nt, Artificial Sequence
  Description of Artificial Sequence: Synthetic oligonucleotide
auaaauuucuuguguugac

SEQ ID NO: 2057660 - RNA, 19 nt, Artificial Sequence
  Description of Artificial Sequence: Synthetic oligonucleotide
augaaacugaccccaaagg

SEQ ID NO: 2057661 - RNA, 19 nt, Artificial Sequence
  Description of Artificial Sequence: Synthetic oligonucleotide
uuuucaggaagaauaugug

SEQ ID NO: 2057662 - RNA, 19 nt, Artificial Sequence
  Description of Artificial Sequence: Synthetic oligonucleotide
uuccuaacaucuuuugggg

SEQ ID NO: 2057663 - RNA, 19 nt, Artificial Sequence
  Description of Artificial Sequence: Synthetic oligonucleotide
ugugauccaauaauuaaaa

SEQ ID NO: 2057664 - RNA, 19 nt, Artificial Sequence
  Description of Artificial Sequence: Synthetic oligonucleotide
uaggaacauacccuggagg

SEQ ID NO: 2057665 - RNA, 19 nt, Artificial Sequence
  Description of Artificial Sequence: Synthetic oligonucleotide
aauucacgcagcugguagg

SEQ ID NO: 2057666 - RNA, 19 nt, Artificial Sequence
  Description of Artificial Sequence: Synthetic oligonucleotide
aauaugugugauccaauaa

SEQ ID NO: 2057667 - RNA, 19 nt, Artificial Sequence
  Description of Artificial Sequence: Synthetic oligonucleotide
aaaagcugagauuacuuuu

SEQ ID NO: 2057668 - RNA, 19 nt, Artificial Sequence
  Description of Artificial Sequence: Synthetic oligonucleotide
auuagagguguguuauucg

SEQ ID NO: 2057669 - RNA, 19 nt, Artificial Sequence
  Description of Artificial Sequence: Synthetic oligonucleotide
ugcgacaucaucugcaucu

SEQ ID NO: 2057670 - RNA, 19 nt, Artificial Sequence
  Description of Artificial Sequence: Synthetic oligonucleotide
aaggucuuugucacuaagc

SEQ ID NO: 2057671 - RNA, 19 nt, Artificial Sequence
  Description of Artificial Sequence: Synthetic oligonucleotide
uacuuuugcauggucaggg

SEQ ID NO: 2057672 - RNA, 19 nt, Artificial Sequence
  Description of Artificial Sequence: Synthetic oligonucleotide
uggcaaacuaggaacauac

SEQ ID NO: 2057673 - RNA, 19 nt, Artificial Sequence
  Description of Artificial Sequence: Synthetic oligonucleotide
uuagagguguguuauucgc

SEQ ID NO: 2057674 - RNA, 19 nt, Artificial Sequence
  Description of Artificial Sequence: Synthetic oligonucleotide
aagccggcugcuuucuucc

SEQ ID NO: 2057675 - RNA, 19 nt, Artificial Sequence
  Description of Artificial Sequence: Synthetic oligonucleotide
aaacacgugcuuccgauga

SEQ ID NO: 2057676 - RNA, 19 nt, Artificial Sequence
  Description of Artificial Sequence: Synthetic oligonucleotide
ugucccuuuaucuugucca

SEQ ID NO: 2057677 - RNA, 19 nt, Artificial Sequence
  Description of Artificial Sequence: Synthetic oligonucleotide
ugugugauccaauaauuaa

SEQ ID NO: 2057678 - RNA, 19 nt, Artificial Sequence
  Description of Artificial Sequence: Synthetic oligonucleotide
gaauucacgcagcugguag

SEQ ID NO: 2057679 - RNA, 19 nt, Artificial Sequence
  Description of Artificial Sequence: Synthetic oligonucleotide
auaugugugauccaauaau

SEQ ID NO: 2057680 - RNA, 19 nt, Artificial Sequence
  Description of Artificial Sequence: Synthetic oligonucleotide
uuucaggaagaauaugugu

SEQ ID NO: 2057681 - RNA, 19 nt, Artificial Sequence
  Description of Artificial Sequence: Synthetic oligonucleotide
ggaagaauaugugugaucc

SEQ ID NO: 2057682 - RNA, 19 nt, Artificial Sequence
  Description of Artificial Sequence: Synthetic oligonucleotide
uuugucacuaagccggcug

SEQ ID NO: 2057683 - RNA, 19 nt, Artificial Sequence
  Description of Artificial Sequence: Synthetic oligonucleotide
ucugcagucucucaguguc

SEQ ID NO: 2057684 - RNA, 19 nt, Artificial Sequence
  Description of Artificial Sequence: Synthetic oligonucleotide
uuuucagaauucacgcagc

SEQ ID NO: 2057685 - RNA, 19 nt, Artificial Sequence
  Description of Artificial Sequence: Synthetic oligonucleotide
aaagcugagauuacuuuug

SEQ ID NO: 2057686 - RNA, 19 nt, Artificial Sequence
  Description of Artificial Sequence: Synthetic oligonucleotide
gaacauacccuggaggagg

SEQ ID NO: 2057687 - RNA, 19 nt, Artificial Sequence
  Description of Artificial Sequence: Synthetic oligonucleotide
auuugugccuucuacuucu

SEQ ID NO: 2057688 - RNA, 19 nt, Artificial Sequence
  Description of Artificial Sequence: Synthetic oligonucleotide
acucaggaugccuucugcc

SEQ ID NO: 2057689 - RNA, 19 nt, Artificial Sequence
  Description of Artificial Sequence: Synthetic oligonucleotide
guccagaaugagcacaucg

SEQ ID NO: 2057690 - RNA, 19 nt, Artificial Sequence
  Description of Artificial Sequence: Synthetic oligonucleotide
ucaggaagaauauguguga

SEQ ID NO: 2057691 - RNA, 19 nt, Artificial Sequence
  Description of Artificial Sequence: Synthetic oligonucleotide
ucagcuguuucuauacaca

SEQ ID NO: 2057692 - RNA, 19 nt, Artificial Sequence
  Description of Artificial Sequence: Synthetic oligonucleotide
aaacugaccccaaaggucu

SEQ ID NO: 2057693 - RNA, 19 nt, Artificial Sequence
  Description of Artificial Sequence: Synthetic oligonucleotide
uucaggcuggaucuuaaug

SEQ ID NO: 2057694 - RNA, 19 nt, Artificial Sequence
  Description of Artificial Sequence: Synthetic oligonucleotide
uuuauuccuaacaucuuuu

SEQ ID NO: 2057695 - RNA, 19 nt, Artificial Sequence
  Description of Artificial Sequence: Synthetic oligonucleotide
agaguuuucauguggucca

SEQ ID NO: 2057696 - RNA, 19 nt, Artificial Sequence
  Description of Artificial Sequence: Synthetic oligonucleotide
uuauuccuaacaucuuuug

SEQ ID NO: 2057697 - RNA, 19 nt, Artificial Sequence
  Description of Artificial Sequence: Synthetic oligonucleotide
cugagauuacuuuugcaug

SEQ ID NO: 2057698 - RNA, 19 nt, Artificial Sequence
  Description of Artificial Sequence: Synthetic oligonucleotide
uaugugugauccaauaauu

SEQ ID NO: 2057699 - RNA, 19 nt, Artificial Sequence
  Description of Artificial Sequence: Synthetic oligonucleotide
aggaacauacccuggagga

SEQ ID NO: 2057700 - RNA, 19 nt, Artificial Sequence
  Description of Artificial Sequence: Synthetic oligonucleotide
gaaugagcacaucggaagc

SEQ ID NO: 2057701 - RNA, 19 nt, Artificial Sequence
  Description of Artificial Sequence: Synthetic oligonucleotide
ugugucaccaccacuggaa

SEQ ID NO: 2057702 - RNA, 19 nt, Artificial Sequence
  Description of Artificial Sequence: Synthetic oligonucleotide
uucagcuguuucuauacac

SEQ ID NO: 2057703 - RNA, 19 nt, Artificial Sequence
  Description of Artificial Sequence: Synthetic oligonucleotide
ugguauuugugccuucuac

SEQ ID NO: 2057704 - RNA, 19 nt, Artificial Sequence
  Description of Artificial Sequence: Synthetic oligonucleotide
agagccgacguucaggcug

SEQ ID NO: 2057705 - RNA, 19 nt, Artificial Sequence
  Description of Artificial Sequence: Synthetic oligonucleotide
gauuacuuuugcaugguca

SEQ ID NO: 2057706 - RNA, 19 nt, Artificial Sequence
  Description of Artificial Sequence: Synthetic oligonucleotide
uggaucgaagccuucagaa

SEQ ID NO: 2057707 - RNA, 19 nt, Artificial Sequence
  Description of Artificial Sequence: Synthetic oligonucleotide
uaaauuucuuguguugacu

SEQ ID NO: 2057708 - RNA, 19 nt, Artificial Sequence
  Description of Artificial Sequence: Synthetic oligonucleotide
gaaacugaccccaaagguc

SEQ ID NO: 2057709 - RNA, 19 nt, Artificial Sequence
  Description of Artificial Sequence: Synthetic oligonucleotide
uuucagaauucacgcagcu

SEQ ID NO: 2057710 - RNA, 19 nt, Artificial Sequence
  Description of Artificial Sequence: Synthetic oligonucleotide
agacauacccgaccccagc

SEQ ID NO: 2057711 - RNA, 19 nt, Artificial Sequence
  Description of Artificial Sequence: Synthetic oligonucleotide
gauuagagguguguuauuc

SEQ ID NO: 2057712 - RNA, 19 nt, Artificial Sequence
  Description of Artificial Sequence: Synthetic oligonucleotide
uuaucuuguccacuugaaa

SEQ ID NO: 2057713 - RNA, 19 nt, Artificial Sequence
  Description of Artificial Sequence: Synthetic oligonucleotide
caugugguccagaaugagc

SEQ ID NO: 2057714 - RNA, 19 nt, Artificial Sequence
  Description of Artificial Sequence: Synthetic oligonucleotide
uuauucgcuguuuuguuuu

SEQ ID NO: 2057715 - RNA, 19 nt, Artificial Sequence
  Description of Artificial Sequence: Synthetic oligonucleotide
guagagccgacguucaggc

SEQ ID NO: 2057716 - RNA, 19 nt, Artificial Sequence
  Description of Artificial Sequence: Synthetic oligonucleotide
aacauacccuggaggaggc

SEQ ID NO: 2057717 - RNA, 19 nt, Artificial Sequence
  Description of Artificial Sequence: Synthetic oligonucleotide
uguguugacuugagaaaac

SEQ ID NO: 2057718 - RNA, 19 nt, Artificial Sequence
  Description of Artificial Sequence: Synthetic oligonucleotide
agauuacuuuugcaugguc

SEQ ID NO: 2057719 - RNA, 19 nt, Artificial Sequence
  Description of Artificial Sequence: Synthetic oligonucleotide
caaacucacaguguagagc

SEQ ID NO: 2057720 - RNA, 19 nt, Artificial Sequence
  Description of Artificial Sequence: Synthetic oligonucleotide
uugucacuaagccggcugc

SEQ ID NO: 2057721 - RNA, 19 nt, Artificial Sequence
  Description of Artificial Sequence: Synthetic oligonucleotide
gaucgaagccuucagaagu

SEQ ID NO: 2057722 - RNA, 19 nt, Artificial Sequence
  Description of Artificial Sequence: Synthetic oligonucleotide
uuguguugacuugagaaaa

SEQ ID NO: 2057723 - RNA, 19 nt, Artificial Sequence
  Description of Artificial Sequence: Synthetic oligonucleotide
aacaucuccagagcgcucu

SEQ ID NO: 2057724 - RNA, 19 nt, Artificial Sequence
  Description of Artificial Sequence: Synthetic oligonucleotide
gagcagacauacccgaccc

SEQ ID NO: 2057725 - RNA, 19 nt, Artificial Sequence
  Description of Artificial Sequence: Synthetic oligonucleotide
uccugcgacaucaucugca

SEQ ID NO: 2057726 - RNA, 19 nt, Artificial Sequence
  Description of Artificial Sequence: Synthetic oligonucleotide
acaucggaagcaggcaugc

SEQ ID NO: 2057727 - RNA, 19 nt, Artificial Sequence
  Description of Artificial Sequence: Synthetic oligonucleotide
aaugagcacaucggaagca

SEQ ID NO: 2057728 - RNA, 19 nt, Artificial Sequence
  Description of Artificial Sequence: Synthetic oligonucleotide
gaaaacucaggaugccuuc

SEQ ID NO: 2057729 - RNA, 19 nt, Artificial Sequence
  Description of Artificial Sequence: Synthetic oligonucleotide
cuauacacacagcuggauc

SEQ ID NO: 2057730 - RNA, 19 nt, Artificial Sequence
  Description of Artificial Sequence: Synthetic oligonucleotide
gacauacccgaccccagcc

SEQ ID NO: 2057731 - RNA, 19 nt, Artificial Sequence
  Description of Artificial Sequence: Synthetic oligonucleotide
caaacuaggaacauacccu

SEQ ID NO: 2057732 - RNA, 19 nt, Artificial Sequence
  Description of Artificial Sequence: Synthetic oligonucleotide
ucagaaguaucaucauaaa

SEQ ID NO: 2057733 - RNA, 19 nt, Artificial Sequence
  Description of Artificial Sequence: Synthetic oligonucleotide
ggggucacauucuugggcg

SEQ ID NO: 2057734 - RNA, 19 nt, Artificial Sequence
  Description of Artificial Sequence: Synthetic oligonucleotide
cuaggaacauacccuggag

SEQ ID NO: 2057735 - RNA, 19 nt, Artificial Sequence
  Description of Artificial Sequence: Synthetic oligonucleotide
ucuaguucugcuugcuuua

SEQ ID NO: 2057736 - RNA, 19 nt, Artificial Sequence
  Description of Artificial Sequence: Synthetic oligonucleotide
ugugcucuacugccucugg

SEQ ID NO: 2057737 - RNA, 19 nt, Artificial Sequence
  Description of Artificial Sequence: Synthetic oligonucleotide
aacacgugcuuccgaugag

SEQ ID NO: 2057738 - RNA, 19 nt, Artificial Sequence
  Description of Artificial Sequence: Synthetic oligonucleotide
guucugcuugcuuuauucc

SEQ ID NO: 2057739 - RNA, 19 nt, Artificial Sequence
  Description of Artificial Sequence: Synthetic oligonucleotide
acauacccgaccccagccg

SEQ ID NO: 2057740 - RNA, 19 nt, Artificial Sequence
  Description of Artificial Sequence: Synthetic oligonucleotide
uuccgaugagcagacauac

SEQ ID NO: 2057741 - RNA, 19 nt, Artificial Sequence
  Description of Artificial Sequence: Synthetic oligonucleotide
uaaacacgugcuuccgaug

SEQ ID NO: 2057742 - RNA, 19 nt, Artificial Sequence
  Description of Artificial Sequence: Synthetic oligonucleotide
uguccacuugaaacauuag

SEQ ID NO: 2057743 - RNA, 19 nt, Artificial Sequence
  Description of Artificial Sequence: Synthetic oligonucleotide
uggucaugaagaucuggcu

SEQ ID NO: 2057744 - RNA, 19 nt, Artificial Sequence
  Description of Artificial Sequence: Synthetic oligonucleotide
uccaaagcaggagucugag

SEQ ID NO: 2057745 - RNA, 19 nt, Artificial Sequence
  Description of Artificial Sequence: Synthetic oligonucleotide
agcagacauacccgacccc

SEQ ID NO: 2057746 - RNA, 19 nt, Artificial Sequence
  Description of Artificial Sequence: Synthetic oligonucleotide
ccgaugagcagacauaccc

SEQ ID NO: 2057747 - RNA, 19 nt, Artificial Sequence
  Description of Artificial Sequence: Synthetic oligonucleotide
agaucuggcucuucugugu

SEQ ID NO: 2057748 - RNA, 19 nt, Artificial Sequence
  Description of Artificial Sequence: Synthetic oligonucleotide
uguuauucgcuguuuuguu

SEQ ID NO: 2057749 - RNA, 19 nt, Artificial Sequence
  Description of Artificial Sequence: Synthetic oligonucleotide
ugggcggugucuccaaagc

SEQ ID NO: 2057750 - RNA, 19 nt, Artificial Sequence
  Description of Artificial Sequence: Synthetic oligonucleotide
ugcgccgagacucgaggag

SEQ ID NO: 2057751 - RNA, 19 nt, Artificial Sequence
  Description of Artificial Sequence: Synthetic oligonucleotide
aguaaacacgugcuuccga

SEQ ID NO: 2057752 - RNA, 19 nt, Artificial Sequence
  Description of Artificial Sequence: Synthetic oligonucleotide
ucuuugucacuaagccggc

SEQ ID NO: 2057753 - RNA, 19 nt, Artificial Sequence
  Description of Artificial Sequence: Synthetic oligonucleotide
guuggucaugaagaucugg

SEQ ID NO: 2057754 - RNA, 19 nt, Artificial Sequence
  Description of Artificial Sequence: Synthetic oligonucleotide
acacgugcuuccgaugagc

SEQ ID NO: 2057755 - RNA, 19 nt, Artificial Sequence
  Description of Artificial Sequence: Synthetic oligonucleotide
aggcugauacaugaaacug

SEQ ID NO: 2057756 - RNA, 19 nt, Artificial Sequence
  Description of Artificial Sequence: Synthetic oligonucleotide
uccuaacaucuuuuggggu

SEQ ID NO: 2057757 - RNA, 19 nt, Artificial Sequence
  Description of Artificial Sequence: Synthetic oligonucleotide
uuggcaaguucaaugucuu

SEQ ID NO: 2057758 - RNA, 19 nt, Artificial Sequence
  Description of Artificial Sequence: Synthetic oligonucleotide
cauacccgaccccagccgg

SEQ ID NO: 2057759 - RNA, 19 nt, Artificial Sequence
  Description of Artificial Sequence: Synthetic oligonucleotide
ugucaccaccacuggaagc

SEQ ID NO: 2057760 - RNA, 19 nt, Artificial Sequence
  Description of Artificial Sequence: Synthetic oligonucleotide
caugcgccgagacucgagg

SEQ ID NO: 2057761 - RNA, 19 nt, Artificial Sequence
  Description of Artificial Sequence: Synthetic oligonucleotide
cucucaggcugauacauga

SEQ ID NO: 2057762 - RNA, 19 nt, Artificial Sequence
  Description of Artificial Sequence: Synthetic oligonucleotide
uggaucuuaaugucaccau

SEQ ID NO: 2057763 - RNA, 19 nt, Artificial Sequence
  Description of Artificial Sequence: Synthetic oligonucleotide
cuugugaccaugggugugc

SEQ ID NO: 2057764 - RNA, 19 nt, Artificial Sequence
  Description of Artificial Sequence: Synthetic oligonucleotide
uucagaauucacgcagcug

SEQ ID NO: 2057765 - RNA, 19 nt, Artificial Sequence
  Description of Artificial Sequence: Synthetic oligonucleotide
cugauacaugaaacugacc

SEQ ID NO: 2057766 - RNA, 19 nt, Artificial Sequence
  Description of Artificial Sequence: Synthetic oligonucleotide
gaagcaggcaugcgccgag

SEQ ID NO: 2057767 - RNA, 19 nt, Artificial Sequence
  Description of Artificial Sequence: Synthetic oligonucleotide
ucacgcagcugguagguuc

SEQ ID NO: 2057768 - RNA, 19 nt, Artificial Sequence
  Description of Artificial Sequence: Synthetic oligonucleotide
uugggcggugucuccaaag

SEQ ID NO: 2057769 - RNA, 19 nt, Artificial Sequence
  Description of Artificial Sequence: Synthetic oligonucleotide
cuugcuuuauuccuaacau

SEQ ID NO: 2057770 - RNA, 19 nt, Artificial Sequence
  Description of Artificial Sequence: Synthetic oligonucleotide
gacggagcccuccugguca

SEQ ID NO: 2057771 - RNA, 19 nt, Artificial Sequence
  Description of Artificial Sequence: Synthetic oligonucleotide
agcugguagguucuggcaa

SEQ ID NO: 2057772 - RNA, 19 nt, Artificial Sequence
  Description of Artificial Sequence: Synthetic oligonucleotide
agcaggcaugcgccgagac

SEQ ID NO: 2057773 - RNA, 19 nt, Artificial Sequence
  Description of Artificial Sequence: Synthetic oligonucleotide
ucugugacggagcccuccu

SEQ ID NO: 2057774 - RNA, 19 nt, Artificial Sequence
  Description of Artificial Sequence: Synthetic oligonucleotide
ggaucgaagccuucagaag

SEQ ID NO: 2057775 - RNA, 19 nt, Artificial Sequence
  Description of Artificial Sequence: Synthetic oligonucleotide
uaagccggcugcuuucuuc

SEQ ID NO: 2057776 - RNA, 19 nt, Artificial Sequence
  Description of Artificial Sequence: Synthetic oligonucleotide
caggcaugcgccgagacuc

SEQ ID NO: 2057777 - RNA, 19 nt, Artificial Sequence
  Description of Artificial Sequence: Synthetic oligonucleotide
uccgaugagcagacauacc

SEQ ID NO: 2057778 - RNA, 19 nt, Artificial Sequence
  Description of Artificial Sequence: Synthetic oligonucleotide
ucgaggaggugaagcagcu

SEQ ID NO: 2057779 - RNA, 19 nt, Artificial Sequence
  Description of Artificial Sequence: Synthetic oligonucleotide
gaccccaaaggucuuuguc

SEQ ID NO: 2057780 - RNA, 19 nt, Artificial Sequence
  Description of Artificial Sequence: Synthetic oligonucleotide
ucuucggccucuccuccug

SEQ ID NO: 2057781 - RNA, 19 nt, Artificial Sequence
  Description of Artificial Sequence: Synthetic oligonucleotide
cuguuucuauacacacagc

SEQ ID NO: 2057782 - RNA, 19 nt, Artificial Sequence
  Description of Artificial Sequence: Synthetic oligonucleotide
ucuauacacacagcuggau

SEQ ID NO: 2057783 - RNA, 19 nt, Artificial Sequence
  Description of Artificial Sequence: Synthetic oligonucleotide
gugugauccaauaauuaaa

SEQ ID NO: 2057784 - RNA, 19 nt, Artificial Sequence
  Description of Artificial Sequence: Synthetic oligonucleotide
gaucuggcucuucuguguc

SEQ ID NO: 2057785 - RNA, 19 nt, Artificial Sequence
  Description of Artificial Sequence: Synthetic oligonucleotide
ugcucucaggcugauacau

SEQ ID NO: 2057786 - RNA, 19 nt, Artificial Sequence
  Description of Artificial Sequence: Synthetic oligonucleotide
ucacuaagccggcugcuuu

SEQ ID NO: 2057787 - RNA, 19 nt, Artificial Sequence
  Description of Artificial Sequence: Synthetic oligonucleotide
gcugauacaugaaacugac

SEQ ID NO: 2057788 - RNA, 19 nt, Artificial Sequence
  Description of Artificial Sequence: Synthetic oligonucleotide
gugucccuuuaucuugucc

SEQ ID NO: 2057789 - RNA, 19 nt, Artificial Sequence
  Description of Artificial Sequence: Synthetic oligonucleotide
cagaaugagcacaucggaa

SEQ ID NO: 2057790 - RNA, 19 nt, Artificial Sequence
  Description of Artificial Sequence: Synthetic oligonucleotide
gguucuggcaaacuaggaa

SEQ ID NO: 2057791 - RNA, 19 nt, Artificial Sequence
  Description of Artificial Sequence: Synthetic oligonucleotide
uccagagcgcucugcaguc

SEQ ID NO: 2057792 - RNA, 19 nt, Artificial Sequence
  Description of Artificial Sequence: Synthetic oligonucleotide
caucuucggccucuccucc

SEQ ID NO: 2057793 - RNA, 19 nt, Artificial Sequence
  Description of Artificial Sequence: Synthetic oligonucleotide
agcuugugaccaugggugu

SEQ ID NO: 2057794 - RNA, 19 nt, Artificial Sequence
  Description of Artificial Sequence: Synthetic oligonucleotide
augagcagacauacccgac

SEQ ID NO: 2057795 - RNA, 19 nt, Artificial Sequence
  Description of Artificial Sequence: Synthetic oligonucleotide
caccacuggaagcauuuuc

SEQ ID NO: 2057796 - RNA, 19 nt, Artificial Sequence
  Description of Artificial Sequence: Synthetic oligonucleotide
uugguauuugugccuucua

SEQ ID NO: 2057797 - RNA, 19 nt, Artificial Sequence
  Description of Artificial Sequence: Synthetic oligonucleotide
gcugagauuacuuuugcau

SEQ ID NO: 2057798 - RNA, 19 nt, Artificial Sequence
  Description of Artificial Sequence: Synthetic oligonucleotide
cuucagaaguaucaucaua

SEQ ID NO: 2057799 - RNA, 19 nt, Artificial Sequence
  Description of Artificial Sequence: Synthetic oligonucleotide
uugcuguuggcaaguucaa

SEQ ID NO: 2057800 - RNA, 19 nt, Artificial Sequence
  Description of Artificial Sequence: Synthetic oligonucleotide
guaaacacgugcuuccgau

SEQ ID NO: 2057801 - RNA, 19 nt, Artificial Sequence
  Description of Artificial Sequence: Synthetic oligonucleotide
cagacauacccgaccccag

SEQ ID NO: 2057802 - RNA, 19 nt, Artificial Sequence
  Description of Artificial Sequence: Synthetic oligonucleotide
gguauuugugccuucuacu

SEQ ID NO: 2057803 - RNA, 19 nt, Artificial Sequence
  Description of Artificial Sequence: Synthetic oligonucleotide
auucacgcagcugguaggu

SEQ ID NO: 2057804 - RNA, 19 nt, Artificial Sequence
  Description of Artificial Sequence: Synthetic oligonucleotide
uugguuggucaugaagauc

SEQ ID NO: 2057805 - RNA, 19 nt, Artificial Sequence
  Description of Artificial Sequence: Synthetic oligonucleotide
gaguuuucaugugguccag

SEQ ID NO: 2057806 - RNA, 19 nt, Artificial Sequence
  Description of Artificial Sequence: Synthetic oligonucleotide
cacuggaagcauuuucaga

SEQ ID NO: 2057807 - RNA, 19 nt, Artificial Sequence
  Description of Artificial Sequence: Synthetic oligonucleotide
acgugcuuccgaugagcag

SEQ ID NO: 2057808 - RNA, 19 nt, Artificial Sequence
  Description of Artificial Sequence: Synthetic oligonucleotide
cucacaguguagagccgac

SEQ ID NO: 2057809 - RNA, 19 nt, Artificial Sequence
  Description of Artificial Sequence: Synthetic oligonucleotide
ucuggcaaacuaggaacau

SEQ ID NO: 2057810 - RNA, 19 nt, Artificial Sequence
  Description of Artificial Sequence: Synthetic oligonucleotide
ggcggugucuccaaagcag

SEQ ID NO: 2057811 - RNA, 19 nt, Artificial Sequence
  Description of Artificial Sequence: Synthetic oligonucleotide
agaauaugugugauccaau

SEQ ID NO: 2057812 - RNA, 19 nt, Artificial Sequence
  Description of Artificial Sequence: Synthetic oligonucleotide
cacuaagccggcugcuuuc

SEQ ID NO: 2057813 - RNA, 19 nt, Artificial Sequence
  Description of Artificial Sequence: Synthetic oligonucleotide
augugugauccaauaauua

SEQ ID NO: 2057814 - RNA, 19 nt, Artificial Sequence
  Description of Artificial Sequence: Synthetic oligonucleotide
cucuacugccucugggguc

SEQ ID NO: 2057815 - RNA, 19 nt, Artificial Sequence
  Description of Artificial Sequence: Synthetic oligonucleotide
acaguguagagccgacguu

SEQ ID NO: 2057816 - RNA, 19 nt, Artificial Sequence
  Description of Artificial Sequence: Synthetic oligonucleotide
gugaccaugggugugcucu

SEQ ID NO: 2057817 - RNA, 19 nt, Artificial Sequence
  Description of Artificial Sequence: Synthetic oligonucleotide
agguguguuauucgcuguu

SEQ ID NO: 2057818 - RNA, 19 nt, Artificial Sequence
  Description of Artificial Sequence: Synthetic oligonucleotide
aguguagagccgacguuca

SEQ ID NO: 2057819 - RNA, 19 nt, Artificial Sequence
  Description of Artificial Sequence: Synthetic oligonucleotide
auacacacagcuggaucga

SEQ ID NO: 2057820 - RNA, 19 nt, Artificial Sequence
  Description of Artificial Sequence: Synthetic oligonucleotide
ucucaguguccugcagaag

SEQ ID NO: 2057821 - RNA, 19 nt, Artificial Sequence
  Description of Artificial Sequence: Synthetic oligonucleotide
guguuauucgcuguuuugu

SEQ ID NO: 2057822 - RNA, 19 nt, Artificial Sequence
  Description of Artificial Sequence: Synthetic oligonucleotide
ugacggagcccuccugguc

SEQ ID NO: 2057823 - RNA, 19 nt, Artificial Sequence
  Description of Artificial Sequence: Synthetic oligonucleotide
caggcugauacaugaaacu

SEQ ID NO: 2057824 - RNA, 19 nt, Artificial Sequence
  Description of Artificial Sequence: Synthetic oligonucleotide
cuuugguauuugugccuuc

SEQ ID NO: 2057825 - RNA, 19 nt, Artificial Sequence
  Description of Artificial Sequence: Synthetic oligonucleotide
gcuggaucgaagccuucag

SEQ ID NO: 2057826 - RNA, 19 nt, Artificial Sequence
  Description of Artificial Sequence: Synthetic oligonucleotide
cuuccgaugagcagacaua

SEQ ID NO: 2057827 - RNA, 19 nt, Artificial Sequence
  Description of Artificial Sequence: Synthetic oligonucleotide
cugaggugucccuuuaucu

SEQ ID NO: 2057828 - RNA, 19 nt, Artificial Sequence
  Description of Artificial Sequence: Synthetic oligonucleotide
uaguucugcuugcuuuauu

SEQ ID NO: 2057829 - RNA, 19 nt, Artificial Sequence
  Description of Artificial Sequence: Synthetic oligonucleotide
uggcaaguucaaugucuuc

SEQ ID NO: 2057830 - RNA, 19 nt, Artificial Sequence
  Description of Artificial Sequence: Synthetic oligonucleotide
ggcuggaucuuaaugucac

SEQ ID NO: 2057831 - RNA, 19 nt, Artificial Sequence
  Description of Artificial Sequence: Synthetic oligonucleotide
cacgugcuuccgaugagca

SEQ ID NO: 2057832 - RNA, 19 nt, Artificial Sequence
  Description of Artificial Sequence: Synthetic oligonucleotide
guuauucgcuguuuuguuu

SEQ ID NO: 2057833 - RNA, 19 nt, Artificial Sequence
  Description of Artificial Sequence: Synthetic oligonucleotide
acagugcucugggaacauc

SEQ ID NO: 2057834 - RNA, 19 nt, Artificial Sequence
  Description of Artificial Sequence: Synthetic oligonucleotide
guguagagccgacguucag

SEQ ID NO: 2057835 - RNA, 19 nt, Artificial Sequence
  Description of Artificial Sequence: Synthetic oligonucleotide
cuggaucgaagccuucaga

SEQ ID NO: 2057836 - RNA, 19 nt, Artificial Sequence
  Description of Artificial Sequence: Synthetic oligonucleotide
ucggccucuccuccugcga

SEQ ID NO: 2057837 - RNA, 19 nt, Artificial Sequence
  Description of Artificial Sequence: Synthetic oligonucleotide
cacaguguagagccgacgu

SEQ ID NO: 2057838 - RNA, 19 nt, Artificial Sequence
  Description of Artificial Sequence: Synthetic oligonucleotide
acuaagccggcugcuuucu

SEQ ID NO: 2057839 - RNA, 19 nt, Artificial Sequence
  Description of Artificial Sequence: Synthetic oligonucleotide
ucuugggcggugucuccaa

SEQ ID NO: 2057840 - RNA, 19 nt, Artificial Sequence
  Description of Artificial Sequence: Synthetic oligonucleotide
cuccugcgacaucaucugc

SEQ ID NO: 2057841 - RNA, 19 nt, Artificial Sequence
  Description of Artificial Sequence: Synthetic oligonucleotide
ccgacguucaggcuggauc

SEQ ID NO: 2057842 - RNA, 19 nt, Artificial Sequence
  Description of Artificial Sequence: Synthetic oligonucleotide
augcgccgagacucgagga

SEQ ID NO: 2057843 - RNA, 19 nt, Artificial Sequence
  Description of Artificial Sequence: Synthetic oligonucleotide
ugccucacugcugcucuca

SEQ ID NO: 2057844 - RNA, 19 nt, Artificial Sequence
  Description of Artificial Sequence: Synthetic oligonucleotide
gggucacauucuugggcgg

SEQ ID NO: 2057845 - RNA, 19 nt, Artificial Sequence
  Description of Artificial Sequence: Synthetic oligonucleotide
ucgaagccuucagaaguau

SEQ ID NO: 2057846 - RNA, 19 nt, Artificial Sequence
  Description of Artificial Sequence: Synthetic oligonucleotide
gaccccagccgggauccgg

SEQ ID NO: 2057847 - RNA, 19 nt, Artificial Sequence
  Description of Artificial Sequence: Synthetic oligonucleotide
gcuggaucuuaaugucacc

SEQ ID NO: 2057848 - RNA, 19 nt, Artificial Sequence
  Description of Artificial Sequence: Synthetic oligonucleotide
gcggugucuccaaagcagg

SEQ ID NO: 2057849 - RNA, 19 nt, Artificial Sequence
  Description of Artificial Sequence: Synthetic oligonucleotide
guguugacuugagaaaacu

SEQ ID NO: 2057850 - RNA, 19 nt, Artificial Sequence
  Description of Artificial Sequence: Synthetic oligonucleotide
agaauucacgcagcuggua

SEQ ID NO: 2057851 - RNA, 19 nt, Artificial Sequence
  Description of Artificial Sequence: Synthetic oligonucleotide
gagauuacuuuugcauggu

SEQ ID NO: 2057852 - RNA, 19 nt, Artificial Sequence
  Description of Artificial Sequence: Synthetic oligonucleotide
agucugaggugucccuuua

SEQ ID NO: 2057853 - RNA, 19 nt, Artificial Sequence
  Description of Artificial Sequence: Synthetic oligonucleotide
ccagaaugagcacaucgga

SEQ ID NO: 2057854 - RNA, 19 nt, Artificial Sequence
  Description of Artificial Sequence: Synthetic oligonucleotide
gagguguguuauucgcugu

SEQ ID NO: 2057855 - RNA, 19 nt, Artificial Sequence
  Description of Artificial Sequence: Synthetic oligonucleotide
cauacccuggaggaggcaa

SEQ ID NO: 2057856 - RNA, 19 nt, Artificial Sequence
  Description of Artificial Sequence: Synthetic oligonucleotide
cagagcgcucugcagucuc

SEQ ID NO: 2057857 - RNA, 19 nt, Artificial Sequence
  Description of Artificial Sequence: Synthetic oligonucleotide
caucggaagcaggcaugcg

SEQ ID NO: 2057858 - RNA, 19 nt, Artificial Sequence
  Description of Artificial Sequence: Synthetic oligonucleotide
uagagccgacguucaggcu

SEQ ID NO: 2057859 - RNA, 19 nt, Artificial Sequence
  Description of Artificial Sequence: Synthetic oligonucleotide
aucgaagccuucagaagua

SEQ ID NO: 2057860 - RNA, 19 nt, Artificial Sequence
  Description of Artificial Sequence: Synthetic oligonucleotide
agguucuggcaaacuagga

SEQ ID NO: 2057861 - RNA, 19 nt, Artificial Sequence
  Description of Artificial Sequence: Synthetic oligonucleotide
accaccacuggaagcauuu

SEQ ID NO: 2057862 - RNA, 19 nt, Artificial Sequence
  Description of Artificial Sequence: Synthetic oligonucleotide
gcaaguucaaugucuuccu

SEQ ID NO: 2057863 - RNA, 19 nt, Artificial Sequence
  Description of Artificial Sequence: Synthetic oligonucleotide
ccggcugcuuucuuccucc

SEQ ID NO: 2057864 - RNA, 19 nt, Artificial Sequence
  Description of Artificial Sequence: Synthetic oligonucleotide
auacccgaccccagccggg

SEQ ID NO: 2057865 - RNA, 19 nt, Artificial Sequence
  Description of Artificial Sequence: Synthetic oligonucleotide
gugugcucuacugccucug

SEQ ID NO: 2057866 - RNA, 19 nt, Artificial Sequence
  Description of Artificial Sequence: Synthetic oligonucleotide
ugugaccaugggugugcuc

SEQ ID NO: 2057867 - RNA, 19 nt, Artificial Sequence
  Description of Artificial Sequence: Synthetic oligonucleotide
cccuggaggaggcaaacuc

SEQ ID NO: 2057868 - RNA, 19 nt, Artificial Sequence
  Description of Artificial Sequence: Synthetic oligonucleotide
ugaccaugggugugcucua

SEQ ID NO: 2057869 - RNA, 19 nt, Artificial Sequence
  Description of Artificial Sequence: Synthetic oligonucleotide
uugugaccaugggugugcu

SEQ ID NO: 2057870 - RNA, 19 nt, Artificial Sequence
  Description of Artificial Sequence: Synthetic oligonucleotide
cugugucaccaccacugga

SEQ ID NO: 2057871 - RNA, 19 nt, Artificial Sequence
  Description of Artificial Sequence: Synthetic oligonucleotide
ccuggaggaggcaaacuca

SEQ ID NO: 2057872 - RNA, 19 nt, Artificial Sequence
  Description of Artificial Sequence: Synthetic oligonucleotide
ggcauugcacagugcucug

SEQ ID NO: 2057873 - RNA, 19 nt, Artificial Sequence
  Description of Artificial Sequence: Synthetic oligonucleotide
ggaacaucuccagagcgcu

SEQ ID NO: 2057874 - RNA, 19 nt, Artificial Sequence
  Description of Artificial Sequence: Synthetic oligonucleotide
gaccaugggugugcucuac

SEQ ID NO: 2057875 - RNA, 19 nt, Artificial Sequence
  Description of Artificial Sequence: Synthetic oligonucleotide
aagcaggcaugcgccgaga

SEQ ID NO: 2057876 - RNA, 19 nt, Artificial Sequence
  Description of Artificial Sequence: Synthetic oligonucleotide
gaacaucuccagagcgcuc

SEQ ID NO: 2057877 - RNA, 19 nt, Artificial Sequence
  Description of Artificial Sequence: Synthetic oligonucleotide
gugcuuccgaugagcagac

SEQ ID NO: 2057878 - RNA, 19 nt, Artificial Sequence
  Description of Artificial Sequence: Synthetic oligonucleotide
aggcaugcgccgagacucg

SEQ ID NO: 2057879 - RNA, 19 nt, Artificial Sequence
  Description of Artificial Sequence: Synthetic oligonucleotide
cugcgacaucaucugcauc

SEQ ID NO: 2057880 - RNA, 19 nt, Artificial Sequence
  Description of Artificial Sequence: Synthetic oligonucleotide
gggauuagagguguguuau

SEQ ID NO: 2057881 - RNA, 19 nt, Artificial Sequence
  Description of Artificial Sequence: Synthetic oligonucleotide
uacccgaccccagccggga

SEQ ID NO: 2057882 - RNA, 19 nt, Artificial Sequence
  Description of Artificial Sequence: Synthetic oligonucleotide
gcugguagguucuggcaaa

SEQ ID NO: 2057883 - RNA, 19 nt, Artificial Sequence
  Description of Artificial Sequence: Synthetic oligonucleotide
gcgccgagacucgaggagg

SEQ ID NO: 2057884 - RNA, 19 nt, Artificial Sequence
  Description of Artificial Sequence: Synthetic oligonucleotide
guguguuauucgcuguuuu

SEQ ID NO: 2057885 - RNA, 19 nt, Artificial Sequence
  Description of Artificial Sequence: Synthetic oligonucleotide
cagaauucacgcagcuggu

SEQ ID NO: 2057886 - RNA, 19 nt, Artificial Sequence
  Description of Artificial Sequence: Synthetic oligonucleotide
uaacaucuuuugggguuuu

SEQ ID NO: 2057887 - RNA, 19 nt, Artificial Sequence
  Description of Artificial Sequence: Synthetic oligonucleotide
gcuugugaccaugggugug

SEQ ID NO: 2057888 - RNA, 19 nt, Artificial Sequence
  Description of Artificial Sequence: Synthetic oligonucleotide
cuggcaaacuaggaacaua

SEQ ID NO: 2057889 - RNA, 19 nt, Artificial Sequence
  Description of Artificial Sequence: Synthetic oligonucleotide
auacccuggaggaggcaaa

SEQ ID NO: 2057890 - RNA, 19 nt, Artificial Sequence
  Description of Artificial Sequence: Synthetic oligonucleotide
gcccuccuggucaucuucg

SEQ ID NO: 2057891 - RNA, 19 nt, Artificial Sequence
  Description of Artificial Sequence: Synthetic oligonucleotide
cuggaagcauuuucagaau

SEQ ID NO: 2057892 - RNA, 19 nt, Artificial Sequence
  Description of Artificial Sequence: Synthetic oligonucleotide
gucuccaaagcaggagucu

SEQ ID NO: 2057893 - RNA, 19 nt, Artificial Sequence
  Description of Artificial Sequence: Synthetic oligonucleotide
ccuaacaucuuuugggguu

SEQ ID NO: 2057894 - RNA, 19 nt, Artificial Sequence
  Description of Artificial Sequence: Synthetic oligonucleotide
cacgcagcugguagguucu

SEQ ID NO: 2057895 - RNA, 19 nt, Artificial Sequence
  Description of Artificial Sequence: Synthetic oligonucleotide
gggcggugucuccaaagca

SEQ ID NO: 2057896 - RNA, 19 nt, Artificial Sequence
  Description of Artificial Sequence: Synthetic oligonucleotide
aacugaccccaaaggucuu

SEQ ID NO: 2057897 - RNA, 19 nt, Artificial Sequence
  Description of Artificial Sequence: Synthetic oligonucleotide
acguucaggcuggaucuua

SEQ ID NO: 2057898 - RNA, 19 nt, Artificial Sequence
  Description of Artificial Sequence: Synthetic oligonucleotide
cuaacaucuuuugggguuu

SEQ ID NO: 2057899 - RNA, 19 nt, Artificial Sequence
  Description of Artificial Sequence: Synthetic oligonucleotide
agccggcugcuuucuuccu

SEQ ID NO: 2057900 - RNA, 19 nt, Artificial Sequence
  Description of Artificial Sequence: Synthetic oligonucleotide
acggagcccuccuggucau

SEQ ID NO: 2057901 - RNA, 19 nt, Artificial Sequence
  Description of Artificial Sequence: Synthetic oligonucleotide
caucugugacggagcccuc

SEQ ID NO: 2057902 - RNA, 19 nt, Artificial Sequence
  Description of Artificial Sequence: Synthetic oligonucleotide
gcgacaucaucugcaucug

SEQ ID NO: 2057903 - RNA, 19 nt, Artificial Sequence
  Description of Artificial Sequence: Synthetic oligonucleotide
uucacgcagcugguagguu

SEQ ID NO: 2057904 - RNA, 19 nt, Artificial Sequence
  Description of Artificial Sequence: Synthetic oligonucleotide
acauacccuggaggaggca

SEQ ID NO: 2057905 - RNA, 19 nt, Artificial Sequence
  Description of Artificial Sequence: Synthetic oligonucleotide
gugacggagcccuccuggu

SEQ ID NO: 2057906 - RNA, 19 nt, Artificial Sequence
  Description of Artificial Sequence: Synthetic oligonucleotide
ugcuuccgaugagcagaca

SEQ ID NO: 2057907 - RNA, 19 nt, Artificial Sequence
  Description of Artificial Sequence: Synthetic oligonucleotide
ugucaccaucugccagcuu

SEQ ID NO: 2057908 - RNA, 19 nt, Artificial Sequence
  Description of Artificial Sequence: Synthetic oligonucleotide
ggugucccuuuaucuuguc

SEQ ID NO: 2057909 - RNA, 19 nt, Artificial Sequence
  Description of Artificial Sequence: Synthetic oligonucleotide
ccgaccccagccgggaucc

SEQ ID NO: 2057910 - RNA, 19 nt, Artificial Sequence
  Description of Artificial Sequence: Synthetic oligonucleotide
ggggcauugcacagugcuc

SEQ ID NO: 2057911 - RNA, 19 nt, Artificial Sequence
  Description of Artificial Sequence: Synthetic oligonucleotide
cuugggcggugucuccaaa

SEQ ID NO: 2057912 - RNA, 19 nt, Artificial Sequence
  Description of Artificial Sequence: Synthetic oligonucleotide
ggaggcaaacucacagugu

SEQ ID NO: 2057913 - RNA, 19 nt, Artificial Sequence
  Description of Artificial Sequence: Synthetic oligonucleotide
gcaugcgccgagacucgag

SEQ ID NO: 2057914 - RNA, 19 nt, Artificial Sequence
  Description of Artificial Sequence: Synthetic oligonucleotide
gccggcugcuuucuuccuc

SEQ ID NO: 2057915 - RNA, 19 nt, Artificial Sequence
  Description of Artificial Sequence: Synthetic oligonucleotide
cgacguucaggcuggaucu

SEQ ID NO: 2057916 - RNA, 19 nt, Artificial Sequence
  Description of Artificial Sequence: Synthetic oligonucleotide
ccgagacucgaggagguga

SEQ ID NO: 2057917 - RNA, 19 nt, Artificial Sequence
  Description of Artificial Sequence: Synthetic oligonucleotide
cuuugucacuaagccggcu

SEQ ID NO: 2057918 - RNA, 19 nt, Artificial Sequence
  Description of Artificial Sequence: Synthetic oligonucleotide
acgcagcugguagguucug

SEQ ID NO: 2057919 - RNA, 19 nt, Artificial Sequence
  Description of Artificial Sequence: Synthetic oligonucleotide
ggauuagagguguguuauu

SEQ ID NO: 2057920 - RNA, 19 nt, Artificial Sequence
  Description of Artificial Sequence: Synthetic oligonucleotide
gguccagaaugagcacauc

SEQ ID NO: 2057921 - RNA, 19 nt, Artificial Sequence
  Description of Artificial Sequence: Synthetic oligonucleotide
gucacuaagccggcugcuu

SEQ ID NO: 2057922 - RNA, 19 nt, Artificial Sequence
  Description of Artificial Sequence: Synthetic oligonucleotide
ggucacauucuugggcggu

SEQ ID NO: 2057923 - RNA, 19 nt, Artificial Sequence
  Description of Artificial Sequence: Synthetic oligonucleotide
gcaggcaugcgccgagacu

SEQ ID NO: 2057924 - RNA, 19 nt, Artificial Sequence
  Description of Artificial Sequence: Synthetic oligonucleotide
gguguguuauucgcuguuu

SEQ ID NO: 2057925 - RNA, 19 nt, Artificial Sequence
  Description of Artificial Sequence: Synthetic oligonucleotide
gccgagacucgaggaggug

SEQ ID NO: 2057926 - RNA, 19 nt, Artificial Sequence
  Description of Artificial Sequence: Synthetic oligonucleotide
ccugcgacaucaucugcau

SEQ ID NO: 2057927 - RNA, 19 nt, Artificial Sequence
  Description of Artificial Sequence: Synthetic oligonucleotide
ggcaugcgccgagacucga

SEQ ID NO: 2057928 - RNA, 19 nt, Artificial Sequence
  Description of Artificial Sequence: Synthetic oligonucleotide
gagcccuccuggucaucuu

SEQ ID NO: 2057929 - RNA, 19 nt, Artificial Sequence
  Description of Artificial Sequence: Synthetic oligonucleotide
cccaaaggucuuugucacu

SEQ ID NO: 2057930 - RNA, 19 nt, Artificial Sequence
  Description of Artificial Sequence: Synthetic oligonucleotide
cgaggaggugaagcagcuc

SEQ ID NO: 2057931 - RNA, 19 nt, Artificial Sequence
  Description of Artificial Sequence: Synthetic oligonucleotide
ggaugccuucugccuugcu

SEQ ID NO: 2057932 - RNA, 19 nt, Artificial Sequence
  Description of Artificial Sequence: Synthetic oligonucleotide
caucugcaucugccucacu

SEQ ID NO: 2057933 - RNA, 19 nt, Artificial Sequence
  Description of Artificial Sequence: Synthetic oligonucleotide
ccagagcgcucugcagucu

SEQ ID NO: 2057934 - RNA, 19 nt, Artificial Sequence
  Description of Artificial Sequence: Synthetic oligonucleotide
gccgacguucaggcuggau

SEQ ID NO: 2057935 - RNA, 19 nt, Artificial Sequence
  Description of Artificial Sequence: Synthetic oligonucleotide
gccuugcuguuggcaaguu

SEQ ID NO: 2057936 - RNA, 19 nt, Artificial Sequence
  Description of Artificial Sequence: Synthetic oligonucleotide
ccaccacuggaagcauuuu

SEQ ID NO: 2057937 - RNA, 19 nt, Artificial Sequence
  Description of Artificial Sequence: Synthetic oligonucleotide
cggagcccuccuggucauc

SEQ ID NO: 2057938 - RNA, 19 nt, Artificial Sequence
  Description of Artificial Sequence: Synthetic oligonucleotide
uuagaguucaucaagcggg

SEQ ID NO: 2057939 - RNA, 19 nt, Artificial Sequence
  Description of Artificial Sequence: Synthetic oligonucleotide
uuuaacacauccaagggcu

SEQ ID NO: 2057940 - RNA, 19 nt, Artificial Sequence
  Description of Artificial Sequence: Synthetic oligonucleotide
aacacccugauauucgccc

SEQ ID NO: 2057941 - RNA, 19 nt, Artificial Sequence
  Description of Artificial Sequence: Synthetic oligonucleotide
acaggaauguggcacaucc

SEQ ID NO: 2057942 - RNA, 19 nt, Artificial Sequence
  Description of Artificial Sequence: Synthetic oligonucleotide
aaaacacccugauauucgc

SEQ ID NO: 2057943 - RNA, 19 nt, Artificial Sequence
  Description of Artificial Sequence: Synthetic oligonucleotide
uucaaagugccaccgagcg

SEQ ID NO: 2057944 - RNA, 19 nt, Artificial Sequence
  Description of Artificial Sequence: Synthetic oligonucleotide
acugaugccgcccagcaac

SEQ ID NO: 2057945 - RNA, 19 nt, Artificial Sequence
  Description of Artificial Sequence: Synthetic oligonucleotide
cugauauucgcccuuagag

SEQ ID NO: 2057946 - RNA, 19 nt, Artificial Sequence
  Description of Artificial Sequence: Synthetic oligonucleotide
acagugaccgagcauggcc

SEQ ID NO: 2057947 - RNA, 19 nt, Artificial Sequence
  Description of Artificial Sequence: Synthetic oligonucleotide
ugcauccugacauugacca

SEQ ID NO: 2057948 - RNA, 19 nt, Artificial Sequence
  Description of Artificial Sequence: Synthetic oligonucleotide
uggaggugcaccuugagca

SEQ ID NO: 2057949 - RNA, 19 nt, Artificial Sequence
  Description of Artificial Sequence: Synthetic oligonucleotide
cuuagaguucaucaagcgg

SEQ ID NO: 2057950 - RNA, 19 nt, Artificial Sequence
  Description of Artificial Sequence: Synthetic oligonucleotide
cuuuaacacauccaagggc

SEQ ID NO: 2057951 - RNA, 19 nt, Artificial Sequence
  Description of Artificial Sequence: Synthetic oligonucleotide
ugugguccaagcuuugcgg

SEQ ID NO: 2057952 - RNA, 19 nt, Artificial Sequence
  Description of Artificial Sequence: Synthetic oligonucleotide
agugaagauguugucagac

SEQ ID NO: 2057953 - RNA, 19 nt, Artificial Sequence
  Description of Artificial Sequence: Synthetic oligonucleotide
ucguagauagcgaaccgag

SEQ ID NO: 2057954 - RNA, 19 nt, Artificial Sequence
  Description of Artificial Sequence: Synthetic oligonucleotide
gaagccaucgguucgcacc

SEQ ID NO: 2057955 - RNA, 19 nt, Artificial Sequence
  Description of Artificial Sequence: Synthetic oligonucleotide
aagaggcccuuguaaaagg

SEQ ID NO: 2057956 - RNA, 19 nt, Artificial Sequence
  Description of Artificial Sequence: Synthetic oligonucleotide
cauugaccaaaucugcugg

SEQ ID NO: 2057957 - RNA, 19 nt, Artificial Sequence
  Description of Artificial Sequence: Synthetic oligonucleotide
gaugccaaagugcuuccgg

SEQ ID NO: 2057958 - RNA, 19 nt, Artificial Sequence
  Description of Artificial Sequence: Synthetic oligonucleotide
uuccuguugugucuggagg

SEQ ID NO: 2057959 - RNA, 19 nt, Artificial Sequence
  Description of Artificial Sequence: Synthetic oligonucleotide
agaugugcgcgcuucggcc

SEQ ID NO: 2057960 - RNA, 19 nt, Artificial Sequence
  Description of Artificial Sequence: Synthetic oligonucleotide
aaagugagugaagauguug

SEQ ID NO: 2057961 - RNA, 19 nt, Artificial Sequence
  Description of Artificial Sequence: Synthetic oligonucleotide
caugagaguaguugcgucg

SEQ ID NO: 2057962 - RNA, 19 nt, Artificial Sequence
  Description of Artificial Sequence: Synthetic oligonucleotide
aucgguucgcaccaccugc

SEQ ID NO: 2057963 - RNA, 19 nt, Artificial Sequence
  Description of Artificial Sequence: Synthetic oligonucleotide
auagcaggacagcuggccc

SEQ ID NO: 2057964 - RNA, 19 nt, Artificial Sequence
  Description of Artificial Sequence: Synthetic oligonucleotide
gagcucagcacagugaccg

SEQ ID NO: 2057965 - RNA, 19 nt, Artificial Sequence
  Description of Artificial Sequence: Synthetic oligonucleotide
guucgcaccaccugcagcg

SEQ ID NO: 2057966 - RNA, 19 nt, Artificial Sequence
  Description of Artificial Sequence: Synthetic oligonucleotide
ugauauucgcccuuagagu

SEQ ID NO: 2057967 - RNA, 19 nt, Artificial Sequence
  Description of Artificial Sequence: Synthetic oligonucleotide
agaguaguugcgucgcugg

SEQ ID NO: 2057968 - RNA, 19 nt, Artificial Sequence
  Description of Artificial Sequence: Synthetic oligonucleotide
guacagaccauccagggca

SEQ ID NO: 2057969 - RNA, 19 nt, Artificial Sequence
  Description of Artificial Sequence: Synthetic oligonucleotide
acauugaccaaaucugcug

SEQ ID NO: 2057970 - RNA, 19 nt, Artificial Sequence
  Description of Artificial Sequence: Synthetic oligonucleotide
aacacauccaagggcuggc

SEQ ID NO: 2057971 - RNA, 19 nt, Artificial Sequence
  Description of Artificial Sequence: Synthetic oligonucleotide
aguaccaccgagaugugcg

SEQ ID NO: 2057972 - RNA, 19 nt, Artificial Sequence
  Description of Artificial Sequence: Synthetic oligonucleotide
cauggucucguagauagcg

SEQ ID NO: 2057973 - RNA, 19 nt, Artificial Sequence
  Description of Artificial Sequence: Synthetic oligonucleotide
caaaguaccaccgagaugu

SEQ ID NO: 2057974 - RNA, 19 nt, Artificial Sequence
  Description of Artificial Sequence: Synthetic oligonucleotide
uuugcggucuccauugcac

SEQ ID NO: 2057975 - RNA, 19 nt, Artificial Sequence
  Description of Artificial Sequence: Synthetic oligonucleotide
uagauagcgaaccgaguca

SEQ ID NO: 2057976 - RNA, 19 nt, Artificial Sequence
  Description of Artificial Sequence: Synthetic oligonucleotide
accuugagcaggucuagcg

SEQ ID NO: 2057977 - RNA, 19 nt, Artificial Sequence
  Description of Artificial Sequence: Synthetic oligonucleotide
ucucguagauagcgaaccg

SEQ ID NO: 2057978 - RNA, 19 nt, Artificial Sequence
  Description of Artificial Sequence: Synthetic oligonucleotide
agcgaaccgagucagggag

SEQ ID NO: 2057979 - RNA, 19 nt, Artificial Sequence
  Description of Artificial Sequence: Synthetic oligonucleotide
ucaagcgggucuuuaacac

SEQ ID NO: 2057980 - RNA, 19 nt, Artificial Sequence
  Description of Artificial Sequence: Synthetic oligonucleotide
auagcgaaccgagucaggg

SEQ ID NO: 2057981 - RNA, 19 nt, Artificial Sequence
  Description of Artificial Sequence: Synthetic oligonucleotide
ucugcauccugacauugac

SEQ ID NO: 2057982 - RNA, 19 nt, Artificial Sequence
  Description of Artificial Sequence: Synthetic oligonucleotide
agugagugaagauguuguc

SEQ ID NO: 2057983 - RNA, 19 nt, Artificial Sequence
  Description of Artificial Sequence: Synthetic oligonucleotide
auugaccaaaucugcuggg

SEQ ID NO: 2057984 - RNA, 19 nt, Artificial Sequence
  Description of Artificial Sequence: Synthetic oligonucleotide
augagaguaguugcgucgc

SEQ ID NO: 2057985 - RNA, 19 nt, Artificial Sequence
  Description of Artificial Sequence: Synthetic oligonucleotide
aaggggagaggccccuggc

SEQ ID NO: 2057986 - RNA, 19 nt, Artificial Sequence
  Description of Artificial Sequence: Synthetic oligonucleotide
aaacacccugauauucgcc

SEQ ID NO: 2057987 - RNA, 19 nt, Artificial Sequence
  Description of Artificial Sequence: Synthetic oligonucleotide
aauguggcacauccgccug

SEQ ID NO: 2057988 - RNA, 19 nt, Artificial Sequence
  Description of Artificial Sequence: Synthetic oligonucleotide
agcuuugcggucuccauug

SEQ ID NO: 2057989 - RNA, 19 nt, Artificial Sequence
  Description of Artificial Sequence: Synthetic oligonucleotide
aaguaccaccgagaugugc

SEQ ID NO: 2057990 - RNA, 19 nt, Artificial Sequence
  Description of Artificial Sequence: Synthetic oligonucleotide
gaugccaugguugcacccg

SEQ ID NO: 2057991 - RNA, 19 nt, Artificial Sequence
  Description of Artificial Sequence: Synthetic oligonucleotide
uccgccugcaaugaaacug

SEQ ID NO: 2057992 - RNA, 19 nt, Artificial Sequence
  Description of Artificial Sequence: Synthetic oligonucleotide
ucgcccuuagaguucauca

SEQ ID NO: 2057993 - RNA, 19 nt, Artificial Sequence
  Description of Artificial Sequence: Synthetic oligonucleotide
aggaacaugaaggugagua

SEQ ID NO: 2057994 - RNA, 19 nt, Artificial Sequence
  Description of Artificial Sequence: Synthetic oligonucleotide
cacgguacagaccauccag

SEQ ID NO: 2057995 - RNA, 19 nt, Artificial Sequence
  Description of Artificial Sequence: Synthetic oligonucleotide
aggucuagcgggugcgugc

SEQ ID NO: 2057996 - RNA, 19 nt, Artificial Sequence
  Description of Artificial Sequence: Synthetic oligonucleotide
ugcaaugaaacuggagaca

SEQ ID NO: 2057997 - RNA, 19 nt, Artificial Sequence
  Description of Artificial Sequence: Synthetic oligonucleotide
aucaagcgggucuuuaaca

SEQ ID NO: 2057998 - RNA, 19 nt, Artificial Sequence
  Description of Artificial Sequence: Synthetic oligonucleotide
aggaaagaggcccuuguaa

SEQ ID NO: 2057999 - RNA, 19 nt, Artificial Sequence
  Description of Artificial Sequence: Synthetic oligonucleotide
cagggaguaggucaucugc

SEQ ID NO: 2058000 - RNA, 19 nt, Artificial Sequence
  Description of Artificial Sequence: Synthetic oligonucleotide
auugcacaguggaaaacac

SEQ ID NO: 2058001 - RNA, 19 nt, Artificial Sequence
  Description of Artificial Sequence: Synthetic oligonucleotide
gaguaggucaucugccuac

SEQ ID NO: 2058002 - RNA, 19 nt, Artificial Sequence
  Description of Artificial Sequence: Synthetic oligonucleotide
accaccgagaugugcgcgc

SEQ ID NO: 2058003 - RNA, 19 nt, Artificial Sequence
  Description of Artificial Sequence: Synthetic oligonucleotide
caugguugcacccgagaag

SEQ ID NO: 2058004 - RNA, 19 nt, Artificial Sequence
  Description of Artificial Sequence: Synthetic oligonucleotide
gauauucgcccuuagaguu

SEQ ID NO: 2058005 - RNA, 19 nt, Artificial Sequence
  Description of Artificial Sequence: Synthetic oligonucleotide
uaaaccacugaugccgccc

SEQ ID NO: 2058006 - RNA, 19 nt, Artificial Sequence
  Description of Artificial Sequence: Synthetic oligonucleotide
agggaguaggucaucugcc

SEQ ID NO: 2058007 - RNA, 19 nt, Artificial Sequence
  Description of Artificial Sequence: Synthetic oligonucleotide
gguucaaagugccaccgag

SEQ ID NO: 2058008 - RNA, 19 nt, Artificial Sequence
  Description of Artificial Sequence: Synthetic oligonucleotide
ugagacggaugcccgcagg

SEQ ID NO: 2058009 - RNA, 19 nt, Artificial Sequence
  Description of Artificial Sequence: Synthetic oligonucleotide
cacacgguacagaccaucc

SEQ ID NO: 2058010 - RNA, 19 nt, Artificial Sequence
  Description of Artificial Sequence: Synthetic oligonucleotide
augguugcacccgagaaga

SEQ ID NO: 2058011 - RNA, 19 nt, Artificial Sequence
  Description of Artificial Sequence: Synthetic oligonucleotide
ucaaagugccaccgagcgc

SEQ ID NO: 2058012 - RNA, 19 nt, Artificial Sequence
  Description of Artificial Sequence: Synthetic oligonucleotide
gucucguagauagcgaacc

SEQ ID NO: 2058013 - RNA, 19 nt, Artificial Sequence
  Description of Artificial Sequence: Synthetic oligonucleotide
cauagcaggacagcuggcc

SEQ ID NO: 2058014 - RNA, 19 nt, Artificial Sequence
  Description of Artificial Sequence: Synthetic oligonucleotide
gaugcccgcaggaaagagg

SEQ ID NO: 2058015 - RNA, 19 nt, Artificial Sequence
  Description of Artificial Sequence: Synthetic oligonucleotide
agauagcgaaccgagucag

SEQ ID NO: 2058016 - RNA, 19 nt, Artificial Sequence
  Description of Artificial Sequence: Synthetic oligonucleotide
cuuggccuggucauagcag

SEQ ID NO: 2058017 - RNA, 19 nt, Artificial Sequence
  Description of Artificial Sequence: Synthetic oligonucleotide
cagugaccgagcauggccc

SEQ ID NO: 2058018 - RNA, 19 nt, Artificial Sequence
  Description of Artificial Sequence: Synthetic oligonucleotide
uccauugcacaguggaaaa

SEQ ID NO: 2058019 - RNA, 19 nt, Artificial Sequence
  Description of Artificial Sequence: Synthetic oligonucleotide
auucccgucaugcgcagcu

SEQ ID NO: 2058020 - RNA, 19 nt, Artificial Sequence
  Description of Artificial Sequence: Synthetic oligonucleotide
gaaagaggcccuuguaaaa

SEQ ID NO: 2058021 - RNA, 19 nt, Artificial Sequence
  Description of Artificial Sequence: Synthetic oligonucleotide
uacacagcgaggcgcucag

SEQ ID NO: 2058022 - RNA, 19 nt, Artificial Sequence
  Description of Artificial Sequence: Synthetic oligonucleotide
caggccauuguagagcgcc

SEQ ID NO: 2058023 - RNA, 19 nt, Artificial Sequence
  Description of Artificial Sequence: Synthetic oligonucleotide
ucaggccuucuucacgggc

SEQ ID NO: 2058024 - RNA, 19 nt, Artificial Sequence
  Description of Artificial Sequence: Synthetic oligonucleotide
ucuggaggugcaccuugag

SEQ ID NO: 2058025 - RNA, 19 nt, Artificial Sequence
  Description of Artificial Sequence: Synthetic oligonucleotide
gaugccgcccagcaacacc

SEQ ID NO: 2058026 - RNA, 19 nt, Artificial Sequence
  Description of Artificial Sequence: Synthetic oligonucleotide
acccgguucaaagugccac

SEQ ID NO: 2058027 - RNA, 19 nt, Artificial Sequence
  Description of Artificial Sequence: Synthetic oligonucleotide
gagaugugcgcgcuucggc

SEQ ID NO: 2058028 - RNA, 19 nt, Artificial Sequence
  Description of Artificial Sequence: Synthetic oligonucleotide
caucugccuacacagcgag

SEQ ID NO: 2058029 - RNA, 19 nt, Artificial Sequence
  Description of Artificial Sequence: Synthetic oligonucleotide
uugcuguagaaggggagag

SEQ ID NO: 2058030 - RNA, 19 nt, Artificial Sequence
  Description of Artificial Sequence: Synthetic oligonucleotide
caucaagcgggucuuuaac

SEQ ID NO: 2058031 - RNA, 19 nt, Artificial Sequence
  Description of Artificial Sequence: Synthetic oligonucleotide
cauccgccugcaaugaaac

SEQ ID NO: 2058032 - RNA, 19 nt, Artificial Sequence
  Description of Artificial Sequence: Synthetic oligonucleotide
agcgggugcgugcagcagg

SEQ ID NO: 2058033 - RNA, 19 nt, Artificial Sequence
  Description of Artificial Sequence: Synthetic oligonucleotide
uuaaaccacugaugccgcc

SEQ ID NO: 2058034 - RNA, 19 nt, Artificial Sequence
  Description of Artificial Sequence: Synthetic oligonucleotide
cacagcgaggcgcucaggc

SEQ ID NO: 2058035 - RNA, 19 nt, Artificial Sequence
  Description of Artificial Sequence: Synthetic oligonucleotide
ugcggucuccauugcacag

SEQ ID NO: 2058036 - RNA, 19 nt, Artificial Sequence
  Description of Artificial Sequence: Synthetic oligonucleotide
uucacgggccacacgguac

SEQ ID NO: 2058037 - RNA, 19 nt, Artificial Sequence
  Description of Artificial Sequence: Synthetic oligonucleotide
uggucucguagauagcgaa

SEQ ID NO: 2058038 - RNA, 19 nt, Artificial Sequence
  Description of Artificial Sequence: Synthetic oligonucleotide
ccuuagaguucaucaagcg

SEQ ID NO: 2058039 - RNA, 19 nt, Artificial Sequence
  Description of Artificial Sequence: Synthetic oligonucleotide
auguggcacauccgccugc

SEQ ID NO: 2058040 - RNA, 19 nt, Artificial Sequence
  Description of Artificial Sequence: Synthetic oligonucleotide
acacccgguucaaagugcc

SEQ ID NO: 2058041 - RNA, 19 nt, Artificial Sequence
  Description of Artificial Sequence: Synthetic oligonucleotide
ucuccauugcacaguggaa

SEQ ID NO: 2058042 - RNA, 19 nt, Artificial Sequence
  Description of Artificial Sequence: Synthetic oligonucleotide
cauugcacaguggaaaaca

SEQ ID NO: 2058043 - RNA, 19 nt, Artificial Sequence
  Description of Artificial Sequence: Synthetic oligonucleotide
augccaaagugcuuccgga

SEQ ID NO: 2058044 - RNA, 19 nt, Artificial Sequence
  Description of Artificial Sequence: Synthetic oligonucleotide
acagugaccagggccccgc

SEQ ID NO: 2058045 - RNA, 19 nt, Artificial Sequence
  Description of Artificial Sequence: Synthetic oligonucleotide
guuaaaccacugaugccgc

SEQ ID NO: 2058046 - RNA, 19 nt, Artificial Sequence
  Description of Artificial Sequence: Synthetic oligonucleotide
cugcauccugacauugacc

SEQ ID NO: 2058047 - RNA, 19 nt, Artificial Sequence
  Description of Artificial Sequence: Synthetic oligonucleotide
caggaauguggcacauccg

SEQ ID NO: 2058048 - RNA, 19 nt, Artificial Sequence
  Description of Artificial Sequence: Synthetic oligonucleotide
ucacgggccacacgguaca

SEQ ID NO: 2058049 - RNA, 19 nt, Artificial Sequence
  Description of Artificial Sequence: Synthetic oligonucleotide
cuguagaaggggagaggcc

SEQ ID NO: 2058050 - RNA, 19 nt, Artificial Sequence
  Description of Artificial Sequence: Synthetic oligonucleotide
guaguugcgucgcuggcuc

SEQ ID NO: 2058051 - RNA, 19 nt, Artificial Sequence
  Description of Artificial Sequence: Synthetic oligonucleotide
uggcacauccgccugcaau

SEQ ID NO: 2058052 - RNA, 19 nt, Artificial Sequence
  Description of Artificial Sequence: Synthetic oligonucleotide
ucauagcaggacagcuggc

SEQ ID NO: 2058053 - RNA, 19 nt, Artificial Sequence
  Description of Artificial Sequence: Synthetic oligonucleotide
gguggggucagguuggcac

SEQ ID NO: 2058054 - RNA, 19 nt, Artificial Sequence
  Description of Artificial Sequence: Synthetic oligonucleotide
ugccuacacagcgaggcgc

SEQ ID NO: 2058055 - RNA, 19 nt, Artificial Sequence
  Description of Artificial Sequence: Synthetic oligonucleotide
gaauguggcacauccgccu

SEQ ID NO: 2058056 - RNA, 19 nt, Artificial Sequence
  Description of Artificial Sequence: Synthetic oligonucleotide
guucaaagugccaccgagc

SEQ ID NO: 2058057 - RNA, 19 nt, Artificial Sequence
  Description of Artificial Sequence: Synthetic oligonucleotide
gggucuuuaacacauccaa

SEQ ID NO: 2058058 - RNA, 19 nt, Artificial Sequence
  Description of Artificial Sequence: Synthetic oligonucleotide
uggaaaacacccugauauu

SEQ ID NO: 2058059 - RNA, 19 nt, Artificial Sequence
  Description of Artificial Sequence: Synthetic oligonucleotide
cgcauggucucguagauag

SEQ ID NO: 2058060 - RNA, 19 nt, Artificial Sequence
  Description of Artificial Sequence: Synthetic oligonucleotide
gcuguagaaggggagaggc

SEQ ID NO: 2058061 - RNA, 19 nt, Artificial Sequence
  Description of Artificial Sequence: Synthetic oligonucleotide
gagaguaguugcgucgcug

SEQ ID NO: 2058062 - RNA, 19 nt, Artificial Sequence
  Description of Artificial Sequence: Synthetic oligonucleotide
uugcgucgcuggcucaggg

SEQ ID NO: 2058063 - RNA, 19 nt, Artificial Sequence
  Description of Artificial Sequence: Synthetic oligonucleotide
gauagcgaaccgagucagg

SEQ ID NO: 2058064 - RNA, 19 nt, Artificial Sequence
  Description of Artificial Sequence: Synthetic oligonucleotide
auauucgcccuuagaguuc

SEQ ID NO: 2058065 - RNA, 19 nt, Artificial Sequence
  Description of Artificial Sequence: Synthetic oligonucleotide
acgguacagaccauccagg

SEQ ID NO: 2058066 - RNA, 19 nt, Artificial Sequence
  Description of Artificial Sequence: Synthetic oligonucleotide
ggaaaacacccugauauuc

SEQ ID NO: 2058067 - RNA, 19 nt, Artificial Sequence
  Description of Artificial Sequence: Synthetic oligonucleotide
ggcagcacaacuccgguuc

SEQ ID NO: 2058068 - RNA, 19 nt, Artificial Sequence
  Description of Artificial Sequence: Synthetic oligonucleotide
gaguaguugcgucgcuggc

SEQ ID NO: 2058069 - RNA, 19 nt, Artificial Sequence
  Description of Artificial Sequence: Synthetic oligonucleotide
uugcggucuccauugcaca

SEQ ID NO: 2058070 - RNA, 19 nt, Artificial Sequence
  Description of Artificial Sequence: Synthetic oligonucleotide
ggaaagaggcccuuguaaa

SEQ ID NO: 2058071 - RNA, 19 nt, Artificial Sequence
  Description of Artificial Sequence: Synthetic oligonucleotide
aguaguugcgucgcuggcu

SEQ ID NO: 2058072 - RNA, 19 nt, Artificial Sequence
  Description of Artificial Sequence: Synthetic oligonucleotide
cccuuagaguucaucaagc

SEQ ID NO: 2058073 - RNA, 19 nt, Artificial Sequence
  Description of Artificial Sequence: Synthetic oligonucleotide
ucuagcgggugcgugcagc

SEQ ID NO: 2058074 - RNA, 19 nt, Artificial Sequence
  Description of Artificial Sequence: Synthetic oligonucleotide
cuggaugccaugguugcac

SEQ ID NO: 2058075 - RNA, 19 nt, Artificial Sequence
  Description of Artificial Sequence: Synthetic oligonucleotide
agugaccagggccccgcgg

SEQ ID NO: 2058076 - RNA, 19 nt, Artificial Sequence
  Description of Artificial Sequence: Synthetic oligonucleotide
uagcgaaccgagucaggga

SEQ ID NO: 2058077 - RNA, 19 nt, Artificial Sequence
  Description of Artificial Sequence: Synthetic oligonucleotide
ucgguucgcaccaccugca

SEQ ID NO: 2058078 - RNA, 19 nt, Artificial Sequence
  Description of Artificial Sequence: Synthetic oligonucleotide
gcccuuagaguucaucaag

SEQ ID NO: 2058079 - RNA, 19 nt, Artificial Sequence
  Description of Artificial Sequence: Synthetic oligonucleotide
gacacccgguucaaagugc

SEQ ID NO: 2058080 - RNA, 19 nt, Artificial Sequence
  Description of Artificial Sequence: Synthetic oligonucleotide
gaugugcgcgcuucggcca

SEQ ID NO: 2058081 - RNA, 19 nt, Artificial Sequence
  Description of Artificial Sequence: Synthetic oligonucleotide
accgagaugugcgcgcuuc

SEQ ID NO: 2058082 - RNA, 19 nt, Artificial Sequence
  Description of Artificial Sequence: Synthetic oligonucleotide
gaugagacggaugcccgca

SEQ ID NO: 2058083 - RNA, 19 nt, Artificial Sequence
  Description of Artificial Sequence: Synthetic oligonucleotide
uaccaccgagaugugcgcg

SEQ ID NO: 2058084 - RNA, 19 nt, Artificial Sequence
  Description of Artificial Sequence: Synthetic oligonucleotide
ccucaggccuucuucacgg

SEQ ID NO: 2058085 - RNA, 19 nt, Artificial Sequence
  Description of Artificial Sequence: Synthetic oligonucleotide
ggucuuuaacacauccaag

SEQ ID NO: 2058086 - RNA, 19 nt, Artificial Sequence
  Description of Artificial Sequence: Synthetic oligonucleotide
ugagaguaguugcgucgcu

SEQ ID NO: 2058087 - RNA, 19 nt, Artificial Sequence
  Description of Artificial Sequence: Synthetic oligonucleotide
ugaccgagcauggcccagg

SEQ ID NO: 2058088 - RNA, 19 nt, Artificial Sequence
  Description of Artificial Sequence: Synthetic oligonucleotide
cuggugcagccaaugcgcc

SEQ ID NO: 2058089 - RNA, 19 nt, Artificial Sequence
  Description of Artificial Sequence: Synthetic oligonucleotide
aggggagucugcuccccuc

SEQ ID NO: 2058090 - RNA, 19 nt, Artificial Sequence
  Description of Artificial Sequence: Synthetic oligonucleotide
ggacacccgguucaaagug

SEQ ID NO: 2058091 - RNA, 19 nt, Artificial Sequence
  Description of Artificial Sequence: Synthetic oligonucleotide
gagacggaugcccgcagga

SEQ ID NO: 2058092 - RNA, 19 nt, Artificial Sequence
  Description of Artificial Sequence: Synthetic oligonucleotide
aaccacugaugccgcccag

SEQ ID NO: 2058093 - RNA, 19 nt, Artificial Sequence
  Description of Artificial Sequence: Synthetic oligonucleotide
gagucugcuccccucccac

SEQ ID NO: 2058094 - RNA, 19 nt, Artificial Sequence
  Description of Artificial Sequence: Synthetic oligonucleotide
ccuugagcaggucuagcgg

SEQ ID NO: 2058095 - RNA, 19 nt, Artificial Sequence
  Description of Artificial Sequence: Synthetic oligonucleotide
acacgguacagaccaucca

SEQ ID NO: 2058096 - RNA, 19 nt, Artificial Sequence
  Description of Artificial Sequence: Synthetic oligonucleotide
aaggggagucugcuccccu

SEQ ID NO: 2058097 - RNA, 19 nt, Artificial Sequence
  Description of Artificial Sequence: Synthetic oligonucleotide
ucuucacgggccacacggu

SEQ ID NO: 2058098 - RNA, 19 nt, Artificial Sequence
  Description of Artificial Sequence: Synthetic oligonucleotide
agcaggacagcuggcccac

SEQ ID NO: 2058099 - RNA, 19 nt, Artificial Sequence
  Description of Artificial Sequence: Synthetic oligonucleotide
agcauggcccagguguccg

SEQ ID NO: 2058100 - RNA, 19 nt, Artificial Sequence
  Description of Artificial Sequence: Synthetic oligonucleotide
acggaugcccgcaggaaag

SEQ ID NO: 2058101 - RNA, 19 nt, Artificial Sequence
  Description of Artificial Sequence: Synthetic oligonucleotide
cacgcuuccagggagcuca

SEQ ID NO: 2058102 - RNA, 19 nt, Artificial Sequence
  Description of Artificial Sequence: Synthetic oligonucleotide
gacggaugcccgcaggaaa

SEQ ID NO: 2058103 - RNA, 19 nt, Artificial Sequence
  Description of Artificial Sequence: Synthetic oligonucleotide
cuggucauagcaggacagc

SEQ ID NO: 2058104 - RNA, 19 nt, Artificial Sequence
  Description of Artificial Sequence: Synthetic oligonucleotide
guaccaccgagaugugcgc

SEQ ID NO: 2058105 - RNA, 19 nt, Artificial Sequence
  Description of Artificial Sequence: Synthetic oligonucleotide
ugguugcacccgagaagag

SEQ ID NO: 2058106 - RNA, 19 nt, Artificial Sequence
  Description of Artificial Sequence: Synthetic oligonucleotide
augagacggaugcccgcag

SEQ ID NO: 2058107 - RNA, 19 nt, Artificial Sequence
  Description of Artificial Sequence: Synthetic oligonucleotide
uccagggcaugagaguagu

SEQ ID NO: 2058108 - RNA, 19 nt, Artificial Sequence
  Description of Artificial Sequence: Synthetic oligonucleotide
cagggagcucagcacagug

SEQ ID NO: 2058109 - RNA, 19 nt, Artificial Sequence
  Description of Artificial Sequence: Synthetic oligonucleotide
agaguucaucaagcggguc

SEQ ID NO: 2058110 - RNA, 19 nt, Artificial Sequence
  Description of Artificial Sequence: Synthetic oligonucleotide
gcgggucuuuaacacaucc

SEQ ID NO: 2058111 - RNA, 19 nt, Artificial Sequence
  Description of Artificial Sequence: Synthetic oligonucleotide
uggugcagccaaugcgccc

SEQ ID NO: 2058112 - RNA, 19 nt, Artificial Sequence
  Description of Artificial Sequence: Synthetic oligonucleotide
uacagaccauccagggcau

SEQ ID NO: 2058113 - RNA, 19 nt, Artificial Sequence
  Description of Artificial Sequence: Synthetic oligonucleotide
ccgccugcaaugaaacugg

SEQ ID NO: 2058114 - RNA, 19 nt, Artificial Sequence
  Description of Artificial Sequence: Synthetic oligonucleotide
uguggcacauccgccugca

SEQ ID NO: 2058115 - RNA, 19 nt, Artificial Sequence
  Description of Artificial Sequence: Synthetic oligonucleotide
cugggguccccacgaagcc

SEQ ID NO: 2058116 - RNA, 19 nt, Artificial Sequence
  Description of Artificial Sequence: Synthetic oligonucleotide
agugaccgagcauggccca

SEQ ID NO: 2058117 - RNA, 19 nt, Artificial Sequence
  Description of Artificial Sequence: Synthetic oligonucleotide
guugcacccgagaagagcu

SEQ ID NO: 2058118 - RNA, 19 nt, Artificial Sequence
  Description of Artificial Sequence: Synthetic oligonucleotide
ucccacgcuuccagggagc

SEQ ID NO: 2058119 - RNA, 19 nt, Artificial Sequence
  Description of Artificial Sequence: Synthetic oligonucleotide
caucgguucgcaccaccug

SEQ ID NO: 2058120 - RNA, 19 nt, Artificial Sequence
  Description of Artificial Sequence: Synthetic oligonucleotide
aguugcgucgcuggcucag

SEQ ID NO: 2058121 - RNA, 19 nt, Artificial Sequence
  Description of Artificial Sequence: Synthetic oligonucleotide
caagcgggucuuuaacaca

SEQ ID NO: 2058122 - RNA, 19 nt, Artificial Sequence
  Description of Artificial Sequence: Synthetic oligonucleotide
gggugcgugcagcaggcgg

SEQ ID NO: 2058123 - RNA, 19 nt, Artificial Sequence
  Description of Artificial Sequence: Synthetic oligonucleotide
ugagcaggucuagcgggug

SEQ ID NO: 2058124 - RNA, 19 nt, Artificial Sequence
  Description of Artificial Sequence: Synthetic oligonucleotide
caggaagccaucgguucgc

SEQ ID NO: 2058125 - RNA, 19 nt, Artificial Sequence
  Description of Artificial Sequence: Synthetic oligonucleotide
guccccacgaagccuccag

SEQ ID NO: 2058126 - RNA, 19 nt, Artificial Sequence
  Description of Artificial Sequence: Synthetic oligonucleotide
gguugcacccgagaagagc

SEQ ID NO: 2058127 - RNA, 19 nt, Artificial Sequence
  Description of Artificial Sequence: Synthetic oligonucleotide
uccccacgaagccuccagu

SEQ ID NO: 2058128 - RNA, 19 nt, Artificial Sequence
  Description of Artificial Sequence: Synthetic oligonucleotide
cugcuuggccuggucauag

SEQ ID NO: 2058129 - RNA, 19 nt, Artificial Sequence
  Description of Artificial Sequence: Synthetic oligonucleotide
ugcacccgagaagagcuuc

SEQ ID NO: 2058130 - RNA, 19 nt, Artificial Sequence
  Description of Artificial Sequence: Synthetic oligonucleotide
gggaugagacggaugcccg

SEQ ID NO: 2058131 - RNA, 19 nt, Artificial Sequence
  Description of Artificial Sequence: Synthetic oligonucleotide
cucguagauagcgaaccga

SEQ ID NO: 2058132 - RNA, 19 nt, Artificial Sequence
  Description of Artificial Sequence: Synthetic oligonucleotide
cauuguagagcgccaggaa

SEQ ID NO: 2058133 - RNA, 19 nt, Artificial Sequence
  Description of Artificial Sequence: Synthetic oligonucleotide
gggcaugagaguaguugcg

SEQ ID NO: 2058134 - RNA, 19 nt, Artificial Sequence
  Description of Artificial Sequence: Synthetic oligonucleotide
uccugacauugaccaaauc

SEQ ID NO: 2058135 - RNA, 19 nt, Artificial Sequence
  Description of Artificial Sequence: Synthetic oligonucleotide
augccaugguugcacccga

SEQ ID NO: 2058136 - RNA, 19 nt, Artificial Sequence
  Description of Artificial Sequence: Synthetic oligonucleotide
cuuugcggucuccauugca

SEQ ID NO: 2058137 - RNA, 19 nt, Artificial Sequence
  Description of Artificial Sequence: Synthetic oligonucleotide
aggccuucuucacgggcca

SEQ ID NO: 2058138 - RNA, 19 nt, Artificial Sequence
  Description of Artificial Sequence: Synthetic oligonucleotide
acauccgccugcaaugaaa

SEQ ID NO: 2058139 - RNA, 19 nt, Artificial Sequence
  Description of Artificial Sequence: Synthetic oligonucleotide
gguucgcaccaccugcagc

SEQ ID NO: 2058140 - RNA, 19 nt, Artificial Sequence
  Description of Artificial Sequence: Synthetic oligonucleotide
guaggucaucugccuacac

SEQ ID NO: 2058141 - RNA, 19 nt, Artificial Sequence
  Description of Artificial Sequence: Synthetic oligonucleotide
caaagugcuuccggagcug

SEQ ID NO: 2058142 - RNA, 19 nt, Artificial Sequence
  Description of Artificial Sequence: Synthetic oligonucleotide
ggcuggcacaggaaugugg

SEQ ID NO: 2058143 - RNA, 19 nt, Artificial Sequence
  Description of Artificial Sequence: Synthetic oligonucleotide
uucgcccuuagaguucauc

SEQ ID NO: 2058144 - RNA, 19 nt, Artificial Sequence
  Description of Artificial Sequence: Synthetic oligonucleotide
gucccgcauggucucguag

SEQ ID NO: 2058145 - RNA, 19 nt, Artificial Sequence
  Description of Artificial Sequence: Synthetic oligonucleotide
ggcgcucaggccauuguag

SEQ ID NO: 2058146 - RNA, 19 nt, Artificial Sequence
  Description of Artificial Sequence: Synthetic oligonucleotide
agguguccguggugggguc

SEQ ID NO: 2058147 - RNA, 19 nt, Artificial Sequence
  Description of Artificial Sequence: Synthetic oligonucleotide
auccgccugcaaugaaacu

SEQ ID NO: 2058148 - RNA, 19 nt, Artificial Sequence
  Description of Artificial Sequence: Synthetic oligonucleotide
ucccgucaugcgcagcuuu

SEQ ID NO: 2058149 - RNA, 19 nt, Artificial Sequence
  Description of Artificial Sequence: Synthetic oligonucleotide
ggaugccaugguugcaccc

SEQ ID NO: 2058150 - RNA, 19 nt, Artificial Sequence
  Description of Artificial Sequence: Synthetic oligonucleotide
ggcacaggaauguggcaca

SEQ ID NO: 2058151 - RNA, 19 nt, Artificial Sequence
  Description of Artificial Sequence: Synthetic oligonucleotide
cuagcgggugcgugcagca

SEQ ID NO: 2058152 - RNA, 19 nt, Artificial Sequence
  Description of Artificial Sequence: Synthetic oligonucleotide
gacagcuggcccacaguga

SEQ ID NO: 2058153 - RNA, 19 nt, Artificial Sequence
  Description of Artificial Sequence: Synthetic oligonucleotide
gaaccgagucagggaguag

SEQ ID NO: 2058154 - RNA, 19 nt, Artificial Sequence
  Description of Artificial Sequence: Synthetic oligonucleotide
gucaugcgcagcuuuacuu

SEQ ID NO: 2058155 - RNA, 19 nt, Artificial Sequence
  Description of Artificial Sequence: Synthetic oligonucleotide
agggagcucagcacaguga

SEQ ID NO: 2058156 - RNA, 19 nt, Artificial Sequence
  Description of Artificial Sequence: Synthetic oligonucleotide
guugcgucgcuggcucagg

SEQ ID NO: 2058157 - RNA, 19 nt, Artificial Sequence
  Description of Artificial Sequence: Synthetic oligonucleotide
uuccagccgcgggacaccc

SEQ ID NO: 2058158 - RNA, 19 nt, Artificial Sequence
  Description of Artificial Sequence: Synthetic oligonucleotide
guuggcacucugaugccaa

SEQ ID NO: 2058159 - RNA, 19 nt, Artificial Sequence
  Description of Artificial Sequence: Synthetic oligonucleotide
gcccgcaggaaagaggccc

SEQ ID NO: 2058160 - RNA, 19 nt, Artificial Sequence
  Description of Artificial Sequence: Synthetic oligonucleotide
uucgcaccaccugcagcgc

SEQ ID NO: 2058161 - RNA, 19 nt, Artificial Sequence
  Description of Artificial Sequence: Synthetic oligonucleotide
ggggagucugcuccccucc

SEQ ID NO: 2058162 - RNA, 19 nt, Artificial Sequence
  Description of Artificial Sequence: Synthetic oligonucleotide
uaguugcgucgcuggcuca

SEQ ID NO: 2058163 - RNA, 19 nt, Artificial Sequence
  Description of Artificial Sequence: Synthetic oligonucleotide
ccaaaguaccaccgagaug

SEQ ID NO: 2058164 - RNA, 19 nt, Artificial Sequence
  Description of Artificial Sequence: Synthetic oligonucleotide
caaaucugcuggggucccc

SEQ ID NO: 2058165 - RNA, 19 nt, Artificial Sequence
  Description of Artificial Sequence: Synthetic oligonucleotide
gucgcuggcucaggggcag

SEQ ID NO: 2058166 - RNA, 19 nt, Artificial Sequence
  Description of Artificial Sequence: Synthetic oligonucleotide
caccuugagcaggucuagc

SEQ ID NO: 2058167 - RNA, 19 nt, Artificial Sequence
  Description of Artificial Sequence: Synthetic oligonucleotide
cccgguucaaagugccacc

SEQ ID NO: 2058168 - RNA, 19 nt, Artificial Sequence
  Description of Artificial Sequence: Synthetic oligonucleotide
uccgugguggggucagguu

SEQ ID NO: 2058169 - RNA, 19 nt, Artificial Sequence
  Description of Artificial Sequence: Synthetic oligonucleotide
accgagucagggaguaggu

SEQ ID NO: 2058170 - RNA, 19 nt, Artificial Sequence
  Description of Artificial Sequence: Synthetic oligonucleotide
ccgugguggggucagguug

SEQ ID NO: 2058171 - RNA, 19 nt, Artificial Sequence
  Description of Artificial Sequence: Synthetic oligonucleotide
aggccaagaaggggagucu

SEQ ID NO: 2058172 - RNA, 19 nt, Artificial Sequence
  Description of Artificial Sequence: Synthetic oligonucleotide
ccgguucaaagugccaccg

SEQ ID NO: 2058173 - RNA, 19 nt, Artificial Sequence
  Description of Artificial Sequence: Synthetic oligonucleotide
acacauccaagggcuggca

SEQ ID NO: 2058174 - RNA, 19 nt, Artificial Sequence
  Description of Artificial Sequence: Synthetic oligonucleotide
gcgccauucccgucaugcg

SEQ ID NO: 2058175 - RNA, 19 nt, Artificial Sequence
  Description of Artificial Sequence: Synthetic oligonucleotide
cgggacacccgguucaaag

SEQ ID NO: 2058176 - RNA, 19 nt, Artificial Sequence
  Description of Artificial Sequence: Synthetic oligonucleotide
auccugacauugaccaaau

SEQ ID NO: 2058177 - RNA, 19 nt, Artificial Sequence
  Description of Artificial Sequence: Synthetic oligonucleotide
cuacacagcgaggcgcuca

SEQ ID NO: 2058178 - RNA, 19 nt, Artificial Sequence
  Description of Artificial Sequence: Synthetic oligonucleotide
agcgggucuuuaacacauc

SEQ ID NO: 2058179 - RNA, 19 nt, Artificial Sequence
  Description of Artificial Sequence: Synthetic oligonucleotide
gguuccagccgcgggacac

SEQ ID NO: 2058180 - RNA, 19 nt, Artificial Sequence
  Description of Artificial Sequence: Synthetic oligonucleotide
cauggcccagguguccgug

SEQ ID NO: 2058181 - RNA, 19 nt, Artificial Sequence
  Description of Artificial Sequence: Synthetic oligonucleotide
uugcacccgagaagagcuu

SEQ ID NO: 2058182 - RNA, 19 nt, Artificial Sequence
  Description of Artificial Sequence: Synthetic oligonucleotide
ggccauuguagagcgccag

SEQ ID NO: 2058183 - RNA, 19 nt, Artificial Sequence
  Description of Artificial Sequence: Synthetic oligonucleotide
guguccgugguggggucag

SEQ ID NO: 2058184 - RNA, 19 nt, Artificial Sequence
  Description of Artificial Sequence: Synthetic oligonucleotide
uagcgggugcgugcagcag

SEQ ID NO: 2058185 - RNA, 19 nt, Artificial Sequence
  Description of Artificial Sequence: Synthetic oligonucleotide
cuucacgggccacacggua

SEQ ID NO: 2058186 - RNA, 19 nt, Artificial Sequence
  Description of Artificial Sequence: Synthetic oligonucleotide
caggucuagcgggugcgug

SEQ ID NO: 2058187 - RNA, 19 nt, Artificial Sequence
  Description of Artificial Sequence: Synthetic oligonucleotide
ggccaagaaggggagucug

SEQ ID NO: 2058188 - RNA, 19 nt, Artificial Sequence
  Description of Artificial Sequence: Synthetic oligonucleotide
ggaugcccgcaggaaagag

SEQ ID NO: 2058189 - RNA, 19 nt, Artificial Sequence
  Description of Artificial Sequence: Synthetic oligonucleotide
ggcacucugaugccaaagu

SEQ ID NO: 2058190 - RNA, 19 nt, Artificial Sequence
  Description of Artificial Sequence: Synthetic oligonucleotide
uagucccgcauggucucgu

SEQ ID NO: 2058191 - RNA, 19 nt, Artificial Sequence
  Description of Artificial Sequence: Synthetic oligonucleotide
agacggaugcccgcaggaa

SEQ ID NO: 2058192 - RNA, 19 nt, Artificial Sequence
  Description of Artificial Sequence: Synthetic oligonucleotide
ccgagcauggcccaggugu

SEQ ID NO: 2058193 - RNA, 19 nt, Artificial Sequence
  Description of Artificial Sequence: Synthetic oligonucleotide
caggaaagaggcccuugua

SEQ ID NO: 2058194 - RNA, 19 nt, Artificial Sequence
  Description of Artificial Sequence: Synthetic oligonucleotide
guuccagccgcgggacacc

SEQ ID NO: 2058195 - RNA, 19 nt, Artificial Sequence
  Description of Artificial Sequence: Synthetic oligonucleotide
augugcgcgcuucggccau

SEQ ID NO: 2058196 - RNA, 19 nt, Artificial Sequence
  Description of Artificial Sequence: Synthetic oligonucleotide
gucagggaguaggucaucu

SEQ ID NO: 2058197 - RNA, 19 nt, Artificial Sequence
  Description of Artificial Sequence: Synthetic oligonucleotide
cagugaccagggccccgcg

SEQ ID NO: 2058198 - RNA, 19 nt, Artificial Sequence
  Description of Artificial Sequence: Synthetic oligonucleotide
gccauucccgucaugcgca

SEQ ID NO: 2058199 - RNA, 19 nt, Artificial Sequence
  Description of Artificial Sequence: Synthetic oligonucleotide
cacaggaauguggcacauc

SEQ ID NO: 2058200 - RNA, 19 nt, Artificial Sequence
  Description of Artificial Sequence: Synthetic oligonucleotide
cauucccgucaugcgcagc

SEQ ID NO: 2058201 - RNA, 19 nt, Artificial Sequence
  Description of Artificial Sequence: Synthetic oligonucleotide
gugaccgagcauggcccag

SEQ ID NO: 2058202 - RNA, 19 nt, Artificial Sequence
  Description of Artificial Sequence: Synthetic oligonucleotide
cgccauucccgucaugcgc

SEQ ID NO: 2058203 - RNA, 19 nt, Artificial Sequence
  Description of Artificial Sequence: Synthetic oligonucleotide
gccaucgguucgcaccacc

SEQ ID NO: 2058204 - RNA, 19 nt, Artificial Sequence
  Description of Artificial Sequence: Synthetic oligonucleotide
ccaccugcagcgccauucc

SEQ ID NO: 2058205 - RNA, 19 nt, Artificial Sequence
  Description of Artificial Sequence: Synthetic oligonucleotide
gggagucugcuccccuccc

SEQ ID NO: 2058206 - RNA, 19 nt, Artificial Sequence
  Description of Artificial Sequence: Synthetic oligonucleotide
gggaguaggucaucugccu

SEQ ID NO: 2058207 - RNA, 19 nt, Artificial Sequence
  Description of Artificial Sequence: Synthetic oligonucleotide
gucuagcgggugcgugcag

SEQ ID NO: 2058208 - RNA, 19 nt, Artificial Sequence
  Description of Artificial Sequence: Synthetic oligonucleotide
guggggucagguuggcacu

SEQ ID NO: 2058209 - RNA, 19 nt, Artificial Sequence
  Description of Artificial Sequence: Synthetic oligonucleotide
aggaagccaucgguucgca

SEQ ID NO: 2058210 - RNA, 19 nt, Artificial Sequence
  Description of Artificial Sequence: Synthetic oligonucleotide
ccuccaguuaaaccacuga

SEQ ID NO: 2058211 - RNA, 19 nt, Artificial Sequence
  Description of Artificial Sequence: Synthetic oligonucleotide
ugcgcgcuucggccauggc

SEQ ID NO: 2058212 - RNA, 19 nt, Artificial Sequence
  Description of Artificial Sequence: Synthetic oligonucleotide
gcgcucaggccauuguaga

SEQ ID NO: 2058213 - RNA, 19 nt, Artificial Sequence
  Description of Artificial Sequence: Synthetic oligonucleotide
cgcgcuucggccauggcca

SEQ ID NO: 2058214 - RNA, 19 nt, Artificial Sequence
  Description of Artificial Sequence: Synthetic oligonucleotide
ccacgaagccuccaguuaa

SEQ ID NO: 2058215 - RNA, 19 nt, Artificial Sequence
  Description of Artificial Sequence: Synthetic oligonucleotide
caguggaaaacacccugau

SEQ ID NO: 2058216 - RNA, 19 nt, Artificial Sequence
  Description of Artificial Sequence: Synthetic oligonucleotide
ccaugguugcacccgagaa

SEQ ID NO: 2058217 - RNA, 19 nt, Artificial Sequence
  Description of Artificial Sequence: Synthetic oligonucleotide
augcgcagcuuuacuuccu

SEQ ID NO: 2058218 - RNA, 19 nt, Artificial Sequence
  Description of Artificial Sequence: Synthetic oligonucleotide
gugcgcgcuucggccaugg

SEQ ID NO: 2058219 - RNA, 19 nt, Artificial Sequence
  Description of Artificial Sequence: Synthetic oligonucleotide
gcuuugcggucuccauugc

SEQ ID NO: 2058220 - RNA, 19 nt, Artificial Sequence
  Description of Artificial Sequence: Synthetic oligonucleotide
gugccaccgagcgcccgcg

SEQ ID NO: 2058221 - RNA, 19 nt, Artificial Sequence
  Description of Artificial Sequence: Synthetic oligonucleotide
agccaucgguucgcaccac

SEQ ID NO: 2058222 - RNA, 19 nt, Artificial Sequence
  Description of Artificial Sequence: Synthetic oligonucleotide
gccaugguugcacccgaga

SEQ ID NO: 2058223 - RNA, 19 nt, Artificial Sequence
  Description of Artificial Sequence: Synthetic oligonucleotide
ggucuccauugcacagugg

SEQ ID NO: 2058224 - RNA, 19 nt, Artificial Sequence
  Description of Artificial Sequence: Synthetic oligonucleotide
gguuggcacucugaugcca

SEQ ID NO: 2058225 - RNA, 19 nt, Artificial Sequence
  Description of Artificial Sequence: Synthetic oligonucleotide
ggagucugcuccccuccca

SEQ ID NO: 2058226 - RNA, 19 nt, Artificial Sequence
  Description of Artificial Sequence: Synthetic oligonucleotide
caagcuuugcggucuccau

SEQ ID NO: 2058227 - RNA, 19 nt, Artificial Sequence
  Description of Artificial Sequence: Synthetic oligonucleotide
ccccaaaguaccaccgaga

SEQ ID NO: 2058228 - RNA, 19 nt, Artificial Sequence
  Description of Artificial Sequence: Synthetic oligonucleotide
ccgagaugugcgcgcuucg

SEQ ID NO: 2058229 - RNA, 19 nt, Artificial Sequence
  Description of Artificial Sequence: Synthetic oligonucleotide
gggacacccgguucaaagu

SEQ ID NO: 2058230 - RNA, 19 nt, Artificial Sequence
  Description of Artificial Sequence: Synthetic oligonucleotide
agucccgcauggucucgua

SEQ ID NO: 2058231 - RNA, 19 nt, Artificial Sequence
  Description of Artificial Sequence: Synthetic oligonucleotide
accgagcgcccgcgccugg

SEQ ID NO: 2058232 - RNA, 19 nt, Artificial Sequence
  Description of Artificial Sequence: Synthetic oligonucleotide
ggucagguuggcacucuga

SEQ ID NO: 2058233 - RNA, 19 nt, Artificial Sequence
  Description of Artificial Sequence: Synthetic oligonucleotide
ggcaugagaguaguugcgu

SEQ ID NO: 2058234 - RNA, 19 nt, Artificial Sequence
  Description of Artificial Sequence: Synthetic oligonucleotide
ggucuagcgggugcgugca

SEQ ID NO: 2058235 - RNA, 19 nt, Artificial Sequence
  Description of Artificial Sequence: Synthetic oligonucleotide
ugugcgcgcuucggccaug

SEQ ID NO: 2058236 - RNA, 19 nt, Artificial Sequence
  Description of Artificial Sequence: Synthetic oligonucleotide
gaccgagcauggcccaggu

SEQ ID NO: 2058237 - RNA, 19 nt, Artificial Sequence
  Description of Artificial Sequence: Synthetic oligonucleotide
gccaccgagcgcccgcgcc

SEQ ID NO: 2058238 - RNA, 19 nt, Artificial Sequence
  Description of Artificial Sequence: Synthetic oligonucleotide
gggguccccacgaagccuc

SEQ ID NO: 2058239 - RNA, 19 nt, Artificial Sequence
  Description of Artificial Sequence: Synthetic oligonucleotide
cgagaugugcgcgcuucgg

SEQ ID NO: 2058240 - RNA, 19 nt, Artificial Sequence
  Description of Artificial Sequence: Synthetic oligonucleotide
cccugauauucgcccuuag

SEQ ID NO: 2058241 - RNA, 19 nt, Artificial Sequence
  Description of Artificial Sequence: Synthetic oligonucleotide
ccauucccgucaugcgcag

SEQ ID NO: 2058242 - RNA, 19 nt, Artificial Sequence
  Description of Artificial Sequence: Synthetic oligonucleotide
cacugaugccgcccagcaa

SEQ ID NO: 2058243 - RNA, 19 nt, Artificial Sequence
  Description of Artificial Sequence: Synthetic oligonucleotide
cacauccgccugcaaugaa

SEQ ID NO: 2058244 - RNA, 19 nt, Artificial Sequence
  Description of Artificial Sequence: Synthetic oligonucleotide
uucccgucaugcgcagcuu

SEQ ID NO: 2058245 - RNA, 19 nt, Artificial Sequence
  Description of Artificial Sequence: Synthetic oligonucleotide
gcgggugcgugcagcaggc

SEQ ID NO: 2058246 - RNA, 19 nt, Artificial Sequence
  Description of Artificial Sequence: Synthetic oligonucleotide
cgggucuuuaacacaucca

SEQ ID NO: 2058247 - RNA, 19 nt, Artificial Sequence
  Description of Artificial Sequence: Synthetic oligonucleotide
cagcacaacuccgguucca

SEQ ID NO: 2058248 - RNA, 19 nt, Artificial Sequence
  Description of Artificial Sequence: Synthetic oligonucleotide
agcgaggcgcucaggccau

SEQ ID NO: 2058249 - RNA, 19 nt, Artificial Sequence
  Description of Artificial Sequence: Synthetic oligonucleotide
ccgucaugcgcagcuuuac

SEQ ID NO: 2058250 - RNA, 19 nt, Artificial Sequence
  Description of Artificial Sequence: Synthetic oligonucleotide
gcgccuggugcagccaaug

SEQ ID NO: 2058251 - RNA, 19 nt, Artificial Sequence
  Description of Artificial Sequence: Synthetic oligonucleotide
gggcuggcacaggaaugug

SEQ ID NO: 2058252 - RNA, 19 nt, Artificial Sequence
  Description of Artificial Sequence: Synthetic oligonucleotide
gccgcgggacacccgguuc

SEQ ID NO: 2058253 - RNA, 19 nt, Artificial Sequence
  Description of Artificial Sequence: Synthetic oligonucleotide
ccgagucagggaguagguc

SEQ ID NO: 2058254 - RNA, 19 nt, Artificial Sequence
  Description of Artificial Sequence: Synthetic oligonucleotide
ccgcggcuggaugccaugg

SEQ ID NO: 2058255 - RNA, 19 nt, Artificial Sequence
  Description of Artificial Sequence: Synthetic oligonucleotide
ggagaggccccuggcuguc

SEQ ID NO: 2058256 - RNA, 19 nt, Artificial Sequence
  Description of Artificial Sequence: Synthetic oligonucleotide
gguguccguggugggguca

SEQ ID NO: 2058257 - RNA, 19 nt, Artificial Sequence
  Description of Artificial Sequence: Synthetic oligonucleotide
cuggcccggcucggggcag

SEQ ID NO: 2058258 - RNA, 19 nt, Artificial Sequence
  Description of Artificial Sequence: Synthetic oligonucleotide
guggcacauccgccugcaa

SEQ ID NO: 2058259 - RNA, 19 nt, Artificial Sequence
  Description of Artificial Sequence: Synthetic oligonucleotide
gcacaguggaaaacacccu

SEQ ID NO: 2058260 - RNA, 19 nt, Artificial Sequence
  Description of Artificial Sequence: Synthetic oligonucleotide
cccggcucggggcagcaca

SEQ ID NO: 2058261 - RNA, 19 nt, Artificial Sequence
  Description of Artificial Sequence: Synthetic oligonucleotide
ccaucgguucgcaccaccu

SEQ ID NO: 2058262 - RNA, 19 nt, Artificial Sequence
  Description of Artificial Sequence: Synthetic oligonucleotide
cacccugauauucgcccuu

SEQ ID NO: 2058263 - RNA, 19 nt, Artificial Sequence
  Description of Artificial Sequence: Synthetic oligonucleotide
cacccgagaagagcuuccu

SEQ ID NO: 2058264 - RNA, 19 nt, Artificial Sequence
  Description of Artificial Sequence: Synthetic oligonucleotide
gcccuuguaaaaggccugu

SEQ ID NO: 2058265 - RNA, 19 nt, Artificial Sequence
  Description of Artificial Sequence: Synthetic oligonucleotide
cguagauagcgaaccgagu

SEQ ID NO: 2058266 - RNA, 19 nt, Artificial Sequence
  Description of Artificial Sequence: Synthetic oligonucleotide
cgguucgcaccaccugcag

SEQ ID NO: 2058267 - RNA, 19 nt, Artificial Sequence
  Description of Artificial Sequence: Synthetic oligonucleotide
ccgcgggacacccgguuca

SEQ ID NO: 2058268 - RNA, 19 nt, Artificial Sequence
  Description of Artificial Sequence: Synthetic oligonucleotide
gccuacacagcgaggcgcu

SEQ ID NO: 2058269 - RNA, 19 nt, Artificial Sequence
  Description of Artificial Sequence: Synthetic oligonucleotide
cagcacagugaccgagcau

SEQ ID NO: 2058270 - RNA, 19 nt, Artificial Sequence
  Description of Artificial Sequence: Synthetic oligonucleotide
cccgcggcuggaugccaug

SEQ ID NO: 2058271 - RNA, 19 nt, Artificial Sequence
  Description of Artificial Sequence: Synthetic oligonucleotide
cccgucaugcgcagcuuua

SEQ ID NO: 2058272 - RNA, 19 nt, Artificial Sequence
  Description of Artificial Sequence: Synthetic oligonucleotide
gcggcuggaugccaugguu

SEQ ID NO: 2058273 - RNA, 19 nt, Artificial Sequence
  Description of Artificial Sequence: Synthetic oligonucleotide
gcggcuccgcaggaggcca

SEQ ID NO: 2058274 - RNA, 19 nt, Artificial Sequence
  Description of Artificial Sequence: Synthetic oligonucleotide
gcgcagcuuuacuuccugu

SEQ ID NO: 2058275 - RNA, 19 nt, Artificial Sequence
  Description of Artificial Sequence: Synthetic oligonucleotide
gcggucuccauugcacagu

SEQ ID NO: 2058276 - RNA, 19 nt, Artificial Sequence
  Description of Artificial Sequence: Synthetic oligonucleotide
ccuacacagcgaggcgcuc

SEQ ID NO: 2058277 - RNA, 19 nt, Artificial Sequence
  Description of Artificial Sequence: Synthetic oligonucleotide
cgaaccgagucagggagua

SEQ ID NO: 2058278 - RNA, 19 nt, Artificial Sequence
  Description of Artificial Sequence: Synthetic oligonucleotide
cgguucaaagugccaccga

SEQ ID NO: 2058279 - RNA, 19 nt, Artificial Sequence
  Description of Artificial Sequence: Synthetic oligonucleotide
gaggccccuggcuguccuu

SEQ ID NO: 2058280 - RNA, 19 nt, Artificial Sequence
  Description of Artificial Sequence: Synthetic oligonucleotide
cgucgcuggcucaggggca

SEQ ID NO: 2058281 - RNA, 19 nt, Artificial Sequence
  Description of Artificial Sequence: Synthetic oligonucleotide
cugcuccccucccacgcuu

SEQ ID NO: 2058282 - RNA, 19 nt, Artificial Sequence
  Description of Artificial Sequence: Synthetic oligonucleotide
cccgcauggucucguagau

SEQ ID NO: 2058283 - RNA, 19 nt, Artificial Sequence
  Description of Artificial Sequence: Synthetic oligonucleotide
gcgaaccgagucagggagu

SEQ ID NO: 2058284 - RNA, 19 nt, Artificial Sequence
  Description of Artificial Sequence: Synthetic oligonucleotide
ccccacgaagccuccaguu

SEQ ID NO: 2058285 - RNA, 19 nt, Artificial Sequence
  Description of Artificial Sequence: Synthetic oligonucleotide
cgccugcaaugaaacugga

SEQ ID NO: 2058286 - RNA, 19 nt, Artificial Sequence
  Description of Artificial Sequence: Synthetic oligonucleotide
cgagcgcccgcgccuggug

SEQ ID NO: 2058287 - RNA, 19 nt, Artificial Sequence
  Description of Artificial Sequence: Synthetic oligonucleotide
ccacgcuuccagggagcuc

SEQ ID NO: 2058288 - RNA, 19 nt, Artificial Sequence
  Description of Artificial Sequence: Synthetic oligonucleotide
gcaggucuagcgggugcgu

SEQ ID NO: 2058289 - RNA, 19 nt, Artificial Sequence
  Description of Artificial Sequence: Synthetic oligonucleotide
gcaggacagcuggcccaca

SEQ ID NO: 2058290 - RNA, 19 nt, Artificial Sequence
  Description of Artificial Sequence: Synthetic oligonucleotide
cggcuccgcaggaggccag

SEQ ID NO: 2058291 - RNA, 19 nt, Artificial Sequence
  Description of Artificial Sequence: Synthetic oligonucleotide
ccaccgagcgcccgcgccu

SEQ ID NO: 2058292 - RNA, 19 nt, Artificial Sequence
  Description of Artificial Sequence: Synthetic oligonucleotide
cagccgcgggacacccggu

SEQ ID NO: 2058293 - RNA, 19 nt, Artificial Sequence
  Description of Artificial Sequence: Synthetic oligonucleotide
cgggugcgugcagcaggcg

SEQ ID NO: 2058294 - RNA, 19 nt, Artificial Sequence
  Description of Artificial Sequence: Synthetic oligonucleotide
caccgagaugugcgcgcuu

SEQ ID NO: 2058295 - RNA, 19 nt, Artificial Sequence
  Description of Artificial Sequence: Synthetic oligonucleotide
gcgggacacccgguucaaa

SEQ ID NO: 2058296 - RNA, 19 nt, Artificial Sequence
  Description of Artificial Sequence: Synthetic oligonucleotide
ccgcauggucucguagaua

SEQ ID NO: 2058297 - RNA, 19 nt, Artificial Sequence
  Description of Artificial Sequence: Synthetic oligonucleotide
ccaccgagaugugcgcgcu

SEQ ID NO: 2058298 - RNA, 19 nt, Artificial Sequence
  Description of Artificial Sequence: Synthetic oligonucleotide
cccacgcuuccagggagcu

SEQ ID NO: 2058299 - RNA, 19 nt, Artificial Sequence
  Description of Artificial Sequence: Synthetic oligonucleotide
ccagggcaugagaguaguu

SEQ ID NO: 2058300 - RNA, 19 nt, Artificial Sequence
  Description of Artificial Sequence: Synthetic oligonucleotide
cgguuccagccgcgggaca

SEQ ID NO: 2058301 - RNA, 19 nt, Artificial Sequence
  Description of Artificial Sequence: Synthetic oligonucleotide
cccgcgccuggugcagcca

SEQ ID NO: 2058302 - RNA, 19 nt, Artificial Sequence
  Description of Artificial Sequence: Synthetic oligonucleotide
cgcuucggccauggccaga

SEQ ID NO: 2058303 - RNA, 19 nt, Artificial Sequence
  Description of Artificial Sequence: Synthetic oligonucleotide
ccccgcggcuggaugccau

SEQ ID NO: 2058304 - RNA, 19 nt, Artificial Sequence
  Description of Artificial Sequence: Synthetic oligonucleotide
cgcgccuggugcagccaau

SEQ ID NO: 2058305 - RNA, 19 nt, Artificial Sequence
  Description of Artificial Sequence: Synthetic oligonucleotide
ccgagcgcccgcgccuggu

SEQ ID NO: 2058306 - RNA, 19 nt, Artificial Sequence
  Description of Artificial Sequence: Synthetic oligonucleotide
gcgaggcgcucaggccauu

SEQ ID NO: 2058307 - RNA, 19 nt, Artificial Sequence
  Description of Artificial Sequence: Synthetic oligonucleotide
uuuauaagugcaaacagcg

SEQ ID NO: 2058308 - RNA, 19 nt, Artificial Sequence
  Description of Artificial Sequence: Synthetic oligonucleotide
aaguuaugcacccagagca

SEQ ID NO: 2058309 - RNA, 19 nt, Artificial Sequence
  Description of Artificial Sequence: Synthetic oligonucleotide
uauaagugcaaacagcggc

SEQ ID NO: 2058310 - RNA, 19 nt, Artificial Sequence
  Description of Artificial Sequence: Synthetic oligonucleotide
agaaauucaucaaaggugc

SEQ ID NO: 2058311 - RNA, 19 nt, Artificial Sequence
  Description of Artificial Sequence: Synthetic oligonucleotide
aaugacaucagcauugguc

SEQ ID NO: 2058312 - RNA, 19 nt, Artificial Sequence
  Description of Artificial Sequence: Synthetic oligonucleotide
uagacgaaugaucucagcg

SEQ ID NO: 2058313 - RNA, 19 nt, Artificial Sequence
  Description of Artificial Sequence: Synthetic oligonucleotide
cuugauacccucuagcucc

SEQ ID NO: 2058314 - RNA, 19 nt, Artificial Sequence
  Description of Artificial Sequence: Synthetic oligonucleotide
ucuagaaauucaucaaagg

SEQ ID NO: 2058315 - RNA, 19 nt, Artificial Sequence
  Description of Artificial Sequence: Synthetic oligonucleotide
uugaaugacaucagcauug

SEQ ID NO: 2058316 - RNA, 19 nt, Artificial Sequence
  Description of Artificial Sequence: Synthetic oligonucleotide
aaagccaugagcccuaaga

SEQ ID NO: 2058317 - RNA, 19 nt, Artificial Sequence
  Description of Artificial Sequence: Synthetic oligonucleotide
agugcagaaauguugaaug

SEQ ID NO: 2058318 - RNA, 19 nt, Artificial Sequence
  Description of Artificial Sequence: Synthetic oligonucleotide
aagcuugauacccucuagc

SEQ ID NO: 2058319 - RNA, 19 nt, Artificial Sequence
  Description of Artificial Sequence: Synthetic oligonucleotide
ucuuguagacgaaugaucu

SEQ ID NO: 2058320 - RNA, 19 nt, Artificial Sequence
  Description of Artificial Sequence: Synthetic oligonucleotide
aaccaacuuuuauaagugc

SEQ ID NO: 2058321 - RNA, 19 nt, Artificial Sequence
  Description of Artificial Sequence: Synthetic oligonucleotide
gaugauguacucuuuuacc

SEQ ID NO: 2058322 - RNA, 19 nt, Artificial Sequence
  Description of Artificial Sequence: Synthetic oligonucleotide
aagaucuuucaagggaucc

SEQ ID NO: 2058323 - RNA, 19 nt, Artificial Sequence
  Description of Artificial Sequence: Synthetic oligonucleotide
gaugauuuccuccaggguc

SEQ ID NO: 2058324 - RNA, 19 nt, Artificial Sequence
  Description of Artificial Sequence: Synthetic oligonucleotide
auuccggauacuccuaacc

SEQ ID NO: 2058325 - RNA, 19 nt, Artificial Sequence
  Description of Artificial Sequence: Synthetic oligonucleotide
uuauaagugcaaacagcgg

SEQ ID NO: 2058326 - RNA, 19 nt, Artificial Sequence
  Description of Artificial Sequence: Synthetic oligonucleotide
uugauguuggcgaugacgu

SEQ ID NO: 2058327 - RNA, 19 nt, Artificial Sequence
  Description of Artificial Sequence: Synthetic oligonucleotide
uccaguauauuccggauac

SEQ ID NO: 2058328 - RNA, 19 nt, Artificial Sequence
  Description of Artificial Sequence: Synthetic oligonucleotide
ucgaacugcgccaaggugc

SEQ ID NO: 2058329 - RNA, 19 nt, Artificial Sequence
  Description of Artificial Sequence: Synthetic oligonucleotide
aaagcuaaccaacuuuuau

SEQ ID NO: 2058330 - RNA, 19 nt, Artificial Sequence
  Description of Artificial Sequence: Synthetic oligonucleotide
ugagcauccccaacuaggg

SEQ ID NO: 2058331 - RNA, 19 nt, Artificial Sequence
  Description of Artificial Sequence: Synthetic oligonucleotide
aggggauccauucugagug

SEQ ID NO: 2058332 - RNA, 19 nt, Artificial Sequence
  Description of Artificial Sequence: Synthetic oligonucleotide
agcagcaacaaguaggugu

SEQ ID NO: 2058333 - RNA, 19 nt, Artificial Sequence
  Description of Artificial Sequence: Synthetic oligonucleotide
auacuccuaaccucgcugc

SEQ ID NO: 2058334 - RNA, 19 nt, Artificial Sequence
  Description of Artificial Sequence: Synthetic oligonucleotide
acauuuggaaaagcuaacc

SEQ ID NO: 2058335 - RNA, 19 nt, Artificial Sequence
  Description of Artificial Sequence: Synthetic oligonucleotide
ugagaacucaggcaggcug

SEQ ID NO: 2058336 - RNA, 19 nt, Artificial Sequence
  Description of Artificial Sequence: Synthetic oligonucleotide
aaguaggugucccucucac

SEQ ID NO: 2058337 - RNA, 19 nt, Artificial Sequence
  Description of Artificial Sequence: Synthetic oligonucleotide
agaaguuaugcacccagag

SEQ ID NO: 2058338 - RNA, 19 nt, Artificial Sequence
  Description of Artificial Sequence: Synthetic oligonucleotide
guugauguccaguauauuc

SEQ ID NO: 2058339 - RNA, 19 nt, Artificial Sequence
  Description of Artificial Sequence: Synthetic oligonucleotide
aguauauuccggauacucc

SEQ ID NO: 2058340 - RNA, 19 nt, Artificial Sequence
  Description of Artificial Sequence: Synthetic oligonucleotide
ucuuuuaccaggugcaggu

SEQ ID NO: 2058341 - RNA, 19 nt, Artificial Sequence
  Description of Artificial Sequence: Synthetic oligonucleotide
aacucaggcaggcugacgu

SEQ ID NO: 2058342 - RNA, 19 nt, Artificial Sequence
  Description of Artificial Sequence: Synthetic oligonucleotide
ugauguccaguauauuccg

SEQ ID NO: 2058343 - RNA, 19 nt, Artificial Sequence
  Description of Artificial Sequence: Synthetic oligonucleotide
agaaauguugaaugacauc

SEQ ID NO: 2058344 - RNA, 19 nt, Artificial Sequence
  Description of Artificial Sequence: Synthetic oligonucleotide
uuuggggcuguucagaauc

SEQ ID NO: 2058345 - RNA, 19 nt, Artificial Sequence
  Description of Artificial Sequence: Synthetic oligonucleotide
gggagauuucccuugaugg

SEQ ID NO: 2058346 - RNA, 19 nt, Artificial Sequence
  Description of Artificial Sequence: Synthetic oligonucleotide
uacucuuuuaccaggugca

SEQ ID NO: 2058347 - RNA, 19 nt, Artificial Sequence
  Description of Artificial Sequence: Synthetic oligonucleotide
aaccuggucuguuuagggg

SEQ ID NO: 2058348 - RNA, 19 nt, Artificial Sequence
  Description of Artificial Sequence: Synthetic oligonucleotide
auaagugcaaacagcggcc

SEQ ID NO: 2058349 - RNA, 19 nt, Artificial Sequence
  Description of Artificial Sequence: Synthetic oligonucleotide
augauguacucuuuuacca

SEQ ID NO: 2058350 - RNA, 19 nt, Artificial Sequence
  Description of Artificial Sequence: Synthetic oligonucleotide
gacgaaugaucucagcgag

SEQ ID NO: 2058351 - RNA, 19 nt, Artificial Sequence
  Description of Artificial Sequence: Synthetic oligonucleotide
uaauuucucagcaguuugc

SEQ ID NO: 2058352 - RNA, 19 nt, Artificial Sequence
  Description of Artificial Sequence: Synthetic oligonucleotide
gaaguuaugcacccagagc

SEQ ID NO: 2058353 - RNA, 19 nt, Artificial Sequence
  Description of Artificial Sequence: Synthetic oligonucleotide
aguagugcagccuucacau

SEQ ID NO: 2058354 - RNA, 19 nt, Artificial Sequence
  Description of Artificial Sequence: Synthetic oligonucleotide
cagcacaucagacauuugg

SEQ ID NO: 2058355 - RNA, 19 nt, Artificial Sequence
  Description of Artificial Sequence: Synthetic oligonucleotide
uucaagggauccaacaggu

SEQ ID NO: 2058356 - RNA, 19 nt, Artificial Sequence
  Description of Artificial Sequence: Synthetic oligonucleotide
aucuuaauggcacuggaau

SEQ ID NO: 2058357 - RNA, 19 nt, Artificial Sequence
  Description of Artificial Sequence: Synthetic oligonucleotide
cuagggaggugucugaugc

SEQ ID NO: 2058358 - RNA, 19 nt, Artificial Sequence
  Description of Artificial Sequence: Synthetic oligonucleotide
guagaaguuaugcacccag

SEQ ID NO: 2058359 - RNA, 19 nt, Artificial Sequence
  Description of Artificial Sequence: Synthetic oligonucleotide
cuuucaagggauccaacag

SEQ ID NO: 2058360 - RNA, 19 nt, Artificial Sequence
  Description of Artificial Sequence: Synthetic oligonucleotide
gauacuccuaaccucgcug

SEQ ID NO: 2058361 - RNA, 19 nt, Artificial Sequence
  Description of Artificial Sequence: Synthetic oligonucleotide
acaucagacauuuggaaaa

SEQ ID NO: 2058362 - RNA, 19 nt, Artificial Sequence
  Description of Artificial Sequence: Synthetic oligonucleotide
uuguagacgaaugaucuca

SEQ ID NO: 2058363 - RNA, 19 nt, Artificial Sequence
  Description of Artificial Sequence: Synthetic oligonucleotide
aagcuaaccaacuuuuaua

SEQ ID NO: 2058364 - RNA, 19 nt, Artificial Sequence
  Description of Artificial Sequence: Synthetic oligonucleotide
gucccucucacacagcucg

SEQ ID NO: 2058365 - RNA, 19 nt, Artificial Sequence
  Description of Artificial Sequence: Synthetic oligonucleotide
uuggucaccucauuggaca

SEQ ID NO: 2058366 - RNA, 19 nt, Artificial Sequence
  Description of Artificial Sequence: Synthetic oligonucleotide
uguguugauguccaguaua

SEQ ID NO: 2058367 - RNA, 19 nt, Artificial Sequence
  Description of Artificial Sequence: Synthetic oligonucleotide
acguccacaguacugauga

SEQ ID NO: 2058368 - RNA, 19 nt, Artificial Sequence
  Description of Artificial Sequence: Synthetic oligonucleotide
ugucccgaaggacaggcag

SEQ ID NO: 2058369 - RNA, 19 nt, Artificial Sequence
  Description of Artificial Sequence: Synthetic oligonucleotide
accucaaucuuaauggcac

SEQ ID NO: 2058370 - RNA, 19 nt, Artificial Sequence
  Description of Artificial Sequence: Synthetic oligonucleotide
uggcacuggaaucuuguag

SEQ ID NO: 2058371 - RNA, 19 nt, Artificial Sequence
  Description of Artificial Sequence: Synthetic oligonucleotide
aaggugcgcugguagcucc

SEQ ID NO: 2058372 - RNA, 19 nt, Artificial Sequence
  Description of Artificial Sequence: Synthetic oligonucleotide
uguagacgaaugaucucag

SEQ ID NO: 2058373 - RNA, 19 nt, Artificial Sequence
  Description of Artificial Sequence: Synthetic oligonucleotide
gaaucuuguagacgaauga

SEQ ID NO: 2058374 - RNA, 19 nt, Artificial Sequence
  Description of Artificial Sequence: Synthetic oligonucleotide
agguaucugccacuucugc

SEQ ID NO: 2058375 - RNA, 19 nt, Artificial Sequence
  Description of Artificial Sequence: Synthetic oligonucleotide
ucuuaauggcacuggaauc

SEQ ID NO: 2058376 - RNA, 19 nt, Artificial Sequence
  Description of Artificial Sequence: Synthetic oligonucleotide
aaucuuguagacgaaugau

SEQ ID NO: 2058377 - RNA, 19 nt, Artificial Sequence
  Description of Artificial Sequence: Synthetic oligonucleotide
guaggugucccucucacac

SEQ ID NO: 2058378 - RNA, 19 nt, Artificial Sequence
  Description of Artificial Sequence: Synthetic oligonucleotide
aauuuggggcuguucagaa

SEQ ID NO: 2058379 - RNA, 19 nt, Artificial Sequence
  Description of Artificial Sequence: Synthetic oligonucleotide
uuuaccaggugcaggugca

SEQ ID NO: 2058380 - RNA, 19 nt, Artificial Sequence
  Description of Artificial Sequence: Synthetic oligonucleotide
aacaaguaggugucccucu

SEQ ID NO: 2058381 - RNA, 19 nt, Artificial Sequence
  Description of Artificial Sequence: Synthetic oligonucleotide
uuccggauacuccuaaccu

SEQ ID NO: 2058382 - RNA, 19 nt, Artificial Sequence
  Description of Artificial Sequence: Synthetic oligonucleotide
agccaugagcccuaagauc

SEQ ID NO: 2058383 - RNA, 19 nt, Artificial Sequence
  Description of Artificial Sequence: Synthetic oligonucleotide
uugaacaguggcuucaguu

SEQ ID NO: 2058384 - RNA, 19 nt, Artificial Sequence
  Description of Artificial Sequence: Synthetic oligonucleotide
ugcgccaaggugcacaggu

SEQ ID NO: 2058385 - RNA, 19 nt, Artificial Sequence
  Description of Artificial Sequence: Synthetic oligonucleotide
aucuuguagacgaaugauc

SEQ ID NO: 2058386 - RNA, 19 nt, Artificial Sequence
  Description of Artificial Sequence: Synthetic oligonucleotide
agcuugauacccucuagcu

SEQ ID NO: 2058387 - RNA, 19 nt, Artificial Sequence
  Description of Artificial Sequence: Synthetic oligonucleotide
cuagaaauucaucaaaggu

SEQ ID NO: 2058388 - RNA, 19 nt, Artificial Sequence
  Description of Artificial Sequence: Synthetic oligonucleotide
aguggcuucaguucugcga

SEQ ID NO: 2058389 - RNA, 19 nt, Artificial Sequence
  Description of Artificial Sequence: Synthetic oligonucleotide
aaggcgucaaagccaugag

SEQ ID NO: 2058390 - RNA, 19 nt, Artificial Sequence
  Description of Artificial Sequence: Synthetic oligonucleotide
gugaacuucuugaacagug

SEQ ID NO: 2058391 - RNA, 19 nt, Artificial Sequence
  Description of Artificial Sequence: Synthetic oligonucleotide
gaacacagccuccagcaac

SEQ ID NO: 2058392 - RNA, 19 nt, Artificial Sequence
  Description of Artificial Sequence: Synthetic oligonucleotide
agacauuuggaaaagcuaa

SEQ ID NO: 2058393 - RNA, 19 nt, Artificial Sequence
  Description of Artificial Sequence: Synthetic oligonucleotide
cucagcgagcuuaggaagg

SEQ ID NO: 2058394 - RNA, 19 nt, Artificial Sequence
  Description of Artificial Sequence: Synthetic oligonucleotide
ugcgaacaggcccuggagc

SEQ ID NO: 2058395 - RNA, 19 nt, Artificial Sequence
  Description of Artificial Sequence: Synthetic oligonucleotide
ucugaugcuggcugcgugc

SEQ ID NO: 2058396 - RNA, 19 nt, Artificial Sequence
  Description of Artificial Sequence: Synthetic oligonucleotide
ggagcaaggcgucaaagcc

SEQ ID NO: 2058397 - RNA, 19 nt, Artificial Sequence
  Description of Artificial Sequence: Synthetic oligonucleotide
agcuccuuugccaauuugg

SEQ ID NO: 2058398 - RNA, 19 nt, Artificial Sequence
  Description of Artificial Sequence: Synthetic oligonucleotide
augacguuggcccuguaau

SEQ ID NO: 2058399 - RNA, 19 nt, Artificial Sequence
  Description of Artificial Sequence: Synthetic oligonucleotide
gaucucagcgagcuuagga

SEQ ID NO: 2058400 - RNA, 19 nt, Artificial Sequence
  Description of Artificial Sequence: Synthetic oligonucleotide
uuugcugagucggaugaug

SEQ ID NO: 2058401 - RNA, 19 nt, Artificial Sequence
  Description of Artificial Sequence: Synthetic oligonucleotide
caguucugcgaacaggccc

SEQ ID NO: 2058402 - RNA, 19 nt, Artificial Sequence
  Description of Artificial Sequence: Synthetic oligonucleotide
cauucugagugcagaaaug

SEQ ID NO: 2058403 - RNA, 19 nt, Artificial Sequence
  Description of Artificial Sequence: Synthetic oligonucleotide
gugugaacuucuugaacag

SEQ ID NO: 2058404 - RNA, 19 nt, Artificial Sequence
  Description of Artificial Sequence: Synthetic oligonucleotide
caaccuggucuguuuaggg

SEQ ID NO: 2058405 - RNA, 19 nt, Artificial Sequence
  Description of Artificial Sequence: Synthetic oligonucleotide
uugcaggggauccauucug

SEQ ID NO: 2058406 - RNA, 19 nt, Artificial Sequence
  Description of Artificial Sequence: Synthetic oligonucleotide
accggcguggcccagcggg

SEQ ID NO: 2058407 - RNA, 19 nt, Artificial Sequence
  Description of Artificial Sequence: Synthetic oligonucleotide
gaugucccgaaggacaggc

SEQ ID NO: 2058408 - RNA, 19 nt, Artificial Sequence
  Description of Artificial Sequence: Synthetic oligonucleotide
uaaccucgcugcuugggag

SEQ ID NO: 2058409 - RNA, 19 nt, Artificial Sequence
  Description of Artificial Sequence: Synthetic oligonucleotide
cacauuggucaccucauug

SEQ ID NO: 2058410 - RNA, 19 nt, Artificial Sequence
  Description of Artificial Sequence: Synthetic oligonucleotide
aucucagcgagcuuaggaa

SEQ ID NO: 2058411 - RNA, 19 nt, Artificial Sequence
  Description of Artificial Sequence: Synthetic oligonucleotide
uagaaguuaugcacccaga

SEQ ID NO: 2058412 - RNA, 19 nt, Artificial Sequence
  Description of Artificial Sequence: Synthetic oligonucleotide
auguugaaugacaucagca

SEQ ID NO: 2058413 - RNA, 19 nt, Artificial Sequence
  Description of Artificial Sequence: Synthetic oligonucleotide
aaaggugcgcugguagcuc

SEQ ID NO: 2058414 - RNA, 19 nt, Artificial Sequence
  Description of Artificial Sequence: Synthetic oligonucleotide
cugagugcagaaauguuga

SEQ ID NO: 2058415 - RNA, 19 nt, Artificial Sequence
  Description of Artificial Sequence: Synthetic oligonucleotide
ugcuuuucucuagaaauuc

SEQ ID NO: 2058416 - RNA, 19 nt, Artificial Sequence
  Description of Artificial Sequence: Synthetic oligonucleotide
uaagaucuuucaagggauc

SEQ ID NO: 2058417 - RNA, 19 nt, Artificial Sequence
  Description of Artificial Sequence: Synthetic oligonucleotide
ugagcccuaagaucuuuca

SEQ ID NO: 2058418 - RNA, 19 nt, Artificial Sequence
  Description of Artificial Sequence: Synthetic oligonucleotide
ggcgucaaagccaugagcc

SEQ ID NO: 2058419 - RNA, 19 nt, Artificial Sequence
  Description of Artificial Sequence: Synthetic oligonucleotide
ucugcgaacaggcccugga

SEQ ID NO: 2058420 - RNA, 19 nt, Artificial Sequence
  Description of Artificial Sequence: Synthetic oligonucleotide
cagaaucucauugggguag

SEQ ID NO: 2058421 - RNA, 19 nt, Artificial Sequence
  Description of Artificial Sequence: Synthetic oligonucleotide
gcccuaagaucuuucaagg

SEQ ID NO: 2058422 - RNA, 19 nt, Artificial Sequence
  Description of Artificial Sequence: Synthetic oligonucleotide
guauauuccggauacuccu

SEQ ID NO: 2058423 - RNA, 19 nt, Artificial Sequence
  Description of Artificial Sequence: Synthetic oligonucleotide
acccucuagcuccuuugcc

SEQ ID NO: 2058424 - RNA, 19 nt, Artificial Sequence
  Description of Artificial Sequence: Synthetic oligonucleotide
uugcugagucggaugaugu

SEQ ID NO: 2058425 - RNA, 19 nt, Artificial Sequence
  Description of Artificial Sequence: Synthetic oligonucleotide
ggucuugaggaccaggcgc

SEQ ID NO: 2058426 - RNA, 19 nt, Artificial Sequence
  Description of Artificial Sequence: Synthetic oligonucleotide
uggcccuguaauuucucag

SEQ ID NO: 2058427 - RNA, 19 nt, Artificial Sequence
  Description of Artificial Sequence: Synthetic oligonucleotide
aaucuuaauggcacuggaa

SEQ ID NO: 2058428 - RNA, 19 nt, Artificial Sequence
  Description of Artificial Sequence: Synthetic oligonucleotide
auuggucaccucauuggac

SEQ ID NO: 2058429 - RNA, 19 nt, Artificial Sequence
  Description of Artificial Sequence: Synthetic oligonucleotide
auacccucuagcuccuuug

SEQ ID NO: 2058430 - RNA, 19 nt, Artificial Sequence
  Description of Artificial Sequence: Synthetic oligonucleotide
ucucauugggguagaaguu

SEQ ID NO: 2058431 - RNA, 19 nt, Artificial Sequence
  Description of Artificial Sequence: Synthetic oligonucleotide
caguauauuccggauacuc

SEQ ID NO: 2058432 - RNA, 19 nt, Artificial Sequence
  Description of Artificial Sequence: Synthetic oligonucleotide
cucaucagcacaucagaca

SEQ ID NO: 2058433 - RNA, 19 nt, Artificial Sequence
  Description of Artificial Sequence: Synthetic oligonucleotide
ggaugauguacucuuuuac

SEQ ID NO: 2058434 - RNA, 19 nt, Artificial Sequence
  Description of Artificial Sequence: Synthetic oligonucleotide
aggugcacggccuccauga

SEQ ID NO: 2058435 - RNA, 19 nt, Artificial Sequence
  Description of Artificial Sequence: Synthetic oligonucleotide
uauauuccggauacuccua

SEQ ID NO: 2058436 - RNA, 19 nt, Artificial Sequence
  Description of Artificial Sequence: Synthetic oligonucleotide
ucaagggauccaacaggug

SEQ ID NO: 2058437 - RNA, 19 nt, Artificial Sequence
  Description of Artificial Sequence: Synthetic oligonucleotide
uccggauacuccuaaccuc

SEQ ID NO: 2058438 - RNA, 19 nt, Artificial Sequence
  Description of Artificial Sequence: Synthetic oligonucleotide
ggagauuucccuugauggc

SEQ ID NO: 2058439 - RNA, 19 nt, Artificial Sequence
  Description of Artificial Sequence: Synthetic oligonucleotide
acaguggcuucaguucugc

SEQ ID NO: 2058440 - RNA, 19 nt, Artificial Sequence
  Description of Artificial Sequence: Synthetic oligonucleotide
cucaaucuuaauggcacug

SEQ ID NO: 2058441 - RNA, 19 nt, Artificial Sequence
  Description of Artificial Sequence: Synthetic oligonucleotide
cuuguagacgaaugaucuc

SEQ ID NO: 2058442 - RNA, 19 nt, Artificial Sequence
  Description of Artificial Sequence: Synthetic oligonucleotide
caagcuugauacccucuag

SEQ ID NO: 2058443 - RNA, 19 nt, Artificial Sequence
  Description of Artificial Sequence: Synthetic oligonucleotide
acguuggcccuguaauuuc

SEQ ID NO: 2058444 - RNA, 19 nt, Artificial Sequence
  Description of Artificial Sequence: Synthetic oligonucleotide
aaacagcggccuggaaggc

SEQ ID NO: 2058445 - RNA, 19 nt, Artificial Sequence
  Description of Artificial Sequence: Synthetic oligonucleotide
aggaccaggcgccguuugc

SEQ ID NO: 2058446 - RNA, 19 nt, Artificial Sequence
  Description of Artificial Sequence: Synthetic oligonucleotide
ugcaggggauccauucuga

SEQ ID NO: 2058447 - RNA, 19 nt, Artificial Sequence
  Description of Artificial Sequence: Synthetic oligonucleotide
uacccucuagcuccuuugc

SEQ ID NO: 2058448 - RNA, 19 nt, Artificial Sequence
  Description of Artificial Sequence: Synthetic oligonucleotide
ggcacuggaaucuuguaga

SEQ ID NO: 2058449 - RNA, 19 nt, Artificial Sequence
  Description of Artificial Sequence: Synthetic oligonucleotide
uccucggucuugaggacca

SEQ ID NO: 2058450 - RNA, 19 nt, Artificial Sequence
  Description of Artificial Sequence: Synthetic oligonucleotide
ccggauacuccuaaccucg

SEQ ID NO: 2058451 - RNA, 19 nt, Artificial Sequence
  Description of Artificial Sequence: Synthetic oligonucleotide
aucagcacaucagacauuu

SEQ ID NO: 2058452 - RNA, 19 nt, Artificial Sequence
  Description of Artificial Sequence: Synthetic oligonucleotide
aacugcgccaaggugcaca

SEQ ID NO: 2058453 - RNA, 19 nt, Artificial Sequence
  Description of Artificial Sequence: Synthetic oligonucleotide
uggucaccucauuggacag

SEQ ID NO: 2058454 - RNA, 19 nt, Artificial Sequence
  Description of Artificial Sequence: Synthetic oligonucleotide
gaaggacaggcaguuguug

SEQ ID NO: 2058455 - RNA, 19 nt, Artificial Sequence
  Description of Artificial Sequence: Synthetic oligonucleotide
ugcuccauggaugucccga

SEQ ID NO: 2058456 - RNA, 19 nt, Artificial Sequence
  Description of Artificial Sequence: Synthetic oligonucleotide
ucggaugauguacucuuuu

SEQ ID NO: 2058457 - RNA, 19 nt, Artificial Sequence
  Description of Artificial Sequence: Synthetic oligonucleotide
gacuccugagguaucugcc

SEQ ID NO: 2058458 - RNA, 19 nt, Artificial Sequence
  Description of Artificial Sequence: Synthetic oligonucleotide
cuccuaaccucgcugcuug

SEQ ID NO: 2058459 - RNA, 19 nt, Artificial Sequence
  Description of Artificial Sequence: Synthetic oligonucleotide
auauuccggauacuccuaa

SEQ ID NO: 2058460 - RNA, 19 nt, Artificial Sequence
  Description of Artificial Sequence: Synthetic oligonucleotide
guagacgaaugaucucagc

SEQ ID NO: 2058461 - RNA, 19 nt, Artificial Sequence
  Description of Artificial Sequence: Synthetic oligonucleotide
uagcuccucaguagugcag

SEQ ID NO: 2058462 - RNA, 19 nt, Artificial Sequence
  Description of Artificial Sequence: Synthetic oligonucleotide
ggaaucuuguagacgaaug

SEQ ID NO: 2058463 - RNA, 19 nt, Artificial Sequence
  Description of Artificial Sequence: Synthetic oligonucleotide
acgaaugaucucagcgagc

SEQ ID NO: 2058464 - RNA, 19 nt, Artificial Sequence
  Description of Artificial Sequence: Synthetic oligonucleotide
cuuaauggcacuggaaucu

SEQ ID NO: 2058465 - RNA, 19 nt, Artificial Sequence
  Description of Artificial Sequence: Synthetic oligonucleotide
aguucugcgaacaggcccu

SEQ ID NO: 2058466 - RNA, 19 nt, Artificial Sequence
  Description of Artificial Sequence: Synthetic oligonucleotide
cuaagaucuuucaagggau

SEQ ID NO: 2058467 - RNA, 19 nt, Artificial Sequence
  Description of Artificial Sequence: Synthetic oligonucleotide
acugcgccaaggugcacag

SEQ ID NO: 2058468 - RNA, 19 nt, Artificial Sequence
  Description of Artificial Sequence: Synthetic oligonucleotide
ucaguagugcagccuucac

SEQ ID NO: 2058469 - RNA, 19 nt, Artificial Sequence
  Description of Artificial Sequence: Synthetic oligonucleotide
uaagugcaaacagcggccu

SEQ ID NO: 2058470 - RNA, 19 nt, Artificial Sequence
  Description of Artificial Sequence: Synthetic oligonucleotide
gaugacguuggcccuguaa

SEQ ID NO: 2058471 - RNA, 19 nt, Artificial Sequence
  Description of Artificial Sequence: Synthetic oligonucleotide
cagacauuuggaaaagcua

SEQ ID NO: 2058472 - RNA, 19 nt, Artificial Sequence
  Description of Artificial Sequence: Synthetic oligonucleotide
ccuaagaucuuucaaggga

SEQ ID NO: 2058473 - RNA, 19 nt, Artificial Sequence
  Description of Artificial Sequence: Synthetic oligonucleotide
cacuggaaucuuguagacg

SEQ ID NO: 2058474 - RNA, 19 nt, Artificial Sequence
  Description of Artificial Sequence: Synthetic oligonucleotide
guggcuucaguucugcgaa

SEQ ID NO: 2058475 - RNA, 19 nt, Artificial Sequence
  Description of Artificial Sequence: Synthetic oligonucleotide
gcugguagcuccucaguag

SEQ ID NO: 2058476 - RNA, 19 nt, Artificial Sequence
  Description of Artificial Sequence: Synthetic oligonucleotide
aguuugcuuuucucuagaa

SEQ ID NO: 2058477 - RNA, 19 nt, Artificial Sequence
  Description of Artificial Sequence: Synthetic oligonucleotide
agcucgaacugcgccaagg

SEQ ID NO: 2058478 - RNA, 19 nt, Artificial Sequence
  Description of Artificial Sequence: Synthetic oligonucleotide
caaucuuaauggcacugga

SEQ ID NO: 2058479 - RNA, 19 nt, Artificial Sequence
  Description of Artificial Sequence: Synthetic oligonucleotide
ugcgugcucaucagcacau

SEQ ID NO: 2058480 - RNA, 19 nt, Artificial Sequence
  Description of Artificial Sequence: Synthetic oligonucleotide
uaccaggugcaggugcacg

SEQ ID NO: 2058481 - RNA, 19 nt, Artificial Sequence
  Description of Artificial Sequence: Synthetic oligonucleotide
uggaaucuuguagacgaau

SEQ ID NO: 2058482 - RNA, 19 nt, Artificial Sequence
  Description of Artificial Sequence: Synthetic oligonucleotide
gagcuuaggaagggccugg

SEQ ID NO: 2058483 - RNA, 19 nt, Artificial Sequence
  Description of Artificial Sequence: Synthetic oligonucleotide
gcuaaccaacuuuuauaag

SEQ ID NO: 2058484 - RNA, 19 nt, Artificial Sequence
  Description of Artificial Sequence: Synthetic oligonucleotide
ugcacagguggguugcgaa

SEQ ID NO: 2058485 - RNA, 19 nt, Artificial Sequence
  Description of Artificial Sequence: Synthetic oligonucleotide
gauuucccuugauggccag

SEQ ID NO: 2058486 - RNA, 19 nt, Artificial Sequence
  Description of Artificial Sequence: Synthetic oligonucleotide
aucuuucaagggauccaac

SEQ ID NO: 2058487 - RNA, 19 nt, Artificial Sequence
  Description of Artificial Sequence: Synthetic oligonucleotide
ugagucggaugauguacuc

SEQ ID NO: 2058488 - RNA, 19 nt, Artificial Sequence
  Description of Artificial Sequence: Synthetic oligonucleotide
ggcccuguaauuucucagc

SEQ ID NO: 2058489 - RNA, 19 nt, Artificial Sequence
  Description of Artificial Sequence: Synthetic oligonucleotide
uugauacccucuagcuccu

SEQ ID NO: 2058490 - RNA, 19 nt, Artificial Sequence
  Description of Artificial Sequence: Synthetic oligonucleotide
uacuccuaaccucgcugcu

SEQ ID NO: 2058491 - RNA, 19 nt, Artificial Sequence
  Description of Artificial Sequence: Synthetic oligonucleotide
aggauggcguucagguggc

SEQ ID NO: 2058492 - RNA, 19 nt, Artificial Sequence
  Description of Artificial Sequence: Synthetic oligonucleotide
agggucuccaccggcgugg

SEQ ID NO: 2058493 - RNA, 19 nt, Artificial Sequence
  Description of Artificial Sequence: Synthetic oligonucleotide
uccauucugagugcagaaa

SEQ ID NO: 2058494 - RNA, 19 nt, Artificial Sequence
  Description of Artificial Sequence: Synthetic oligonucleotide
aggacaggcaguuguugau

SEQ ID NO: 2058495 - RNA, 19 nt, Artificial Sequence
  Description of Artificial Sequence: Synthetic oligonucleotide
uguggccaccucaaucuua

SEQ ID NO: 2058496 - RNA, 19 nt, Artificial Sequence
  Description of Artificial Sequence: Synthetic oligonucleotide
cauggaugucccgaaggac

SEQ ID NO: 2058497 - RNA, 19 nt, Artificial Sequence
  Description of Artificial Sequence: Synthetic oligonucleotide
uaggugucccucucacaca

SEQ ID NO: 2058498 - RNA, 19 nt, Artificial Sequence
  Description of Artificial Sequence: Synthetic oligonucleotide
ggaaacaguccuucaguuc

SEQ ID NO: 2058499 - RNA, 19 nt, Artificial Sequence
  Description of Artificial Sequence: Synthetic oligonucleotide
cugcuccucggucuugagg

SEQ ID NO: 2058500 - RNA, 19 nt, Artificial Sequence
  Description of Artificial Sequence: Synthetic oligonucleotide
gagguaucugccacuucug

SEQ ID NO: 2058501 - RNA, 19 nt, Artificial Sequence
  Description of Artificial Sequence: Synthetic oligonucleotide
caaggcgucaaagccauga

SEQ ID NO: 2058502 - RNA, 19 nt, Artificial Sequence
  Description of Artificial Sequence: Synthetic oligonucleotide
acagguggguugcgaagug

SEQ ID NO: 2058503 - RNA, 19 nt, Artificial Sequence
  Description of Artificial Sequence: Synthetic oligonucleotide
gccuggugcagccagguug

SEQ ID NO: 2058504 - RNA, 19 nt, Artificial Sequence
  Description of Artificial Sequence: Synthetic oligonucleotide
uccuaaccucgcugcuugg

SEQ ID NO: 2058505 - RNA, 19 nt, Artificial Sequence
  Description of Artificial Sequence: Synthetic oligonucleotide
cacacagcucgaacugcgc

SEQ ID NO: 2058506 - RNA, 19 nt, Artificial Sequence
  Description of Artificial Sequence: Synthetic oligonucleotide
guugaaugacaucagcauu

SEQ ID NO: 2058507 - RNA, 19 nt, Artificial Sequence
  Description of Artificial Sequence: Synthetic oligonucleotide
cauugggguagaaguuaug

SEQ ID NO: 2058508 - RNA, 19 nt, Artificial Sequence
  Description of Artificial Sequence: Synthetic oligonucleotide
uuugccaauuuggggcugu

SEQ ID NO: 2058509 - RNA, 19 nt, Artificial Sequence
  Description of Artificial Sequence: Synthetic oligonucleotide
ugcagccuucacauugguc

SEQ ID NO: 2058510 - RNA, 19 nt, Artificial Sequence
  Description of Artificial Sequence: Synthetic oligonucleotide
gguagcuccucaguagugc

SEQ ID NO: 2058511 - RNA, 19 nt, Artificial Sequence
  Description of Artificial Sequence: Synthetic oligonucleotide
uccugagguaucugccacu

SEQ ID NO: 2058512 - RNA, 19 nt, Artificial Sequence
  Description of Artificial Sequence: Synthetic oligonucleotide
caguacugaugauuuccuc

SEQ ID NO: 2058513 - RNA, 19 nt, Artificial Sequence
  Description of Artificial Sequence: Synthetic oligonucleotide
ucagcacaucagacauuug

SEQ ID NO: 2058514 - RNA, 19 nt, Artificial Sequence
  Description of Artificial Sequence: Synthetic oligonucleotide
ugacguuggcccuguaauu

SEQ ID NO: 2058515 - RNA, 19 nt, Artificial Sequence
  Description of Artificial Sequence: Synthetic oligonucleotide
gcucccaagcuugauaccc

SEQ ID NO: 2058516 - RNA, 19 nt, Artificial Sequence
  Description of Artificial Sequence: Synthetic oligonucleotide
cugcgaacaggcccuggag

SEQ ID NO: 2058517 - RNA, 19 nt, Artificial Sequence
  Description of Artificial Sequence: Synthetic oligonucleotide
caguagugcagccuucaca

SEQ ID NO: 2058518 - RNA, 19 nt, Artificial Sequence
  Description of Artificial Sequence: Synthetic oligonucleotide
augagcccuaagaucuuuc

SEQ ID NO: 2058519 - RNA, 19 nt, Artificial Sequence
  Description of Artificial Sequence: Synthetic oligonucleotide
cagaaauguugaaugacau

SEQ ID NO: 2058520 - RNA, 19 nt, Artificial Sequence
  Description of Artificial Sequence: Synthetic oligonucleotide
cuaaccucgcugcuuggga

SEQ ID NO: 2058521 - RNA, 19 nt, Artificial Sequence
  Description of Artificial Sequence: Synthetic oligonucleotide
gcugagucggaugauguac

SEQ ID NO: 2058522 - RNA, 19 nt, Artificial Sequence
  Description of Artificial Sequence: Synthetic oligonucleotide
cuggagcaaggcgucaaag

SEQ ID NO: 2058523 - RNA, 19 nt, Artificial Sequence
  Description of Artificial Sequence: Synthetic oligonucleotide
gaccaggcgccguuugcug

SEQ ID NO: 2058524 - RNA, 19 nt, Artificial Sequence
  Description of Artificial Sequence: Synthetic oligonucleotide
uuaauggcacuggaaucuu

SEQ ID NO: 2058525 - RNA, 19 nt, Artificial Sequence
  Description of Artificial Sequence: Synthetic oligonucleotide
auuuggggcuguucagaau

SEQ ID NO: 2058526 - RNA, 19 nt, Artificial Sequence
  Description of Artificial Sequence: Synthetic oligonucleotide
gagcccuaagaucuuucaa

SEQ ID NO: 2058527 - RNA, 19 nt, Artificial Sequence
  Description of Artificial Sequence: Synthetic oligonucleotide
cuggcugcgugcucaucag

SEQ ID NO: 2058528 - RNA, 19 nt, Artificial Sequence
  Description of Artificial Sequence: Synthetic oligonucleotide
aggcugacguccacaguac

SEQ ID NO: 2058529 - RNA, 19 nt, Artificial Sequence
  Description of Artificial Sequence: Synthetic oligonucleotide
cacagcucgaacugcgcca

SEQ ID NO: 2058530 - RNA, 19 nt, Artificial Sequence
  Description of Artificial Sequence: Synthetic oligonucleotide
ggaaaagcuaaccaacuuu

SEQ ID NO: 2058531 - RNA, 19 nt, Artificial Sequence
  Description of Artificial Sequence: Synthetic oligonucleotide
ggcauauguggccaccuca

SEQ ID NO: 2058532 - RNA, 19 nt, Artificial Sequence
  Description of Artificial Sequence: Synthetic oligonucleotide
uguugauguuggcgaugac

SEQ ID NO: 2058533 - RNA, 19 nt, Artificial Sequence
  Description of Artificial Sequence: Synthetic oligonucleotide
uggcauauguggccaccuc

SEQ ID NO: 2058534 - RNA, 19 nt, Artificial Sequence
  Description of Artificial Sequence: Synthetic oligonucleotide
gcuugauacccucuagcuc

SEQ ID NO: 2058535 - RNA, 19 nt, Artificial Sequence
  Description of Artificial Sequence: Synthetic oligonucleotide
gugucugaugcuggcugcg

SEQ ID NO: 2058536 - RNA, 19 nt, Artificial Sequence
  Description of Artificial Sequence: Synthetic oligonucleotide
caauuuggggcuguucaga

SEQ ID NO: 2058537 - RNA, 19 nt, Artificial Sequence
  Description of Artificial Sequence: Synthetic oligonucleotide
ugcugagucggaugaugua

SEQ ID NO: 2058538 - RNA, 19 nt, Artificial Sequence
  Description of Artificial Sequence: Synthetic oligonucleotide
auggcguucagguggccuu

SEQ ID NO: 2058539 - RNA, 19 nt, Artificial Sequence
  Description of Artificial Sequence: Synthetic oligonucleotide
gcaaccuggucuguuuagg

SEQ ID NO: 2058540 - RNA, 19 nt, Artificial Sequence
  Description of Artificial Sequence: Synthetic oligonucleotide
ggucugugugaacuucuug

SEQ ID NO: 2058541 - RNA, 19 nt, Artificial Sequence
  Description of Artificial Sequence: Synthetic oligonucleotide
ugucccucucacacagcuc

SEQ ID NO: 2058542 - RNA, 19 nt, Artificial Sequence
  Description of Artificial Sequence: Synthetic oligonucleotide
gagcuccucccggaaacag

SEQ ID NO: 2058543 - RNA, 19 nt, Artificial Sequence
  Description of Artificial Sequence: Synthetic oligonucleotide
ccaccucaaucuuaauggc

SEQ ID NO: 2058544 - RNA, 19 nt, Artificial Sequence
  Description of Artificial Sequence: Synthetic oligonucleotide
cuugggagauuucccuuga

SEQ ID NO: 2058545 - RNA, 19 nt, Artificial Sequence
  Description of Artificial Sequence: Synthetic oligonucleotide
cuuuuaccaggugcaggug

SEQ ID NO: 2058546 - RNA, 19 nt, Artificial Sequence
  Description of Artificial Sequence: Synthetic oligonucleotide
caguggcuucaguucugcg

SEQ ID NO: 2058547 - RNA, 19 nt, Artificial Sequence
  Description of Artificial Sequence: Synthetic oligonucleotide
uugggagauuucccuugau

SEQ ID NO: 2058548 - RNA, 19 nt, Artificial Sequence
  Description of Artificial Sequence: Synthetic oligonucleotide
ucccggaaacaguccuuca

SEQ ID NO: 2058549 - RNA, 19 nt, Artificial Sequence
  Description of Artificial Sequence: Synthetic oligonucleotide
accaggcgccguuugcuga

SEQ ID NO: 2058550 - RNA, 19 nt, Artificial Sequence
  Description of Artificial Sequence: Synthetic oligonucleotide
agaaucucauugggguaga

SEQ ID NO: 2058551 - RNA, 19 nt, Artificial Sequence
  Description of Artificial Sequence: Synthetic oligonucleotide
ugagcuccucccggaaaca

SEQ ID NO: 2058552 - RNA, 19 nt, Artificial Sequence
  Description of Artificial Sequence: Synthetic oligonucleotide
guccaguauauuccggaua

SEQ ID NO: 2058553 - RNA, 19 nt, Artificial Sequence
  Description of Artificial Sequence: Synthetic oligonucleotide
gcauccccaacuagggagg

SEQ ID NO: 2058554 - RNA, 19 nt, Artificial Sequence
  Description of Artificial Sequence: Synthetic oligonucleotide
caaguaggugucccucuca

SEQ ID NO: 2058555 - RNA, 19 nt, Artificial Sequence
  Description of Artificial Sequence: Synthetic oligonucleotide
gcgaacaggcccuggagca

SEQ ID NO: 2058556 - RNA, 19 nt, Artificial Sequence
  Description of Artificial Sequence: Synthetic oligonucleotide
ccaacuagggaggugucug

SEQ ID NO: 2058557 - RNA, 19 nt, Artificial Sequence
  Description of Artificial Sequence: Synthetic oligonucleotide
ugucugaugcuggcugcgu

SEQ ID NO: 2058558 - RNA, 19 nt, Artificial Sequence
  Description of Artificial Sequence: Synthetic oligonucleotide
cucccggaaacaguccuuc

SEQ ID NO: 2058559 - RNA, 19 nt, Artificial Sequence
  Description of Artificial Sequence: Synthetic oligonucleotide
ggcgccguuugcugagucg

SEQ ID NO: 2058560 - RNA, 19 nt, Artificial Sequence
  Description of Artificial Sequence: Synthetic oligonucleotide
gcaggggauccauucugag

SEQ ID NO: 2058561 - RNA, 19 nt, Artificial Sequence
  Description of Artificial Sequence: Synthetic oligonucleotide
gcgucaaagccaugagccc

SEQ ID NO: 2058562 - RNA, 19 nt, Artificial Sequence
  Description of Artificial Sequence: Synthetic oligonucleotide
cccggaaacaguccuucag

SEQ ID NO: 2058563 - RNA, 19 nt, Artificial Sequence
  Description of Artificial Sequence: Synthetic oligonucleotide
gugucccucucacacagcu

SEQ ID NO: 2058564 - RNA, 19 nt, Artificial Sequence
  Description of Artificial Sequence: Synthetic oligonucleotide
cugcgugcucaucagcaca

SEQ ID NO: 2058565 - RNA, 19 nt, Artificial Sequence
  Description of Artificial Sequence: Synthetic oligonucleotide
aggcgccguuugcugaguc

SEQ ID NO: 2058566 - RNA, 19 nt, Artificial Sequence
  Description of Artificial Sequence: Synthetic oligonucleotide
caaagccaugagcccuaag

SEQ ID NO: 2058567 - RNA, 19 nt, Artificial Sequence
  Description of Artificial Sequence: Synthetic oligonucleotide
caggguacaagguggcaua

SEQ ID NO: 2058568 - RNA, 19 nt, Artificial Sequence
  Description of Artificial Sequence: Synthetic oligonucleotide
cucaguagugcagccuuca

SEQ ID NO: 2058569 - RNA, 19 nt, Artificial Sequence
  Description of Artificial Sequence: Synthetic oligonucleotide
ggacaggcaguuguugaug

SEQ ID NO: 2058570 - RNA, 19 nt, Artificial Sequence
  Description of Artificial Sequence: Synthetic oligonucleotide
cacagccuccagcaaccug

SEQ ID NO: 2058571 - RNA, 19 nt, Artificial Sequence
  Description of Artificial Sequence: Synthetic oligonucleotide
cugagucggaugauguacu

SEQ ID NO: 2058572 - RNA, 19 nt, Artificial Sequence
  Description of Artificial Sequence: Synthetic oligonucleotide
ccucauuggacaggaacac

SEQ ID NO: 2058573 - RNA, 19 nt, Artificial Sequence
  Description of Artificial Sequence: Synthetic oligonucleotide
ggcccagcgggucugugug

SEQ ID NO: 2058574 - RNA, 19 nt, Artificial Sequence
  Description of Artificial Sequence: Synthetic oligonucleotide
cucauuggacaggaacaca

SEQ ID NO: 2058575 - RNA, 19 nt, Artificial Sequence
  Description of Artificial Sequence: Synthetic oligonucleotide
gaaugacaucagcauuggu

SEQ ID NO: 2058576 - RNA, 19 nt, Artificial Sequence
  Description of Artificial Sequence: Synthetic oligonucleotide
ggaugugccgcgccagcug

SEQ ID NO: 2058577 - RNA, 19 nt, Artificial Sequence
  Description of Artificial Sequence: Synthetic oligonucleotide
ggucaccucauuggacagg

SEQ ID NO: 2058578 - RNA, 19 nt, Artificial Sequence
  Description of Artificial Sequence: Synthetic oligonucleotide
gggaggugucugaugcugg

SEQ ID NO: 2058579 - RNA, 19 nt, Artificial Sequence
  Description of Artificial Sequence: Synthetic oligonucleotide
gccaaggugcacagguggg

SEQ ID NO: 2058580 - RNA, 19 nt, Artificial Sequence
  Description of Artificial Sequence: Synthetic oligonucleotide
uggcuucaguucugcgaac

SEQ ID NO: 2058581 - RNA, 19 nt, Artificial Sequence
  Description of Artificial Sequence: Synthetic oligonucleotide
agggauccaacaggugccu

SEQ ID NO: 2058582 - RNA, 19 nt, Artificial Sequence
  Description of Artificial Sequence: Synthetic oligonucleotide
ugaugcuggcugcgugcuc

SEQ ID NO: 2058583 - RNA, 19 nt, Artificial Sequence
  Description of Artificial Sequence: Synthetic oligonucleotide
gacguuggcccuguaauuu

SEQ ID NO: 2058584 - RNA, 19 nt, Artificial Sequence
  Description of Artificial Sequence: Synthetic oligonucleotide
aggaugugccgcgccagcu

SEQ ID NO: 2058585 - RNA, 19 nt, Artificial Sequence
  Description of Artificial Sequence: Synthetic oligonucleotide
ggauccauucugagugcag

SEQ ID NO: 2058586 - RNA, 19 nt, Artificial Sequence
  Description of Artificial Sequence: Synthetic oligonucleotide
guguugauguccaguauau

SEQ ID NO: 2058587 - RNA, 19 nt, Artificial Sequence
  Description of Artificial Sequence: Synthetic oligonucleotide
gagcagcaacaaguaggug

SEQ ID NO: 2058588 - RNA, 19 nt, Artificial Sequence
  Description of Artificial Sequence: Synthetic oligonucleotide
gauacccucuagcuccuuu

SEQ ID NO: 2058589 - RNA, 19 nt, Artificial Sequence
  Description of Artificial Sequence: Synthetic oligonucleotide
ccuguguugauguccagua

SEQ ID NO: 2058590 - RNA, 19 nt, Artificial Sequence
  Description of Artificial Sequence: Synthetic oligonucleotide
agcgggucugugugaacuu

SEQ ID NO: 2058591 - RNA, 19 nt, Artificial Sequence
  Description of Artificial Sequence: Synthetic oligonucleotide
acuccuaaccucgcugcuu

SEQ ID NO: 2058592 - RNA, 19 nt, Artificial Sequence
  Description of Artificial Sequence: Synthetic oligonucleotide
ccuaaccucgcugcuuggg

SEQ ID NO: 2058593 - RNA, 19 nt, Artificial Sequence
  Description of Artificial Sequence: Synthetic oligonucleotide
ggucaggaugugccgcgcc

SEQ ID NO: 2058594 - RNA, 19 nt, Artificial Sequence
  Description of Artificial Sequence: Synthetic oligonucleotide
gauggcguucagguggccu

SEQ ID NO: 2058595 - RNA, 19 nt, Artificial Sequence
  Description of Artificial Sequence: Synthetic oligonucleotide
ccuucaguucugagaacuc

SEQ ID NO: 2058596 - RNA, 19 nt, Artificial Sequence
  Description of Artificial Sequence: Synthetic oligonucleotide
cugagguaucugccacuuc

SEQ ID NO: 2058597 - RNA, 19 nt, Artificial Sequence
  Description of Artificial Sequence: Synthetic oligonucleotide
cuggaaucuuguagacgaa

SEQ ID NO: 2058598 - RNA, 19 nt, Artificial Sequence
  Description of Artificial Sequence: Synthetic oligonucleotide
uggggcuguucagaaucuc

SEQ ID NO: 2058599 - RNA, 19 nt, Artificial Sequence
  Description of Artificial Sequence: Synthetic oligonucleotide
aggugccucagggacuccu

SEQ ID NO: 2058600 - RNA, 19 nt, Artificial Sequence
  Description of Artificial Sequence: Synthetic oligonucleotide
agcuccucccggaaacagu

SEQ ID NO: 2058601 - RNA, 19 nt, Artificial Sequence
  Description of Artificial Sequence: Synthetic oligonucleotide
gcuccucccggaaacaguc

SEQ ID NO: 2058602 - RNA, 19 nt, Artificial Sequence
  Description of Artificial Sequence: Synthetic oligonucleotide
gcugcgugcucaucagcac

SEQ ID NO: 2058603 - RNA, 19 nt, Artificial Sequence
  Description of Artificial Sequence: Synthetic oligonucleotide
agcuuaggaagggccuggu

SEQ ID NO: 2058604 - RNA, 19 nt, Artificial Sequence
  Description of Artificial Sequence: Synthetic oligonucleotide
ccauggaugucccgaagga

SEQ ID NO: 2058605 - RNA, 19 nt, Artificial Sequence
  Description of Artificial Sequence: Synthetic oligonucleotide
caaaggugcgcugguagcu

SEQ ID NO: 2058606 - RNA, 19 nt, Artificial Sequence
  Description of Artificial Sequence: Synthetic oligonucleotide
gaaucucauugggguagaa

SEQ ID NO: 2058607 - RNA, 19 nt, Artificial Sequence
  Description of Artificial Sequence: Synthetic oligonucleotide
gucaaagccaugagcccua

SEQ ID NO: 2058608 - RNA, 19 nt, Artificial Sequence
  Description of Artificial Sequence: Synthetic oligonucleotide
ccguuugcugagucggaug

SEQ ID NO: 2058609 - RNA, 19 nt, Artificial Sequence
  Description of Artificial Sequence: Synthetic oligonucleotide
ggggcuguucagaaucuca

SEQ ID NO: 2058610 - RNA, 19 nt, Artificial Sequence
  Description of Artificial Sequence: Synthetic oligonucleotide
gcauauguggccaccucaa

SEQ ID NO: 2058611 - RNA, 19 nt, Artificial Sequence
  Description of Artificial Sequence: Synthetic oligonucleotide
cguuugcugagucggauga

SEQ ID NO: 2058612 - RNA, 19 nt, Artificial Sequence
  Description of Artificial Sequence: Synthetic oligonucleotide
auccccaacuagggaggug

SEQ ID NO: 2058613 - RNA, 19 nt, Artificial Sequence
  Description of Artificial Sequence: Synthetic oligonucleotide
uccaccggcguggcccagc

SEQ ID NO: 2058614 - RNA, 19 nt, Artificial Sequence
  Description of Artificial Sequence: Synthetic oligonucleotide
cucagggacuccugaggua

SEQ ID NO: 2058615 - RNA, 19 nt, Artificial Sequence
  Description of Artificial Sequence: Synthetic oligonucleotide
ccaggcgccguuugcugag

SEQ ID NO: 2058616 - RNA, 19 nt, Artificial Sequence
  Description of Artificial Sequence: Synthetic oligonucleotide
ccaacaggugccucaggga

SEQ ID NO: 2058617 - RNA, 19 nt, Artificial Sequence
  Description of Artificial Sequence: Synthetic oligonucleotide
cagcggccuggaaggcucc

SEQ ID NO: 2058618 - RNA, 19 nt, Artificial Sequence
  Description of Artificial Sequence: Synthetic oligonucleotide
ggccuuugcugaagucagg

SEQ ID NO: 2058619 - RNA, 19 nt, Artificial Sequence
  Description of Artificial Sequence: Synthetic oligonucleotide
cggucuugaggaccaggcg

SEQ ID NO: 2058620 - RNA, 19 nt, Artificial Sequence
  Description of Artificial Sequence: Synthetic oligonucleotide
ggguacaagguggcauaug

SEQ ID NO: 2058621 - RNA, 19 nt, Artificial Sequence
  Description of Artificial Sequence: Synthetic oligonucleotide
guucugcgaacaggcccug

SEQ ID NO: 2058622 - RNA, 19 nt, Artificial Sequence
  Description of Artificial Sequence: Synthetic oligonucleotide
gggauccauucugagugca

SEQ ID NO: 2058623 - RNA, 19 nt, Artificial Sequence
  Description of Artificial Sequence: Synthetic oligonucleotide
ggcgaugacguuggcccug

SEQ ID NO: 2058624 - RNA, 19 nt, Artificial Sequence
  Description of Artificial Sequence: Synthetic oligonucleotide
gugcgcugguagcuccuca

SEQ ID NO: 2058625 - RNA, 19 nt, Artificial Sequence
  Description of Artificial Sequence: Synthetic oligonucleotide
ggauacuccuaaccucgcu

SEQ ID NO: 2058626 - RNA, 19 nt, Artificial Sequence
  Description of Artificial Sequence: Synthetic oligonucleotide
gugccgcgccagcugcugc

SEQ ID NO: 2058627 - RNA, 19 nt, Artificial Sequence
  Description of Artificial Sequence: Synthetic oligonucleotide
ucgcugcuugggagauuuc

SEQ ID NO: 2058628 - RNA, 19 nt, Artificial Sequence
  Description of Artificial Sequence: Synthetic oligonucleotide
ccaagcuugauacccucua

SEQ ID NO: 2058629 - RNA, 19 nt, Artificial Sequence
  Description of Artificial Sequence: Synthetic oligonucleotide
augucccgaaggacaggca

SEQ ID NO: 2058630 - RNA, 19 nt, Artificial Sequence
  Description of Artificial Sequence: Synthetic oligonucleotide
ccgaaggacaggcaguugu

SEQ ID NO: 2058631 - RNA, 19 nt, Artificial Sequence
  Description of Artificial Sequence: Synthetic oligonucleotide
gcuccauggaugucccgaa

SEQ ID NO: 2058632 - RNA, 19 nt, Artificial Sequence
  Description of Artificial Sequence: Synthetic oligonucleotide
caucaaaggugcgcuggua

SEQ ID NO: 2058633 - RNA, 19 nt, Artificial Sequence
  Description of Artificial Sequence: Synthetic oligonucleotide
uggcguucagguggccuuu

SEQ ID NO: 2058634 - RNA, 19 nt, Artificial Sequence
  Description of Artificial Sequence: Synthetic oligonucleotide
cagcgggucugugugaacu

SEQ ID NO: 2058635 - RNA, 19 nt, Artificial Sequence
  Description of Artificial Sequence: Synthetic oligonucleotide
uggccaccucaaucuuaau

SEQ ID NO: 2058636 - RNA, 19 nt, Artificial Sequence
  Description of Artificial Sequence: Synthetic oligonucleotide
guggcauauguggccaccu

SEQ ID NO: 2058637 - RNA, 19 nt, Artificial Sequence
  Description of Artificial Sequence: Synthetic oligonucleotide
cagcucgaacugcgccaag

SEQ ID NO: 2058638 - RNA, 19 nt, Artificial Sequence
  Description of Artificial Sequence: Synthetic oligonucleotide
gcguucagguggccuuugc

SEQ ID NO: 2058639 - RNA, 19 nt, Artificial Sequence
  Description of Artificial Sequence: Synthetic oligonucleotide
cucgcugcuugggagauuu

SEQ ID NO: 2058640 - RNA, 19 nt, Artificial Sequence
  Description of Artificial Sequence: Synthetic oligonucleotide
uugccaauuuggggcuguu

SEQ ID NO: 2058641 - RNA, 19 nt, Artificial Sequence
  Description of Artificial Sequence: Synthetic oligonucleotide
ccucaguagugcagccuuc

SEQ ID NO: 2058642 - RNA, 19 nt, Artificial Sequence
  Description of Artificial Sequence: Synthetic oligonucleotide
cgugcucaucagcacauca

SEQ ID NO: 2058643 - RNA, 19 nt, Artificial Sequence
  Description of Artificial Sequence: Synthetic oligonucleotide
cgaacugcgccaaggugca

SEQ ID NO: 2058644 - RNA, 19 nt, Artificial Sequence
  Description of Artificial Sequence: Synthetic oligonucleotide
gcucgaacugcgccaaggu

SEQ ID NO: 2058645 - RNA, 19 nt, Artificial Sequence
  Description of Artificial Sequence: Synthetic oligonucleotide
cggauacuccuaaccucgc

SEQ ID NO: 2058646 - RNA, 19 nt, Artificial Sequence
  Description of Artificial Sequence: Synthetic oligonucleotide
cugcgccaaggugcacagg

SEQ ID NO: 2058647 - RNA, 19 nt, Artificial Sequence
  Description of Artificial Sequence: Synthetic oligonucleotide
ccggaaacaguccuucagu

SEQ ID NO: 2058648 - RNA, 19 nt, Artificial Sequence
  Description of Artificial Sequence: Synthetic oligonucleotide
ccaccggcguggcccagcg

SEQ ID NO: 2058649 - RNA, 19 nt, Artificial Sequence
  Description of Artificial Sequence: Synthetic oligonucleotide
gaacugcgccaaggugcac

SEQ ID NO: 2058650 - RNA, 19 nt, Artificial Sequence
  Description of Artificial Sequence: Synthetic oligonucleotide
aggugcgcugguagcuccu

SEQ ID NO: 2058651 - RNA, 19 nt, Artificial Sequence
  Description of Artificial Sequence: Synthetic oligonucleotide
ugauacccucuagcuccuu

SEQ ID NO: 2058652 - RNA, 19 nt, Artificial Sequence
  Description of Artificial Sequence: Synthetic oligonucleotide
ggcuguucagaaucucauu

SEQ ID NO: 2058653 - RNA, 19 nt, Artificial Sequence
  Description of Artificial Sequence: Synthetic oligonucleotide
caccggcguggcccagcgg

SEQ ID NO: 2058654 - RNA, 19 nt, Artificial Sequence
  Description of Artificial Sequence: Synthetic oligonucleotide
caucagcacaucagacauu

SEQ ID NO: 2058655 - RNA, 19 nt, Artificial Sequence
  Description of Artificial Sequence: Synthetic oligonucleotide
gugcagccuucacauuggu

SEQ ID NO: 2058656 - RNA, 19 nt, Artificial Sequence
  Description of Artificial Sequence: Synthetic oligonucleotide
guuugcugagucggaugau

SEQ ID NO: 2058657 - RNA, 19 nt, Artificial Sequence
  Description of Artificial Sequence: Synthetic oligonucleotide
gcgccaaggugcacaggug

SEQ ID NO: 2058658 - RNA, 19 nt, Artificial Sequence
  Description of Artificial Sequence: Synthetic oligonucleotide
ggcguucagguggccuuug

SEQ ID NO: 2058659 - RNA, 19 nt, Artificial Sequence
  Description of Artificial Sequence: Synthetic oligonucleotide
ccucaaucuuaauggcacu

SEQ ID NO: 2058660 - RNA, 19 nt, Artificial Sequence
  Description of Artificial Sequence: Synthetic oligonucleotide
ggcugacguccacaguacu

SEQ ID NO: 2058661 - RNA, 19 nt, Artificial Sequence
  Description of Artificial Sequence: Synthetic oligonucleotide
gcgagcuuaggaagggccu

SEQ ID NO: 2058662 - RNA, 19 nt, Artificial Sequence
  Description of Artificial Sequence: Synthetic oligonucleotide
agguugcaggggauccauu

SEQ ID NO: 2058663 - RNA, 19 nt, Artificial Sequence
  Description of Artificial Sequence: Synthetic oligonucleotide
ggaccaggcgccguuugcu

SEQ ID NO: 2058664 - RNA, 19 nt, Artificial Sequence
  Description of Artificial Sequence: Synthetic oligonucleotide
cagguugcaggggauccau

SEQ ID NO: 2058665 - RNA, 19 nt, Artificial Sequence
  Description of Artificial Sequence: Synthetic oligonucleotide
ggugcgcugguagcuccuc

SEQ ID NO: 2058666 - RNA, 19 nt, Artificial Sequence
  Description of Artificial Sequence: Synthetic oligonucleotide
ccagcgggucugugugaac

SEQ ID NO: 2058667 - RNA, 19 nt, Artificial Sequence
  Description of Artificial Sequence: Synthetic oligonucleotide
gucggaugauguacucuuu

SEQ ID NO: 2058668 - RNA, 19 nt, Artificial Sequence
  Description of Artificial Sequence: Synthetic oligonucleotide
gggucuccaccggcguggc

SEQ ID NO: 2058669 - RNA, 19 nt, Artificial Sequence
  Description of Artificial Sequence: Synthetic oligonucleotide
gcggccuggaaggcuccug

SEQ ID NO: 2058670 - RNA, 19 nt, Artificial Sequence
  Description of Artificial Sequence: Synthetic oligonucleotide
cccgaaggacaggcaguug

SEQ ID NO: 2058671 - RNA, 19 nt, Artificial Sequence
  Description of Artificial Sequence: Synthetic oligonucleotide
cggaaacaguccuucaguu

SEQ ID NO: 2058672 - RNA, 19 nt, Artificial Sequence
  Description of Artificial Sequence: Synthetic oligonucleotide
gcgcugguagcuccucagu

SEQ ID NO: 2058673 - RNA, 19 nt, Artificial Sequence
  Description of Artificial Sequence: Synthetic oligonucleotide
gcaaggcgucaaagccaug

SEQ ID NO: 2058674 - RNA, 19 nt, Artificial Sequence
  Description of Artificial Sequence: Synthetic oligonucleotide
cguuggcccuguaauuucu

SEQ ID NO: 2058675 - RNA, 19 nt, Artificial Sequence
  Description of Artificial Sequence: Synthetic oligonucleotide
cguucagguggccuuugcu

SEQ ID NO: 2058676 - RNA, 19 nt, Artificial Sequence
  Description of Artificial Sequence: Synthetic oligonucleotide
ccaaggugcacaggugggu

SEQ ID NO: 2058677 - RNA, 19 nt, Artificial Sequence
  Description of Artificial Sequence: Synthetic oligonucleotide
gcgugcucaucagcacauc

SEQ ID NO: 2058678 - RNA, 19 nt, Artificial Sequence
  Description of Artificial Sequence: Synthetic oligonucleotide
cuccaccggcguggcccag

SEQ ID NO: 2058679 - RNA, 19 nt, Artificial Sequence
  Description of Artificial Sequence: Synthetic oligonucleotide
gccguuugcugagucggau

SEQ ID NO: 2058680 - RNA, 19 nt, Artificial Sequence
  Description of Artificial Sequence: Synthetic oligonucleotide
ccugagguaucugccacuu

SEQ ID NO: 2058681 - RNA, 19 nt, Artificial Sequence
  Description of Artificial Sequence: Synthetic oligonucleotide
cccaacuagggaggugucu

SEQ ID NO: 2058682 - RNA, 19 nt, Artificial Sequence
  Description of Artificial Sequence: Synthetic oligonucleotide
cgggucugugugaacuucu

SEQ ID NO: 2058683 - RNA, 19 nt, Artificial Sequence
  Description of Artificial Sequence: Synthetic oligonucleotide
ccaguauauuccggauacu

SEQ ID NO: 2058684 - RNA, 19 nt, Artificial Sequence
  Description of Artificial Sequence: Synthetic oligonucleotide
cccucucacacagcucgaa

SEQ ID NO: 2058685 - RNA, 19 nt, Artificial Sequence
  Description of Artificial Sequence: Synthetic oligonucleotide
ccagggucuccaccggcgu

SEQ ID NO: 2058686 - RNA, 19 nt, Artificial Sequence
  Description of Artificial Sequence: Synthetic oligonucleotide
cgccguuugcugagucgga

SEQ ID NO: 2058687 - RNA, 19 nt, Artificial Sequence
  Description of Artificial Sequence: Synthetic oligonucleotide
cuccagcaaccuggucugu

SEQ ID NO: 2058688 - RNA, 19 nt, Artificial Sequence
  Description of Artificial Sequence: Synthetic oligonucleotide
ccaugagcccuaagaucuu

SEQ ID NO: 2058689 - RNA, 19 nt, Artificial Sequence
  Description of Artificial Sequence: Synthetic oligonucleotide
caggcgccguuugcugagu

SEQ ID NO: 2058690 - RNA, 19 nt, Artificial Sequence
  Description of Artificial Sequence: Synthetic oligonucleotide
cggcguggcccagcggguc

SEQ ID NO: 2058691 - RNA, 19 nt, Artificial Sequence
  Description of Artificial Sequence: Synthetic oligonucleotide
ccggcguggcccagcgggu

SEQ ID NO: 2058692 - RNA, 19 nt, Artificial Sequence
  Description of Artificial Sequence: Synthetic oligonucleotide
cgaugacguuggcccugua

SEQ ID NO: 2058693 - RNA, 19 nt, Artificial Sequence
  Description of Artificial Sequence: Synthetic oligonucleotide
ccucgcugcuugggagauu

SEQ ID NO: 2058694 - RNA, 19 nt, Artificial Sequence
  Description of Artificial Sequence: Synthetic oligonucleotide
ucaaauauugcaaauacaa

SEQ ID NO: 2058695 - RNA, 19 nt, Artificial Sequence
  Description of Artificial Sequence: Synthetic oligonucleotide
auuuacaaugcuucuaccc

SEQ ID NO: 2058696 - RNA, 19 nt, Artificial Sequence
  Description of Artificial Sequence: Synthetic oligonucleotide
ucaaugauugaaaugaaga

SEQ ID NO: 2058697 - RNA, 19 nt, Artificial Sequence
  Description of Artificial Sequence: Synthetic oligonucleotide
accagaagaaauuuaggcc

SEQ ID NO: 2058698 - RNA, 19 nt, Artificial Sequence
  Description of Artificial Sequence: Synthetic oligonucleotide
auaauaacuagauaaccag

SEQ ID NO: 2058699 - RNA, 19 nt, Artificial Sequence
  Description of Artificial Sequence: Synthetic oligonucleotide
uuuacugcugauaauaacu

SEQ ID NO: 2058700 - RNA, 19 nt, Artificial Sequence
  Description of Artificial Sequence: Synthetic oligonucleotide
agaguauauauuuacaaug

SEQ ID NO: 2058701 - RNA, 19 nt, Artificial Sequence
  Description of Artificial Sequence: Synthetic oligonucleotide
uuuaggccaguuaagauag

SEQ ID NO: 2058702 - RNA, 19 nt, Artificial Sequence
  Description of Artificial Sequence: Synthetic oligonucleotide
aacaaacuuccuuaagugg

SEQ ID NO: 2058703 - RNA, 19 nt, Artificial Sequence
  Description of Artificial Sequence: Synthetic oligonucleotide
uuucccgucauuuugcugg

SEQ ID NO: 2058704 - RNA, 19 nt, Artificial Sequence
  Description of Artificial Sequence: Synthetic oligonucleotide
auuucaaugauugaaauga

SEQ ID NO: 2058705 - RNA, 19 nt, Artificial Sequence
  Description of Artificial Sequence: Synthetic oligonucleotide
uacaaauaaaguuuaguga

SEQ ID NO: 2058706 - RNA, 19 nt, Artificial Sequence
  Description of Artificial Sequence: Synthetic oligonucleotide
uuuacaaugcuucuacccc

SEQ ID NO: 2058707 - RNA, 19 nt, Artificial Sequence
  Description of Artificial Sequence: Synthetic oligonucleotide
gaagacaaaauaaaguacc

SEQ ID NO: 2058708 - RNA, 19 nt, Artificial Sequence
  Description of Artificial Sequence: Synthetic oligonucleotide
uuaauaguuacaaugguuu

SEQ ID NO: 2058709 - RNA, 19 nt, Artificial Sequence
  Description of Artificial Sequence: Synthetic oligonucleotide
aauaacuagauaaccagag

SEQ ID NO: 2058710 - RNA, 19 nt, Artificial Sequence
  Description of Artificial Sequence: Synthetic oligonucleotide
uuagcuuucaguuuccucu

SEQ ID NO: 2058711 - RNA, 19 nt, Artificial Sequence
  Description of Artificial Sequence: Synthetic oligonucleotide
uaacuagauaaccagaggu

SEQ ID NO: 2058712 - RNA, 19 nt, Artificial Sequence
  Description of Artificial Sequence: Synthetic oligonucleotide
auauugcaaauacaaacac

SEQ ID NO: 2058713 - RNA, 19 nt, Artificial Sequence
  Description of Artificial Sequence: Synthetic oligonucleotide
aaugaagacaaaauaaagu

SEQ ID NO: 2058714 - RNA, 19 nt, Artificial Sequence
  Description of Artificial Sequence: Synthetic oligonucleotide
uuguaauaggcauauguag

SEQ ID NO: 2058715 - RNA, 19 nt, Artificial Sequence
  Description of Artificial Sequence: Synthetic oligonucleotide
agaagaacauauuucaaug

SEQ ID NO: 2058716 - RNA, 19 nt, Artificial Sequence
  Description of Artificial Sequence: Synthetic oligonucleotide
uaaaguuuagugauuguga

SEQ ID NO: 2058717 - RNA, 19 nt, Artificial Sequence
  Description of Artificial Sequence: Synthetic oligonucleotide
aaugauugaaaugaagaca

SEQ ID NO: 2058718 - RNA, 19 nt, Artificial Sequence
  Description of Artificial Sequence: Synthetic oligonucleotide
ugaaaguugaacugacacg

SEQ ID NO: 2058719 - RNA, 19 nt, Artificial Sequence
  Description of Artificial Sequence: Synthetic oligonucleotide
aaugcuucuaccccauuag

SEQ ID NO: 2058720 - RNA, 19 nt, Artificial Sequence
  Description of Artificial Sequence: Synthetic oligonucleotide
aaaguaggucuacaguacg

SEQ ID NO: 2058721 - RNA, 19 nt, Artificial Sequence
  Description of Artificial Sequence: Synthetic oligonucleotide
aguacgguagaauaucuuc

SEQ ID NO: 2058722 - RNA, 19 nt, Artificial Sequence
  Description of Artificial Sequence: Synthetic oligonucleotide
aauacaaacacagagcauu

SEQ ID NO: 2058723 - RNA, 19 nt, Artificial Sequence
  Description of Artificial Sequence: Synthetic oligonucleotide
agaaauuuaggccaguuaa

SEQ ID NO: 2058724 - RNA, 19 nt, Artificial Sequence
  Description of Artificial Sequence: Synthetic oligonucleotide
acuagauaaccagaggucc

SEQ ID NO: 2058725 - RNA, 19 nt, Artificial Sequence
  Description of Artificial Sequence: Synthetic oligonucleotide
uugacguagggaaaguagg

SEQ ID NO: 2058726 - RNA, 19 nt, Artificial Sequence
  Description of Artificial Sequence: Synthetic oligonucleotide
uuugacguagggaaaguag

SEQ ID NO: 2058727 - RNA, 19 nt, Artificial Sequence
  Description of Artificial Sequence: Synthetic oligonucleotide
gaccagaagaaauuuaggc

SEQ ID NO: 2058728 - RNA, 19 nt, Artificial Sequence
  Description of Artificial Sequence: Synthetic oligonucleotide
auguaguugcuuuugauug

SEQ ID NO: 2058729 - RNA, 19 nt, Artificial Sequence
  Description of Artificial Sequence: Synthetic oligonucleotide
ucaauuggucauuaaaaca

SEQ ID NO: 2058730 - RNA, 19 nt, Artificial Sequence
  Description of Artificial Sequence: Synthetic oligonucleotide
acaaacacagagcauuaac

SEQ ID NO: 2058731 - RNA, 19 nt, Artificial Sequence
  Description of Artificial Sequence: Synthetic oligonucleotide
augaagacaaaauaaagua

SEQ ID NO: 2058732 - RNA, 19 nt, Artificial Sequence
  Description of Artificial Sequence: Synthetic oligonucleotide
uugagcuugaggaacuagg

SEQ ID NO: 2058733 - RNA, 19 nt, Artificial Sequence
  Description of Artificial Sequence: Synthetic oligonucleotide
aagaguauauauuuacaau

SEQ ID NO: 2058734 - RNA, 19 nt, Artificial Sequence
  Description of Artificial Sequence: Synthetic oligonucleotide
agagcauuaacaaaacagg

SEQ ID NO: 2058735 - RNA, 19 nt, Artificial Sequence
  Description of Artificial Sequence: Synthetic oligonucleotide
aagauagggauguccuuac

SEQ ID NO: 2058736 - RNA, 19 nt, Artificial Sequence
  Description of Artificial Sequence: Synthetic oligonucleotide
aaaaguacuuuuccaagaa

SEQ ID NO: 2058737 - RNA, 19 nt, Artificial Sequence
  Description of Artificial Sequence: Synthetic oligonucleotide
aguuaagauagggaugucc

SEQ ID NO: 2058738 - RNA, 19 nt, Artificial Sequence
  Description of Artificial Sequence: Synthetic oligonucleotide
aaugguuuacaaauaaagu

SEQ ID NO: 2058739 - RNA, 19 nt, Artificial Sequence
  Description of Artificial Sequence: Synthetic oligonucleotide
ugauaauaacuagauaacc

SEQ ID NO: 2058740 - RNA, 19 nt, Artificial Sequence
  Description of Artificial Sequence: Synthetic oligonucleotide
gaguauauauuuacaaugc

SEQ ID NO: 2058741 - RNA, 19 nt, Artificial Sequence
  Description of Artificial Sequence: Synthetic oligonucleotide
augguuuacaaauaaaguu

SEQ ID NO: 2058742 - RNA, 19 nt, Artificial Sequence
  Description of Artificial Sequence: Synthetic oligonucleotide
auaacuagauaaccagagg

SEQ ID NO: 2058743 - RNA, 19 nt, Artificial Sequence
  Description of Artificial Sequence: Synthetic oligonucleotide
uaauaacuagauaaccaga

SEQ ID NO: 2058744 - RNA, 19 nt, Artificial Sequence
  Description of Artificial Sequence: Synthetic oligonucleotide
gaaaguugaacugacacga

SEQ ID NO: 2058745 - RNA, 19 nt, Artificial Sequence
  Description of Artificial Sequence: Synthetic oligonucleotide
gcugauaauaacuagauaa

SEQ ID NO: 2058746 - RNA, 19 nt, Artificial Sequence
  Description of Artificial Sequence: Synthetic oligonucleotide
aacuagauaaccagagguc

SEQ ID NO: 2058747 - RNA, 19 nt, Artificial Sequence
  Description of Artificial Sequence: Synthetic oligonucleotide
uguacaugacuucaccagc

SEQ ID NO: 2058748 - RNA, 19 nt, Artificial Sequence
  Description of Artificial Sequence: Synthetic oligonucleotide
gugauugugacuuuuaaaa

SEQ ID NO: 2058749 - RNA, 19 nt, Artificial Sequence
  Description of Artificial Sequence: Synthetic oligonucleotide
aacugacacgaccagaaga

SEQ ID NO: 2058750 - RNA, 19 nt, Artificial Sequence
  Description of Artificial Sequence: Synthetic oligonucleotide
uaggucuacaguacgguag

SEQ ID NO: 2058751 - RNA, 19 nt, Artificial Sequence
  Description of Artificial Sequence: Synthetic oligonucleotide
cugaaaguugaacugacac

SEQ ID NO: 2058752 - RNA, 19 nt, Artificial Sequence
  Description of Artificial Sequence: Synthetic oligonucleotide
aaguacuuuuccaagaaga

SEQ ID NO: 2058753 - RNA, 19 nt, Artificial Sequence
  Description of Artificial Sequence: Synthetic oligonucleotide
cugauaauaacuagauaac

SEQ ID NO: 2058754 - RNA, 19 nt, Artificial Sequence
  Description of Artificial Sequence: Synthetic oligonucleotide
aaccaaacaaacuuccuua

SEQ ID NO: 2058755 - RNA, 19 nt, Artificial Sequence
  Description of Artificial Sequence: Synthetic oligonucleotide
agguuaauaguuacaaugg

SEQ ID NO: 2058756 - RNA, 19 nt, Artificial Sequence
  Description of Artificial Sequence: Synthetic oligonucleotide
aguugcaaagaguauauau

SEQ ID NO: 2058757 - RNA, 19 nt, Artificial Sequence
  Description of Artificial Sequence: Synthetic oligonucleotide
auuucggccauguuucuuc

SEQ ID NO: 2058758 - RNA, 19 nt, Artificial Sequence
  Description of Artificial Sequence: Synthetic oligonucleotide
aauaucuucuuggaccgag

SEQ ID NO: 2058759 - RNA, 19 nt, Artificial Sequence
  Description of Artificial Sequence: Synthetic oligonucleotide
uucauuauuaucgucuccu

SEQ ID NO: 2058760 - RNA, 19 nt, Artificial Sequence
  Description of Artificial Sequence: Synthetic oligonucleotide
uacaaugguuuacaaauaa

SEQ ID NO: 2058761 - RNA, 19 nt, Artificial Sequence
  Description of Artificial Sequence: Synthetic oligonucleotide
ugcauuucggccauguuuc

SEQ ID NO: 2058762 - RNA, 19 nt, Artificial Sequence
  Description of Artificial Sequence: Synthetic oligonucleotide
uuuugcuagguuuacugcu

SEQ ID NO: 2058763 - RNA, 19 nt, Artificial Sequence
  Description of Artificial Sequence: Synthetic oligonucleotide
ugaacugacacgaccagaa

SEQ ID NO: 2058764 - RNA, 19 nt, Artificial Sequence
  Description of Artificial Sequence: Synthetic oligonucleotide
aauuuaggccaguuaagau

SEQ ID NO: 2058765 - RNA, 19 nt, Artificial Sequence
  Description of Artificial Sequence: Synthetic oligonucleotide
uugucguccauccagugcu

SEQ ID NO: 2058766 - RNA, 19 nt, Artificial Sequence
  Description of Artificial Sequence: Synthetic oligonucleotide
aguauauauuuacaaugcu

SEQ ID NO: 2058767 - RNA, 19 nt, Artificial Sequence
  Description of Artificial Sequence: Synthetic oligonucleotide
ggaacuaggaucucugggg

SEQ ID NO: 2058768 - RNA, 19 nt, Artificial Sequence
  Description of Artificial Sequence: Synthetic oligonucleotide
agggacuugucguccaucc

SEQ ID NO: 2058769 - RNA, 19 nt, Artificial Sequence
  Description of Artificial Sequence: Synthetic oligonucleotide
uuugcuagguuuacugcug

SEQ ID NO: 2058770 - RNA, 19 nt, Artificial Sequence
  Description of Artificial Sequence: Synthetic oligonucleotide
aggaacuaggaucucuggg

SEQ ID NO: 2058771 - RNA, 19 nt, Artificial Sequence
  Description of Artificial Sequence: Synthetic oligonucleotide
auaaccagagguccaacug

SEQ ID NO: 2058772 - RNA, 19 nt, Artificial Sequence
  Description of Artificial Sequence: Synthetic oligonucleotide
agacaaaauaaaguaccac

SEQ ID NO: 2058773 - RNA, 19 nt, Artificial Sequence
  Description of Artificial Sequence: Synthetic oligonucleotide
uuaaguggcacuucugaaa

SEQ ID NO: 2058774 - RNA, 19 nt, Artificial Sequence
  Description of Artificial Sequence: Synthetic oligonucleotide
auuauuaucgucuccucuu

SEQ ID NO: 2058775 - RNA, 19 nt, Artificial Sequence
  Description of Artificial Sequence: Synthetic oligonucleotide
ggucacuuggguuuguucg

SEQ ID NO: 2058776 - RNA, 19 nt, Artificial Sequence
  Description of Artificial Sequence: Synthetic oligonucleotide
auuuaggccaguuaagaua

SEQ ID NO: 2058777 - RNA, 19 nt, Artificial Sequence
  Description of Artificial Sequence: Synthetic oligonucleotide
ugaggaacuaggaucucug

SEQ ID NO: 2058778 - RNA, 19 nt, Artificial Sequence
  Description of Artificial Sequence: Synthetic oligonucleotide
guaacugccgccuuuucug

SEQ ID NO: 2058779 - RNA, 19 nt, Artificial Sequence
  Description of Artificial Sequence: Synthetic oligonucleotide
gaaauuuaggccaguuaag

SEQ ID NO: 2058780 - RNA, 19 nt, Artificial Sequence
  Description of Artificial Sequence: Synthetic oligonucleotide
auuagcuuucaguuuccuc

SEQ ID NO: 2058781 - RNA, 19 nt, Artificial Sequence
  Description of Artificial Sequence: Synthetic oligonucleotide
aguuuagugauugugacuu

SEQ ID NO: 2058782 - RNA, 19 nt, Artificial Sequence
  Description of Artificial Sequence: Synthetic oligonucleotide
ucuguacaugacuucacca

SEQ ID NO: 2058783 - RNA, 19 nt, Artificial Sequence
  Description of Artificial Sequence: Synthetic oligonucleotide
aaggucucgcuuugcugcc

SEQ ID NO: 2058784 - RNA, 19 nt, Artificial Sequence
  Description of Artificial Sequence: Synthetic oligonucleotide
augauugaaaugaagacaa

SEQ ID NO: 2058785 - RNA, 19 nt, Artificial Sequence
  Description of Artificial Sequence: Synthetic oligonucleotide
uauguaguugcuuuugauu

SEQ ID NO: 2058786 - RNA, 19 nt, Artificial Sequence
  Description of Artificial Sequence: Synthetic oligonucleotide
aaucaagucuguacaugac

SEQ ID NO: 2058787 - RNA, 19 nt, Artificial Sequence
  Description of Artificial Sequence: Synthetic oligonucleotide
ucuucgaccuacauuugcu

SEQ ID NO: 2058788 - RNA, 19 nt, Artificial Sequence
  Description of Artificial Sequence: Synthetic oligonucleotide
auugaaaugaagacaaaau

SEQ ID NO: 2058789 - RNA, 19 nt, Artificial Sequence
  Description of Artificial Sequence: Synthetic oligonucleotide
guuucuucgaccuacauuu

SEQ ID NO: 2058790 - RNA, 19 nt, Artificial Sequence
  Description of Artificial Sequence: Synthetic oligonucleotide
ugcuucuaccccauuagcu

SEQ ID NO: 2058791 - RNA, 19 nt, Artificial Sequence
  Description of Artificial Sequence: Synthetic oligonucleotide
uauuuacaaugcuucuacc

SEQ ID NO: 2058792 - RNA, 19 nt, Artificial Sequence
  Description of Artificial Sequence: Synthetic oligonucleotide
aucugucuguucuugcuuc

SEQ ID NO: 2058793 - RNA, 19 nt, Artificial Sequence
  Description of Artificial Sequence: Synthetic oligonucleotide
aaauuggaaccauuugguu

SEQ ID NO: 2058794 - RNA, 19 nt, Artificial Sequence
  Description of Artificial Sequence: Synthetic oligonucleotide
uuguucgcaggucagggac

SEQ ID NO: 2058795 - RNA, 19 nt, Artificial Sequence
  Description of Artificial Sequence: Synthetic oligonucleotide
gauugaaaugaagacaaaa

SEQ ID NO: 2058796 - RNA, 19 nt, Artificial Sequence
  Description of Artificial Sequence: Synthetic oligonucleotide
uuugcugccuuguuucccc

SEQ ID NO: 2058797 - RNA, 19 nt, Artificial Sequence
  Description of Artificial Sequence: Synthetic oligonucleotide
uucuucgaccuacauuugc

SEQ ID NO: 2058798 - RNA, 19 nt, Artificial Sequence
  Description of Artificial Sequence: Synthetic oligonucleotide
agggaaaguaggucuacag

SEQ ID NO: 2058799 - RNA, 19 nt, Artificial Sequence
  Description of Artificial Sequence: Synthetic oligonucleotide
uacugcugauaauaacuag

SEQ ID NO: 2058800 - RNA, 19 nt, Artificial Sequence
  Description of Artificial Sequence: Synthetic oligonucleotide
acuugcuuguaauaggcau

SEQ ID NO: 2058801 - RNA, 19 nt, Artificial Sequence
  Description of Artificial Sequence: Synthetic oligonucleotide
ucgaccuacauuugcuugc

SEQ ID NO: 2058802 - RNA, 19 nt, Artificial Sequence
  Description of Artificial Sequence: Synthetic oligonucleotide
uucugaaaguugaacugac

SEQ ID NO: 2058803 - RNA, 19 nt, Artificial Sequence
  Description of Artificial Sequence: Synthetic oligonucleotide
ucuucauuauuaucgucuc

SEQ ID NO: 2058804 - RNA, 19 nt, Artificial Sequence
  Description of Artificial Sequence: Synthetic oligonucleotide
aaguaggucuacaguacgg

SEQ ID NO: 2058805 - RNA, 19 nt, Artificial Sequence
  Description of Artificial Sequence: Synthetic oligonucleotide
uugcauuucggccauguuu

SEQ ID NO: 2058806 - RNA, 19 nt, Artificial Sequence
  Description of Artificial Sequence: Synthetic oligonucleotide
uggcacuucugaaaguuga

SEQ ID NO: 2058807 - RNA, 19 nt, Artificial Sequence
  Description of Artificial Sequence: Synthetic oligonucleotide
aguuacaaugguuuacaaa

SEQ ID NO: 2058808 - RNA, 19 nt, Artificial Sequence
  Description of Artificial Sequence: Synthetic oligonucleotide
accuacauuugcuugcucu

SEQ ID NO: 2058809 - RNA, 19 nt, Artificial Sequence
  Description of Artificial Sequence: Synthetic oligonucleotide
uguccuuacucaauugguc

SEQ ID NO: 2058810 - RNA, 19 nt, Artificial Sequence
  Description of Artificial Sequence: Synthetic oligonucleotide
uuguuugacguagggaaag

SEQ ID NO: 2058811 - RNA, 19 nt, Artificial Sequence
  Description of Artificial Sequence: Synthetic oligonucleotide
uauauuuacaaugcuucua

SEQ ID NO: 2058812 - RNA, 19 nt, Artificial Sequence
  Description of Artificial Sequence: Synthetic oligonucleotide
acguagggaaaguaggucu

SEQ ID NO: 2058813 - RNA, 19 nt, Artificial Sequence
  Description of Artificial Sequence: Synthetic oligonucleotide
ggaaccauuugguucacag

SEQ ID NO: 2058814 - RNA, 19 nt, Artificial Sequence
  Description of Artificial Sequence: Synthetic oligonucleotide
gaaaguaggucuacaguac

SEQ ID NO: 2058815 - RNA, 19 nt, Artificial Sequence
  Description of Artificial Sequence: Synthetic oligonucleotide
uucgaccuacauuugcuug

SEQ ID NO: 2058816 - RNA, 19 nt, Artificial Sequence
  Description of Artificial Sequence: Synthetic oligonucleotide
ucugaaaguugaacugaca

SEQ ID NO: 2058817 - RNA, 19 nt, Artificial Sequence
  Description of Artificial Sequence: Synthetic oligonucleotide
acuggcuuagcccuacuca

SEQ ID NO: 2058818 - RNA, 19 nt, Artificial Sequence
  Description of Artificial Sequence: Synthetic oligonucleotide
aaguaccaccaggaguugc

SEQ ID NO: 2058819 - RNA, 19 nt, Artificial Sequence
  Description of Artificial Sequence: Synthetic oligonucleotide
uggguuuguucgcagguca

SEQ ID NO: 2058820 - RNA, 19 nt, Artificial Sequence
  Description of Artificial Sequence: Synthetic oligonucleotide
gaaccauuugguucacagc

SEQ ID NO: 2058821 - RNA, 19 nt, Artificial Sequence
  Description of Artificial Sequence: Synthetic oligonucleotide
uugcuucuauagaagcgag

SEQ ID NO: 2058822 - RNA, 19 nt, Artificial Sequence
  Description of Artificial Sequence: Synthetic oligonucleotide
gacauugagcuugaggaac

SEQ ID NO: 2058823 - RNA, 19 nt, Artificial Sequence
  Description of Artificial Sequence: Synthetic oligonucleotide
gguuguuugacguagggaa

SEQ ID NO: 2058824 - RNA, 19 nt, Artificial Sequence
  Description of Artificial Sequence: Synthetic oligonucleotide
agugauugugacuuuuaaa

SEQ ID NO: 2058825 - RNA, 19 nt, Artificial Sequence
  Description of Artificial Sequence: Synthetic oligonucleotide
uuucaaugauugaaaugaa

SEQ ID NO: 2058826 - RNA, 19 nt, Artificial Sequence
  Description of Artificial Sequence: Synthetic oligonucleotide
acagcccacaaucaagucu

SEQ ID NO: 2058827 - RNA, 19 nt, Artificial Sequence
  Description of Artificial Sequence: Synthetic oligonucleotide
cagcccacaaucaagucug

SEQ ID NO: 2058828 - RNA, 19 nt, Artificial Sequence
  Description of Artificial Sequence: Synthetic oligonucleotide
uguuucuucgaccuacauu

SEQ ID NO: 2058829 - RNA, 19 nt, Artificial Sequence
  Description of Artificial Sequence: Synthetic oligonucleotide
ugacguagggaaaguaggu

SEQ ID NO: 2058830 - RNA, 19 nt, Artificial Sequence
  Description of Artificial Sequence: Synthetic oligonucleotide
ugacacgaccagaagaaau

SEQ ID NO: 2058831 - RNA, 19 nt, Artificial Sequence
  Description of Artificial Sequence: Synthetic oligonucleotide
acgaccagaagaaauuuag

SEQ ID NO: 2058832 - RNA, 19 nt, Artificial Sequence
  Description of Artificial Sequence: Synthetic oligonucleotide
aaaguugaacugacacgac

SEQ ID NO: 2058833 - RNA, 19 nt, Artificial Sequence
  Description of Artificial Sequence: Synthetic oligonucleotide
uaccccauuagcuuucagu

SEQ ID NO: 2058834 - RNA, 19 nt, Artificial Sequence
  Description of Artificial Sequence: Synthetic oligonucleotide
gaggaacuaggaucucugg

SEQ ID NO: 2058835 - RNA, 19 nt, Artificial Sequence
  Description of Artificial Sequence: Synthetic oligonucleotide
uaauaguuacaaugguuua

SEQ ID NO: 2058836 - RNA, 19 nt, Artificial Sequence
  Description of Artificial Sequence: Synthetic oligonucleotide
guuuguucgcaggucaggg

SEQ ID NO: 2058837 - RNA, 19 nt, Artificial Sequence
  Description of Artificial Sequence: Synthetic oligonucleotide
auuaaaacauccacuugcu

SEQ ID NO: 2058838 - RNA, 19 nt, Artificial Sequence
  Description of Artificial Sequence: Synthetic oligonucleotide
acgaucugucuguucuugc

SEQ ID NO: 2058839 - RNA, 19 nt, Artificial Sequence
  Description of Artificial Sequence: Synthetic oligonucleotide
guuuacugcugauaauaac

SEQ ID NO: 2058840 - RNA, 19 nt, Artificial Sequence
  Description of Artificial Sequence: Synthetic oligonucleotide
acacagagcauuaacaaaa

SEQ ID NO: 2058841 - RNA, 19 nt, Artificial Sequence
  Description of Artificial Sequence: Synthetic oligonucleotide
acugcugauaauaacuaga

SEQ ID NO: 2058842 - RNA, 19 nt, Artificial Sequence
  Description of Artificial Sequence: Synthetic oligonucleotide
caauuggucauuaaaacau

SEQ ID NO: 2058843 - RNA, 19 nt, Artificial Sequence
  Description of Artificial Sequence: Synthetic oligonucleotide
cauuuugcugguccugugc

SEQ ID NO: 2058844 - RNA, 19 nt, Artificial Sequence
  Description of Artificial Sequence: Synthetic oligonucleotide
aguugaacugacacgacca

SEQ ID NO: 2058845 - RNA, 19 nt, Artificial Sequence
  Description of Artificial Sequence: Synthetic oligonucleotide
ugucugacgaucugucugu

SEQ ID NO: 2058846 - RNA, 19 nt, Artificial Sequence
  Description of Artificial Sequence: Synthetic oligonucleotide
caacaguuucuucaauaag

SEQ ID NO: 2058847 - RNA, 19 nt, Artificial Sequence
  Description of Artificial Sequence: Synthetic oligonucleotide
uagugauugugacuuuuaa

SEQ ID NO: 2058848 - RNA, 19 nt, Artificial Sequence
  Description of Artificial Sequence: Synthetic oligonucleotide
uuucggccauguuucuucg

SEQ ID NO: 2058849 - RNA, 19 nt, Artificial Sequence
  Description of Artificial Sequence: Synthetic oligonucleotide
uuccucuaauucuucauua

SEQ ID NO: 2058850 - RNA, 19 nt, Artificial Sequence
  Description of Artificial Sequence: Synthetic oligonucleotide
accccauuagcuuucaguu

SEQ ID NO: 2058851 - RNA, 19 nt, Artificial Sequence
  Description of Artificial Sequence: Synthetic oligonucleotide
cugucugacgaucugucug

SEQ ID NO: 2058852 - RNA, 19 nt, Artificial Sequence
  Description of Artificial Sequence: Synthetic oligonucleotide
cuucauuauuaucgucucc

SEQ ID NO: 2058853 - RNA, 19 nt, Artificial Sequence
  Description of Artificial Sequence: Synthetic oligonucleotide
uuagugauugugacuuuua

SEQ ID NO: 2058854 - RNA, 19 nt, Artificial Sequence
  Description of Artificial Sequence: Synthetic oligonucleotide
acaaucaagucuguacaug

SEQ ID NO: 2058855 - RNA, 19 nt, Artificial Sequence
  Description of Artificial Sequence: Synthetic oligonucleotide
caaauauugcaaauacaaa

SEQ ID NO: 2058856 - RNA, 19 nt, Artificial Sequence
  Description of Artificial Sequence: Synthetic oligonucleotide
ucggccauguuucuucgac

SEQ ID NO: 2058857 - RNA, 19 nt, Artificial Sequence
  Description of Artificial Sequence: Synthetic oligonucleotide
guugaacugacacgaccag

SEQ ID NO: 2058858 - RNA, 19 nt, Artificial Sequence
  Description of Artificial Sequence: Synthetic oligonucleotide
cuugucguccauccagugc

SEQ ID NO: 2058859 - RNA, 19 nt, Artificial Sequence
  Description of Artificial Sequence: Synthetic oligonucleotide
uccucgugaugacauugag

SEQ ID NO: 2058860 - RNA, 19 nt, Artificial Sequence
  Description of Artificial Sequence: Synthetic oligonucleotide
acuaggaucucugggguug

SEQ ID NO: 2058861 - RNA, 19 nt, Artificial Sequence
  Description of Artificial Sequence: Synthetic oligonucleotide
ccagaagaaauuuaggcca

SEQ ID NO: 2058862 - RNA, 19 nt, Artificial Sequence
  Description of Artificial Sequence: Synthetic oligonucleotide
ccaagaagaacauauuuca

SEQ ID NO: 2058863 - RNA, 19 nt, Artificial Sequence
  Description of Artificial Sequence: Synthetic oligonucleotide
uuauuaucgucuccucuuu

SEQ ID NO: 2058864 - RNA, 19 nt, Artificial Sequence
  Description of Artificial Sequence: Synthetic oligonucleotide
guccuuacucaauugguca

SEQ ID NO: 2058865 - RNA, 19 nt, Artificial Sequence
  Description of Artificial Sequence: Synthetic oligonucleotide
gauccucgugaugacauug

SEQ ID NO: 2058866 - RNA, 19 nt, Artificial Sequence
  Description of Artificial Sequence: Synthetic oligonucleotide
agcccuacucauccaaaag

SEQ ID NO: 2058867 - RNA, 19 nt, Artificial Sequence
  Description of Artificial Sequence: Synthetic oligonucleotide
acgguagaauaucuucuug

SEQ ID NO: 2058868 - RNA, 19 nt, Artificial Sequence
  Description of Artificial Sequence: Synthetic oligonucleotide
uuaaaacauccacuugcuu

SEQ ID NO: 2058869 - RNA, 19 nt, Artificial Sequence
  Description of Artificial Sequence: Synthetic oligonucleotide
cacagagcauuaacaaaac

SEQ ID NO: 2058870 - RNA, 19 nt, Artificial Sequence
  Description of Artificial Sequence: Synthetic oligonucleotide
accauuugguucacagccc

SEQ ID NO: 2058871 - RNA, 19 nt, Artificial Sequence
  Description of Artificial Sequence: Synthetic oligonucleotide
ucauuauuaucgucuccuc

SEQ ID NO: 2058872 - RNA, 19 nt, Artificial Sequence
  Description of Artificial Sequence: Synthetic oligonucleotide
uuaucgucuccucuuucau

SEQ ID NO: 2058873 - RNA, 19 nt, Artificial Sequence
  Description of Artificial Sequence: Synthetic oligonucleotide
aggucagggacuugucguc

SEQ ID NO: 2058874 - RNA, 19 nt, Artificial Sequence
  Description of Artificial Sequence: Synthetic oligonucleotide
uuuguucgcaggucaggga

SEQ ID NO: 2058875 - RNA, 19 nt, Artificial Sequence
  Description of Artificial Sequence: Synthetic oligonucleotide
aacugccgccuuuucuguc

SEQ ID NO: 2058876 - RNA, 19 nt, Artificial Sequence
  Description of Artificial Sequence: Synthetic oligonucleotide
agguuuacugcugauaaua

SEQ ID NO: 2058877 - RNA, 19 nt, Artificial Sequence
  Description of Artificial Sequence: Synthetic oligonucleotide
gaacugacacgaccagaag

SEQ ID NO: 2058878 - RNA, 19 nt, Artificial Sequence
  Description of Artificial Sequence: Synthetic oligonucleotide
uuuagugauugugacuuuu

SEQ ID NO: 2058879 - RNA, 19 nt, Artificial Sequence
  Description of Artificial Sequence: Synthetic oligonucleotide
cucuuugucggcuuccuga

SEQ ID NO: 2058880 - RNA, 19 nt, Artificial Sequence
  Description of Artificial Sequence: Synthetic oligonucleotide
uccuuaaguggcacuucug

SEQ ID NO: 2058881 - RNA, 19 nt, Artificial Sequence
  Description of Artificial Sequence: Synthetic oligonucleotide
aggcauauguaguugcuuu

SEQ ID NO: 2058882 - RNA, 19 nt, Artificial Sequence
  Description of Artificial Sequence: Synthetic oligonucleotide
ugcugauaauaacuagaua

SEQ ID NO: 2058883 - RNA, 19 nt, Artificial Sequence
  Description of Artificial Sequence: Synthetic oligonucleotide
gucacuuggguuuguucgc

SEQ ID NO: 2058884 - RNA, 19 nt, Artificial Sequence
  Description of Artificial Sequence: Synthetic oligonucleotide
ucuccccuuguaacugccg

SEQ ID NO: 2058885 - RNA, 19 nt, Artificial Sequence
  Description of Artificial Sequence: Synthetic oligonucleotide
aggucuacaguacgguaga

SEQ ID NO: 2058886 - RNA, 19 nt, Artificial Sequence
  Description of Artificial Sequence: Synthetic oligonucleotide
ugauugaaaugaagacaaa

SEQ ID NO: 2058887 - RNA, 19 nt, Artificial Sequence
  Description of Artificial Sequence: Synthetic oligonucleotide
ccaaguacuugcauuucgg

SEQ ID NO: 2058888 - RNA, 19 nt, Artificial Sequence
  Description of Artificial Sequence: Synthetic oligonucleotide
uuaagauagggauguccuu

SEQ ID NO: 2058889 - RNA, 19 nt, Artificial Sequence
  Description of Artificial Sequence: Synthetic oligonucleotide
aguacuuuuccaagaagaa

SEQ ID NO: 2058890 - RNA, 19 nt, Artificial Sequence
  Description of Artificial Sequence: Synthetic oligonucleotide
uacgguagaauaucuucuu

SEQ ID NO: 2058891 - RNA, 19 nt, Artificial Sequence
  Description of Artificial Sequence: Synthetic oligonucleotide
aguaggucuacaguacggu

SEQ ID NO: 2058892 - RNA, 19 nt, Artificial Sequence
  Description of Artificial Sequence: Synthetic oligonucleotide
uugcuuguaauaggcauau

SEQ ID NO: 2058893 - RNA, 19 nt, Artificial Sequence
  Description of Artificial Sequence: Synthetic oligonucleotide
ugggguuguuugacguagg

SEQ ID NO: 2058894 - RNA, 19 nt, Artificial Sequence
  Description of Artificial Sequence: Synthetic oligonucleotide
ugcuucuauagaagcgagu

SEQ ID NO: 2058895 - RNA, 19 nt, Artificial Sequence
  Description of Artificial Sequence: Synthetic oligonucleotide
uccuuacucaauuggucau

SEQ ID NO: 2058896 - RNA, 19 nt, Artificial Sequence
  Description of Artificial Sequence: Synthetic oligonucleotide
uuaggccaguuaagauagg

SEQ ID NO: 2058897 - RNA, 19 nt, Artificial Sequence
  Description of Artificial Sequence: Synthetic oligonucleotide
agcauuaacaaaacagguu

SEQ ID NO: 2058898 - RNA, 19 nt, Artificial Sequence
  Description of Artificial Sequence: Synthetic oligonucleotide
cuagauaaccagaggucca

SEQ ID NO: 2058899 - RNA, 19 nt, Artificial Sequence
  Description of Artificial Sequence: Synthetic oligonucleotide
caaacuuccuuaaguggca

SEQ ID NO: 2058900 - RNA, 19 nt, Artificial Sequence
  Description of Artificial Sequence: Synthetic oligonucleotide
cauuaacaaaacagguuaa

SEQ ID NO: 2058901 - RNA, 19 nt, Artificial Sequence
  Description of Artificial Sequence: Synthetic oligonucleotide
auuugguucacagcccaca

SEQ ID NO: 2058902 - RNA, 19 nt, Artificial Sequence
  Description of Artificial Sequence: Synthetic oligonucleotide
uuagcccuacucauccaaa

SEQ ID NO: 2058903 - RNA, 19 nt, Artificial Sequence
  Description of Artificial Sequence: Synthetic oligonucleotide
ggcuuagcccuacucaucc

SEQ ID NO: 2058904 - RNA, 19 nt, Artificial Sequence
  Description of Artificial Sequence: Synthetic oligonucleotide
uaguuacaaugguuuacaa

SEQ ID NO: 2058905 - RNA, 19 nt, Artificial Sequence
  Description of Artificial Sequence: Synthetic oligonucleotide
auugagcuugaggaacuag

SEQ ID NO: 2058906 - RNA, 19 nt, Artificial Sequence
  Description of Artificial Sequence: Synthetic oligonucleotide
uugaacugacacgaccaga

SEQ ID NO: 2058907 - RNA, 19 nt, Artificial Sequence
  Description of Artificial Sequence: Synthetic oligonucleotide
gcuuguaauaggcauaugu

SEQ ID NO: 2058908 - RNA, 19 nt, Artificial Sequence
  Description of Artificial Sequence: Synthetic oligonucleotide
aggaguugcaaagaguaua

SEQ ID NO: 2058909 - RNA, 19 nt, Artificial Sequence
  Description of Artificial Sequence: Synthetic oligonucleotide
cuacucauccaaaaguacu

SEQ ID NO: 2058910 - RNA, 19 nt, Artificial Sequence
  Description of Artificial Sequence: Synthetic oligonucleotide
agucuguacaugacuucac

SEQ ID NO: 2058911 - RNA, 19 nt, Artificial Sequence
  Description of Artificial Sequence: Synthetic oligonucleotide
uggaggaaggucucgcuuu

SEQ ID NO: 2058912 - RNA, 19 nt, Artificial Sequence
  Description of Artificial Sequence: Synthetic oligonucleotide
gacgaucugucuguucuug

SEQ ID NO: 2058913 - RNA, 19 nt, Artificial Sequence
  Description of Artificial Sequence: Synthetic oligonucleotide
ccacuugcuuguaauaggc

SEQ ID NO: 2058914 - RNA, 19 nt, Artificial Sequence
  Description of Artificial Sequence: Synthetic oligonucleotide
uagggauguccuuacucaa

SEQ ID NO: 2058915 - RNA, 19 nt, Artificial Sequence
  Description of Artificial Sequence: Synthetic oligonucleotide
agauaaccagagguccaac

SEQ ID NO: 2058916 - RNA, 19 nt, Artificial Sequence
  Description of Artificial Sequence: Synthetic oligonucleotide
uguucgcaggucagggacu

SEQ ID NO: 2058917 - RNA, 19 nt, Artificial Sequence
  Description of Artificial Sequence: Synthetic oligonucleotide
acugccgccuuuucugucu

SEQ ID NO: 2058918 - RNA, 19 nt, Artificial Sequence
  Description of Artificial Sequence: Synthetic oligonucleotide
cugggguuguuugacguag

SEQ ID NO: 2058919 - RNA, 19 nt, Artificial Sequence
  Description of Artificial Sequence: Synthetic oligonucleotide
cuccccuuguaacugccgc

SEQ ID NO: 2058920 - RNA, 19 nt, Artificial Sequence
  Description of Artificial Sequence: Synthetic oligonucleotide
cauauguaguugcuuuuga

SEQ ID NO: 2058921 - RNA, 19 nt, Artificial Sequence
  Description of Artificial Sequence: Synthetic oligonucleotide
cuuaaguggcacuucugaa

SEQ ID NO: 2058922 - RNA, 19 nt, Artificial Sequence
  Description of Artificial Sequence: Synthetic oligonucleotide
caccaggaguugcaaagag

SEQ ID NO: 2058923 - RNA, 19 nt, Artificial Sequence
  Description of Artificial Sequence: Synthetic oligonucleotide
uccccuuguaacugccgcc

SEQ ID NO: 2058924 - RNA, 19 nt, Artificial Sequence
  Description of Artificial Sequence: Synthetic oligonucleotide
accgaggugugucuuggcu

SEQ ID NO: 2058925 - RNA, 19 nt, Artificial Sequence
  Description of Artificial Sequence: Synthetic oligonucleotide
uucuaccccauuagcuuuc

SEQ ID NO: 2058926 - RNA, 19 nt, Artificial Sequence
  Description of Artificial Sequence: Synthetic oligonucleotide
ggugugucuuggcuggagg

SEQ ID NO: 2058927 - RNA, 19 nt, Artificial Sequence
  Description of Artificial Sequence: Synthetic oligonucleotide
ucucuccccuuguaacugc

SEQ ID NO: 2058928 - RNA, 19 nt, Artificial Sequence
  Description of Artificial Sequence: Synthetic oligonucleotide
gacguagggaaaguagguc

SEQ ID NO: 2058929 - RNA, 19 nt, Artificial Sequence
  Description of Artificial Sequence: Synthetic oligonucleotide
acuugucguccauccagug

SEQ ID NO: 2058930 - RNA, 19 nt, Artificial Sequence
  Description of Artificial Sequence: Synthetic oligonucleotide
uguuugacguagggaaagu

SEQ ID NO: 2058931 - RNA, 19 nt, Artificial Sequence
  Description of Artificial Sequence: Synthetic oligonucleotide
auguccuuacucaauuggu

SEQ ID NO: 2058932 - RNA, 19 nt, Artificial Sequence
  Description of Artificial Sequence: Synthetic oligonucleotide
uaucgucuccucuuucaua

SEQ ID NO: 2058933 - RNA, 19 nt, Artificial Sequence
  Description of Artificial Sequence: Synthetic oligonucleotide
ugugucuuggcuggaggaa

SEQ ID NO: 2058934 - RNA, 19 nt, Artificial Sequence
  Description of Artificial Sequence: Synthetic oligonucleotide
uaacugccgccuuuucugu

SEQ ID NO: 2058935 - RNA, 19 nt, Artificial Sequence
  Description of Artificial Sequence: Synthetic oligonucleotide
acuuccuuaaguggcacuu

SEQ ID NO: 2058936 - RNA, 19 nt, Artificial Sequence
  Description of Artificial Sequence: Synthetic oligonucleotide
cgugaugacauugagcuug

SEQ ID NO: 2058937 - RNA, 19 nt, Artificial Sequence
  Description of Artificial Sequence: Synthetic oligonucleotide
uuacucaauuggucauuaa

SEQ ID NO: 2058938 - RNA, 19 nt, Artificial Sequence
  Description of Artificial Sequence: Synthetic oligonucleotide
guuaauaguuacaaugguu

SEQ ID NO: 2058939 - RNA, 19 nt, Artificial Sequence
  Description of Artificial Sequence: Synthetic oligonucleotide
aguaccaccaggaguugca

SEQ ID NO: 2058940 - RNA, 19 nt, Artificial Sequence
  Description of Artificial Sequence: Synthetic oligonucleotide
uagguuuacugcugauaau

SEQ ID NO: 2058941 - RNA, 19 nt, Artificial Sequence
  Description of Artificial Sequence: Synthetic oligonucleotide
cugacgaucugucuguucu

SEQ ID NO: 2058942 - RNA, 19 nt, Artificial Sequence
  Description of Artificial Sequence: Synthetic oligonucleotide
ucacuuggguuuguucgca

SEQ ID NO: 2058943 - RNA, 19 nt, Artificial Sequence
  Description of Artificial Sequence: Synthetic oligonucleotide
cuuucccgucauuuugcug

SEQ ID NO: 2058944 - RNA, 19 nt, Artificial Sequence
  Description of Artificial Sequence: Synthetic oligonucleotide
cuuguuuccccgcccuuuc

SEQ ID NO: 2058945 - RNA, 19 nt, Artificial Sequence
  Description of Artificial Sequence: Synthetic oligonucleotide
ccuacucauccaaaaguac

SEQ ID NO: 2058946 - RNA, 19 nt, Artificial Sequence
  Description of Artificial Sequence: Synthetic oligonucleotide
cccaaguacuugcauuucg

SEQ ID NO: 2058947 - RNA, 19 nt, Artificial Sequence
  Description of Artificial Sequence: Synthetic oligonucleotide
gcuucucuccccuuguaac

SEQ ID NO: 2058948 - RNA, 19 nt, Artificial Sequence
  Description of Artificial Sequence: Synthetic oligonucleotide
ucguccauccagugcuucu

SEQ ID NO: 2058949 - RNA, 19 nt, Artificial Sequence
  Description of Artificial Sequence: Synthetic oligonucleotide
ucugacgaucugucuguuc

SEQ ID NO: 2058950 - RNA, 19 nt, Artificial Sequence
  Description of Artificial Sequence: Synthetic oligonucleotide
agauagggauguccuuacu

SEQ ID NO: 2058951 - RNA, 19 nt, Artificial Sequence
  Description of Artificial Sequence: Synthetic oligonucleotide
cauuauuaucgucuccucu

SEQ ID NO: 2058952 - RNA, 19 nt, Artificial Sequence
  Description of Artificial Sequence: Synthetic oligonucleotide
cucuccccuuguaacugcc

SEQ ID NO: 2058953 - RNA, 19 nt, Artificial Sequence
  Description of Artificial Sequence: Synthetic oligonucleotide
cuuagcccuacucauccaa

SEQ ID NO: 2058954 - RNA, 19 nt, Artificial Sequence
  Description of Artificial Sequence: Synthetic oligonucleotide
uggcuuagcccuacucauc

SEQ ID NO: 2058955 - RNA, 19 nt, Artificial Sequence
  Description of Artificial Sequence: Synthetic oligonucleotide
ucugggguuguuugacgua

SEQ ID NO: 2058956 - RNA, 19 nt, Artificial Sequence
  Description of Artificial Sequence: Synthetic oligonucleotide
ccucgugaugacauugagc

SEQ ID NO: 2058957 - RNA, 19 nt, Artificial Sequence
  Description of Artificial Sequence: Synthetic oligonucleotide
gguuuguucgcaggucagg

SEQ ID NO: 2058958 - RNA, 19 nt, Artificial Sequence
  Description of Artificial Sequence: Synthetic oligonucleotide
ucggcuuccugauccucgu

SEQ ID NO: 2058959 - RNA, 19 nt, Artificial Sequence
  Description of Artificial Sequence: Synthetic oligonucleotide
ccaggaguugcaaagagua

SEQ ID NO: 2058960 - RNA, 19 nt, Artificial Sequence
  Description of Artificial Sequence: Synthetic oligonucleotide
ccacaaucaagucuguaca

SEQ ID NO: 2058961 - RNA, 19 nt, Artificial Sequence
  Description of Artificial Sequence: Synthetic oligonucleotide
ccuacauuugcuugcucuc

SEQ ID NO: 2058962 - RNA, 19 nt, Artificial Sequence
  Description of Artificial Sequence: Synthetic oligonucleotide
cacuuggguuuguucgcag

SEQ ID NO: 2058963 - RNA, 19 nt, Artificial Sequence
  Description of Artificial Sequence: Synthetic oligonucleotide
uuguaacugccgccuuuuc

SEQ ID NO: 2058964 - RNA, 19 nt, Artificial Sequence
  Description of Artificial Sequence: Synthetic oligonucleotide
auguuucuucgaccuacau

SEQ ID NO: 2058965 - RNA, 19 nt, Artificial Sequence
  Description of Artificial Sequence: Synthetic oligonucleotide
ugcucucuuugucggcuuc

SEQ ID NO: 2058966 - RNA, 19 nt, Artificial Sequence
  Description of Artificial Sequence: Synthetic oligonucleotide
cccgucauuuugcuggucc

SEQ ID NO: 2058967 - RNA, 19 nt, Artificial Sequence
  Description of Artificial Sequence: Synthetic oligonucleotide
guacgguagaauaucuucu

SEQ ID NO: 2058968 - RNA, 19 nt, Artificial Sequence
  Description of Artificial Sequence: Synthetic oligonucleotide
guagggaaaguaggucuac

SEQ ID NO: 2058969 - RNA, 19 nt, Artificial Sequence
  Description of Artificial Sequence: Synthetic oligonucleotide
guaggucuacaguacggua

SEQ ID NO: 2058970 - RNA, 19 nt, Artificial Sequence
  Description of Artificial Sequence: Synthetic oligonucleotide
ucucgcuuugcugccuugu

SEQ ID NO: 2058971 - RNA, 19 nt, Artificial Sequence
  Description of Artificial Sequence: Synthetic oligonucleotide
ggucauuaaaacauccacu

SEQ ID NO: 2058972 - RNA, 19 nt, Artificial Sequence
  Description of Artificial Sequence: Synthetic oligonucleotide
uccugauccucgugaugac

SEQ ID NO: 2058973 - RNA, 19 nt, Artificial Sequence
  Description of Artificial Sequence: Synthetic oligonucleotide
aggccaguuaagauaggga

SEQ ID NO: 2058974 - RNA, 19 nt, Artificial Sequence
  Description of Artificial Sequence: Synthetic oligonucleotide
gccaguuaagauagggaug

SEQ ID NO: 2058975 - RNA, 19 nt, Artificial Sequence
  Description of Artificial Sequence: Synthetic oligonucleotide
cgaccagaagaaauuuagg

SEQ ID NO: 2058976 - RNA, 19 nt, Artificial Sequence
  Description of Artificial Sequence: Synthetic oligonucleotide
ccuuaaguggcacuucuga

SEQ ID NO: 2058977 - RNA, 19 nt, Artificial Sequence
  Description of Artificial Sequence: Synthetic oligonucleotide
cacuugcuuguaauaggca

SEQ ID NO: 2058978 - RNA, 19 nt, Artificial Sequence
  Description of Artificial Sequence: Synthetic oligonucleotide
accaggaguugcaaagagu

SEQ ID NO: 2058979 - RNA, 19 nt, Artificial Sequence
  Description of Artificial Sequence: Synthetic oligonucleotide
ccauguuucuucgaccuac

SEQ ID NO: 2058980 - RNA, 19 nt, Artificial Sequence
  Description of Artificial Sequence: Synthetic oligonucleotide
uucccgucauuuugcuggu

SEQ ID NO: 2058981 - RNA, 19 nt, Artificial Sequence
  Description of Artificial Sequence: Synthetic oligonucleotide
ggccaguuaagauagggau

SEQ ID NO: 2058982 - RNA, 19 nt, Artificial Sequence
  Description of Artificial Sequence: Synthetic oligonucleotide
ucuaccccauuagcuuuca

SEQ ID NO: 2058983 - RNA, 19 nt, Artificial Sequence
  Description of Artificial Sequence: Synthetic oligonucleotide
ggaggaaggucucgcuuug

SEQ ID NO: 2058984 - RNA, 19 nt, Artificial Sequence
  Description of Artificial Sequence: Synthetic oligonucleotide
ugcugccuuguuuccccgc

SEQ ID NO: 2058985 - RNA, 19 nt, Artificial Sequence
  Description of Artificial Sequence: Synthetic oligonucleotide
gacacgaccagaagaaauu

SEQ ID NO: 2058986 - RNA, 19 nt, Artificial Sequence
  Description of Artificial Sequence: Synthetic oligonucleotide
cuuacucaauuggucauua

SEQ ID NO: 2058987 - RNA, 19 nt, Artificial Sequence
  Description of Artificial Sequence: Synthetic oligonucleotide
ucagggacuugucguccau

SEQ ID NO: 2058988 - RNA, 19 nt, Artificial Sequence
  Description of Artificial Sequence: Synthetic oligonucleotide
acacgaccagaagaaauuu

SEQ ID NO: 2058989 - RNA, 19 nt, Artificial Sequence
  Description of Artificial Sequence: Synthetic oligonucleotide
gcccuuucccgucauuuug

SEQ ID NO: 2058990 - RNA, 19 nt, Artificial Sequence
  Description of Artificial Sequence: Synthetic oligonucleotide
uccaacuggcuuagcccua

SEQ ID NO: 2058991 - RNA, 19 nt, Artificial Sequence
  Description of Artificial Sequence: Synthetic oligonucleotide
ugacgaucugucuguucuu

SEQ ID NO: 2058992 - RNA, 19 nt, Artificial Sequence
  Description of Artificial Sequence: Synthetic oligonucleotide
cccuuucccgucauuuugc

SEQ ID NO: 2058993 - RNA, 19 nt, Artificial Sequence
  Description of Artificial Sequence: Synthetic oligonucleotide
ugauccucgugaugacauu

SEQ ID NO: 2058994 - RNA, 19 nt, Artificial Sequence
  Description of Artificial Sequence: Synthetic oligonucleotide
ccauuagcuuucaguuucc

SEQ ID NO: 2058995 - RNA, 19 nt, Artificial Sequence
  Description of Artificial Sequence: Synthetic oligonucleotide
guacaugacuucaccagcu

SEQ ID NO: 2058996 - RNA, 19 nt, Artificial Sequence
  Description of Artificial Sequence: Synthetic oligonucleotide
gggaaaguaggucuacagu

SEQ ID NO: 2058997 - RNA, 19 nt, Artificial Sequence
  Description of Artificial Sequence: Synthetic oligonucleotide
agcuuucaguuuccucuaa

SEQ ID NO: 2058998 - RNA, 19 nt, Artificial Sequence
  Description of Artificial Sequence: Synthetic oligonucleotide
cugccuuguuuccccgccc

SEQ ID NO: 2058999 - RNA, 19 nt, Artificial Sequence
  Description of Artificial Sequence: Synthetic oligonucleotide
ggaccgaggugugucuugg

SEQ ID NO: 2059000 - RNA, 19 nt, Artificial Sequence
  Description of Artificial Sequence: Synthetic oligonucleotide
gaggaaggucucgcuuugc

SEQ ID NO: 2059001 - RNA, 19 nt, Artificial Sequence
  Description of Artificial Sequence: Synthetic oligonucleotide
ugcuuguaauaggcauaug

SEQ ID NO: 2059002 - RNA, 19 nt, Artificial Sequence
  Description of Artificial Sequence: Synthetic oligonucleotide
cuuugucggcuuccugauc

SEQ ID NO: 2059003 - RNA, 19 nt, Artificial Sequence
  Description of Artificial Sequence: Synthetic oligonucleotide
aggugugucuuggcuggag

SEQ ID NO: 2059004 - RNA, 19 nt, Artificial Sequence
  Description of Artificial Sequence: Synthetic oligonucleotide
gcuugaggaacuaggaucu

SEQ ID NO: 2059005 - RNA, 19 nt, Artificial Sequence
  Description of Artificial Sequence: Synthetic oligonucleotide
cacgaccagaagaaauuua

SEQ ID NO: 2059006 - RNA, 19 nt, Artificial Sequence
  Description of Artificial Sequence: Synthetic oligonucleotide
gguuuacugcugauaauaa

SEQ ID NO: 2059007 - RNA, 19 nt, Artificial Sequence
  Description of Artificial Sequence: Synthetic oligonucleotide
auccucgugaugacauuga

SEQ ID NO: 2059008 - RNA, 19 nt, Artificial Sequence
  Description of Artificial Sequence: Synthetic oligonucleotide
gcuuugcugccuuguuucc

SEQ ID NO: 2059009 - RNA, 19 nt, Artificial Sequence
  Description of Artificial Sequence: Synthetic oligonucleotide
guuugacguagggaaagua

SEQ ID NO: 2059010 - RNA, 19 nt, Artificial Sequence
  Description of Artificial Sequence: Synthetic oligonucleotide
ccgaggugugucuuggcug

SEQ ID NO: 2059011 - RNA, 19 nt, Artificial Sequence
  Description of Artificial Sequence: Synthetic oligonucleotide
cuggcuuagcccuacucau

SEQ ID NO: 2059012 - RNA, 19 nt, Artificial Sequence
  Description of Artificial Sequence: Synthetic oligonucleotide
cgcuuugcugccuuguuuc

SEQ ID NO: 2059013 - RNA, 19 nt, Artificial Sequence
  Description of Artificial Sequence: Synthetic oligonucleotide
gcuucucuggggucacuug

SEQ ID NO: 2059014 - RNA, 19 nt, Artificial Sequence
  Description of Artificial Sequence: Synthetic oligonucleotide
agggauguccuuacucaau

SEQ ID NO: 2059015 - RNA, 19 nt, Artificial Sequence
  Description of Artificial Sequence: Synthetic oligonucleotide
ugucguccauccagugcuu

SEQ ID NO: 2059016 - RNA, 19 nt, Artificial Sequence
  Description of Artificial Sequence: Synthetic oligonucleotide
gcccuacucauccaaaagu

SEQ ID NO: 2059017 - RNA, 19 nt, Artificial Sequence
  Description of Artificial Sequence: Synthetic oligonucleotide
gacuugucguccauccagu

SEQ ID NO: 2059018 - RNA, 19 nt, Artificial Sequence
  Description of Artificial Sequence: Synthetic oligonucleotide
cuucuaccccauuagcuuu

SEQ ID NO: 2059019 - RNA, 19 nt, Artificial Sequence
  Description of Artificial Sequence: Synthetic oligonucleotide
cccuacucauccaaaagua

SEQ ID NO: 2059020 - RNA, 19 nt, Artificial Sequence
  Description of Artificial Sequence: Synthetic oligonucleotide
gcuucuaccccauuagcuu

SEQ ID NO: 2059021 - RNA, 19 nt, Artificial Sequence
  Description of Artificial Sequence: Synthetic oligonucleotide
ggguuuguucgcaggucag

SEQ ID NO: 2059022 - RNA, 19 nt, Artificial Sequence
  Description of Artificial Sequence: Synthetic oligonucleotide
uuccccgcccuuucccguc

SEQ ID NO: 2059023 - RNA, 19 nt, Artificial Sequence
  Description of Artificial Sequence: Synthetic oligonucleotide
uccccgcccuuucccguca

SEQ ID NO: 2059024 - RNA, 19 nt, Artificial Sequence
  Description of Artificial Sequence: Synthetic oligonucleotide
gucucgcuuugcugccuug

SEQ ID NO: 2059025 - RNA, 19 nt, Artificial Sequence
  Description of Artificial Sequence: Synthetic oligonucleotide
ggaguugcaaagaguauau

SEQ ID NO: 2059026 - RNA, 19 nt, Artificial Sequence
  Description of Artificial Sequence: Synthetic oligonucleotide
ggguuguuugacguaggga

SEQ ID NO: 2059027 - RNA, 19 nt, Artificial Sequence
  Description of Artificial Sequence: Synthetic oligonucleotide
uuggaccgaggugugucuu

SEQ ID NO: 2059028 - RNA, 19 nt, Artificial Sequence
  Description of Artificial Sequence: Synthetic oligonucleotide
cugccgccuuuucugucug

SEQ ID NO: 2059029 - RNA, 19 nt, Artificial Sequence
  Description of Artificial Sequence: Synthetic oligonucleotide
ccgccuuuucugucugacg

SEQ ID NO: 2059030 - RNA, 19 nt, Artificial Sequence
  Description of Artificial Sequence: Synthetic oligonucleotide
gcuagguuuacugcugaua

SEQ ID NO: 2059031 - RNA, 19 nt, Artificial Sequence
  Description of Artificial Sequence: Synthetic oligonucleotide
cuuggaccgaggugugucu

SEQ ID NO: 2059032 - RNA, 19 nt, Artificial Sequence
  Description of Artificial Sequence: Synthetic oligonucleotide
ugccgccuuuucugucuga

SEQ ID NO: 2059033 - RNA, 19 nt, Artificial Sequence
  Description of Artificial Sequence: Synthetic oligonucleotide
caguuaagauagggauguc

SEQ ID NO: 2059034 - RNA, 19 nt, Artificial Sequence
  Description of Artificial Sequence: Synthetic oligonucleotide
uucgcaggucagggacuug

SEQ ID NO: 2059035 - RNA, 19 nt, Artificial Sequence
  Description of Artificial Sequence: Synthetic oligonucleotide
gggauguccuuacucaauu

SEQ ID NO: 2059036 - RNA, 19 nt, Artificial Sequence
  Description of Artificial Sequence: Synthetic oligonucleotide
guccauccagugcuucucu

SEQ ID NO: 2059037 - RNA, 19 nt, Artificial Sequence
  Description of Artificial Sequence: Synthetic oligonucleotide
gggacuugucguccaucca

SEQ ID NO: 2059038 - RNA, 19 nt, Artificial Sequence
  Description of Artificial Sequence: Synthetic oligonucleotide
gucguccauccagugcuuc

SEQ ID NO: 2059039 - RNA, 19 nt, Artificial Sequence
  Description of Artificial Sequence: Synthetic oligonucleotide
guuuagugauugugacuuu

SEQ ID NO: 2059040 - RNA, 19 nt, Artificial Sequence
  Description of Artificial Sequence: Synthetic oligonucleotide
guaccaccaggaguugcaa

SEQ ID NO: 2059041 - RNA, 19 nt, Artificial Sequence
  Description of Artificial Sequence: Synthetic oligonucleotide
caggaguugcaaagaguau

SEQ ID NO: 2059042 - RNA, 19 nt, Artificial Sequence
  Description of Artificial Sequence: Synthetic oligonucleotide
ggcauauguaguugcuuuu

SEQ ID NO: 2059043 - RNA, 19 nt, Artificial Sequence
  Description of Artificial Sequence: Synthetic oligonucleotide
cggccauguuucuucgacc

SEQ ID NO: 2059044 - RNA, 19 nt, Artificial Sequence
  Description of Artificial Sequence: Synthetic oligonucleotide
caguacgguagaauaucuu

SEQ ID NO: 2059045 - RNA, 19 nt, Artificial Sequence
  Description of Artificial Sequence: Synthetic oligonucleotide
aggucucgcuuugcugccu

SEQ ID NO: 2059046 - RNA, 19 nt, Artificial Sequence
  Description of Artificial Sequence: Synthetic oligonucleotide
gcuuagcccuacucaucca

SEQ ID NO: 2059047 - RNA, 19 nt, Artificial Sequence
  Description of Artificial Sequence: Synthetic oligonucleotide
ccaacuggcuuagcccuac

SEQ ID NO: 2059048 - RNA, 19 nt, Artificial Sequence
  Description of Artificial Sequence: Synthetic oligonucleotide
cauuagcuuucaguuuccu

SEQ ID NO: 2059049 - RNA, 19 nt, Artificial Sequence
  Description of Artificial Sequence: Synthetic oligonucleotide
gcuuucaguuuccucuaau

SEQ ID NO: 2059050 - RNA, 19 nt, Artificial Sequence
  Description of Artificial Sequence: Synthetic oligonucleotide
cguagggaaaguaggucua

SEQ ID NO: 2059051 - RNA, 19 nt, Artificial Sequence
  Description of Artificial Sequence: Synthetic oligonucleotide
ucccgucauuuugcugguc

SEQ ID NO: 2059052 - RNA, 19 nt, Artificial Sequence
  Description of Artificial Sequence: Synthetic oligonucleotide
gcuuccugauccucgugau

SEQ ID NO: 2059053 - RNA, 19 nt, Artificial Sequence
  Description of Artificial Sequence: Synthetic oligonucleotide
cucuggggucacuuggguu

SEQ ID NO: 2059054 - RNA, 19 nt, Artificial Sequence
  Description of Artificial Sequence: Synthetic oligonucleotide
cuugcauuucggccauguu

SEQ ID NO: 2059055 - RNA, 19 nt, Artificial Sequence
  Description of Artificial Sequence: Synthetic oligonucleotide
ccugauccucgugaugaca

SEQ ID NO: 2059056 - RNA, 19 nt, Artificial Sequence
  Description of Artificial Sequence: Synthetic oligonucleotide
cuaggaucucugggguugu

SEQ ID NO: 2059057 - RNA, 19 nt, Artificial Sequence
  Description of Artificial Sequence: Synthetic oligonucleotide
ggucuacaguacgguagaa

SEQ ID NO: 2059058 - RNA, 19 nt, Artificial Sequence
  Description of Artificial Sequence: Synthetic oligonucleotide
gccauguuucuucgaccua

SEQ ID NO: 2059059 - RNA, 19 nt, Artificial Sequence
  Description of Artificial Sequence: Synthetic oligonucleotide
cucgcuuugcugccuuguu

SEQ ID NO: 2059060 - RNA, 19 nt, Artificial Sequence
  Description of Artificial Sequence: Synthetic oligonucleotide
gccuuuucugucugacgau

SEQ ID NO: 2059061 - RNA, 19 nt, Artificial Sequence
  Description of Artificial Sequence: Synthetic oligonucleotide
gcauuucggccauguuucu

SEQ ID NO: 2059062 - RNA, 19 nt, Artificial Sequence
  Description of Artificial Sequence: Synthetic oligonucleotide
cauuucggccauguuucuu

SEQ ID NO: 2059063 - RNA, 19 nt, Artificial Sequence
  Description of Artificial Sequence: Synthetic oligonucleotide
ccccaaguacuugcauuuc

SEQ ID NO: 2059064 - RNA, 19 nt, Artificial Sequence
  Description of Artificial Sequence: Synthetic oligonucleotide
ccuuucccgucauuuugcu

SEQ ID NO: 2059065 - RNA, 19 nt, Artificial Sequence
  Description of Artificial Sequence: Synthetic oligonucleotide
caacuggcuuagcccuacu

SEQ ID NO: 2059066 - RNA, 19 nt, Artificial Sequence
  Description of Artificial Sequence: Synthetic oligonucleotide
ggucucgcuuugcugccuu

SEQ ID NO: 2059067 - RNA, 19 nt, Artificial Sequence
  Description of Artificial Sequence: Synthetic oligonucleotide
gucugacgaucugucuguu

SEQ ID NO: 2059068 - RNA, 19 nt, Artificial Sequence
  Description of Artificial Sequence: Synthetic oligonucleotide
ccccauuagcuuucaguuu

SEQ ID NO: 2059069 - RNA, 19 nt, Artificial Sequence
  Description of Artificial Sequence: Synthetic oligonucleotide
ccuuacucaauuggucauu

SEQ ID NO: 2059070 - RNA, 19 nt, Artificial Sequence
  Description of Artificial Sequence: Synthetic oligonucleotide
cgaccuacauuugcuugcu

SEQ ID NO: 2059071 - RNA, 19 nt, Artificial Sequence
  Description of Artificial Sequence: Synthetic oligonucleotide
ccgcccuuucccgucauuu

SEQ ID NO: 2059072 - RNA, 19 nt, Artificial Sequence
  Description of Artificial Sequence: Synthetic oligonucleotide
cccgcccuuucccgucauu

SEQ ID NO: 2059073 - RNA, 19 nt, Artificial Sequence
  Description of Artificial Sequence: Synthetic oligonucleotide
ccccgcccuuucccgucau

SEQ ID NO: 2059074 - RNA, 19 nt, Artificial Sequence
  Description of Artificial Sequence: Synthetic oligonucleotide
aaagcaaugaagcacaggc

SEQ ID NO: 2059075 - RNA, 19 nt, Artificial Sequence
  Description of Artificial Sequence: Synthetic oligonucleotide
aacccaaaugacuugaugc

SEQ ID NO: 2059076 - RNA, 19 nt, Artificial Sequence
  Description of Artificial Sequence: Synthetic oligonucleotide
gaaauaaugcuucaggaag

SEQ ID NO: 2059077 - RNA, 19 nt, Artificial Sequence
  Description of Artificial Sequence: Synthetic oligonucleotide
cauuguaugugucagaggc

SEQ ID NO: 2059078 - RNA, 19 nt, Artificial Sequence
  Description of Artificial Sequence: Synthetic oligonucleotide
aaugaggucaguagaaagc

SEQ ID NO: 2059079 - RNA, 19 nt, Artificial Sequence
  Description of Artificial Sequence: Synthetic oligonucleotide
acuuugagaaaucugcugg

SEQ ID NO: 2059080 - RNA, 19 nt, Artificial Sequence
  Description of Artificial Sequence: Synthetic oligonucleotide
uuuguauccugcaagaccu

SEQ ID NO: 2059081 - RNA, 19 nt, Artificial Sequence
  Description of Artificial Sequence: Synthetic oligonucleotide
  modified_base (10)..(10): a, c, u, g, unknown or other
uauguuuacnucugccugg

SEQ ID NO: 2059082 - RNA, 19 nt, Artificial Sequence
  Description of Artificial Sequence: Synthetic oligonucleotide
gacgaaauaaugcuucagg

SEQ ID NO: 2059083 - RNA, 19 nt, Artificial Sequence
  Description of Artificial Sequence: Synthetic oligonucleotide
ugcaagaccuuucaguggg

SEQ ID NO: 2059084 - RNA, 19 nt, Artificial Sequence
  Description of Artificial Sequence: Synthetic oligonucleotide
aaugacuugaugcacucca

SEQ ID NO: 2059085 - RNA, 19 nt, Artificial Sequence
  Description of Artificial Sequence: Synthetic oligonucleotide
aaucgacuguccuggaggc

SEQ ID NO: 2059086 - RNA, 19 nt, Artificial Sequence
  Description of Artificial Sequence: Synthetic oligonucleotide
aaaaccuuaaugcugccau

SEQ ID NO: 2059087 - RNA, 19 nt, Artificial Sequence
  Description of Artificial Sequence: Synthetic oligonucleotide
agcaaugaagcacaggcuc

SEQ ID NO: 2059088 - RNA, 19 nt, Artificial Sequence
  Description of Artificial Sequence: Synthetic oligonucleotide
aaauaacaccuguuccgcc

SEQ ID NO: 2059089 - RNA, 19 nt, Artificial Sequence
  Description of Artificial Sequence: Synthetic oligonucleotide
gaaucgacuguccuggagg

SEQ ID NO: 2059090 - RNA, 19 nt, Artificial Sequence
  Description of Artificial Sequence: Synthetic oligonucleotide
uuugggacgaaauaaugcu

SEQ ID NO: 2059091 - RNA, 19 nt, Artificial Sequence
  Description of Artificial Sequence: Synthetic oligonucleotide
uggugaauaacuuucugca

SEQ ID NO: 2059092 - RNA, 19 nt, Artificial Sequence
  Description of Artificial Sequence: Synthetic oligonucleotide
  modified_base (7)..(7): a, c, u, g, unknown or other
guuuacnucugccuggugc

SEQ ID NO: 2059093 - RNA, 19 nt, Artificial Sequence
  Description of Artificial Sequence: Synthetic oligonucleotide
aauaacaccuguuccgccu

SEQ ID NO: 2059094 - RNA, 19 nt, Artificial Sequence
  Description of Artificial Sequence: Synthetic oligonucleotide
ugagaaugaggucaguaga

SEQ ID NO: 2059095 - RNA, 19 nt, Artificial Sequence
  Description of Artificial Sequence: Synthetic oligonucleotide
cuuugggacgaaauaaugc

SEQ ID NO: 2059096 - RNA, 19 nt, Artificial Sequence
  Description of Artificial Sequence: Synthetic oligonucleotide
aaggagguugcucuuuggg

SEQ ID NO: 2059097 - RNA, 19 nt, Artificial Sequence
  Description of Artificial Sequence: Synthetic oligonucleotide
  modified_base (6)..(6): a, c, u, g, unknown or other
uuuacnucugccuggugcc

SEQ ID NO: 2059098 - RNA, 19 nt, Artificial Sequence
  Description of Artificial Sequence: Synthetic oligonucleotide
gaagaaggccacuuucugg

SEQ ID NO: 2059099 - RNA, 19 nt, Artificial Sequence
  Description of Artificial Sequence: Synthetic oligonucleotide
  modified_base (12)..(12): a, c, u, g, unknown or other
ucuauguuuacnucugccu

SEQ ID NO: 2059100 - RNA, 19 nt, Artificial Sequence
  Description of Artificial Sequence: Synthetic oligonucleotide
agaccuuucagugggaugg

SEQ ID NO: 2059101 - RNA, 19 nt, Artificial Sequence
  Description of Artificial Sequence: Synthetic oligonucleotide
uucucacaaguccagaaga

SEQ ID NO: 2059102 - RNA, 19 nt, Artificial Sequence
  Description of Artificial Sequence: Synthetic oligonucleotide
uuggaaucgacuguccugg

SEQ ID NO: 2059103 - RNA, 19 nt, Artificial Sequence
  Description of Artificial Sequence: Synthetic oligonucleotide
aaacaccuaggccacuggg

SEQ ID NO: 2059104 - RNA, 19 nt, Artificial Sequence
  Description of Artificial Sequence: Synthetic oligonucleotide
ugagaaaucugcuggcgcc

SEQ ID NO: 2059105 - RNA, 19 nt, Artificial Sequence
  Description of Artificial Sequence: Synthetic oligonucleotide
ugcauuuuccaccagcguc

SEQ ID NO: 2059106 - RNA, 19 nt, Artificial Sequence
  Description of Artificial Sequence: Synthetic oligonucleotide
ucacaaguccagaagagaa

SEQ ID NO: 2059107 - RNA, 19 nt, Artificial Sequence
  Description of Artificial Sequence: Synthetic oligonucleotide
aggaccugaaagcaccgcc

SEQ ID NO: 2059108 - RNA, 19 nt, Artificial Sequence
  Description of Artificial Sequence: Synthetic oligonucleotide
ucuuugggacgaaauaaug

SEQ ID NO: 2059109 - RNA, 19 nt, Artificial Sequence
  Description of Artificial Sequence: Synthetic oligonucleotide
aguagaaagcaaugaagca

SEQ ID NO: 2059110 - RNA, 19 nt, Artificial Sequence
  Description of Artificial Sequence: Synthetic oligonucleotide
uguaguaccgccagcgcug

SEQ ID NO: 2059111 - RNA, 19 nt, Artificial Sequence
  Description of Artificial Sequence: Synthetic oligonucleotide
ugaagcacaggcucccugg

SEQ ID NO: 2059112 - RNA, 19 nt, Artificial Sequence
  Description of Artificial Sequence: Synthetic oligonucleotide
acgaaauaaugcuucagga

SEQ ID NO: 2059113 - RNA, 19 nt, Artificial Sequence
  Description of Artificial Sequence: Synthetic oligonucleotide
acauggaacaggcucgggg

SEQ ID NO: 2059114 - RNA, 19 nt, Artificial Sequence
  Description of Artificial Sequence: Synthetic oligonucleotide
uuugagaaaucugcuggcg

SEQ ID NO: 2059115 - RNA, 19 nt, Artificial Sequence
  Description of Artificial Sequence: Synthetic oligonucleotide
ucucacaaguccagaagag

SEQ ID NO: 2059116 - RNA, 19 nt, Artificial Sequence
  Description of Artificial Sequence: Synthetic oligonucleotide
  modified_base (11)..(11): a, c, u, g, unknown or other
cuauguuuacnucugccug

SEQ ID NO: 2059117 - RNA, 19 nt, Artificial Sequence
  Description of Artificial Sequence: Synthetic oligonucleotide
agagagacugcccugagaa

SEQ ID NO: 2059118 - RNA, 19 nt, Artificial Sequence
  Description of Artificial Sequence: Synthetic oligonucleotide
uagcauaggggccuggcag

SEQ ID NO: 2059119 - RNA, 19 nt, Artificial Sequence
  Description of Artificial Sequence: Synthetic oligonucleotide
uuaaugcugccauuguaug

SEQ ID NO: 2059120 - RNA, 19 nt, Artificial Sequence
  Description of Artificial Sequence: Synthetic oligonucleotide
cugagaaugaggucaguag

SEQ ID NO: 2059121 - RNA, 19 nt, Artificial Sequence
  Description of Artificial Sequence: Synthetic oligonucleotide
ucagcaggcaaucuuguaa

SEQ ID NO: 2059122 - RNA, 19 nt, Artificial Sequence
  Description of Artificial Sequence: Synthetic oligonucleotide
aacaccuaggccacugggc

SEQ ID NO: 2059123 - RNA, 19 nt, Artificial Sequence
  Description of Artificial Sequence: Synthetic oligonucleotide
uugagaaaucugcuggcgc

SEQ ID NO: 2059124 - RNA, 19 nt, Artificial Sequence
  Description of Artificial Sequence: Synthetic oligonucleotide
ggggccaaaaccuuaaugc

SEQ ID NO: 2059125 - RNA, 19 nt, Artificial Sequence
  Description of Artificial Sequence: Synthetic oligonucleotide
guggugaauaacuuucugc

SEQ ID NO: 2059126 - RNA, 19 nt, Artificial Sequence
  Description of Artificial Sequence: Synthetic oligonucleotide
guaagucucccucuggaag

SEQ ID NO: 2059127 - RNA, 19 nt, Artificial Sequence
  Description of Artificial Sequence: Synthetic oligonucleotide
aaauaaugcuucaggaagu

SEQ ID NO: 2059128 - RNA, 19 nt, Artificial Sequence
  Description of Artificial Sequence: Synthetic oligonucleotide
  modified_base (13)..(13): a, c, u, g, unknown or other
cucuauguuuacnucugcc

SEQ ID NO: 2059129 - RNA, 19 nt, Artificial Sequence
  Description of Artificial Sequence: Synthetic oligonucleotide
cauggaacaggcucggggc

SEQ ID NO: 2059130 - RNA, 19 nt, Artificial Sequence
  Description of Artificial Sequence: Synthetic oligonucleotide
cucaggaccugaaagcacc

SEQ ID NO: 2059131 - RNA, 19 nt, Artificial Sequence
  Description of Artificial Sequence: Synthetic oligonucleotide
aacacuuggaggacuuugg

SEQ ID NO: 2059132 - RNA, 19 nt, Artificial Sequence
  Description of Artificial Sequence: Synthetic oligonucleotide
ugggacgaaauaaugcuuc

SEQ ID NO: 2059133 - RNA, 19 nt, Artificial Sequence
  Description of Artificial Sequence: Synthetic oligonucleotide
ucuggggacggccaccgcg

SEQ ID NO: 2059134 - RNA, 19 nt, Artificial Sequence
  Description of Artificial Sequence: Synthetic oligonucleotide
ucuuguaagucucccucug

SEQ ID NO: 2059135 - RNA, 19 nt, Artificial Sequence
  Description of Artificial Sequence: Synthetic oligonucleotide
uuguaagucucccucugga

SEQ ID NO: 2059136 - RNA, 19 nt, Artificial Sequence
  Description of Artificial Sequence: Synthetic oligonucleotide
agcauaggggccuggcagc

SEQ ID NO: 2059137 - RNA, 19 nt, Artificial Sequence
  Description of Artificial Sequence: Synthetic oligonucleotide
aaacugaacccaaaugacu

SEQ ID NO: 2059138 - RNA, 19 nt, Artificial Sequence
  Description of Artificial Sequence: Synthetic oligonucleotide
cacagcuuggaaucgacug

SEQ ID NO: 2059139 - RNA, 19 nt, Artificial Sequence
  Description of Artificial Sequence: Synthetic oligonucleotide
aacagucugcagguggugg

SEQ ID NO: 2059140 - RNA, 19 nt, Artificial Sequence
  Description of Artificial Sequence: Synthetic oligonucleotide
uuccuccacacuuugagaa

SEQ ID NO: 2059141 - RNA, 19 nt, Artificial Sequence
  Description of Artificial Sequence: Synthetic oligonucleotide
uccugcaagaccuuucagu

SEQ ID NO: 2059142 - RNA, 19 nt, Artificial Sequence
  Description of Artificial Sequence: Synthetic oligonucleotide
caaauaacaccuguuccgc

SEQ ID NO: 2059143 - RNA, 19 nt, Artificial Sequence
  Description of Artificial Sequence: Synthetic oligonucleotide
uccaccuuacucagcaggc

SEQ ID NO: 2059144 - RNA, 19 nt, Artificial Sequence
  Description of Artificial Sequence: Synthetic oligonucleotide
acugcauuuuccaccagcg

SEQ ID NO: 2059145 - RNA, 19 nt, Artificial Sequence
  Description of Artificial Sequence: Synthetic oligonucleotide
ggguauuucucacaagucc

SEQ ID NO: 2059146 - RNA, 19 nt, Artificial Sequence
  Description of Artificial Sequence: Synthetic oligonucleotide
aguaccgccagcgcugugc

SEQ ID NO: 2059147 - RNA, 19 nt, Artificial Sequence
  Description of Artificial Sequence: Synthetic oligonucleotide
cuuggaaucgacuguccug

SEQ ID NO: 2059148 - RNA, 19 nt, Artificial Sequence
  Description of Artificial Sequence: Synthetic oligonucleotide
agagacugcccugagaaug

SEQ ID NO: 2059149 - RNA, 19 nt, Artificial Sequence
  Description of Artificial Sequence: Synthetic oligonucleotide
auggaacaggcucggggcc

SEQ ID NO: 2059150 - RNA, 19 nt, Artificial Sequence
  Description of Artificial Sequence: Synthetic oligonucleotide
agccugauggaagaccugc

SEQ ID NO: 2059151 - RNA, 19 nt, Artificial Sequence
  Description of Artificial Sequence: Synthetic oligonucleotide
aagaccuuucagugggaug

SEQ ID NO: 2059152 - RNA, 19 nt, Artificial Sequence
  Description of Artificial Sequence: Synthetic oligonucleotide
ugggauggugacauggaac

SEQ ID NO: 2059153 - RNA, 19 nt, Artificial Sequence
  Description of Artificial Sequence: Synthetic oligonucleotide
guucuuuaggaagaaggcc

SEQ ID NO: 2059154 - RNA, 19 nt, Artificial Sequence
  Description of Artificial Sequence: Synthetic oligonucleotide
gaucuccgcugucaggugg

SEQ ID NO: 2059155 - RNA, 19 nt, Artificial Sequence
  Description of Artificial Sequence: Synthetic oligonucleotide
gagguugcucuuugggacg

SEQ ID NO: 2059156 - RNA, 19 nt, Artificial Sequence
  Description of Artificial Sequence: Synthetic oligonucleotide
ugaaggagguugcucuuug

SEQ ID NO: 2059157 - RNA, 19 nt, Artificial Sequence
  Description of Artificial Sequence: Synthetic oligonucleotide
acccaaaugacuugaugca

SEQ ID NO: 2059158 - RNA, 19 nt, Artificial Sequence
  Description of Artificial Sequence: Synthetic oligonucleotide
aacugaacccaaaugacuu

SEQ ID NO: 2059159 - RNA, 19 nt, Artificial Sequence
  Description of Artificial Sequence: Synthetic oligonucleotide
gugacauggaacaggcucg

SEQ ID NO: 2059160 - RNA, 19 nt, Artificial Sequence
  Description of Artificial Sequence: Synthetic oligonucleotide
ucaggaccugaaagcaccg

SEQ ID NO: 2059161 - RNA, 19 nt, Artificial Sequence
  Description of Artificial Sequence: Synthetic oligonucleotide
agaccugccaauccuugag

SEQ ID NO: 2059162 - RNA, 19 nt, Artificial Sequence
  Description of Artificial Sequence: Synthetic oligonucleotide
acugggcuuucucagacca

SEQ ID NO: 2059163 - RNA, 19 nt, Artificial Sequence
  Description of Artificial Sequence: Synthetic oligonucleotide
cagcaggcaaucuuguaag

SEQ ID NO: 2059164 - RNA, 19 nt, Artificial Sequence
  Description of Artificial Sequence: Synthetic oligonucleotide
acgguagacaggcucucac

SEQ ID NO: 2059165 - RNA, 19 nt, Artificial Sequence
  Description of Artificial Sequence: Synthetic oligonucleotide
acagucugcaggugguggg

SEQ ID NO: 2059166 - RNA, 19 nt, Artificial Sequence
  Description of Artificial Sequence: Synthetic oligonucleotide
gacuugaugcacuccacuc

SEQ ID NO: 2059167 - RNA, 19 nt, Artificial Sequence
  Description of Artificial Sequence: Synthetic oligonucleotide
cacuuugagaaaucugcug

SEQ ID NO: 2059168 - RNA, 19 nt, Artificial Sequence
  Description of Artificial Sequence: Synthetic oligonucleotide
uuggcugacugaaggaggu

SEQ ID NO: 2059169 - RNA, 19 nt, Artificial Sequence
  Description of Artificial Sequence: Synthetic oligonucleotide
ugacuugaugcacuccacu

SEQ ID NO: 2059170 - RNA, 19 nt, Artificial Sequence
  Description of Artificial Sequence: Synthetic oligonucleotide
aaagcaccgccuguggcag

SEQ ID NO: 2059171 - RNA, 19 nt, Artificial Sequence
  Description of Artificial Sequence: Synthetic oligonucleotide
cuggacaccacacauccuc

SEQ ID NO: 2059172 - RNA, 19 nt, Artificial Sequence
  Description of Artificial Sequence: Synthetic oligonucleotide
ugaccugcggguucuuuag

SEQ ID NO: 2059173 - RNA, 19 nt, Artificial Sequence
  Description of Artificial Sequence: Synthetic oligonucleotide
gugaugacuggccucuucc

SEQ ID NO: 2059174 - RNA, 19 nt, Artificial Sequence
  Description of Artificial Sequence: Synthetic oligonucleotide
guaugugucagaggcaggc

SEQ ID NO: 2059175 - RNA, 19 nt, Artificial Sequence
  Description of Artificial Sequence: Synthetic oligonucleotide
gaaggagguugcucuuugg

SEQ ID NO: 2059176 - RNA, 19 nt, Artificial Sequence
  Description of Artificial Sequence: Synthetic oligonucleotide
gccagugauagcuggaccg

SEQ ID NO: 2059177 - RNA, 19 nt, Artificial Sequence
  Description of Artificial Sequence: Synthetic oligonucleotide
gcgucaaacaccuaggcca

SEQ ID NO: 2059178 - RNA, 19 nt, Artificial Sequence
  Description of Artificial Sequence: Synthetic oligonucleotide
ucaugaacugcucggucuc

SEQ ID NO: 2059179 - RNA, 19 nt, Artificial Sequence
  Description of Artificial Sequence: Synthetic oligonucleotide
acugaacccaaaugacuug

SEQ ID NO: 2059180 - RNA, 19 nt, Artificial Sequence
  Description of Artificial Sequence: Synthetic oligonucleotide
uccacgguagacaggcucu

SEQ ID NO: 2059181 - RNA, 19 nt, Artificial Sequence
  Description of Artificial Sequence: Synthetic oligonucleotide
uggguauuucucacaaguc

SEQ ID NO: 2059182 - RNA, 19 nt, Artificial Sequence
  Description of Artificial Sequence: Synthetic oligonucleotide
gaccugccaauccuugagg

SEQ ID NO: 2059183 - RNA, 19 nt, Artificial Sequence
  Description of Artificial Sequence: Synthetic oligonucleotide
aaggccacuuucugggcca

SEQ ID NO: 2059184 - RNA, 19 nt, Artificial Sequence
  Description of Artificial Sequence: Synthetic oligonucleotide
gaagcacaggcucccuggg

SEQ ID NO: 2059185 - RNA, 19 nt, Artificial Sequence
  Description of Artificial Sequence: Synthetic oligonucleotide
ucccgcaaagggcagguga

SEQ ID NO: 2059186 - RNA, 19 nt, Artificial Sequence
  Description of Artificial Sequence: Synthetic oligonucleotide
uggcucacacaucugugca

SEQ ID NO: 2059187 - RNA, 19 nt, Artificial Sequence
  Description of Artificial Sequence: Synthetic oligonucleotide
caaaugacuugaugcacuc

SEQ ID NO: 2059188 - RNA, 19 nt, Artificial Sequence
  Description of Artificial Sequence: Synthetic oligonucleotide
agugauagcuggaccgggc

SEQ ID NO: 2059189 - RNA, 19 nt, Artificial Sequence
  Description of Artificial Sequence: Synthetic oligonucleotide
aauccuugaggugugggua

SEQ ID NO: 2059190 - RNA, 19 nt, Artificial Sequence
  Description of Artificial Sequence: Synthetic oligonucleotide
cacaaguccagaagagaac

SEQ ID NO: 2059191 - RNA, 19 nt, Artificial Sequence
  Description of Artificial Sequence: Synthetic oligonucleotide
acaggcucggggccaaaac

SEQ ID NO: 2059192 - RNA, 19 nt, Artificial Sequence
  Description of Artificial Sequence: Synthetic oligonucleotide
aaucugcuggcgccucagg

SEQ ID NO: 2059193 - RNA, 19 nt, Artificial Sequence
  Description of Artificial Sequence: Synthetic oligonucleotide
aagaccugccaauccuuga

SEQ ID NO: 2059194 - RNA, 19 nt, Artificial Sequence
  Description of Artificial Sequence: Synthetic oligonucleotide
ugcucuuugggacgaaaua

SEQ ID NO: 2059195 - RNA, 19 nt, Artificial Sequence
  Description of Artificial Sequence: Synthetic oligonucleotide
uggacaccacacauccucc

SEQ ID NO: 2059196 - RNA, 19 nt, Artificial Sequence
  Description of Artificial Sequence: Synthetic oligonucleotide
ugaugacuggccucuuccc

SEQ ID NO: 2059197 - RNA, 19 nt, Artificial Sequence
  Description of Artificial Sequence: Synthetic oligonucleotide
ccaaacugaacccaaauga

SEQ ID NO: 2059198 - RNA, 19 nt, Artificial Sequence
  Description of Artificial Sequence: Synthetic oligonucleotide
aggagguugcucuuuggga

SEQ ID NO: 2059199 - RNA, 19 nt, Artificial Sequence
  Description of Artificial Sequence: Synthetic oligonucleotide
guccggaacacuuggagga

SEQ ID NO: 2059200 - RNA, 19 nt, Artificial Sequence
  Description of Artificial Sequence: Synthetic oligonucleotide
uguggguauuucucacaag

SEQ ID NO: 2059201 - RNA, 19 nt, Artificial Sequence
  Description of Artificial Sequence: Synthetic oligonucleotide
ucgacuguccuggaggcug

SEQ ID NO: 2059202 - RNA, 19 nt, Artificial Sequence
  Description of Artificial Sequence: Synthetic oligonucleotide
cugcaagaccuuucagugg

SEQ ID NO: 2059203 - RNA, 19 nt, Artificial Sequence
  Description of Artificial Sequence: Synthetic oligonucleotide
ugauagcuggaccgggcca

SEQ ID NO: 2059204 - RNA, 19 nt, Artificial Sequence
  Description of Artificial Sequence: Synthetic oligonucleotide
uccacacuuugagaaaucu

SEQ ID NO: 2059205 - RNA, 19 nt, Artificial Sequence
  Description of Artificial Sequence: Synthetic oligonucleotide
auaacaccuguuccgccug

SEQ ID NO: 2059206 - RNA, 19 nt, Artificial Sequence
  Description of Artificial Sequence: Synthetic oligonucleotide
aaccagcugcucaaauaac

SEQ ID NO: 2059207 - RNA, 19 nt, Artificial Sequence
  Description of Artificial Sequence: Synthetic oligonucleotide
acggcauccagcucacuug

SEQ ID NO: 2059208 - RNA, 19 nt, Artificial Sequence
  Description of Artificial Sequence: Synthetic oligonucleotide
guagacaggcucucacugc

SEQ ID NO: 2059209 - RNA, 19 nt, Artificial Sequence
  Description of Artificial Sequence: Synthetic oligonucleotide
caaagggcaggugagcuug

SEQ ID NO: 2059210 - RNA, 19 nt, Artificial Sequence
  Description of Artificial Sequence: Synthetic oligonucleotide
ugacauggaacaggcucgg

SEQ ID NO: 2059211 - RNA, 19 nt, Artificial Sequence
  Description of Artificial Sequence: Synthetic oligonucleotide
caccgcgucaaacaccuag

SEQ ID NO: 2059212 - RNA, 19 nt, Artificial Sequence
  Description of Artificial Sequence: Synthetic oligonucleotide
ggaucuccacgguagacag

SEQ ID NO: 2059213 - RNA, 19 nt, Artificial Sequence
  Description of Artificial Sequence: Synthetic oligonucleotide
auaacuuucugcacuuccu

SEQ ID NO: 2059214 - RNA, 19 nt, Artificial Sequence
  Description of Artificial Sequence: Synthetic oligonucleotide
ccugcaagaccuuucagug

SEQ ID NO: 2059215 - RNA, 19 nt, Artificial Sequence
  Description of Artificial Sequence: Synthetic oligonucleotide
ggagguugcucuuugggac

SEQ ID NO: 2059216 - RNA, 19 nt, Artificial Sequence
  Description of Artificial Sequence: Synthetic oligonucleotide
cugcggguucuuuaggaag

SEQ ID NO: 2059217 - RNA, 19 nt, Artificial Sequence
  Description of Artificial Sequence: Synthetic oligonucleotide
uugggacgaaauaaugcuu

SEQ ID NO: 2059218 - RNA, 19 nt, Artificial Sequence
  Description of Artificial Sequence: Synthetic oligonucleotide
uccacucugucuggggacg

SEQ ID NO: 2059219 - RNA, 19 nt, Artificial Sequence
  Description of Artificial Sequence: Synthetic oligonucleotide
gggcaggugagcuuggugc

SEQ ID NO: 2059220 - RNA, 19 nt, Artificial Sequence
  Description of Artificial Sequence: Synthetic oligonucleotide
gaccugaaagcaccgccug

SEQ ID NO: 2059221 - RNA, 19 nt, Artificial Sequence
  Description of Artificial Sequence: Synthetic oligonucleotide
caaugaagcacaggcuccc

SEQ ID NO: 2059222 - RNA, 19 nt, Artificial Sequence
  Description of Artificial Sequence: Synthetic oligonucleotide
caaccagcugcucaaauaa

SEQ ID NO: 2059223 - RNA, 19 nt, Artificial Sequence
  Description of Artificial Sequence: Synthetic oligonucleotide
gagaaugaggucaguagaa

SEQ ID NO: 2059224 - RNA, 19 nt, Artificial Sequence
  Description of Artificial Sequence: Synthetic oligonucleotide
acucugucuggggacggcc

SEQ ID NO: 2059225 - RNA, 19 nt, Artificial Sequence
  Description of Artificial Sequence: Synthetic oligonucleotide
cugcuggcgccucaggucc

SEQ ID NO: 2059226 - RNA, 19 nt, Artificial Sequence
  Description of Artificial Sequence: Synthetic oligonucleotide
gagagccugauggaagacc

SEQ ID NO: 2059227 - RNA, 19 nt, Artificial Sequence
  Description of Artificial Sequence: Synthetic oligonucleotide
accugccaauccuugaggu

SEQ ID NO: 2059228 - RNA, 19 nt, Artificial Sequence
  Description of Artificial Sequence: Synthetic oligonucleotide
acaauguccccucuauguu

SEQ ID NO: 2059229 - RNA, 19 nt, Artificial Sequence
  Description of Artificial Sequence: Synthetic oligonucleotide
gguauuucucacaagucca

SEQ ID NO: 2059230 - RNA, 19 nt, Artificial Sequence
  Description of Artificial Sequence: Synthetic oligonucleotide
gaagaccugccaauccuug

SEQ ID NO: 2059231 - RNA, 19 nt, Artificial Sequence
  Description of Artificial Sequence: Synthetic oligonucleotide
aggcaaucuuguaagucuc

SEQ ID NO: 2059232 - RNA, 19 nt, Artificial Sequence
  Description of Artificial Sequence: Synthetic oligonucleotide
uccgcugucagguggugaa

SEQ ID NO: 2059233 - RNA, 19 nt, Artificial Sequence
  Description of Artificial Sequence: Synthetic oligonucleotide
uuggguuggcugacugaag

SEQ ID NO: 2059234 - RNA, 19 nt, Artificial Sequence
  Description of Artificial Sequence: Synthetic oligonucleotide
ggugaauaacuuucugcac

SEQ ID NO: 2059235 - RNA, 19 nt, Artificial Sequence
  Description of Artificial Sequence: Synthetic oligonucleotide
uuccggaccaggcgcagga

SEQ ID NO: 2059236 - RNA, 19 nt, Artificial Sequence
  Description of Artificial Sequence: Synthetic oligonucleotide
agcucacuuggguuggcug

SEQ ID NO: 2059237 - RNA, 19 nt, Artificial Sequence
  Description of Artificial Sequence: Synthetic oligonucleotide
gauagcuggaccgggccac

SEQ ID NO: 2059238 - RNA, 19 nt, Artificial Sequence
  Description of Artificial Sequence: Synthetic oligonucleotide
agggucuucaugaacugcu

SEQ ID NO: 2059239 - RNA, 19 nt, Artificial Sequence
  Description of Artificial Sequence: Synthetic oligonucleotide
gccauuguaugugucagag

SEQ ID NO: 2059240 - RNA, 19 nt, Artificial Sequence
  Description of Artificial Sequence: Synthetic oligonucleotide
cucagaccaggcugguggg

SEQ ID NO: 2059241 - RNA, 19 nt, Artificial Sequence
  Description of Artificial Sequence: Synthetic oligonucleotide
aacaccuguuccgccuggg

SEQ ID NO: 2059242 - RNA, 19 nt, Artificial Sequence
  Description of Artificial Sequence: Synthetic oligonucleotide
aauguccccucuauguuua

SEQ ID NO: 2059243 - RNA, 19 nt, Artificial Sequence
  Description of Artificial Sequence: Synthetic oligonucleotide
acggccaccgcgucaaaca

SEQ ID NO: 2059244 - RNA, 19 nt, Artificial Sequence
  Description of Artificial Sequence: Synthetic oligonucleotide
ugaacccaaaugacuugau

SEQ ID NO: 2059245 - RNA, 19 nt, Artificial Sequence
  Description of Artificial Sequence: Synthetic oligonucleotide
accugcggguucuuuagga

SEQ ID NO: 2059246 - RNA, 19 nt, Artificial Sequence
  Description of Artificial Sequence: Synthetic oligonucleotide
gcugguggggaucuccacg

SEQ ID NO: 2059247 - RNA, 19 nt, Artificial Sequence
  Description of Artificial Sequence: Synthetic oligonucleotide
  modified_base (8)..(8): a, c, u, g, unknown or other
uguuuacnucugccuggug

SEQ ID NO: 2059248 - RNA, 19 nt, Artificial Sequence
  Description of Artificial Sequence: Synthetic oligonucleotide
uaugugucagaggcaggca

SEQ ID NO: 2059249 - RNA, 19 nt, Artificial Sequence
  Description of Artificial Sequence: Synthetic oligonucleotide
ugccaauccuugaggugug

SEQ ID NO: 2059250 - RNA, 19 nt, Artificial Sequence
  Description of Artificial Sequence: Synthetic oligonucleotide
agcuuggaaucgacugucc

SEQ ID NO: 2059251 - RNA, 19 nt, Artificial Sequence
  Description of Artificial Sequence: Synthetic oligonucleotide
aaugaagcacaggcucccu

SEQ ID NO: 2059252 - RNA, 19 nt, Artificial Sequence
  Description of Artificial Sequence: Synthetic oligonucleotide
uggaccgggccaccaaacu

SEQ ID NO: 2059253 - RNA, 19 nt, Artificial Sequence
  Description of Artificial Sequence: Synthetic oligonucleotide
caggcaaucuuguaagucu

SEQ ID NO: 2059254 - RNA, 19 nt, Artificial Sequence
  Description of Artificial Sequence: Synthetic oligonucleotide
agaacagucugcagguggu

SEQ ID NO: 2059255 - RNA, 19 nt, Artificial Sequence
  Description of Artificial Sequence: Synthetic oligonucleotide
uugaugcacuccacucugu

SEQ ID NO: 2059256 - RNA, 19 nt, Artificial Sequence
  Description of Artificial Sequence: Synthetic oligonucleotide
gaccugcggguucuuuagg

SEQ ID NO: 2059257 - RNA, 19 nt, Artificial Sequence
  Description of Artificial Sequence: Synthetic oligonucleotide
ugccauuguaugugucaga

SEQ ID NO: 2059258 - RNA, 19 nt, Artificial Sequence
  Description of Artificial Sequence: Synthetic oligonucleotide
accgcgucaaacaccuagg

SEQ ID NO: 2059259 - RNA, 19 nt, Artificial Sequence
  Description of Artificial Sequence: Synthetic oligonucleotide
cuccacgguagacaggcuc

SEQ ID NO: 2059260 - RNA, 19 nt, Artificial Sequence
  Description of Artificial Sequence: Synthetic oligonucleotide
  modified_base (9)..(9): a, c, u, g, unknown or other
auguuuacnucugccuggu

SEQ ID NO: 2059261 - RNA, 19 nt, Artificial Sequence
  Description of Artificial Sequence: Synthetic oligonucleotide
auuguaugugucagaggca

SEQ ID NO: 2059262 - RNA, 19 nt, Artificial Sequence
  Description of Artificial Sequence: Synthetic oligonucleotide
uccuccacacuuugagaaa

SEQ ID NO: 2059263 - RNA, 19 nt, Artificial Sequence
  Description of Artificial Sequence: Synthetic oligonucleotide
cagcguccggaacacuugg

SEQ ID NO: 2059264 - RNA, 19 nt, Artificial Sequence
  Description of Artificial Sequence: Synthetic oligonucleotide
ggaaucgacuguccuggag

SEQ ID NO: 2059265 - RNA, 19 nt, Artificial Sequence
  Description of Artificial Sequence: Synthetic oligonucleotide
agcaggcaaucuuguaagu

SEQ ID NO: 2059266 - RNA, 19 nt, Artificial Sequence
  Description of Artificial Sequence: Synthetic oligonucleotide
ugaucuccgcugucaggug

SEQ ID NO: 2059267 - RNA, 19 nt, Artificial Sequence
  Description of Artificial Sequence: Synthetic oligonucleotide
aaagggcaggugagcuugg

SEQ ID NO: 2059268 - RNA, 19 nt, Artificial Sequence
  Description of Artificial Sequence: Synthetic oligonucleotide
cuccacucugucuggggac

SEQ ID NO: 2059269 - RNA, 19 nt, Artificial Sequence
  Description of Artificial Sequence: Synthetic oligonucleotide
  modified_base (4)..(4): a, c, u, g, unknown or other
uacnucugccuggugccac

SEQ ID NO: 2059270 - RNA, 19 nt, Artificial Sequence
  Description of Artificial Sequence: Synthetic oligonucleotide
  modified_base (17)..(17): a, c, u, g, unknown or other
uccccucuauguuuacnuc

SEQ ID NO: 2059271 - RNA, 19 nt, Artificial Sequence
  Description of Artificial Sequence: Synthetic oligonucleotide
gaccgggccaccaaacuga

SEQ ID NO: 2059272 - RNA, 19 nt, Artificial Sequence
  Description of Artificial Sequence: Synthetic oligonucleotide
  modified_base (5)..(5): a, c, u, g, unknown or other
uuacnucugccuggugcca

SEQ ID NO: 2059273 - RNA, 19 nt, Artificial Sequence
  Description of Artificial Sequence: Synthetic oligonucleotide
auuuuccaccagcguccgg

SEQ ID NO: 2059274 - RNA, 19 nt, Artificial Sequence
  Description of Artificial Sequence: Synthetic oligonucleotide
uguauccugcaagaccuuu

SEQ ID NO: 2059275 - RNA, 19 nt, Artificial Sequence
  Description of Artificial Sequence: Synthetic oligonucleotide
ggggaaacucagcugccag

SEQ ID NO: 2059276 - RNA, 19 nt, Artificial Sequence
  Description of Artificial Sequence: Synthetic oligonucleotide
cugaacccaaaugacuuga

SEQ ID NO: 2059277 - RNA, 19 nt, Artificial Sequence
  Description of Artificial Sequence: Synthetic oligonucleotide
agugugaccugcggguucu

SEQ ID NO: 2059278 - RNA, 19 nt, Artificial Sequence
  Description of Artificial Sequence: Synthetic oligonucleotide
cagugauagcuggaccggg

SEQ ID NO: 2059279 - RNA, 19 nt, Artificial Sequence
  Description of Artificial Sequence: Synthetic oligonucleotide
gaaaucugcuggcgccuca

SEQ ID NO: 2059280 - RNA, 19 nt, Artificial Sequence
  Description of Artificial Sequence: Synthetic oligonucleotide
cucacaaguccagaagaga

SEQ ID NO: 2059281 - RNA, 19 nt, Artificial Sequence
  Description of Artificial Sequence: Synthetic oligonucleotide
  modified_base (19)..(19): a, c, u, g, unknown or other
uguccccucuauguuuacn

SEQ ID NO: 2059282 - RNA, 19 nt, Artificial Sequence
  Description of Artificial Sequence: Synthetic oligonucleotide
ggacgaaauaaugcuucag

SEQ ID NO: 2059283 - RNA, 19 nt, Artificial Sequence
  Description of Artificial Sequence: Synthetic oligonucleotide
cuugagguguggguauuuc

SEQ ID NO: 2059284 - RNA, 19 nt, Artificial Sequence
  Description of Artificial Sequence: Synthetic oligonucleotide
  modified_base (3)..(3): a, c, u, g, unknown or other
acnucugccuggugccacu

SEQ ID NO: 2059285 - RNA, 19 nt, Artificial Sequence
  Description of Artificial Sequence: Synthetic oligonucleotide
gcugccauuguauguguca

SEQ ID NO: 2059286 - RNA, 19 nt, Artificial Sequence
  Description of Artificial Sequence: Synthetic oligonucleotide
auguccccucuauguuuac

SEQ ID NO: 2059287 - RNA, 19 nt, Artificial Sequence
  Description of Artificial Sequence: Synthetic oligonucleotide
cuguccuggaggcugaucu

SEQ ID NO: 2059288 - RNA, 19 nt, Artificial Sequence
  Description of Artificial Sequence: Synthetic oligonucleotide
ggucaguagaaagcaauga

SEQ ID NO: 2059289 - RNA, 19 nt, Artificial Sequence
  Description of Artificial Sequence: Synthetic oligonucleotide
  modified_base (14)..(14): a, c, u, g, unknown or other
ccucuauguuuacnucugc

SEQ ID NO: 2059290 - RNA, 19 nt, Artificial Sequence
  Description of Artificial Sequence: Synthetic oligonucleotide
cacaucugugcagcuuccg

SEQ ID NO: 2059291 - RNA, 19 nt, Artificial Sequence
  Description of Artificial Sequence: Synthetic oligonucleotide
caaaaccuuaaugcugcca

SEQ ID NO: 2059292 - RNA, 19 nt, Artificial Sequence
  Description of Artificial Sequence: Synthetic oligonucleotide
ugcugccauuguauguguc

SEQ ID NO: 2059293 - RNA, 19 nt, Artificial Sequence
  Description of Artificial Sequence: Synthetic oligonucleotide
guaccgccagcgcugugcc

SEQ ID NO: 2059294 - RNA, 19 nt, Artificial Sequence
  Description of Artificial Sequence: Synthetic oligonucleotide
cugucagguggugaauaac

SEQ ID NO: 2059295 - RNA, 19 nt, Artificial Sequence
  Description of Artificial Sequence: Synthetic oligonucleotide
ggcugacugaaggagguug

SEQ ID NO: 2059296 - RNA, 19 nt, Artificial Sequence
  Description of Artificial Sequence: Synthetic oligonucleotide
ccauuguaugugucagagg

SEQ ID NO: 2059297 - RNA, 19 nt, Artificial Sequence
  Description of Artificial Sequence: Synthetic oligonucleotide
gcguccggaacacuuggag

SEQ ID NO: 2059298 - RNA, 19 nt, Artificial Sequence
  Description of Artificial Sequence: Synthetic oligonucleotide
augcugccauuguaugugu

SEQ ID NO: 2059299 - RNA, 19 nt, Artificial Sequence
  Description of Artificial Sequence: Synthetic oligonucleotide
ggcucacacaucugugcag

SEQ ID NO: 2059300 - RNA, 19 nt, Artificial Sequence
  Description of Artificial Sequence: Synthetic oligonucleotide
  modified_base (15)..(15): a, c, u, g, unknown or other
cccucuauguuuacnucug

SEQ ID NO: 2059301 - RNA, 19 nt, Artificial Sequence
  Description of Artificial Sequence: Synthetic oligonucleotide
ggaccgggccaccaaacug

SEQ ID NO: 2059302 - RNA, 19 nt, Artificial Sequence
  Description of Artificial Sequence: Synthetic oligonucleotide
cugccagugauagcuggac

SEQ ID NO: 2059303 - RNA, 19 nt, Artificial Sequence
  Description of Artificial Sequence: Synthetic oligonucleotide
cuggaccgggccaccaaac

SEQ ID NO: 2059304 - RNA, 19 nt, Artificial Sequence
  Description of Artificial Sequence: Synthetic oligonucleotide
cucacuuggguuggcugac

SEQ ID NO: 2059305 - RNA, 19 nt, Artificial Sequence
  Description of Artificial Sequence: Synthetic oligonucleotide
aggcucggggccaaaaccu

SEQ ID NO: 2059306 - RNA, 19 nt, Artificial Sequence
  Description of Artificial Sequence: Synthetic oligonucleotide
caccucagggcagugugac

SEQ ID NO: 2059307 - RNA, 19 nt, Artificial Sequence
  Description of Artificial Sequence: Synthetic oligonucleotide
gccaccucagggcagugug

SEQ ID NO: 2059308 - RNA, 19 nt, Artificial Sequence
  Description of Artificial Sequence: Synthetic oligonucleotide
cugggccacggcauccagc

SEQ ID NO: 2059309 - RNA, 19 nt, Artificial Sequence
  Description of Artificial Sequence: Synthetic oligonucleotide
uggaaucgacuguccugga

SEQ ID NO: 2059310 - RNA, 19 nt, Artificial Sequence
  Description of Artificial Sequence: Synthetic oligonucleotide
uccggaacacuuggaggac

SEQ ID NO: 2059311 - RNA, 19 nt, Artificial Sequence
  Description of Artificial Sequence: Synthetic oligonucleotide
ucacacaucugugcagcuu

SEQ ID NO: 2059312 - RNA, 19 nt, Artificial Sequence
  Description of Artificial Sequence: Synthetic oligonucleotide
caccuuacucagcaggcaa

SEQ ID NO: 2059313 - RNA, 19 nt, Artificial Sequence
  Description of Artificial Sequence: Synthetic oligonucleotide
uggcgccucagguccaccu

SEQ ID NO: 2059314 - RNA, 19 nt, Artificial Sequence
  Description of Artificial Sequence: Synthetic oligonucleotide
cugaucuccgcugucaggu

SEQ ID NO: 2059315 - RNA, 19 nt, Artificial Sequence
  Description of Artificial Sequence: Synthetic oligonucleotide
gggacgaaauaaugcuuca

SEQ ID NO: 2059316 - RNA, 19 nt, Artificial Sequence
  Description of Artificial Sequence: Synthetic oligonucleotide
gcucacuuggguuggcuga

SEQ ID NO: 2059317 - RNA, 19 nt, Artificial Sequence
  Description of Artificial Sequence: Synthetic oligonucleotide
cguccggaacacuuggagg

SEQ ID NO: 2059318 - RNA, 19 nt, Artificial Sequence
  Description of Artificial Sequence: Synthetic oligonucleotide
cgaaauaaugcuucaggaa

SEQ ID NO: 2059319 - RNA, 19 nt, Artificial Sequence
  Description of Artificial Sequence: Synthetic oligonucleotide
caauccuugaggugugggu

SEQ ID NO: 2059320 - RNA, 19 nt, Artificial Sequence
  Description of Artificial Sequence: Synthetic oligonucleotide
acuguccuggaggcugauc

SEQ ID NO: 2059321 - RNA, 19 nt, Artificial Sequence
  Description of Artificial Sequence: Synthetic oligonucleotide
gcugacugaaggagguugc

SEQ ID NO: 2059322 - RNA, 19 nt, Artificial Sequence
  Description of Artificial Sequence: Synthetic oligonucleotide
aacaggcucggggccaaaa

SEQ ID NO: 2059323 - RNA, 19 nt, Artificial Sequence
  Description of Artificial Sequence: Synthetic oligonucleotide
acucagcaggcaaucuugu

SEQ ID NO: 2059324 - RNA, 19 nt, Artificial Sequence
  Description of Artificial Sequence: Synthetic oligonucleotide
  modified_base (18)..(18): a, c, u, g, unknown or other
guccccucuauguuuacnu

SEQ ID NO: 2059325 - RNA, 19 nt, Artificial Sequence
  Description of Artificial Sequence: Synthetic oligonucleotide
gcuguaguaccgccagcgc

SEQ ID NO: 2059326 - RNA, 19 nt, Artificial Sequence
  Description of Artificial Sequence: Synthetic oligonucleotide
cccgcaaagggcaggugag

SEQ ID NO: 2059327 - RNA, 19 nt, Artificial Sequence
  Description of Artificial Sequence: Synthetic oligonucleotide
gugaccugcggguucuuua

SEQ ID NO: 2059328 - RNA, 19 nt, Artificial Sequence
  Description of Artificial Sequence: Synthetic oligonucleotide
ccugaaagcaccgccugug

SEQ ID NO: 2059329 - RNA, 19 nt, Artificial Sequence
  Description of Artificial Sequence: Synthetic oligonucleotide
ucuccacgguagacaggcu

SEQ ID NO: 2059330 - RNA, 19 nt, Artificial Sequence
  Description of Artificial Sequence: Synthetic oligonucleotide
cugcucggucuccagccac

SEQ ID NO: 2059331 - RNA, 19 nt, Artificial Sequence
  Description of Artificial Sequence: Synthetic oligonucleotide
cuguaguaccgccagcgcu

SEQ ID NO: 2059332 - RNA, 19 nt, Artificial Sequence
  Description of Artificial Sequence: Synthetic oligonucleotide
caggaccugaaagcaccgc

SEQ ID NO: 2059333 - RNA, 19 nt, Artificial Sequence
  Description of Artificial Sequence: Synthetic oligonucleotide
aagggcaggugagcuuggu

SEQ ID NO: 2059334 - RNA, 19 nt, Artificial Sequence
  Description of Artificial Sequence: Synthetic oligonucleotide
accuuucagugggauggug

SEQ ID NO: 2059335 - RNA, 19 nt, Artificial Sequence
  Description of Artificial Sequence: Synthetic oligonucleotide
gaggcugaucuccgcuguc

SEQ ID NO: 2059336 - RNA, 19 nt, Artificial Sequence
  Description of Artificial Sequence: Synthetic oligonucleotide
cucggucuccagccacugc

SEQ ID NO: 2059337 - RNA, 19 nt, Artificial Sequence
  Description of Artificial Sequence: Synthetic oligonucleotide
gggccaaaaccuuaaugcu

SEQ ID NO: 2059338 - RNA, 19 nt, Artificial Sequence
  Description of Artificial Sequence: Synthetic oligonucleotide
cucggggccaaaaccuuaa

SEQ ID NO: 2059339 - RNA, 19 nt, Artificial Sequence
  Description of Artificial Sequence: Synthetic oligonucleotide
cugcccugagaaugagguc

SEQ ID NO: 2059340 - RNA, 19 nt, Artificial Sequence
  Description of Artificial Sequence: Synthetic oligonucleotide
ucggggccaaaaccuuaau

SEQ ID NO: 2059341 - RNA, 19 nt, Artificial Sequence
  Description of Artificial Sequence: Synthetic oligonucleotide
accagcguccggaacacuu

SEQ ID NO: 2059342 - RNA, 19 nt, Artificial Sequence
  Description of Artificial Sequence: Synthetic oligonucleotide
accuuacucagcaggcaau

SEQ ID NO: 2059343 - RNA, 19 nt, Artificial Sequence
  Description of Artificial Sequence: Synthetic oligonucleotide
ggcucucacugcauuuucc

SEQ ID NO: 2059344 - RNA, 19 nt, Artificial Sequence
  Description of Artificial Sequence: Synthetic oligonucleotide
ccaauccuugagguguggg

SEQ ID NO: 2059345 - RNA, 19 nt, Artificial Sequence
  Description of Artificial Sequence: Synthetic oligonucleotide
gacggccaccgcgucaaac

SEQ ID NO: 2059346 - RNA, 19 nt, Artificial Sequence
  Description of Artificial Sequence: Synthetic oligonucleotide
accuaggccacugggcuuu

SEQ ID NO: 2059347 - RNA, 19 nt, Artificial Sequence
  Description of Artificial Sequence: Synthetic oligonucleotide
guggugaugacuggccucu

SEQ ID NO: 2059348 - RNA, 19 nt, Artificial Sequence
  Description of Artificial Sequence: Synthetic oligonucleotide
ucacuuggguuggcugacu

SEQ ID NO: 2059349 - RNA, 19 nt, Artificial Sequence
  Description of Artificial Sequence: Synthetic oligonucleotide
ccacugggcuuucucagac

SEQ ID NO: 2059350 - RNA, 19 nt, Artificial Sequence
  Description of Artificial Sequence: Synthetic oligonucleotide
cgcgucaaacaccuaggcc

SEQ ID NO: 2059351 - RNA, 19 nt, Artificial Sequence
  Description of Artificial Sequence: Synthetic oligonucleotide
gcaggcacaauguccccuc

SEQ ID NO: 2059352 - RNA, 19 nt, Artificial Sequence
  Description of Artificial Sequence: Synthetic oligonucleotide
ccucaggaccugaaagcac

SEQ ID NO: 2059353 - RNA, 19 nt, Artificial Sequence
  Description of Artificial Sequence: Synthetic oligonucleotide
ccaaaugacuugaugcacu

SEQ ID NO: 2059354 - RNA, 19 nt, Artificial Sequence
  Description of Artificial Sequence: Synthetic oligonucleotide
caauguccccucuauguuu

SEQ ID NO: 2059355 - RNA, 19 nt, Artificial Sequence
  Description of Artificial Sequence: Synthetic oligonucleotide
aggcaggcacagcuuggaa

SEQ ID NO: 2059356 - RNA, 19 nt, Artificial Sequence
  Description of Artificial Sequence: Synthetic oligonucleotide
ccuuuguauccugcaagac

SEQ ID NO: 2059357 - RNA, 19 nt, Artificial Sequence
  Description of Artificial Sequence: Synthetic oligonucleotide
cacucugucuggggacggc

SEQ ID NO: 2059358 - RNA, 19 nt, Artificial Sequence
  Description of Artificial Sequence: Synthetic oligonucleotide
ccagcguccggaacacuug

SEQ ID NO: 2059359 - RNA, 19 nt, Artificial Sequence
  Description of Artificial Sequence: Synthetic oligonucleotide
ccgcgucaaacaccuaggc

SEQ ID NO: 2059360 - RNA, 19 nt, Artificial Sequence
  Description of Artificial Sequence: Synthetic oligonucleotide
  modified_base (2)..(2): a, c, u, g, unknown or other
cnucugccuggugccacug

SEQ ID NO: 2059361 - RNA, 19 nt, Artificial Sequence
  Description of Artificial Sequence: Synthetic oligonucleotide
ccuuacucagcaggcaauc

SEQ ID NO: 2059362 - RNA, 19 nt, Artificial Sequence
  Description of Artificial Sequence: Synthetic oligonucleotide
ugugaccugcggguucuuu

SEQ ID NO: 2059363 - RNA, 19 nt, Artificial Sequence
  Description of Artificial Sequence: Synthetic oligonucleotide
agcuggaccgggccaccaa

SEQ ID NO: 2059364 - RNA, 19 nt, Artificial Sequence
  Description of Artificial Sequence: Synthetic oligonucleotide
aucgacuguccuggaggcu

SEQ ID NO: 2059365 - RNA, 19 nt, Artificial Sequence
  Description of Artificial Sequence: Synthetic oligonucleotide
  modified_base (16)..(16): a, c, u, g, unknown or other
ccccucuauguuuacnucu

SEQ ID NO: 2059366 - RNA, 19 nt, Artificial Sequence
  Description of Artificial Sequence: Synthetic oligonucleotide
uaguaccgccagcgcugug

SEQ ID NO: 2059367 - RNA, 19 nt, Artificial Sequence
  Description of Artificial Sequence: Synthetic oligonucleotide
ggcacagcuuggaaucgac

SEQ ID NO: 2059368 - RNA, 19 nt, Artificial Sequence
  Description of Artificial Sequence: Synthetic oligonucleotide
cauaggggccuggcagcug

SEQ ID NO: 2059369 - RNA, 19 nt, Artificial Sequence
  Description of Artificial Sequence: Synthetic oligonucleotide
ggcaggcacagcuuggaau

SEQ ID NO: 2059370 - RNA, 19 nt, Artificial Sequence
  Description of Artificial Sequence: Synthetic oligonucleotide
cggggccaaaaccuuaaug

SEQ ID NO: 2059371 - RNA, 19 nt, Artificial Sequence
  Description of Artificial Sequence: Synthetic oligonucleotide
gggcuuucucagaccaggc

SEQ ID NO: 2059372 - RNA, 19 nt, Artificial Sequence
  Description of Artificial Sequence: Synthetic oligonucleotide
gcccugagaaugaggucag

SEQ ID NO: 2059373 - RNA, 19 nt, Artificial Sequence
  Description of Artificial Sequence: Synthetic oligonucleotide
cugcauuuuccaccagcgu

SEQ ID NO: 2059374 - RNA, 19 nt, Artificial Sequence
  Description of Artificial Sequence: Synthetic oligonucleotide
agcguccggaacacuugga

SEQ ID NO: 2059375 - RNA, 19 nt, Artificial Sequence
  Description of Artificial Sequence: Synthetic oligonucleotide
gccaauccuugaggugugg

SEQ ID NO: 2059376 - RNA, 19 nt, Artificial Sequence
  Description of Artificial Sequence: Synthetic oligonucleotide
ggccaccaaacugaaccca

SEQ ID NO: 2059377 - RNA, 19 nt, Artificial Sequence
  Description of Artificial Sequence: Synthetic oligonucleotide
cuggggacggccaccgcgu

SEQ ID NO: 2059378 - RNA, 19 nt, Artificial Sequence
  Description of Artificial Sequence: Synthetic oligonucleotide
ccugagaaugaggucagua

SEQ ID NO: 2059379 - RNA, 19 nt, Artificial Sequence
  Description of Artificial Sequence: Synthetic oligonucleotide
cccuggcuuccuuuguauc

SEQ ID NO: 2059380 - RNA, 19 nt, Artificial Sequence
  Description of Artificial Sequence: Synthetic oligonucleotide
ggccaccgcgucaaacacc

SEQ ID NO: 2059381 - RNA, 19 nt, Artificial Sequence
  Description of Artificial Sequence: Synthetic oligonucleotide
ggaccugaaagcaccgccu

SEQ ID NO: 2059382 - RNA, 19 nt, Artificial Sequence
  Description of Artificial Sequence: Synthetic oligonucleotide
ggaggcugaucuccgcugu

SEQ ID NO: 2059383 - RNA, 19 nt, Artificial Sequence
  Description of Artificial Sequence: Synthetic oligonucleotide
gccaccgcgucaaacaccu

SEQ ID NO: 2059384 - RNA, 19 nt, Artificial Sequence
  Description of Artificial Sequence: Synthetic oligonucleotide
gggucccgcaaagggcagg

SEQ ID NO: 2059385 - RNA, 19 nt, Artificial Sequence
  Description of Artificial Sequence: Synthetic oligonucleotide
caagaccuuucagugggau

SEQ ID NO: 2059386 - RNA, 19 nt, Artificial Sequence
  Description of Artificial Sequence: Synthetic oligonucleotide
ccucagggucccgcaaagg

SEQ ID NO: 2059387 - RNA, 19 nt, Artificial Sequence
  Description of Artificial Sequence: Synthetic oligonucleotide
gucuggggacggccaccgc

SEQ ID NO: 2059388 - RNA, 19 nt, Artificial Sequence
  Description of Artificial Sequence: Synthetic oligonucleotide
cugacugaaggagguugcu

SEQ ID NO: 2059389 - RNA, 19 nt, Artificial Sequence
  Description of Artificial Sequence: Synthetic oligonucleotide
guaguaccgccagcgcugu

SEQ ID NO: 2059390 - RNA, 19 nt, Artificial Sequence
  Description of Artificial Sequence: Synthetic oligonucleotide
gggacggccaccgcgucaa

SEQ ID NO: 2059391 - RNA, 19 nt, Artificial Sequence
  Description of Artificial Sequence: Synthetic oligonucleotide
accgggccaccaaacugaa

SEQ ID NO: 2059392 - RNA, 19 nt, Artificial Sequence
  Description of Artificial Sequence: Synthetic oligonucleotide
gucccgcaaagggcaggug

SEQ ID NO: 2059393 - RNA, 19 nt, Artificial Sequence
  Description of Artificial Sequence: Synthetic oligonucleotide
ccgcaaagggcaggugagc

SEQ ID NO: 2059394 - RNA, 19 nt, Artificial Sequence
  Description of Artificial Sequence: Synthetic oligonucleotide
cuccgcugucaggugguga

SEQ ID NO: 2059395 - RNA, 19 nt, Artificial Sequence
  Description of Artificial Sequence: Synthetic oligonucleotide
cuggcgccucagguccacc

SEQ ID NO: 2059396 - RNA, 19 nt, Artificial Sequence
  Description of Artificial Sequence: Synthetic oligonucleotide
ccacucugucuggggacgg

SEQ ID NO: 2059397 - RNA, 19 nt, Artificial Sequence
  Description of Artificial Sequence: Synthetic oligonucleotide
gcucggucuccagccacug

SEQ ID NO: 2059398 - RNA, 19 nt, Artificial Sequence
  Description of Artificial Sequence: Synthetic oligonucleotide
ggggacggccaccgcguca

SEQ ID NO: 2059399 - RNA, 19 nt, Artificial Sequence
  Description of Artificial Sequence: Synthetic oligonucleotide
ggaagaccugccaauccuu

SEQ ID NO: 2059400 - RNA, 19 nt, Artificial Sequence
  Description of Artificial Sequence: Synthetic oligonucleotide
gcaagaccuuucaguggga

SEQ ID NO: 2059401 - RNA, 19 nt, Artificial Sequence
  Description of Artificial Sequence: Synthetic oligonucleotide
gcaaagggcaggugagcuu

SEQ ID NO: 2059402 - RNA, 19 nt, Artificial Sequence
  Description of Artificial Sequence: Synthetic oligonucleotide
ccaccuuacucagcaggca

SEQ ID NO: 2059403 - RNA, 19 nt, Artificial Sequence
  Description of Artificial Sequence: Synthetic oligonucleotide
ccaccucagggcaguguga

SEQ ID NO: 2059404 - RNA, 19 nt, Artificial Sequence
  Description of Artificial Sequence: Synthetic oligonucleotide
cggccaccgcgucaaacac

SEQ ID NO: 2059405 - RNA, 19 nt, Artificial Sequence
  Description of Artificial Sequence: Synthetic oligonucleotide
ggucccgcaaagggcaggu

SEQ ID NO: 2059406 - RNA, 19 nt, Artificial Sequence
  Description of Artificial Sequence: Synthetic oligonucleotide
gcacagcuuggaaucgacu

SEQ ID NO: 2059407 - RNA, 19 nt, Artificial Sequence
  Description of Artificial Sequence: Synthetic oligonucleotide
caccuaggccacugggcuu

SEQ ID NO: 2059408 - RNA, 19 nt, Artificial Sequence
  Description of Artificial Sequence: Synthetic oligonucleotide
gcucggggccaaaaccuua

SEQ ID NO: 2059409 - RNA, 19 nt, Artificial Sequence
  Description of Artificial Sequence: Synthetic oligonucleotide
ccgggccaccaaacugaac

SEQ ID NO: 2059410 - RNA, 19 nt, Artificial Sequence
  Description of Artificial Sequence: Synthetic oligonucleotide
gcauaggggccuggcagcu

SEQ ID NO: 2059411 - RNA, 19 nt, Artificial Sequence
  Description of Artificial Sequence: Synthetic oligonucleotide
gcagacccucagggucccg

SEQ ID NO: 2059412 - RNA, 19 nt, Artificial Sequence
  Description of Artificial Sequence: Synthetic oligonucleotide
cgcaaagggcaggugagcu

SEQ ID NO: 2059413 - RNA, 19 nt, Artificial Sequence
  Description of Artificial Sequence: Synthetic oligonucleotide
ggaacacuuggaggacuuu

SEQ ID NO: 2059414 - RNA, 19 nt, Artificial Sequence
  Description of Artificial Sequence: Synthetic oligonucleotide
ccuggacaccacacauccu

SEQ ID NO: 2059415 - RNA, 19 nt, Artificial Sequence
  Description of Artificial Sequence: Synthetic oligonucleotide
cuaggccacugggcuuucu

SEQ ID NO: 2059416 - RNA, 19 nt, Artificial Sequence
  Description of Artificial Sequence: Synthetic oligonucleotide
ccgccagcgcugugcccug

SEQ ID NO: 2059417 - RNA, 19 nt, Artificial Sequence
  Description of Artificial Sequence: Synthetic oligonucleotide
gcaccgccuguggcagccc

SEQ ID NO: 2059418 - RNA, 19 nt, Artificial Sequence
  Description of Artificial Sequence: Synthetic oligonucleotide
ggcucggggccaaaaccuu

SEQ ID NO: 2059419 - RNA, 19 nt, Artificial Sequence
  Description of Artificial Sequence: Synthetic oligonucleotide
ggccaccucagggcagugu

SEQ ID NO: 2059420 - RNA, 19 nt, Artificial Sequence
  Description of Artificial Sequence: Synthetic oligonucleotide
ccuaggccacugggcuuuc

SEQ ID NO: 2059421 - RNA, 19 nt, Artificial Sequence
  Description of Artificial Sequence: Synthetic oligonucleotide
ccagcgcugugcccuggcu

SEQ ID NO: 2059422 - RNA, 19 nt, Artificial Sequence
  Description of Artificial Sequence: Synthetic oligonucleotide
ggacggccaccgcgucaaa

SEQ ID NO: 2059423 - RNA, 19 nt, Artificial Sequence
  Description of Artificial Sequence: Synthetic oligonucleotide
gugugaccugcggguucuu

SEQ ID NO: 2059424 - RNA, 19 nt, Artificial Sequence
  Description of Artificial Sequence: Synthetic oligonucleotide
ccaccgcgucaaacaccua

SEQ ID NO: 2059425 - RNA, 19 nt, Artificial Sequence
  Description of Artificial Sequence: Synthetic oligonucleotide
ccgcugucagguggugaau

SEQ ID NO: 2059426 - RNA, 19 nt, Artificial Sequence
  Description of Artificial Sequence: Synthetic oligonucleotide
ucaauuuuaaccuugaucg

SEQ ID NO: 2059427 - RNA, 19 nt, Artificial Sequence
  Description of Artificial Sequence: Synthetic oligonucleotide
uucauuuucaauuuuaacc

SEQ ID NO: 2059428 - RNA, 19 nt, Artificial Sequence
  Description of Artificial Sequence: Synthetic oligonucleotide
aaaguauccucccugcucc

SEQ ID NO: 2059429 - RNA, 19 nt, Artificial Sequence
  Description of Artificial Sequence: Synthetic oligonucleotide
uaaauauagaaccagcuca

SEQ ID NO: 2059430 - RNA, 19 nt, Artificial Sequence
  Description of Artificial Sequence: Synthetic oligonucleotide
uacaaauugguucucaggg

SEQ ID NO: 2059431 - RNA, 19 nt, Artificial Sequence
  Description of Artificial Sequence: Synthetic oligonucleotide
aagagaggcuuccaaaucc

SEQ ID NO: 2059432 - RNA, 19 nt, Artificial Sequence
  Description of Artificial Sequence: Synthetic oligonucleotide
acaaauggcagacauuuac

SEQ ID NO: 2059433 - RNA, 19 nt, Artificial Sequence
  Description of Artificial Sequence: Synthetic oligonucleotide
acucaagagcaucagaggc

SEQ ID NO: 2059434 - RNA, 19 nt, Artificial Sequence
  Description of Artificial Sequence: Synthetic oligonucleotide
aaaaguauccucccugcuc

SEQ ID NO: 2059435 - RNA, 19 nt, Artificial Sequence
  Description of Artificial Sequence: Synthetic oligonucleotide
uccagaucaacagugaugg

SEQ ID NO: 2059436 - RNA, 19 nt, Artificial Sequence
  Description of Artificial Sequence: Synthetic oligonucleotide
auggcagacauuuacaaag

SEQ ID NO: 2059437 - RNA, 19 nt, Artificial Sequence
  Description of Artificial Sequence: Synthetic oligonucleotide
uguaaaaguauccucccug

SEQ ID NO: 2059438 - RNA, 19 nt, Artificial Sequence
  Description of Artificial Sequence: Synthetic oligonucleotide
cuuacguacaaauugguuc

SEQ ID NO: 2059439 - RNA, 19 nt, Artificial Sequence
  Description of Artificial Sequence: Synthetic oligonucleotide
ugcauuuucaagcugaauu

SEQ ID NO: 2059440 - RNA, 19 nt, Artificial Sequence
  Description of Artificial Sequence: Synthetic oligonucleotide
aacucaagagcaucagagg

SEQ ID NO: 2059441 - RNA, 19 nt, Artificial Sequence
  Description of Artificial Sequence: Synthetic oligonucleotide
accacuucaacugaggacg

SEQ ID NO: 2059442 - RNA, 19 nt, Artificial Sequence
  Description of Artificial Sequence: Synthetic oligonucleotide
ucgagaaauauuuucacuc

SEQ ID NO: 2059443 - RNA, 19 nt, Artificial Sequence
  Description of Artificial Sequence: Synthetic oligonucleotide
agaaauauuuucacucucc

SEQ ID NO: 2059444 - RNA, 19 nt, Artificial Sequence
  Description of Artificial Sequence: Synthetic oligonucleotide
uccaaauccagucccaggc

SEQ ID NO: 2059445 - RNA, 19 nt, Artificial Sequence
  Description of Artificial Sequence: Synthetic oligonucleotide
ucuuggaggaacucaagag

SEQ ID NO: 2059446 - RNA, 19 nt, Artificial Sequence
  Description of Artificial Sequence: Synthetic oligonucleotide
agcuauaauuuucauuuuc

SEQ ID NO: 2059447 - RNA, 19 nt, Artificial Sequence
  Description of Artificial Sequence: Synthetic oligonucleotide
acugaggacgaccagguuc

SEQ ID NO: 2059448 - RNA, 19 nt, Artificial Sequence
  Description of Artificial Sequence: Synthetic oligonucleotide
gaacucaagagcaucagag

SEQ ID NO: 2059449 - RNA, 19 nt, Artificial Sequence
  Description of Artificial Sequence: Synthetic oligonucleotide
aaauauagaaccagcucag

SEQ ID NO: 2059450 - RNA, 19 nt, Artificial Sequence
  Description of Artificial Sequence: Synthetic oligonucleotide
uauaauuuucauuuucaau

SEQ ID NO: 2059451 - RNA, 19 nt, Artificial Sequence
  Description of Artificial Sequence: Synthetic oligonucleotide
aauugggucuuguugaaaa

SEQ ID NO: 2059452 - RNA, 19 nt, Artificial Sequence
  Description of Artificial Sequence: Synthetic oligonucleotide
uuacguacaaauugguucu

SEQ ID NO: 2059453 - RNA, 19 nt, Artificial Sequence
  Description of Artificial Sequence: Synthetic oligonucleotide
gauguaaaaguauccuccc

SEQ ID NO: 2059454 - RNA, 19 nt, Artificial Sequence
  Description of Artificial Sequence: Synthetic oligonucleotide
uguugaaaacugcagcagc

SEQ ID NO: 2059455 - RNA, 19 nt, Artificial Sequence
  Description of Artificial Sequence: Synthetic oligonucleotide
agagaugagcucuuuagug

SEQ ID NO: 2059456 - RNA, 19 nt, Artificial Sequence
  Description of Artificial Sequence: Synthetic oligonucleotide
aauauagaaccagcucagc

SEQ ID NO: 2059457 - RNA, 19 nt, Artificial Sequence
  Description of Artificial Sequence: Synthetic oligonucleotide
ugugauggcuccuaaauau

SEQ ID NO: 2059458 - RNA, 19 nt, Artificial Sequence
  Description of Artificial Sequence: Synthetic oligonucleotide
ucuucuucuacuccagggc

SEQ ID NO: 2059459 - RNA, 19 nt, Artificial Sequence
  Description of Artificial Sequence: Synthetic oligonucleotide
uccaagauuucacaaagau

SEQ ID NO: 2059460 - RNA, 19 nt, Artificial Sequence
  Description of Artificial Sequence: Synthetic oligonucleotide
uccuaaauauagaaccagc

SEQ ID NO: 2059461 - RNA, 19 nt, Artificial Sequence
  Description of Artificial Sequence: Synthetic oligonucleotide
cuccaugaagucuaggugc

SEQ ID NO: 2059462 - RNA, 19 nt, Artificial Sequence
  Description of Artificial Sequence: Synthetic oligonucleotide
ugauggcuccuaaauauag

SEQ ID NO: 2059463 - RNA, 19 nt, Artificial Sequence
  Description of Artificial Sequence: Synthetic oligonucleotide
auagucuguuuccagauca

SEQ ID NO: 2059464 - RNA, 19 nt, Artificial Sequence
  Description of Artificial Sequence: Synthetic oligonucleotide
gguucuuacguacaaauug

SEQ ID NO: 2059465 - RNA, 19 nt, Artificial Sequence
  Description of Artificial Sequence: Synthetic oligonucleotide
cuuggaggaacucaagagc

SEQ ID NO: 2059466 - RNA, 19 nt, Artificial Sequence
  Description of Artificial Sequence: Synthetic oligonucleotide
ggcuccuaaauauagaacc

SEQ ID NO: 2059467 - RNA, 19 nt, Artificial Sequence
  Description of Artificial Sequence: Synthetic oligonucleotide
aggacgaccagguucuuac

SEQ ID NO: 2059468 - RNA, 19 nt, Artificial Sequence
  Description of Artificial Sequence: Synthetic oligonucleotide
aauugguucucagggugcc

SEQ ID NO: 2059469 - RNA, 19 nt, Artificial Sequence
  Description of Artificial Sequence: Synthetic oligonucleotide
ucagcauagguugaccugg

SEQ ID NO: 2059470 - RNA, 19 nt, Artificial Sequence
  Description of Artificial Sequence: Synthetic oligonucleotide
uuuacaaagagaggcuucc

SEQ ID NO: 2059471 - RNA, 19 nt, Artificial Sequence
  Description of Artificial Sequence: Synthetic oligonucleotide
aaauugguucucagggugc

SEQ ID NO: 2059472 - RNA, 19 nt, Artificial Sequence
  Description of Artificial Sequence: Synthetic oligonucleotide
uguugaagcuauaauuuuc

SEQ ID NO: 2059473 - RNA, 19 nt, Artificial Sequence
  Description of Artificial Sequence: Synthetic oligonucleotide
ucaagcugaauuucuuucc

SEQ ID NO: 2059474 - RNA, 19 nt, Artificial Sequence
  Description of Artificial Sequence: Synthetic oligonucleotide
gaaggggaagucuuccugg

SEQ ID NO: 2059475 - RNA, 19 nt, Artificial Sequence
  Description of Artificial Sequence: Synthetic oligonucleotide
acagugauggacauuuccc

SEQ ID NO: 2059476 - RNA, 19 nt, Artificial Sequence
  Description of Artificial Sequence: Synthetic oligonucleotide
ucaacugaggacgaccagg

SEQ ID NO: 2059477 - RNA, 19 nt, Artificial Sequence
  Description of Artificial Sequence: Synthetic oligonucleotide
uauagaaccagcucagcau

SEQ ID NO: 2059478 - RNA, 19 nt, Artificial Sequence
  Description of Artificial Sequence: Synthetic oligonucleotide
guucuuacguacaaauugg

SEQ ID NO: 2059479 - RNA, 19 nt, Artificial Sequence
  Description of Artificial Sequence: Synthetic oligonucleotide
cugaaauugggucuuguug

SEQ ID NO: 2059480 - RNA, 19 nt, Artificial Sequence
  Description of Artificial Sequence: Synthetic oligonucleotide
gaucgcuccaccuccagag

SEQ ID NO: 2059481 - RNA, 19 nt, Artificial Sequence
  Description of Artificial Sequence: Synthetic oligonucleotide
auauagaaccagcucagca

SEQ ID NO: 2059482 - RNA, 19 nt, Artificial Sequence
  Description of Artificial Sequence: Synthetic oligonucleotide
guacaaauugguucucagg

SEQ ID NO: 2059483 - RNA, 19 nt, Artificial Sequence
  Description of Artificial Sequence: Synthetic oligonucleotide
acuucaacugaggacgacc

SEQ ID NO: 2059484 - RNA, 19 nt, Artificial Sequence
  Description of Artificial Sequence: Synthetic oligonucleotide
uuucccaugagcucugcug

SEQ ID NO: 2059485 - RNA, 19 nt, Artificial Sequence
  Description of Artificial Sequence: Synthetic oligonucleotide
guaaaaguauccucccugc

SEQ ID NO: 2059486 - RNA, 19 nt, Artificial Sequence
  Description of Artificial Sequence: Synthetic oligonucleotide
ugaauuucuuucccaugag

SEQ ID NO: 2059487 - RNA, 19 nt, Artificial Sequence
  Description of Artificial Sequence: Synthetic oligonucleotide
caaauugguucucagggug

SEQ ID NO: 2059488 - RNA, 19 nt, Artificial Sequence
  Description of Artificial Sequence: Synthetic oligonucleotide
agaggcaaccacuucaacu

SEQ ID NO: 2059489 - RNA, 19 nt, Artificial Sequence
  Description of Artificial Sequence: Synthetic oligonucleotide
auugggucuuguugaaaac

SEQ ID NO: 2059490 - RNA, 19 nt, Artificial Sequence
  Description of Artificial Sequence: Synthetic oligonucleotide
aauggcagacauuuacaaa

SEQ ID NO: 2059491 - RNA, 19 nt, Artificial Sequence
  Description of Artificial Sequence: Synthetic oligonucleotide
agcaaugucacuucagcau

SEQ ID NO: 2059492 - RNA, 19 nt, Artificial Sequence
  Description of Artificial Sequence: Synthetic oligonucleotide
ugcuccaugaagucuaggu

SEQ ID NO: 2059493 - RNA, 19 nt, Artificial Sequence
  Description of Artificial Sequence: Synthetic oligonucleotide
uccugguacugaaauuggg

SEQ ID NO: 2059494 - RNA, 19 nt, Artificial Sequence
  Description of Artificial Sequence: Synthetic oligonucleotide
agugugauggcuccuaaau

SEQ ID NO: 2059495 - RNA, 19 nt, Artificial Sequence
  Description of Artificial Sequence: Synthetic oligonucleotide
uccaugaagucuaggugcc

SEQ ID NO: 2059496 - RNA, 19 nt, Artificial Sequence
  Description of Artificial Sequence: Synthetic oligonucleotide
uuccugguacugaaauugg

SEQ ID NO: 2059497 - RNA, 19 nt, Artificial Sequence
  Description of Artificial Sequence: Synthetic oligonucleotide
uagguugaccuggugaagg

SEQ ID NO: 2059498 - RNA, 19 nt, Artificial Sequence
  Description of Artificial Sequence: Synthetic oligonucleotide
ugucacuucagcauagguu

SEQ ID NO: 2059499 - RNA, 19 nt, Artificial Sequence
  Description of Artificial Sequence: Synthetic oligonucleotide
cucagcauagucuguuucc

SEQ ID NO: 2059500 - RNA, 19 nt, Artificial Sequence
  Description of Artificial Sequence: Synthetic oligonucleotide
ugaagcuauaauuuucauu

SEQ ID NO: 2059501 - RNA, 19 nt, Artificial Sequence
  Description of Artificial Sequence: Synthetic oligonucleotide
aggaucucccuccauuuuc

SEQ ID NO: 2059502 - RNA, 19 nt, Artificial Sequence
  Description of Artificial Sequence: Synthetic oligonucleotide
accagcucagcauagucug

SEQ ID NO: 2059503 - RNA, 19 nt, Artificial Sequence
  Description of Artificial Sequence: Synthetic oligonucleotide
uucucagggugccaaucgg

SEQ ID NO: 2059504 - RNA, 19 nt, Artificial Sequence
  Description of Artificial Sequence: Synthetic oligonucleotide
ggugccuccccacaaaugg

SEQ ID NO: 2059505 - RNA, 19 nt, Artificial Sequence
  Description of Artificial Sequence: Synthetic oligonucleotide
auuuuaaccuugaucgcuc

SEQ ID NO: 2059506 - RNA, 19 nt, Artificial Sequence
  Description of Artificial Sequence: Synthetic oligonucleotide
caauuuuaaccuugaucgc

SEQ ID NO: 2059507 - RNA, 19 nt, Artificial Sequence
  Description of Artificial Sequence: Synthetic oligonucleotide
ggagagcacacacagcucg

SEQ ID NO: 2059508 - RNA, 19 nt, Artificial Sequence
  Description of Artificial Sequence: Synthetic oligonucleotide
uuuucugaggagaggguuc

SEQ ID NO: 2059509 - RNA, 19 nt, Artificial Sequence
  Description of Artificial Sequence: Synthetic oligonucleotide
caagcugaauuucuuuccc

SEQ ID NO: 2059510 - RNA, 19 nt, Artificial Sequence
  Description of Artificial Sequence: Synthetic oligonucleotide
aaugucacuucagcauagg

SEQ ID NO: 2059511 - RNA, 19 nt, Artificial Sequence
  Description of Artificial Sequence: Synthetic oligonucleotide
cagugauggacauuucccc

SEQ ID NO: 2059512 - RNA, 19 nt, Artificial Sequence
  Description of Artificial Sequence: Synthetic oligonucleotide
uucuauucuucuccccaag

SEQ ID NO: 2059513 - RNA, 19 nt, Artificial Sequence
  Description of Artificial Sequence: Synthetic oligonucleotide
uucuucuacuccagggcag

SEQ ID NO: 2059514 - RNA, 19 nt, Artificial Sequence
  Description of Artificial Sequence: Synthetic oligonucleotide
cuauucuucuccccaagug

SEQ ID NO: 2059515 - RNA, 19 nt, Artificial Sequence
  Description of Artificial Sequence: Synthetic oligonucleotide
ucuauucuucuccccaagu

SEQ ID NO: 2059516 - RNA, 19 nt, Artificial Sequence
  Description of Artificial Sequence: Synthetic oligonucleotide
cagaucaacagugauggac

SEQ ID NO: 2059517 - RNA, 19 nt, Artificial Sequence
  Description of Artificial Sequence: Synthetic oligonucleotide
cugguacugaaauuggguc

SEQ ID NO: 2059518 - RNA, 19 nt, Artificial Sequence
  Description of Artificial Sequence: Synthetic oligonucleotide
auggcuccuaaauauagaa

SEQ ID NO: 2059519 - RNA, 19 nt, Artificial Sequence
  Description of Artificial Sequence: Synthetic oligonucleotide
ugcacuccaagauuucaca

SEQ ID NO: 2059520 - RNA, 19 nt, Artificial Sequence
  Description of Artificial Sequence: Synthetic oligonucleotide
uucccaugagcucugcugu

SEQ ID NO: 2059521 - RNA, 19 nt, Artificial Sequence
  Description of Artificial Sequence: Synthetic oligonucleotide
aagucuaggugccucccca

SEQ ID NO: 2059522 - RNA, 19 nt, Artificial Sequence
  Description of Artificial Sequence: Synthetic oligonucleotide
guucucagggugccaaucg

SEQ ID NO: 2059523 - RNA, 19 nt, Artificial Sequence
  Description of Artificial Sequence: Synthetic oligonucleotide
ucccugaaagcaaugucac

SEQ ID NO: 2059524 - RNA, 19 nt, Artificial Sequence
  Description of Artificial Sequence: Synthetic oligonucleotide
uuuuaaccuugaucgcucc

SEQ ID NO: 2059525 - RNA, 19 nt, Artificial Sequence
  Description of Artificial Sequence: Synthetic oligonucleotide
uucuuacguacaaauuggu

SEQ ID NO: 2059526 - RNA, 19 nt, Artificial Sequence
  Description of Artificial Sequence: Synthetic oligonucleotide
uuuucaagcugaauuucuu

SEQ ID NO: 2059527 - RNA, 19 nt, Artificial Sequence
  Description of Artificial Sequence: Synthetic oligonucleotide
acaaauugguucucagggu

SEQ ID NO: 2059528 - RNA, 19 nt, Artificial Sequence
  Description of Artificial Sequence: Synthetic oligonucleotide
agugauggacauuucccca

SEQ ID NO: 2059529 - RNA, 19 nt, Artificial Sequence
  Description of Artificial Sequence: Synthetic oligonucleotide
aggcucuaccuacaggagg

SEQ ID NO: 2059530 - RNA, 19 nt, Artificial Sequence
  Description of Artificial Sequence: Synthetic oligonucleotide
aagcugaauuucuuuccca

SEQ ID NO: 2059531 - RNA, 19 nt, Artificial Sequence
  Description of Artificial Sequence: Synthetic oligonucleotide
agcauagucuguuuccaga

SEQ ID NO: 2059532 - RNA, 19 nt, Artificial Sequence
  Description of Artificial Sequence: Synthetic oligonucleotide
ucuuucuauucuucucccc

SEQ ID NO: 2059533 - RNA, 19 nt, Artificial Sequence
  Description of Artificial Sequence: Synthetic oligonucleotide
ucuuacguacaaauugguu

SEQ ID NO: 2059534 - RNA, 19 nt, Artificial Sequence
  Description of Artificial Sequence: Synthetic oligonucleotide
ucuacuccagggcaggcuc

SEQ ID NO: 2059535 - RNA, 19 nt, Artificial Sequence
  Description of Artificial Sequence: Synthetic oligonucleotide
agcuguuucccugaaagca

SEQ ID NO: 2059536 - RNA, 19 nt, Artificial Sequence
  Description of Artificial Sequence: Synthetic oligonucleotide
acuucagcauagguugacc

SEQ ID NO: 2059537 - RNA, 19 nt, Artificial Sequence
  Description of Artificial Sequence: Synthetic oligonucleotide
agaucaacagugauggaca

SEQ ID NO: 2059538 - RNA, 19 nt, Artificial Sequence
  Description of Artificial Sequence: Synthetic oligonucleotide
uaaccuugaucgcuccacc

SEQ ID NO: 2059539 - RNA, 19 nt, Artificial Sequence
  Description of Artificial Sequence: Synthetic oligonucleotide
guugaagcuauaauuuuca

SEQ ID NO: 2059540 - RNA, 19 nt, Artificial Sequence
  Description of Artificial Sequence: Synthetic oligonucleotide
ucuucuacuccagggcagg

SEQ ID NO: 2059541 - RNA, 19 nt, Artificial Sequence
  Description of Artificial Sequence: Synthetic oligonucleotide
accuugaucgcuccaccuc

SEQ ID NO: 2059542 - RNA, 19 nt, Artificial Sequence
  Description of Artificial Sequence: Synthetic oligonucleotide
ugucugcacuccaagauuu

SEQ ID NO: 2059543 - RNA, 19 nt, Artificial Sequence
  Description of Artificial Sequence: Synthetic oligonucleotide
ucugacacaggaucucccu

SEQ ID NO: 2059544 - RNA, 19 nt, Artificial Sequence
  Description of Artificial Sequence: Synthetic oligonucleotide
uggcagacauuuacaaaga

SEQ ID NO: 2059545 - RNA, 19 nt, Artificial Sequence
  Description of Artificial Sequence: Synthetic oligonucleotide
ugauggacauuuccccagc

SEQ ID NO: 2059546 - RNA, 19 nt, Artificial Sequence
  Description of Artificial Sequence: Synthetic oligonucleotide
ucaagagcaucagaggcaa

SEQ ID NO: 2059547 - RNA, 19 nt, Artificial Sequence
  Description of Artificial Sequence: Synthetic oligonucleotide
agcacacacagcucgagaa

SEQ ID NO: 2059548 - RNA, 19 nt, Artificial Sequence
  Description of Artificial Sequence: Synthetic oligonucleotide
cuccuaaauauagaaccag

SEQ ID NO: 2059549 - RNA, 19 nt, Artificial Sequence
  Description of Artificial Sequence: Synthetic oligonucleotide
aaccuugaucgcuccaccu

SEQ ID NO: 2059550 - RNA, 19 nt, Artificial Sequence
  Description of Artificial Sequence: Synthetic oligonucleotide
gagacuuucuucuucuacu

SEQ ID NO: 2059551 - RNA, 19 nt, Artificial Sequence
  Description of Artificial Sequence: Synthetic oligonucleotide
ucccguuuucugaggagag

SEQ ID NO: 2059552 - RNA, 19 nt, Artificial Sequence
  Description of Artificial Sequence: Synthetic oligonucleotide
uucaacugaggacgaccag

SEQ ID NO: 2059553 - RNA, 19 nt, Artificial Sequence
  Description of Artificial Sequence: Synthetic oligonucleotide
caaugucacuucagcauag

SEQ ID NO: 2059554 - RNA, 19 nt, Artificial Sequence
  Description of Artificial Sequence: Synthetic oligonucleotide
uccucuaggagacuuucuu

SEQ ID NO: 2059555 - RNA, 19 nt, Artificial Sequence
  Description of Artificial Sequence: Synthetic oligonucleotide
agguugaccuggugaaggg

SEQ ID NO: 2059556 - RNA, 19 nt, Artificial Sequence
  Description of Artificial Sequence: Synthetic oligonucleotide
aaggggaagucuuccuggu

SEQ ID NO: 2059557 - RNA, 19 nt, Artificial Sequence
  Description of Artificial Sequence: Synthetic oligonucleotide
uggcuccuaaauauagaac

SEQ ID NO: 2059558 - RNA, 19 nt, Artificial Sequence
  Description of Artificial Sequence: Synthetic oligonucleotide
uuucaauuuuaaccuugau

SEQ ID NO: 2059559 - RNA, 19 nt, Artificial Sequence
  Description of Artificial Sequence: Synthetic oligonucleotide
agaguugaggagagcacac

SEQ ID NO: 2059560 - RNA, 19 nt, Artificial Sequence
  Description of Artificial Sequence: Synthetic oligonucleotide
auguaaaaguauccucccu

SEQ ID NO: 2059561 - RNA, 19 nt, Artificial Sequence
  Description of Artificial Sequence: Synthetic oligonucleotide
ucagcauagucuguuucca

SEQ ID NO: 2059562 - RNA, 19 nt, Artificial Sequence
  Description of Artificial Sequence: Synthetic oligonucleotide
caaauggcagacauuuaca

SEQ ID NO: 2059563 - RNA, 19 nt, Artificial Sequence
  Description of Artificial Sequence: Synthetic oligonucleotide
cauagguugaccuggugaa

SEQ ID NO: 2059564 - RNA, 19 nt, Artificial Sequence
  Description of Artificial Sequence: Synthetic oligonucleotide
aucggcagcccaaagaugu

SEQ ID NO: 2059565 - RNA, 19 nt, Artificial Sequence
  Description of Artificial Sequence: Synthetic oligonucleotide
ucacucucccguuuucuga

SEQ ID NO: 2059566 - RNA, 19 nt, Artificial Sequence
  Description of Artificial Sequence: Synthetic oligonucleotide
uguuucccugaaagcaaug

SEQ ID NO: 2059567 - RNA, 19 nt, Artificial Sequence
  Description of Artificial Sequence: Synthetic oligonucleotide
agcucgagaaauauuuuca

SEQ ID NO: 2059568 - RNA, 19 nt, Artificial Sequence
  Description of Artificial Sequence: Synthetic oligonucleotide
agccagguccucuaggaga

SEQ ID NO: 2059569 - RNA, 19 nt, Artificial Sequence
  Description of Artificial Sequence: Synthetic oligonucleotide
cagcucgagaaauauuuuc

SEQ ID NO: 2059570 - RNA, 19 nt, Artificial Sequence
  Description of Artificial Sequence: Synthetic oligonucleotide
aaccagcucagcauagucu

SEQ ID NO: 2059571 - RNA, 19 nt, Artificial Sequence
  Description of Artificial Sequence: Synthetic oligonucleotide
aagcuauaauuuucauuuu

SEQ ID NO: 2059572 - RNA, 19 nt, Artificial Sequence
  Description of Artificial Sequence: Synthetic oligonucleotide
agucuaggugccuccccac

SEQ ID NO: 2059573 - RNA, 19 nt, Artificial Sequence
  Description of Artificial Sequence: Synthetic oligonucleotide
cuucaacugaggacgacca

SEQ ID NO: 2059574 - RNA, 19 nt, Artificial Sequence
  Description of Artificial Sequence: Synthetic oligonucleotide
ucugcacuccaagauuuca

SEQ ID NO: 2059575 - RNA, 19 nt, Artificial Sequence
  Description of Artificial Sequence: Synthetic oligonucleotide
ucuaggugccuccccacaa

SEQ ID NO: 2059576 - RNA, 19 nt, Artificial Sequence
  Description of Artificial Sequence: Synthetic oligonucleotide
cucaagagcaucagaggca

SEQ ID NO: 2059577 - RNA, 19 nt, Artificial Sequence
  Description of Artificial Sequence: Synthetic oligonucleotide
gaagucuaggugccucccc

SEQ ID NO: 2059578 - RNA, 19 nt, Artificial Sequence
  Description of Artificial Sequence: Synthetic oligonucleotide
ccaagauuucacaaagaug

SEQ ID NO: 2059579 - RNA, 19 nt, Artificial Sequence
  Description of Artificial Sequence: Synthetic oligonucleotide
uuucugaggagaggguucu

SEQ ID NO: 2059580 - RNA, 19 nt, Artificial Sequence
  Description of Artificial Sequence: Synthetic oligonucleotide
cacucucccguuuucugag

SEQ ID NO: 2059581 - RNA, 19 nt, Artificial Sequence
  Description of Artificial Sequence: Synthetic oligonucleotide
gaaauugggucuuguugaa

SEQ ID NO: 2059582 - RNA, 19 nt, Artificial Sequence
  Description of Artificial Sequence: Synthetic oligonucleotide
uugaagcuauaauuuucau

SEQ ID NO: 2059583 - RNA, 19 nt, Artificial Sequence
  Description of Artificial Sequence: Synthetic oligonucleotide
aauccagucccaggccauc

SEQ ID NO: 2059584 - RNA, 19 nt, Artificial Sequence
  Description of Artificial Sequence: Synthetic oligonucleotide
gcaggcucuaccuacagga

SEQ ID NO: 2059585 - RNA, 19 nt, Artificial Sequence
  Description of Artificial Sequence: Synthetic oligonucleotide
augucacuucagcauaggu

SEQ ID NO: 2059586 - RNA, 19 nt, Artificial Sequence
  Description of Artificial Sequence: Synthetic oligonucleotide
acugaaauugggucuuguu

SEQ ID NO: 2059587 - RNA, 19 nt, Artificial Sequence
  Description of Artificial Sequence: Synthetic oligonucleotide
aagugugauggcuccuaaa

SEQ ID NO: 2059588 - RNA, 19 nt, Artificial Sequence
  Description of Artificial Sequence: Synthetic oligonucleotide
ucccuguugaagcuauaau

SEQ ID NO: 2059589 - RNA, 19 nt, Artificial Sequence
  Description of Artificial Sequence: Synthetic oligonucleotide
ucucccguuuucugaggag

SEQ ID NO: 2059590 - RNA, 19 nt, Artificial Sequence
  Description of Artificial Sequence: Synthetic oligonucleotide
ugaucgcuccaccuccaga

SEQ ID NO: 2059591 - RNA, 19 nt, Artificial Sequence
  Description of Artificial Sequence: Synthetic oligonucleotide
accuacaggaggcucuggu

SEQ ID NO: 2059592 - RNA, 19 nt, Artificial Sequence
  Description of Artificial Sequence: Synthetic oligonucleotide
accuccagaguugaggaga

SEQ ID NO: 2059593 - RNA, 19 nt, Artificial Sequence
  Description of Artificial Sequence: Synthetic oligonucleotide
ugaagucuaggugccuccc

SEQ ID NO: 2059594 - RNA, 19 nt, Artificial Sequence
  Description of Artificial Sequence: Synthetic oligonucleotide
ggaggcucuggucugacac

SEQ ID NO: 2059595 - RNA, 19 nt, Artificial Sequence
  Description of Artificial Sequence: Synthetic oligonucleotide
ggggaagucuuccugguac

SEQ ID NO: 2059596 - RNA, 19 nt, Artificial Sequence
  Description of Artificial Sequence: Synthetic oligonucleotide
uccccaagugugauggcuc

SEQ ID NO: 2059597 - RNA, 19 nt, Artificial Sequence
  Description of Artificial Sequence: Synthetic oligonucleotide
uugaucgcuccaccuccag

SEQ ID NO: 2059598 - RNA, 19 nt, Artificial Sequence
  Description of Artificial Sequence: Synthetic oligonucleotide
ggcagacauuuacaaagag

SEQ ID NO: 2059599 - RNA, 19 nt, Artificial Sequence
  Description of Artificial Sequence: Synthetic oligonucleotide
aguucuuggaggaacucaa

SEQ ID NO: 2059600 - RNA, 19 nt, Artificial Sequence
  Description of Artificial Sequence: Synthetic oligonucleotide
gaggaacucaagagcauca

SEQ ID NO: 2059601 - RNA, 19 nt, Artificial Sequence
  Description of Artificial Sequence: Synthetic oligonucleotide
ggagacuuucuucuucuac

SEQ ID NO: 2059602 - RNA, 19 nt, Artificial Sequence
  Description of Artificial Sequence: Synthetic oligonucleotide
agcaucagaggcaaccacu

SEQ ID NO: 2059603 - RNA, 19 nt, Artificial Sequence
  Description of Artificial Sequence: Synthetic oligonucleotide
caaauccagucccaggcca

SEQ ID NO: 2059604 - RNA, 19 nt, Artificial Sequence
  Description of Artificial Sequence: Synthetic oligonucleotide
ggcuuccaaauccaguccc

SEQ ID NO: 2059605 - RNA, 19 nt, Artificial Sequence
  Description of Artificial Sequence: Synthetic oligonucleotide
aggaacucaagagcaucag

SEQ ID NO: 2059606 - RNA, 19 nt, Artificial Sequence
  Description of Artificial Sequence: Synthetic oligonucleotide
gauggcuccuaaauauaga

SEQ ID NO: 2059607 - RNA, 19 nt, Artificial Sequence
  Description of Artificial Sequence: Synthetic oligonucleotide
cauagucuguuuccagauc

SEQ ID NO: 2059608 - RNA, 19 nt, Artificial Sequence
  Description of Artificial Sequence: Synthetic oligonucleotide
caggccaucccuguugaag

SEQ ID NO: 2059609 - RNA, 19 nt, Artificial Sequence
  Description of Artificial Sequence: Synthetic oligonucleotide
gagagaugagcucuuuagu

SEQ ID NO: 2059610 - RNA, 19 nt, Artificial Sequence
  Description of Artificial Sequence: Synthetic oligonucleotide
ucuaggagacuuucuucuu

SEQ ID NO: 2059611 - RNA, 19 nt, Artificial Sequence
  Description of Artificial Sequence: Synthetic oligonucleotide
caugaagucuaggugccuc

SEQ ID NO: 2059612 - RNA, 19 nt, Artificial Sequence
  Description of Artificial Sequence: Synthetic oligonucleotide
cucuaggagacuuucuucu

SEQ ID NO: 2059613 - RNA, 19 nt, Artificial Sequence
  Description of Artificial Sequence: Synthetic oligonucleotide
agaggguucugcauuuucu

SEQ ID NO: 2059614 - RNA, 19 nt, Artificial Sequence
  Description of Artificial Sequence: Synthetic oligonucleotide
gagaggguucugcauuuuc

SEQ ID NO: 2059615 - RNA, 19 nt, Artificial Sequence
  Description of Artificial Sequence: Synthetic oligonucleotide
uagucuguuuccagaucaa

SEQ ID NO: 2059616 - RNA, 19 nt, Artificial Sequence
  Description of Artificial Sequence: Synthetic oligonucleotide
aaucggcagcccaaagaug

SEQ ID NO: 2059617 - RNA, 19 nt, Artificial Sequence
  Description of Artificial Sequence: Synthetic oligonucleotide
cgagagaugagcucuuuag

SEQ ID NO: 2059618 - RNA, 19 nt, Artificial Sequence
  Description of Artificial Sequence: Synthetic oligonucleotide
uugaccuggugaaggggaa

SEQ ID NO: 2059619 - RNA, 19 nt, Artificial Sequence
  Description of Artificial Sequence: Synthetic oligonucleotide
cagcauagucuguuuccag

SEQ ID NO: 2059620 - RNA, 19 nt, Artificial Sequence
  Description of Artificial Sequence: Synthetic oligonucleotide
gcauagguugaccugguga

SEQ ID NO: 2059621 - RNA, 19 nt, Artificial Sequence
  Description of Artificial Sequence: Synthetic oligonucleotide
gcucgagaaauauuuucac

SEQ ID NO: 2059622 - RNA, 19 nt, Artificial Sequence
  Description of Artificial Sequence: Synthetic oligonucleotide
auagguugaccuggugaag

SEQ ID NO: 2059623 - RNA, 19 nt, Artificial Sequence
  Description of Artificial Sequence: Synthetic oligonucleotide
ggacauuuccccagcagcc

SEQ ID NO: 2059624 - RNA, 19 nt, Artificial Sequence
  Description of Artificial Sequence: Synthetic oligonucleotide
cacagcucgagaaauauuu

SEQ ID NO: 2059625 - RNA, 19 nt, Artificial Sequence
  Description of Artificial Sequence: Synthetic oligonucleotide
ggcucuaccuacaggaggc

SEQ ID NO: 2059626 - RNA, 19 nt, Artificial Sequence
  Description of Artificial Sequence: Synthetic oligonucleotide
guugaccuggugaagggga

SEQ ID NO: 2059627 - RNA, 19 nt, Artificial Sequence
  Description of Artificial Sequence: Synthetic oligonucleotide
accagguucuuacguacaa

SEQ ID NO: 2059628 - RNA, 19 nt, Artificial Sequence
  Description of Artificial Sequence: Synthetic oligonucleotide
cacaaagauguaaaaguau

SEQ ID NO: 2059629 - RNA, 19 nt, Artificial Sequence
  Description of Artificial Sequence: Synthetic oligonucleotide
gagaggcuuccaaauccag

SEQ ID NO: 2059630 - RNA, 19 nt, Artificial Sequence
  Description of Artificial Sequence: Synthetic oligonucleotide
caggcucuaccuacaggag

SEQ ID NO: 2059631 - RNA, 19 nt, Artificial Sequence
  Description of Artificial Sequence: Synthetic oligonucleotide
uggugaaggggaagucuuc

SEQ ID NO: 2059632 - RNA, 19 nt, Artificial Sequence
  Description of Artificial Sequence: Synthetic oligonucleotide
caaccacuucaacugagga

SEQ ID NO: 2059633 - RNA, 19 nt, Artificial Sequence
  Description of Artificial Sequence: Synthetic oligonucleotide
uaggugccuccccacaaau

SEQ ID NO: 2059634 - RNA, 19 nt, Artificial Sequence
  Description of Artificial Sequence: Synthetic oligonucleotide
cacuccaagauuucacaaa

SEQ ID NO: 2059635 - RNA, 19 nt, Artificial Sequence
  Description of Artificial Sequence: Synthetic oligonucleotide
aagauuucacaaagaugua

SEQ ID NO: 2059636 - RNA, 19 nt, Artificial Sequence
  Description of Artificial Sequence: Synthetic oligonucleotide
caaagagaggcuuccaaau

SEQ ID NO: 2059637 - RNA, 19 nt, Artificial Sequence
  Description of Artificial Sequence: Synthetic oligonucleotide
ugaccuggugaaggggaag

SEQ ID NO: 2059638 - RNA, 19 nt, Artificial Sequence
  Description of Artificial Sequence: Synthetic oligonucleotide
agagcacacacagcucgag

SEQ ID NO: 2059639 - RNA, 19 nt, Artificial Sequence
  Description of Artificial Sequence: Synthetic oligonucleotide
agagaggcuuccaaaucca

SEQ ID NO: 2059640 - RNA, 19 nt, Artificial Sequence
  Description of Artificial Sequence: Synthetic oligonucleotide
cucgagaaauauuuucacu

SEQ ID NO: 2059641 - RNA, 19 nt, Artificial Sequence
  Description of Artificial Sequence: Synthetic oligonucleotide
agcauagguugaccuggug

SEQ ID NO: 2059642 - RNA, 19 nt, Artificial Sequence
  Description of Artificial Sequence: Synthetic oligonucleotide
guuuccagaucaacaguga

SEQ ID NO: 2059643 - RNA, 19 nt, Artificial Sequence
  Description of Artificial Sequence: Synthetic oligonucleotide
guucuuggaggaacucaag

SEQ ID NO: 2059644 - RNA, 19 nt, Artificial Sequence
  Description of Artificial Sequence: Synthetic oligonucleotide
acgaccagguucuuacgua

SEQ ID NO: 2059645 - RNA, 19 nt, Artificial Sequence
  Description of Artificial Sequence: Synthetic oligonucleotide
guugaggagagcacacaca

SEQ ID NO: 2059646 - RNA, 19 nt, Artificial Sequence
  Description of Artificial Sequence: Synthetic oligonucleotide
cagaguugaggagagcaca

SEQ ID NO: 2059647 - RNA, 19 nt, Artificial Sequence
  Description of Artificial Sequence: Synthetic oligonucleotide
cugaggacgaccagguucu

SEQ ID NO: 2059648 - RNA, 19 nt, Artificial Sequence
  Description of Artificial Sequence: Synthetic oligonucleotide
caaagaugucugcacucca

SEQ ID NO: 2059649 - RNA, 19 nt, Artificial Sequence
  Description of Artificial Sequence: Synthetic oligonucleotide
aggcaaccacuucaacuga

SEQ ID NO: 2059650 - RNA, 19 nt, Artificial Sequence
  Description of Artificial Sequence: Synthetic oligonucleotide
gacgaccagguucuuacgu

SEQ ID NO: 2059651 - RNA, 19 nt, Artificial Sequence
  Description of Artificial Sequence: Synthetic oligonucleotide
gagcacacacagcucgaga

SEQ ID NO: 2059652 - RNA, 19 nt, Artificial Sequence
  Description of Artificial Sequence: Synthetic oligonucleotide
cuucagcauagguugaccu

SEQ ID NO: 2059653 - RNA, 19 nt, Artificial Sequence
  Description of Artificial Sequence: Synthetic oligonucleotide
aggagaggguucugcauuu

SEQ ID NO: 2059654 - RNA, 19 nt, Artificial Sequence
  Description of Artificial Sequence: Synthetic oligonucleotide
ucgcuccaccuccagaguu

SEQ ID NO: 2059655 - RNA, 19 nt, Artificial Sequence
  Description of Artificial Sequence: Synthetic oligonucleotide
acguacaaauugguucuca

SEQ ID NO: 2059656 - RNA, 19 nt, Artificial Sequence
  Description of Artificial Sequence: Synthetic oligonucleotide
cuccaagauuucacaaaga

SEQ ID NO: 2059657 - RNA, 19 nt, Artificial Sequence
  Description of Artificial Sequence: Synthetic oligonucleotide
ccuaaauauagaaccagcu

SEQ ID NO: 2059658 - RNA, 19 nt, Artificial Sequence
  Description of Artificial Sequence: Synthetic oligonucleotide
ggaacucaagagcaucaga

SEQ ID NO: 2059659 - RNA, 19 nt, Artificial Sequence
  Description of Artificial Sequence: Synthetic oligonucleotide
caaucggcagcccaaagau

SEQ ID NO: 2059660 - RNA, 19 nt, Artificial Sequence
  Description of Artificial Sequence: Synthetic oligonucleotide
cagguucuuacguacaaau

SEQ ID NO: 2059661 - RNA, 19 nt, Artificial Sequence
  Description of Artificial Sequence: Synthetic oligonucleotide
cguacaaauugguucucag

SEQ ID NO: 2059662 - RNA, 19 nt, Artificial Sequence
  Description of Artificial Sequence: Synthetic oligonucleotide
gguugaccuggugaagggg

SEQ ID NO: 2059663 - RNA, 19 nt, Artificial Sequence
  Description of Artificial Sequence: Synthetic oligonucleotide
ggaucucccuccauuuucc

SEQ ID NO: 2059664 - RNA, 19 nt, Artificial Sequence
  Description of Artificial Sequence: Synthetic oligonucleotide
gugugauggcuccuaaaua

SEQ ID NO: 2059665 - RNA, 19 nt, Artificial Sequence
  Description of Artificial Sequence: Synthetic oligonucleotide
aacugaggacgaccagguu

SEQ ID NO: 2059666 - RNA, 19 nt, Artificial Sequence
  Description of Artificial Sequence: Synthetic oligonucleotide
cacuucagcauagguugac

SEQ ID NO: 2059667 - RNA, 19 nt, Artificial Sequence
  Description of Artificial Sequence: Synthetic oligonucleotide
gcucuggucugacacagga

SEQ ID NO: 2059668 - RNA, 19 nt, Artificial Sequence
  Description of Artificial Sequence: Synthetic oligonucleotide
cucccugcuccaugaaguc

SEQ ID NO: 2059669 - RNA, 19 nt, Artificial Sequence
  Description of Artificial Sequence: Synthetic oligonucleotide
uuuccccagcagccuuugc

SEQ ID NO: 2059670 - RNA, 19 nt, Artificial Sequence
  Description of Artificial Sequence: Synthetic oligonucleotide
gcaaugucacuucagcaua

SEQ ID NO: 2059671 - RNA, 19 nt, Artificial Sequence
  Description of Artificial Sequence: Synthetic oligonucleotide
gaggagaggguucugcauu

SEQ ID NO: 2059672 - RNA, 19 nt, Artificial Sequence
  Description of Artificial Sequence: Synthetic oligonucleotide
gaguugaggagagcacaca

SEQ ID NO: 2059673 - RNA, 19 nt, Artificial Sequence
  Description of Artificial Sequence: Synthetic oligonucleotide
cuaccuacaggaggcucug

SEQ ID NO: 2059674 - RNA, 19 nt, Artificial Sequence
  Description of Artificial Sequence: Synthetic oligonucleotide
gaucaacagugauggacau

SEQ ID NO: 2059675 - RNA, 19 nt, Artificial Sequence
  Description of Artificial Sequence: Synthetic oligonucleotide
caguucuuggaggaacuca

SEQ ID NO: 2059676 - RNA, 19 nt, Artificial Sequence
  Description of Artificial Sequence: Synthetic oligonucleotide
ugagcucuuuaguguguuu

SEQ ID NO: 2059677 - RNA, 19 nt, Artificial Sequence
  Description of Artificial Sequence: Synthetic oligonucleotide
aucgcuccaccuccagagu

SEQ ID NO: 2059678 - RNA, 19 nt, Artificial Sequence
  Description of Artificial Sequence: Synthetic oligonucleotide
gggucuuguugaaaacugc

SEQ ID NO: 2059679 - RNA, 19 nt, Artificial Sequence
  Description of Artificial Sequence: Synthetic oligonucleotide
uacguacaaauugguucuc

SEQ ID NO: 2059680 - RNA, 19 nt, Artificial Sequence
  Description of Artificial Sequence: Synthetic oligonucleotide
ucccugcuccaugaagucu

SEQ ID NO: 2059681 - RNA, 19 nt, Artificial Sequence
  Description of Artificial Sequence: Synthetic oligonucleotide
caacugaggacgaccaggu

SEQ ID NO: 2059682 - RNA, 19 nt, Artificial Sequence
  Description of Artificial Sequence: Synthetic oligonucleotide
ggacgaccagguucuuacg

SEQ ID NO: 2059683 - RNA, 19 nt, Artificial Sequence
  Description of Artificial Sequence: Synthetic oligonucleotide
ggucugacacaggaucucc

SEQ ID NO: 2059684 - RNA, 19 nt, Artificial Sequence
  Description of Artificial Sequence: Synthetic oligonucleotide
ucuccccaagugugauggc

SEQ ID NO: 2059685 - RNA, 19 nt, Artificial Sequence
  Description of Artificial Sequence: Synthetic oligonucleotide
ccagaguugaggagagcac

SEQ ID NO: 2059686 - RNA, 19 nt, Artificial Sequence
  Description of Artificial Sequence: Synthetic oligonucleotide
ggugccaaucggcagccca

SEQ ID NO: 2059687 - RNA, 19 nt, Artificial Sequence
  Description of Artificial Sequence: Synthetic oligonucleotide
cuugaucgcuccaccucca

SEQ ID NO: 2059688 - RNA, 19 nt, Artificial Sequence
  Description of Artificial Sequence: Synthetic oligonucleotide
ccucuaggagacuuucuuc

SEQ ID NO: 2059689 - RNA, 19 nt, Artificial Sequence
  Description of Artificial Sequence: Synthetic oligonucleotide
gaggguucugcauuuucuu

SEQ ID NO: 2059690 - RNA, 19 nt, Artificial Sequence
  Description of Artificial Sequence: Synthetic oligonucleotide
cucccguuuucugaggaga

SEQ ID NO: 2059691 - RNA, 19 nt, Artificial Sequence
  Description of Artificial Sequence: Synthetic oligonucleotide
cuucuacuccagggcaggc

SEQ ID NO: 2059692 - RNA, 19 nt, Artificial Sequence
  Description of Artificial Sequence: Synthetic oligonucleotide
ucggcagcccaaagauguc

SEQ ID NO: 2059693 - RNA, 19 nt, Artificial Sequence
  Description of Artificial Sequence: Synthetic oligonucleotide
caacagugauggacauuuc

SEQ ID NO: 2059694 - RNA, 19 nt, Artificial Sequence
  Description of Artificial Sequence: Synthetic oligonucleotide
uaccuacaggaggcucugg

SEQ ID NO: 2059695 - RNA, 19 nt, Artificial Sequence
  Description of Artificial Sequence: Synthetic oligonucleotide
cucucccguuuucugagga

SEQ ID NO: 2059696 - RNA, 19 nt, Artificial Sequence
  Description of Artificial Sequence: Synthetic oligonucleotide
agguucuuacguacaaauu

SEQ ID NO: 2059697 - RNA, 19 nt, Artificial Sequence
  Description of Artificial Sequence: Synthetic oligonucleotide
cagaggcaaccacuucaac

SEQ ID NO: 2059698 - RNA, 19 nt, Artificial Sequence
  Description of Artificial Sequence: Synthetic oligonucleotide
gcucagcauagucuguuuc

SEQ ID NO: 2059699 - RNA, 19 nt, Artificial Sequence
  Description of Artificial Sequence: Synthetic oligonucleotide
gucuaggugccuccccaca

SEQ ID NO: 2059700 - RNA, 19 nt, Artificial Sequence
  Description of Artificial Sequence: Synthetic oligonucleotide
cuguugaagcuauaauuuu

SEQ ID NO: 2059701 - RNA, 19 nt, Artificial Sequence
  Description of Artificial Sequence: Synthetic oligonucleotide
gaccagguucuuacguaca

SEQ ID NO: 2059702 - RNA, 19 nt, Artificial Sequence
  Description of Artificial Sequence: Synthetic oligonucleotide
ccuguugaagcuauaauuu

SEQ ID NO: 2059703 - RNA, 19 nt, Artificial Sequence
  Description of Artificial Sequence: Synthetic oligonucleotide
cucuaccuacaggaggcuc

SEQ ID NO: 2059704 - RNA, 19 nt, Artificial Sequence
  Description of Artificial Sequence: Synthetic oligonucleotide
ccaugagcucugcuguugc

SEQ ID NO: 2059705 - RNA, 19 nt, Artificial Sequence
  Description of Artificial Sequence: Synthetic oligonucleotide
augagcucuuuaguguguu

SEQ ID NO: 2059706 - RNA, 19 nt, Artificial Sequence
  Description of Artificial Sequence: Synthetic oligonucleotide
acagcucgagaaauauuuu

SEQ ID NO: 2059707 - RNA, 19 nt, Artificial Sequence
  Description of Artificial Sequence: Synthetic oligonucleotide
auugguucucagggugcca

SEQ ID NO: 2059708 - RNA, 19 nt, Artificial Sequence
  Description of Artificial Sequence: Synthetic oligonucleotide
gagcucuuuaguguguuuu

SEQ ID NO: 2059709 - RNA, 19 nt, Artificial Sequence
  Description of Artificial Sequence: Synthetic oligonucleotide
aggagacuuucuucuucua

SEQ ID NO: 2059710 - RNA, 19 nt, Artificial Sequence
  Description of Artificial Sequence: Synthetic oligonucleotide
gacauuuccccagcagccu

SEQ ID NO: 2059711 - RNA, 19 nt, Artificial Sequence
  Description of Artificial Sequence: Synthetic oligonucleotide
gaugagcucuuuagugugu

SEQ ID NO: 2059712 - RNA, 19 nt, Artificial Sequence
  Description of Artificial Sequence: Synthetic oligonucleotide
ucccuccauuuuccuccag

SEQ ID NO: 2059713 - RNA, 19 nt, Artificial Sequence
  Description of Artificial Sequence: Synthetic oligonucleotide
uucugaggagaggguucug

SEQ ID NO: 2059714 - RNA, 19 nt, Artificial Sequence
  Description of Artificial Sequence: Synthetic oligonucleotide
gcacuccaagauuucacaa

SEQ ID NO: 2059715 - RNA, 19 nt, Artificial Sequence
  Description of Artificial Sequence: Synthetic oligonucleotide
ccaaucggcagcccaaaga

SEQ ID NO: 2059716 - RNA, 19 nt, Artificial Sequence
  Description of Artificial Sequence: Synthetic oligonucleotide
aucaacagugauggacauu

SEQ ID NO: 2059717 - RNA, 19 nt, Artificial Sequence
  Description of Artificial Sequence: Synthetic oligonucleotide
cagcccaaagaugucugca

SEQ ID NO: 2059718 - RNA, 19 nt, Artificial Sequence
  Description of Artificial Sequence: Synthetic oligonucleotide
ugccaaucggcagcccaaa

SEQ ID NO: 2059719 - RNA, 19 nt, Artificial Sequence
  Description of Artificial Sequence: Synthetic oligonucleotide
ccccaagugugauggcucc

SEQ ID NO: 2059720 - RNA, 19 nt, Artificial Sequence
  Description of Artificial Sequence: Synthetic oligonucleotide
ucccaugagcucugcuguu

SEQ ID NO: 2059721 - RNA, 19 nt, Artificial Sequence
  Description of Artificial Sequence: Synthetic oligonucleotide
caagugugauggcuccuaa

SEQ ID NO: 2059722 - RNA, 19 nt, Artificial Sequence
  Description of Artificial Sequence: Synthetic oligonucleotide
gugaaggggaagucuuccu

SEQ ID NO: 2059723 - RNA, 19 nt, Artificial Sequence
  Description of Artificial Sequence: Synthetic oligonucleotide
cacuucaacugaggacgac

SEQ ID NO: 2059724 - RNA, 19 nt, Artificial Sequence
  Description of Artificial Sequence: Synthetic oligonucleotide
cuaggugccuccccacaaa

SEQ ID NO: 2059725 - RNA, 19 nt, Artificial Sequence
  Description of Artificial Sequence: Synthetic oligonucleotide
ggcagcccaaagaugucug

SEQ ID NO: 2059726 - RNA, 19 nt, Artificial Sequence
  Description of Artificial Sequence: Synthetic oligonucleotide
cugcuccaugaagucuagg

SEQ ID NO: 2059727 - RNA, 19 nt, Artificial Sequence
  Description of Artificial Sequence: Synthetic oligonucleotide
gaccuggugaaggggaagu

SEQ ID NO: 2059728 - RNA, 19 nt, Artificial Sequence
  Description of Artificial Sequence: Synthetic oligonucleotide
cacaaauggcagacauuua

SEQ ID NO: 2059729 - RNA, 19 nt, Artificial Sequence
  Description of Artificial Sequence: Synthetic oligonucleotide
gaucucccuccauuuuccu

SEQ ID NO: 2059730 - RNA, 19 nt, Artificial Sequence
  Description of Artificial Sequence: Synthetic oligonucleotide
cgaccagguucuuacguac

SEQ ID NO: 2059731 - RNA, 19 nt, Artificial Sequence
  Description of Artificial Sequence: Synthetic oligonucleotide
aggugccuccccacaaaug

SEQ ID NO: 2059732 - RNA, 19 nt, Artificial Sequence
  Description of Artificial Sequence: Synthetic oligonucleotide
uccccacaaauggcagaca

SEQ ID NO: 2059733 - RNA, 19 nt, Artificial Sequence
  Description of Artificial Sequence: Synthetic oligonucleotide
ccugguacugaaauugggu

SEQ ID NO: 2059734 - RNA, 19 nt, Artificial Sequence
  Description of Artificial Sequence: Synthetic oligonucleotide
gcauagucuguuuccagau

SEQ ID NO: 2059735 - RNA, 19 nt, Artificial Sequence
  Description of Artificial Sequence: Synthetic oligonucleotide
gguucucagggugccaauc

SEQ ID NO: 2059736 - RNA, 19 nt, Artificial Sequence
  Description of Artificial Sequence: Synthetic oligonucleotide
gccaaucggcagcccaaag

SEQ ID NO: 2059737 - RNA, 19 nt, Artificial Sequence
  Description of Artificial Sequence: Synthetic oligonucleotide
uacuccagggcaggcucua

SEQ ID NO: 2059738 - RNA, 19 nt, Artificial Sequence
  Description of Artificial Sequence: Synthetic oligonucleotide
gggcaggcucuaccuacag

SEQ ID NO: 2059739 - RNA, 19 nt, Artificial Sequence
  Description of Artificial Sequence: Synthetic oligonucleotide
cacaggaucucccuccauu

SEQ ID NO: 2059740 - RNA, 19 nt, Artificial Sequence
  Description of Artificial Sequence: Synthetic oligonucleotide
ccugaaagcaaugucacuu

SEQ ID NO: 2059741 - RNA, 19 nt, Artificial Sequence
  Description of Artificial Sequence: Synthetic oligonucleotide
gguacugaaauugggucuu

SEQ ID NO: 2059742 - RNA, 19 nt, Artificial Sequence
  Description of Artificial Sequence: Synthetic oligonucleotide
gcuuccaaauccaguccca

SEQ ID NO: 2059743 - RNA, 19 nt, Artificial Sequence
  Description of Artificial Sequence: Synthetic oligonucleotide
gugccaaucggcagcccaa

SEQ ID NO: 2059744 - RNA, 19 nt, Artificial Sequence
  Description of Artificial Sequence: Synthetic oligonucleotide
gaggacgaccagguucuua

SEQ ID NO: 2059745 - RNA, 19 nt, Artificial Sequence
  Description of Artificial Sequence: Synthetic oligonucleotide
auccucccugcuccaugaa

SEQ ID NO: 2059746 - RNA, 19 nt, Artificial Sequence
  Description of Artificial Sequence: Synthetic oligonucleotide
ccucccugcuccaugaagu

SEQ ID NO: 2059747 - RNA, 19 nt, Artificial Sequence
  Description of Artificial Sequence: Synthetic oligonucleotide
gccuccccacaaauggcag

SEQ ID NO: 2059748 - RNA, 19 nt, Artificial Sequence
  Description of Artificial Sequence: Synthetic oligonucleotide
cccaugagcucugcuguug

SEQ ID NO: 2059749 - RNA, 19 nt, Artificial Sequence
  Description of Artificial Sequence: Synthetic oligonucleotide
cgcuccaccuccagaguug

SEQ ID NO: 2059750 - RNA, 19 nt, Artificial Sequence
  Description of Artificial Sequence: Synthetic oligonucleotide
cuacuccagggcaggcucu

SEQ ID NO: 2059751 - RNA, 19 nt, Artificial Sequence
  Description of Artificial Sequence: Synthetic oligonucleotide
agguccucuaggagacuuu

SEQ ID NO: 2059752 - RNA, 19 nt, Artificial Sequence
  Description of Artificial Sequence: Synthetic oligonucleotide
cagcauagguugaccuggu

SEQ ID NO: 2059753 - RNA, 19 nt, Artificial Sequence
  Description of Artificial Sequence: Synthetic oligonucleotide
ccacuucaacugaggacga

SEQ ID NO: 2059754 - RNA, 19 nt, Artificial Sequence
  Description of Artificial Sequence: Synthetic oligonucleotide
caucccuguugaagcuaua

SEQ ID NO: 2059755 - RNA, 19 nt, Artificial Sequence
  Description of Artificial Sequence: Synthetic oligonucleotide
ugaggacgaccagguucuu

SEQ ID NO: 2059756 - RNA, 19 nt, Artificial Sequence
  Description of Artificial Sequence: Synthetic oligonucleotide
ccccacaaauggcagacau

SEQ ID NO: 2059757 - RNA, 19 nt, Artificial Sequence
  Description of Artificial Sequence: Synthetic oligonucleotide
ccagaucaacagugaugga

SEQ ID NO: 2059758 - RNA, 19 nt, Artificial Sequence
  Description of Artificial Sequence: Synthetic oligonucleotide
cagguccucuaggagacuu

SEQ ID NO: 2059759 - RNA, 19 nt, Artificial Sequence
  Description of Artificial Sequence: Synthetic oligonucleotide
ccagguucuuacguacaaa

SEQ ID NO: 2059760 - RNA, 19 nt, Artificial Sequence
  Description of Artificial Sequence: Synthetic oligonucleotide
ccaagugugauggcuccua

SEQ ID NO: 2059761 - RNA, 19 nt, Artificial Sequence
  Description of Artificial Sequence: Synthetic oligonucleotide
ccaucccuguugaagcuau

SEQ ID NO: 2059762 - RNA, 19 nt, Artificial Sequence
  Description of Artificial Sequence: Synthetic oligonucleotide
cccuccauuuuccuccagu

SEQ ID NO: 2059763 - RNA, 19 nt, Artificial Sequence
  Description of Artificial Sequence: Synthetic oligonucleotide
cguuuucugaggagagggu

SEQ ID NO: 2059764 - RNA, 19 nt, Artificial Sequence
  Description of Artificial Sequence: Synthetic oligonucleotide
cccacaaauggcagacauu

SEQ ID NO: 2059765 - RNA, 19 nt, Artificial Sequence
  Description of Artificial Sequence: Synthetic oligonucleotide
ccagggcaggcucuaccua

SEQ ID NO: 2059766 - RNA, 19 nt, Artificial Sequence
  Description of Artificial Sequence: Synthetic oligonucleotide
gcucuaccuacaggaggcu

SEQ ID NO: 2059767 - RNA, 19 nt, Artificial Sequence
  Description of Artificial Sequence: Synthetic oligonucleotide
ggagaggguucugcauuuu

SEQ ID NO: 2059768 - RNA, 19 nt, Artificial Sequence
  Description of Artificial Sequence: Synthetic oligonucleotide
ccaugaagucuaggugccu

SEQ ID NO: 2059769 - RNA, 19 nt, Artificial Sequence
  Description of Artificial Sequence: Synthetic oligonucleotide
cggcagcccaaagaugucu

SEQ ID NO: 2059770 - RNA, 19 nt, Artificial Sequence
  Description of Artificial Sequence: Synthetic oligonucleotide
aaggaaacaauuuaguccc

SEQ ID NO: 2059771 - RNA, 19 nt, Artificial Sequence
  Description of Artificial Sequence: Synthetic oligonucleotide
aaaucaacggcuuaaacac

SEQ ID NO: 2059772 - RNA, 19 nt, Artificial Sequence
  Description of Artificial Sequence: Synthetic oligonucleotide
aaaaucaacggcuuaaaca

SEQ ID NO: 2059773 - RNA, 19 nt, Artificial Sequence
  Description of Artificial Sequence: Synthetic oligonucleotide
uagagaaauaauuuaaugc

SEQ ID NO: 2059774 - RNA, 19 nt, Artificial Sequence
  Description of Artificial Sequence: Synthetic oligonucleotide
uauucgguaguuuucaugg

SEQ ID NO: 2059775 - RNA, 19 nt, Artificial Sequence
  Description of Artificial Sequence: Synthetic oligonucleotide
gaaggaaacaauuuagucc

SEQ ID NO: 2059776 - RNA, 19 nt, Artificial Sequence
  Description of Artificial Sequence: Synthetic oligonucleotide
cuuaaacacacguagaagc

SEQ ID NO: 2059777 - RNA, 19 nt, Artificial Sequence
  Description of Artificial Sequence: Synthetic oligonucleotide
acgaaugucacacacaaag

SEQ ID NO: 2059778 - RNA, 19 nt, Artificial Sequence
  Description of Artificial Sequence: Synthetic oligonucleotide
aaaguuagauuugauacuc

SEQ ID NO: 2059779 - RNA, 19 nt, Artificial Sequence
  Description of Artificial Sequence: Synthetic oligonucleotide
aauacacuaaagcagccug

SEQ ID NO: 2059780 - RNA, 19 nt, Artificial Sequence
  Description of Artificial Sequence: Synthetic oligonucleotide
gaacauauacuccuuaaag

SEQ ID NO: 2059781 - RNA, 19 nt, Artificial Sequence
  Description of Artificial Sequence: Synthetic oligonucleotide
aacauauacuccuuaaaga

SEQ ID NO: 2059782 - RNA, 19 nt, Artificial Sequence
  Description of Artificial Sequence: Synthetic oligonucleotide
aagugaaggaaucuacaac

SEQ ID NO: 2059783 - RNA, 19 nt, Artificial Sequence
  Description of Artificial Sequence: Synthetic oligonucleotide
aauaauuuaaugccuucca

SEQ ID NO: 2059784 - RNA, 19 nt, Artificial Sequence
  Description of Artificial Sequence: Synthetic oligonucleotide
auagauaacgccccugacc

SEQ ID NO: 2059785 - RNA, 19 nt, Artificial Sequence
  Description of Artificial Sequence: Synthetic oligonucleotide
gaaagaacggccuaaaauc

SEQ ID NO: 2059786 - RNA, 19 nt, Artificial Sequence
  Description of Artificial Sequence: Synthetic oligonucleotide
aaugucacacacaaaggcc

SEQ ID NO: 2059787 - RNA, 19 nt, Artificial Sequence
  Description of Artificial Sequence: Synthetic oligonucleotide
uuuaagauacaauacacua

SEQ ID NO: 2059788 - RNA, 19 nt, Artificial Sequence
  Description of Artificial Sequence: Synthetic oligonucleotide
aguuacaaaugcuauuuac

SEQ ID NO: 2059789 - RNA, 19 nt, Artificial Sequence
  Description of Artificial Sequence: Synthetic oligonucleotide
aaaagcauauucacugucc

SEQ ID NO: 2059790 - RNA, 19 nt, Artificial Sequence
  Description of Artificial Sequence: Synthetic oligonucleotide
uggacuacuguaaggaugg

SEQ ID NO: 2059791 - RNA, 19 nt, Artificial Sequence
  Description of Artificial Sequence: Synthetic oligonucleotide
aaaaguuagauuugauacu

SEQ ID NO: 2059792 - RNA, 19 nt, Artificial Sequence
  Description of Artificial Sequence: Synthetic oligonucleotide
ugaccuuuaagaaaguaga

SEQ ID NO: 2059793 - RNA, 19 nt, Artificial Sequence
  Description of Artificial Sequence: Synthetic oligonucleotide
agaaggaaacaauuuaguc

SEQ ID NO: 2059794 - RNA, 19 nt, Artificial Sequence
  Description of Artificial Sequence: Synthetic oligonucleotide
gaaauagugcuggagaacg

SEQ ID NO: 2059795 - RNA, 19 nt, Artificial Sequence
  Description of Artificial Sequence: Synthetic oligonucleotide
aaguuuuacuuuuaaguga

SEQ ID NO: 2059796 - RNA, 19 nt, Artificial Sequence
  Description of Artificial Sequence: Synthetic oligonucleotide
agugauuacaagcacacca

SEQ ID NO: 2059797 - RNA, 19 nt, Artificial Sequence
  Description of Artificial Sequence: Synthetic oligonucleotide
agugaaggaaucuacaaca

SEQ ID NO: 2059798 - RNA, 19 nt, Artificial Sequence
  Description of Artificial Sequence: Synthetic oligonucleotide
uuuucauagauaacgcccc

SEQ ID NO: 2059799 - RNA, 19 nt, Artificial Sequence
  Description of Artificial Sequence: Synthetic oligonucleotide
uuaaacacacguagaagcc

SEQ ID NO: 2059800 - RNA, 19 nt, Artificial Sequence
  Description of Artificial Sequence: Synthetic oligonucleotide
cauccuauccauuuauucg

SEQ ID NO: 2059801 - RNA, 19 nt, Artificial Sequence
  Description of Artificial Sequence: Synthetic oligonucleotide
acuguccuaaauuagcuag

SEQ ID NO: 2059802 - RNA, 19 nt, Artificial Sequence
  Description of Artificial Sequence: Synthetic oligonucleotide
aucuaguaauuuaagauac

SEQ ID NO: 2059803 - RNA, 19 nt, Artificial Sequence
  Description of Artificial Sequence: Synthetic oligonucleotide
aacaauuuagucccuuucu

SEQ ID NO: 2059804 - RNA, 19 nt, Artificial Sequence
  Description of Artificial Sequence: Synthetic oligonucleotide
uuaagugauuacaagcaca

SEQ ID NO: 2059805 - RNA, 19 nt, Artificial Sequence
  Description of Artificial Sequence: Synthetic oligonucleotide
uaaauuagcuagaauggac

SEQ ID NO: 2059806 - RNA, 19 nt, Artificial Sequence
  Description of Artificial Sequence: Synthetic oligonucleotide
auauacuccuuaaagacac

SEQ ID NO: 2059807 - RNA, 19 nt, Artificial Sequence
  Description of Artificial Sequence: Synthetic oligonucleotide
aagcacaccaaauaacaug

SEQ ID NO: 2059808 - RNA, 19 nt, Artificial Sequence
  Description of Artificial Sequence: Synthetic oligonucleotide
uagauaacgccccugaccu

SEQ ID NO: 2059809 - RNA, 19 nt, Artificial Sequence
  Description of Artificial Sequence: Synthetic oligonucleotide
auccuauccauuuauucgg

SEQ ID NO: 2059810 - RNA, 19 nt, Artificial Sequence
  Description of Artificial Sequence: Synthetic oligonucleotide
uaagugauuacaagcacac

SEQ ID NO: 2059811 - RNA, 19 nt, Artificial Sequence
  Description of Artificial Sequence: Synthetic oligonucleotide
aguuagauuugauacucuc

SEQ ID NO: 2059812 - RNA, 19 nt, Artificial Sequence
  Description of Artificial Sequence: Synthetic oligonucleotide
ggaaaaucaacagugaugc

SEQ ID NO: 2059813 - RNA, 19 nt, Artificial Sequence
  Description of Artificial Sequence: Synthetic oligonucleotide
ucguaagaguuacaaaugc

SEQ ID NO: 2059814 - RNA, 19 nt, Artificial Sequence
  Description of Artificial Sequence: Synthetic oligonucleotide
auaauuuaaugccuuccag

SEQ ID NO: 2059815 - RNA, 19 nt, Artificial Sequence
  Description of Artificial Sequence: Synthetic oligonucleotide
acuucagggacuuacuaag

SEQ ID NO: 2059816 - RNA, 19 nt, Artificial Sequence
  Description of Artificial Sequence: Synthetic oligonucleotide
aacggccuaaaaucaacgg

SEQ ID NO: 2059817 - RNA, 19 nt, Artificial Sequence
  Description of Artificial Sequence: Synthetic oligonucleotide
acggcuuaaacacacguag

SEQ ID NO: 2059818 - RNA, 19 nt, Artificial Sequence
  Description of Artificial Sequence: Synthetic oligonucleotide
acggccuaaaaucaacggc

SEQ ID NO: 2059819 - RNA, 19 nt, Artificial Sequence
  Description of Artificial Sequence: Synthetic oligonucleotide
acuuuuaagugauuacaag

SEQ ID NO: 2059820 - RNA, 19 nt, Artificial Sequence
  Description of Artificial Sequence: Synthetic oligonucleotide
acacgcagggaacauauac

SEQ ID NO: 2059821 - RNA, 19 nt, Artificial Sequence
  Description of Artificial Sequence: Synthetic oligonucleotide
auacaauacacuaaagcag

SEQ ID NO: 2059822 - RNA, 19 nt, Artificial Sequence
  Description of Artificial Sequence: Synthetic oligonucleotide
uguucugcucgaaauagug

SEQ ID NO: 2059823 - RNA, 19 nt, Artificial Sequence
  Description of Artificial Sequence: Synthetic oligonucleotide
uuacuuuuaagugauuaca

SEQ ID NO: 2059824 - RNA, 19 nt, Artificial Sequence
  Description of Artificial Sequence: Synthetic oligonucleotide
uucguaagaguuacaaaug

SEQ ID NO: 2059825 - RNA, 19 nt, Artificial Sequence
  Description of Artificial Sequence: Synthetic oligonucleotide
acauguaacacauucuuaa

SEQ ID NO: 2059826 - RNA, 19 nt, Artificial Sequence
  Description of Artificial Sequence: Synthetic oligonucleotide
uuacaaaugcuauuuacua

SEQ ID NO: 2059827 - RNA, 19 nt, Artificial Sequence
  Description of Artificial Sequence: Synthetic oligonucleotide
aaucuacaacagcauagag

SEQ ID NO: 2059828 - RNA, 19 nt, Artificial Sequence
  Description of Artificial Sequence: Synthetic oligonucleotide
gaaggaaucuacaacagca

SEQ ID NO: 2059829 - RNA, 19 nt, Artificial Sequence
  Description of Artificial Sequence: Synthetic oligonucleotide
aaauuagcuagaauggacu

SEQ ID NO: 2059830 - RNA, 19 nt, Artificial Sequence
  Description of Artificial Sequence: Synthetic oligonucleotide
uuacaagcacaccaaauaa

SEQ ID NO: 2059831 - RNA, 19 nt, Artificial Sequence
  Description of Artificial Sequence: Synthetic oligonucleotide
ccuaaauuagcuagaaugg

SEQ ID NO: 2059832 - RNA, 19 nt, Artificial Sequence
  Description of Artificial Sequence: Synthetic oligonucleotide
aguccuagcaucuaguaau

SEQ ID NO: 2059833 - RNA, 19 nt, Artificial Sequence
  Description of Artificial Sequence: Synthetic oligonucleotide
auuacaagcacaccaaaua

SEQ ID NO: 2059834 - RNA, 19 nt, Artificial Sequence
  Description of Artificial Sequence: Synthetic oligonucleotide
cuauccauuuauucgguag

SEQ ID NO: 2059835 - RNA, 19 nt, Artificial Sequence
  Description of Artificial Sequence: Synthetic oligonucleotide
acauucuuaaguccuagca

SEQ ID NO: 2059836 - RNA, 19 nt, Artificial Sequence
  Description of Artificial Sequence: Synthetic oligonucleotide
aaggaaaaucaacagugau

SEQ ID NO: 2059837 - RNA, 19 nt, Artificial Sequence
  Description of Artificial Sequence: Synthetic oligonucleotide
uaagaguuacaaaugcuau

SEQ ID NO: 2059838 - RNA, 19 nt, Artificial Sequence
  Description of Artificial Sequence: Synthetic oligonucleotide
guagaaggaaacaauuuag

SEQ ID NO: 2059839 - RNA, 19 nt, Artificial Sequence
  Description of Artificial Sequence: Synthetic oligonucleotide
acaccaaauaacauguaac

SEQ ID NO: 2059840 - RNA, 19 nt, Artificial Sequence
  Description of Artificial Sequence: Synthetic oligonucleotide
aguagaaggaaacaauuua

SEQ ID NO: 2059841 - RNA, 19 nt, Artificial Sequence
  Description of Artificial Sequence: Synthetic oligonucleotide
uacuuuuaagugauuacaa

SEQ ID NO: 2059842 - RNA, 19 nt, Artificial Sequence
  Description of Artificial Sequence: Synthetic oligonucleotide
uucugcucgaaauagugcu

SEQ ID NO: 2059843 - RNA, 19 nt, Artificial Sequence
  Description of Artificial Sequence: Synthetic oligonucleotide
uauucacuguccuaaauua

SEQ ID NO: 2059844 - RNA, 19 nt, Artificial Sequence
  Description of Artificial Sequence: Synthetic oligonucleotide
auuuaaugccuuccagaac

SEQ ID NO: 2059845 - RNA, 19 nt, Artificial Sequence
  Description of Artificial Sequence: Synthetic oligonucleotide
ugaaggaaucuacaacagc

SEQ ID NO: 2059846 - RNA, 19 nt, Artificial Sequence
  Description of Artificial Sequence: Synthetic oligonucleotide
acuccuuaaagacacacaa

SEQ ID NO: 2059847 - RNA, 19 nt, Artificial Sequence
  Description of Artificial Sequence: Synthetic oligonucleotide
uacaaaugcuauuuacuac

SEQ ID NO: 2059848 - RNA, 19 nt, Artificial Sequence
  Description of Artificial Sequence: Synthetic oligonucleotide
acugcuacaacugccgugg

SEQ ID NO: 2059849 - RNA, 19 nt, Artificial Sequence
  Description of Artificial Sequence: Synthetic oligonucleotide
acugacucgccaucgcugc

SEQ ID NO: 2059850 - RNA, 19 nt, Artificial Sequence
  Description of Artificial Sequence: Synthetic oligonucleotide
guuuccuauucugugaggg

SEQ ID NO: 2059851 - RNA, 19 nt, Artificial Sequence
  Description of Artificial Sequence: Synthetic oligonucleotide
ugcacagacacgcagggaa

SEQ ID NO: 2059852 - RNA, 19 nt, Artificial Sequence
  Description of Artificial Sequence: Synthetic oligonucleotide
cagaacucgaguucugugg

SEQ ID NO: 2059853 - RNA, 19 nt, Artificial Sequence
  Description of Artificial Sequence: Synthetic oligonucleotide
uuauucgguaguuuucaug

SEQ ID NO: 2059854 - RNA, 19 nt, Artificial Sequence
  Description of Artificial Sequence: Synthetic oligonucleotide
uggagaacggucaucuucu

SEQ ID NO: 2059855 - RNA, 19 nt, Artificial Sequence
  Description of Artificial Sequence: Synthetic oligonucleotide
aauuagcuagaauggacua

SEQ ID NO: 2059856 - RNA, 19 nt, Artificial Sequence
  Description of Artificial Sequence: Synthetic oligonucleotide
aaagaacggccuaaaauca

SEQ ID NO: 2059857 - RNA, 19 nt, Artificial Sequence
  Description of Artificial Sequence: Synthetic oligonucleotide
gaugccuugcgacugacuc

SEQ ID NO: 2059858 - RNA, 19 nt, Artificial Sequence
  Description of Artificial Sequence: Synthetic oligonucleotide
agcaucuaguaauuuaaga

SEQ ID NO: 2059859 - RNA, 19 nt, Artificial Sequence
  Description of Artificial Sequence: Synthetic oligonucleotide
uuagcuagaauggacuacu

SEQ ID NO: 2059860 - RNA, 19 nt, Artificial Sequence
  Description of Artificial Sequence: Synthetic oligonucleotide
cuuaaguccuagcaucuag

SEQ ID NO: 2059861 - RNA, 19 nt, Artificial Sequence
  Description of Artificial Sequence: Synthetic oligonucleotide
aacuucagggacuuacuaa

SEQ ID NO: 2059862 - RNA, 19 nt, Artificial Sequence
  Description of Artificial Sequence: Synthetic oligonucleotide
uuaaguccuagcaucuagu

SEQ ID NO: 2059863 - RNA, 19 nt, Artificial Sequence
  Description of Artificial Sequence: Synthetic oligonucleotide
auuagcuagaauggacuac

SEQ ID NO: 2059864 - RNA, 19 nt, Artificial Sequence
  Description of Artificial Sequence: Synthetic oligonucleotide
auacuccuuaaagacacac

SEQ ID NO: 2059865 - RNA, 19 nt, Artificial Sequence
  Description of Artificial Sequence: Synthetic oligonucleotide
gauguuuccuauucuguga

SEQ ID NO: 2059866 - RNA, 19 nt, Artificial Sequence
  Description of Artificial Sequence: Synthetic oligonucleotide
aaggauggcugcugcuucg

SEQ ID NO: 2059867 - RNA, 19 nt, Artificial Sequence
  Description of Artificial Sequence: Synthetic oligonucleotide
uguucaaucucagccuggg

SEQ ID NO: 2059868 - RNA, 19 nt, Artificial Sequence
  Description of Artificial Sequence: Synthetic oligonucleotide
cauguaacacauucuuaag

SEQ ID NO: 2059869 - RNA, 19 nt, Artificial Sequence
  Description of Artificial Sequence: Synthetic oligonucleotide
aagugauuacaagcacacc

SEQ ID NO: 2059870 - RNA, 19 nt, Artificial Sequence
  Description of Artificial Sequence: Synthetic oligonucleotide
uuccagaacagaacucgag

SEQ ID NO: 2059871 - RNA, 19 nt, Artificial Sequence
  Description of Artificial Sequence: Synthetic oligonucleotide
aagaguuacaaaugcuauu

SEQ ID NO: 2059872 - RNA, 19 nt, Artificial Sequence
  Description of Artificial Sequence: Synthetic oligonucleotide
uucuggacgaaugucacac

SEQ ID NO: 2059873 - RNA, 19 nt, Artificial Sequence
  Description of Artificial Sequence: Synthetic oligonucleotide
aucaacggcuuaaacacac

SEQ ID NO: 2059874 - RNA, 19 nt, Artificial Sequence
  Description of Artificial Sequence: Synthetic oligonucleotide
acacguagaagccccuugg

SEQ ID NO: 2059875 - RNA, 19 nt, Artificial Sequence
  Description of Artificial Sequence: Synthetic oligonucleotide
aauagugcuggagaacggu

SEQ ID NO: 2059876 - RNA, 19 nt, Artificial Sequence
  Description of Artificial Sequence: Synthetic oligonucleotide
auuuauucgguaguuuuca

SEQ ID NO: 2059877 - RNA, 19 nt, Artificial Sequence
  Description of Artificial Sequence: Synthetic oligonucleotide
uagcaucuaguaauuuaag

SEQ ID NO: 2059878 - RNA, 19 nt, Artificial Sequence
  Description of Artificial Sequence: Synthetic oligonucleotide
uaaacacacguagaagccc

SEQ ID NO: 2059879 - RNA, 19 nt, Artificial Sequence
  Description of Artificial Sequence: Synthetic oligonucleotide
aaugccuuccagaacagaa

SEQ ID NO: 2059880 - RNA, 19 nt, Artificial Sequence
  Description of Artificial Sequence: Synthetic oligonucleotide
ucggacaccuucucggccg

SEQ ID NO: 2059881 - RNA, 19 nt, Artificial Sequence
  Description of Artificial Sequence: Synthetic oligonucleotide
caccaaauaacauguaaca

SEQ ID NO: 2059882 - RNA, 19 nt, Artificial Sequence
  Description of Artificial Sequence: Synthetic oligonucleotide
aggaaaaucaacagugaug

SEQ ID NO: 2059883 - RNA, 19 nt, Artificial Sequence
  Description of Artificial Sequence: Synthetic oligonucleotide
uugaagggcaagacaaagu

SEQ ID NO: 2059884 - RNA, 19 nt, Artificial Sequence
  Description of Artificial Sequence: Synthetic oligonucleotide
cacuaaagcagccugaaaa

SEQ ID NO: 2059885 - RNA, 19 nt, Artificial Sequence
  Description of Artificial Sequence: Synthetic oligonucleotide
cauuuauucgguaguuuuc

SEQ ID NO: 2059886 - RNA, 19 nt, Artificial Sequence
  Description of Artificial Sequence: Synthetic oligonucleotide
ucaacggcuuaaacacacg

SEQ ID NO: 2059887 - RNA, 19 nt, Artificial Sequence
  Description of Artificial Sequence: Synthetic oligonucleotide
ggaaucuacaacagcauag

SEQ ID NO: 2059888 - RNA, 19 nt, Artificial Sequence
  Description of Artificial Sequence: Synthetic oligonucleotide
caucuaguaauuuaagaua

SEQ ID NO: 2059889 - RNA, 19 nt, Artificial Sequence
  Description of Artificial Sequence: Synthetic oligonucleotide
gaacggccuaaaaucaacg

SEQ ID NO: 2059890 - RNA, 19 nt, Artificial Sequence
  Description of Artificial Sequence: Synthetic oligonucleotide
acaauacacuaaagcagcc

SEQ ID NO: 2059891 - RNA, 19 nt, Artificial Sequence
  Description of Artificial Sequence: Synthetic oligonucleotide
cuucguaagaguuacaaau

SEQ ID NO: 2059892 - RNA, 19 nt, Artificial Sequence
  Description of Artificial Sequence: Synthetic oligonucleotide
guggauguuuccuauucug

SEQ ID NO: 2059893 - RNA, 19 nt, Artificial Sequence
  Description of Artificial Sequence: Synthetic oligonucleotide
aagauacaauacacuaaag

SEQ ID NO: 2059894 - RNA, 19 nt, Artificial Sequence
  Description of Artificial Sequence: Synthetic oligonucleotide
cauauacuccuuaaagaca

SEQ ID NO: 2059895 - RNA, 19 nt, Artificial Sequence
  Description of Artificial Sequence: Synthetic oligonucleotide
uuuccuauucugugagggc

SEQ ID NO: 2059896 - RNA, 19 nt, Artificial Sequence
  Description of Artificial Sequence: Synthetic oligonucleotide
aaguccuagcaucuaguaa

SEQ ID NO: 2059897 - RNA, 19 nt, Artificial Sequence
  Description of Artificial Sequence: Synthetic oligonucleotide
uuccuauucugugagggca

SEQ ID NO: 2059898 - RNA, 19 nt, Artificial Sequence
  Description of Artificial Sequence: Synthetic oligonucleotide
aaauagugcuggagaacgg

SEQ ID NO: 2059899 - RNA, 19 nt, Artificial Sequence
  Description of Artificial Sequence: Synthetic oligonucleotide
aguuuuacuuuuaagugau

SEQ ID NO: 2059900 - RNA, 19 nt, Artificial Sequence
  Description of Artificial Sequence: Synthetic oligonucleotide
agaacucgaguucugugga

SEQ ID NO: 2059901 - RNA, 19 nt, Artificial Sequence
  Description of Artificial Sequence: Synthetic oligonucleotide
aacagcauagagaaauaau

SEQ ID NO: 2059902 - RNA, 19 nt, Artificial Sequence
  Description of Artificial Sequence: Synthetic oligonucleotide
uguuuccuauucugugagg

SEQ ID NO: 2059903 - RNA, 19 nt, Artificial Sequence
  Description of Artificial Sequence: Synthetic oligonucleotide
uucgguaguuuucauggau

SEQ ID NO: 2059904 - RNA, 19 nt, Artificial Sequence
  Description of Artificial Sequence: Synthetic oligonucleotide
ugauuacaagcacaccaaa

SEQ ID NO: 2059905 - RNA, 19 nt, Artificial Sequence
  Description of Artificial Sequence: Synthetic oligonucleotide
uagugcuggagaacgguca

SEQ ID NO: 2059906 - RNA, 19 nt, Artificial Sequence
  Description of Artificial Sequence: Synthetic oligonucleotide
agaacggccuaaaaucaac

SEQ ID NO: 2059907 - RNA, 19 nt, Artificial Sequence
  Description of Artificial Sequence: Synthetic oligonucleotide
caaauaacauguaacacau

SEQ ID NO: 2059908 - RNA, 19 nt, Artificial Sequence
  Description of Artificial Sequence: Synthetic oligonucleotide
ucugcucgaaauagugcug

SEQ ID NO: 2059909 - RNA, 19 nt, Artificial Sequence
  Description of Artificial Sequence: Synthetic oligonucleotide
ugcguaacgcgccgaagcc

SEQ ID NO: 2059910 - RNA, 19 nt, Artificial Sequence
  Description of Artificial Sequence: Synthetic oligonucleotide
aacucgaguucuguggaug

SEQ ID NO: 2059911 - RNA, 19 nt, Artificial Sequence
  Description of Artificial Sequence: Synthetic oligonucleotide
cucgaaauagugcuggaga

SEQ ID NO: 2059912 - RNA, 19 nt, Artificial Sequence
  Description of Artificial Sequence: Synthetic oligonucleotide
acaauuuagucccuuucuu

SEQ ID NO: 2059913 - RNA, 19 nt, Artificial Sequence
  Description of Artificial Sequence: Synthetic oligonucleotide
auggcugcugcuucguaag

SEQ ID NO: 2059914 - RNA, 19 nt, Artificial Sequence
  Description of Artificial Sequence: Synthetic oligonucleotide
gaaaaucaacagugaugcc

SEQ ID NO: 2059915 - RNA, 19 nt, Artificial Sequence
  Description of Artificial Sequence: Synthetic oligonucleotide
uuucauagauaacgccccu

SEQ ID NO: 2059916 - RNA, 19 nt, Artificial Sequence
  Description of Artificial Sequence: Synthetic oligonucleotide
auaacauguaacacauucu

SEQ ID NO: 2059917 - RNA, 19 nt, Artificial Sequence
  Description of Artificial Sequence: Synthetic oligonucleotide
acagaacucgaguucugug

SEQ ID NO: 2059918 - RNA, 19 nt, Artificial Sequence
  Description of Artificial Sequence: Synthetic oligonucleotide
aaguagaaggaaacaauuu

SEQ ID NO: 2059919 - RNA, 19 nt, Artificial Sequence
  Description of Artificial Sequence: Synthetic oligonucleotide
cuagaauggacuacuguaa

SEQ ID NO: 2059920 - RNA, 19 nt, Artificial Sequence
  Description of Artificial Sequence: Synthetic oligonucleotide
ugcuucguaagaguuacaa

SEQ ID NO: 2059921 - RNA, 19 nt, Artificial Sequence
  Description of Artificial Sequence: Synthetic oligonucleotide
acucucggccgaaagaacg

SEQ ID NO: 2059922 - RNA, 19 nt, Artificial Sequence
  Description of Artificial Sequence: Synthetic oligonucleotide
aguucuguggauguuuccu

SEQ ID NO: 2059923 - RNA, 19 nt, Artificial Sequence
  Description of Artificial Sequence: Synthetic oligonucleotide
gagaacggucaucuucucc

SEQ ID NO: 2059924 - RNA, 19 nt, Artificial Sequence
  Description of Artificial Sequence: Synthetic oligonucleotide
guaagaguuacaaaugcua

SEQ ID NO: 2059925 - RNA, 19 nt, Artificial Sequence
  Description of Artificial Sequence: Synthetic oligonucleotide
gaugccugcugcuugcaca

SEQ ID NO: 2059926 - RNA, 19 nt, Artificial Sequence
  Description of Artificial Sequence: Synthetic oligonucleotide
uucagggacuuacuaaguu

SEQ ID NO: 2059927 - RNA, 19 nt, Artificial Sequence
  Description of Artificial Sequence: Synthetic oligonucleotide
cuggacgaaugucacacac

SEQ ID NO: 2059928 - RNA, 19 nt, Artificial Sequence
  Description of Artificial Sequence: Synthetic oligonucleotide
gagggcaucucccaugcca

SEQ ID NO: 2059929 - RNA, 19 nt, Artificial Sequence
  Description of Artificial Sequence: Synthetic oligonucleotide
uggacgaaugucacacaca

SEQ ID NO: 2059930 - RNA, 19 nt, Artificial Sequence
  Description of Artificial Sequence: Synthetic oligonucleotide
agcuagaauggacuacugu

SEQ ID NO: 2059931 - RNA, 19 nt, Artificial Sequence
  Description of Artificial Sequence: Synthetic oligonucleotide
gacuuacuaaguuguacaa

SEQ ID NO: 2059932 - RNA, 19 nt, Artificial Sequence
  Description of Artificial Sequence: Synthetic oligonucleotide
ggauguuuccuauucugug

SEQ ID NO: 2059933 - RNA, 19 nt, Artificial Sequence
  Description of Artificial Sequence: Synthetic oligonucleotide
uaaguccuagcaucuagua

SEQ ID NO: 2059934 - RNA, 19 nt, Artificial Sequence
  Description of Artificial Sequence: Synthetic oligonucleotide
cugcguaacgcgccgaagc

SEQ ID NO: 2059935 - RNA, 19 nt, Artificial Sequence
  Description of Artificial Sequence: Synthetic oligonucleotide
augccuugcgacugacucg

SEQ ID NO: 2059936 - RNA, 19 nt, Artificial Sequence
  Description of Artificial Sequence: Synthetic oligonucleotide
ggacuuacuaaguuguaca

SEQ ID NO: 2059937 - RNA, 19 nt, Artificial Sequence
  Description of Artificial Sequence: Synthetic oligonucleotide
gcugcuugcacagacacgc

SEQ ID NO: 2059938 - RNA, 19 nt, Artificial Sequence
  Description of Artificial Sequence: Synthetic oligonucleotide
guuagauuugauacucuca

SEQ ID NO: 2059939 - RNA, 19 nt, Artificial Sequence
  Description of Artificial Sequence: Synthetic oligonucleotide
cuaaauuagcuagaaugga

SEQ ID NO: 2059940 - RNA, 19 nt, Artificial Sequence
  Description of Artificial Sequence: Synthetic oligonucleotide
ugcugcuugcacagacacg

SEQ ID NO: 2059941 - RNA, 19 nt, Artificial Sequence
  Description of Artificial Sequence: Synthetic oligonucleotide
cucucggccgaaagaacgg

SEQ ID NO: 2059942 - RNA, 19 nt, Artificial Sequence
  Description of Artificial Sequence: Synthetic oligonucleotide
cugcucgaaauagugcugg

SEQ ID NO: 2059943 - RNA, 19 nt, Artificial Sequence
  Description of Artificial Sequence: Synthetic oligonucleotide
aacgccccugaccuuuaag

SEQ ID NO: 2059944 - RNA, 19 nt, Artificial Sequence
  Description of Artificial Sequence: Synthetic oligonucleotide
ucgguaguuuucauggauu

SEQ ID NO: 2059945 - RNA, 19 nt, Artificial Sequence
  Description of Artificial Sequence: Synthetic oligonucleotide
uguccuaaauuagcuagaa

SEQ ID NO: 2059946 - RNA, 19 nt, Artificial Sequence
  Description of Artificial Sequence: Synthetic oligonucleotide
uagauuugauacucucaaa

SEQ ID NO: 2059947 - RNA, 19 nt, Artificial Sequence
  Description of Artificial Sequence: Synthetic oligonucleotide
aucugcgccugcguaacgc

SEQ ID NO: 2059948 - RNA, 19 nt, Artificial Sequence
  Description of Artificial Sequence: Synthetic oligonucleotide
uauacuccuuaaagacaca

SEQ ID NO: 2059949 - RNA, 19 nt, Artificial Sequence
  Description of Artificial Sequence: Synthetic oligonucleotide
uucauagauaacgccccug

SEQ ID NO: 2059950 - RNA, 19 nt, Artificial Sequence
  Description of Artificial Sequence: Synthetic oligonucleotide
uccuauccauuuauucggu

SEQ ID NO: 2059951 - RNA, 19 nt, Artificial Sequence
  Description of Artificial Sequence: Synthetic oligonucleotide
caggacuucaucccuguuc

SEQ ID NO: 2059952 - RNA, 19 nt, Artificial Sequence
  Description of Artificial Sequence: Synthetic oligonucleotide
gagguuauccaggacuuca

SEQ ID NO: 2059953 - RNA, 19 nt, Artificial Sequence
  Description of Artificial Sequence: Synthetic oligonucleotide
uuuauucgguaguuuucau

SEQ ID NO: 2059954 - RNA, 19 nt, Artificial Sequence
  Description of Artificial Sequence: Synthetic oligonucleotide
ucggccgaaagaacggccu

SEQ ID NO: 2059955 - RNA, 19 nt, Artificial Sequence
  Description of Artificial Sequence: Synthetic oligonucleotide
uuucuggacgaaugucaca

SEQ ID NO: 2059956 - RNA, 19 nt, Artificial Sequence
  Description of Artificial Sequence: Synthetic oligonucleotide
ugcgacugacucgccaucg

SEQ ID NO: 2059957 - RNA, 19 nt, Artificial Sequence
  Description of Artificial Sequence: Synthetic oligonucleotide
aggaaucuacaacagcaua

SEQ ID NO: 2059958 - RNA, 19 nt, Artificial Sequence
  Description of Artificial Sequence: Synthetic oligonucleotide
uacacuaaagcagccugaa

SEQ ID NO: 2059959 - RNA, 19 nt, Artificial Sequence
  Description of Artificial Sequence: Synthetic oligonucleotide
aacauguaacacauucuua

SEQ ID NO: 2059960 - RNA, 19 nt, Artificial Sequence
  Description of Artificial Sequence: Synthetic oligonucleotide
acgccccugaccuuuaaga

SEQ ID NO: 2059961 - RNA, 19 nt, Artificial Sequence
  Description of Artificial Sequence: Synthetic oligonucleotide
gcuagaauggacuacugua

SEQ ID NO: 2059962 - RNA, 19 nt, Artificial Sequence
  Description of Artificial Sequence: Synthetic oligonucleotide
auagugcuggagaacgguc

SEQ ID NO: 2059963 - RNA, 19 nt, Artificial Sequence
  Description of Artificial Sequence: Synthetic oligonucleotide
uucuguggauguuuccuau

SEQ ID NO: 2059964 - RNA, 19 nt, Artificial Sequence
  Description of Artificial Sequence: Synthetic oligonucleotide
cuguaaggauggcugcugc

SEQ ID NO: 2059965 - RNA, 19 nt, Artificial Sequence
  Description of Artificial Sequence: Synthetic oligonucleotide
uagcuagaauggacuacug

SEQ ID NO: 2059966 - RNA, 19 nt, Artificial Sequence
  Description of Artificial Sequence: Synthetic oligonucleotide
cacguagaagccccuuggg

SEQ ID NO: 2059967 - RNA, 19 nt, Artificial Sequence
  Description of Artificial Sequence: Synthetic oligonucleotide
ugcuacaacugccguggga

SEQ ID NO: 2059968 - RNA, 19 nt, Artificial Sequence
  Description of Artificial Sequence: Synthetic oligonucleotide
ugccgugggaccccagugc

SEQ ID NO: 2059969 - RNA, 19 nt, Artificial Sequence
  Description of Artificial Sequence: Synthetic oligonucleotide
ugacucgccaucgcugcgg

SEQ ID NO: 2059970 - RNA, 19 nt, Artificial Sequence
  Description of Artificial Sequence: Synthetic oligonucleotide
aaucaacggcuuaaacaca

SEQ ID NO: 2059971 - RNA, 19 nt, Artificial Sequence
  Description of Artificial Sequence: Synthetic oligonucleotide
aaguuagauuugauacucu

SEQ ID NO: 2059972 - RNA, 19 nt, Artificial Sequence
  Description of Artificial Sequence: Synthetic oligonucleotide
ccccugaccuuuaagaaag

SEQ ID NO: 2059973 - RNA, 19 nt, Artificial Sequence
  Description of Artificial Sequence: Synthetic oligonucleotide
cugcugcuugcacagacac

SEQ ID NO: 2059974 - RNA, 19 nt, Artificial Sequence
  Description of Artificial Sequence: Synthetic oligonucleotide
ugcgccugcguaacgcgcc

SEQ ID NO: 2059975 - RNA, 19 nt, Artificial Sequence
  Description of Artificial Sequence: Synthetic oligonucleotide
acaacugccgugggacccc

SEQ ID NO: 2059976 - RNA, 19 nt, Artificial Sequence
  Description of Artificial Sequence: Synthetic oligonucleotide
gaguucuguggauguuucc

SEQ ID NO: 2059977 - RNA, 19 nt, Artificial Sequence
  Description of Artificial Sequence: Synthetic oligonucleotide
ucccuguucugcucgaaau

SEQ ID NO: 2059978 - RNA, 19 nt, Artificial Sequence
  Description of Artificial Sequence: Synthetic oligonucleotide
gcaucuaguaauuuaagau

SEQ ID NO: 2059979 - RNA, 19 nt, Artificial Sequence
  Description of Artificial Sequence: Synthetic oligonucleotide
guucugcucgaaauagugc

SEQ ID NO: 2059980 - RNA, 19 nt, Artificial Sequence
  Description of Artificial Sequence: Synthetic oligonucleotide
gcuuaaacacacguagaag

SEQ ID NO: 2059981 - RNA, 19 nt, Artificial Sequence
  Description of Artificial Sequence: Synthetic oligonucleotide
ugcuggaugccuugcgacu

SEQ ID NO: 2059982 - RNA, 19 nt, Artificial Sequence
  Description of Artificial Sequence: Synthetic oligonucleotide
gaacggucaucuucuccug

SEQ ID NO: 2059983 - RNA, 19 nt, Artificial Sequence
  Description of Artificial Sequence: Synthetic oligonucleotide
ggacgaaugucacacacaa

SEQ ID NO: 2059984 - RNA, 19 nt, Artificial Sequence
  Description of Artificial Sequence: Synthetic oligonucleotide
acuuacuaaguuguacaaa

SEQ ID NO: 2059985 - RNA, 19 nt, Artificial Sequence
  Description of Artificial Sequence: Synthetic oligonucleotide
uuagucccuuucuuucuuc

SEQ ID NO: 2059986 - RNA, 19 nt, Artificial Sequence
  Description of Artificial Sequence: Synthetic oligonucleotide
uccuauucugugagggcau

SEQ ID NO: 2059987 - RNA, 19 nt, Artificial Sequence
  Description of Artificial Sequence: Synthetic oligonucleotide
agaggaaacuucagggacu

SEQ ID NO: 2059988 - RNA, 19 nt, Artificial Sequence
  Description of Artificial Sequence: Synthetic oligonucleotide
cccaugccaacccacaggg

SEQ ID NO: 2059989 - RNA, 19 nt, Artificial Sequence
  Description of Artificial Sequence: Synthetic oligonucleotide
uccaccucacugcuacaac

SEQ ID NO: 2059990 - RNA, 19 nt, Artificial Sequence
  Description of Artificial Sequence: Synthetic oligonucleotide
cuacaacugccgugggacc

SEQ ID NO: 2059991 - RNA, 19 nt, Artificial Sequence
  Description of Artificial Sequence: Synthetic oligonucleotide
auucgguaguuuucaugga

SEQ ID NO: 2059992 - RNA, 19 nt, Artificial Sequence
  Description of Artificial Sequence: Synthetic oligonucleotide
uacuguaaggauggcugcu

SEQ ID NO: 2059993 - RNA, 19 nt, Artificial Sequence
  Description of Artificial Sequence: Synthetic oligonucleotide
aagaacggccuaaaaucaa

SEQ ID NO: 2059994 - RNA, 19 nt, Artificial Sequence
  Description of Artificial Sequence: Synthetic oligonucleotide
cucggccgaaagaacggcc

SEQ ID NO: 2059995 - RNA, 19 nt, Artificial Sequence
  Description of Artificial Sequence: Synthetic oligonucleotide
ugcugcuucguaagaguua

SEQ ID NO: 2059996 - RNA, 19 nt, Artificial Sequence
  Description of Artificial Sequence: Synthetic oligonucleotide
ucuggacgaaugucacaca

SEQ ID NO: 2059997 - RNA, 19 nt, Artificial Sequence
  Description of Artificial Sequence: Synthetic oligonucleotide
cacugcuacaacugccgug

SEQ ID NO: 2059998 - RNA, 19 nt, Artificial Sequence
  Description of Artificial Sequence: Synthetic oligonucleotide
ucggccgcccgcuucucgg

SEQ ID NO: 2059999 - RNA, 19 nt, Artificial Sequence
  Description of Artificial Sequence: Synthetic oligonucleotide
agugccgcagcugccuugg

SEQ ID NO: 2060000 - RNA, 19 nt, Artificial Sequence
  Description of Artificial Sequence: Synthetic oligonucleotide
gacucgccaucgcugcggg

SEQ ID NO: 2060001 - RNA, 19 nt, Artificial Sequence
  Description of Artificial Sequence: Synthetic oligonucleotide
aacggcuuaaacacacgua

SEQ ID NO: 2060002 - RNA, 19 nt, Artificial Sequence
  Description of Artificial Sequence: Synthetic oligonucleotide
aggcgguacuguucaaucu

SEQ ID NO: 2060003 - RNA, 19 nt, Artificial Sequence
  Description of Artificial Sequence: Synthetic oligonucleotide
ggaacauauacuccuuaaa

SEQ ID NO: 2060004 - RNA, 19 nt, Artificial Sequence
  Description of Artificial Sequence: Synthetic oligonucleotide
agugcuggagaacggucau

SEQ ID NO: 2060005 - RNA, 19 nt, Artificial Sequence
  Description of Artificial Sequence: Synthetic oligonucleotide
cugggucuccuucuccacc

SEQ ID NO: 2060006 - RNA, 19 nt, Artificial Sequence
  Description of Artificial Sequence: Synthetic oligonucleotide
gaaacaauuuagucccuuu

SEQ ID NO: 2060007 - RNA, 19 nt, Artificial Sequence
  Description of Artificial Sequence: Synthetic oligonucleotide
auacacuaaagcagccuga

SEQ ID NO: 2060008 - RNA, 19 nt, Artificial Sequence
  Description of Artificial Sequence: Synthetic oligonucleotide
gauuacaagcacaccaaau

SEQ ID NO: 2060009 - RNA, 19 nt, Artificial Sequence
  Description of Artificial Sequence: Synthetic oligonucleotide
gaguuacaaaugcuauuua

SEQ ID NO: 2060010 - RNA, 19 nt, Artificial Sequence
  Description of Artificial Sequence: Synthetic oligonucleotide
cacacacaaaggccaggag

SEQ ID NO: 2060011 - RNA, 19 nt, Artificial Sequence
  Description of Artificial Sequence: Synthetic oligonucleotide
uccauuuauucgguaguuu

SEQ ID NO: 2060012 - RNA, 19 nt, Artificial Sequence
  Description of Artificial Sequence: Synthetic oligonucleotide
uccgguucuuccgcuugcg

SEQ ID NO: 2060013 - RNA, 19 nt, Artificial Sequence
  Description of Artificial Sequence: Synthetic oligonucleotide
cuguccuaaauuagcuaga

SEQ ID NO: 2060014 - RNA, 19 nt, Artificial Sequence
  Description of Artificial Sequence: Synthetic oligonucleotide
ugaugccugcugcuugcac

SEQ ID NO: 2060015 - RNA, 19 nt, Artificial Sequence
  Description of Artificial Sequence: Synthetic oligonucleotide
ugcucgaaauagugcugga

SEQ ID NO: 2060016 - RNA, 19 nt, Artificial Sequence
  Description of Artificial Sequence: Synthetic oligonucleotide
agacacgcagggaacauau

SEQ ID NO: 2060017 - RNA, 19 nt, Artificial Sequence
  Description of Artificial Sequence: Synthetic oligonucleotide
cagggacuuacuaaguugu

SEQ ID NO: 2060018 - RNA, 19 nt, Artificial Sequence
  Description of Artificial Sequence: Synthetic oligonucleotide
agggaacauauacuccuua

SEQ ID NO: 2060019 - RNA, 19 nt, Artificial Sequence
  Description of Artificial Sequence: Synthetic oligonucleotide
ucucggccgaaagaacggc

SEQ ID NO: 2060020 - RNA, 19 nt, Artificial Sequence
  Description of Artificial Sequence: Synthetic oligonucleotide
gcugcuucguaagaguuac

SEQ ID NO: 2060021 - RNA, 19 nt, Artificial Sequence
  Description of Artificial Sequence: Synthetic oligonucleotide
ucgaguucuguggauguuu

SEQ ID NO: 2060022 - RNA, 19 nt, Artificial Sequence
  Description of Artificial Sequence: Synthetic oligonucleotide
ccuguucugcucgaaauag

SEQ ID NO: 2060023 - RNA, 19 nt, Artificial Sequence
  Description of Artificial Sequence: Synthetic oligonucleotide
cuuccagaacagaacucga

SEQ ID NO: 2060024 - RNA, 19 nt, Artificial Sequence
  Description of Artificial Sequence: Synthetic oligonucleotide
cagugaugccugcugcuug

SEQ ID NO: 2060025 - RNA, 19 nt, Artificial Sequence
  Description of Artificial Sequence: Synthetic oligonucleotide
ggcaagacaaaguuuuacu

SEQ ID NO: 2060026 - RNA, 19 nt, Artificial Sequence
  Description of Artificial Sequence: Synthetic oligonucleotide
cucccaugccaacccacag

SEQ ID NO: 2060027 - RNA, 19 nt, Artificial Sequence
  Description of Artificial Sequence: Synthetic oligonucleotide
acgaucugcgccugcguaa

SEQ ID NO: 2060028 - RNA, 19 nt, Artificial Sequence
  Description of Artificial Sequence: Synthetic oligonucleotide
gggacuuacuaaguuguac

SEQ ID NO: 2060029 - RNA, 19 nt, Artificial Sequence
  Description of Artificial Sequence: Synthetic oligonucleotide
gcagggaacauauacuccu

SEQ ID NO: 2060030 - RNA, 19 nt, Artificial Sequence
  Description of Artificial Sequence: Synthetic oligonucleotide
acacuaaagcagccugaaa

SEQ ID NO: 2060031 - RNA, 19 nt, Artificial Sequence
  Description of Artificial Sequence: Synthetic oligonucleotide
gaaacuucagggacuuacu

SEQ ID NO: 2060032 - RNA, 19 nt, Artificial Sequence
  Description of Artificial Sequence: Synthetic oligonucleotide
acaaaggccaggagguuau

SEQ ID NO: 2060033 - RNA, 19 nt, Artificial Sequence
  Description of Artificial Sequence: Synthetic oligonucleotide
aucgcugcggggacucucg

SEQ ID NO: 2060034 - RNA, 19 nt, Artificial Sequence
  Description of Artificial Sequence: Synthetic oligonucleotide
gggaacauauacuccuuaa

SEQ ID NO: 2060035 - RNA, 19 nt, Artificial Sequence
  Description of Artificial Sequence: Synthetic oligonucleotide
uugcgacugacucgccauc

SEQ ID NO: 2060036 - RNA, 19 nt, Artificial Sequence
  Description of Artificial Sequence: Synthetic oligonucleotide
uccgcuugcgggccucgga

SEQ ID NO: 2060037 - RNA, 19 nt, Artificial Sequence
  Description of Artificial Sequence: Synthetic oligonucleotide
caauuuagucccuuucuuu

SEQ ID NO: 2060038 - RNA, 19 nt, Artificial Sequence
  Description of Artificial Sequence: Synthetic oligonucleotide
caacagcauagagaaauaa

SEQ ID NO: 2060039 - RNA, 19 nt, Artificial Sequence
  Description of Artificial Sequence: Synthetic oligonucleotide
cugacucgccaucgcugcg

SEQ ID NO: 2060040 - RNA, 19 nt, Artificial Sequence
  Description of Artificial Sequence: Synthetic oligonucleotide
aacacacguagaagccccu

SEQ ID NO: 2060041 - RNA, 19 nt, Artificial Sequence
  Description of Artificial Sequence: Synthetic oligonucleotide
ugcggggacucucggccga

SEQ ID NO: 2060042 - RNA, 19 nt, Artificial Sequence
  Description of Artificial Sequence: Synthetic oligonucleotide
gacuacuguaaggauggcu

SEQ ID NO: 2060043 - RNA, 19 nt, Artificial Sequence
  Description of Artificial Sequence: Synthetic oligonucleotide
cucgcggcccacgaucugc

SEQ ID NO: 2060044 - RNA, 19 nt, Artificial Sequence
  Description of Artificial Sequence: Synthetic oligonucleotide
gcucgaaauagugcuggag

SEQ ID NO: 2060045 - RNA, 19 nt, Artificial Sequence
  Description of Artificial Sequence: Synthetic oligonucleotide
ggucagcugacucgcggcc

SEQ ID NO: 2060046 - RNA, 19 nt, Artificial Sequence
  Description of Artificial Sequence: Synthetic oligonucleotide
uagaagccccuugggucag

SEQ ID NO: 2060047 - RNA, 19 nt, Artificial Sequence
  Description of Artificial Sequence: Synthetic oligonucleotide
cuccgguucuuccgcuugc

SEQ ID NO: 2060048 - RNA, 19 nt, Artificial Sequence
  Description of Artificial Sequence: Synthetic oligonucleotide
gauaacgccccugaccuuu

SEQ ID NO: 2060049 - RNA, 19 nt, Artificial Sequence
  Description of Artificial Sequence: Synthetic oligonucleotide
cacgcagggaacauauacu

SEQ ID NO: 2060050 - RNA, 19 nt, Artificial Sequence
  Description of Artificial Sequence: Synthetic oligonucleotide
gacucucggccgaaagaac

SEQ ID NO: 2060051 - RNA, 19 nt, Artificial Sequence
  Description of Artificial Sequence: Synthetic oligonucleotide
gggcaagacaaaguuuuac

SEQ ID NO: 2060052 - RNA, 19 nt, Artificial Sequence
  Description of Artificial Sequence: Synthetic oligonucleotide
ccuaaaaucaacggcuuaa

SEQ ID NO: 2060053 - RNA, 19 nt, Artificial Sequence
  Description of Artificial Sequence: Synthetic oligonucleotide
gcaagacaaaguuuuacuu

SEQ ID NO: 2060054 - RNA, 19 nt, Artificial Sequence
  Description of Artificial Sequence: Synthetic oligonucleotide
caacggcuuaaacacacgu

SEQ ID NO: 2060055 - RNA, 19 nt, Artificial Sequence
  Description of Artificial Sequence: Synthetic oligonucleotide
acaacagcauagagaaaua

SEQ ID NO: 2060056 - RNA, 19 nt, Artificial Sequence
  Description of Artificial Sequence: Synthetic oligonucleotide
cacuguccuaaauuagcua

SEQ ID NO: 2060057 - RNA, 19 nt, Artificial Sequence
  Description of Artificial Sequence: Synthetic oligonucleotide
ccuagcaucuaguaauuua

SEQ ID NO: 2060058 - RNA, 19 nt, Artificial Sequence
  Description of Artificial Sequence: Synthetic oligonucleotide
ggcaucucccaugccaacc

SEQ ID NO: 2060059 - RNA, 19 nt, Artificial Sequence
  Description of Artificial Sequence: Synthetic oligonucleotide
uugcacagacacgcaggga

SEQ ID NO: 2060060 - RNA, 19 nt, Artificial Sequence
  Description of Artificial Sequence: Synthetic oligonucleotide
gguaguuuucauggauuuc

SEQ ID NO: 2060061 - RNA, 19 nt, Artificial Sequence
  Description of Artificial Sequence: Synthetic oligonucleotide
ggcugcugcuucguaagag

SEQ ID NO: 2060062 - RNA, 19 nt, Artificial Sequence
  Description of Artificial Sequence: Synthetic oligonucleotide
cuugcuucagccuccgguu

SEQ ID NO: 2060063 - RNA, 19 nt, Artificial Sequence
  Description of Artificial Sequence: Synthetic oligonucleotide
gucagcugacucgcggccc

SEQ ID NO: 2060064 - RNA, 19 nt, Artificial Sequence
  Description of Artificial Sequence: Synthetic oligonucleotide
agacaaaguuuuacuuuua

SEQ ID NO: 2060065 - RNA, 19 nt, Artificial Sequence
  Description of Artificial Sequence: Synthetic oligonucleotide
ggccucggacaccuucucg

SEQ ID NO: 2060066 - RNA, 19 nt, Artificial Sequence
  Description of Artificial Sequence: Synthetic oligonucleotide
uccuagcaucuaguaauuu

SEQ ID NO: 2060067 - RNA, 19 nt, Artificial Sequence
  Description of Artificial Sequence: Synthetic oligonucleotide
ggacucucggccgaaagaa

SEQ ID NO: 2060068 - RNA, 19 nt, Artificial Sequence
  Description of Artificial Sequence: Synthetic oligonucleotide
acagacacgcagggaacau

SEQ ID NO: 2060069 - RNA, 19 nt, Artificial Sequence
  Description of Artificial Sequence: Synthetic oligonucleotide
cugcuacaacugccguggg

SEQ ID NO: 2060070 - RNA, 19 nt, Artificial Sequence
  Description of Artificial Sequence: Synthetic oligonucleotide
agggcaucucccaugccaa

SEQ ID NO: 2060071 - RNA, 19 nt, Artificial Sequence
  Description of Artificial Sequence: Synthetic oligonucleotide
cuugcgacugacucgccau

SEQ ID NO: 2060072 - RNA, 19 nt, Artificial Sequence
  Description of Artificial Sequence: Synthetic oligonucleotide
cuucagggacuuacuaagu

SEQ ID NO: 2060073 - RNA, 19 nt, Artificial Sequence
  Description of Artificial Sequence: Synthetic oligonucleotide
cacagacacgcagggaaca

SEQ ID NO: 2060074 - RNA, 19 nt, Artificial Sequence
  Description of Artificial Sequence: Synthetic oligonucleotide
agguuauccaggacuucau

SEQ ID NO: 2060075 - RNA, 19 nt, Artificial Sequence
  Description of Artificial Sequence: Synthetic oligonucleotide
caaaugcuauuuacuacuu

SEQ ID NO: 2060076 - RNA, 19 nt, Artificial Sequence
  Description of Artificial Sequence: Synthetic oligonucleotide
gggacucucggccgaaaga

SEQ ID NO: 2060077 - RNA, 19 nt, Artificial Sequence
  Description of Artificial Sequence: Synthetic oligonucleotide
uucuuccgcuugcgggccu

SEQ ID NO: 2060078 - RNA, 19 nt, Artificial Sequence
  Description of Artificial Sequence: Synthetic oligonucleotide
uaacgccccugaccuuuaa

SEQ ID NO: 2060079 - RNA, 19 nt, Artificial Sequence
  Description of Artificial Sequence: Synthetic oligonucleotide
agcugacucgcggcccacg

SEQ ID NO: 2060080 - RNA, 19 nt, Artificial Sequence
  Description of Artificial Sequence: Synthetic oligonucleotide
agauaacgccccugaccuu

SEQ ID NO: 2060081 - RNA, 19 nt, Artificial Sequence
  Description of Artificial Sequence: Synthetic oligonucleotide
gaggaaacuucagggacuu

SEQ ID NO: 2060082 - RNA, 19 nt, Artificial Sequence
  Description of Artificial Sequence: Synthetic oligonucleotide
gacgaaugucacacacaaa

SEQ ID NO: 2060083 - RNA, 19 nt, Artificial Sequence
  Description of Artificial Sequence: Synthetic oligonucleotide
uuccgcuugcgggccucgg

SEQ ID NO: 2060084 - RNA, 19 nt, Artificial Sequence
  Description of Artificial Sequence: Synthetic oligonucleotide
cagugccgcagcugccuug

SEQ ID NO: 2060085 - RNA, 19 nt, Artificial Sequence
  Description of Artificial Sequence: Synthetic oligonucleotide
cgaaauagugcuggagaac

SEQ ID NO: 2060086 - RNA, 19 nt, Artificial Sequence
  Description of Artificial Sequence: Synthetic oligonucleotide
cuugcgggccucggacacc

SEQ ID NO: 2060087 - RNA, 19 nt, Artificial Sequence
  Description of Artificial Sequence: Synthetic oligonucleotide
gaacucgaguucuguggau

SEQ ID NO: 2060088 - RNA, 19 nt, Artificial Sequence
  Description of Artificial Sequence: Synthetic oligonucleotide
guccuaaauuagcuagaau

SEQ ID NO: 2060089 - RNA, 19 nt, Artificial Sequence
  Description of Artificial Sequence: Synthetic oligonucleotide
ccauuuauucgguaguuuu

SEQ ID NO: 2060090 - RNA, 19 nt, Artificial Sequence
  Description of Artificial Sequence: Synthetic oligonucleotide
cacgaucugcgccugcgua

SEQ ID NO: 2060091 - RNA, 19 nt, Artificial Sequence
  Description of Artificial Sequence: Synthetic oligonucleotide
gcggcccacgaucugcgcc

SEQ ID NO: 2060092 - RNA, 19 nt, Artificial Sequence
  Description of Artificial Sequence: Synthetic oligonucleotide
acucgcggcccacgaucug

SEQ ID NO: 2060093 - RNA, 19 nt, Artificial Sequence
  Description of Artificial Sequence: Synthetic oligonucleotide
gcgacugacucgccaucgc

SEQ ID NO: 2060094 - RNA, 19 nt, Artificial Sequence
  Description of Artificial Sequence: Synthetic oligonucleotide
ggagaacggucaucuucuc

SEQ ID NO: 2060095 - RNA, 19 nt, Artificial Sequence
  Description of Artificial Sequence: Synthetic oligonucleotide
cccacgaucugcgccugcg

SEQ ID NO: 2060096 - RNA, 19 nt, Artificial Sequence
  Description of Artificial Sequence: Synthetic oligonucleotide
cggccuaaaaucaacggcu

SEQ ID NO: 2060097 - RNA, 19 nt, Artificial Sequence
  Description of Artificial Sequence: Synthetic oligonucleotide
gccuaaaaucaacggcuua

SEQ ID NO: 2060098 - RNA, 19 nt, Artificial Sequence
  Description of Artificial Sequence: Synthetic oligonucleotide
ccgguucuuccgcuugcgg

SEQ ID NO: 2060099 - RNA, 19 nt, Artificial Sequence
  Description of Artificial Sequence: Synthetic oligonucleotide
cacauccuauccauuuauu

SEQ ID NO: 2060100 - RNA, 19 nt, Artificial Sequence
  Description of Artificial Sequence: Synthetic oligonucleotide
cgguacuguucaaucucag

SEQ ID NO: 2060101 - RNA, 19 nt, Artificial Sequence
  Description of Artificial Sequence: Synthetic oligonucleotide
ccagaacagaacucgaguu

SEQ ID NO: 2060102 - RNA, 19 nt, Artificial Sequence
  Description of Artificial Sequence: Synthetic oligonucleotide
gacucgcggcccacgaucu

SEQ ID NO: 2060103 - RNA, 19 nt, Artificial Sequence
  Description of Artificial Sequence: Synthetic oligonucleotide
gcugacucgcggcccacga

SEQ ID NO: 2060104 - RNA, 19 nt, Artificial Sequence
  Description of Artificial Sequence: Synthetic oligonucleotide
caaaggccaggagguuauc

SEQ ID NO: 2060105 - RNA, 19 nt, Artificial Sequence
  Description of Artificial Sequence: Synthetic oligonucleotide
ccuccgguucuuccgcuug

SEQ ID NO: 2060106 - RNA, 19 nt, Artificial Sequence
  Description of Artificial Sequence: Synthetic oligonucleotide
aacugccgugggaccccag

SEQ ID NO: 2060107 - RNA, 19 nt, Artificial Sequence
  Description of Artificial Sequence: Synthetic oligonucleotide
cgugggaccccagugccgc

SEQ ID NO: 2060108 - RNA, 19 nt, Artificial Sequence
  Description of Artificial Sequence: Synthetic oligonucleotide
ggagguuauccaggacuuc

SEQ ID NO: 2060109 - RNA, 19 nt, Artificial Sequence
  Description of Artificial Sequence: Synthetic oligonucleotide
gacacgcagggaacauaua

SEQ ID NO: 2060110 - RNA, 19 nt, Artificial Sequence
  Description of Artificial Sequence: Synthetic oligonucleotide
ccgcuugcgggccucggac

SEQ ID NO: 2060111 - RNA, 19 nt, Artificial Sequence
  Description of Artificial Sequence: Synthetic oligonucleotide
ggacuacuguaaggauggc

SEQ ID NO: 2060112 - RNA, 19 nt, Artificial Sequence
  Description of Artificial Sequence: Synthetic oligonucleotide
ccaccucacugcuacaacu

SEQ ID NO: 2060113 - RNA, 19 nt, Artificial Sequence
  Description of Artificial Sequence: Synthetic oligonucleotide
ccuugcgacugacucgcca

SEQ ID NO: 2060114 - RNA, 19 nt, Artificial Sequence
  Description of Artificial Sequence: Synthetic oligonucleotide
ccuauucugugagggcauc

SEQ ID NO: 2060115 - RNA, 19 nt, Artificial Sequence
  Description of Artificial Sequence: Synthetic oligonucleotide
auaacgccccugaccuuua

SEQ ID NO: 2060116 - RNA, 19 nt, Artificial Sequence
  Description of Artificial Sequence: Synthetic oligonucleotide
ccuauccauuuauucggua

SEQ ID NO: 2060117 - RNA, 19 nt, Artificial Sequence
  Description of Artificial Sequence: Synthetic oligonucleotide
ccugcguaacgcgccgaag

SEQ ID NO: 2060118 - RNA, 19 nt, Artificial Sequence
  Description of Artificial Sequence: Synthetic oligonucleotide
cuuccacauccuauccauu

SEQ ID NO: 2060119 - RNA, 19 nt, Artificial Sequence
  Description of Artificial Sequence: Synthetic oligonucleotide
gcgggccucggacaccuuc

SEQ ID NO: 2060120 - RNA, 19 nt, Artificial Sequence
  Description of Artificial Sequence: Synthetic oligonucleotide
cgcuucucggccugcagca

SEQ ID NO: 2060121 - RNA, 19 nt, Artificial Sequence
  Description of Artificial Sequence: Synthetic oligonucleotide
guccuagcaucuaguaauu

SEQ ID NO: 2060122 - RNA, 19 nt, Artificial Sequence
  Description of Artificial Sequence: Synthetic oligonucleotide
gccgaaagaacggccuaaa

SEQ ID NO: 2060123 - RNA, 19 nt, Artificial Sequence
  Description of Artificial Sequence: Synthetic oligonucleotide
aggaaacuucagggacuua

SEQ ID NO: 2060124 - RNA, 19 nt, Artificial Sequence
  Description of Artificial Sequence: Synthetic oligonucleotide
ccugaccuuuaagaaagua

SEQ ID NO: 2060125 - RNA, 19 nt, Artificial Sequence
  Description of Artificial Sequence: Synthetic oligonucleotide
cgaucugcgccugcguaac

SEQ ID NO: 2060126 - RNA, 19 nt, Artificial Sequence
  Description of Artificial Sequence: Synthetic oligonucleotide
ccgaaagaacggccuaaaa

SEQ ID NO: 2060127 - RNA, 19 nt, Artificial Sequence
  Description of Artificial Sequence: Synthetic oligonucleotide
cccuguucugcucgaaaua

SEQ ID NO: 2060128 - RNA, 19 nt, Artificial Sequence
  Description of Artificial Sequence: Synthetic oligonucleotide
gugggaccccagugccgca

SEQ ID NO: 2060129 - RNA, 19 nt, Artificial Sequence
  Description of Artificial Sequence: Synthetic oligonucleotide
caucccuguucugcucgaa

SEQ ID NO: 2060130 - RNA, 19 nt, Artificial Sequence
  Description of Artificial Sequence: Synthetic oligonucleotide
cagcugacucgcggcccac

SEQ ID NO: 2060131 - RNA, 19 nt, Artificial Sequence
  Description of Artificial Sequence: Synthetic oligonucleotide
gccugcguaacgcgccgaa

SEQ ID NO: 2060132 - RNA, 19 nt, Artificial Sequence
  Description of Artificial Sequence: Synthetic oligonucleotide
ggccuaaaaucaacggcuu

SEQ ID NO: 2060133 - RNA, 19 nt, Artificial Sequence
  Description of Artificial Sequence: Synthetic oligonucleotide
cgccccugaccuuuaagaa

SEQ ID NO: 2060134 - RNA, 19 nt, Artificial Sequence
  Description of Artificial Sequence: Synthetic oligonucleotide
gccccuugggucagcugac

SEQ ID NO: 2060135 - RNA, 19 nt, Artificial Sequence
  Description of Artificial Sequence: Synthetic oligonucleotide
caacugccgugggacccca

SEQ ID NO: 2060136 - RNA, 19 nt, Artificial Sequence
  Description of Artificial Sequence: Synthetic oligonucleotide
cugacucgcggcccacgau

SEQ ID NO: 2060137 - RNA, 19 nt, Artificial Sequence
  Description of Artificial Sequence: Synthetic oligonucleotide
gcaggcgguacuguucaau

SEQ ID NO: 2060138 - RNA, 19 nt, Artificial Sequence
  Description of Artificial Sequence: Synthetic oligonucleotide
cucgaguucuguggauguu

SEQ ID NO: 2060139 - RNA, 19 nt, Artificial Sequence
  Description of Artificial Sequence: Synthetic oligonucleotide
ggcccacgaucugcgccug

SEQ ID NO: 2060140 - RNA, 19 nt, Artificial Sequence
  Description of Artificial Sequence: Synthetic oligonucleotide
ggaccccagugccgcagcu

SEQ ID NO: 2060141 - RNA, 19 nt, Artificial Sequence
  Description of Artificial Sequence: Synthetic oligonucleotide
gccuugcgacugacucgcc

SEQ ID NO: 2060142 - RNA, 19 nt, Artificial Sequence
  Description of Artificial Sequence: Synthetic oligonucleotide
cggccgcccgcuucucggc

SEQ ID NO: 2060143 - RNA, 19 nt, Artificial Sequence
  Description of Artificial Sequence: Synthetic oligonucleotide
cgcggcccacgaucugcgc

SEQ ID NO: 2060144 - RNA, 19 nt, Artificial Sequence
  Description of Artificial Sequence: Synthetic oligonucleotide
ccacgaucugcgccugcgu

SEQ ID NO: 2060145 - RNA, 19 nt, Artificial Sequence
  Description of Artificial Sequence: Synthetic oligonucleotide
cggccgaaagaacggccua

SEQ ID NO: 2060146 - RNA, 19 nt, Artificial Sequence
  Description of Artificial Sequence: Synthetic oligonucleotide
gcggggacucucggccgaa

SEQ ID NO: 2060147 - RNA, 19 nt, Artificial Sequence
  Description of Artificial Sequence: Synthetic oligonucleotide
ccagugccgcagcugccuu

SEQ ID NO: 2060148 - RNA, 19 nt, Artificial Sequence
  Description of Artificial Sequence: Synthetic oligonucleotide
cgccugcguaacgcgccga

SEQ ID NO: 2060149 - RNA, 19 nt, Artificial Sequence
  Description of Artificial Sequence: Synthetic oligonucleotide
cggggacucucggccgaaa

SEQ ID NO: 2060150 - RNA, 19 nt, Artificial Sequence
  Description of Artificial Sequence: Synthetic oligonucleotide
cgccaucgcugcggggacu

SEQ ID NO: 2060151 - RNA, 19 nt, Artificial Sequence
  Description of Artificial Sequence: Synthetic oligonucleotide
auacaaauaauacagaacc

SEQ ID NO: 2060152 - RNA, 19 nt, Artificial Sequence
  Description of Artificial Sequence: Synthetic oligonucleotide
aauaaaaguuguuucacac

SEQ ID NO: 2060153 - RNA, 19 nt, Artificial Sequence
  Description of Artificial Sequence: Synthetic oligonucleotide
aauaauacagaaccaacuc

SEQ ID NO: 2060154 - RNA, 19 nt, Artificial Sequence
  Description of Artificial Sequence: Synthetic oligonucleotide
auuaauguccuuuuggugg

SEQ ID NO: 2060155 - RNA, 19 nt, Artificial Sequence
  Description of Artificial Sequence: Synthetic oligonucleotide
uacauaauggcuuuuaaag

SEQ ID NO: 2060156 - RNA, 19 nt, Artificial Sequence
  Description of Artificial Sequence: Synthetic oligonucleotide
uuaaaaugcuuucuggacg

SEQ ID NO: 2060157 - RNA, 19 nt, Artificial Sequence
  Description of Artificial Sequence: Synthetic oligonucleotide
aaaguuguuucacacaaag

SEQ ID NO: 2060158 - RNA, 19 nt, Artificial Sequence
  Description of Artificial Sequence: Synthetic oligonucleotide
auaauacagaaccaacucc

SEQ ID NO: 2060159 - RNA, 19 nt, Artificial Sequence
  Description of Artificial Sequence: Synthetic oligonucleotide
aauacuacugguccaacag

SEQ ID NO: 2060160 - RNA, 19 nt, Artificial Sequence
  Description of Artificial Sequence: Synthetic oligonucleotide
uaaaacuacacacaagucu

SEQ ID NO: 2060161 - RNA, 19 nt, Artificial Sequence
  Description of Artificial Sequence: Synthetic oligonucleotide
ugaguuguuauauauaaga

SEQ ID NO: 2060162 - RNA, 19 nt, Artificial Sequence
  Description of Artificial Sequence: Synthetic oligonucleotide
uuaaguaguaaucuaauau

SEQ ID NO: 2060163 - RNA, 19 nt, Artificial Sequence
  Description of Artificial Sequence: Synthetic oligonucleotide
guuuauacaguuucaaagg

SEQ ID NO: 2060164 - RNA, 19 nt, Artificial Sequence
  Description of Artificial Sequence: Synthetic oligonucleotide
guaguaaucuaauauacag

SEQ ID NO: 2060165 - RNA, 19 nt, Artificial Sequence
  Description of Artificial Sequence: Synthetic oligonucleotide
aaugaguuguuauauauaa

SEQ ID NO: 2060166 - RNA, 19 nt, Artificial Sequence
  Description of Artificial Sequence: Synthetic oligonucleotide
acuaauuuaaacaauaaca

SEQ ID NO: 2060167 - RNA, 19 nt, Artificial Sequence
  Description of Artificial Sequence: Synthetic oligonucleotide
acaauaacaaaguaacguc

SEQ ID NO: 2060168 - RNA, 19 nt, Artificial Sequence
  Description of Artificial Sequence: Synthetic oligonucleotide
ucguauuuaauacaaauaa

SEQ ID NO: 2060169 - RNA, 19 nt, Artificial Sequence
  Description of Artificial Sequence: Synthetic oligonucleotide
aacaauaacaaaguaacgu

SEQ ID NO: 2060170 - RNA, 19 nt, Artificial Sequence
  Description of Artificial Sequence: Synthetic oligonucleotide
ugacauuaaaacuacacac

SEQ ID NO: 2060171 - RNA, 19 nt, Artificial Sequence
  Description of Artificial Sequence: Synthetic oligonucleotide
acauaauggcuuuuaaagc

SEQ ID NO: 2060172 - RNA, 19 nt, Artificial Sequence
  Description of Artificial Sequence: Synthetic oligonucleotide
uuauaggugacauuaaaac

SEQ ID NO: 2060173 - RNA, 19 nt, Artificial Sequence
  Description of Artificial Sequence: Synthetic oligonucleotide
ucuuguuuuacauaauggc

SEQ ID NO: 2060174 - RNA, 19 nt, Artificial Sequence
  Description of Artificial Sequence: Synthetic oligonucleotide
uuguuaaugcuacugaccc

SEQ ID NO: 2060175 - RNA, 19 nt, Artificial Sequence
  Description of Artificial Sequence: Synthetic oligonucleotide
auaaaaguuuugcacacgg

SEQ ID NO: 2060176 - RNA, 19 nt, Artificial Sequence
  Description of Artificial Sequence: Synthetic oligonucleotide
aagugauugguucgcaagc

SEQ ID NO: 2060177 - RNA, 19 nt, Artificial Sequence
  Description of Artificial Sequence: Synthetic oligonucleotide
gaugcuuaugcuaaggacg

SEQ ID NO: 2060178 - RNA, 19 nt, Artificial Sequence
  Description of Artificial Sequence: Synthetic oligonucleotide
aacaagcaaccucuaaagc

SEQ ID NO: 2060179 - RNA, 19 nt, Artificial Sequence
  Description of Artificial Sequence: Synthetic oligonucleotide
uaucuauguaacaucacag

SEQ ID NO: 2060180 - RNA, 19 nt, Artificial Sequence
  Description of Artificial Sequence: Synthetic oligonucleotide
ucugcuaccaaacacauuu

SEQ ID NO: 2060181 - RNA, 19 nt, Artificial Sequence
  Description of Artificial Sequence: Synthetic oligonucleotide
aauaacaaaguaacgucac

SEQ ID NO: 2060182 - RNA, 19 nt, Artificial Sequence
  Description of Artificial Sequence: Synthetic oligonucleotide
caauaaauacuacuggucc

SEQ ID NO: 2060183 - RNA, 19 nt, Artificial Sequence
  Description of Artificial Sequence: Synthetic oligonucleotide
uauaagaugcuuaugcuaa

SEQ ID NO: 2060184 - RNA, 19 nt, Artificial Sequence
  Description of Artificial Sequence: Synthetic oligonucleotide
aguuguuucacacaaagaa

SEQ ID NO: 2060185 - RNA, 19 nt, Artificial Sequence
  Description of Artificial Sequence: Synthetic oligonucleotide
uaaaaguuguuucacacaa

SEQ ID NO: 2060186 - RNA, 19 nt, Artificial Sequence
  Description of Artificial Sequence: Synthetic oligonucleotide
aucuauguaacaucacagc

SEQ ID NO: 2060187 - RNA, 19 nt, Artificial Sequence
  Description of Artificial Sequence: Synthetic oligonucleotide
ucuauguaacaucacagca

SEQ ID NO: 2060188 - RNA, 19 nt, Artificial Sequence
  Description of Artificial Sequence: Synthetic oligonucleotide
agaauuuuggcacauaaaa

SEQ ID NO: 2060189 - RNA, 19 nt, Artificial Sequence
  Description of Artificial Sequence: Synthetic oligonucleotide
aaagugauugguucgcaag

SEQ ID NO: 2060190 - RNA, 19 nt, Artificial Sequence
  Description of Artificial Sequence: Synthetic oligonucleotide
uauuuaaguaguaaucuaa

SEQ ID NO: 2060191 - RNA, 19 nt, Artificial Sequence
  Description of Artificial Sequence: Synthetic oligonucleotide
uuaauguaacuauuaaugu

SEQ ID NO: 2060192 - RNA, 19 nt, Artificial Sequence
  Description of Artificial Sequence: Synthetic oligonucleotide
uaauacagaaccaacuccu

SEQ ID NO: 2060193 - RNA, 19 nt, Artificial Sequence
  Description of Artificial Sequence: Synthetic oligonucleotide
aguuguuauauauaagaug

SEQ ID NO: 2060194 - RNA, 19 nt, Artificial Sequence
  Description of Artificial Sequence: Synthetic oligonucleotide
aauaaauacuacuggucca

SEQ ID NO: 2060195 - RNA, 19 nt, Artificial Sequence
  Description of Artificial Sequence: Synthetic oligonucleotide
aacagcguugauuccauuc

SEQ ID NO: 2060196 - RNA, 19 nt, Artificial Sequence
  Description of Artificial Sequence: Synthetic oligonucleotide
ucuguacuaauuuaaacaa

SEQ ID NO: 2060197 - RNA, 19 nt, Artificial Sequence
  Description of Artificial Sequence: Synthetic oligonucleotide
uuuaaaaugcuuucuggac

SEQ ID NO: 2060198 - RNA, 19 nt, Artificial Sequence
  Description of Artificial Sequence: Synthetic oligonucleotide
uuuguuauaggugacauua

SEQ ID NO: 2060199 - RNA, 19 nt, Artificial Sequence
  Description of Artificial Sequence: Synthetic oligonucleotide
uacuacugguccaacagcg

SEQ ID NO: 2060200 - RNA, 19 nt, Artificial Sequence
  Description of Artificial Sequence: Synthetic oligonucleotide
ucuauuuaaguaguaaucu

SEQ ID NO: 2060201 - RNA, 19 nt, Artificial Sequence
  Description of Artificial Sequence: Synthetic oligonucleotide
uguucuaagagcacagggc

SEQ ID NO: 2060202 - RNA, 19 nt, Artificial Sequence
  Description of Artificial Sequence: Synthetic oligonucleotide
gaugaaaagugauugguuc

SEQ ID NO: 2060203 - RNA, 19 nt, Artificial Sequence
  Description of Artificial Sequence: Synthetic oligonucleotide
ugauugguucgcaagcucg

SEQ ID NO: 2060204 - RNA, 19 nt, Artificial Sequence
  Description of Artificial Sequence: Synthetic oligonucleotide
uucuauuuaaguaguaauc

SEQ ID NO: 2060205 - RNA, 19 nt, Artificial Sequence
  Description of Artificial Sequence: Synthetic oligonucleotide
auaacaaaguaacgucacc

SEQ ID NO: 2060206 - RNA, 19 nt, Artificial Sequence
  Description of Artificial Sequence: Synthetic oligonucleotide
ugugggaugcuucaaaacu

SEQ ID NO: 2060207 - RNA, 19 nt, Artificial Sequence
  Description of Artificial Sequence: Synthetic oligonucleotide
uauaggugacauuaaaacu

SEQ ID NO: 2060208 - RNA, 19 nt, Artificial Sequence
  Description of Artificial Sequence: Synthetic oligonucleotide
aaauaauacagaaccaacu

SEQ ID NO: 2060209 - RNA, 19 nt, Artificial Sequence
  Description of Artificial Sequence: Synthetic oligonucleotide
augaaaagugauugguucg

SEQ ID NO: 2060210 - RNA, 19 nt, Artificial Sequence
  Description of Artificial Sequence: Synthetic oligonucleotide
uuauauauaagaugcuuau

SEQ ID NO: 2060211 - RNA, 19 nt, Artificial Sequence
  Description of Artificial Sequence: Synthetic oligonucleotide
uauguaacaucacagcaaa

SEQ ID NO: 2060212 - RNA, 19 nt, Artificial Sequence
  Description of Artificial Sequence: Synthetic oligonucleotide
uguaacaucacagcaaaac

SEQ ID NO: 2060213 - RNA, 19 nt, Artificial Sequence
  Description of Artificial Sequence: Synthetic oligonucleotide
uacagguacaacaagcaac

SEQ ID NO: 2060214 - RNA, 19 nt, Artificial Sequence
  Description of Artificial Sequence: Synthetic oligonucleotide
agaugcuuaugcuaaggac

SEQ ID NO: 2060215 - RNA, 19 nt, Artificial Sequence
  Description of Artificial Sequence: Synthetic oligonucleotide
aaagcaacccuuguuaaug

SEQ ID NO: 2060216 - RNA, 19 nt, Artificial Sequence
  Description of Artificial Sequence: Synthetic oligonucleotide
aagcaacccuuguuaaugc

SEQ ID NO: 2060217 - RNA, 19 nt, Artificial Sequence
  Description of Artificial Sequence: Synthetic oligonucleotide
acaagcaaccucuaaagca

SEQ ID NO: 2060218 - RNA, 19 nt, Artificial Sequence
  Description of Artificial Sequence: Synthetic oligonucleotide
aaaguaacgucaccaauaa

SEQ ID NO: 2060219 - RNA, 19 nt, Artificial Sequence
  Description of Artificial Sequence: Synthetic oligonucleotide
uaauguaacuauuaauguc

SEQ ID NO: 2060220 - RNA, 19 nt, Artificial Sequence
  Description of Artificial Sequence: Synthetic oligonucleotide
cuuguuaaugcuacugacc

SEQ ID NO: 2060221 - RNA, 19 nt, Artificial Sequence
  Description of Artificial Sequence: Synthetic oligonucleotide
aaggguuuagaccucuuca

SEQ ID NO: 2060222 - RNA, 19 nt, Artificial Sequence
  Description of Artificial Sequence: Synthetic oligonucleotide
aaguuuugcacacggucag

SEQ ID NO: 2060223 - RNA, 19 nt, Artificial Sequence
  Description of Artificial Sequence: Synthetic oligonucleotide
auguucuaagagcacaggg

SEQ ID NO: 2060224 - RNA, 19 nt, Artificial Sequence
  Description of Artificial Sequence: Synthetic oligonucleotide
agcaauaaauacuacuggu

SEQ ID NO: 2060225 - RNA, 19 nt, Artificial Sequence
  Description of Artificial Sequence: Synthetic oligonucleotide
gaauuuuggcacauaaaag

SEQ ID NO: 2060226 - RNA, 19 nt, Artificial Sequence
  Description of Artificial Sequence: Synthetic oligonucleotide
uauuaauguccuuuuggug

SEQ ID NO: 2060227 - RNA, 19 nt, Artificial Sequence
  Description of Artificial Sequence: Synthetic oligonucleotide
aagaugaaaagugauuggu

SEQ ID NO: 2060228 - RNA, 19 nt, Artificial Sequence
  Description of Artificial Sequence: Synthetic oligonucleotide
uuguuuuacauaauggcuu

SEQ ID NO: 2060229 - RNA, 19 nt, Artificial Sequence
  Description of Artificial Sequence: Synthetic oligonucleotide
aaacaauaacaaaguaacg

SEQ ID NO: 2060230 - RNA, 19 nt, Artificial Sequence
  Description of Artificial Sequence: Synthetic oligonucleotide
ugagaauuuuggcacauaa

SEQ ID NO: 2060231 - RNA, 19 nt, Artificial Sequence
  Description of Artificial Sequence: Synthetic oligonucleotide
cagugcauugcauugauug

SEQ ID NO: 2060232 - RNA, 19 nt, Artificial Sequence
  Description of Artificial Sequence: Synthetic oligonucleotide
aguaacgucaccaauaaaa

SEQ ID NO: 2060233 - RNA, 19 nt, Artificial Sequence
  Description of Artificial Sequence: Synthetic oligonucleotide
aauugacuaggagaugggg

SEQ ID NO: 2060234 - RNA, 19 nt, Artificial Sequence
  Description of Artificial Sequence: Synthetic oligonucleotide
agaaagaaagggcagugca

SEQ ID NO: 2060235 - RNA, 19 nt, Artificial Sequence
  Description of Artificial Sequence: Synthetic oligonucleotide
agucuaucuauguaacauc

SEQ ID NO: 2060236 - RNA, 19 nt, Artificial Sequence
  Description of Artificial Sequence: Synthetic oligonucleotide
auacuacugguccaacagc

SEQ ID NO: 2060237 - RNA, 19 nt, Artificial Sequence
  Description of Artificial Sequence: Synthetic oligonucleotide
accaauaaaaguuguuuca

SEQ ID NO: 2060238 - RNA, 19 nt, Artificial Sequence
  Description of Artificial Sequence: Synthetic oligonucleotide
aagaacaaccaccauggaa

SEQ ID NO: 2060239 - RNA, 19 nt, Artificial Sequence
  Description of Artificial Sequence: Synthetic oligonucleotide
agucuuguuuuacauaaug

SEQ ID NO: 2060240 - RNA, 19 nt, Artificial Sequence
  Description of Artificial Sequence: Synthetic oligonucleotide
aguacaaaugaguuguuau

SEQ ID NO: 2060241 - RNA, 19 nt, Artificial Sequence
  Description of Artificial Sequence: Synthetic oligonucleotide
gauucucucacuaauguuc

SEQ ID NO: 2060242 - RNA, 19 nt, Artificial Sequence
  Description of Artificial Sequence: Synthetic oligonucleotide
uaacaaaguaacgucacca

SEQ ID NO: 2060243 - RNA, 19 nt, Artificial Sequence
  Description of Artificial Sequence: Synthetic oligonucleotide
agggcaauugacuaggaga

SEQ ID NO: 2060244 - RNA, 19 nt, Artificial Sequence
  Description of Artificial Sequence: Synthetic oligonucleotide
aaaacuacacacaagucua

SEQ ID NO: 2060245 - RNA, 19 nt, Artificial Sequence
  Description of Artificial Sequence: Synthetic oligonucleotide
uggaacaagguauauuaac

SEQ ID NO: 2060246 - RNA, 19 nt, Artificial Sequence
  Description of Artificial Sequence: Synthetic oligonucleotide
aacgucaccaauaaaaguu

SEQ ID NO: 2060247 - RNA, 19 nt, Artificial Sequence
  Description of Artificial Sequence: Synthetic oligonucleotide
aacuauuaauguccuuuug

SEQ ID NO: 2060248 - RNA, 19 nt, Artificial Sequence
  Description of Artificial Sequence: Synthetic oligonucleotide
caagaugaaaagugauugg

SEQ ID NO: 2060249 - RNA, 19 nt, Artificial Sequence
  Description of Artificial Sequence: Synthetic oligonucleotide
aaccaacuccuucuguggg

SEQ ID NO: 2060250 - RNA, 19 nt, Artificial Sequence
  Description of Artificial Sequence: Synthetic oligonucleotide
cacauuuuguuauagguga

SEQ ID NO: 2060251 - RNA, 19 nt, Artificial Sequence
  Description of Artificial Sequence: Synthetic oligonucleotide
cauucauuguugaguagcg

SEQ ID NO: 2060252 - RNA, 19 nt, Artificial Sequence
  Description of Artificial Sequence: Synthetic oligonucleotide
aagaugcuuaugcuaagga

SEQ ID NO: 2060253 - RNA, 19 nt, Artificial Sequence
  Description of Artificial Sequence: Synthetic oligonucleotide
aaaccuuaguacaaaugag

SEQ ID NO: 2060254 - RNA, 19 nt, Artificial Sequence
  Description of Artificial Sequence: Synthetic oligonucleotide
aagggacagacguacaggu

SEQ ID NO: 2060255 - RNA, 19 nt, Artificial Sequence
  Description of Artificial Sequence: Synthetic oligonucleotide
aaaguuuugcacacgguca

SEQ ID NO: 2060256 - RNA, 19 nt, Artificial Sequence
  Description of Artificial Sequence: Synthetic oligonucleotide
agguacaacaagcaaccuc

SEQ ID NO: 2060257 - RNA, 19 nt, Artificial Sequence
  Description of Artificial Sequence: Synthetic oligonucleotide
aagucuaucuauguaacau

SEQ ID NO: 2060258 - RNA, 19 nt, Artificial Sequence
  Description of Artificial Sequence: Synthetic oligonucleotide
uucauuguugaguagcguc

SEQ ID NO: 2060259 - RNA, 19 nt, Artificial Sequence
  Description of Artificial Sequence: Synthetic oligonucleotide
agaaccaacuccuucugug

SEQ ID NO: 2060260 - RNA, 19 nt, Artificial Sequence
  Description of Artificial Sequence: Synthetic oligonucleotide
auaaaaguuguuucacaca

SEQ ID NO: 2060261 - RNA, 19 nt, Artificial Sequence
  Description of Artificial Sequence: Synthetic oligonucleotide
uuaauguccuuuugguggc

SEQ ID NO: 2060262 - RNA, 19 nt, Artificial Sequence
  Description of Artificial Sequence: Synthetic oligonucleotide
uguuauaggugacauuaaa

SEQ ID NO: 2060263 - RNA, 19 nt, Artificial Sequence
  Description of Artificial Sequence: Synthetic oligonucleotide
gaaccaacuccuucugugg

SEQ ID NO: 2060264 - RNA, 19 nt, Artificial Sequence
  Description of Artificial Sequence: Synthetic oligonucleotide
uuugcacacggucagucca

SEQ ID NO: 2060265 - RNA, 19 nt, Artificial Sequence
  Description of Artificial Sequence: Synthetic oligonucleotide
uuuggcacauaaaaguuuu

SEQ ID NO: 2060266 - RNA, 19 nt, Artificial Sequence
  Description of Artificial Sequence: Synthetic oligonucleotide
ugcauugcauugauugucc

SEQ ID NO: 2060267 - RNA, 19 nt, Artificial Sequence
  Description of Artificial Sequence: Synthetic oligonucleotide
gaacagaaaguacagcauc

SEQ ID NO: 2060268 - RNA, 19 nt, Artificial Sequence
  Description of Artificial Sequence: Synthetic oligonucleotide
auugcauugauuguccucu

SEQ ID NO: 2060269 - RNA, 19 nt, Artificial Sequence
  Description of Artificial Sequence: Synthetic oligonucleotide
uaagaugcuuaugcuaagg

SEQ ID NO: 2060270 - RNA, 19 nt, Artificial Sequence
  Description of Artificial Sequence: Synthetic oligonucleotide
acaacaagcaaccucuaaa

SEQ ID NO: 2060271 - RNA, 19 nt, Artificial Sequence
  Description of Artificial Sequence: Synthetic oligonucleotide
ucacuaauguucaagucuu

SEQ ID NO: 2060272 - RNA, 19 nt, Artificial Sequence
  Description of Artificial Sequence: Synthetic oligonucleotide
auugauuguccucuugugu

SEQ ID NO: 2060273 - RNA, 19 nt, Artificial Sequence
  Description of Artificial Sequence: Synthetic oligonucleotide
acguacagguacaacaagc

SEQ ID NO: 2060274 - RNA, 19 nt, Artificial Sequence
  Description of Artificial Sequence: Synthetic oligonucleotide
auauaagaugcuuaugcua

SEQ ID NO: 2060275 - RNA, 19 nt, Artificial Sequence
  Description of Artificial Sequence: Synthetic oligonucleotide
aaccuuaguacaaaugagu

SEQ ID NO: 2060276 - RNA, 19 nt, Artificial Sequence
  Description of Artificial Sequence: Synthetic oligonucleotide
uugauuccauucauuguug

SEQ ID NO: 2060277 - RNA, 19 nt, Artificial Sequence
  Description of Artificial Sequence: Synthetic oligonucleotide
acuacacacaagucuaucu

SEQ ID NO: 2060278 - RNA, 19 nt, Artificial Sequence
  Description of Artificial Sequence: Synthetic oligonucleotide
guaacgucaccaauaaaag

SEQ ID NO: 2060279 - RNA, 19 nt, Artificial Sequence
  Description of Artificial Sequence: Synthetic oligonucleotide
cauggaacaagguauauua

SEQ ID NO: 2060280 - RNA, 19 nt, Artificial Sequence
  Description of Artificial Sequence: Synthetic oligonucleotide
uacaaaugaguuguuauau

SEQ ID NO: 2060281 - RNA, 19 nt, Artificial Sequence
  Description of Artificial Sequence: Synthetic oligonucleotide
ugcuaccaaacacauuuug

SEQ ID NO: 2060282 - RNA, 19 nt, Artificial Sequence
  Description of Artificial Sequence: Synthetic oligonucleotide
uaggugacauuaaaacuac

SEQ ID NO: 2060283 - RNA, 19 nt, Artificial Sequence
  Description of Artificial Sequence: Synthetic oligonucleotide
caauaacaaaguaacguca

SEQ ID NO: 2060284 - RNA, 19 nt, Artificial Sequence
  Description of Artificial Sequence: Synthetic oligonucleotide
acaagucuaucuauguaac

SEQ ID NO: 2060285 - RNA, 19 nt, Artificial Sequence
  Description of Artificial Sequence: Synthetic oligonucleotide
accaaacacauuuuguuau

SEQ ID NO: 2060286 - RNA, 19 nt, Artificial Sequence
  Description of Artificial Sequence: Synthetic oligonucleotide
aacagaaaguacagcauca

SEQ ID NO: 2060287 - RNA, 19 nt, Artificial Sequence
  Description of Artificial Sequence: Synthetic oligonucleotide
acggucugcuaccaaacac

SEQ ID NO: 2060288 - RNA, 19 nt, Artificial Sequence
  Description of Artificial Sequence: Synthetic oligonucleotide
uuaaagcaacccuuguuaa

SEQ ID NO: 2060289 - RNA, 19 nt, Artificial Sequence
  Description of Artificial Sequence: Synthetic oligonucleotide
ugggaugcuucaaaacugc

SEQ ID NO: 2060290 - RNA, 19 nt, Artificial Sequence
  Description of Artificial Sequence: Synthetic oligonucleotide
aaaagugauugguucgcaa

SEQ ID NO: 2060291 - RNA, 19 nt, Artificial Sequence
  Description of Artificial Sequence: Synthetic oligonucleotide
aaaccaagaugaaaaguga

SEQ ID NO: 2060292 - RNA, 19 nt, Artificial Sequence
  Description of Artificial Sequence: Synthetic oligonucleotide
augcuacugacccuuaaug

SEQ ID NO: 2060293 - RNA, 19 nt, Artificial Sequence
  Description of Artificial Sequence: Synthetic oligonucleotide
auaggugacauuaaaacua

SEQ ID NO: 2060294 - RNA, 19 nt, Artificial Sequence
  Description of Artificial Sequence: Synthetic oligonucleotide
cuaucuauguaacaucaca

SEQ ID NO: 2060295 - RNA, 19 nt, Artificial Sequence
  Description of Artificial Sequence: Synthetic oligonucleotide
aacuacacacaagucuauc

SEQ ID NO: 2060296 - RNA, 19 nt, Artificial Sequence
  Description of Artificial Sequence: Synthetic oligonucleotide
ugacccuuaauguaacuau

SEQ ID NO: 2060297 - RNA, 19 nt, Artificial Sequence
  Description of Artificial Sequence: Synthetic oligonucleotide
uuuuggcacauaaaaguuu

SEQ ID NO: 2060298 - RNA, 19 nt, Artificial Sequence
  Description of Artificial Sequence: Synthetic oligonucleotide
acacggucaguccauguuc

SEQ ID NO: 2060299 - RNA, 19 nt, Artificial Sequence
  Description of Artificial Sequence: Synthetic oligonucleotide
aaugcuuucuggacggucu

SEQ ID NO: 2060300 - RNA, 19 nt, Artificial Sequence
  Description of Artificial Sequence: Synthetic oligonucleotide
uggcacauaaaaguuuugc

SEQ ID NO: 2060301 - RNA, 19 nt, Artificial Sequence
  Description of Artificial Sequence: Synthetic oligonucleotide
cguuuauacaguuucaaag

SEQ ID NO: 2060302 - RNA, 19 nt, Artificial Sequence
  Description of Artificial Sequence: Synthetic oligonucleotide
cuuaguacaaaugaguugu

SEQ ID NO: 2060303 - RNA, 19 nt, Artificial Sequence
  Description of Artificial Sequence: Synthetic oligonucleotide
ucucucacuaauguucaag

SEQ ID NO: 2060304 - RNA, 19 nt, Artificial Sequence
  Description of Artificial Sequence: Synthetic oligonucleotide
uuguuauauauaagaugcu

SEQ ID NO: 2060305 - RNA, 19 nt, Artificial Sequence
  Description of Artificial Sequence: Synthetic oligonucleotide
aaagaaagggcagugcauu

SEQ ID NO: 2060306 - RNA, 19 nt, Artificial Sequence
  Description of Artificial Sequence: Synthetic oligonucleotide
gaagauucucucacuaaug

SEQ ID NO: 2060307 - RNA, 19 nt, Artificial Sequence
  Description of Artificial Sequence: Synthetic oligonucleotide
uaacgucaccaauaaaagu

SEQ ID NO: 2060308 - RNA, 19 nt, Artificial Sequence
  Description of Artificial Sequence: Synthetic oligonucleotide
uagaccucuucauuuaaaa

SEQ ID NO: 2060309 - RNA, 19 nt, Artificial Sequence
  Description of Artificial Sequence: Synthetic oligonucleotide
acaucacagcaaaacaugg

SEQ ID NO: 2060310 - RNA, 19 nt, Artificial Sequence
  Description of Artificial Sequence: Synthetic oligonucleotide
ucuaucuauguaacaucac

SEQ ID NO: 2060311 - RNA, 19 nt, Artificial Sequence
  Description of Artificial Sequence: Synthetic oligonucleotide
uggcgaacagaaaguacag

SEQ ID NO: 2060312 - RNA, 19 nt, Artificial Sequence
  Description of Artificial Sequence: Synthetic oligonucleotide
acagcguugauuccauuca

SEQ ID NO: 2060313 - RNA, 19 nt, Artificial Sequence
  Description of Artificial Sequence: Synthetic oligonucleotide
agcaaaacauggcgaacag

SEQ ID NO: 2060314 - RNA, 19 nt, Artificial Sequence
  Description of Artificial Sequence: Synthetic oligonucleotide
auaagaugcuuaugcuaag

SEQ ID NO: 2060315 - RNA, 19 nt, Artificial Sequence
  Description of Artificial Sequence: Synthetic oligonucleotide
cagacguacagguacaaca

SEQ ID NO: 2060316 - RNA, 19 nt, Artificial Sequence
  Description of Artificial Sequence: Synthetic oligonucleotide
uuuagaccucuucauuuaa

SEQ ID NO: 2060317 - RNA, 19 nt, Artificial Sequence
  Description of Artificial Sequence: Synthetic oligonucleotide
augcuuaugcuaaggacgg

SEQ ID NO: 2060318 - RNA, 19 nt, Artificial Sequence
  Description of Artificial Sequence: Synthetic oligonucleotide
uuuugcacacggucagucc

SEQ ID NO: 2060319 - RNA, 19 nt, Artificial Sequence
  Description of Artificial Sequence: Synthetic oligonucleotide
uaccaaacacauuuuguua

SEQ ID NO: 2060320 - RNA, 19 nt, Artificial Sequence
  Description of Artificial Sequence: Synthetic oligonucleotide
caacccuuguuaaugcuac

SEQ ID NO: 2060321 - RNA, 19 nt, Artificial Sequence
  Description of Artificial Sequence: Synthetic oligonucleotide
cacaagucuaucuauguaa

SEQ ID NO: 2060322 - RNA, 19 nt, Artificial Sequence
  Description of Artificial Sequence: Synthetic oligonucleotide
ccucuaaagcaauaaauac

SEQ ID NO: 2060323 - RNA, 19 nt, Artificial Sequence
  Description of Artificial Sequence: Synthetic oligonucleotide
ccggguuucauacagaaac

SEQ ID NO: 2060324 - RNA, 19 nt, Artificial Sequence
  Description of Artificial Sequence: Synthetic oligonucleotide
ugcucagacagcugcgaag

SEQ ID NO: 2060325 - RNA, 19 nt, Artificial Sequence
  Description of Artificial Sequence: Synthetic oligonucleotide
uacacacaagucuaucuau

SEQ ID NO: 2060326 - RNA, 19 nt, Artificial Sequence
  Description of Artificial Sequence: Synthetic oligonucleotide
uucgcaagcucguauuuaa

SEQ ID NO: 2060327 - RNA, 19 nt, Artificial Sequence
  Description of Artificial Sequence: Synthetic oligonucleotide
agugcauugcauugauugu

SEQ ID NO: 2060328 - RNA, 19 nt, Artificial Sequence
  Description of Artificial Sequence: Synthetic oligonucleotide
aagguauauuaacacuauu

SEQ ID NO: 2060329 - RNA, 19 nt, Artificial Sequence
  Description of Artificial Sequence: Synthetic oligonucleotide
uaaggguuuagaccucuuc

SEQ ID NO: 2060330 - RNA, 19 nt, Artificial Sequence
  Description of Artificial Sequence: Synthetic oligonucleotide
cuauguaacaucacagcaa

SEQ ID NO: 2060331 - RNA, 19 nt, Artificial Sequence
  Description of Artificial Sequence: Synthetic oligonucleotide
cauugauuguccucuugug

SEQ ID NO: 2060332 - RNA, 19 nt, Artificial Sequence
  Description of Artificial Sequence: Synthetic oligonucleotide
aguccauguucuaagagca

SEQ ID NO: 2060333 - RNA, 19 nt, Artificial Sequence
  Description of Artificial Sequence: Synthetic oligonucleotide
gaagcuaaagccacugaga

SEQ ID NO: 2060334 - RNA, 19 nt, Artificial Sequence
  Description of Artificial Sequence: Synthetic oligonucleotide
agguauauuaacacuauuu

SEQ ID NO: 2060335 - RNA, 19 nt, Artificial Sequence
  Description of Artificial Sequence: Synthetic oligonucleotide
caaaguaacgucaccaaua

SEQ ID NO: 2060336 - RNA, 19 nt, Artificial Sequence
  Description of Artificial Sequence: Synthetic oligonucleotide
gacguacagguacaacaag

SEQ ID NO: 2060337 - RNA, 19 nt, Artificial Sequence
  Description of Artificial Sequence: Synthetic oligonucleotide
guuauauauaagaugcuua

SEQ ID NO: 2060338 - RNA, 19 nt, Artificial Sequence
  Description of Artificial Sequence: Synthetic oligonucleotide
ucugugggaugcuucaaaa

SEQ ID NO: 2060339 - RNA, 19 nt, Artificial Sequence
  Description of Artificial Sequence: Synthetic oligonucleotide
aguaguaaucuaauauaca

SEQ ID NO: 2060340 - RNA, 19 nt, Artificial Sequence
  Description of Artificial Sequence: Synthetic oligonucleotide
cucuaaagcaauaaauacu

SEQ ID NO: 2060341 - RNA, 19 nt, Artificial Sequence
  Description of Artificial Sequence: Synthetic oligonucleotide
ucucacuaauguucaaguc

SEQ ID NO: 2060342 - RNA, 19 nt, Artificial Sequence
  Description of Artificial Sequence: Synthetic oligonucleotide
auaaauacuacugguccaa

SEQ ID NO: 2060343 - RNA, 19 nt, Artificial Sequence
  Description of Artificial Sequence: Synthetic oligonucleotide
uuagaccucuucauuuaaa

SEQ ID NO: 2060344 - RNA, 19 nt, Artificial Sequence
  Description of Artificial Sequence: Synthetic oligonucleotide
auuuaaguaguaaucuaau

SEQ ID NO: 2060345 - RNA, 19 nt, Artificial Sequence
  Description of Artificial Sequence: Synthetic oligonucleotide
ugcgaagauucucucacua

SEQ ID NO: 2060346 - RNA, 19 nt, Artificial Sequence
  Description of Artificial Sequence: Synthetic oligonucleotide
ccaagaugaaaagugauug

SEQ ID NO: 2060347 - RNA, 19 nt, Artificial Sequence
  Description of Artificial Sequence: Synthetic oligonucleotide
uacaacaagcaaccucuaa

SEQ ID NO: 2060348 - RNA, 19 nt, Artificial Sequence
  Description of Artificial Sequence: Synthetic oligonucleotide
caaccaccauggaacaagg

SEQ ID NO: 2060349 - RNA, 19 nt, Artificial Sequence
  Description of Artificial Sequence: Synthetic oligonucleotide
uaaagcaacccuuguuaau

SEQ ID NO: 2060350 - RNA, 19 nt, Artificial Sequence
  Description of Artificial Sequence: Synthetic oligonucleotide
gggacguuuauacaguuuc

SEQ ID NO: 2060351 - RNA, 19 nt, Artificial Sequence
  Description of Artificial Sequence: Synthetic oligonucleotide
cuauuaauguccuuuuggu

SEQ ID NO: 2060352 - RNA, 19 nt, Artificial Sequence
  Description of Artificial Sequence: Synthetic oligonucleotide
aaacggggugguucccagg

SEQ ID NO: 2060353 - RNA, 19 nt, Artificial Sequence
  Description of Artificial Sequence: Synthetic oligonucleotide
guuauaggugacauuaaaa

SEQ ID NO: 2060354 - RNA, 19 nt, Artificial Sequence
  Description of Artificial Sequence: Synthetic oligonucleotide
cucacuaauguucaagucu

SEQ ID NO: 2060355 - RNA, 19 nt, Artificial Sequence
  Description of Artificial Sequence: Synthetic oligonucleotide
cucguauuuaauacaaaua

SEQ ID NO: 2060356 - RNA, 19 nt, Artificial Sequence
  Description of Artificial Sequence: Synthetic oligonucleotide
ucuaagagcacagggcaau

SEQ ID NO: 2060357 - RNA, 19 nt, Artificial Sequence
  Description of Artificial Sequence: Synthetic oligonucleotide
acaaaugaguuguuauaua

SEQ ID NO: 2060358 - RNA, 19 nt, Artificial Sequence
  Description of Artificial Sequence: Synthetic oligonucleotide
acguuuauacaguuucaaa

SEQ ID NO: 2060359 - RNA, 19 nt, Artificial Sequence
  Description of Artificial Sequence: Synthetic oligonucleotide
agcacagggcaauugacua

SEQ ID NO: 2060360 - RNA, 19 nt, Artificial Sequence
  Description of Artificial Sequence: Synthetic oligonucleotide
gggacagacguacagguac

SEQ ID NO: 2060361 - RNA, 19 nt, Artificial Sequence
  Description of Artificial Sequence: Synthetic oligonucleotide
gaaacggggugguucccag

SEQ ID NO: 2060362 - RNA, 19 nt, Artificial Sequence
  Description of Artificial Sequence: Synthetic oligonucleotide
aaguuguuucacacaaaga

SEQ ID NO: 2060363 - RNA, 19 nt, Artificial Sequence
  Description of Artificial Sequence: Synthetic oligonucleotide
ugaguagcguccccucccc

SEQ ID NO: 2060364 - RNA, 19 nt, Artificial Sequence
  Description of Artificial Sequence: Synthetic oligonucleotide
uccauucauuguugaguag

SEQ ID NO: 2060365 - RNA, 19 nt, Artificial Sequence
  Description of Artificial Sequence: Synthetic oligonucleotide
aggguuuagaccucuucau

SEQ ID NO: 2060366 - RNA, 19 nt, Artificial Sequence
  Description of Artificial Sequence: Synthetic oligonucleotide
uuggcacauaaaaguuuug

SEQ ID NO: 2060367 - RNA, 19 nt, Artificial Sequence
  Description of Artificial Sequence: Synthetic oligonucleotide
caagcucguauuuaauaca

SEQ ID NO: 2060368 - RNA, 19 nt, Artificial Sequence
  Description of Artificial Sequence: Synthetic oligonucleotide
caaaugaguuguuauauau

SEQ ID NO: 2060369 - RNA, 19 nt, Artificial Sequence
  Description of Artificial Sequence: Synthetic oligonucleotide
gcguugauuccauucauug

SEQ ID NO: 2060370 - RNA, 19 nt, Artificial Sequence
  Description of Artificial Sequence: Synthetic oligonucleotide
ggucaguccauguucuaag

SEQ ID NO: 2060371 - RNA, 19 nt, Artificial Sequence
  Description of Artificial Sequence: Synthetic oligonucleotide
uacugacccuuaauguaac

SEQ ID NO: 2060372 - RNA, 19 nt, Artificial Sequence
  Description of Artificial Sequence: Synthetic oligonucleotide
augaguuguuauauauaag

SEQ ID NO: 2060373 - RNA, 19 nt, Artificial Sequence
  Description of Artificial Sequence: Synthetic oligonucleotide
uguccuuuugguggcgucc

SEQ ID NO: 2060374 - RNA, 19 nt, Artificial Sequence
  Description of Artificial Sequence: Synthetic oligonucleotide
ggcacauaaaaguuuugca

SEQ ID NO: 2060375 - RNA, 19 nt, Artificial Sequence
  Description of Artificial Sequence: Synthetic oligonucleotide
uggacggucugcuaccaaa

SEQ ID NO: 2060376 - RNA, 19 nt, Artificial Sequence
  Description of Artificial Sequence: Synthetic oligonucleotide
cuacugacccuuaauguaa

SEQ ID NO: 2060377 - RNA, 19 nt, Artificial Sequence
  Description of Artificial Sequence: Synthetic oligonucleotide
gcuuaugcuaaggacgggg

SEQ ID NO: 2060378 - RNA, 19 nt, Artificial Sequence
  Description of Artificial Sequence: Synthetic oligonucleotide
cauuguugaguagcguccc

SEQ ID NO: 2060379 - RNA, 19 nt, Artificial Sequence
  Description of Artificial Sequence: Synthetic oligonucleotide
guaacuauuaauguccuuu

SEQ ID NO: 2060380 - RNA, 19 nt, Artificial Sequence
  Description of Artificial Sequence: Synthetic oligonucleotide
agugauugguucgcaagcu

SEQ ID NO: 2060381 - RNA, 19 nt, Artificial Sequence
  Description of Artificial Sequence: Synthetic oligonucleotide
guugaguagcguccccucc

SEQ ID NO: 2060382 - RNA, 19 nt, Artificial Sequence
  Description of Artificial Sequence: Synthetic oligonucleotide
gguauauuaacacuauuuu

SEQ ID NO: 2060383 - RNA, 19 nt, Artificial Sequence
  Description of Artificial Sequence: Synthetic oligonucleotide
auucucucacuaauguuca

SEQ ID NO: 2060384 - RNA, 19 nt, Artificial Sequence
  Description of Artificial Sequence: Synthetic oligonucleotide
cugugggaugcuucaaaac

SEQ ID NO: 2060385 - RNA, 19 nt, Artificial Sequence
  Description of Artificial Sequence: Synthetic oligonucleotide
uugguucgcaagcucguau

SEQ ID NO: 2060386 - RNA, 19 nt, Artificial Sequence
  Description of Artificial Sequence: Synthetic oligonucleotide
gguacaacaagcaaccucu

SEQ ID NO: 2060387 - RNA, 19 nt, Artificial Sequence
  Description of Artificial Sequence: Synthetic oligonucleotide
acacaagucuaucuaugua

SEQ ID NO: 2060388 - RNA, 19 nt, Artificial Sequence
  Description of Artificial Sequence: Synthetic oligonucleotide
uggcguccggguuucauac

SEQ ID NO: 2060389 - RNA, 19 nt, Artificial Sequence
  Description of Artificial Sequence: Synthetic oligonucleotide
acgucaccaauaaaaguug

SEQ ID NO: 2060390 - RNA, 19 nt, Artificial Sequence
  Description of Artificial Sequence: Synthetic oligonucleotide
gcccuuaaggguuuagacc

SEQ ID NO: 2060391 - RNA, 19 nt, Artificial Sequence
  Description of Artificial Sequence: Synthetic oligonucleotide
acccuuguuaaugcuacug

SEQ ID NO: 2060392 - RNA, 19 nt, Artificial Sequence
  Description of Artificial Sequence: Synthetic oligonucleotide
uguugaguagcguccccuc

SEQ ID NO: 2060393 - RNA, 19 nt, Artificial Sequence
  Description of Artificial Sequence: Synthetic oligonucleotide
gacguuuauacaguuucaa

SEQ ID NO: 2060394 - RNA, 19 nt, Artificial Sequence
  Description of Artificial Sequence: Synthetic oligonucleotide
aaguaacgucaccaauaaa

SEQ ID NO: 2060395 - RNA, 19 nt, Artificial Sequence
  Description of Artificial Sequence: Synthetic oligonucleotide
acacacaagucuaucuaug

SEQ ID NO: 2060396 - RNA, 19 nt, Artificial Sequence
  Description of Artificial Sequence: Synthetic oligonucleotide
gcaauaaauacuacugguc

SEQ ID NO: 2060397 - RNA, 19 nt, Artificial Sequence
  Description of Artificial Sequence: Synthetic oligonucleotide
guuuagaccucuucauuua

SEQ ID NO: 2060398 - RNA, 19 nt, Artificial Sequence
  Description of Artificial Sequence: Synthetic oligonucleotide
accuuaguacaaaugaguu

SEQ ID NO: 2060399 - RNA, 19 nt, Artificial Sequence
  Description of Artificial Sequence: Synthetic oligonucleotide
aauguccuuuugguggcgu

SEQ ID NO: 2060400 - RNA, 19 nt, Artificial Sequence
  Description of Artificial Sequence: Synthetic oligonucleotide
uuguugaguagcguccccu

SEQ ID NO: 2060401 - RNA, 19 nt, Artificial Sequence
  Description of Artificial Sequence: Synthetic oligonucleotide
aauacagaaccaacuccuu

SEQ ID NO: 2060402 - RNA, 19 nt, Artificial Sequence
  Description of Artificial Sequence: Synthetic oligonucleotide
aacccuuguuaaugcuacu

SEQ ID NO: 2060403 - RNA, 19 nt, Artificial Sequence
  Description of Artificial Sequence: Synthetic oligonucleotide
cacagcaaaacauggcgaa

SEQ ID NO: 2060404 - RNA, 19 nt, Artificial Sequence
  Description of Artificial Sequence: Synthetic oligonucleotide
auguccuuuugguggcguc

SEQ ID NO: 2060405 - RNA, 19 nt, Artificial Sequence
  Description of Artificial Sequence: Synthetic oligonucleotide
ugcuucaaaacugcuucuc

SEQ ID NO: 2060406 - RNA, 19 nt, Artificial Sequence
  Description of Artificial Sequence: Synthetic oligonucleotide
ccuuguuaaugcuacugac

SEQ ID NO: 2060407 - RNA, 19 nt, Artificial Sequence
  Description of Artificial Sequence: Synthetic oligonucleotide
uguaacuauuaauguccuu

SEQ ID NO: 2060408 - RNA, 19 nt, Artificial Sequence
  Description of Artificial Sequence: Synthetic oligonucleotide
uuaguacaaaugaguuguu

SEQ ID NO: 2060409 - RNA, 19 nt, Artificial Sequence
  Description of Artificial Sequence: Synthetic oligonucleotide
agcaacccuuguuaaugcu

SEQ ID NO: 2060410 - RNA, 19 nt, Artificial Sequence
  Description of Artificial Sequence: Synthetic oligonucleotide
gagaauuuuggcacauaaa

SEQ ID NO: 2060411 - RNA, 19 nt, Artificial Sequence
  Description of Artificial Sequence: Synthetic oligonucleotide
caagucuaucuauguaaca

SEQ ID NO: 2060412 - RNA, 19 nt, Artificial Sequence
  Description of Artificial Sequence: Synthetic oligonucleotide
cuacacacaagucuaucua

SEQ ID NO: 2060413 - RNA, 19 nt, Artificial Sequence
  Description of Artificial Sequence: Synthetic oligonucleotide
uccuuuugguggcguccgg

SEQ ID NO: 2060414 - RNA, 19 nt, Artificial Sequence
  Description of Artificial Sequence: Synthetic oligonucleotide
uuuuacccuuuuguuucug

SEQ ID NO: 2060415 - RNA, 19 nt, Artificial Sequence
  Description of Artificial Sequence: Synthetic oligonucleotide
accaacuccuucuguggga

SEQ ID NO: 2060416 - RNA, 19 nt, Artificial Sequence
  Description of Artificial Sequence: Synthetic oligonucleotide
gugcauugcauugauuguc

SEQ ID NO: 2060417 - RNA, 19 nt, Artificial Sequence
  Description of Artificial Sequence: Synthetic oligonucleotide
gaaaagugauugguucgca

SEQ ID NO: 2060418 - RNA, 19 nt, Artificial Sequence
  Description of Artificial Sequence: Synthetic oligonucleotide
cagggcaauugacuaggag

SEQ ID NO: 2060419 - RNA, 19 nt, Artificial Sequence
  Description of Artificial Sequence: Synthetic oligonucleotide
gaguuguuauauauaagau

SEQ ID NO: 2060420 - RNA, 19 nt, Artificial Sequence
  Description of Artificial Sequence: Synthetic oligonucleotide
aaacuacacacaagucuau

SEQ ID NO: 2060421 - RNA, 19 nt, Artificial Sequence
  Description of Artificial Sequence: Synthetic oligonucleotide
aggaagcuaaagccacuga

SEQ ID NO: 2060422 - RNA, 19 nt, Artificial Sequence
  Description of Artificial Sequence: Synthetic oligonucleotide
agacguacagguacaacaa

SEQ ID NO: 2060423 - RNA, 19 nt, Artificial Sequence
  Description of Artificial Sequence: Synthetic oligonucleotide
guuuugcacacggucaguc

SEQ ID NO: 2060424 - RNA, 19 nt, Artificial Sequence
  Description of Artificial Sequence: Synthetic oligonucleotide
agcuaaagccacugagaau

SEQ ID NO: 2060425 - RNA, 19 nt, Artificial Sequence
  Description of Artificial Sequence: Synthetic oligonucleotide
ugguccaacagcguugauu

SEQ ID NO: 2060426 - RNA, 19 nt, Artificial Sequence
  Description of Artificial Sequence: Synthetic oligonucleotide
acugacccuuaauguaacu

SEQ ID NO: 2060427 - RNA, 19 nt, Artificial Sequence
  Description of Artificial Sequence: Synthetic oligonucleotide
ggcccuuaaggguuuagac

SEQ ID NO: 2060428 - RNA, 19 nt, Artificial Sequence
  Description of Artificial Sequence: Synthetic oligonucleotide
cucucacuaauguucaagu

SEQ ID NO: 2060429 - RNA, 19 nt, Artificial Sequence
  Description of Artificial Sequence: Synthetic oligonucleotide
auucauuguugaguagcgu

SEQ ID NO: 2060430 - RNA, 19 nt, Artificial Sequence
  Description of Artificial Sequence: Synthetic oligonucleotide
ugcuuaugcuaaggacggg

SEQ ID NO: 2060431 - RNA, 19 nt, Artificial Sequence
  Description of Artificial Sequence: Synthetic oligonucleotide
aaaaugcuuucuggacggu

SEQ ID NO: 2060432 - RNA, 19 nt, Artificial Sequence
  Description of Artificial Sequence: Synthetic oligonucleotide
ugguucgcaagcucguauu

SEQ ID NO: 2060433 - RNA, 19 nt, Artificial Sequence
  Description of Artificial Sequence: Synthetic oligonucleotide
gcuaaagccacugagaauu

SEQ ID NO: 2060434 - RNA, 19 nt, Artificial Sequence
  Description of Artificial Sequence: Synthetic oligonucleotide
gugauugguucgcaagcuc

SEQ ID NO: 2060435 - RNA, 19 nt, Artificial Sequence
  Description of Artificial Sequence: Synthetic oligonucleotide
gacggucugcuaccaaaca

SEQ ID NO: 2060436 - RNA, 19 nt, Artificial Sequence
  Description of Artificial Sequence: Synthetic oligonucleotide
gacagcugcgaagauucuc

SEQ ID NO: 2060437 - RNA, 19 nt, Artificial Sequence
  Description of Artificial Sequence: Synthetic oligonucleotide
uccggguuucauacagaaa

SEQ ID NO: 2060438 - RNA, 19 nt, Artificial Sequence
  Description of Artificial Sequence: Synthetic oligonucleotide
gcuacugacccuuaaugua

SEQ ID NO: 2060439 - RNA, 19 nt, Artificial Sequence
  Description of Artificial Sequence: Synthetic oligonucleotide
uuaaggguuuagaccucuu

SEQ ID NO: 2060440 - RNA, 19 nt, Artificial Sequence
  Description of Artificial Sequence: Synthetic oligonucleotide
acugagaauuuuggcacau

SEQ ID NO: 2060441 - RNA, 19 nt, Artificial Sequence
  Description of Artificial Sequence: Synthetic oligonucleotide
caaccucuaaagcaauaaa

SEQ ID NO: 2060442 - RNA, 19 nt, Artificial Sequence
  Description of Artificial Sequence: Synthetic oligonucleotide
guccggguuucauacagaa

SEQ ID NO: 2060443 - RNA, 19 nt, Artificial Sequence
  Description of Artificial Sequence: Synthetic oligonucleotide
uggcccuuaaggguuuaga

SEQ ID NO: 2060444 - RNA, 19 nt, Artificial Sequence
  Description of Artificial Sequence: Synthetic oligonucleotide
uugcacacggucaguccau

SEQ ID NO: 2060445 - RNA, 19 nt, Artificial Sequence
  Description of Artificial Sequence: Synthetic oligonucleotide
ucgcaagcucguauuuaau

SEQ ID NO: 2060446 - RNA, 19 nt, Artificial Sequence
  Description of Artificial Sequence: Synthetic oligonucleotide
gcucguauuuaauacaaau

SEQ ID NO: 2060447 - RNA, 19 nt, Artificial Sequence
  Description of Artificial Sequence: Synthetic oligonucleotide
cacacaagucuaucuaugu

SEQ ID NO: 2060448 - RNA, 19 nt, Artificial Sequence
  Description of Artificial Sequence: Synthetic oligonucleotide
cccuuaaggguuuagaccu

SEQ ID NO: 2060449 - RNA, 19 nt, Artificial Sequence
  Description of Artificial Sequence: Synthetic oligonucleotide
cuaauguucaagucuuguu

SEQ ID NO: 2060450 - RNA, 19 nt, Artificial Sequence
  Description of Artificial Sequence: Synthetic oligonucleotide
acccuuaauguaacuauua

SEQ ID NO: 2060451 - RNA, 19 nt, Artificial Sequence
  Description of Artificial Sequence: Synthetic oligonucleotide
gaaagaaagggcagugcau

SEQ ID NO: 2060452 - RNA, 19 nt, Artificial Sequence
  Description of Artificial Sequence: Synthetic oligonucleotide
gguuuagaccucuucauuu

SEQ ID NO: 2060453 - RNA, 19 nt, Artificial Sequence
  Description of Artificial Sequence: Synthetic oligonucleotide
cacugagaauuuuggcaca

SEQ ID NO: 2060454 - RNA, 19 nt, Artificial Sequence
  Description of Artificial Sequence: Synthetic oligonucleotide
gggaggaagcuaaagccac

SEQ ID NO: 2060455 - RNA, 19 nt, Artificial Sequence
  Description of Artificial Sequence: Synthetic oligonucleotide
aaagggcagugcauugcau

SEQ ID NO: 2060456 - RNA, 19 nt, Artificial Sequence
  Description of Artificial Sequence: Synthetic oligonucleotide
acuacugguccaacagcgu

SEQ ID NO: 2060457 - RNA, 19 nt, Artificial Sequence
  Description of Artificial Sequence: Synthetic oligonucleotide
aaccaccauggaacaaggu

SEQ ID NO: 2060458 - RNA, 19 nt, Artificial Sequence
  Description of Artificial Sequence: Synthetic oligonucleotide
cuguacuaauuuaaacaau

SEQ ID NO: 2060459 - RNA, 19 nt, Artificial Sequence
  Description of Artificial Sequence: Synthetic oligonucleotide
uuggcccuuaaggguuuag

SEQ ID NO: 2060460 - RNA, 19 nt, Artificial Sequence
  Description of Artificial Sequence: Synthetic oligonucleotide
gauugguucgcaagcucgu

SEQ ID NO: 2060461 - RNA, 19 nt, Artificial Sequence
  Description of Artificial Sequence: Synthetic oligonucleotide
gcaaccucuaaagcaauaa

SEQ ID NO: 2060462 - RNA, 19 nt, Artificial Sequence
  Description of Artificial Sequence: Synthetic oligonucleotide
caccauggaacaagguaua

SEQ ID NO: 2060463 - RNA, 19 nt, Artificial Sequence
  Description of Artificial Sequence: Synthetic oligonucleotide
ccuuaauguaacuauuaau

SEQ ID NO: 2060464 - RNA, 19 nt, Artificial Sequence
  Description of Artificial Sequence: Synthetic oligonucleotide
cuuuugguggcguccgggu

SEQ ID NO: 2060465 - RNA, 19 nt, Artificial Sequence
  Description of Artificial Sequence: Synthetic oligonucleotide
gacagacguacagguacaa

SEQ ID NO: 2060466 - RNA, 19 nt, Artificial Sequence
  Description of Artificial Sequence: Synthetic oligonucleotide
caacuccuucugugggaug

SEQ ID NO: 2060467 - RNA, 19 nt, Artificial Sequence
  Description of Artificial Sequence: Synthetic oligonucleotide
aggugacauuaaaacuaca

SEQ ID NO: 2060468 - RNA, 19 nt, Artificial Sequence
  Description of Artificial Sequence: Synthetic oligonucleotide
agcguugauuccauucauu

SEQ ID NO: 2060469 - RNA, 19 nt, Artificial Sequence
  Description of Artificial Sequence: Synthetic oligonucleotide
cuuaaggguuuagaccucu

SEQ ID NO: 2060470 - RNA, 19 nt, Artificial Sequence
  Description of Artificial Sequence: Synthetic oligonucleotide
auugguucgcaagcucgua

SEQ ID NO: 2060471 - RNA, 19 nt, Artificial Sequence
  Description of Artificial Sequence: Synthetic oligonucleotide
ccuuuugguggcguccggg

SEQ ID NO: 2060472 - RNA, 19 nt, Artificial Sequence
  Description of Artificial Sequence: Synthetic oligonucleotide
cccuuaauguaacuauuaa

SEQ ID NO: 2060473 - RNA, 19 nt, Artificial Sequence
  Description of Artificial Sequence: Synthetic oligonucleotide
cccuuguuaaugcuacuga

SEQ ID NO: 2060474 - RNA, 19 nt, Artificial Sequence
  Description of Artificial Sequence: Synthetic oligonucleotide
ggacguuuauacaguuuca

SEQ ID NO: 2060475 - RNA, 19 nt, Artificial Sequence
  Description of Artificial Sequence: Synthetic oligonucleotide
cacggucaguccauguucu

SEQ ID NO: 2060476 - RNA, 19 nt, Artificial Sequence
  Description of Artificial Sequence: Synthetic oligonucleotide
uugguggcguccggguuuc

SEQ ID NO: 2060477 - RNA, 19 nt, Artificial Sequence
  Description of Artificial Sequence: Synthetic oligonucleotide
gcgaagauucucucacuaa

SEQ ID NO: 2060478 - RNA, 19 nt, Artificial Sequence
  Description of Artificial Sequence: Synthetic oligonucleotide
ggcaauugacuaggagaug

SEQ ID NO: 2060479 - RNA, 19 nt, Artificial Sequence
  Description of Artificial Sequence: Synthetic oligonucleotide
ggacggucugcuaccaaac

SEQ ID NO: 2060480 - RNA, 19 nt, Artificial Sequence
  Description of Artificial Sequence: Synthetic oligonucleotide
gacccuuaauguaacuauu

SEQ ID NO: 2060481 - RNA, 19 nt, Artificial Sequence
  Description of Artificial Sequence: Synthetic oligonucleotide
guucgcaagcucguauuua

SEQ ID NO: 2060482 - RNA, 19 nt, Artificial Sequence
  Description of Artificial Sequence: Synthetic oligonucleotide
caaaacugcuucucucuuu

SEQ ID NO: 2060483 - RNA, 19 nt, Artificial Sequence
  Description of Artificial Sequence: Synthetic oligonucleotide
agcaaccucuaaagcaaua

SEQ ID NO: 2060484 - RNA, 19 nt, Artificial Sequence
  Description of Artificial Sequence: Synthetic oligonucleotide
auguaacaucacagcaaaa

SEQ ID NO: 2060485 - RNA, 19 nt, Artificial Sequence
  Description of Artificial Sequence: Synthetic oligonucleotide
cuuucuggacggucugcua

SEQ ID NO: 2060486 - RNA, 19 nt, Artificial Sequence
  Description of Artificial Sequence: Synthetic oligonucleotide
guggcguccggguuucaua

SEQ ID NO: 2060487 - RNA, 19 nt, Artificial Sequence
  Description of Artificial Sequence: Synthetic oligonucleotide
cuacugguccaacagcguu

SEQ ID NO: 2060488 - RNA, 19 nt, Artificial Sequence
  Description of Artificial Sequence: Synthetic oligonucleotide
acagggcaauugacuagga

SEQ ID NO: 2060489 - RNA, 19 nt, Artificial Sequence
  Description of Artificial Sequence: Synthetic oligonucleotide
ccuuaaggguuuagaccuc

SEQ ID NO: 2060490 - RNA, 19 nt, Artificial Sequence
  Description of Artificial Sequence: Synthetic oligonucleotide
gucaccaauaaaaguuguu

SEQ ID NO: 2060491 - RNA, 19 nt, Artificial Sequence
  Description of Artificial Sequence: Synthetic oligonucleotide
uuuggcccuuaaggguuua

SEQ ID NO: 2060492 - RNA, 19 nt, Artificial Sequence
  Description of Artificial Sequence: Synthetic oligonucleotide
cugcucagacagcugcgaa

SEQ ID NO: 2060493 - RNA, 19 nt, Artificial Sequence
  Description of Artificial Sequence: Synthetic oligonucleotide
gcaacccuuguuaaugcua

SEQ ID NO: 2060494 - RNA, 19 nt, Artificial Sequence
  Description of Artificial Sequence: Synthetic oligonucleotide
ggaaacggggugguuccca

SEQ ID NO: 2060495 - RNA, 19 nt, Artificial Sequence
  Description of Artificial Sequence: Synthetic oligonucleotide
cagaaccaacuccuucugu

SEQ ID NO: 2060496 - RNA, 19 nt, Artificial Sequence
  Description of Artificial Sequence: Synthetic oligonucleotide
cacacggucaguccauguu

SEQ ID NO: 2060497 - RNA, 19 nt, Artificial Sequence
  Description of Artificial Sequence: Synthetic oligonucleotide
cugcgaagauucucucacu

SEQ ID NO: 2060498 - RNA, 19 nt, Artificial Sequence
  Description of Artificial Sequence: Synthetic oligonucleotide
cgcaagcucguauuuaaua

SEQ ID NO: 2060499 - RNA, 19 nt, Artificial Sequence
  Description of Artificial Sequence: Synthetic oligonucleotide
guuuuacauaauggcuuuu

SEQ ID NO: 2060500 - RNA, 19 nt, Artificial Sequence
  Description of Artificial Sequence: Synthetic oligonucleotide
cugagaauuuuggcacaua

SEQ ID NO: 2060501 - RNA, 19 nt, Artificial Sequence
  Description of Artificial Sequence: Synthetic oligonucleotide
ggcagugcauugcauugau

SEQ ID NO: 2060502 - RNA, 19 nt, Artificial Sequence
  Description of Artificial Sequence: Synthetic oligonucleotide
cgaagauucucucacuaau

SEQ ID NO: 2060503 - RNA, 19 nt, Artificial Sequence
  Description of Artificial Sequence: Synthetic oligonucleotide
cagcguugauuccauucau

SEQ ID NO: 2060504 - RNA, 19 nt, Artificial Sequence
  Description of Artificial Sequence: Synthetic oligonucleotide
gguucgcaagcucguauuu

SEQ ID NO: 2060505 - RNA, 19 nt, Artificial Sequence
  Description of Artificial Sequence: Synthetic oligonucleotide
ggucugcuaccaaacacau

SEQ ID NO: 2060506 - RNA, 19 nt, Artificial Sequence
  Description of Artificial Sequence: Synthetic oligonucleotide
cguugauuccauucauugu

SEQ ID NO: 2060507 - RNA, 19 nt, Artificial Sequence
  Description of Artificial Sequence: Synthetic oligonucleotide
cugcuaccaaacacauuuu

SEQ ID NO: 2060508 - RNA, 19 nt, Artificial Sequence
  Description of Artificial Sequence: Synthetic oligonucleotide
cuaagagcacagggcaauu

SEQ ID NO: 2060509 - RNA, 19 nt, Artificial Sequence
  Description of Artificial Sequence: Synthetic oligonucleotide
cagguacaacaagcaaccu

SEQ ID NO: 2060510 - RNA, 19 nt, Artificial Sequence
  Description of Artificial Sequence: Synthetic oligonucleotide
ccaacagcguugauuccau

SEQ ID NO: 2060511 - RNA, 19 nt, Artificial Sequence
  Description of Artificial Sequence: Synthetic oligonucleotide
gcacacggucaguccaugu

SEQ ID NO: 2060512 - RNA, 19 nt, Artificial Sequence
  Description of Artificial Sequence: Synthetic oligonucleotide
gucugcuaccaaacacauu

SEQ ID NO: 2060513 - RNA, 19 nt, Artificial Sequence
  Description of Artificial Sequence: Synthetic oligonucleotide
ccauggaacaagguauauu

SEQ ID NO: 2060514 - RNA, 19 nt, Artificial Sequence
  Description of Artificial Sequence: Synthetic oligonucleotide
caacagcguugauuccauu

SEQ ID NO: 2060515 - RNA, 19 nt, Artificial Sequence
  Description of Artificial Sequence: Synthetic oligonucleotide
cguccggguuucauacaga

SEQ ID NO: 2060516 - RNA, 19 nt, Artificial Sequence
  Description of Artificial Sequence: Synthetic oligonucleotide
ccaacuccuucugugggau

SEQ ID NO: 2060517 - RNA, 19 nt, Artificial Sequence
  Description of Artificial Sequence: Synthetic oligonucleotide
ggggacguuuauacaguuu

SEQ ID NO: 2060518 - RNA, 19 nt, Artificial Sequence
  Description of Artificial Sequence: Synthetic oligonucleotide
gguggcguccggguuucau

SEQ ID NO: 2060519 - RNA, 19 nt, Artificial Sequence
  Description of Artificial Sequence: Synthetic oligonucleotide
cugguccaacagcguugau

SEQ ID NO: 2060520 - RNA, 19 nt, Artificial Sequence
  Description of Artificial Sequence: Synthetic oligonucleotide
auagagaugaugcagacug

SEQ ID NO: 2060521 - RNA, 19 nt, Artificial Sequence
  Description of Artificial Sequence: Synthetic oligonucleotide
gaugguaauaaguccaugg

SEQ ID NO: 2060522 - RNA, 19 nt, Artificial Sequence
  Description of Artificial Sequence: Synthetic oligonucleotide
uuugguacuugucaucugg

SEQ ID NO: 2060523 - RNA, 19 nt, Artificial Sequence
  Description of Artificial Sequence: Synthetic oligonucleotide
ugguguauugccuagacca

SEQ ID NO: 2060524 - RNA, 19 nt, Artificial Sequence
  Description of Artificial Sequence: Synthetic oligonucleotide
aaugguguauugccuagac

SEQ ID NO: 2060525 - RNA, 19 nt, Artificial Sequence
  Description of Artificial Sequence: Synthetic oligonucleotide
aaggcauccacacgggccc

SEQ ID NO: 2060526 - RNA, 19 nt, Artificial Sequence
  Description of Artificial Sequence: Synthetic oligonucleotide
augguaauaaguccauggc

SEQ ID NO: 2060527 - RNA, 19 nt, Artificial Sequence
  Description of Artificial Sequence: Synthetic oligonucleotide
auugcaggaagcaaaaugg

SEQ ID NO: 2060528 - RNA, 19 nt, Artificial Sequence
  Description of Artificial Sequence: Synthetic oligonucleotide
aggaauauaggguucuggg

SEQ ID NO: 2060529 - RNA, 19 nt, Artificial Sequence
  Description of Artificial Sequence: Synthetic oligonucleotide
uuuuaucagcuuaagccag

SEQ ID NO: 2060530 - RNA, 19 nt, Artificial Sequence
  Description of Artificial Sequence: Synthetic oligonucleotide
uuucccuguaccgagagcg

SEQ ID NO: 2060531 - RNA, 19 nt, Artificial Sequence
  Description of Artificial Sequence: Synthetic oligonucleotide
uggaauguggcuacagagg

SEQ ID NO: 2060532 - RNA, 19 nt, Artificial Sequence
  Description of Artificial Sequence: Synthetic oligonucleotide
guacuugucaucuggaggc

SEQ ID NO: 2060533 - RNA, 19 nt, Artificial Sequence
  Description of Artificial Sequence: Synthetic oligonucleotide
auagggaggccauaggagg

SEQ ID NO: 2060534 - RNA, 19 nt, Artificial Sequence
  Description of Artificial Sequence: Synthetic oligonucleotide
uguauugccuagaccaucc

SEQ ID NO: 2060535 - RNA, 19 nt, Artificial Sequence
  Description of Artificial Sequence: Synthetic oligonucleotide
uggcccauagagaugaugc

SEQ ID NO: 2060536 - RNA, 19 nt, Artificial Sequence
  Description of Artificial Sequence: Synthetic oligonucleotide
ugcucuuugguacuuguca

SEQ ID NO: 2060537 - RNA, 19 nt, Artificial Sequence
  Description of Artificial Sequence: Synthetic oligonucleotide
agcaucuaagggcaagggc

SEQ ID NO: 2060538 - RNA, 19 nt, Artificial Sequence
  Description of Artificial Sequence: Synthetic oligonucleotide
cagaugaugguaauaaguc

SEQ ID NO: 2060539 - RNA, 19 nt, Artificial Sequence
  Description of Artificial Sequence: Synthetic oligonucleotide
guucaugccgcccaaggcg

SEQ ID NO: 2060540 - RNA, 19 nt, Artificial Sequence
  Description of Artificial Sequence: Synthetic oligonucleotide
agagcgugcaccuccuugc

SEQ ID NO: 2060541 - RNA, 19 nt, Artificial Sequence
  Description of Artificial Sequence: Synthetic oligonucleotide
ugguaauaaguccauggcu

SEQ ID NO: 2060542 - RNA, 19 nt, Artificial Sequence
  Description of Artificial Sequence: Synthetic oligonucleotide
guaauaaguccauggcugg

SEQ ID NO: 2060543 - RNA, 19 nt, Artificial Sequence
  Description of Artificial Sequence: Synthetic oligonucleotide
auccgugccaucuuccagc

SEQ ID NO: 2060544 - RNA, 19 nt, Artificial Sequence
  Description of Artificial Sequence: Synthetic oligonucleotide
gaugaugguaauaagucca

SEQ ID NO: 2060545 - RNA, 19 nt, Artificial Sequence
  Description of Artificial Sequence: Synthetic oligonucleotide
uuggcagaaucccucagcc

SEQ ID NO: 2060546 - RNA, 19 nt, Artificial Sequence
  Description of Artificial Sequence: Synthetic oligonucleotide
aaggaauauaggguucugg

SEQ ID NO: 2060547 - RNA, 19 nt, Artificial Sequence
  Description of Artificial Sequence: Synthetic oligonucleotide
uaacauguggaugaucugc

SEQ ID NO: 2060548 - RNA, 19 nt, Artificial Sequence
  Description of Artificial Sequence: Synthetic oligonucleotide
cauugcaggaagcaaaaug

SEQ ID NO: 2060549 - RNA, 19 nt, Artificial Sequence
  Description of Artificial Sequence: Synthetic oligonucleotide
ugcagcgcaguucaucgcg

SEQ ID NO: 2060550 - RNA, 19 nt, Artificial Sequence
  Description of Artificial Sequence: Synthetic oligonucleotide
gguugcuaaggacauaggg

SEQ ID NO: 2060551 - RNA, 19 nt, Artificial Sequence
  Description of Artificial Sequence: Synthetic oligonucleotide
ucccguaacauguggauga

SEQ ID NO: 2060552 - RNA, 19 nt, Artificial Sequence
  Description of Artificial Sequence: Synthetic oligonucleotide
gaauauaggguucuggggu

SEQ ID NO: 2060553 - RNA, 19 nt, Artificial Sequence
  Description of Artificial Sequence: Synthetic oligonucleotide
gguaaugucugcuaggaca

SEQ ID NO: 2060554 - RNA, 19 nt, Artificial Sequence
  Description of Artificial Sequence: Synthetic oligonucleotide
agcuuaagccagaugaugg

SEQ ID NO: 2060555 - RNA, 19 nt, Artificial Sequence
  Description of Artificial Sequence: Synthetic oligonucleotide
augguguauugccuagacc

SEQ ID NO: 2060556 - RNA, 19 nt, Artificial Sequence
  Description of Artificial Sequence: Synthetic oligonucleotide
cauagggaggccauaggag

SEQ ID NO: 2060557 - RNA, 19 nt, Artificial Sequence
  Description of Artificial Sequence: Synthetic oligonucleotide
gguaauaaguccauggcug

SEQ ID NO: 2060558 - RNA, 19 nt, Artificial Sequence
  Description of Artificial Sequence: Synthetic oligonucleotide
gguaaagcuggccaagagg

SEQ ID NO: 2060559 - RNA, 19 nt, Artificial Sequence
  Description of Artificial Sequence: Synthetic oligonucleotide
gguacuugucaucuggagg

SEQ ID NO: 2060560 - RNA, 19 nt, Artificial Sequence
  Description of Artificial Sequence: Synthetic oligonucleotide
ggaauauaggguucugggg

SEQ ID NO: 2060561 - RNA, 19 nt, Artificial Sequence
  Description of Artificial Sequence: Synthetic oligonucleotide
ucuuugguacuugucaucu

SEQ ID NO: 2060562 - RNA, 19 nt, Artificial Sequence
  Description of Artificial Sequence: Synthetic oligonucleotide
uauugccuagaccauccug

SEQ ID NO: 2060563 - RNA, 19 nt, Artificial Sequence
  Description of Artificial Sequence: Synthetic oligonucleotide
gaucuugcagcgcaguuca

SEQ ID NO: 2060564 - RNA, 19 nt, Artificial Sequence
  Description of Artificial Sequence: Synthetic oligonucleotide
aauauaggguucugggguu

SEQ ID NO: 2060565 - RNA, 19 nt, Artificial Sequence
  Description of Artificial Sequence: Synthetic oligonucleotide
agccggacagccuccaagc

SEQ ID NO: 2060566 - RNA, 19 nt, Artificial Sequence
  Description of Artificial Sequence: Synthetic oligonucleotide
ugcuaaggacauagggagg

SEQ ID NO: 2060567 - RNA, 19 nt, Artificial Sequence
  Description of Artificial Sequence: Synthetic oligonucleotide
aaggcguuccagguacucc

SEQ ID NO: 2060568 - RNA, 19 nt, Artificial Sequence
  Description of Artificial Sequence: Synthetic oligonucleotide
aauaaguccauggcuggga

SEQ ID NO: 2060569 - RNA, 19 nt, Artificial Sequence
  Description of Artificial Sequence: Synthetic oligonucleotide
acauagggaggccauagga

SEQ ID NO: 2060570 - RNA, 19 nt, Artificial Sequence
  Description of Artificial Sequence: Synthetic oligonucleotide
cuaggacagcacaaguggg

SEQ ID NO: 2060571 - RNA, 19 nt, Artificial Sequence
  Description of Artificial Sequence: Synthetic oligonucleotide
uucaucgcggggcucggcg

SEQ ID NO: 2060572 - RNA, 19 nt, Artificial Sequence
  Description of Artificial Sequence: Synthetic oligonucleotide
uuuaucagcuuaagccaga

SEQ ID NO: 2060573 - RNA, 19 nt, Artificial Sequence
  Description of Artificial Sequence: Synthetic oligonucleotide
gccuagaccauccuguugg

SEQ ID NO: 2060574 - RNA, 19 nt, Artificial Sequence
  Description of Artificial Sequence: Synthetic oligonucleotide
uagaccauccuguugguua

SEQ ID NO: 2060575 - RNA, 19 nt, Artificial Sequence
  Description of Artificial Sequence: Synthetic oligonucleotide
ugcacaaucuggucauugc

SEQ ID NO: 2060576 - RNA, 19 nt, Artificial Sequence
  Description of Artificial Sequence: Synthetic oligonucleotide
agacugagggagguaaagc

SEQ ID NO: 2060577 - RNA, 19 nt, Artificial Sequence
  Description of Artificial Sequence: Synthetic oligonucleotide
guuagggucagccccauga

SEQ ID NO: 2060578 - RNA, 19 nt, Artificial Sequence
  Description of Artificial Sequence: Synthetic oligonucleotide
uguccaaggcauccacacg

SEQ ID NO: 2060579 - RNA, 19 nt, Artificial Sequence
  Description of Artificial Sequence: Synthetic oligonucleotide
ucugcuaggacagcacaag

SEQ ID NO: 2060580 - RNA, 19 nt, Artificial Sequence
  Description of Artificial Sequence: Synthetic oligonucleotide
gcaggaagcaaaauggagg

SEQ ID NO: 2060581 - RNA, 19 nt, Artificial Sequence
  Description of Artificial Sequence: Synthetic oligonucleotide
cuugucaucuggaggcggg

SEQ ID NO: 2060582 - RNA, 19 nt, Artificial Sequence
  Description of Artificial Sequence: Synthetic oligonucleotide
ugccauugcaggaagcaaa

SEQ ID NO: 2060583 - RNA, 19 nt, Artificial Sequence
  Description of Artificial Sequence: Synthetic oligonucleotide
ugguacuugucaucuggag

SEQ ID NO: 2060584 - RNA, 19 nt, Artificial Sequence
  Description of Artificial Sequence: Synthetic oligonucleotide
cacaagugggccuggaaug

SEQ ID NO: 2060585 - RNA, 19 nt, Artificial Sequence
  Description of Artificial Sequence: Synthetic oligonucleotide
ucuacaucauuggcauugg

SEQ ID NO: 2060586 - RNA, 19 nt, Artificial Sequence
  Description of Artificial Sequence: Synthetic oligonucleotide
gacauagggaggccauagg

SEQ ID NO: 2060587 - RNA, 19 nt, Artificial Sequence
  Description of Artificial Sequence: Synthetic oligonucleotide
ucaucagcugcgcagggau

SEQ ID NO: 2060588 - RNA, 19 nt, Artificial Sequence
  Description of Artificial Sequence: Synthetic oligonucleotide
agcucuguccaaggcaucc

SEQ ID NO: 2060589 - RNA, 19 nt, Artificial Sequence
  Description of Artificial Sequence: Synthetic oligonucleotide
aaagcaagggagagccuuc

SEQ ID NO: 2060590 - RNA, 19 nt, Artificial Sequence
  Description of Artificial Sequence: Synthetic oligonucleotide
uguugguuagggucagccc

SEQ ID NO: 2060591 - RNA, 19 nt, Artificial Sequence
  Description of Artificial Sequence: Synthetic oligonucleotide
augauccaggagaagcugc

SEQ ID NO: 2060592 - RNA, 19 nt, Artificial Sequence
  Description of Artificial Sequence: Synthetic oligonucleotide
ggcauugugcaccaggagc

SEQ ID NO: 2060593 - RNA, 19 nt, Artificial Sequence
  Description of Artificial Sequence: Synthetic oligonucleotide
guacagaggucauccagcc

SEQ ID NO: 2060594 - RNA, 19 nt, Artificial Sequence
  Description of Artificial Sequence: Synthetic oligonucleotide
aacauguggaugaucugcu

SEQ ID NO: 2060595 - RNA, 19 nt, Artificial Sequence
  Description of Artificial Sequence: Synthetic oligonucleotide
agguguaggggcgugcggc

SEQ ID NO: 2060596 - RNA, 19 nt, Artificial Sequence
  Description of Artificial Sequence: Synthetic oligonucleotide
aggugcaaugguguauugc

SEQ ID NO: 2060597 - RNA, 19 nt, Artificial Sequence
  Description of Artificial Sequence: Synthetic oligonucleotide
ggugcugacaaagcaaggg

SEQ ID NO: 2060598 - RNA, 19 nt, Artificial Sequence
  Description of Artificial Sequence: Synthetic oligonucleotide
uccaggagaagcugcacaa

SEQ ID NO: 2060599 - RNA, 19 nt, Artificial Sequence
  Description of Artificial Sequence: Synthetic oligonucleotide
guuucuacaucauuggcau

SEQ ID NO: 2060600 - RNA, 19 nt, Artificial Sequence
  Description of Artificial Sequence: Synthetic oligonucleotide
uggccaagaggucugucac

SEQ ID NO: 2060601 - RNA, 19 nt, Artificial Sequence
  Description of Artificial Sequence: Synthetic oligonucleotide
uucaugccgcccaaggcgu

SEQ ID NO: 2060602 - RNA, 19 nt, Artificial Sequence
  Description of Artificial Sequence: Synthetic oligonucleotide
uccuggcccauagagauga

SEQ ID NO: 2060603 - RNA, 19 nt, Artificial Sequence
  Description of Artificial Sequence: Synthetic oligonucleotide
agguaaagcuggccaagag

SEQ ID NO: 2060604 - RNA, 19 nt, Artificial Sequence
  Description of Artificial Sequence: Synthetic oligonucleotide
ugugcggcccuugucauca

SEQ ID NO: 2060605 - RNA, 19 nt, Artificial Sequence
  Description of Artificial Sequence: Synthetic oligonucleotide
uugguuagggucagcccca

SEQ ID NO: 2060606 - RNA, 19 nt, Artificial Sequence
  Description of Artificial Sequence: Synthetic oligonucleotide
uaggauguucagcuuugac

SEQ ID NO: 2060607 - RNA, 19 nt, Artificial Sequence
  Description of Artificial Sequence: Synthetic oligonucleotide
uccuugcuaccucuucucc

SEQ ID NO: 2060608 - RNA, 19 nt, Artificial Sequence
  Description of Artificial Sequence: Synthetic oligonucleotide
uacucccguaacaugugga

SEQ ID NO: 2060609 - RNA, 19 nt, Artificial Sequence
  Description of Artificial Sequence: Synthetic oligonucleotide
cugggcuuucccuguaccg

SEQ ID NO: 2060610 - RNA, 19 nt, Artificial Sequence
  Description of Artificial Sequence: Synthetic oligonucleotide
ggagguaaugucugcuagg

SEQ ID NO: 2060611 - RNA, 19 nt, Artificial Sequence
  Description of Artificial Sequence: Synthetic oligonucleotide
cuagcggcgcgccucagcc

SEQ ID NO: 2060612 - RNA, 19 nt, Artificial Sequence
  Description of Artificial Sequence: Synthetic oligonucleotide
gaagcaaaauggagggcug

SEQ ID NO: 2060613 - RNA, 19 nt, Artificial Sequence
  Description of Artificial Sequence: Synthetic oligonucleotide
cuguugguuagggucagcc

SEQ ID NO: 2060614 - RNA, 19 nt, Artificial Sequence
  Description of Artificial Sequence: Synthetic oligonucleotide
uaaggacauagggaggcca

SEQ ID NO: 2060615 - RNA, 19 nt, Artificial Sequence
  Description of Artificial Sequence: Synthetic oligonucleotide
uucccuguaccgagagcgg

SEQ ID NO: 2060616 - RNA, 19 nt, Artificial Sequence
  Description of Artificial Sequence: Synthetic oligonucleotide
agggauccgugccaucuuc

SEQ ID NO: 2060617 - RNA, 19 nt, Artificial Sequence
  Description of Artificial Sequence: Synthetic oligonucleotide
ucagccucuucagagcgug

SEQ ID NO: 2060618 - RNA, 19 nt, Artificial Sequence
  Description of Artificial Sequence: Synthetic oligonucleotide
caagguggaacuggagucc

SEQ ID NO: 2060619 - RNA, 19 nt, Artificial Sequence
  Description of Artificial Sequence: Synthetic oligonucleotide
agccagaugaugguaauaa

SEQ ID NO: 2060620 - RNA, 19 nt, Artificial Sequence
  Description of Artificial Sequence: Synthetic oligonucleotide
aggagcuagggcugugguc

SEQ ID NO: 2060621 - RNA, 19 nt, Artificial Sequence
  Description of Artificial Sequence: Synthetic oligonucleotide
uguaccgagagcggagggc

SEQ ID NO: 2060622 - RNA, 19 nt, Artificial Sequence
  Description of Artificial Sequence: Synthetic oligonucleotide
ugacaaagcaagggagagc

SEQ ID NO: 2060623 - RNA, 19 nt, Artificial Sequence
  Description of Artificial Sequence: Synthetic oligonucleotide
caagaggucugucacuuca

SEQ ID NO: 2060624 - RNA, 19 nt, Artificial Sequence
  Description of Artificial Sequence: Synthetic oligonucleotide
ggcagaaucccucagccuc

SEQ ID NO: 2060625 - RNA, 19 nt, Artificial Sequence
  Description of Artificial Sequence: Synthetic oligonucleotide
acgggccccuccucgaagc

SEQ ID NO: 2060626 - RNA, 19 nt, Artificial Sequence
  Description of Artificial Sequence: Synthetic oligonucleotide
uacuugucaucuggaggcg

SEQ ID NO: 2060627 - RNA, 19 nt, Artificial Sequence
  Description of Artificial Sequence: Synthetic oligonucleotide
ugaugguaauaaguccaug

SEQ ID NO: 2060628 - RNA, 19 nt, Artificial Sequence
  Description of Artificial Sequence: Synthetic oligonucleotide
gcuaaggacauagggaggc

SEQ ID NO: 2060629 - RNA, 19 nt, Artificial Sequence
  Description of Artificial Sequence: Synthetic oligonucleotide
cagacugucugggagcagc

SEQ ID NO: 2060630 - RNA, 19 nt, Artificial Sequence
  Description of Artificial Sequence: Synthetic oligonucleotide
gcaucuaagggcaagggca

SEQ ID NO: 2060631 - RNA, 19 nt, Artificial Sequence
  Description of Artificial Sequence: Synthetic oligonucleotide
acugagggagguaaagcug

SEQ ID NO: 2060632 - RNA, 19 nt, Artificial Sequence
  Description of Artificial Sequence: Synthetic oligonucleotide
auaaguccauggcugggaa

SEQ ID NO: 2060633 - RNA, 19 nt, Artificial Sequence
  Description of Artificial Sequence: Synthetic oligonucleotide
uuagggucagccccaugau

SEQ ID NO: 2060634 - RNA, 19 nt, Artificial Sequence
  Description of Artificial Sequence: Synthetic oligonucleotide
uguaggggcgugcggccag

SEQ ID NO: 2060635 - RNA, 19 nt, Artificial Sequence
  Description of Artificial Sequence: Synthetic oligonucleotide
ugccuagaccauccuguug

SEQ ID NO: 2060636 - RNA, 19 nt, Artificial Sequence
  Description of Artificial Sequence: Synthetic oligonucleotide
gguacagaggucauccagc

SEQ ID NO: 2060637 - RNA, 19 nt, Artificial Sequence
  Description of Artificial Sequence: Synthetic oligonucleotide
gugcugacaaagcaaggga

SEQ ID NO: 2060638 - RNA, 19 nt, Artificial Sequence
  Description of Artificial Sequence: Synthetic oligonucleotide
agcgcaguucaucgcgggg

SEQ ID NO: 2060639 - RNA, 19 nt, Artificial Sequence
  Description of Artificial Sequence: Synthetic oligonucleotide
uggcccuccuguaggaugu

SEQ ID NO: 2060640 - RNA, 19 nt, Artificial Sequence
  Description of Artificial Sequence: Synthetic oligonucleotide
gguucugggguugcuaagg

SEQ ID NO: 2060641 - RNA, 19 nt, Artificial Sequence
  Description of Artificial Sequence: Synthetic oligonucleotide
ggguacagaggucauccag

SEQ ID NO: 2060642 - RNA, 19 nt, Artificial Sequence
  Description of Artificial Sequence: Synthetic oligonucleotide
ugcgcagggauccgugcca

SEQ ID NO: 2060643 - RNA, 19 nt, Artificial Sequence
  Description of Artificial Sequence: Synthetic oligonucleotide
gcaagguggaacuggaguc

SEQ ID NO: 2060644 - RNA, 19 nt, Artificial Sequence
  Description of Artificial Sequence: Synthetic oligonucleotide
gaaggaauauaggguucug

SEQ ID NO: 2060645 - RNA, 19 nt, Artificial Sequence
  Description of Artificial Sequence: Synthetic oligonucleotide
gacaggcacaugauuggug

SEQ ID NO: 2060646 - RNA, 19 nt, Artificial Sequence
  Description of Artificial Sequence: Synthetic oligonucleotide
gaggcggguacagagguca

SEQ ID NO: 2060647 - RNA, 19 nt, Artificial Sequence
  Description of Artificial Sequence: Synthetic oligonucleotide
aggcacaugauuggugcag

SEQ ID NO: 2060648 - RNA, 19 nt, Artificial Sequence
  Description of Artificial Sequence: Synthetic oligonucleotide
uucagagcgugcaccuccu

SEQ ID NO: 2060649 - RNA, 19 nt, Artificial Sequence
  Description of Artificial Sequence: Synthetic oligonucleotide
ugcagacugucugggagca

SEQ ID NO: 2060650 - RNA, 19 nt, Artificial Sequence
  Description of Artificial Sequence: Synthetic oligonucleotide
caguucaucgcggggcucg

SEQ ID NO: 2060651 - RNA, 19 nt, Artificial Sequence
  Description of Artificial Sequence: Synthetic oligonucleotide
ggauguucagcuuugacuu

SEQ ID NO: 2060652 - RNA, 19 nt, Artificial Sequence
  Description of Artificial Sequence: Synthetic oligonucleotide
cuacaucauuggcauuggc

SEQ ID NO: 2060653 - RNA, 19 nt, Artificial Sequence
  Description of Artificial Sequence: Synthetic oligonucleotide
cagcuuaagccagaugaug

SEQ ID NO: 2060654 - RNA, 19 nt, Artificial Sequence
  Description of Artificial Sequence: Synthetic oligonucleotide
cccaugauccaggagaagc

SEQ ID NO: 2060655 - RNA, 19 nt, Artificial Sequence
  Description of Artificial Sequence: Synthetic oligonucleotide
uuaucagcuuaagccagau

SEQ ID NO: 2060656 - RNA, 19 nt, Artificial Sequence
  Description of Artificial Sequence: Synthetic oligonucleotide
cauuggcagaaucccucag

SEQ ID NO: 2060657 - RNA, 19 nt, Artificial Sequence
  Description of Artificial Sequence: Synthetic oligonucleotide
aggguucugggguugcuaa

SEQ ID NO: 2060658 - RNA, 19 nt, Artificial Sequence
  Description of Artificial Sequence: Synthetic oligonucleotide
ggaccugccagguagcgca

SEQ ID NO: 2060659 - RNA, 19 nt, Artificial Sequence
  Description of Artificial Sequence: Synthetic oligonucleotide
aggaccugccagguagcgc

SEQ ID NO: 2060660 - RNA, 19 nt, Artificial Sequence
  Description of Artificial Sequence: Synthetic oligonucleotide
ucaucuggaggcggguaca

SEQ ID NO: 2060661 - RNA, 19 nt, Artificial Sequence
  Description of Artificial Sequence: Synthetic oligonucleotide
cagagcgugcaccuccuug

SEQ ID NO: 2060662 - RNA, 19 nt, Artificial Sequence
  Description of Artificial Sequence: Synthetic oligonucleotide
ugacaggcacaugauuggu

SEQ ID NO: 2060663 - RNA, 19 nt, Artificial Sequence
  Description of Artificial Sequence: Synthetic oligonucleotide
cuaaggacauagggaggcc

SEQ ID NO: 2060664 - RNA, 19 nt, Artificial Sequence
  Description of Artificial Sequence: Synthetic oligonucleotide
cagcaucuaagggcaaggg

SEQ ID NO: 2060665 - RNA, 19 nt, Artificial Sequence
  Description of Artificial Sequence: Synthetic oligonucleotide
uccucgaagcaguguggug

SEQ ID NO: 2060666 - RNA, 19 nt, Artificial Sequence
  Description of Artificial Sequence: Synthetic oligonucleotide
aaggacauagggaggccau

SEQ ID NO: 2060667 - RNA, 19 nt, Artificial Sequence
  Description of Artificial Sequence: Synthetic oligonucleotide
cuggccaagaggucuguca

SEQ ID NO: 2060668 - RNA, 19 nt, Artificial Sequence
  Description of Artificial Sequence: Synthetic oligonucleotide
cagguacucccguaacaug

SEQ ID NO: 2060669 - RNA, 19 nt, Artificial Sequence
  Description of Artificial Sequence: Synthetic oligonucleotide
auauaggguucugggguug

SEQ ID NO: 2060670 - RNA, 19 nt, Artificial Sequence
  Description of Artificial Sequence: Synthetic oligonucleotide
acaggaccugccagguagc

SEQ ID NO: 2060671 - RNA, 19 nt, Artificial Sequence
  Description of Artificial Sequence: Synthetic oligonucleotide
caucuaagggcaagggcaa

SEQ ID NO: 2060672 - RNA, 19 nt, Artificial Sequence
  Description of Artificial Sequence: Synthetic oligonucleotide
cuguaccgagagcggaggg

SEQ ID NO: 2060673 - RNA, 19 nt, Artificial Sequence
  Description of Artificial Sequence: Synthetic oligonucleotide
ugugguccuggcccauaga

SEQ ID NO: 2060674 - RNA, 19 nt, Artificial Sequence
  Description of Artificial Sequence: Synthetic oligonucleotide
gggaauggcccuccuguag

SEQ ID NO: 2060675 - RNA, 19 nt, Artificial Sequence
  Description of Artificial Sequence: Synthetic oligonucleotide
gcuacagaggcuggcauug

SEQ ID NO: 2060676 - RNA, 19 nt, Artificial Sequence
  Description of Artificial Sequence: Synthetic oligonucleotide
uggcagaaucccucagccu

SEQ ID NO: 2060677 - RNA, 19 nt, Artificial Sequence
  Description of Artificial Sequence: Synthetic oligonucleotide
uguggaugaucugcuucac

SEQ ID NO: 2060678 - RNA, 19 nt, Artificial Sequence
  Description of Artificial Sequence: Synthetic oligonucleotide
gagggagguaaagcuggcc

SEQ ID NO: 2060679 - RNA, 19 nt, Artificial Sequence
  Description of Artificial Sequence: Synthetic oligonucleotide
ggagggugcugacaaagca

SEQ ID NO: 2060680 - RNA, 19 nt, Artificial Sequence
  Description of Artificial Sequence: Synthetic oligonucleotide
gagagccuuccuugcuacc

SEQ ID NO: 2060681 - RNA, 19 nt, Artificial Sequence
  Description of Artificial Sequence: Synthetic oligonucleotide
agaaucccucagccucuuc

SEQ ID NO: 2060682 - RNA, 19 nt, Artificial Sequence
  Description of Artificial Sequence: Synthetic oligonucleotide
ggcccuugucaucagcugc

SEQ ID NO: 2060683 - RNA, 19 nt, Artificial Sequence
  Description of Artificial Sequence: Synthetic oligonucleotide
uugcagcgcaguucaucgc

SEQ ID NO: 2060684 - RNA, 19 nt, Artificial Sequence
  Description of Artificial Sequence: Synthetic oligonucleotide
gagcgugcaccuccuugcc

SEQ ID NO: 2060685 - RNA, 19 nt, Artificial Sequence
  Description of Artificial Sequence: Synthetic oligonucleotide
cugcgcagggauccgugcc

SEQ ID NO: 2060686 - RNA, 19 nt, Artificial Sequence
  Description of Artificial Sequence: Synthetic oligonucleotide
guuccagguacucccguaa

SEQ ID NO: 2060687 - RNA, 19 nt, Artificial Sequence
  Description of Artificial Sequence: Synthetic oligonucleotide
gcgugcaccuccuugccag

SEQ ID NO: 2060688 - RNA, 19 nt, Artificial Sequence
  Description of Artificial Sequence: Synthetic oligonucleotide
uugccauugcaggaagcaa

SEQ ID NO: 2060689 - RNA, 19 nt, Artificial Sequence
  Description of Artificial Sequence: Synthetic oligonucleotide
guaccgagagcggagggca

SEQ ID NO: 2060690 - RNA, 19 nt, Artificial Sequence
  Description of Artificial Sequence: Synthetic oligonucleotide
gcggguacagaggucaucc

SEQ ID NO: 2060691 - RNA, 19 nt, Artificial Sequence
  Description of Artificial Sequence: Synthetic oligonucleotide
cagcgcaguucaucgcggg

SEQ ID NO: 2060692 - RNA, 19 nt, Artificial Sequence
  Description of Artificial Sequence: Synthetic oligonucleotide
ccauagagaugaugcagac

SEQ ID NO: 2060693 - RNA, 19 nt, Artificial Sequence
  Description of Artificial Sequence: Synthetic oligonucleotide
cucccguaacauguggaug

SEQ ID NO: 2060694 - RNA, 19 nt, Artificial Sequence
  Description of Artificial Sequence: Synthetic oligonucleotide
gcaaaauggagggcugugc

SEQ ID NO: 2060695 - RNA, 19 nt, Artificial Sequence
  Description of Artificial Sequence: Synthetic oligonucleotide
gcuuucccuguaccgagag

SEQ ID NO: 2060696 - RNA, 19 nt, Artificial Sequence
  Description of Artificial Sequence: Synthetic oligonucleotide
ucccuguaccgagagcgga

SEQ ID NO: 2060697 - RNA, 19 nt, Artificial Sequence
  Description of Artificial Sequence: Synthetic oligonucleotide
ugcggcccuugucaucagc

SEQ ID NO: 2060698 - RNA, 19 nt, Artificial Sequence
  Description of Artificial Sequence: Synthetic oligonucleotide
cugcgguggggccuagcgg

SEQ ID NO: 2060699 - RNA, 19 nt, Artificial Sequence
  Description of Artificial Sequence: Synthetic oligonucleotide
aggccauaggaggagguaa

SEQ ID NO: 2060700 - RNA, 19 nt, Artificial Sequence
  Description of Artificial Sequence: Synthetic oligonucleotide
guguauugccuagaccauc

SEQ ID NO: 2060701 - RNA, 19 nt, Artificial Sequence
  Description of Artificial Sequence: Synthetic oligonucleotide
ggagagccuuccuugcuac

SEQ ID NO: 2060702 - RNA, 19 nt, Artificial Sequence
  Description of Artificial Sequence: Synthetic oligonucleotide
ucaucgcggggcucggcgu

SEQ ID NO: 2060703 - RNA, 19 nt, Artificial Sequence
  Description of Artificial Sequence: Synthetic oligonucleotide
cguaacauguggaugaucu

SEQ ID NO: 2060704 - RNA, 19 nt, Artificial Sequence
  Description of Artificial Sequence: Synthetic oligonucleotide
uugccuagaccauccuguu

SEQ ID NO: 2060705 - RNA, 19 nt, Artificial Sequence
  Description of Artificial Sequence: Synthetic oligonucleotide
uccaagcacugggaauggc

SEQ ID NO: 2060706 - RNA, 19 nt, Artificial Sequence
  Description of Artificial Sequence: Synthetic oligonucleotide
aucuaagggcaagggcaag

SEQ ID NO: 2060707 - RNA, 19 nt, Artificial Sequence
  Description of Artificial Sequence: Synthetic oligonucleotide
cuuaagccagaugauggua

SEQ ID NO: 2060708 - RNA, 19 nt, Artificial Sequence
  Description of Artificial Sequence: Synthetic oligonucleotide
cccauagagaugaugcaga

SEQ ID NO: 2060709 - RNA, 19 nt, Artificial Sequence
  Description of Artificial Sequence: Synthetic oligonucleotide
cuugcuaccucuucuccau

SEQ ID NO: 2060710 - RNA, 19 nt, Artificial Sequence
  Description of Artificial Sequence: Synthetic oligonucleotide
cacaugauuggugcaggca

SEQ ID NO: 2060711 - RNA, 19 nt, Artificial Sequence
  Description of Artificial Sequence: Synthetic oligonucleotide
cucggcguccugcugccac

SEQ ID NO: 2060712 - RNA, 19 nt, Artificial Sequence
  Description of Artificial Sequence: Synthetic oligonucleotide
ggcugugcggcccuuguca

SEQ ID NO: 2060713 - RNA, 19 nt, Artificial Sequence
  Description of Artificial Sequence: Synthetic oligonucleotide
ggcaagguggaacuggagu

SEQ ID NO: 2060714 - RNA, 19 nt, Artificial Sequence
  Description of Artificial Sequence: Synthetic oligonucleotide
agcuuugacuuggccaggu

SEQ ID NO: 2060715 - RNA, 19 nt, Artificial Sequence
  Description of Artificial Sequence: Synthetic oligonucleotide
aguucaucgcggggcucgg

SEQ ID NO: 2060716 - RNA, 19 nt, Artificial Sequence
  Description of Artificial Sequence: Synthetic oligonucleotide
gcugacaaagcaagggaga

SEQ ID NO: 2060717 - RNA, 19 nt, Artificial Sequence
  Description of Artificial Sequence: Synthetic oligonucleotide
gcccuugucaucagcugcg

SEQ ID NO: 2060718 - RNA, 19 nt, Artificial Sequence
  Description of Artificial Sequence: Synthetic oligonucleotide
uagcggcgcgccucagccg

SEQ ID NO: 2060719 - RNA, 19 nt, Artificial Sequence
  Description of Artificial Sequence: Synthetic oligonucleotide
agcgugcaccuccuugcca

SEQ ID NO: 2060720 - RNA, 19 nt, Artificial Sequence
  Description of Artificial Sequence: Synthetic oligonucleotide
cuggcccauagagaugaug

SEQ ID NO: 2060721 - RNA, 19 nt, Artificial Sequence
  Description of Artificial Sequence: Synthetic oligonucleotide
auggcugggaaggaauaua

SEQ ID NO: 2060722 - RNA, 19 nt, Artificial Sequence
  Description of Artificial Sequence: Synthetic oligonucleotide
ggaucuugcagcgcaguuc

SEQ ID NO: 2060723 - RNA, 19 nt, Artificial Sequence
  Description of Artificial Sequence: Synthetic oligonucleotide
gguguaggggcgugcggcc

SEQ ID NO: 2060724 - RNA, 19 nt, Artificial Sequence
  Description of Artificial Sequence: Synthetic oligonucleotide
ggcaagggcaagguggaac

SEQ ID NO: 2060725 - RNA, 19 nt, Artificial Sequence
  Description of Artificial Sequence: Synthetic oligonucleotide
ccggcggggaucuugcagc

SEQ ID NO: 2060726 - RNA, 19 nt, Artificial Sequence
  Description of Artificial Sequence: Synthetic oligonucleotide
ccugcgguggggccuagcg

SEQ ID NO: 2060727 - RNA, 19 nt, Artificial Sequence
  Description of Artificial Sequence: Synthetic oligonucleotide
caggaccugccagguagcg

SEQ ID NO: 2060728 - RNA, 19 nt, Artificial Sequence
  Description of Artificial Sequence: Synthetic oligonucleotide
auccaccugcucuuuggua

SEQ ID NO: 2060729 - RNA, 19 nt, Artificial Sequence
  Description of Artificial Sequence: Synthetic oligonucleotide
ucggcguccugcugccaca

SEQ ID NO: 2060730 - RNA, 19 nt, Artificial Sequence
  Description of Artificial Sequence: Synthetic oligonucleotide
gcacaugauuggugcaggc

SEQ ID NO: 2060731 - RNA, 19 nt, Artificial Sequence
  Description of Artificial Sequence: Synthetic oligonucleotide
gguacucccguaacaugug

SEQ ID NO: 2060732 - RNA, 19 nt, Artificial Sequence
  Description of Artificial Sequence: Synthetic oligonucleotide
ccuccucgaagcagugugg

SEQ ID NO: 2060733 - RNA, 19 nt, Artificial Sequence
  Description of Artificial Sequence: Synthetic oligonucleotide
cugccagguagcgcagcgg

SEQ ID NO: 2060734 - RNA, 19 nt, Artificial Sequence
  Description of Artificial Sequence: Synthetic oligonucleotide
gcauuggcagaaucccuca

SEQ ID NO: 2060735 - RNA, 19 nt, Artificial Sequence
  Description of Artificial Sequence: Synthetic oligonucleotide
guggcuacagaggcuggca

SEQ ID NO: 2060736 - RNA, 19 nt, Artificial Sequence
  Description of Artificial Sequence: Synthetic oligonucleotide
ggguucugggguugcuaag

SEQ ID NO: 2060737 - RNA, 19 nt, Artificial Sequence
  Description of Artificial Sequence: Synthetic oligonucleotide
gcuagggcugugguccugg

SEQ ID NO: 2060738 - RNA, 19 nt, Artificial Sequence
  Description of Artificial Sequence: Synthetic oligonucleotide
ggauccgugccaucuucca

SEQ ID NO: 2060739 - RNA, 19 nt, Artificial Sequence
  Description of Artificial Sequence: Synthetic oligonucleotide
aggggcgugcggccagcuc

SEQ ID NO: 2060740 - RNA, 19 nt, Artificial Sequence
  Description of Artificial Sequence: Synthetic oligonucleotide
cagguagcgcagcggggac

SEQ ID NO: 2060741 - RNA, 19 nt, Artificial Sequence
  Description of Artificial Sequence: Synthetic oligonucleotide
ggaaggaauauaggguucu

SEQ ID NO: 2060742 - RNA, 19 nt, Artificial Sequence
  Description of Artificial Sequence: Synthetic oligonucleotide
ucagccgcccggcggggau

SEQ ID NO: 2060743 - RNA, 19 nt, Artificial Sequence
  Description of Artificial Sequence: Synthetic oligonucleotide
cagcuuugacuuggccagg

SEQ ID NO: 2060744 - RNA, 19 nt, Artificial Sequence
  Description of Artificial Sequence: Synthetic oligonucleotide
auaggguucugggguugcu

SEQ ID NO: 2060745 - RNA, 19 nt, Artificial Sequence
  Description of Artificial Sequence: Synthetic oligonucleotide
ccuguaccgagagcggagg

SEQ ID NO: 2060746 - RNA, 19 nt, Artificial Sequence
  Description of Artificial Sequence: Synthetic oligonucleotide
gcauugugcaccaggagcu

SEQ ID NO: 2060747 - RNA, 19 nt, Artificial Sequence
  Description of Artificial Sequence: Synthetic oligonucleotide
ucgaagcaguguggugaug

SEQ ID NO: 2060748 - RNA, 19 nt, Artificial Sequence
  Description of Artificial Sequence: Synthetic oligonucleotide
gguggggccuagcggcgcg

SEQ ID NO: 2060749 - RNA, 19 nt, Artificial Sequence
  Description of Artificial Sequence: Synthetic oligonucleotide
caaagcaagggagagccuu

SEQ ID NO: 2060750 - RNA, 19 nt, Artificial Sequence
  Description of Artificial Sequence: Synthetic oligonucleotide
ucccgcuguucaugccgcc

SEQ ID NO: 2060751 - RNA, 19 nt, Artificial Sequence
  Description of Artificial Sequence: Synthetic oligonucleotide
gcuuaagccagaugauggu

SEQ ID NO: 2060752 - RNA, 19 nt, Artificial Sequence
  Description of Artificial Sequence: Synthetic oligonucleotide
gcgcaguucaucgcggggc

SEQ ID NO: 2060753 - RNA, 19 nt, Artificial Sequence
  Description of Artificial Sequence: Synthetic oligonucleotide
ccgcccaaggcguuccagg

SEQ ID NO: 2060754 - RNA, 19 nt, Artificial Sequence
  Description of Artificial Sequence: Synthetic oligonucleotide
cagccucuucagagcgugc

SEQ ID NO: 2060755 - RNA, 19 nt, Artificial Sequence
  Description of Artificial Sequence: Synthetic oligonucleotide
cacgggccccuccucgaag

SEQ ID NO: 2060756 - RNA, 19 nt, Artificial Sequence
  Description of Artificial Sequence: Synthetic oligonucleotide
cccuguaccgagagcggag

SEQ ID NO: 2060757 - RNA, 19 nt, Artificial Sequence
  Description of Artificial Sequence: Synthetic oligonucleotide
ccaaggcauccacacgggc

SEQ ID NO: 2060758 - RNA, 19 nt, Artificial Sequence
  Description of Artificial Sequence: Synthetic oligonucleotide
cauagagaugaugcagacu

SEQ ID NO: 2060759 - RNA, 19 nt, Artificial Sequence
  Description of Artificial Sequence: Synthetic oligonucleotide
gcguccugcugccacagga

SEQ ID NO: 2060760 - RNA, 19 nt, Artificial Sequence
  Description of Artificial Sequence: Synthetic oligonucleotide
ggguugcuaaggacauagg

SEQ ID NO: 2060761 - RNA, 19 nt, Artificial Sequence
  Description of Artificial Sequence: Synthetic oligonucleotide
gaggccauaggaggaggua

SEQ ID NO: 2060762 - RNA, 19 nt, Artificial Sequence
  Description of Artificial Sequence: Synthetic oligonucleotide
ccggacagccuccaagcac

SEQ ID NO: 2060763 - RNA, 19 nt, Artificial Sequence
  Description of Artificial Sequence: Synthetic oligonucleotide
ccagguguaggggcgugcg

SEQ ID NO: 2060764 - RNA, 19 nt, Artificial Sequence
  Description of Artificial Sequence: Synthetic oligonucleotide
gcagcgcaguucaucgcgg

SEQ ID NO: 2060765 - RNA, 19 nt, Artificial Sequence
  Description of Artificial Sequence: Synthetic oligonucleotide
caucgcggggcucggcguc

SEQ ID NO: 2060766 - RNA, 19 nt, Artificial Sequence
  Description of Artificial Sequence: Synthetic oligonucleotide
cuaagggcaagggcaaggu

SEQ ID NO: 2060767 - RNA, 19 nt, Artificial Sequence
  Description of Artificial Sequence: Synthetic oligonucleotide
agcggggacugggcccugc

SEQ ID NO: 2060768 - RNA, 19 nt, Artificial Sequence
  Description of Artificial Sequence: Synthetic oligonucleotide
ccuugcuaccucuucucca

SEQ ID NO: 2060769 - RNA, 19 nt, Artificial Sequence
  Description of Artificial Sequence: Synthetic oligonucleotide
cuucaccuccagccggaca

SEQ ID NO: 2060770 - RNA, 19 nt, Artificial Sequence
  Description of Artificial Sequence: Synthetic oligonucleotide
gaccugccagguagcgcag

SEQ ID NO: 2060771 - RNA, 19 nt, Artificial Sequence
  Description of Artificial Sequence: Synthetic oligonucleotide
cugugcggcccuugucauc

SEQ ID NO: 2060772 - RNA, 19 nt, Artificial Sequence
  Description of Artificial Sequence: Synthetic oligonucleotide
gggauccgugccaucuucc

SEQ ID NO: 2060773 - RNA, 19 nt, Artificial Sequence
  Description of Artificial Sequence: Synthetic oligonucleotide
ccguucccgcuguucaugc

SEQ ID NO: 2060774 - RNA, 19 nt, Artificial Sequence
  Description of Artificial Sequence: Synthetic oligonucleotide
ccuggaauguggcuacaga

SEQ ID NO: 2060775 - RNA, 19 nt, Artificial Sequence
  Description of Artificial Sequence: Synthetic oligonucleotide
ucaugccgcccaaggcguu

SEQ ID NO: 2060776 - RNA, 19 nt, Artificial Sequence
  Description of Artificial Sequence: Synthetic oligonucleotide
caugccgcccaaggcguuc

SEQ ID NO: 2060777 - RNA, 19 nt, Artificial Sequence
  Description of Artificial Sequence: Synthetic oligonucleotide
gcucuuugguacuugucau

SEQ ID NO: 2060778 - RNA, 19 nt, Artificial Sequence
  Description of Artificial Sequence: Synthetic oligonucleotide
guauugccuagaccauccu

SEQ ID NO: 2060779 - RNA, 19 nt, Artificial Sequence
  Description of Artificial Sequence: Synthetic oligonucleotide
cugcuaggacagcacaagu

SEQ ID NO: 2060780 - RNA, 19 nt, Artificial Sequence
  Description of Artificial Sequence: Synthetic oligonucleotide
ggucagccccaugauccag

SEQ ID NO: 2060781 - RNA, 19 nt, Artificial Sequence
  Description of Artificial Sequence: Synthetic oligonucleotide
gugcaaugguguauugccu

SEQ ID NO: 2060782 - RNA, 19 nt, Artificial Sequence
  Description of Artificial Sequence: Synthetic oligonucleotide
aggacauagggaggccaua

SEQ ID NO: 2060783 - RNA, 19 nt, Artificial Sequence
  Description of Artificial Sequence: Synthetic oligonucleotide
uggggccuagcggcgcgcc

SEQ ID NO: 2060784 - RNA, 19 nt, Artificial Sequence
  Description of Artificial Sequence: Synthetic oligonucleotide
acacgggccccuccucgaa

SEQ ID NO: 2060785 - RNA, 19 nt, Artificial Sequence
  Description of Artificial Sequence: Synthetic oligonucleotide
cgaagcaguguggugauga

SEQ ID NO: 2060786 - RNA, 19 nt, Artificial Sequence
  Description of Artificial Sequence: Synthetic oligonucleotide
ugccgcccaaggcguucca

SEQ ID NO: 2060787 - RNA, 19 nt, Artificial Sequence
  Description of Artificial Sequence: Synthetic oligonucleotide
ccaugauccaggagaagcu

SEQ ID NO: 2060788 - RNA, 19 nt, Artificial Sequence
  Description of Artificial Sequence: Synthetic oligonucleotide
ugguuagggucagccccau

SEQ ID NO: 2060789 - RNA, 19 nt, Artificial Sequence
  Description of Artificial Sequence: Synthetic oligonucleotide
ugggagcagcucugcccuc

SEQ ID NO: 2060790 - RNA, 19 nt, Artificial Sequence
  Description of Artificial Sequence: Synthetic oligonucleotide
ugggguugcuaaggacaua

SEQ ID NO: 2060791 - RNA, 19 nt, Artificial Sequence
  Description of Artificial Sequence: Synthetic oligonucleotide
guucaucgcggggcucggc

SEQ ID NO: 2060792 - RNA, 19 nt, Artificial Sequence
  Description of Artificial Sequence: Synthetic oligonucleotide
ggggcgugcggccagcucu

SEQ ID NO: 2060793 - RNA, 19 nt, Artificial Sequence
  Description of Artificial Sequence: Synthetic oligonucleotide
cccggcggggaucuugcag

SEQ ID NO: 2060794 - RNA, 19 nt, Artificial Sequence
  Description of Artificial Sequence: Synthetic oligonucleotide
agcuagggcugugguccug

SEQ ID NO: 2060795 - RNA, 19 nt, Artificial Sequence
  Description of Artificial Sequence: Synthetic oligonucleotide
gccguucccgcuguucaug

SEQ ID NO: 2060796 - RNA, 19 nt, Artificial Sequence
  Description of Artificial Sequence: Synthetic oligonucleotide
gugggcccgagccugcggu

SEQ ID NO: 2060797 - RNA, 19 nt, Artificial Sequence
  Description of Artificial Sequence: Synthetic oligonucleotide
agcuggccaagaggucugu

SEQ ID NO: 2060798 - RNA, 19 nt, Artificial Sequence
  Description of Artificial Sequence: Synthetic oligonucleotide
ccuagcggcgcgccucagc

SEQ ID NO: 2060799 - RNA, 19 nt, Artificial Sequence
  Description of Artificial Sequence: Synthetic oligonucleotide
gcagggauccgugccaucu

SEQ ID NO: 2060800 - RNA, 19 nt, Artificial Sequence
  Description of Artificial Sequence: Synthetic oligonucleotide
cauugugcaccaggagcua

SEQ ID NO: 2060801 - RNA, 19 nt, Artificial Sequence
  Description of Artificial Sequence: Synthetic oligonucleotide
cuccucgaagcaguguggu

SEQ ID NO: 2060802 - RNA, 19 nt, Artificial Sequence
  Description of Artificial Sequence: Synthetic oligonucleotide
caggagcuagggcuguggu

SEQ ID NO: 2060803 - RNA, 19 nt, Artificial Sequence
  Description of Artificial Sequence: Synthetic oligonucleotide
cauggcugggaaggaauau

SEQ ID NO: 2060804 - RNA, 19 nt, Artificial Sequence
  Description of Artificial Sequence: Synthetic oligonucleotide
gugcggcccuugucaucag

SEQ ID NO: 2060805 - RNA, 19 nt, Artificial Sequence
  Description of Artificial Sequence: Synthetic oligonucleotide
gccggacagccuccaagca

SEQ ID NO: 2060806 - RNA, 19 nt, Artificial Sequence
  Description of Artificial Sequence: Synthetic oligonucleotide
cccgcuguucaugccgccc

SEQ ID NO: 2060807 - RNA, 19 nt, Artificial Sequence
  Description of Artificial Sequence: Synthetic oligonucleotide
uccagccguucccgcuguu

SEQ ID NO: 2060808 - RNA, 19 nt, Artificial Sequence
  Description of Artificial Sequence: Synthetic oligonucleotide
cucugcccucagcaucuaa

SEQ ID NO: 2060809 - RNA, 19 nt, Artificial Sequence
  Description of Artificial Sequence: Synthetic oligonucleotide
ggccaagaggucugucacu

SEQ ID NO: 2060810 - RNA, 19 nt, Artificial Sequence
  Description of Artificial Sequence: Synthetic oligonucleotide
cggcggggaucuugcagcg

SEQ ID NO: 2060811 - RNA, 19 nt, Artificial Sequence
  Description of Artificial Sequence: Synthetic oligonucleotide
gccccaugauccaggagaa

SEQ ID NO: 2060812 - RNA, 19 nt, Artificial Sequence
  Description of Artificial Sequence: Synthetic oligonucleotide
cggacagccuccaagcacu

SEQ ID NO: 2060813 - RNA, 19 nt, Artificial Sequence
  Description of Artificial Sequence: Synthetic oligonucleotide
ggcuacagaggcuggcauu

SEQ ID NO: 2060814 - RNA, 19 nt, Artificial Sequence
  Description of Artificial Sequence: Synthetic oligonucleotide
ggcggguacagaggucauc

SEQ ID NO: 2060815 - RNA, 19 nt, Artificial Sequence
  Description of Artificial Sequence: Synthetic oligonucleotide
gcggggacugggcccugcc

SEQ ID NO: 2060816 - RNA, 19 nt, Artificial Sequence
  Description of Artificial Sequence: Synthetic oligonucleotide
guggggccuagcggcgcgc

SEQ ID NO: 2060817 - RNA, 19 nt, Artificial Sequence
  Description of Artificial Sequence: Synthetic oligonucleotide
ccguaacauguggaugauc

SEQ ID NO: 2060818 - RNA, 19 nt, Artificial Sequence
  Description of Artificial Sequence: Synthetic oligonucleotide
gcagacugucugggagcag

SEQ ID NO: 2060819 - RNA, 19 nt, Artificial Sequence
  Description of Artificial Sequence: Synthetic oligonucleotide
gcagacugagggagguaaa

SEQ ID NO: 2060820 - RNA, 19 nt, Artificial Sequence
  Description of Artificial Sequence: Synthetic oligonucleotide
gggaucuugcagcgcaguu

SEQ ID NO: 2060821 - RNA, 19 nt, Artificial Sequence
  Description of Artificial Sequence: Synthetic oligonucleotide
cggcccuugucaucagcug

SEQ ID NO: 2060822 - RNA, 19 nt, Artificial Sequence
  Description of Artificial Sequence: Synthetic oligonucleotide
gccgcccaaggcguuccag

SEQ ID NO: 2060823 - RNA, 19 nt, Artificial Sequence
  Description of Artificial Sequence: Synthetic oligonucleotide
ggcgcgccucagccgcccg

SEQ ID NO: 2060824 - RNA, 19 nt, Artificial Sequence
  Description of Artificial Sequence: Synthetic oligonucleotide
gggcugugcggcccuuguc

SEQ ID NO: 2060825 - RNA, 19 nt, Artificial Sequence
  Description of Artificial Sequence: Synthetic oligonucleotide
gggccuagcggcgcgccuc

SEQ ID NO: 2060826 - RNA, 19 nt, Artificial Sequence
  Description of Artificial Sequence: Synthetic oligonucleotide
gggcgugcggccagcucug

SEQ ID NO: 2060827 - RNA, 19 nt, Artificial Sequence
  Description of Artificial Sequence: Synthetic oligonucleotide
ggccuagcggcgcgccuca

SEQ ID NO: 2060828 - RNA, 19 nt, Artificial Sequence
  Description of Artificial Sequence: Synthetic oligonucleotide
ggcggggaucuugcagcgc

SEQ ID NO: 2060829 - RNA, 19 nt, Artificial Sequence
  Description of Artificial Sequence: Synthetic oligonucleotide
gagccugcgguggggccua

SEQ ID NO: 2060830 - RNA, 19 nt, Artificial Sequence
  Description of Artificial Sequence: Synthetic oligonucleotide
cuagaccauccuguugguu

SEQ ID NO: 2060831 - RNA, 19 nt, Artificial Sequence
  Description of Artificial Sequence: Synthetic oligonucleotide
gcgccucagccgcccggcg

SEQ ID NO: 2060832 - RNA, 19 nt, Artificial Sequence
  Description of Artificial Sequence: Synthetic oligonucleotide
ggccauaggaggagguaau

SEQ ID NO: 2060833 - RNA, 19 nt, Artificial Sequence
  Description of Artificial Sequence: Synthetic oligonucleotide
aggcggguacagaggucau

SEQ ID NO: 2060834 - RNA, 19 nt, Artificial Sequence
  Description of Artificial Sequence: Synthetic oligonucleotide
gcggcccuugucaucagcu

SEQ ID NO: 2060835 - RNA, 19 nt, Artificial Sequence
  Description of Artificial Sequence: Synthetic oligonucleotide
gcccaaggcguuccaggua

SEQ ID NO: 2060836 - RNA, 19 nt, Artificial Sequence
  Description of Artificial Sequence: Synthetic oligonucleotide
cgcccggcggggaucuugc

SEQ ID NO: 2060837 - RNA, 19 nt, Artificial Sequence
  Description of Artificial Sequence: Synthetic oligonucleotide
gcaguucaucgcggggcuc

SEQ ID NO: 2060838 - RNA, 19 nt, Artificial Sequence
  Description of Artificial Sequence: Synthetic oligonucleotide
ggggaucuugcagcgcagu

SEQ ID NO: 2060839 - RNA, 19 nt, Artificial Sequence
  Description of Artificial Sequence: Synthetic oligonucleotide
ccaccugcucuuugguacu

SEQ ID NO: 2060840 - RNA, 19 nt, Artificial Sequence
  Description of Artificial Sequence: Synthetic oligonucleotide
gcgugcggccagcucuguc

SEQ ID NO: 2060841 - RNA, 19 nt, Artificial Sequence
  Description of Artificial Sequence: Synthetic oligonucleotide
ccuagaccauccuguuggu

SEQ ID NO: 2060842 - RNA, 19 nt, Artificial Sequence
  Description of Artificial Sequence: Synthetic oligonucleotide
ccgugccaucuuccagcag

SEQ ID NO: 2060843 - RNA, 19 nt, Artificial Sequence
  Description of Artificial Sequence: Synthetic oligonucleotide
cagggauccgugccaucuu

SEQ ID NO: 2060844 - RNA, 19 nt, Artificial Sequence
  Description of Artificial Sequence: Synthetic oligonucleotide
cguuccagguacucccgua

SEQ ID NO: 2060845 - RNA, 19 nt, Artificial Sequence
  Description of Artificial Sequence: Synthetic oligonucleotide
cagccgcccggcggggauc

SEQ ID NO: 2060846 - RNA, 19 nt, Artificial Sequence
  Description of Artificial Sequence: Synthetic oligonucleotide
cggguacagaggucaucca

SEQ ID NO: 2060847 - RNA, 19 nt, Artificial Sequence
  Description of Artificial Sequence: Synthetic oligonucleotide
ggccuggaauguggcuaca

SEQ ID NO: 2060848 - RNA, 19 nt, Artificial Sequence
  Description of Artificial Sequence: Synthetic oligonucleotide
ccucagcaucuaagggcaa

SEQ ID NO: 2060849 - RNA, 19 nt, Artificial Sequence
  Description of Artificial Sequence: Synthetic oligonucleotide
gcaggcagccaggugcaau

SEQ ID NO: 2060850 - RNA, 19 nt, Artificial Sequence
  Description of Artificial Sequence: Synthetic oligonucleotide
agccugcgguggggccuag

SEQ ID NO: 2060851 - RNA, 19 nt, Artificial Sequence
  Description of Artificial Sequence: Synthetic oligonucleotide
cagaaucccucagccucuu

SEQ ID NO: 2060852 - RNA, 19 nt, Artificial Sequence
  Description of Artificial Sequence: Synthetic oligonucleotide
cagcagcugcugcacuguu

SEQ ID NO: 2060853 - RNA, 19 nt, Artificial Sequence
  Description of Artificial Sequence: Synthetic oligonucleotide
ccgcccggcggggaucuug

SEQ ID NO: 2060854 - RNA, 19 nt, Artificial Sequence
  Description of Artificial Sequence: Synthetic oligonucleotide
gcugugguccuggcccaua

SEQ ID NO: 2060855 - RNA, 19 nt, Artificial Sequence
  Description of Artificial Sequence: Synthetic oligonucleotide
cgcccaaggcguuccaggu

SEQ ID NO: 2060856 - RNA, 19 nt, Artificial Sequence
  Description of Artificial Sequence: Synthetic oligonucleotide
cgcaguucaucgcggggcu

SEQ ID NO: 2060857 - RNA, 19 nt, Artificial Sequence
  Description of Artificial Sequence: Synthetic oligonucleotide
cggcguccugcugccacag

SEQ ID NO: 2060858 - RNA, 19 nt, Artificial Sequence
  Description of Artificial Sequence: Synthetic oligonucleotide
cagcugcgcagggauccgu

SEQ ID NO: 2060859 - RNA, 19 nt, Artificial Sequence
  Description of Artificial Sequence: Synthetic oligonucleotide
cgcagggauccgugccauc

SEQ ID NO: 2060860 - RNA, 19 nt, Artificial Sequence
  Description of Artificial Sequence: Synthetic oligonucleotide
ccuugccagugggcccgag

SEQ ID NO: 2060861 - RNA, 19 nt, Artificial Sequence
  Description of Artificial Sequence: Synthetic oligonucleotide
gccuagcggcgcgccucag

SEQ ID NO: 2060862 - RNA, 19 nt, Artificial Sequence
  Description of Artificial Sequence: Synthetic oligonucleotide
ccauugcaggaagcaaaau

SEQ ID NO: 2060863 - RNA, 19 nt, Artificial Sequence
  Description of Artificial Sequence: Synthetic oligonucleotide
gccugcgguggggccuagc

SEQ ID NO: 2060864 - RNA, 19 nt, Artificial Sequence
  Description of Artificial Sequence: Synthetic oligonucleotide
ccacaggaccugccaggua

SEQ ID NO: 2060865 - RNA, 19 nt, Artificial Sequence
  Description of Artificial Sequence: Synthetic oligonucleotide
gcccggcggggaucuugca

SEQ ID NO: 2060866 - RNA, 19 nt, Artificial Sequence
  Description of Artificial Sequence: Synthetic oligonucleotide
ggggccuagcggcgcgccu

SEQ ID NO: 2060867 - RNA, 19 nt, Artificial Sequence
  Description of Artificial Sequence: Synthetic oligonucleotide
cccguaacauguggaugau

SEQ ID NO: 2060868 - RNA, 19 nt, Artificial Sequence
  Description of Artificial Sequence: Synthetic oligonucleotide
gcgcagggauccgugccau

SEQ ID NO: 2060869 - RNA, 19 nt, Artificial Sequence
  Description of Artificial Sequence: Synthetic oligonucleotide
cgagccugcgguggggccu

SEQ ID NO: 2060870 - RNA, 19 nt, Artificial Sequence
  Description of Artificial Sequence: Synthetic oligonucleotide
ccccuccucgaagcagugu

SEQ ID NO: 2060871 - RNA, 19 nt, Artificial Sequence
  Description of Artificial Sequence: Synthetic oligonucleotide
ggcccuccuguaggauguu

SEQ ID NO: 2060872 - RNA, 19 nt, Artificial Sequence
  Description of Artificial Sequence: Synthetic oligonucleotide
gccgcccggcggggaucuu

SEQ ID NO: 2060873 - RNA, 19 nt, Artificial Sequence
  Description of Artificial Sequence: Synthetic oligonucleotide
aguauuuauacguugcucc

SEQ ID NO: 2060874 - RNA, 19 nt, Artificial Sequence
  Description of Artificial Sequence: Synthetic oligonucleotide
uguauaaucagauuaaacu

SEQ ID NO: 2060875 - RNA, 19 nt, Artificial Sequence
  Description of Artificial Sequence: Synthetic oligonucleotide
ugaaauauuggauauacac

SEQ ID NO: 2060876 - RNA, 19 nt, Artificial Sequence
  Description of Artificial Sequence: Synthetic oligonucleotide
aaauauuggauauacacaa

SEQ ID NO: 2060877 - RNA, 19 nt, Artificial Sequence
  Description of Artificial Sequence: Synthetic oligonucleotide
aaacuuguagugcagcacc

SEQ ID NO: 2060878 - RNA, 19 nt, Artificial Sequence
  Description of Artificial Sequence: Synthetic oligonucleotide
gaaacuagaacauaacuug

SEQ ID NO: 2060879 - RNA, 19 nt, Artificial Sequence
  Description of Artificial Sequence: Synthetic oligonucleotide
uuaaugacagguaaggacc

SEQ ID NO: 2060880 - RNA, 19 nt, Artificial Sequence
  Description of Artificial Sequence: Synthetic oligonucleotide
aaaaugaacuuucacaggu

SEQ ID NO: 2060881 - RNA, 19 nt, Artificial Sequence
  Description of Artificial Sequence: Synthetic oligonucleotide
aacacacacacccacacac

SEQ ID NO: 2060882 - RNA, 19 nt, Artificial Sequence
  Description of Artificial Sequence: Synthetic oligonucleotide
ucuaauguuuccaaaauga

SEQ ID NO: 2060883 - RNA, 19 nt, Artificial Sequence
  Description of Artificial Sequence: Synthetic oligonucleotide
aauagguaacaauuuaaag

SEQ ID NO: 2060884 - RNA, 19 nt, Artificial Sequence
  Description of Artificial Sequence: Synthetic oligonucleotide
uguugaugaaacuagaaca

SEQ ID NO: 2060885 - RNA, 19 nt, Artificial Sequence
  Description of Artificial Sequence: Synthetic oligonucleotide
aaauuuuguaaauguacuc

SEQ ID NO: 2060886 - RNA, 19 nt, Artificial Sequence
  Description of Artificial Sequence: Synthetic oligonucleotide
uuuagcauagugaaaacug

SEQ ID NO: 2060887 - RNA, 19 nt, Artificial Sequence
  Description of Artificial Sequence: Synthetic oligonucleotide
auagguaacaauuuaaagu

SEQ ID NO: 2060888 - RNA, 19 nt, Artificial Sequence
  Description of Artificial Sequence: Synthetic oligonucleotide
uaugagguaauuuuaaugu

SEQ ID NO: 2060889 - RNA, 19 nt, Artificial Sequence
  Description of Artificial Sequence: Synthetic oligonucleotide
aaaaguugucaccaguuuc

SEQ ID NO: 2060890 - RNA, 19 nt, Artificial Sequence
  Description of Artificial Sequence: Synthetic oligonucleotide
aaucauguuacuuucauua

SEQ ID NO: 2060891 - RNA, 19 nt, Artificial Sequence
  Description of Artificial Sequence: Synthetic oligonucleotide
aaauaaguaggaaagucac

SEQ ID NO: 2060892 - RNA, 19 nt, Artificial Sequence
  Description of Artificial Sequence: Synthetic oligonucleotide
uaacuauugaaaaugcaag

SEQ ID NO: 2060893 - RNA, 19 nt, Artificial Sequence
  Description of Artificial Sequence: Synthetic oligonucleotide
uuucuuaugagauuucaag

SEQ ID NO: 2060894 - RNA, 19 nt, Artificial Sequence
  Description of Artificial Sequence: Synthetic oligonucleotide
auagacugaacaccgaagc

SEQ ID NO: 2060895 - RNA, 19 nt, Artificial Sequence
  Description of Artificial Sequence: Synthetic oligonucleotide
uuuacaugacaauugcugg

SEQ ID NO: 2060896 - RNA, 19 nt, Artificial Sequence
  Description of Artificial Sequence: Synthetic oligonucleotide
uauuucuaaauaaaauuug

SEQ ID NO: 2060897 - RNA, 19 nt, Artificial Sequence
  Description of Artificial Sequence: Synthetic oligonucleotide
ucacagguaaaauagacug

SEQ ID NO: 2060898 - RNA, 19 nt, Artificial Sequence
  Description of Artificial Sequence: Synthetic oligonucleotide
uauaaucagauuaaacuga

SEQ ID NO: 2060899 - RNA, 19 nt, Artificial Sequence
  Description of Artificial Sequence: Synthetic oligonucleotide
aaauguuuucuguaauagg

SEQ ID NO: 2060900 - RNA, 19 nt, Artificial Sequence
  Description of Artificial Sequence: Synthetic oligonucleotide
augagcuuaauauuaaaag

SEQ ID NO: 2060901 - RNA, 19 nt, Artificial Sequence
  Description of Artificial Sequence: Synthetic oligonucleotide
uuaacuacagcaauucaca

SEQ ID NO: 2060902 - RNA, 19 nt, Artificial Sequence
  Description of Artificial Sequence: Synthetic oligonucleotide
caaaauuuuguaaauguac

SEQ ID NO: 2060903 - RNA, 19 nt, Artificial Sequence
  Description of Artificial Sequence: Synthetic oligonucleotide
uaauguacuaaccacuuga

SEQ ID NO: 2060904 - RNA, 19 nt, Artificial Sequence
  Description of Artificial Sequence: Synthetic oligonucleotide
aauuuaaagucuggaaugg

SEQ ID NO: 2060905 - RNA, 19 nt, Artificial Sequence
  Description of Artificial Sequence: Synthetic oligonucleotide
uaauauuaaaaguugucac

SEQ ID NO: 2060906 - RNA, 19 nt, Artificial Sequence
  Description of Artificial Sequence: Synthetic oligonucleotide
aaauuaguuauaaucaugu

SEQ ID NO: 2060907 - RNA, 19 nt, Artificial Sequence
  Description of Artificial Sequence: Synthetic oligonucleotide
aaagaagugcaguuuauga

SEQ ID NO: 2060908 - RNA, 19 nt, Artificial Sequence
  Description of Artificial Sequence: Synthetic oligonucleotide
uaaccaugaaaucugaaac

SEQ ID NO: 2060909 - RNA, 19 nt, Artificial Sequence
  Description of Artificial Sequence: Synthetic oligonucleotide
aaacuugucuuguuuggac

SEQ ID NO: 2060910 - RNA, 19 nt, Artificial Sequence
  Description of Artificial Sequence: Synthetic oligonucleotide
ugaaauuuaggauuaacua

SEQ ID NO: 2060911 - RNA, 19 nt, Artificial Sequence
  Description of Artificial Sequence: Synthetic oligonucleotide
uaauguuuccaaaaugagc

SEQ ID NO: 2060912 - RNA, 19 nt, Artificial Sequence
  Description of Artificial Sequence: Synthetic oligonucleotide
aauuuagcauagugaaaac

SEQ ID NO: 2060913 - RNA, 19 nt, Artificial Sequence
  Description of Artificial Sequence: Synthetic oligonucleotide
uguacuguguugaugaaac

SEQ ID NO: 2060914 - RNA, 19 nt, Artificial Sequence
  Description of Artificial Sequence: Synthetic oligonucleotide
aauauuacuuuggcaaugg

SEQ ID NO: 2060915 - RNA, 19 nt, Artificial Sequence
  Description of Artificial Sequence: Synthetic oligonucleotide
uaauuuuaauguacuaacc

SEQ ID NO: 2060916 - RNA, 19 nt, Artificial Sequence
  Description of Artificial Sequence: Synthetic oligonucleotide
uuuauguauuucuaaauaa

SEQ ID NO: 2060917 - RNA, 19 nt, Artificial Sequence
  Description of Artificial Sequence: Synthetic oligonucleotide
ugagcuuaauauuaaaagu

SEQ ID NO: 2060918 - RNA, 19 nt, Artificial Sequence
  Description of Artificial Sequence: Synthetic oligonucleotide
ucagauuaaacugagggga

SEQ ID NO: 2060919 - RNA, 19 nt, Artificial Sequence
  Description of Artificial Sequence: Synthetic oligonucleotide
uuucauuaauuuagcauag

SEQ ID NO: 2060920 - RNA, 19 nt, Artificial Sequence
  Description of Artificial Sequence: Synthetic oligonucleotide
aaaucugaaacuguuauau

SEQ ID NO: 2060921 - RNA, 19 nt, Artificial Sequence
  Description of Artificial Sequence: Synthetic oligonucleotide
uucuuauaagugcaaaccc

SEQ ID NO: 2060922 - RNA, 19 nt, Artificial Sequence
  Description of Artificial Sequence: Synthetic oligonucleotide
uguacucuaaguuuuacaa

SEQ ID NO: 2060923 - RNA, 19 nt, Artificial Sequence
  Description of Artificial Sequence: Synthetic oligonucleotide
uauuacuuuggcaauggug

SEQ ID NO: 2060924 - RNA, 19 nt, Artificial Sequence
  Description of Artificial Sequence: Synthetic oligonucleotide
uuaaaacuguuuaaacuug

SEQ ID NO: 2060925 - RNA, 19 nt, Artificial Sequence
  Description of Artificial Sequence: Synthetic oligonucleotide
uguaaauguacucuaaguu

SEQ ID NO: 2060926 - RNA, 19 nt, Artificial Sequence
  Description of Artificial Sequence: Synthetic oligonucleotide
agcaauucacaauaagcac

SEQ ID NO: 2060927 - RNA, 19 nt, Artificial Sequence
  Description of Artificial Sequence: Synthetic oligonucleotide
uacucuaaguuuuacaaac

SEQ ID NO: 2060928 - RNA, 19 nt, Artificial Sequence
  Description of Artificial Sequence: Synthetic oligonucleotide
aacaccgaagccuaaauaa

SEQ ID NO: 2060929 - RNA, 19 nt, Artificial Sequence
  Description of Artificial Sequence: Synthetic oligonucleotide
uaauuuagcauagugaaaa

SEQ ID NO: 2060930 - RNA, 19 nt, Artificial Sequence
  Description of Artificial Sequence: Synthetic oligonucleotide
augaaccuaucuuaaaggg

SEQ ID NO: 2060931 - RNA, 19 nt, Artificial Sequence
  Description of Artificial Sequence: Synthetic oligonucleotide
aaaauccacacaguggcac

SEQ ID NO: 2060932 - RNA, 19 nt, Artificial Sequence
  Description of Artificial Sequence: Synthetic oligonucleotide
aacuauugaaaaugcaagu

SEQ ID NO: 2060933 - RNA, 19 nt, Artificial Sequence
  Description of Artificial Sequence: Synthetic oligonucleotide
uauugaaaaugcaaguuuc

SEQ ID NO: 2060934 - RNA, 19 nt, Artificial Sequence
  Description of Artificial Sequence: Synthetic oligonucleotide
aaagucacggaaauauuac

SEQ ID NO: 2060935 - RNA, 19 nt, Artificial Sequence
  Description of Artificial Sequence: Synthetic oligonucleotide
ucucaauagaauauauucu

SEQ ID NO: 2060936 - RNA, 19 nt, Artificial Sequence
  Description of Artificial Sequence: Synthetic oligonucleotide
uuggauauacacaaugaac

SEQ ID NO: 2060937 - RNA, 19 nt, Artificial Sequence
  Description of Artificial Sequence: Synthetic oligonucleotide
aacuguuuaaacuugucuu

SEQ ID NO: 2060938 - RNA, 19 nt, Artificial Sequence
  Description of Artificial Sequence: Synthetic oligonucleotide
acuagaacauaacuugggg

SEQ ID NO: 2060939 - RNA, 19 nt, Artificial Sequence
  Description of Artificial Sequence: Synthetic oligonucleotide
ugcaguuuaugaaauuuag

SEQ ID NO: 2060940 - RNA, 19 nt, Artificial Sequence
  Description of Artificial Sequence: Synthetic oligonucleotide
auauuggauauacacaaug

SEQ ID NO: 2060941 - RNA, 19 nt, Artificial Sequence
  Description of Artificial Sequence: Synthetic oligonucleotide
aucagauuaaacugagggg

SEQ ID NO: 2060942 - RNA, 19 nt, Artificial Sequence
  Description of Artificial Sequence: Synthetic oligonucleotide
aguuuugaguauuuauacg

SEQ ID NO: 2060943 - RNA, 19 nt, Artificial Sequence
  Description of Artificial Sequence: Synthetic oligonucleotide
aaguuaacuacagcaauuc

SEQ ID NO: 2060944 - RNA, 19 nt, Artificial Sequence
  Description of Artificial Sequence: Synthetic oligonucleotide
gucucaauagaauauauuc

SEQ ID NO: 2060945 - RNA, 19 nt, Artificial Sequence
  Description of Artificial Sequence: Synthetic oligonucleotide
uuuaugaaauuuaggauua

SEQ ID NO: 2060946 - RNA, 19 nt, Artificial Sequence
  Description of Artificial Sequence: Synthetic oligonucleotide
ucugauucuaaaauuaguu

SEQ ID NO: 2060947 - RNA, 19 nt, Artificial Sequence
  Description of Artificial Sequence: Synthetic oligonucleotide
uuaaaggguaaguuuaugu

SEQ ID NO: 2060948 - RNA, 19 nt, Artificial Sequence
  Description of Artificial Sequence: Synthetic oligonucleotide
aaaggguaaguuuauguau

SEQ ID NO: 2060949 - RNA, 19 nt, Artificial Sequence
  Description of Artificial Sequence: Synthetic oligonucleotide
uauuggauauacacaauga

SEQ ID NO: 2060950 - RNA, 19 nt, Artificial Sequence
  Description of Artificial Sequence: Synthetic oligonucleotide
ugagguaauuuuaauguac

SEQ ID NO: 2060951 - RNA, 19 nt, Artificial Sequence
  Description of Artificial Sequence: Synthetic oligonucleotide
acggaaauauuacuuuggc

SEQ ID NO: 2060952 - RNA, 19 nt, Artificial Sequence
  Description of Artificial Sequence: Synthetic oligonucleotide
aaaauuaguuauaaucaug

SEQ ID NO: 2060953 - RNA, 19 nt, Artificial Sequence
  Description of Artificial Sequence: Synthetic oligonucleotide
uugaguauuuauacguugc

SEQ ID NO: 2060954 - RNA, 19 nt, Artificial Sequence
  Description of Artificial Sequence: Synthetic oligonucleotide
ucuuauaagugcaaacccu

SEQ ID NO: 2060955 - RNA, 19 nt, Artificial Sequence
  Description of Artificial Sequence: Synthetic oligonucleotide
gacaauguggauuauaugu

SEQ ID NO: 2060956 - RNA, 19 nt, Artificial Sequence
  Description of Artificial Sequence: Synthetic oligonucleotide
uguuuggacauauauuucu

SEQ ID NO: 2060957 - RNA, 19 nt, Artificial Sequence
  Description of Artificial Sequence: Synthetic oligonucleotide
ugaugaaacuagaacauaa

SEQ ID NO: 2060958 - RNA, 19 nt, Artificial Sequence
  Description of Artificial Sequence: Synthetic oligonucleotide
uuaaccaugaaaucugaaa

SEQ ID NO: 2060959 - RNA, 19 nt, Artificial Sequence
  Description of Artificial Sequence: Synthetic oligonucleotide
cuuaugagauuucaaguag

SEQ ID NO: 2060960 - RNA, 19 nt, Artificial Sequence
  Description of Artificial Sequence: Synthetic oligonucleotide
auuacuuuggcaauggugu

SEQ ID NO: 2060961 - RNA, 19 nt, Artificial Sequence
  Description of Artificial Sequence: Synthetic oligonucleotide
uagaacauaacuuggggaa

SEQ ID NO: 2060962 - RNA, 19 nt, Artificial Sequence
  Description of Artificial Sequence: Synthetic oligonucleotide
aaguuuauguauuucuaaa

SEQ ID NO: 2060963 - RNA, 19 nt, Artificial Sequence
  Description of Artificial Sequence: Synthetic oligonucleotide
aaccaugaaaucugaaacu

SEQ ID NO: 2060964 - RNA, 19 nt, Artificial Sequence
  Description of Artificial Sequence: Synthetic oligonucleotide
uaguuuacaugacaauugc

SEQ ID NO: 2060965 - RNA, 19 nt, Artificial Sequence
  Description of Artificial Sequence: Synthetic oligonucleotide
ugcaaacccuuuaacagag

SEQ ID NO: 2060966 - RNA, 19 nt, Artificial Sequence
  Description of Artificial Sequence: Synthetic oligonucleotide
uguaauagguaacaauuua

SEQ ID NO: 2060967 - RNA, 19 nt, Artificial Sequence
  Description of Artificial Sequence: Synthetic oligonucleotide
aacuugaaauauuggauau

SEQ ID NO: 2060968 - RNA, 19 nt, Artificial Sequence
  Description of Artificial Sequence: Synthetic oligonucleotide
uuauaaucauguuacuuuc

SEQ ID NO: 2060969 - RNA, 19 nt, Artificial Sequence
  Description of Artificial Sequence: Synthetic oligonucleotide
cuugaaauauuggauauac

SEQ ID NO: 2060970 - RNA, 19 nt, Artificial Sequence
  Description of Artificial Sequence: Synthetic oligonucleotide
uucuuaugagauuucaagu

SEQ ID NO: 2060971 - RNA, 19 nt, Artificial Sequence
  Description of Artificial Sequence: Synthetic oligonucleotide
uaggauuaacuauugaaaa

SEQ ID NO: 2060972 - RNA, 19 nt, Artificial Sequence
  Description of Artificial Sequence: Synthetic oligonucleotide
aaacuagaacauaacuugg

SEQ ID NO: 2060973 - RNA, 19 nt, Artificial Sequence
  Description of Artificial Sequence: Synthetic oligonucleotide
ucuuaugagauuucaagua

SEQ ID NO: 2060974 - RNA, 19 nt, Artificial Sequence
  Description of Artificial Sequence: Synthetic oligonucleotide
gacauucaaaguuaacuac

SEQ ID NO: 2060975 - RNA, 19 nt, Artificial Sequence
  Description of Artificial Sequence: Synthetic oligonucleotide
guuuacaugacaauugcug

SEQ ID NO: 2060976 - RNA, 19 nt, Artificial Sequence
  Description of Artificial Sequence: Synthetic oligonucleotide
ugcuguacuguguugauga

SEQ ID NO: 2060977 - RNA, 19 nt, Artificial Sequence
  Description of Artificial Sequence: Synthetic oligonucleotide
augaaacuagaacauaacu

SEQ ID NO: 2060978 - RNA, 19 nt, Artificial Sequence
  Description of Artificial Sequence: Synthetic oligonucleotide
auauuaaaaguugucacca

SEQ ID NO: 2060979 - RNA, 19 nt, Artificial Sequence
  Description of Artificial Sequence: Synthetic oligonucleotide
aaauagacugaacaccgaa

SEQ ID NO: 2060980 - RNA, 19 nt, Artificial Sequence
  Description of Artificial Sequence: Synthetic oligonucleotide
aauaaguaggaaagucacg

SEQ ID NO: 2060981 - RNA, 19 nt, Artificial Sequence
  Description of Artificial Sequence: Synthetic oligonucleotide
uuaugagauuucaaguaga

SEQ ID NO: 2060982 - RNA, 19 nt, Artificial Sequence
  Description of Artificial Sequence: Synthetic oligonucleotide
aacuagaacauaacuuggg

SEQ ID NO: 2060983 - RNA, 19 nt, Artificial Sequence
  Description of Artificial Sequence: Synthetic oligonucleotide
gacauauauuucuuaugag

SEQ ID NO: 2060984 - RNA, 19 nt, Artificial Sequence
  Description of Artificial Sequence: Synthetic oligonucleotide
aauguacucuaaguuuuac

SEQ ID NO: 2060985 - RNA, 19 nt, Artificial Sequence
  Description of Artificial Sequence: Synthetic oligonucleotide
cauucaaaguuaacuacag

SEQ ID NO: 2060986 - RNA, 19 nt, Artificial Sequence
  Description of Artificial Sequence: Synthetic oligonucleotide
aaauauuacuuuggcaaug

SEQ ID NO: 2060987 - RNA, 19 nt, Artificial Sequence
  Description of Artificial Sequence: Synthetic oligonucleotide
uuuaauguacuaaccacuu

SEQ ID NO: 2060988 - RNA, 19 nt, Artificial Sequence
  Description of Artificial Sequence: Synthetic oligonucleotide
aaguagaagggguuuaaau

SEQ ID NO: 2060989 - RNA, 19 nt, Artificial Sequence
  Description of Artificial Sequence: Synthetic oligonucleotide
aauggaauuccaaacuugu

SEQ ID NO: 2060990 - RNA, 19 nt, Artificial Sequence
  Description of Artificial Sequence: Synthetic oligonucleotide
caguuuugaguauuuauac

SEQ ID NO: 2060991 - RNA, 19 nt, Artificial Sequence
  Description of Artificial Sequence: Synthetic oligonucleotide
gaaauauuggauauacaca

SEQ ID NO: 2060992 - RNA, 19 nt, Artificial Sequence
  Description of Artificial Sequence: Synthetic oligonucleotide
uaaggacccuaucagagcu

SEQ ID NO: 2060993 - RNA, 19 nt, Artificial Sequence
  Description of Artificial Sequence: Synthetic oligonucleotide
ugacauucaaaguuaacua

SEQ ID NO: 2060994 - RNA, 19 nt, Artificial Sequence
  Description of Artificial Sequence: Synthetic oligonucleotide
auuuauacguugcuccuug

SEQ ID NO: 2060995 - RNA, 19 nt, Artificial Sequence
  Description of Artificial Sequence: Synthetic oligonucleotide
aaacaccucaguaugaggu

SEQ ID NO: 2060996 - RNA, 19 nt, Artificial Sequence
  Description of Artificial Sequence: Synthetic oligonucleotide
aguagaagggguuuaaauu

SEQ ID NO: 2060997 - RNA, 19 nt, Artificial Sequence
  Description of Artificial Sequence: Synthetic oligonucleotide
aaagauucaggaauacugu

SEQ ID NO: 2060998 - RNA, 19 nt, Artificial Sequence
  Description of Artificial Sequence: Synthetic oligonucleotide
aucucagucaguuuugagu

SEQ ID NO: 2060999 - RNA, 19 nt, Artificial Sequence
  Description of Artificial Sequence: Synthetic oligonucleotide
uuacaugacaauugcuggc

SEQ ID NO: 2061000 - RNA, 19 nt, Artificial Sequence
  Description of Artificial Sequence: Synthetic oligonucleotide
cuaaauaaguaggaaaguc

SEQ ID NO: 2061001 - RNA, 19 nt, Artificial Sequence
  Description of Artificial Sequence: Synthetic oligonucleotide
auacacacaccauuaacca

SEQ ID NO: 2061002 - RNA, 19 nt, Artificial Sequence
  Description of Artificial Sequence: Synthetic oligonucleotide
aacuuucacagguaaaaua

SEQ ID NO: 2061003 - RNA, 19 nt, Artificial Sequence
  Description of Artificial Sequence: Synthetic oligonucleotide
aaaguugucaccaguuuca

SEQ ID NO: 2061004 - RNA, 19 nt, Artificial Sequence
  Description of Artificial Sequence: Synthetic oligonucleotide
ugaacuuucacagguaaaa

SEQ ID NO: 2061005 - RNA, 19 nt, Artificial Sequence
  Description of Artificial Sequence: Synthetic oligonucleotide
uaugagauuucaaguagaa

SEQ ID NO: 2061006 - RNA, 19 nt, Artificial Sequence
  Description of Artificial Sequence: Synthetic oligonucleotide
uaaaggguaaguuuaugua

SEQ ID NO: 2061007 - RNA, 19 nt, Artificial Sequence
  Description of Artificial Sequence: Synthetic oligonucleotide
ugaaccuaucuuaaagggu

SEQ ID NO: 2061008 - RNA, 19 nt, Artificial Sequence
  Description of Artificial Sequence: Synthetic oligonucleotide
aauagacugaacaccgaag

SEQ ID NO: 2061009 - RNA, 19 nt, Artificial Sequence
  Description of Artificial Sequence: Synthetic oligonucleotide
uauaaucauguuacuuuca

SEQ ID NO: 2061010 - RNA, 19 nt, Artificial Sequence
  Description of Artificial Sequence: Synthetic oligonucleotide
ucucagucaguuuugagua

SEQ ID NO: 2061011 - RNA, 19 nt, Artificial Sequence
  Description of Artificial Sequence: Synthetic oligonucleotide
aacuugucuuguuuggaca

SEQ ID NO: 2061012 - RNA, 19 nt, Artificial Sequence
  Description of Artificial Sequence: Synthetic oligonucleotide
gaauuccaaacuuguagug

SEQ ID NO: 2061013 - RNA, 19 nt, Artificial Sequence
  Description of Artificial Sequence: Synthetic oligonucleotide
agaagugcaguuuaugaaa

SEQ ID NO: 2061014 - RNA, 19 nt, Artificial Sequence
  Description of Artificial Sequence: Synthetic oligonucleotide
aagggguuuaaauuucuaa

SEQ ID NO: 2061015 - RNA, 19 nt, Artificial Sequence
  Description of Artificial Sequence: Synthetic oligonucleotide
aaacugaaacuugaaauau

SEQ ID NO: 2061016 - RNA, 19 nt, Artificial Sequence
  Description of Artificial Sequence: Synthetic oligonucleotide
aaaugauaguuuacaugac

SEQ ID NO: 2061017 - RNA, 19 nt, Artificial Sequence
  Description of Artificial Sequence: Synthetic oligonucleotide
aguuuauguauuucuaaau

SEQ ID NO: 2061018 - RNA, 19 nt, Artificial Sequence
  Description of Artificial Sequence: Synthetic oligonucleotide
auaguuuacaugacaauug

SEQ ID NO: 2061019 - RNA, 19 nt, Artificial Sequence
  Description of Artificial Sequence: Synthetic oligonucleotide
guuaacuacagcaauucac

SEQ ID NO: 2061020 - RNA, 19 nt, Artificial Sequence
  Description of Artificial Sequence: Synthetic oligonucleotide
auagugaaaacugaaacuu

SEQ ID NO: 2061021 - RNA, 19 nt, Artificial Sequence
  Description of Artificial Sequence: Synthetic oligonucleotide
cacggaaauauuacuuugg

SEQ ID NO: 2061022 - RNA, 19 nt, Artificial Sequence
  Description of Artificial Sequence: Synthetic oligonucleotide
uuaauguacuaaccacuug

SEQ ID NO: 2061023 - RNA, 19 nt, Artificial Sequence
  Description of Artificial Sequence: Synthetic oligonucleotide
uuaauuuagcauagugaaa

SEQ ID NO: 2061024 - RNA, 19 nt, Artificial Sequence
  Description of Artificial Sequence: Synthetic oligonucleotide
uaucuuaaaggguaaguuu

SEQ ID NO: 2061025 - RNA, 19 nt, Artificial Sequence
  Description of Artificial Sequence: Synthetic oligonucleotide
uuuuguaaauguacucuaa

SEQ ID NO: 2061026 - RNA, 19 nt, Artificial Sequence
  Description of Artificial Sequence: Synthetic oligonucleotide
ucacggaaauauuacuuug

SEQ ID NO: 2061027 - RNA, 19 nt, Artificial Sequence
  Description of Artificial Sequence: Synthetic oligonucleotide
ggauuaacuauugaaaaug

SEQ ID NO: 2061028 - RNA, 19 nt, Artificial Sequence
  Description of Artificial Sequence: Synthetic oligonucleotide
cuguauaaucagauuaaac

SEQ ID NO: 2061029 - RNA, 19 nt, Artificial Sequence
  Description of Artificial Sequence: Synthetic oligonucleotide
aagacaauguggauuauau

SEQ ID NO: 2061030 - RNA, 19 nt, Artificial Sequence
  Description of Artificial Sequence: Synthetic oligonucleotide
aagucacggaaauauuacu

SEQ ID NO: 2061031 - RNA, 19 nt, Artificial Sequence
  Description of Artificial Sequence: Synthetic oligonucleotide
guuuugaguauuuauacgu

SEQ ID NO: 2061032 - RNA, 19 nt, Artificial Sequence
  Description of Artificial Sequence: Synthetic oligonucleotide
ugaguauuuauacguugcu

SEQ ID NO: 2061033 - RNA, 19 nt, Artificial Sequence
  Description of Artificial Sequence: Synthetic oligonucleotide
aguaaagaagugcaguuua

SEQ ID NO: 2061034 - RNA, 19 nt, Artificial Sequence
  Description of Artificial Sequence: Synthetic oligonucleotide
cagcaauucacaauaagca

SEQ ID NO: 2061035 - RNA, 19 nt, Artificial Sequence
  Description of Artificial Sequence: Synthetic oligonucleotide
aaugcaaguuuccuuuaaa

SEQ ID NO: 2061036 - RNA, 19 nt, Artificial Sequence
  Description of Artificial Sequence: Synthetic oligonucleotide
uguuacuuucauuaauuua

SEQ ID NO: 2061037 - RNA, 19 nt, Artificial Sequence
  Description of Artificial Sequence: Synthetic oligonucleotide
uguguugaugaaacuagaa

SEQ ID NO: 2061038 - RNA, 19 nt, Artificial Sequence
  Description of Artificial Sequence: Synthetic oligonucleotide
aacuacagcaauucacaau

SEQ ID NO: 2061039 - RNA, 19 nt, Artificial Sequence
  Description of Artificial Sequence: Synthetic oligonucleotide
auauauucuuauaagugca

SEQ ID NO: 2061040 - RNA, 19 nt, Artificial Sequence
  Description of Artificial Sequence: Synthetic oligonucleotide
uccaaugucuaauguuucc

SEQ ID NO: 2061041 - RNA, 19 nt, Artificial Sequence
  Description of Artificial Sequence: Synthetic oligonucleotide
auaaucauguuacuuucau

SEQ ID NO: 2061042 - RNA, 19 nt, Artificial Sequence
  Description of Artificial Sequence: Synthetic oligonucleotide
uauuucuuaugagauuuca

SEQ ID NO: 2061043 - RNA, 19 nt, Artificial Sequence
  Description of Artificial Sequence: Synthetic oligonucleotide
acaucaguuuaccagagua

SEQ ID NO: 2061044 - RNA, 19 nt, Artificial Sequence
  Description of Artificial Sequence: Synthetic oligonucleotide
aauuaguuauaaucauguu

SEQ ID NO: 2061045 - RNA, 19 nt, Artificial Sequence
  Description of Artificial Sequence: Synthetic oligonucleotide
aauuugacauucaaaguua

SEQ ID NO: 2061046 - RNA, 19 nt, Artificial Sequence
  Description of Artificial Sequence: Synthetic oligonucleotide
acuguguugaugaaacuag

SEQ ID NO: 2061047 - RNA, 19 nt, Artificial Sequence
  Description of Artificial Sequence: Synthetic oligonucleotide
cauaacuuggggaaaucuc

SEQ ID NO: 2061048 - RNA, 19 nt, Artificial Sequence
  Description of Artificial Sequence: Synthetic oligonucleotide
uaugaaauuuaggauuaac

SEQ ID NO: 2061049 - RNA, 19 nt, Artificial Sequence
  Description of Artificial Sequence: Synthetic oligonucleotide
agggguuuaaauuucuaaa

SEQ ID NO: 2061050 - RNA, 19 nt, Artificial Sequence
  Description of Artificial Sequence: Synthetic oligonucleotide
auauuucagugcaaacacc

SEQ ID NO: 2061051 - RNA, 19 nt, Artificial Sequence
  Description of Artificial Sequence: Synthetic oligonucleotide
aggaaagucacggaaauau

SEQ ID NO: 2061052 - RNA, 19 nt, Artificial Sequence
  Description of Artificial Sequence: Synthetic oligonucleotide
uugaaauauuggauauaca

SEQ ID NO: 2061053 - RNA, 19 nt, Artificial Sequence
  Description of Artificial Sequence: Synthetic oligonucleotide
uacuuucauuaauuuagca

SEQ ID NO: 2061054 - RNA, 19 nt, Artificial Sequence
  Description of Artificial Sequence: Synthetic oligonucleotide
aggauuaacuauugaaaau

SEQ ID NO: 2061055 - RNA, 19 nt, Artificial Sequence
  Description of Artificial Sequence: Synthetic oligonucleotide
uaagugcaaacccuuuaac

SEQ ID NO: 2061056 - RNA, 19 nt, Artificial Sequence
  Description of Artificial Sequence: Synthetic oligonucleotide
accaugaaaucugaaacug

SEQ ID NO: 2061057 - RNA, 19 nt, Artificial Sequence
  Description of Artificial Sequence: Synthetic oligonucleotide
agccuaaauaaguaggaaa

SEQ ID NO: 2061058 - RNA, 19 nt, Artificial Sequence
  Description of Artificial Sequence: Synthetic oligonucleotide
acacaaugaaccuaucuua

SEQ ID NO: 2061059 - RNA, 19 nt, Artificial Sequence
  Description of Artificial Sequence: Synthetic oligonucleotide
gaugaaacuagaacauaac

SEQ ID NO: 2061060 - RNA, 19 nt, Artificial Sequence
  Description of Artificial Sequence: Synthetic oligonucleotide
aagauucaggaauacugua

SEQ ID NO: 2061061 - RNA, 19 nt, Artificial Sequence
  Description of Artificial Sequence: Synthetic oligonucleotide
gaaaauguuuucuguaaua

SEQ ID NO: 2061062 - RNA, 19 nt, Artificial Sequence
  Description of Artificial Sequence: Synthetic oligonucleotide
uuaccagaguaaagaagug

SEQ ID NO: 2061063 - RNA, 19 nt, Artificial Sequence
  Description of Artificial Sequence: Synthetic oligonucleotide
uccuugcuuaaacacaaaa

SEQ ID NO: 2061064 - RNA, 19 nt, Artificial Sequence
  Description of Artificial Sequence: Synthetic oligonucleotide
agaguaaagaagugcaguu

SEQ ID NO: 2061065 - RNA, 19 nt, Artificial Sequence
  Description of Artificial Sequence: Synthetic oligonucleotide
uuauacguugcuccuugcu

SEQ ID NO: 2061066 - RNA, 19 nt, Artificial Sequence
  Description of Artificial Sequence: Synthetic oligonucleotide
ugcuccuugcuuaaacaca

SEQ ID NO: 2061067 - RNA, 19 nt, Artificial Sequence
  Description of Artificial Sequence: Synthetic oligonucleotide
aacuuggggaaaucucucu

SEQ ID NO: 2061068 - RNA, 19 nt, Artificial Sequence
  Description of Artificial Sequence: Synthetic oligonucleotide
auaacuuggggaaaucucu

SEQ ID NO: 2061069 - RNA, 19 nt, Artificial Sequence
  Description of Artificial Sequence: Synthetic oligonucleotide
uaaaaguugucaccaguuu

SEQ ID NO: 2061070 - RNA, 19 nt, Artificial Sequence
  Description of Artificial Sequence: Synthetic oligonucleotide
uauacguugcuccuugcuu

SEQ ID NO: 2061071 - RNA, 19 nt, Artificial Sequence
  Description of Artificial Sequence: Synthetic oligonucleotide
ucuuccaaugucuaauguu

SEQ ID NO: 2061072 - RNA, 19 nt, Artificial Sequence
  Description of Artificial Sequence: Synthetic oligonucleotide
auuuagcauagugaaaacu

SEQ ID NO: 2061073 - RNA, 19 nt, Artificial Sequence
  Description of Artificial Sequence: Synthetic oligonucleotide
cuagaacauaacuugggga

SEQ ID NO: 2061074 - RNA, 19 nt, Artificial Sequence
  Description of Artificial Sequence: Synthetic oligonucleotide
gccuaaauaaguaggaaag

SEQ ID NO: 2061075 - RNA, 19 nt, Artificial Sequence
  Description of Artificial Sequence: Synthetic oligonucleotide
aaaguuaacuacagcaauu

SEQ ID NO: 2061076 - RNA, 19 nt, Artificial Sequence
  Description of Artificial Sequence: Synthetic oligonucleotide
gauucaggaauacuguaua

SEQ ID NO: 2061077 - RNA, 19 nt, Artificial Sequence
  Description of Artificial Sequence: Synthetic oligonucleotide
uaccagaguaaagaagugc

SEQ ID NO: 2061078 - RNA, 19 nt, Artificial Sequence
  Description of Artificial Sequence: Synthetic oligonucleotide
ucucuuccaaugucuaaug

SEQ ID NO: 2061079 - RNA, 19 nt, Artificial Sequence
  Description of Artificial Sequence: Synthetic oligonucleotide
gugcaaacaccucaguaug

SEQ ID NO: 2061080 - RNA, 19 nt, Artificial Sequence
  Description of Artificial Sequence: Synthetic oligonucleotide
cuuguagugcagcaccgcc

SEQ ID NO: 2061081 - RNA, 19 nt, Artificial Sequence
  Description of Artificial Sequence: Synthetic oligonucleotide
gaaccuaucuuaaagggua

SEQ ID NO: 2061082 - RNA, 19 nt, Artificial Sequence
  Description of Artificial Sequence: Synthetic oligonucleotide
cacaaaauuuuguaaaugu

SEQ ID NO: 2061083 - RNA, 19 nt, Artificial Sequence
  Description of Artificial Sequence: Synthetic oligonucleotide
ugauaguuuacaugacaau

SEQ ID NO: 2061084 - RNA, 19 nt, Artificial Sequence
  Description of Artificial Sequence: Synthetic oligonucleotide
gacaauugcuggcugacaa

SEQ ID NO: 2061085 - RNA, 19 nt, Artificial Sequence
  Description of Artificial Sequence: Synthetic oligonucleotide
ugguguuugcuguacugug

SEQ ID NO: 2061086 - RNA, 19 nt, Artificial Sequence
  Description of Artificial Sequence: Synthetic oligonucleotide
aaacacacacacccacaca

SEQ ID NO: 2061087 - RNA, 19 nt, Artificial Sequence
  Description of Artificial Sequence: Synthetic oligonucleotide
gaagccuaaauaaguagga

SEQ ID NO: 2061088 - RNA, 19 nt, Artificial Sequence
  Description of Artificial Sequence: Synthetic oligonucleotide
aguuaacuacagcaauuca

SEQ ID NO: 2061089 - RNA, 19 nt, Artificial Sequence
  Description of Artificial Sequence: Synthetic oligonucleotide
uuuggacauauauuucuua

SEQ ID NO: 2061090 - RNA, 19 nt, Artificial Sequence
  Description of Artificial Sequence: Synthetic oligonucleotide
acuauugaaaaugcaaguu

SEQ ID NO: 2061091 - RNA, 19 nt, Artificial Sequence
  Description of Artificial Sequence: Synthetic oligonucleotide
acagguaaaauagacugaa

SEQ ID NO: 2061092 - RNA, 19 nt, Artificial Sequence
  Description of Artificial Sequence: Synthetic oligonucleotide
uacaugacaauugcuggcu

SEQ ID NO: 2061093 - RNA, 19 nt, Artificial Sequence
  Description of Artificial Sequence: Synthetic oligonucleotide
augacaauugcuggcugac

SEQ ID NO: 2061094 - RNA, 19 nt, Artificial Sequence
  Description of Artificial Sequence: Synthetic oligonucleotide
auguacucuaaguuuuaca

SEQ ID NO: 2061095 - RNA, 19 nt, Artificial Sequence
  Description of Artificial Sequence: Synthetic oligonucleotide
acaauugcuggcugacaag

SEQ ID NO: 2061096 - RNA, 19 nt, Artificial Sequence
  Description of Artificial Sequence: Synthetic oligonucleotide
aguuauaaucauguuacuu

SEQ ID NO: 2061097 - RNA, 19 nt, Artificial Sequence
  Description of Artificial Sequence: Synthetic oligonucleotide
aaacccuuuaacagaggug

SEQ ID NO: 2061098 - RNA, 19 nt, Artificial Sequence
  Description of Artificial Sequence: Synthetic oligonucleotide
uugcuccuugcuuaaacac

SEQ ID NO: 2061099 - RNA, 19 nt, Artificial Sequence
  Description of Artificial Sequence: Synthetic oligonucleotide
auuaacuauugaaaaugca

SEQ ID NO: 2061100 - RNA, 19 nt, Artificial Sequence
  Description of Artificial Sequence: Synthetic oligonucleotide
gguaacaauuuaaagucug

SEQ ID NO: 2061101 - RNA, 19 nt, Artificial Sequence
  Description of Artificial Sequence: Synthetic oligonucleotide
augcaaguuuccuuuaaaa

SEQ ID NO: 2061102 - RNA, 19 nt, Artificial Sequence
  Description of Artificial Sequence: Synthetic oligonucleotide
guaaggacccuaucagagc

SEQ ID NO: 2061103 - RNA, 19 nt, Artificial Sequence
  Description of Artificial Sequence: Synthetic oligonucleotide
ugcaaacaccucaguauga

SEQ ID NO: 2061104 - RNA, 19 nt, Artificial Sequence
  Description of Artificial Sequence: Synthetic oligonucleotide
gguaaggacccuaucagag

SEQ ID NO: 2061105 - RNA, 19 nt, Artificial Sequence
  Description of Artificial Sequence: Synthetic oligonucleotide
augauaguuuacaugacaa

SEQ ID NO: 2061106 - RNA, 19 nt, Artificial Sequence
  Description of Artificial Sequence: Synthetic oligonucleotide
guaaauguacucuaaguuu

SEQ ID NO: 2061107 - RNA, 19 nt, Artificial Sequence
  Description of Artificial Sequence: Synthetic oligonucleotide
uacuguguugaugaaacua

SEQ ID NO: 2061108 - RNA, 19 nt, Artificial Sequence
  Description of Artificial Sequence: Synthetic oligonucleotide
guaauagguaacaauuuaa

SEQ ID NO: 2061109 - RNA, 19 nt, Artificial Sequence
  Description of Artificial Sequence: Synthetic oligonucleotide
ugacaagacaauguggauu

SEQ ID NO: 2061110 - RNA, 19 nt, Artificial Sequence
  Description of Artificial Sequence: Synthetic oligonucleotide
uuauaagugcaaacccuuu

SEQ ID NO: 2061111 - RNA, 19 nt, Artificial Sequence
  Description of Artificial Sequence: Synthetic oligonucleotide
ggucaauggaauuccaaac

SEQ ID NO: 2061112 - RNA, 19 nt, Artificial Sequence
  Description of Artificial Sequence: Synthetic oligonucleotide
ugaacaccgaagccuaaau

SEQ ID NO: 2061113 - RNA, 19 nt, Artificial Sequence
  Description of Artificial Sequence: Synthetic oligonucleotide
aauguacuaaccacuugaa

SEQ ID NO: 2061114 - RNA, 19 nt, Artificial Sequence
  Description of Artificial Sequence: Synthetic oligonucleotide
uguuuccaaaaugagcuua

SEQ ID NO: 2061115 - RNA, 19 nt, Artificial Sequence
  Description of Artificial Sequence: Synthetic oligonucleotide
uggucucaauagaauauau

SEQ ID NO: 2061116 - RNA, 19 nt, Artificial Sequence
  Description of Artificial Sequence: Synthetic oligonucleotide
cugauucuaaaauuaguua

SEQ ID NO: 2061117 - RNA, 19 nt, Artificial Sequence
  Description of Artificial Sequence: Synthetic oligonucleotide
uuguagugcagcaccgccu

SEQ ID NO: 2061118 - RNA, 19 nt, Artificial Sequence
  Description of Artificial Sequence: Synthetic oligonucleotide
aaggguaaguuuauguauu

SEQ ID NO: 2061119 - RNA, 19 nt, Artificial Sequence
  Description of Artificial Sequence: Synthetic oligonucleotide
aauguggauuauauguuuu

SEQ ID NO: 2061120 - RNA, 19 nt, Artificial Sequence
  Description of Artificial Sequence: Synthetic oligonucleotide
cagaggugaucucagucag

SEQ ID NO: 2061121 - RNA, 19 nt, Artificial Sequence
  Description of Artificial Sequence: Synthetic oligonucleotide
agugcaguuuaugaaauuu

SEQ ID NO: 2061122 - RNA, 19 nt, Artificial Sequence
  Description of Artificial Sequence: Synthetic oligonucleotide
acuuguagugcagcaccgc

SEQ ID NO: 2061123 - RNA, 19 nt, Artificial Sequence
  Description of Artificial Sequence: Synthetic oligonucleotide
uuuauacguugcuccuugc

SEQ ID NO: 2061124 - RNA, 19 nt, Artificial Sequence
  Description of Artificial Sequence: Synthetic oligonucleotide
acuuuggcaaugguguuug

SEQ ID NO: 2061125 - RNA, 19 nt, Artificial Sequence
  Description of Artificial Sequence: Synthetic oligonucleotide
gaguauuuauacguugcuc

SEQ ID NO: 2061126 - RNA, 19 nt, Artificial Sequence
  Description of Artificial Sequence: Synthetic oligonucleotide
aaaauagacugaacaccga

SEQ ID NO: 2061127 - RNA, 19 nt, Artificial Sequence
  Description of Artificial Sequence: Synthetic oligonucleotide
agcaccgccuuaaugacag

SEQ ID NO: 2061128 - RNA, 19 nt, Artificial Sequence
  Description of Artificial Sequence: Synthetic oligonucleotide
cgaagccuaaauaaguagg

SEQ ID NO: 2061129 - RNA, 19 nt, Artificial Sequence
  Description of Artificial Sequence: Synthetic oligonucleotide
gguaaguuuauguauuucu

SEQ ID NO: 2061130 - RNA, 19 nt, Artificial Sequence
  Description of Artificial Sequence: Synthetic oligonucleotide
aacaccucaguaugaggua

SEQ ID NO: 2061131 - RNA, 19 nt, Artificial Sequence
  Description of Artificial Sequence: Synthetic oligonucleotide
uaguuauaaucauguuacu

SEQ ID NO: 2061132 - RNA, 19 nt, Artificial Sequence
  Description of Artificial Sequence: Synthetic oligonucleotide
gccuuaaugacagguaagg

SEQ ID NO: 2061133 - RNA, 19 nt, Artificial Sequence
  Description of Artificial Sequence: Synthetic oligonucleotide
auguuacuuucauuaauuu

SEQ ID NO: 2061134 - RNA, 19 nt, Artificial Sequence
  Description of Artificial Sequence: Synthetic oligonucleotide
augagguaauuuuaaugua

SEQ ID NO: 2061135 - RNA, 19 nt, Artificial Sequence
  Description of Artificial Sequence: Synthetic oligonucleotide
auacguugcuccuugcuua

SEQ ID NO: 2061136 - RNA, 19 nt, Artificial Sequence
  Description of Artificial Sequence: Synthetic oligonucleotide
gauuaaacugaggggaaaa

SEQ ID NO: 2061137 - RNA, 19 nt, Artificial Sequence
  Description of Artificial Sequence: Synthetic oligonucleotide
acauaacuuggggaaaucu

SEQ ID NO: 2061138 - RNA, 19 nt, Artificial Sequence
  Description of Artificial Sequence: Synthetic oligonucleotide
acaaaauuuuguaaaugua

SEQ ID NO: 2061139 - RNA, 19 nt, Artificial Sequence
  Description of Artificial Sequence: Synthetic oligonucleotide
gucaauggaauuccaaacu

SEQ ID NO: 2061140 - RNA, 19 nt, Artificial Sequence
  Description of Artificial Sequence: Synthetic oligonucleotide
acccuaucagagcuggucu

SEQ ID NO: 2061141 - RNA, 19 nt, Artificial Sequence
  Description of Artificial Sequence: Synthetic oligonucleotide
cuuaaaggguaaguuuaug

SEQ ID NO: 2061142 - RNA, 19 nt, Artificial Sequence
  Description of Artificial Sequence: Synthetic oligonucleotide
cucaauagaauauauucuu

SEQ ID NO: 2061143 - RNA, 19 nt, Artificial Sequence
  Description of Artificial Sequence: Synthetic oligonucleotide
agguaaggacccuaucaga

SEQ ID NO: 2061144 - RNA, 19 nt, Artificial Sequence
  Description of Artificial Sequence: Synthetic oligonucleotide
gagcuuaauauuaaaaguu

SEQ ID NO: 2061145 - RNA, 19 nt, Artificial Sequence
  Description of Artificial Sequence: Synthetic oligonucleotide
agcuggucucaauagaaua

SEQ ID NO: 2061146 - RNA, 19 nt, Artificial Sequence
  Description of Artificial Sequence: Synthetic oligonucleotide
aagccuaaauaaguaggaa

SEQ ID NO: 2061147 - RNA, 19 nt, Artificial Sequence
  Description of Artificial Sequence: Synthetic oligonucleotide
guugcuccuugcuuaaaca

SEQ ID NO: 2061148 - RNA, 19 nt, Artificial Sequence
  Description of Artificial Sequence: Synthetic oligonucleotide
aggacccuaucagagcugg

SEQ ID NO: 2061149 - RNA, 19 nt, Artificial Sequence
  Description of Artificial Sequence: Synthetic oligonucleotide
auuucagugcaaacaccuc

SEQ ID NO: 2061150 - RNA, 19 nt, Artificial Sequence
  Description of Artificial Sequence: Synthetic oligonucleotide
gugcaaacccuuuaacaga

SEQ ID NO: 2061151 - RNA, 19 nt, Artificial Sequence
  Description of Artificial Sequence: Synthetic oligonucleotide
auauuacuuuggcaauggu

SEQ ID NO: 2061152 - RNA, 19 nt, Artificial Sequence
  Description of Artificial Sequence: Synthetic oligonucleotide
auuuaaagucuggaaugga

SEQ ID NO: 2061153 - RNA, 19 nt, Artificial Sequence
  Description of Artificial Sequence: Synthetic oligonucleotide
uucauuaauuuagcauagu

SEQ ID NO: 2061154 - RNA, 19 nt, Artificial Sequence
  Description of Artificial Sequence: Synthetic oligonucleotide
auguacuaaccacuugaaa

SEQ ID NO: 2061155 - RNA, 19 nt, Artificial Sequence
  Description of Artificial Sequence: Synthetic oligonucleotide
uauacacaaugaaccuauc

SEQ ID NO: 2061156 - RNA, 19 nt, Artificial Sequence
  Description of Artificial Sequence: Synthetic oligonucleotide
gggguuuaaauuucuaaaa

SEQ ID NO: 2061157 - RNA, 19 nt, Artificial Sequence
  Description of Artificial Sequence: Synthetic oligonucleotide
aguaggaaagucacggaaa

SEQ ID NO: 2061158 - RNA, 19 nt, Artificial Sequence
  Description of Artificial Sequence: Synthetic oligonucleotide
gcaauucacaauaagcaca

SEQ ID NO: 2061159 - RNA, 19 nt, Artificial Sequence
  Description of Artificial Sequence: Synthetic oligonucleotide
caccauuaaccaugaaauc

SEQ ID NO: 2061160 - RNA, 19 nt, Artificial Sequence
  Description of Artificial Sequence: Synthetic oligonucleotide
agauucaggaauacuguau

SEQ ID NO: 2061161 - RNA, 19 nt, Artificial Sequence
  Description of Artificial Sequence: Synthetic oligonucleotide
ucaaguagaagggguuuaa

SEQ ID NO: 2061162 - RNA, 19 nt, Artificial Sequence
  Description of Artificial Sequence: Synthetic oligonucleotide
acaugacaauugcuggcug

SEQ ID NO: 2061163 - RNA, 19 nt, Artificial Sequence
  Description of Artificial Sequence: Synthetic oligonucleotide
aagugcaguuuaugaaauu

SEQ ID NO: 2061164 - RNA, 19 nt, Artificial Sequence
  Description of Artificial Sequence: Synthetic oligonucleotide
uugaugaaacuagaacaua

SEQ ID NO: 2061165 - RNA, 19 nt, Artificial Sequence
  Description of Artificial Sequence: Synthetic oligonucleotide
cucaguaugagguaauuuu

SEQ ID NO: 2061166 - RNA, 19 nt, Artificial Sequence
  Description of Artificial Sequence: Synthetic oligonucleotide
auuaaacugaggggaaaau

SEQ ID NO: 2061167 - RNA, 19 nt, Artificial Sequence
  Description of Artificial Sequence: Synthetic oligonucleotide
uuucaaguagaagggguuu

SEQ ID NO: 2061168 - RNA, 19 nt, Artificial Sequence
  Description of Artificial Sequence: Synthetic oligonucleotide
gcugacaagacaaugugga

SEQ ID NO: 2061169 - RNA, 19 nt, Artificial Sequence
  Description of Artificial Sequence: Synthetic oligonucleotide
guacucuaaguuuuacaaa

SEQ ID NO: 2061170 - RNA, 19 nt, Artificial Sequence
  Description of Artificial Sequence: Synthetic oligonucleotide
ugacagguaaggacccuau

SEQ ID NO: 2061171 - RNA, 19 nt, Artificial Sequence
  Description of Artificial Sequence: Synthetic oligonucleotide
aaaggucaauggaauucca

SEQ ID NO: 2061172 - RNA, 19 nt, Artificial Sequence
  Description of Artificial Sequence: Synthetic oligonucleotide
guaaguuuauguauuucua

SEQ ID NO: 2061173 - RNA, 19 nt, Artificial Sequence
  Description of Artificial Sequence: Synthetic oligonucleotide
aguuuacaugacaauugcu

SEQ ID NO: 2061174 - RNA, 19 nt, Artificial Sequence
  Description of Artificial Sequence: Synthetic oligonucleotide
gagguaauuuuaauguacu

SEQ ID NO: 2061175 - RNA, 19 nt, Artificial Sequence
  Description of Artificial Sequence: Synthetic oligonucleotide
aaugacagguaaggacccu

SEQ ID NO: 2061176 - RNA, 19 nt, Artificial Sequence
  Description of Artificial Sequence: Synthetic oligonucleotide
auuucuuaugagauuucaa

SEQ ID NO: 2061177 - RNA, 19 nt, Artificial Sequence
  Description of Artificial Sequence: Synthetic oligonucleotide
cauguuacuuucauuaauu

SEQ ID NO: 2061178 - RNA, 19 nt, Artificial Sequence
  Description of Artificial Sequence: Synthetic oligonucleotide
aaggucaauggaauuccaa

SEQ ID NO: 2061179 - RNA, 19 nt, Artificial Sequence
  Description of Artificial Sequence: Synthetic oligonucleotide
caugacaauugcuggcuga

SEQ ID NO: 2061180 - RNA, 19 nt, Artificial Sequence
  Description of Artificial Sequence: Synthetic oligonucleotide
cacaguggcacgcuuaaaa

SEQ ID NO: 2061181 - RNA, 19 nt, Artificial Sequence
  Description of Artificial Sequence: Synthetic oligonucleotide
guugaugaaacuagaacau

SEQ ID NO: 2061182 - RNA, 19 nt, Artificial Sequence
  Description of Artificial Sequence: Synthetic oligonucleotide
gacccuaucagagcugguc

SEQ ID NO: 2061183 - RNA, 19 nt, Artificial Sequence
  Description of Artificial Sequence: Synthetic oligonucleotide
cuauugaaaaugcaaguuu

SEQ ID NO: 2061184 - RNA, 19 nt, Artificial Sequence
  Description of Artificial Sequence: Synthetic oligonucleotide
uucaaguagaagggguuua

SEQ ID NO: 2061185 - RNA, 19 nt, Artificial Sequence
  Description of Artificial Sequence: Synthetic oligonucleotide
uauuuauacguugcuccuu

SEQ ID NO: 2061186 - RNA, 19 nt, Artificial Sequence
  Description of Artificial Sequence: Synthetic oligonucleotide
gucuuguuuggacauauau

SEQ ID NO: 2061187 - RNA, 19 nt, Artificial Sequence
  Description of Artificial Sequence: Synthetic oligonucleotide
ucagucaguuuugaguauu

SEQ ID NO: 2061188 - RNA, 19 nt, Artificial Sequence
  Description of Artificial Sequence: Synthetic oligonucleotide
aaauguacucuaaguuuua

SEQ ID NO: 2061189 - RNA, 19 nt, Artificial Sequence
  Description of Artificial Sequence: Synthetic oligonucleotide
agguaacaauuuaaagucu

SEQ ID NO: 2061190 - RNA, 19 nt, Artificial Sequence
  Description of Artificial Sequence: Synthetic oligonucleotide
cuuuaacagaggugaucuc

SEQ ID NO: 2061191 - RNA, 19 nt, Artificial Sequence
  Description of Artificial Sequence: Synthetic oligonucleotide
cuuauaagugcaaacccuu

SEQ ID NO: 2061192 - RNA, 19 nt, Artificial Sequence
  Description of Artificial Sequence: Synthetic oligonucleotide
aggguaaguuuauguauuu

SEQ ID NO: 2061193 - RNA, 19 nt, Artificial Sequence
  Description of Artificial Sequence: Synthetic oligonucleotide
accuaucuuaaaggguaag

SEQ ID NO: 2061194 - RNA, 19 nt, Artificial Sequence
  Description of Artificial Sequence: Synthetic oligonucleotide
uuacuuuggcaaugguguu

SEQ ID NO: 2061195 - RNA, 19 nt, Artificial Sequence
  Description of Artificial Sequence: Synthetic oligonucleotide
caaaguuaacuacagcaau

SEQ ID NO: 2061196 - RNA, 19 nt, Artificial Sequence
  Description of Artificial Sequence: Synthetic oligonucleotide
ggcugacaagacaaugugg

SEQ ID NO: 2061197 - RNA, 19 nt, Artificial Sequence
  Description of Artificial Sequence: Synthetic oligonucleotide
ccgaagccuaaauaaguag

SEQ ID NO: 2061198 - RNA, 19 nt, Artificial Sequence
  Description of Artificial Sequence: Synthetic oligonucleotide
agauuaaacugaggggaaa

SEQ ID NO: 2061199 - RNA, 19 nt, Artificial Sequence
  Description of Artificial Sequence: Synthetic oligonucleotide
agaagggguuuaaauuucu

SEQ ID NO: 2061200 - RNA, 19 nt, Artificial Sequence
  Description of Artificial Sequence: Synthetic oligonucleotide
cuguguugaugaaacuaga

SEQ ID NO: 2061201 - RNA, 19 nt, Artificial Sequence
  Description of Artificial Sequence: Synthetic oligonucleotide
uacguugcuccuugcuuaa

SEQ ID NO: 2061202 - RNA, 19 nt, Artificial Sequence
  Description of Artificial Sequence: Synthetic oligonucleotide
guaggaaagucacggaaau

SEQ ID NO: 2061203 - RNA, 19 nt, Artificial Sequence
  Description of Artificial Sequence: Synthetic oligonucleotide
cagauuaaacugaggggaa

SEQ ID NO: 2061204 - RNA, 19 nt, Artificial Sequence
  Description of Artificial Sequence: Synthetic oligonucleotide
auuaaccaugaaaucugaa

SEQ ID NO: 2061205 - RNA, 19 nt, Artificial Sequence
  Description of Artificial Sequence: Synthetic oligonucleotide
aaccuaucuuaaaggguaa

SEQ ID NO: 2061206 - RNA, 19 nt, Artificial Sequence
  Description of Artificial Sequence: Synthetic oligonucleotide
guuuccaaaaugagcuuaa

SEQ ID NO: 2061207 - RNA, 19 nt, Artificial Sequence
  Description of Artificial Sequence: Synthetic oligonucleotide
ggugaucucagucaguuuu

SEQ ID NO: 2061208 - RNA, 19 nt, Artificial Sequence
  Description of Artificial Sequence: Synthetic oligonucleotide
acuugaaauauuggauaua

SEQ ID NO: 2061209 - RNA, 19 nt, Artificial Sequence
  Description of Artificial Sequence: Synthetic oligonucleotide
cacacaccauuaaccauga

SEQ ID NO: 2061210 - RNA, 19 nt, Artificial Sequence
  Description of Artificial Sequence: Synthetic oligonucleotide
uagugcagcaccgccuuaa

SEQ ID NO: 2061211 - RNA, 19 nt, Artificial Sequence
  Description of Artificial Sequence: Synthetic oligonucleotide
gucacggaaauauuacuuu

SEQ ID NO: 2061212 - RNA, 19 nt, Artificial Sequence
  Description of Artificial Sequence: Synthetic oligonucleotide
acaccucaguaugagguaa

SEQ ID NO: 2061213 - RNA, 19 nt, Artificial Sequence
  Description of Artificial Sequence: Synthetic oligonucleotide
aaggacccuaucagagcug

SEQ ID NO: 2061214 - RNA, 19 nt, Artificial Sequence
  Description of Artificial Sequence: Synthetic oligonucleotide
accgaagccuaaauaagua

SEQ ID NO: 2061215 - RNA, 19 nt, Artificial Sequence
  Description of Artificial Sequence: Synthetic oligonucleotide
cuaucuuaaaggguaaguu

SEQ ID NO: 2061216 - RNA, 19 nt, Artificial Sequence
  Description of Artificial Sequence: Synthetic oligonucleotide
uaggaaagucacggaaaua

SEQ ID NO: 2061217 - RNA, 19 nt, Artificial Sequence
  Description of Artificial Sequence: Synthetic oligonucleotide
cagaguaaagaagugcagu

SEQ ID NO: 2061218 - RNA, 19 nt, Artificial Sequence
  Description of Artificial Sequence: Synthetic oligonucleotide
caauguggauuauauguuu

SEQ ID NO: 2061219 - RNA, 19 nt, Artificial Sequence
  Description of Artificial Sequence: Synthetic oligonucleotide
gugcacaaacacacacacc

SEQ ID NO: 2061220 - RNA, 19 nt, Artificial Sequence
  Description of Artificial Sequence: Synthetic oligonucleotide
gugcaguuuaugaaauuua

SEQ ID NO: 2061221 - RNA, 19 nt, Artificial Sequence
  Description of Artificial Sequence: Synthetic oligonucleotide
gaagggguuuaaauuucua

SEQ ID NO: 2061222 - RNA, 19 nt, Artificial Sequence
  Description of Artificial Sequence: Synthetic oligonucleotide
gaggugaucucagucaguu

SEQ ID NO: 2061223 - RNA, 19 nt, Artificial Sequence
  Description of Artificial Sequence: Synthetic oligonucleotide
gcuggcugacaagacaaug

SEQ ID NO: 2061224 - RNA, 19 nt, Artificial Sequence
  Description of Artificial Sequence: Synthetic oligonucleotide
agugcagcaccgccuuaau

SEQ ID NO: 2061225 - RNA, 19 nt, Artificial Sequence
  Description of Artificial Sequence: Synthetic oligonucleotide
gaguaaagaagugcaguuu

SEQ ID NO: 2061226 - RNA, 19 nt, Artificial Sequence
  Description of Artificial Sequence: Synthetic oligonucleotide
acacacacacccacacaca

SEQ ID NO: 2061227 - RNA, 19 nt, Artificial Sequence
  Description of Artificial Sequence: Synthetic oligonucleotide
cuggucucaauagaauaua

SEQ ID NO: 2061228 - RNA, 19 nt, Artificial Sequence
  Description of Artificial Sequence: Synthetic oligonucleotide
auggaauuccaaacuugua

SEQ ID NO: 2061229 - RNA, 19 nt, Artificial Sequence
  Description of Artificial Sequence: Synthetic oligonucleotide
ggguaaguuuauguauuuc

SEQ ID NO: 2061230 - RNA, 19 nt, Artificial Sequence
  Description of Artificial Sequence: Synthetic oligonucleotide
gcuccuugcuuaaacacaa

SEQ ID NO: 2061231 - RNA, 19 nt, Artificial Sequence
  Description of Artificial Sequence: Synthetic oligonucleotide
aggugaucucagucaguuu

SEQ ID NO: 2061232 - RNA, 19 nt, Artificial Sequence
  Description of Artificial Sequence: Synthetic oligonucleotide
ccaaaaugagcuuaauauu

SEQ ID NO: 2061233 - RNA, 19 nt, Artificial Sequence
  Description of Artificial Sequence: Synthetic oligonucleotide
agaggugaucucagucagu

SEQ ID NO: 2061234 - RNA, 19 nt, Artificial Sequence
  Description of Artificial Sequence: Synthetic oligonucleotide
ccuugcuuaaacacaaaau

SEQ ID NO: 2061235 - RNA, 19 nt, Artificial Sequence
  Description of Artificial Sequence: Synthetic oligonucleotide
guacuguguugaugaaacu

SEQ ID NO: 2061236 - RNA, 19 nt, Artificial Sequence
  Description of Artificial Sequence: Synthetic oligonucleotide
accucaguaugagguaauu

SEQ ID NO: 2061237 - RNA, 19 nt, Artificial Sequence
  Description of Artificial Sequence: Synthetic oligonucleotide
cguugcuccuugcuuaaac

SEQ ID NO: 2061238 - RNA, 19 nt, Artificial Sequence
  Description of Artificial Sequence: Synthetic oligonucleotide
accgccuuaaugacaggua

SEQ ID NO: 2061239 - RNA, 19 nt, Artificial Sequence
  Description of Artificial Sequence: Synthetic oligonucleotide
cacacacacccacacacau

SEQ ID NO: 2061240 - RNA, 19 nt, Artificial Sequence
  Description of Artificial Sequence: Synthetic oligonucleotide
cgccuuaaugacagguaag

SEQ ID NO: 2061241 - RNA, 19 nt, Artificial Sequence
  Description of Artificial Sequence: Synthetic oligonucleotide
auccacacaguggcacgcu

SEQ ID NO: 2061242 - RNA, 19 nt, Artificial Sequence
  Description of Artificial Sequence: Synthetic oligonucleotide
cugacaagacaauguggau

SEQ ID NO: 2061243 - RNA, 19 nt, Artificial Sequence
  Description of Artificial Sequence: Synthetic oligonucleotide
cagcaccgccuuaaugaca

SEQ ID NO: 2061244 - RNA, 19 nt, Artificial Sequence
  Description of Artificial Sequence: Synthetic oligonucleotide
cccuuuaacagaggugauc

SEQ ID NO: 2061245 - RNA, 19 nt, Artificial Sequence
  Description of Artificial Sequence: Synthetic oligonucleotide
ccuuaaugacagguaagga

SEQ ID NO: 2061246 - RNA, 19 nt, Artificial Sequence
  Description of Artificial Sequence: Synthetic oligonucleotide
cccuaucagagcuggucuc

SEQ ID NO: 2061247 - RNA, 19 nt, Artificial Sequence
  Description of Artificial Sequence: Synthetic oligonucleotide
caaugguguuugcuguacu

SEQ ID NO: 2061248 - RNA, 19 nt, Artificial Sequence
  Description of Artificial Sequence: Synthetic oligonucleotide
gagcuggucucaauagaau

SEQ ID NO: 2061249 - RNA, 19 nt, Artificial Sequence
  Description of Artificial Sequence: Synthetic oligonucleotide
acacaccauuaaccaugaa

SEQ ID NO: 2061250 - RNA, 19 nt, Artificial Sequence
  Description of Artificial Sequence: Synthetic oligonucleotide
gcuggucucaauagaauau

SEQ ID NO: 2061251 - RNA, 19 nt, Artificial Sequence
  Description of Artificial Sequence: Synthetic oligonucleotide
acacacacccacacacaua

SEQ ID NO: 2061252 - RNA, 19 nt, Artificial Sequence
  Description of Artificial Sequence: Synthetic oligonucleotide
cuccuugcuuaaacacaaa

SEQ ID NO: 2061253 - RNA, 19 nt, Artificial Sequence
  Description of Artificial Sequence: Synthetic oligonucleotide
gguguuugcuguacugugu

SEQ ID NO: 2061254 - RNA, 19 nt, Artificial Sequence
  Description of Artificial Sequence: Synthetic oligonucleotide
acugaacaccgaagccuaa

SEQ ID NO: 2061255 - RNA, 19 nt, Artificial Sequence
  Description of Artificial Sequence: Synthetic oligonucleotide
ccaugaaaucugaaacugu

SEQ ID NO: 2061256 - RNA, 19 nt, Artificial Sequence
  Description of Artificial Sequence: Synthetic oligonucleotide
ccgccuuaaugacagguaa

SEQ ID NO: 2061257 - RNA, 19 nt, Artificial Sequence
  Description of Artificial Sequence: Synthetic oligonucleotide
acccuuuaacagaggugau

SEQ ID NO: 2061258 - RNA, 19 nt, Artificial Sequence
  Description of Artificial Sequence: Synthetic oligonucleotide
cucagucaguuuugaguau

SEQ ID NO: 2061259 - RNA, 19 nt, Artificial Sequence
  Description of Artificial Sequence: Synthetic oligonucleotide
ccuaucuuaaaggguaagu

SEQ ID NO: 2061260 - RNA, 19 nt, Artificial Sequence
  Description of Artificial Sequence: Synthetic oligonucleotide
ccuaucagagcuggucuca

SEQ ID NO: 2061261 - RNA, 19 nt, Artificial Sequence
  Description of Artificial Sequence: Synthetic oligonucleotide
caccgccuuaaugacaggu

SEQ ID NO: 2061262 - RNA, 19 nt, Artificial Sequence
  Description of Artificial Sequence: Synthetic oligonucleotide
ggucucaauagaauauauu

SEQ ID NO: 2061263 - RNA, 19 nt, Artificial Sequence
  Description of Artificial Sequence: Synthetic oligonucleotide
cagucaguuuugaguauuu

SEQ ID NO: 2061264 - RNA, 19 nt, Artificial Sequence
  Description of Artificial Sequence: Synthetic oligonucleotide
acacaguggcacgcuuaaa

SEQ ID NO: 2061265 - RNA, 19 nt, Artificial Sequence
  Description of Artificial Sequence: Synthetic oligonucleotide
caccucaguaugagguaau

SEQ ID NO: 2061266 - RNA, 19 nt, Artificial Sequence
  Description of Artificial Sequence: Synthetic oligonucleotide
acguugcuccuugcuuaaa

SEQ ID NO: 2061267 - RNA, 19 nt, Artificial Sequence
  Description of Artificial Sequence: Synthetic oligonucleotide
ccacacaguggcacgcuua

SEQ ID NO: 2061268 - RNA, 19 nt, Artificial Sequence
  Description of Artificial Sequence: Synthetic oligonucleotide
ccucaguaugagguaauuu

SEQ ID NO: 2061269 - RNA, 19 nt, Artificial Sequence
  Description of Artificial Sequence: Synthetic oligonucleotide
ggacccuaucagagcuggu

SEQ ID NO: 2061270 - RNA, 19 nt, Artificial Sequence
  Description of Artificial Sequence: Synthetic oligonucleotide
uccgugaucaugcagagcg

SEQ ID NO: 2061271 - RNA, 19 nt, Artificial Sequence
  Description of Artificial Sequence: Synthetic oligonucleotide
ucagauaaguacauggucu

SEQ ID NO: 2061272 - RNA, 19 nt, Artificial Sequence
  Description of Artificial Sequence: Synthetic oligonucleotide
agagugugcauguuguuac

SEQ ID NO: 2061273 - RNA, 19 nt, Artificial Sequence
  Description of Artificial Sequence: Synthetic oligonucleotide
agagcagcaacgcggagcc

SEQ ID NO: 2061274 - RNA, 19 nt, Artificial Sequence
  Description of Artificial Sequence: Synthetic oligonucleotide
auaaguacauggucugccc

SEQ ID NO: 2061275 - RNA, 19 nt, Artificial Sequence
  Description of Artificial Sequence: Synthetic oligonucleotide
aaaccucccacucuccacg

SEQ ID NO: 2061276 - RNA, 19 nt, Artificial Sequence
  Description of Artificial Sequence: Synthetic oligonucleotide
ucuggaagguccuuagccg

SEQ ID NO: 2061277 - RNA, 19 nt, Artificial Sequence
  Description of Artificial Sequence: Synthetic oligonucleotide
uucaacaccacuccaccag

SEQ ID NO: 2061278 - RNA, 19 nt, Artificial Sequence
  Description of Artificial Sequence: Synthetic oligonucleotide
agcagaaugggguggaguc

SEQ ID NO: 2061279 - RNA, 19 nt, Artificial Sequence
  Description of Artificial Sequence: Synthetic oligonucleotide
auguucggguccuucagcc

SEQ ID NO: 2061280 - RNA, 19 nt, Artificial Sequence
  Description of Artificial Sequence: Synthetic oligonucleotide
ucguccugcacacacacgc

SEQ ID NO: 2061281 - RNA, 19 nt, Artificial Sequence
  Description of Artificial Sequence: Synthetic oligonucleotide
uacaauggaccugcgaugg

SEQ ID NO: 2061282 - RNA, 19 nt, Artificial Sequence
  Description of Artificial Sequence: Synthetic oligonucleotide
gacaugaucuucaaccucc

SEQ ID NO: 2061283 - RNA, 19 nt, Artificial Sequence
  Description of Artificial Sequence: Synthetic oligonucleotide
agagaggugaaccgucagc

SEQ ID NO: 2061284 - RNA, 19 nt, Artificial Sequence
  Description of Artificial Sequence: Synthetic oligonucleotide
uaguccgugaucaugcaga

SEQ ID NO: 2061285 - RNA, 19 nt, Artificial Sequence
  Description of Artificial Sequence: Synthetic oligonucleotide
agcuaugguugcuccaucc

SEQ ID NO: 2061286 - RNA, 19 nt, Artificial Sequence
  Description of Artificial Sequence: Synthetic oligonucleotide
guuguuacaauggaccugc

SEQ ID NO: 2061287 - RNA, 19 nt, Artificial Sequence
  Description of Artificial Sequence: Synthetic oligonucleotide
caaaccgccauacugcagc

SEQ ID NO: 2061288 - RNA, 19 nt, Artificial Sequence
  Description of Artificial Sequence: Synthetic oligonucleotide
aaaccgccauacugcagcc

SEQ ID NO: 2061289 - RNA, 19 nt, Artificial Sequence
  Description of Artificial Sequence: Synthetic oligonucleotide
guugcuccaucccacauag

SEQ ID NO: 2061290 - RNA, 19 nt, Artificial Sequence
  Description of Artificial Sequence: Synthetic oligonucleotide
auguaguccgugaucaugc

SEQ ID NO: 2061291 - RNA, 19 nt, Artificial Sequence
  Description of Artificial Sequence: Synthetic oligonucleotide
ucaacaccacuccaccagg

SEQ ID NO: 2061292 - RNA, 19 nt, Artificial Sequence
  Description of Artificial Sequence: Synthetic oligonucleotide
uugagaugcaccaccucag

SEQ ID NO: 2061293 - RNA, 19 nt, Artificial Sequence
  Description of Artificial Sequence: Synthetic oligonucleotide
ugcauguuguuacaaugga

SEQ ID NO: 2061294 - RNA, 19 nt, Artificial Sequence
  Description of Artificial Sequence: Synthetic oligonucleotide
acacucaugacucggucag

SEQ ID NO: 2061295 - RNA, 19 nt, Artificial Sequence
  Description of Artificial Sequence: Synthetic oligonucleotide
uuacaauggaccugcgaug

SEQ ID NO: 2061296 - RNA, 19 nt, Artificial Sequence
  Description of Artificial Sequence: Synthetic oligonucleotide
cucguuacccgaaaucacc

SEQ ID NO: 2061297 - RNA, 19 nt, Artificial Sequence
  Description of Artificial Sequence: Synthetic oligonucleotide
gaaaucaccuccugacccc

SEQ ID NO: 2061298 - RNA, 19 nt, Artificial Sequence
  Description of Artificial Sequence: Synthetic oligonucleotide
cagugcaaccuccagagag

SEQ ID NO: 2061299 - RNA, 19 nt, Artificial Sequence
  Description of Artificial Sequence: Synthetic oligonucleotide
guuacccgaaaucaccucc

SEQ ID NO: 2061300 - RNA, 19 nt, Artificial Sequence
  Description of Artificial Sequence: Synthetic oligonucleotide
ggcguaaguggccagaagg

SEQ ID NO: 2061301 - RNA, 19 nt, Artificial Sequence
  Description of Artificial Sequence: Synthetic oligonucleotide
aaguacauggucugcccca

SEQ ID NO: 2061302 - RNA, 19 nt, Artificial Sequence
  Description of Artificial Sequence: Synthetic oligonucleotide
uucaaccuccacagcauag

SEQ ID NO: 2061303 - RNA, 19 nt, Artificial Sequence
  Description of Artificial Sequence: Synthetic oligonucleotide
auagucguagccuggccag

SEQ ID NO: 2061304 - RNA, 19 nt, Artificial Sequence
  Description of Artificial Sequence: Synthetic oligonucleotide
ucaaccuccacagcauagg

SEQ ID NO: 2061305 - RNA, 19 nt, Artificial Sequence
  Description of Artificial Sequence: Synthetic oligonucleotide
gaugcaccaccucagauaa

SEQ ID NO: 2061306 - RNA, 19 nt, Artificial Sequence
  Description of Artificial Sequence: Synthetic oligonucleotide
cacgccauccgccaguugg

SEQ ID NO: 2061307 - RNA, 19 nt, Artificial Sequence
  Description of Artificial Sequence: Synthetic oligonucleotide
uagguguugccccagugac

SEQ ID NO: 2061308 - RNA, 19 nt, Artificial Sequence
  Description of Artificial Sequence: Synthetic oligonucleotide
acgacaggaguccaucccg

SEQ ID NO: 2061309 - RNA, 19 nt, Artificial Sequence
  Description of Artificial Sequence: Synthetic oligonucleotide
ugauguucggguccuucag

SEQ ID NO: 2061310 - RNA, 19 nt, Artificial Sequence
  Description of Artificial Sequence: Synthetic oligonucleotide
uaugguugcuccaucccac

SEQ ID NO: 2061311 - RNA, 19 nt, Artificial Sequence
  Description of Artificial Sequence: Synthetic oligonucleotide
uccacccgcagacagacac

SEQ ID NO: 2061312 - RNA, 19 nt, Artificial Sequence
  Description of Artificial Sequence: Synthetic oligonucleotide
agauaaguacauggucugc

SEQ ID NO: 2061313 - RNA, 19 nt, Artificial Sequence
  Description of Artificial Sequence: Synthetic oligonucleotide
uagagcuccacccgcagac

SEQ ID NO: 2061314 - RNA, 19 nt, Artificial Sequence
  Description of Artificial Sequence: Synthetic oligonucleotide
accgccauacugcagcccg

SEQ ID NO: 2061315 - RNA, 19 nt, Artificial Sequence
  Description of Artificial Sequence: Synthetic oligonucleotide
uguuacaauggaccugcga

SEQ ID NO: 2061316 - RNA, 19 nt, Artificial Sequence
  Description of Artificial Sequence: Synthetic oligonucleotide
cucagauaaguacaugguc

SEQ ID NO: 2061317 - RNA, 19 nt, Artificial Sequence
  Description of Artificial Sequence: Synthetic oligonucleotide
aacgcggagccauugggga

SEQ ID NO: 2061318 - RNA, 19 nt, Artificial Sequence
  Description of Artificial Sequence: Synthetic oligonucleotide
cagggugacaaugucagcc

SEQ ID NO: 2061319 - RNA, 19 nt, Artificial Sequence
  Description of Artificial Sequence: Synthetic oligonucleotide
uccucguuacccgaaauca

SEQ ID NO: 2061320 - RNA, 19 nt, Artificial Sequence
  Description of Artificial Sequence: Synthetic oligonucleotide
cuggaagguccuuagccgg

SEQ ID NO: 2061321 - RNA, 19 nt, Artificial Sequence
  Description of Artificial Sequence: Synthetic oligonucleotide
uacgacaggaguccauccc

SEQ ID NO: 2061322 - RNA, 19 nt, Artificial Sequence
  Description of Artificial Sequence: Synthetic oligonucleotide
auguuguuacaauggaccu

SEQ ID NO: 2061323 - RNA, 19 nt, Artificial Sequence
  Description of Artificial Sequence: Synthetic oligonucleotide
guugaggucgccauucucc

SEQ ID NO: 2061324 - RNA, 19 nt, Artificial Sequence
  Description of Artificial Sequence: Synthetic oligonucleotide
ucauacguggagucguuga

SEQ ID NO: 2061325 - RNA, 19 nt, Artificial Sequence
  Description of Artificial Sequence: Synthetic oligonucleotide
acauagucguagccuggcc

SEQ ID NO: 2061326 - RNA, 19 nt, Artificial Sequence
  Description of Artificial Sequence: Synthetic oligonucleotide
auccucguuacccgaaauc

SEQ ID NO: 2061327 - RNA, 19 nt, Artificial Sequence
  Description of Artificial Sequence: Synthetic oligonucleotide
uccuucaacaccacuccac

SEQ ID NO: 2061328 - RNA, 19 nt, Artificial Sequence
  Description of Artificial Sequence: Synthetic oligonucleotide
gacgcagggagcagaaugg

SEQ ID NO: 2061329 - RNA, 19 nt, Artificial Sequence
  Description of Artificial Sequence: Synthetic oligonucleotide
gugcauguuguuacaaugg

SEQ ID NO: 2061330 - RNA, 19 nt, Artificial Sequence
  Description of Artificial Sequence: Synthetic oligonucleotide
ucuccgguuccauauaguc

SEQ ID NO: 2061331 - RNA, 19 nt, Artificial Sequence
  Description of Artificial Sequence: Synthetic oligonucleotide
ugcaccaccucagauaagu

SEQ ID NO: 2061332 - RNA, 19 nt, Artificial Sequence
  Description of Artificial Sequence: Synthetic oligonucleotide
gucguugagaugcaccacc

SEQ ID NO: 2061333 - RNA, 19 nt, Artificial Sequence
  Description of Artificial Sequence: Synthetic oligonucleotide
ucguagccuggccagaccc

SEQ ID NO: 2061334 - RNA, 19 nt, Artificial Sequence
  Description of Artificial Sequence: Synthetic oligonucleotide
ccauucuccauguaguccg

SEQ ID NO: 2061335 - RNA, 19 nt, Artificial Sequence
  Description of Artificial Sequence: Synthetic oligonucleotide
uccaucauacguggagucg

SEQ ID NO: 2061336 - RNA, 19 nt, Artificial Sequence
  Description of Artificial Sequence: Synthetic oligonucleotide
gagucguugagaugcacca

SEQ ID NO: 2061337 - RNA, 19 nt, Artificial Sequence
  Description of Artificial Sequence: Synthetic oligonucleotide
uguuguuacaauggaccug

SEQ ID NO: 2061338 - RNA, 19 nt, Artificial Sequence
  Description of Artificial Sequence: Synthetic oligonucleotide
ucguuacccgaaaucaccu

SEQ ID NO: 2061339 - RNA, 19 nt, Artificial Sequence
  Description of Artificial Sequence: Synthetic oligonucleotide
agacacucaugacucgguc

SEQ ID NO: 2061340 - RNA, 19 nt, Artificial Sequence
  Description of Artificial Sequence: Synthetic oligonucleotide
agccauagagcuccacccg

SEQ ID NO: 2061341 - RNA, 19 nt, Artificial Sequence
  Description of Artificial Sequence: Synthetic oligonucleotide
gauguucggguccuucagc

SEQ ID NO: 2061342 - RNA, 19 nt, Artificial Sequence
  Description of Artificial Sequence: Synthetic oligonucleotide
gauuggagagcagcaacgc

SEQ ID NO: 2061343 - RNA, 19 nt, Artificial Sequence
  Description of Artificial Sequence: Synthetic oligonucleotide
gaggucgccauucuccaug

SEQ ID NO: 2061344 - RNA, 19 nt, Artificial Sequence
  Description of Artificial Sequence: Synthetic oligonucleotide
ggcgcuaaggaacugguug

SEQ ID NO: 2061345 - RNA, 19 nt, Artificial Sequence
  Description of Artificial Sequence: Synthetic oligonucleotide
aagcuaugguugcuccauc

SEQ ID NO: 2061346 - RNA, 19 nt, Artificial Sequence
  Description of Artificial Sequence: Synthetic oligonucleotide
cuccgguuccauauagucc

SEQ ID NO: 2061347 - RNA, 19 nt, Artificial Sequence
  Description of Artificial Sequence: Synthetic oligonucleotide
agacccaccacgccauccg

SEQ ID NO: 2061348 - RNA, 19 nt, Artificial Sequence
  Description of Artificial Sequence: Synthetic oligonucleotide
uuacccgaaaucaccuccu

SEQ ID NO: 2061349 - RNA, 19 nt, Artificial Sequence
  Description of Artificial Sequence: Synthetic oligonucleotide
cgggacaugaucuucaacc

SEQ ID NO: 2061350 - RNA, 19 nt, Artificial Sequence
  Description of Artificial Sequence: Synthetic oligonucleotide
uguucggguccuucagccg

SEQ ID NO: 2061351 - RNA, 19 nt, Artificial Sequence
  Description of Artificial Sequence: Synthetic oligonucleotide
uacguggagucguugagau

SEQ ID NO: 2061352 - RNA, 19 nt, Artificial Sequence
  Description of Artificial Sequence: Synthetic oligonucleotide
caccaccucagauaaguac

SEQ ID NO: 2061353 - RNA, 19 nt, Artificial Sequence
  Description of Artificial Sequence: Synthetic oligonucleotide
gaaggaggcgguaggcugg

SEQ ID NO: 2061354 - RNA, 19 nt, Artificial Sequence
  Description of Artificial Sequence: Synthetic oligonucleotide
uggagagcagcaacgcgga

SEQ ID NO: 2061355 - RNA, 19 nt, Artificial Sequence
  Description of Artificial Sequence: Synthetic oligonucleotide
uugaggucgccauucucca

SEQ ID NO: 2061356 - RNA, 19 nt, Artificial Sequence
  Description of Artificial Sequence: Synthetic oligonucleotide
agaagccggaugauguucg

SEQ ID NO: 2061357 - RNA, 19 nt, Artificial Sequence
  Description of Artificial Sequence: Synthetic oligonucleotide
gguagaagcggaccagccg

SEQ ID NO: 2061358 - RNA, 19 nt, Artificial Sequence
  Description of Artificial Sequence: Synthetic oligonucleotide
agaugcaccaccucagaua

SEQ ID NO: 2061359 - RNA, 19 nt, Artificial Sequence
  Description of Artificial Sequence: Synthetic oligonucleotide
caugacucggucagcccgg

SEQ ID NO: 2061360 - RNA, 19 nt, Artificial Sequence
  Description of Artificial Sequence: Synthetic oligonucleotide
gaagguccuuagccggucg

SEQ ID NO: 2061361 - RNA, 19 nt, Artificial Sequence
  Description of Artificial Sequence: Synthetic oligonucleotide
cuguguacgacaggagucc

SEQ ID NO: 2061362 - RNA, 19 nt, Artificial Sequence
  Description of Artificial Sequence: Synthetic oligonucleotide
aguccgugaucaugcagag

SEQ ID NO: 2061363 - RNA, 19 nt, Artificial Sequence
  Description of Artificial Sequence: Synthetic oligonucleotide
accaccucagauaaguaca

SEQ ID NO: 2061364 - RNA, 19 nt, Artificial Sequence
  Description of Artificial Sequence: Synthetic oligonucleotide
cuucuccgguuccauauag

SEQ ID NO: 2061365 - RNA, 19 nt, Artificial Sequence
  Description of Artificial Sequence: Synthetic oligonucleotide
caacgcggagccauugggg

SEQ ID NO: 2061366 - RNA, 19 nt, Artificial Sequence
  Description of Artificial Sequence: Synthetic oligonucleotide
uguugguggguuuggccca

SEQ ID NO: 2061367 - RNA, 19 nt, Artificial Sequence
  Description of Artificial Sequence: Synthetic oligonucleotide
cuccugaccccaucggucc

SEQ ID NO: 2061368 - RNA, 19 nt, Artificial Sequence
  Description of Artificial Sequence: Synthetic oligonucleotide
uguacgacaggaguccauc

SEQ ID NO: 2061369 - RNA, 19 nt, Artificial Sequence
  Description of Artificial Sequence: Synthetic oligonucleotide
ucguugagaugcaccaccu

SEQ ID NO: 2061370 - RNA, 19 nt, Artificial Sequence
  Description of Artificial Sequence: Synthetic oligonucleotide
agcgggucguccugcacac

SEQ ID NO: 2061371 - RNA, 19 nt, Artificial Sequence
  Description of Artificial Sequence: Synthetic oligonucleotide
aguacauggucugccccac

SEQ ID NO: 2061372 - RNA, 19 nt, Artificial Sequence
  Description of Artificial Sequence: Synthetic oligonucleotide
gaacuccaaaaccucccac

SEQ ID NO: 2061373 - RNA, 19 nt, Artificial Sequence
  Description of Artificial Sequence: Synthetic oligonucleotide
uccacagcauagguguugc

SEQ ID NO: 2061374 - RNA, 19 nt, Artificial Sequence
  Description of Artificial Sequence: Synthetic oligonucleotide
agcaacgcggagccauugg

SEQ ID NO: 2061375 - RNA, 19 nt, Artificial Sequence
  Description of Artificial Sequence: Synthetic oligonucleotide
caucccacauagucguagc

SEQ ID NO: 2061376 - RNA, 19 nt, Artificial Sequence
  Description of Artificial Sequence: Synthetic oligonucleotide
gguccuucaacaccacucc

SEQ ID NO: 2061377 - RNA, 19 nt, Artificial Sequence
  Description of Artificial Sequence: Synthetic oligonucleotide
acauggucugccccacggg

SEQ ID NO: 2061378 - RNA, 19 nt, Artificial Sequence
  Description of Artificial Sequence: Synthetic oligonucleotide
agggugacaaugucagccu

SEQ ID NO: 2061379 - RNA, 19 nt, Artificial Sequence
  Description of Artificial Sequence: Synthetic oligonucleotide
gguggaguccccgaggccg

SEQ ID NO: 2061380 - RNA, 19 nt, Artificial Sequence
  Description of Artificial Sequence: Synthetic oligonucleotide
gaagccggaugauguucgg

SEQ ID NO: 2061381 - RNA, 19 nt, Artificial Sequence
  Description of Artificial Sequence: Synthetic oligonucleotide
guaguccgugaucaugcag

SEQ ID NO: 2061382 - RNA, 19 nt, Artificial Sequence
  Description of Artificial Sequence: Synthetic oligonucleotide
aagccggaugauguucggg

SEQ ID NO: 2061383 - RNA, 19 nt, Artificial Sequence
  Description of Artificial Sequence: Synthetic oligonucleotide
uuguuacaauggaccugcg

SEQ ID NO: 2061384 - RNA, 19 nt, Artificial Sequence
  Description of Artificial Sequence: Synthetic oligonucleotide
uccuuagccggucgaacuc

SEQ ID NO: 2061385 - RNA, 19 nt, Artificial Sequence
  Description of Artificial Sequence: Synthetic oligonucleotide
caggaguccaucccgccag

SEQ ID NO: 2061386 - RNA, 19 nt, Artificial Sequence
  Description of Artificial Sequence: Synthetic oligonucleotide
uucggguccuucagccggg

SEQ ID NO: 2061387 - RNA, 19 nt, Artificial Sequence
  Description of Artificial Sequence: Synthetic oligonucleotide
gguguugccccagugacgc

SEQ ID NO: 2061388 - RNA, 19 nt, Artificial Sequence
  Description of Artificial Sequence: Synthetic oligonucleotide
cauagucguagccuggcca

SEQ ID NO: 2061389 - RNA, 19 nt, Artificial Sequence
  Description of Artificial Sequence: Synthetic oligonucleotide
uguaguccgugaucaugca

SEQ ID NO: 2061390 - RNA, 19 nt, Artificial Sequence
  Description of Artificial Sequence: Synthetic oligonucleotide
aagguccuuagccggucga

SEQ ID NO: 2061391 - RNA, 19 nt, Artificial Sequence
  Description of Artificial Sequence: Synthetic oligonucleotide
ggacgcagggagcagaaug

SEQ ID NO: 2061392 - RNA, 19 nt, Artificial Sequence
  Description of Artificial Sequence: Synthetic oligonucleotide
cagacagacacucaugacu

SEQ ID NO: 2061393 - RNA, 19 nt, Artificial Sequence
  Description of Artificial Sequence: Synthetic oligonucleotide
gagcuccacccgcagacag

SEQ ID NO: 2061394 - RNA, 19 nt, Artificial Sequence
  Description of Artificial Sequence: Synthetic oligonucleotide
aaccgccauacugcagccc

SEQ ID NO: 2061395 - RNA, 19 nt, Artificial Sequence
  Description of Artificial Sequence: Synthetic oligonucleotide
ugucagccucggcauagug

SEQ ID NO: 2061396 - RNA, 19 nt, Artificial Sequence
  Description of Artificial Sequence: Synthetic oligonucleotide
gacaggaguccaucccgcc

SEQ ID NO: 2061397 - RNA, 19 nt, Artificial Sequence
  Description of Artificial Sequence: Synthetic oligonucleotide
guacgacaggaguccaucc

SEQ ID NO: 2061398 - RNA, 19 nt, Artificial Sequence
  Description of Artificial Sequence: Synthetic oligonucleotide
cuaugguugcuccauccca

SEQ ID NO: 2061399 - RNA, 19 nt, Artificial Sequence
  Description of Artificial Sequence: Synthetic oligonucleotide
uucuccgguuccauauagu

SEQ ID NO: 2061400 - RNA, 19 nt, Artificial Sequence
  Description of Artificial Sequence: Synthetic oligonucleotide
agucguagccuggccagac

SEQ ID NO: 2061401 - RNA, 19 nt, Artificial Sequence
  Description of Artificial Sequence: Synthetic oligonucleotide
auuggggacgcagggagca

SEQ ID NO: 2061402 - RNA, 19 nt, Artificial Sequence
  Description of Artificial Sequence: Synthetic oligonucleotide
agucguugagaugcaccac

SEQ ID NO: 2061403 - RNA, 19 nt, Artificial Sequence
  Description of Artificial Sequence: Synthetic oligonucleotide
ggugacaaugucagccucg

SEQ ID NO: 2061404 - RNA, 19 nt, Artificial Sequence
  Description of Artificial Sequence: Synthetic oligonucleotide
cacguagccacuggggaag

SEQ ID NO: 2061405 - RNA, 19 nt, Artificial Sequence
  Description of Artificial Sequence: Synthetic oligonucleotide
cccgaaaucaccuccugac

SEQ ID NO: 2061406 - RNA, 19 nt, Artificial Sequence
  Description of Artificial Sequence: Synthetic oligonucleotide
uacccgaaaucaccuccug

SEQ ID NO: 2061407 - RNA, 19 nt, Artificial Sequence
  Description of Artificial Sequence: Synthetic oligonucleotide
cgaaaucaccuccugaccc

SEQ ID NO: 2061408 - RNA, 19 nt, Artificial Sequence
  Description of Artificial Sequence: Synthetic oligonucleotide
ggcccaaaccgccauacug

SEQ ID NO: 2061409 - RNA, 19 nt, Artificial Sequence
  Description of Artificial Sequence: Synthetic oligonucleotide
guccugcacacacacgccc

SEQ ID NO: 2061410 - RNA, 19 nt, Artificial Sequence
  Description of Artificial Sequence: Synthetic oligonucleotide
uggaccugcgauggucugg

SEQ ID NO: 2061411 - RNA, 19 nt, Artificial Sequence
  Description of Artificial Sequence: Synthetic oligonucleotide
cacauagucguagccuggc

SEQ ID NO: 2061412 - RNA, 19 nt, Artificial Sequence
  Description of Artificial Sequence: Synthetic oligonucleotide
gagaggugaaccgucagcu

SEQ ID NO: 2061413 - RNA, 19 nt, Artificial Sequence
  Description of Artificial Sequence: Synthetic oligonucleotide
acgcggagccauuggggac

SEQ ID NO: 2061414 - RNA, 19 nt, Artificial Sequence
  Description of Artificial Sequence: Synthetic oligonucleotide
aaccuccagagagugugca

SEQ ID NO: 2061415 - RNA, 19 nt, Artificial Sequence
  Description of Artificial Sequence: Synthetic oligonucleotide
uccaucccgccagaggcag

SEQ ID NO: 2061416 - RNA, 19 nt, Artificial Sequence
  Description of Artificial Sequence: Synthetic oligonucleotide
uagccggucgaacuccaaa

SEQ ID NO: 2061417 - RNA, 19 nt, Artificial Sequence
  Description of Artificial Sequence: Synthetic oligonucleotide
gcaacgcggagccauuggg

SEQ ID NO: 2061418 - RNA, 19 nt, Artificial Sequence
  Description of Artificial Sequence: Synthetic oligonucleotide
agccggucgaacuccaaaa

SEQ ID NO: 2061419 - RNA, 19 nt, Artificial Sequence
  Description of Artificial Sequence: Synthetic oligonucleotide
uuggcccaaaccgccauac

SEQ ID NO: 2061420 - RNA, 19 nt, Artificial Sequence
  Description of Artificial Sequence: Synthetic oligonucleotide
gcucucgcggcccugggcg

SEQ ID NO: 2061421 - RNA, 19 nt, Artificial Sequence
  Description of Artificial Sequence: Synthetic oligonucleotide
ugacaaugucagccucggc

SEQ ID NO: 2061422 - RNA, 19 nt, Artificial Sequence
  Description of Artificial Sequence: Synthetic oligonucleotide
cucuccacguagccacugg

SEQ ID NO: 2061423 - RNA, 19 nt, Artificial Sequence
  Description of Artificial Sequence: Synthetic oligonucleotide
acacacgcccagaagccgg

SEQ ID NO: 2061424 - RNA, 19 nt, Artificial Sequence
  Description of Artificial Sequence: Synthetic oligonucleotide
agugcaaccuccagagagu

SEQ ID NO: 2061425 - RNA, 19 nt, Artificial Sequence
  Description of Artificial Sequence: Synthetic oligonucleotide
acccgaaaucaccuccuga

SEQ ID NO: 2061426 - RNA, 19 nt, Artificial Sequence
  Description of Artificial Sequence: Synthetic oligonucleotide
gagagugugcauguuguua

SEQ ID NO: 2061427 - RNA, 19 nt, Artificial Sequence
  Description of Artificial Sequence: Synthetic oligonucleotide
gcuaugguugcuccauccc

SEQ ID NO: 2061428 - RNA, 19 nt, Artificial Sequence
  Description of Artificial Sequence: Synthetic oligonucleotide
uguguacgacaggagucca

SEQ ID NO: 2061429 - RNA, 19 nt, Artificial Sequence
  Description of Artificial Sequence: Synthetic oligonucleotide
cagagaggugaaccgucag

SEQ ID NO: 2061430 - RNA, 19 nt, Artificial Sequence
  Description of Artificial Sequence: Synthetic oligonucleotide
accuccugaccccaucggu

SEQ ID NO: 2061431 - RNA, 19 nt, Artificial Sequence
  Description of Artificial Sequence: Synthetic oligonucleotide
cuucaacaccacuccacca

SEQ ID NO: 2061432 - RNA, 19 nt, Artificial Sequence
  Description of Artificial Sequence: Synthetic oligonucleotide
caucccgccagaggcagcc

SEQ ID NO: 2061433 - RNA, 19 nt, Artificial Sequence
  Description of Artificial Sequence: Synthetic oligonucleotide
ccaguuggcccaaaccgcc

SEQ ID NO: 2061434 - RNA, 19 nt, Artificial Sequence
  Description of Artificial Sequence: Synthetic oligonucleotide
gggaagcuaugguugcucc

SEQ ID NO: 2061435 - RNA, 19 nt, Artificial Sequence
  Description of Artificial Sequence: Synthetic oligonucleotide
gacgccugcagggugacaa

SEQ ID NO: 2061436 - RNA, 19 nt, Artificial Sequence
  Description of Artificial Sequence: Synthetic oligonucleotide
caaccuccagagagugugc

SEQ ID NO: 2061437 - RNA, 19 nt, Artificial Sequence
  Description of Artificial Sequence: Synthetic oligonucleotide
augguugcuccaucccaca

SEQ ID NO: 2061438 - RNA, 19 nt, Artificial Sequence
  Description of Artificial Sequence: Synthetic oligonucleotide
ggagucguugagaugcacc

SEQ ID NO: 2061439 - RNA, 19 nt, Artificial Sequence
  Description of Artificial Sequence: Synthetic oligonucleotide
cgccaguuggcccaaaccg

SEQ ID NO: 2061440 - RNA, 19 nt, Artificial Sequence
  Description of Artificial Sequence: Synthetic oligonucleotide
gcgguuguugaugaggaug

SEQ ID NO: 2061441 - RNA, 19 nt, Artificial Sequence
  Description of Artificial Sequence: Synthetic oligonucleotide
cacacacgcccagaagccg

SEQ ID NO: 2061442 - RNA, 19 nt, Artificial Sequence
  Description of Artificial Sequence: Synthetic oligonucleotide
gcugguucuggggaggcgg

SEQ ID NO: 2061443 - RNA, 19 nt, Artificial Sequence
  Description of Artificial Sequence: Synthetic oligonucleotide
agacccgcagcuccuggcu

SEQ ID NO: 2061444 - RNA, 19 nt, Artificial Sequence
  Description of Artificial Sequence: Synthetic oligonucleotide
agcagcaacgcggagccau

SEQ ID NO: 2061445 - RNA, 19 nt, Artificial Sequence
  Description of Artificial Sequence: Synthetic oligonucleotide
ugcaaccuccagagagugu

SEQ ID NO: 2061446 - RNA, 19 nt, Artificial Sequence
  Description of Artificial Sequence: Synthetic oligonucleotide
cccacauagucguagccug

SEQ ID NO: 2061447 - RNA, 19 nt, Artificial Sequence
  Description of Artificial Sequence: Synthetic oligonucleotide
ccaggauccucguuacccg

SEQ ID NO: 2061448 - RNA, 19 nt, Artificial Sequence
  Description of Artificial Sequence: Synthetic oligonucleotide
gcuaaggaacugguugagg

SEQ ID NO: 2061449 - RNA, 19 nt, Artificial Sequence
  Description of Artificial Sequence: Synthetic oligonucleotide
guacauggucugccccacg

SEQ ID NO: 2061450 - RNA, 19 nt, Artificial Sequence
  Description of Artificial Sequence: Synthetic oligonucleotide
acgcagggagcagaauggg

SEQ ID NO: 2061451 - RNA, 19 nt, Artificial Sequence
  Description of Artificial Sequence: Synthetic oligonucleotide
gguguccccagggacagag

SEQ ID NO: 2061452 - RNA, 19 nt, Artificial Sequence
  Description of Artificial Sequence: Synthetic oligonucleotide
cuccaucccacauagucgu

SEQ ID NO: 2061453 - RNA, 19 nt, Artificial Sequence
  Description of Artificial Sequence: Synthetic oligonucleotide
acgccauccgccaguuggc

SEQ ID NO: 2061454 - RNA, 19 nt, Artificial Sequence
  Description of Artificial Sequence: Synthetic oligonucleotide
ugacucggucagcccgggg

SEQ ID NO: 2061455 - RNA, 19 nt, Artificial Sequence
  Description of Artificial Sequence: Synthetic oligonucleotide
ugguugcuccaucccacau

SEQ ID NO: 2061456 - RNA, 19 nt, Artificial Sequence
  Description of Artificial Sequence: Synthetic oligonucleotide
agaaugggguggagucccc

SEQ ID NO: 2061457 - RNA, 19 nt, Artificial Sequence
  Description of Artificial Sequence: Synthetic oligonucleotide
uccgccaguuggcccaaac

SEQ ID NO: 2061458 - RNA, 19 nt, Artificial Sequence
  Description of Artificial Sequence: Synthetic oligonucleotide
ggucguccugcacacacac

SEQ ID NO: 2061459 - RNA, 19 nt, Artificial Sequence
  Description of Artificial Sequence: Synthetic oligonucleotide
aggucgccauucuccaugu

SEQ ID NO: 2061460 - RNA, 19 nt, Artificial Sequence
  Description of Artificial Sequence: Synthetic oligonucleotide
ccggucgaacuccaaaacc

SEQ ID NO: 2061461 - RNA, 19 nt, Artificial Sequence
  Description of Artificial Sequence: Synthetic oligonucleotide
agguguugccccagugacg

SEQ ID NO: 2061462 - RNA, 19 nt, Artificial Sequence
  Description of Artificial Sequence: Synthetic oligonucleotide
gcgauggucuggaaggucc

SEQ ID NO: 2061463 - RNA, 19 nt, Artificial Sequence
  Description of Artificial Sequence: Synthetic oligonucleotide
gaagcuaugguugcuccau

SEQ ID NO: 2061464 - RNA, 19 nt, Artificial Sequence
  Description of Artificial Sequence: Synthetic oligonucleotide
uggcucugccugaagucau

SEQ ID NO: 2061465 - RNA, 19 nt, Artificial Sequence
  Description of Artificial Sequence: Synthetic oligonucleotide
acagagaggugaaccguca

SEQ ID NO: 2061466 - RNA, 19 nt, Artificial Sequence
  Description of Artificial Sequence: Synthetic oligonucleotide
cagacccgcagcuccuggc

SEQ ID NO: 2061467 - RNA, 19 nt, Artificial Sequence
  Description of Artificial Sequence: Synthetic oligonucleotide
ggacaugaucuucaaccuc

SEQ ID NO: 2061468 - RNA, 19 nt, Artificial Sequence
  Description of Artificial Sequence: Synthetic oligonucleotide
acaauggaccugcgauggu

SEQ ID NO: 2061469 - RNA, 19 nt, Artificial Sequence
  Description of Artificial Sequence: Synthetic oligonucleotide
guagccuggccagacccgc

SEQ ID NO: 2061470 - RNA, 19 nt, Artificial Sequence
  Description of Artificial Sequence: Synthetic oligonucleotide
gacccaccacgccauccgc

SEQ ID NO: 2061471 - RNA, 19 nt, Artificial Sequence
  Description of Artificial Sequence: Synthetic oligonucleotide
gcccaaaccgccauacugc

SEQ ID NO: 2061472 - RNA, 19 nt, Artificial Sequence
  Description of Artificial Sequence: Synthetic oligonucleotide
cagccgggccaccaugggg

SEQ ID NO: 2061473 - RNA, 19 nt, Artificial Sequence
  Description of Artificial Sequence: Synthetic oligonucleotide
agugacgccugcaggguga

SEQ ID NO: 2061474 - RNA, 19 nt, Artificial Sequence
  Description of Artificial Sequence: Synthetic oligonucleotide
gcaguguguccaucauacg

SEQ ID NO: 2061475 - RNA, 19 nt, Artificial Sequence
  Description of Artificial Sequence: Synthetic oligonucleotide
agcauagguguugccccag

SEQ ID NO: 2061476 - RNA, 19 nt, Artificial Sequence
  Description of Artificial Sequence: Synthetic oligonucleotide
ccgaaaucaccuccugacc

SEQ ID NO: 2061477 - RNA, 19 nt, Artificial Sequence
  Description of Artificial Sequence: Synthetic oligonucleotide
acgcugguucuggggaggc

SEQ ID NO: 2061478 - RNA, 19 nt, Artificial Sequence
  Description of Artificial Sequence: Synthetic oligonucleotide
gcuguguacgacaggaguc

SEQ ID NO: 2061479 - RNA, 19 nt, Artificial Sequence
  Description of Artificial Sequence: Synthetic oligonucleotide
ccauacugcagcccgccag

SEQ ID NO: 2061480 - RNA, 19 nt, Artificial Sequence
  Description of Artificial Sequence: Synthetic oligonucleotide
cagcacccggcgcucagcc

SEQ ID NO: 2061481 - RNA, 19 nt, Artificial Sequence
  Description of Artificial Sequence: Synthetic oligonucleotide
acguggagucguugagaug

SEQ ID NO: 2061482 - RNA, 19 nt, Artificial Sequence
  Description of Artificial Sequence: Synthetic oligonucleotide
gucguagccuggccagacc

SEQ ID NO: 2061483 - RNA, 19 nt, Artificial Sequence
  Description of Artificial Sequence: Synthetic oligonucleotide
gacgggcguaaguggccag

SEQ ID NO: 2061484 - RNA, 19 nt, Artificial Sequence
  Description of Artificial Sequence: Synthetic oligonucleotide
ggggcacccggcuucuccg

SEQ ID NO: 2061485 - RNA, 19 nt, Artificial Sequence
  Description of Artificial Sequence: Synthetic oligonucleotide
uggcccaaaccgccauacu

SEQ ID NO: 2061486 - RNA, 19 nt, Artificial Sequence
  Description of Artificial Sequence: Synthetic oligonucleotide
cuuagccggucgaacucca

SEQ ID NO: 2061487 - RNA, 19 nt, Artificial Sequence
  Description of Artificial Sequence: Synthetic oligonucleotide
uccugaccccaucgguccu

SEQ ID NO: 2061488 - RNA, 19 nt, Artificial Sequence
  Description of Artificial Sequence: Synthetic oligonucleotide
cagacccaccacgccaucc

SEQ ID NO: 2061489 - RNA, 19 nt, Artificial Sequence
  Description of Artificial Sequence: Synthetic oligonucleotide
ccucguuacccgaaaucac

SEQ ID NO: 2061490 - RNA, 19 nt, Artificial Sequence
  Description of Artificial Sequence: Synthetic oligonucleotide
ugcgauggucuggaagguc

SEQ ID NO: 2061491 - RNA, 19 nt, Artificial Sequence
  Description of Artificial Sequence: Synthetic oligonucleotide
gcgcuaaggaacugguuga

SEQ ID NO: 2061492 - RNA, 19 nt, Artificial Sequence
  Description of Artificial Sequence: Synthetic oligonucleotide
guccuuagccggucgaacu

SEQ ID NO: 2061493 - RNA, 19 nt, Artificial Sequence
  Description of Artificial Sequence: Synthetic oligonucleotide
uggcucucgcggcccuggg

SEQ ID NO: 2061494 - RNA, 19 nt, Artificial Sequence
  Description of Artificial Sequence: Synthetic oligonucleotide
uggagucguugagaugcac

SEQ ID NO: 2061495 - RNA, 19 nt, Artificial Sequence
  Description of Artificial Sequence: Synthetic oligonucleotide
ggaagcuaugguugcucca

SEQ ID NO: 2061496 - RNA, 19 nt, Artificial Sequence
  Description of Artificial Sequence: Synthetic oligonucleotide
ugaggucgccauucuccau

SEQ ID NO: 2061497 - RNA, 19 nt, Artificial Sequence
  Description of Artificial Sequence: Synthetic oligonucleotide
uggggaagcuaugguugcu

SEQ ID NO: 2061498 - RNA, 19 nt, Artificial Sequence
  Description of Artificial Sequence: Synthetic oligonucleotide
aggugaaccgucagcuccu

SEQ ID NO: 2061499 - RNA, 19 nt, Artificial Sequence
  Description of Artificial Sequence: Synthetic oligonucleotide
ccaaaaccucccacucucc

SEQ ID NO: 2061500 - RNA, 19 nt, Artificial Sequence
  Description of Artificial Sequence: Synthetic oligonucleotide
gugaaccgucagcuccucc

SEQ ID NO: 2061501 - RNA, 19 nt, Artificial Sequence
  Description of Artificial Sequence: Synthetic oligonucleotide
cugcagcccgccagcagug

SEQ ID NO: 2061502 - RNA, 19 nt, Artificial Sequence
  Description of Artificial Sequence: Synthetic oligonucleotide
caccucagauaaguacaug

SEQ ID NO: 2061503 - RNA, 19 nt, Artificial Sequence
  Description of Artificial Sequence: Synthetic oligonucleotide
cucucgcggcccugggcgg

SEQ ID NO: 2061504 - RNA, 19 nt, Artificial Sequence
  Description of Artificial Sequence: Synthetic oligonucleotide
cacgcccagaagccggaug

SEQ ID NO: 2061505 - RNA, 19 nt, Artificial Sequence
  Description of Artificial Sequence: Synthetic oligonucleotide
augacucggucagcccggg

SEQ ID NO: 2061506 - RNA, 19 nt, Artificial Sequence
  Description of Artificial Sequence: Synthetic oligonucleotide
ccuccagagagugugcaug

SEQ ID NO: 2061507 - RNA, 19 nt, Artificial Sequence
  Description of Artificial Sequence: Synthetic oligonucleotide
ucccgccagaggcagccau

SEQ ID NO: 2061508 - RNA, 19 nt, Artificial Sequence
  Description of Artificial Sequence: Synthetic oligonucleotide
gucguccugcacacacacg

SEQ ID NO: 2061509 - RNA, 19 nt, Artificial Sequence
  Description of Artificial Sequence: Synthetic oligonucleotide
ggacgcugguucuggggag

SEQ ID NO: 2061510 - RNA, 19 nt, Artificial Sequence
  Description of Artificial Sequence: Synthetic oligonucleotide
agccgggacaugaucuuca

SEQ ID NO: 2061511 - RNA, 19 nt, Artificial Sequence
  Description of Artificial Sequence: Synthetic oligonucleotide
caggauccucguuacccga

SEQ ID NO: 2061512 - RNA, 19 nt, Artificial Sequence
  Description of Artificial Sequence: Synthetic oligonucleotide
uagccuggccagacccgca

SEQ ID NO: 2061513 - RNA, 19 nt, Artificial Sequence
  Description of Artificial Sequence: Synthetic oligonucleotide
acucuccacguagccacug

SEQ ID NO: 2061514 - RNA, 19 nt, Artificial Sequence
  Description of Artificial Sequence: Synthetic oligonucleotide
gggcccaagguccuucaac

SEQ ID NO: 2061515 - RNA, 19 nt, Artificial Sequence
  Description of Artificial Sequence: Synthetic oligonucleotide
caccaggauccucguuacc

SEQ ID NO: 2061516 - RNA, 19 nt, Artificial Sequence
  Description of Artificial Sequence: Synthetic oligonucleotide
uagucguagccuggccaga

SEQ ID NO: 2061517 - RNA, 19 nt, Artificial Sequence
  Description of Artificial Sequence: Synthetic oligonucleotide
gccggucgaacuccaaaac

SEQ ID NO: 2061518 - RNA, 19 nt, Artificial Sequence
  Description of Artificial Sequence: Synthetic oligonucleotide
cuucaaccuccacagcaua

SEQ ID NO: 2061519 - RNA, 19 nt, Artificial Sequence
  Description of Artificial Sequence: Synthetic oligonucleotide
agcccgccagcaguguguc

SEQ ID NO: 2061520 - RNA, 19 nt, Artificial Sequence
  Description of Artificial Sequence: Synthetic oligonucleotide
ccaucccacauagucguag

SEQ ID NO: 2061521 - RNA, 19 nt, Artificial Sequence
  Description of Artificial Sequence: Synthetic oligonucleotide
ccuccugaccccaucgguc

SEQ ID NO: 2061522 - RNA, 19 nt, Artificial Sequence
  Description of Artificial Sequence: Synthetic oligonucleotide
guggcucucgcggcccugg

SEQ ID NO: 2061523 - RNA, 19 nt, Artificial Sequence
  Description of Artificial Sequence: Synthetic oligonucleotide
cagcauagguguugcccca

SEQ ID NO: 2061524 - RNA, 19 nt, Artificial Sequence
  Description of Artificial Sequence: Synthetic oligonucleotide
uccaucccacauagucgua

SEQ ID NO: 2061525 - RNA, 19 nt, Artificial Sequence
  Description of Artificial Sequence: Synthetic oligonucleotide
cacucaugacucggucagc

SEQ ID NO: 2061526 - RNA, 19 nt, Artificial Sequence
  Description of Artificial Sequence: Synthetic oligonucleotide
aggaguccaucccgccaga

SEQ ID NO: 2061527 - RNA, 19 nt, Artificial Sequence
  Description of Artificial Sequence: Synthetic oligonucleotide
gccugaagucauccagacc

SEQ ID NO: 2061528 - RNA, 19 nt, Artificial Sequence
  Description of Artificial Sequence: Synthetic oligonucleotide
gggguagaagcggaccagc

SEQ ID NO: 2061529 - RNA, 19 nt, Artificial Sequence
  Description of Artificial Sequence: Synthetic oligonucleotide
gauccucguuacccgaaau

SEQ ID NO: 2061530 - RNA, 19 nt, Artificial Sequence
  Description of Artificial Sequence: Synthetic oligonucleotide
agcggaccagccgggccac

SEQ ID NO: 2061531 - RNA, 19 nt, Artificial Sequence
  Description of Artificial Sequence: Synthetic oligonucleotide
cugggcgguuguugaugag

SEQ ID NO: 2061532 - RNA, 19 nt, Artificial Sequence
  Description of Artificial Sequence: Synthetic oligonucleotide
gugugcauguuguuacaau

SEQ ID NO: 2061533 - RNA, 19 nt, Artificial Sequence
  Description of Artificial Sequence: Synthetic oligonucleotide
ggggacgggcguaaguggc

SEQ ID NO: 2061534 - RNA, 19 nt, Artificial Sequence
  Description of Artificial Sequence: Synthetic oligonucleotide
ccuuagccggucgaacucc

SEQ ID NO: 2061535 - RNA, 19 nt, Artificial Sequence
  Description of Artificial Sequence: Synthetic oligonucleotide
uugcuccaucccacauagu

SEQ ID NO: 2061536 - RNA, 19 nt, Artificial Sequence
  Description of Artificial Sequence: Synthetic oligonucleotide
cuggauuggagagcagcaa

SEQ ID NO: 2061537 - RNA, 19 nt, Artificial Sequence
  Description of Artificial Sequence: Synthetic oligonucleotide
gguugcuccaucccacaua

SEQ ID NO: 2061538 - RNA, 19 nt, Artificial Sequence
  Description of Artificial Sequence: Synthetic oligonucleotide
ccgugaucaugcagagcgg

SEQ ID NO: 2061539 - RNA, 19 nt, Artificial Sequence
  Description of Artificial Sequence: Synthetic oligonucleotide
gagcagaaugggguggagu

SEQ ID NO: 2061540 - RNA, 19 nt, Artificial Sequence
  Description of Artificial Sequence: Synthetic oligonucleotide
cacccggcuucuccgguuc

SEQ ID NO: 2061541 - RNA, 19 nt, Artificial Sequence
  Description of Artificial Sequence: Synthetic oligonucleotide
gggcguaaguggccagaag

SEQ ID NO: 2061542 - RNA, 19 nt, Artificial Sequence
  Description of Artificial Sequence: Synthetic oligonucleotide
uccagagagugugcauguu

SEQ ID NO: 2061543 - RNA, 19 nt, Artificial Sequence
  Description of Artificial Sequence: Synthetic oligonucleotide
caguuggcccaaaccgcca

SEQ ID NO: 2061544 - RNA, 19 nt, Artificial Sequence
  Description of Artificial Sequence: Synthetic oligonucleotide
ccgccaguuggcccaaacc

SEQ ID NO: 2061545 - RNA, 19 nt, Artificial Sequence
  Description of Artificial Sequence: Synthetic oligonucleotide
ccaaaccgccauacugcag

SEQ ID NO: 2061546 - RNA, 19 nt, Artificial Sequence
  Description of Artificial Sequence: Synthetic oligonucleotide
aaucaccuccugaccccau

SEQ ID NO: 2061547 - RNA, 19 nt, Artificial Sequence
  Description of Artificial Sequence: Synthetic oligonucleotide
guccgugaucaugcagagc

SEQ ID NO: 2061548 - RNA, 19 nt, Artificial Sequence
  Description of Artificial Sequence: Synthetic oligonucleotide
agguccuuagccggucgaa

SEQ ID NO: 2061549 - RNA, 19 nt, Artificial Sequence
  Description of Artificial Sequence: Synthetic oligonucleotide
acgggcguaaguggccaga

SEQ ID NO: 2061550 - RNA, 19 nt, Artificial Sequence
  Description of Artificial Sequence: Synthetic oligonucleotide
cagacacucaugacucggu

SEQ ID NO: 2061551 - RNA, 19 nt, Artificial Sequence
  Description of Artificial Sequence: Synthetic oligonucleotide
gggcgguuguugaugagga

SEQ ID NO: 2061552 - RNA, 19 nt, Artificial Sequence
  Description of Artificial Sequence: Synthetic oligonucleotide
ugccccagugacgccugca

SEQ ID NO: 2061553 - RNA, 19 nt, Artificial Sequence
  Description of Artificial Sequence: Synthetic oligonucleotide
gccauccgccaguuggccc

SEQ ID NO: 2061554 - RNA, 19 nt, Artificial Sequence
  Description of Artificial Sequence: Synthetic oligonucleotide
uuggcccagggcggggugu

SEQ ID NO: 2061555 - RNA, 19 nt, Artificial Sequence
  Description of Artificial Sequence: Synthetic oligonucleotide
cagcggggcacccggcuuc

SEQ ID NO: 2061556 - RNA, 19 nt, Artificial Sequence
  Description of Artificial Sequence: Synthetic oligonucleotide
cccagggacagagagguga

SEQ ID NO: 2061557 - RNA, 19 nt, Artificial Sequence
  Description of Artificial Sequence: Synthetic oligonucleotide
ggcuucuccgguuccauau

SEQ ID NO: 2061558 - RNA, 19 nt, Artificial Sequence
  Description of Artificial Sequence: Synthetic oligonucleotide
ggcgcucagccuugcugag

SEQ ID NO: 2061559 - RNA, 19 nt, Artificial Sequence
  Description of Artificial Sequence: Synthetic oligonucleotide
cacacgcccagaagccgga

SEQ ID NO: 2061560 - RNA, 19 nt, Artificial Sequence
  Description of Artificial Sequence: Synthetic oligonucleotide
ggggaagcuaugguugcuc

SEQ ID NO: 2061561 - RNA, 19 nt, Artificial Sequence
  Description of Artificial Sequence: Synthetic oligonucleotide
aggauccucguuacccgaa

SEQ ID NO: 2061562 - RNA, 19 nt, Artificial Sequence
  Description of Artificial Sequence: Synthetic oligonucleotide
cagcaacgcggagccauug

SEQ ID NO: 2061563 - RNA, 19 nt, Artificial Sequence
  Description of Artificial Sequence: Synthetic oligonucleotide
ggaccugcgauggucugga

SEQ ID NO: 2061564 - RNA, 19 nt, Artificial Sequence
  Description of Artificial Sequence: Synthetic oligonucleotide
ccauccgccaguuggccca

SEQ ID NO: 2061565 - RNA, 19 nt, Artificial Sequence
  Description of Artificial Sequence: Synthetic oligonucleotide
gaggccggggcuccuggua

SEQ ID NO: 2061566 - RNA, 19 nt, Artificial Sequence
  Description of Artificial Sequence: Synthetic oligonucleotide
augucagccucggcauagu

SEQ ID NO: 2061567 - RNA, 19 nt, Artificial Sequence
  Description of Artificial Sequence: Synthetic oligonucleotide
cgacaggaguccaucccgc

SEQ ID NO: 2061568 - RNA, 19 nt, Artificial Sequence
  Description of Artificial Sequence: Synthetic oligonucleotide
ggguuuggcccagggcggg

SEQ ID NO: 2061569 - RNA, 19 nt, Artificial Sequence
  Description of Artificial Sequence: Synthetic oligonucleotide
ggauccucguuacccgaaa

SEQ ID NO: 2061570 - RNA, 19 nt, Artificial Sequence
  Description of Artificial Sequence: Synthetic oligonucleotide
cccaaaccgccauacugca

SEQ ID NO: 2061571 - RNA, 19 nt, Artificial Sequence
  Description of Artificial Sequence: Synthetic oligonucleotide
ccgcagacagacacucaug

SEQ ID NO: 2061572 - RNA, 19 nt, Artificial Sequence
  Description of Artificial Sequence: Synthetic oligonucleotide
guguugccccagugacgcc

SEQ ID NO: 2061573 - RNA, 19 nt, Artificial Sequence
  Description of Artificial Sequence: Synthetic oligonucleotide
acgccugcagggugacaau

SEQ ID NO: 2061574 - RNA, 19 nt, Artificial Sequence
  Description of Artificial Sequence: Synthetic oligonucleotide
gggcacccggcuucuccgg

SEQ ID NO: 2061575 - RNA, 19 nt, Artificial Sequence
  Description of Artificial Sequence: Synthetic oligonucleotide
gggacgggcguaaguggcc

SEQ ID NO: 2061576 - RNA, 19 nt, Artificial Sequence
  Description of Artificial Sequence: Synthetic oligonucleotide
ugcagcccgccagcagugu

SEQ ID NO: 2061577 - RNA, 19 nt, Artificial Sequence
  Description of Artificial Sequence: Synthetic oligonucleotide
cguccugcacacacacgcc

SEQ ID NO: 2061578 - RNA, 19 nt, Artificial Sequence
  Description of Artificial Sequence: Synthetic oligonucleotide
gguuuggcccagggcgggg

SEQ ID NO: 2061579 - RNA, 19 nt, Artificial Sequence
  Description of Artificial Sequence: Synthetic oligonucleotide
ucucgcggcccugggcggu

SEQ ID NO: 2061580 - RNA, 19 nt, Artificial Sequence
  Description of Artificial Sequence: Synthetic oligonucleotide
ccagacccgcagcuccugg

SEQ ID NO: 2061581 - RNA, 19 nt, Artificial Sequence
  Description of Artificial Sequence: Synthetic oligonucleotide
ggaagguccuuagccgguc

SEQ ID NO: 2061582 - RNA, 19 nt, Artificial Sequence
  Description of Artificial Sequence: Synthetic oligonucleotide
ggguggaguccccgaggcc

SEQ ID NO: 2061583 - RNA, 19 nt, Artificial Sequence
  Description of Artificial Sequence: Synthetic oligonucleotide
gcgguaggcuggauuggag

SEQ ID NO: 2061584 - RNA, 19 nt, Artificial Sequence
  Description of Artificial Sequence: Synthetic oligonucleotide
gcagcccgccagcagugug

SEQ ID NO: 2061585 - RNA, 19 nt, Artificial Sequence
  Description of Artificial Sequence: Synthetic oligonucleotide
guccaucccgccagaggca

SEQ ID NO: 2061586 - RNA, 19 nt, Artificial Sequence
  Description of Artificial Sequence: Synthetic oligonucleotide
accacuccaccaggauccu

SEQ ID NO: 2061587 - RNA, 19 nt, Artificial Sequence
  Description of Artificial Sequence: Synthetic oligonucleotide
cgggucguccugcacacac

SEQ ID NO: 2061588 - RNA, 19 nt, Artificial Sequence
  Description of Artificial Sequence: Synthetic oligonucleotide
cgcggagccauuggggacg

SEQ ID NO: 2061589 - RNA, 19 nt, Artificial Sequence
  Description of Artificial Sequence: Synthetic oligonucleotide
ggcucucgcggcccugggc

SEQ ID NO: 2061590 - RNA, 19 nt, Artificial Sequence
  Description of Artificial Sequence: Synthetic oligonucleotide
augcaccaccucagauaag

SEQ ID NO: 2061591 - RNA, 19 nt, Artificial Sequence
  Description of Artificial Sequence: Synthetic oligonucleotide
guggagucguugagaugca

SEQ ID NO: 2061592 - RNA, 19 nt, Artificial Sequence
  Description of Artificial Sequence: Synthetic oligonucleotide
ucggguccuucagccggga

SEQ ID NO: 2061593 - RNA, 19 nt, Artificial Sequence
  Description of Artificial Sequence: Synthetic oligonucleotide
cguuacccgaaaucaccuc

SEQ ID NO: 2061594 - RNA, 19 nt, Artificial Sequence
  Description of Artificial Sequence: Synthetic oligonucleotide
ggcgguaggcuggauugga

SEQ ID NO: 2061595 - RNA, 19 nt, Artificial Sequence
  Description of Artificial Sequence: Synthetic oligonucleotide
ggccggggcuccugguaag

SEQ ID NO: 2061596 - RNA, 19 nt, Artificial Sequence
  Description of Artificial Sequence: Synthetic oligonucleotide
gugacgccugcagggugac

SEQ ID NO: 2061597 - RNA, 19 nt, Artificial Sequence
  Description of Artificial Sequence: Synthetic oligonucleotide
cccgccagcagugugucca

SEQ ID NO: 2061598 - RNA, 19 nt, Artificial Sequence
  Description of Artificial Sequence: Synthetic oligonucleotide
cccagggcggggugugggg

SEQ ID NO: 2061599 - RNA, 19 nt, Artificial Sequence
  Description of Artificial Sequence: Synthetic oligonucleotide
ggacgggcguaaguggcca

SEQ ID NO: 2061600 - RNA, 19 nt, Artificial Sequence
  Description of Artificial Sequence: Synthetic oligonucleotide
ccgggacaugaucuucaac

SEQ ID NO: 2061601 - RNA, 19 nt, Artificial Sequence
  Description of Artificial Sequence: Synthetic oligonucleotide
caucauacguggagucguu

SEQ ID NO: 2061602 - RNA, 19 nt, Artificial Sequence
  Description of Artificial Sequence: Synthetic oligonucleotide
cgaacuccaaaaccuccca

SEQ ID NO: 2061603 - RNA, 19 nt, Artificial Sequence
  Description of Artificial Sequence: Synthetic oligonucleotide
ugacgccugcagggugaca

SEQ ID NO: 2061604 - RNA, 19 nt, Artificial Sequence
  Description of Artificial Sequence: Synthetic oligonucleotide
ccacguagccacuggggaa

SEQ ID NO: 2061605 - RNA, 19 nt, Artificial Sequence
  Description of Artificial Sequence: Synthetic oligonucleotide
cgguaggcuggauuggaga

SEQ ID NO: 2061606 - RNA, 19 nt, Artificial Sequence
  Description of Artificial Sequence: Synthetic oligonucleotide
cagcccgccagcagugugu

SEQ ID NO: 2061607 - RNA, 19 nt, Artificial Sequence
  Description of Artificial Sequence: Synthetic oligonucleotide
gcuucuccgguuccauaua

SEQ ID NO: 2061608 - RNA, 19 nt, Artificial Sequence
  Description of Artificial Sequence: Synthetic oligonucleotide
agcggggcacccggcuucu

SEQ ID NO: 2061609 - RNA, 19 nt, Artificial Sequence
  Description of Artificial Sequence: Synthetic oligonucleotide
ccaucauacguggagucgu

SEQ ID NO: 2061610 - RNA, 19 nt, Artificial Sequence
  Description of Artificial Sequence: Synthetic oligonucleotide
acccgcagacagacacuca

SEQ ID NO: 2061611 - RNA, 19 nt, Artificial Sequence
  Description of Artificial Sequence: Synthetic oligonucleotide
cguugagaugcaccaccuc

SEQ ID NO: 2061612 - RNA, 19 nt, Artificial Sequence
  Description of Artificial Sequence: Synthetic oligonucleotide
cccugggcgguuguugaug

SEQ ID NO: 2061613 - RNA, 19 nt, Artificial Sequence
  Description of Artificial Sequence: Synthetic oligonucleotide
gaccugcgauggucuggaa

SEQ ID NO: 2061614 - RNA, 19 nt, Artificial Sequence
  Description of Artificial Sequence: Synthetic oligonucleotide
ccggggcuccugguaaggg

SEQ ID NO: 2061615 - RNA, 19 nt, Artificial Sequence
  Description of Artificial Sequence: Synthetic oligonucleotide
ggcucugccugaagucauc

SEQ ID NO: 2061616 - RNA, 19 nt, Artificial Sequence
  Description of Artificial Sequence: Synthetic oligonucleotide
gccgggacaugaucuucaa

SEQ ID NO: 2061617 - RNA, 19 nt, Artificial Sequence
  Description of Artificial Sequence: Synthetic oligonucleotide
ggugaaccgucagcuccuc

SEQ ID NO: 2061618 - RNA, 19 nt, Artificial Sequence
  Description of Artificial Sequence: Synthetic oligonucleotide
ccgccagugcaaccuccag

SEQ ID NO: 2061619 - RNA, 19 nt, Artificial Sequence
  Description of Artificial Sequence: Synthetic oligonucleotide
cggcgcucagccuugcuga

SEQ ID NO: 2061620 - RNA, 19 nt, Artificial Sequence
  Description of Artificial Sequence: Synthetic oligonucleotide
cggggcacccggcuucucc

SEQ ID NO: 2061621 - RNA, 19 nt, Artificial Sequence
  Description of Artificial Sequence: Synthetic oligonucleotide
acacgcccagaagccggau

SEQ ID NO: 2061622 - RNA, 19 nt, Artificial Sequence
  Description of Artificial Sequence: Synthetic oligonucleotide
guguacgacaggaguccau

SEQ ID NO: 2061623 - RNA, 19 nt, Artificial Sequence
  Description of Artificial Sequence: Synthetic oligonucleotide
gggucguccugcacacaca

SEQ ID NO: 2061624 - RNA, 19 nt, Artificial Sequence
  Description of Artificial Sequence: Synthetic oligonucleotide
cacucuccacguagccacu

SEQ ID NO: 2061625 - RNA, 19 nt, Artificial Sequence
  Description of Artificial Sequence: Synthetic oligonucleotide
gcgcucagccuugcugagc

SEQ ID NO: 2061626 - RNA, 19 nt, Artificial Sequence
  Description of Artificial Sequence: Synthetic oligonucleotide
ucgcggcccugggcgguug

SEQ ID NO: 2061627 - RNA, 19 nt, Artificial Sequence
  Description of Artificial Sequence: Synthetic oligonucleotide
cccgcagacagacacucau

SEQ ID NO: 2061628 - RNA, 19 nt, Artificial Sequence
  Description of Artificial Sequence: Synthetic oligonucleotide
aucccgccagaggcagcca

SEQ ID NO: 2061629 - RNA, 19 nt, Artificial Sequence
  Description of Artificial Sequence: Synthetic oligonucleotide
cgccagugcaaccuccaga

SEQ ID NO: 2061630 - RNA, 19 nt, Artificial Sequence
  Description of Artificial Sequence: Synthetic oligonucleotide
ggggacgcagggagcagaa

SEQ ID NO: 2061631 - RNA, 19 nt, Artificial Sequence
  Description of Artificial Sequence: Synthetic oligonucleotide
gcacccggcgcucagccuu

SEQ ID NO: 2061632 - RNA, 19 nt, Artificial Sequence
  Description of Artificial Sequence: Synthetic oligonucleotide
cgccgccagugcaaccucc

SEQ ID NO: 2061633 - RNA, 19 nt, Artificial Sequence
  Description of Artificial Sequence: Synthetic oligonucleotide
gcggagccauuggggacgc

SEQ ID NO: 2061634 - RNA, 19 nt, Artificial Sequence
  Description of Artificial Sequence: Synthetic oligonucleotide
gccgccgccagugcaaccu

SEQ ID NO: 2061635 - RNA, 19 nt, Artificial Sequence
  Description of Artificial Sequence: Synthetic oligonucleotide
gcaccaccucagauaagua

SEQ ID NO: 2061636 - RNA, 19 nt, Artificial Sequence
  Description of Artificial Sequence: Synthetic oligonucleotide
ggcgguuguugaugaggau

SEQ ID NO: 2061637 - RNA, 19 nt, Artificial Sequence
  Description of Artificial Sequence: Synthetic oligonucleotide
ggggcccaagguccuucaa

SEQ ID NO: 2061638 - RNA, 19 nt, Artificial Sequence
  Description of Artificial Sequence: Synthetic oligonucleotide
cgccauccgccaguuggcc

SEQ ID NO: 2061639 - RNA, 19 nt, Artificial Sequence
  Description of Artificial Sequence: Synthetic oligonucleotide
ccagacccaccacgccauc

SEQ ID NO: 2061640 - RNA, 19 nt, Artificial Sequence
  Description of Artificial Sequence: Synthetic oligonucleotide
gcccgccagcagugugucc

SEQ ID NO: 2061641 - RNA, 19 nt, Artificial Sequence
  Description of Artificial Sequence: Synthetic oligonucleotide
ggcacccggcuucuccggu

SEQ ID NO: 2061642 - RNA, 19 nt, Artificial Sequence
  Description of Artificial Sequence: Synthetic oligonucleotide
cauccgccaguuggcccaa

SEQ ID NO: 2061643 - RNA, 19 nt, Artificial Sequence
  Description of Artificial Sequence: Synthetic oligonucleotide
cgcugguucuggggaggcg

SEQ ID NO: 2061644 - RNA, 19 nt, Artificial Sequence
  Description of Artificial Sequence: Synthetic oligonucleotide
ggucgccauucuccaugua

SEQ ID NO: 2061645 - RNA, 19 nt, Artificial Sequence
  Description of Artificial Sequence: Synthetic oligonucleotide
ccauguaguccgugaucau

SEQ ID NO: 2061646 - RNA, 19 nt, Artificial Sequence
  Description of Artificial Sequence: Synthetic oligonucleotide
cccgccagaggcagccaua

SEQ ID NO: 2061647 - RNA, 19 nt, Artificial Sequence
  Description of Artificial Sequence: Synthetic oligonucleotide
ccacccgcagacagacacu

SEQ ID NO: 2061648 - RNA, 19 nt, Artificial Sequence
  Description of Artificial Sequence: Synthetic oligonucleotide
cggcccugggcgguuguug

SEQ ID NO: 2061649 - RNA, 19 nt, Artificial Sequence
  Description of Artificial Sequence: Synthetic oligonucleotide
gcagcggggcacccggcuu

SEQ ID NO: 2061650 - RNA, 19 nt, Artificial Sequence
  Description of Artificial Sequence: Synthetic oligonucleotide
cccgaggccggggcuccug

SEQ ID NO: 2061651 - RNA, 19 nt, Artificial Sequence
  Description of Artificial Sequence: Synthetic oligonucleotide
gcacccggcuucuccgguu

SEQ ID NO: 2061652 - RNA, 19 nt, Artificial Sequence
  Description of Artificial Sequence: Synthetic oligonucleotide
gcagcaacgcggagccauu

SEQ ID NO: 2061653 - RNA, 19 nt, Artificial Sequence
  Description of Artificial Sequence: Synthetic oligonucleotide
gggcgcuaaggaacugguu

SEQ ID NO: 2061654 - RNA, 19 nt, Artificial Sequence
  Description of Artificial Sequence: Synthetic oligonucleotide
gcccugggcgguuguugau

SEQ ID NO: 2061655 - RNA, 19 nt, Artificial Sequence
  Description of Artificial Sequence: Synthetic oligonucleotide
cgggcguaaguggccagaa

SEQ ID NO: 2061656 - RNA, 19 nt, Artificial Sequence
  Description of Artificial Sequence: Synthetic oligonucleotide
gcggaccagccgggccacc

SEQ ID NO: 2061657 - RNA, 19 nt, Artificial Sequence
  Description of Artificial Sequence: Synthetic oligonucleotide
gcgggucguccugcacaca

SEQ ID NO: 2061658 - RNA, 19 nt, Artificial Sequence
  Description of Artificial Sequence: Synthetic oligonucleotide
gggacgcagggagcagaau

SEQ ID NO: 2061659 - RNA, 19 nt, Artificial Sequence
  Description of Artificial Sequence: Synthetic oligonucleotide
ggccuggguguuggugggu

SEQ ID NO: 2061660 - RNA, 19 nt, Artificial Sequence
  Description of Artificial Sequence: Synthetic oligonucleotide
ccggcuucuccgguuccau

SEQ ID NO: 2061661 - RNA, 19 nt, Artificial Sequence
  Description of Artificial Sequence: Synthetic oligonucleotide
ccgccagcaguguguccau

SEQ ID NO: 2061662 - RNA, 19 nt, Artificial Sequence
  Description of Artificial Sequence: Synthetic oligonucleotide
cucgcggcccugggcgguu

SEQ ID NO: 2061663 - RNA, 19 nt, Artificial Sequence
  Description of Artificial Sequence: Synthetic oligonucleotide
cgcggcccugggcgguugu

SEQ ID NO: 2061664 - RNA, 19 nt, Artificial Sequence
  Description of Artificial Sequence: Synthetic oligonucleotide
aaaagcaccaaguauuucc

SEQ ID NO: 2061665 - RNA, 19 nt, Artificial Sequence
  Description of Artificial Sequence: Synthetic oligonucleotide
uauaguaaucuucaggucg

SEQ ID NO: 2061666 - RNA, 19 nt, Artificial Sequence
  Description of Artificial Sequence: Synthetic oligonucleotide
ucuucuagaagcaacaggc

SEQ ID NO: 2061667 - RNA, 19 nt, Artificial Sequence
  Description of Artificial Sequence: Synthetic oligonucleotide
guuaaauccgacaagagcg

SEQ ID NO: 2061668 - RNA, 19 nt, Artificial Sequence
  Description of Artificial Sequence: Synthetic oligonucleotide
aaagcaacgauuucuguag

SEQ ID NO: 2061669 - RNA, 19 nt, Artificial Sequence
  Description of Artificial Sequence: Synthetic oligonucleotide
uuaggaucaauaaugaaga

SEQ ID NO: 2061670 - RNA, 19 nt, Artificial Sequence
  Description of Artificial Sequence: Synthetic oligonucleotide
aaggagaagaaugcuaacc

SEQ ID NO: 2061671 - RNA, 19 nt, Artificial Sequence
  Description of Artificial Sequence: Synthetic oligonucleotide
gucucuacaaacuggaacg

SEQ ID NO: 2061672 - RNA, 19 nt, Artificial Sequence
  Description of Artificial Sequence: Synthetic oligonucleotide
agaagauuugggcaaacac

SEQ ID NO: 2061673 - RNA, 19 nt, Artificial Sequence
  Description of Artificial Sequence: Synthetic oligonucleotide
auuaggaucaauaaugaag

SEQ ID NO: 2061674 - RNA, 19 nt, Artificial Sequence
  Description of Artificial Sequence: Synthetic oligonucleotide
gucauugacacucaggugc

SEQ ID NO: 2061675 - RNA, 19 nt, Artificial Sequence
  Description of Artificial Sequence: Synthetic oligonucleotide
uuagucgucaagaaguccc

SEQ ID NO: 2061676 - RNA, 19 nt, Artificial Sequence
  Description of Artificial Sequence: Synthetic oligonucleotide
gacaugaucuaagaaaugg

SEQ ID NO: 2061677 - RNA, 19 nt, Artificial Sequence
  Description of Artificial Sequence: Synthetic oligonucleotide
aacacaagcacagugagga

SEQ ID NO: 2061678 - RNA, 19 nt, Artificial Sequence
  Description of Artificial Sequence: Synthetic oligonucleotide
caugaucuaagaaaugggg

SEQ ID NO: 2061679 - RNA, 19 nt, Artificial Sequence
  Description of Artificial Sequence: Synthetic oligonucleotide
augucugucaagcagguuc

SEQ ID NO: 2061680 - RNA, 19 nt, Artificial Sequence
  Description of Artificial Sequence: Synthetic oligonucleotide
ugcauaguaaccaaaguuc

SEQ ID NO: 2061681 - RNA, 19 nt, Artificial Sequence
  Description of Artificial Sequence: Synthetic oligonucleotide
guaaccaaaguucagagca

SEQ ID NO: 2061682 - RNA, 19 nt, Artificial Sequence
  Description of Artificial Sequence: Synthetic oligonucleotide
aacagaacuccguagucuc

SEQ ID NO: 2061683 - RNA, 19 nt, Artificial Sequence
  Description of Artificial Sequence: Synthetic oligonucleotide
uauuugcuugguuaaaucc

SEQ ID NO: 2061684 - RNA, 19 nt, Artificial Sequence
  Description of Artificial Sequence: Synthetic oligonucleotide
aauccaccgaaacugcaac

SEQ ID NO: 2061685 - RNA, 19 nt, Artificial Sequence
  Description of Artificial Sequence: Synthetic oligonucleotide
ggaaauggcacucacaugc

SEQ ID NO: 2061686 - RNA, 19 nt, Artificial Sequence
  Description of Artificial Sequence: Synthetic oligonucleotide
aaaggcaaacuuuccuugg

SEQ ID NO: 2061687 - RNA, 19 nt, Artificial Sequence
  Description of Artificial Sequence: Synthetic oligonucleotide
ucaagaagucccuaguaag

SEQ ID NO: 2061688 - RNA, 19 nt, Artificial Sequence
  Description of Artificial Sequence: Synthetic oligonucleotide
ugugcuacugcauaguaac

SEQ ID NO: 2061689 - RNA, 19 nt, Artificial Sequence
  Description of Artificial Sequence: Synthetic oligonucleotide
uggaaugaggaacuggugc

SEQ ID NO: 2061690 - RNA, 19 nt, Artificial Sequence
  Description of Artificial Sequence: Synthetic oligonucleotide
uucuguaggacacacaaau

SEQ ID NO: 2061691 - RNA, 19 nt, Artificial Sequence
  Description of Artificial Sequence: Synthetic oligonucleotide
gaagauuugggcaaacacc

SEQ ID NO: 2061692 - RNA, 19 nt, Artificial Sequence
  Description of Artificial Sequence: Synthetic oligonucleotide
gaggauuugccaucuauag

SEQ ID NO: 2061693 - RNA, 19 nt, Artificial Sequence
  Description of Artificial Sequence: Synthetic oligonucleotide
caaacaccagccaugagag

SEQ ID NO: 2061694 - RNA, 19 nt, Artificial Sequence
  Description of Artificial Sequence: Synthetic oligonucleotide
aagcaacaggccuaagaac

SEQ ID NO: 2061695 - RNA, 19 nt, Artificial Sequence
  Description of Artificial Sequence: Synthetic oligonucleotide
cuaaagugggaauccaccg

SEQ ID NO: 2061696 - RNA, 19 nt, Artificial Sequence
  Description of Artificial Sequence: Synthetic oligonucleotide
uacugcauaguaaccaaag

SEQ ID NO: 2061697 - RNA, 19 nt, Artificial Sequence
  Description of Artificial Sequence: Synthetic oligonucleotide
aagauuugggcaaacacca

SEQ ID NO: 2061698 - RNA, 19 nt, Artificial Sequence
  Description of Artificial Sequence: Synthetic oligonucleotide
auauuugcuugguuaaauc

SEQ ID NO: 2061699 - RNA, 19 nt, Artificial Sequence
  Description of Artificial Sequence: Synthetic oligonucleotide
ucuacaaacuggaacgccu

SEQ ID NO: 2061700 - RNA, 19 nt, Artificial Sequence
  Description of Artificial Sequence: Synthetic oligonucleotide
cuaguaaggacagcuaugg

SEQ ID NO: 2061701 - RNA, 19 nt, Artificial Sequence
  Description of Artificial Sequence: Synthetic oligonucleotide
aaggcaaacuuuccuuggg

SEQ ID NO: 2061702 - RNA, 19 nt, Artificial Sequence
  Description of Artificial Sequence: Synthetic oligonucleotide
aggucauugacacucaggu

SEQ ID NO: 2061703 - RNA, 19 nt, Artificial Sequence
  Description of Artificial Sequence: Synthetic oligonucleotide
uaguaaccaaaguucagag

SEQ ID NO: 2061704 - RNA, 19 nt, Artificial Sequence
  Description of Artificial Sequence: Synthetic oligonucleotide
aguaaggacagcuauggaa

SEQ ID NO: 2061705 - RNA, 19 nt, Artificial Sequence
  Description of Artificial Sequence: Synthetic oligonucleotide
aggaucaauaaugaagagg

SEQ ID NO: 2061706 - RNA, 19 nt, Artificial Sequence
  Description of Artificial Sequence: Synthetic oligonucleotide
cuaagaacugcugaggcag

SEQ ID NO: 2061707 - RNA, 19 nt, Artificial Sequence
  Description of Artificial Sequence: Synthetic oligonucleotide
auuugcuugguuaaauccg

SEQ ID NO: 2061708 - RNA, 19 nt, Artificial Sequence
  Description of Artificial Sequence: Synthetic oligonucleotide
ugggaauccaccgaaacug

SEQ ID NO: 2061709 - RNA, 19 nt, Artificial Sequence
  Description of Artificial Sequence: Synthetic oligonucleotide
gauuugggcaaacaccagc

SEQ ID NO: 2061710 - RNA, 19 nt, Artificial Sequence
  Description of Artificial Sequence: Synthetic oligonucleotide
aucuucaggucguugaaag

SEQ ID NO: 2061711 - RNA, 19 nt, Artificial Sequence
  Description of Artificial Sequence: Synthetic oligonucleotide
uuugcuugguuaaauccga

SEQ ID NO: 2061712 - RNA, 19 nt, Artificial Sequence
  Description of Artificial Sequence: Synthetic oligonucleotide
ugaggcagaaauaccccgg

SEQ ID NO: 2061713 - RNA, 19 nt, Artificial Sequence
  Description of Artificial Sequence: Synthetic oligonucleotide
aacaccagccaugagagga

SEQ ID NO: 2061714 - RNA, 19 nt, Artificial Sequence
  Description of Artificial Sequence: Synthetic oligonucleotide
uugguuaaauccgacaaga

SEQ ID NO: 2061715 - RNA, 19 nt, Artificial Sequence
  Description of Artificial Sequence: Synthetic oligonucleotide
agugggaauccaccgaaac

SEQ ID NO: 2061716 - RNA, 19 nt, Artificial Sequence
  Description of Artificial Sequence: Synthetic oligonucleotide
ugcccuuaaaauagggugc

SEQ ID NO: 2061717 - RNA, 19 nt, Artificial Sequence
  Description of Artificial Sequence: Synthetic oligonucleotide
agacucagcucuuugaacu

SEQ ID NO: 2061718 - RNA, 19 nt, Artificial Sequence
  Description of Artificial Sequence: Synthetic oligonucleotide
uacccaacaaagccugugg

SEQ ID NO: 2061719 - RNA, 19 nt, Artificial Sequence
  Description of Artificial Sequence: Synthetic oligonucleotide
uccccuuaaagucuucaag

SEQ ID NO: 2061720 - RNA, 19 nt, Artificial Sequence
  Description of Artificial Sequence: Synthetic oligonucleotide
caaaggguagaagaaaagc

SEQ ID NO: 2061721 - RNA, 19 nt, Artificial Sequence
  Description of Artificial Sequence: Synthetic oligonucleotide
uccgacaagagcgugaugu

SEQ ID NO: 2061722 - RNA, 19 nt, Artificial Sequence
  Description of Artificial Sequence: Synthetic oligonucleotide
aacuacuucacaguuuaca

SEQ ID NO: 2061723 - RNA, 19 nt, Artificial Sequence
  Description of Artificial Sequence: Synthetic oligonucleotide
cacaguaugucugucaagc

SEQ ID NO: 2061724 - RNA, 19 nt, Artificial Sequence
  Description of Artificial Sequence: Synthetic oligonucleotide
gaagcaacaggccuaagaa

SEQ ID NO: 2061725 - RNA, 19 nt, Artificial Sequence
  Description of Artificial Sequence: Synthetic oligonucleotide
aaccaaaguucagagcagg

SEQ ID NO: 2061726 - RNA, 19 nt, Artificial Sequence
  Description of Artificial Sequence: Synthetic oligonucleotide
agaagucccuaguaaggac

SEQ ID NO: 2061727 - RNA, 19 nt, Artificial Sequence
  Description of Artificial Sequence: Synthetic oligonucleotide
uccaacagaacuccguagu

SEQ ID NO: 2061728 - RNA, 19 nt, Artificial Sequence
  Description of Artificial Sequence: Synthetic oligonucleotide
uuaaauccgacaagagcgu

SEQ ID NO: 2061729 - RNA, 19 nt, Artificial Sequence
  Description of Artificial Sequence: Synthetic oligonucleotide
gagcgugauguucaugugg

SEQ ID NO: 2061730 - RNA, 19 nt, Artificial Sequence
  Description of Artificial Sequence: Synthetic oligonucleotide
cuaaugugcuacugcauag

SEQ ID NO: 2061731 - RNA, 19 nt, Artificial Sequence
  Description of Artificial Sequence: Synthetic oligonucleotide
aggcaaacuuuccuugggc

SEQ ID NO: 2061732 - RNA, 19 nt, Artificial Sequence
  Description of Artificial Sequence: Synthetic oligonucleotide
uaaagugggaauccaccga

SEQ ID NO: 2061733 - RNA, 19 nt, Artificial Sequence
  Description of Artificial Sequence: Synthetic oligonucleotide
acuacuucacaguuuacau

SEQ ID NO: 2061734 - RNA, 19 nt, Artificial Sequence
  Description of Artificial Sequence: Synthetic oligonucleotide
gguuaaauccgacaagagc

SEQ ID NO: 2061735 - RNA, 19 nt, Artificial Sequence
  Description of Artificial Sequence: Synthetic oligonucleotide
cuugguguauugauccagg

SEQ ID NO: 2061736 - RNA, 19 nt, Artificial Sequence
  Description of Artificial Sequence: Synthetic oligonucleotide
aacggaggguuucuuccac

SEQ ID NO: 2061737 - RNA, 19 nt, Artificial Sequence
  Description of Artificial Sequence: Synthetic oligonucleotide
ggaccaagcauucuguggg

SEQ ID NO: 2061738 - RNA, 19 nt, Artificial Sequence
  Description of Artificial Sequence: Synthetic oligonucleotide
gaaauaccccgggaaaugg

SEQ ID NO: 2061739 - RNA, 19 nt, Artificial Sequence
  Description of Artificial Sequence: Synthetic oligonucleotide
aacgccuucaccaaacgga

SEQ ID NO: 2061740 - RNA, 19 nt, Artificial Sequence
  Description of Artificial Sequence: Synthetic oligonucleotide
aaauaccccgggaaauggc

SEQ ID NO: 2061741 - RNA, 19 nt, Artificial Sequence
  Description of Artificial Sequence: Synthetic oligonucleotide
ucuagaagcaacaggccua

SEQ ID NO: 2061742 - RNA, 19 nt, Artificial Sequence
  Description of Artificial Sequence: Synthetic oligonucleotide
ucguugaaaggaauucagc

SEQ ID NO: 2061743 - RNA, 19 nt, Artificial Sequence
  Description of Artificial Sequence: Synthetic oligonucleotide
agaagcaacaggccuaaga

SEQ ID NO: 2061744 - RNA, 19 nt, Artificial Sequence
  Description of Artificial Sequence: Synthetic oligonucleotide
agcgugauguucauguggc

SEQ ID NO: 2061745 - RNA, 19 nt, Artificial Sequence
  Description of Artificial Sequence: Synthetic oligonucleotide
ucuuugaacucuccauuga

SEQ ID NO: 2061746 - RNA, 19 nt, Artificial Sequence
  Description of Artificial Sequence: Synthetic oligonucleotide
ucucuggauauuugcuugg

SEQ ID NO: 2061747 - RNA, 19 nt, Artificial Sequence
  Description of Artificial Sequence: Synthetic oligonucleotide
ucguaggggacucuggugu

SEQ ID NO: 2061748 - RNA, 19 nt, Artificial Sequence
  Description of Artificial Sequence: Synthetic oligonucleotide
ugguuaaauccgacaagag

SEQ ID NO: 2061749 - RNA, 19 nt, Artificial Sequence
  Description of Artificial Sequence: Synthetic oligonucleotide
ucuguaggacacacaaaug

SEQ ID NO: 2061750 - RNA, 19 nt, Artificial Sequence
  Description of Artificial Sequence: Synthetic oligonucleotide
auaguaaccaaaguucaga

SEQ ID NO: 2061751 - RNA, 19 nt, Artificial Sequence
  Description of Artificial Sequence: Synthetic oligonucleotide
aagcacagugaggauuugc

SEQ ID NO: 2061752 - RNA, 19 nt, Artificial Sequence
  Description of Artificial Sequence: Synthetic oligonucleotide
ugcugagcaaccgaggacc

SEQ ID NO: 2061753 - RNA, 19 nt, Artificial Sequence
  Description of Artificial Sequence: Synthetic oligonucleotide
uuaaagucuucaagacuca

SEQ ID NO: 2061754 - RNA, 19 nt, Artificial Sequence
  Description of Artificial Sequence: Synthetic oligonucleotide
cauaguaaccaaaguucag

SEQ ID NO: 2061755 - RNA, 19 nt, Artificial Sequence
  Description of Artificial Sequence: Synthetic oligonucleotide
guaaucuucaggucguuga

SEQ ID NO: 2061756 - RNA, 19 nt, Artificial Sequence
  Description of Artificial Sequence: Synthetic oligonucleotide
aguuuacaucaugaaauuc

SEQ ID NO: 2061757 - RNA, 19 nt, Artificial Sequence
  Description of Artificial Sequence: Synthetic oligonucleotide
acaugaucuaagaaauggg

SEQ ID NO: 2061758 - RNA, 19 nt, Artificial Sequence
  Description of Artificial Sequence: Synthetic oligonucleotide
uucauguggcccaagccac

SEQ ID NO: 2061759 - RNA, 19 nt, Artificial Sequence
  Description of Artificial Sequence: Synthetic oligonucleotide
cuugguuaaauccgacaag

SEQ ID NO: 2061760 - RNA, 19 nt, Artificial Sequence
  Description of Artificial Sequence: Synthetic oligonucleotide
ugugggagucgguuagucg

SEQ ID NO: 2061761 - RNA, 19 nt, Artificial Sequence
  Description of Artificial Sequence: Synthetic oligonucleotide
agcaacaggccuaagaacu

SEQ ID NO: 2061762 - RNA, 19 nt, Artificial Sequence
  Description of Artificial Sequence: Synthetic oligonucleotide
cuaaggagaagaaugcuaa

SEQ ID NO: 2061763 - RNA, 19 nt, Artificial Sequence
  Description of Artificial Sequence: Synthetic oligonucleotide
gaaugcuaacccucugaag

SEQ ID NO: 2061764 - RNA, 19 nt, Artificial Sequence
  Description of Artificial Sequence: Synthetic oligonucleotide
auagggugcaugcugugug

SEQ ID NO: 2061765 - RNA, 19 nt, Artificial Sequence
  Description of Artificial Sequence: Synthetic oligonucleotide
cuuugaacucuccauugac

SEQ ID NO: 2061766 - RNA, 19 nt, Artificial Sequence
  Description of Artificial Sequence: Synthetic oligonucleotide
ugauggaccuucucaaagu

SEQ ID NO: 2061767 - RNA, 19 nt, Artificial Sequence
  Description of Artificial Sequence: Synthetic oligonucleotide
ugcuaaaggcaaacuuucc

SEQ ID NO: 2061768 - RNA, 19 nt, Artificial Sequence
  Description of Artificial Sequence: Synthetic oligonucleotide
ugucugucaagcagguucu

SEQ ID NO: 2061769 - RNA, 19 nt, Artificial Sequence
  Description of Artificial Sequence: Synthetic oligonucleotide
uugaugacaccauuaggau

SEQ ID NO: 2061770 - RNA, 19 nt, Artificial Sequence
  Description of Artificial Sequence: Synthetic oligonucleotide
aaugugcuacugcauagua

SEQ ID NO: 2061771 - RNA, 19 nt, Artificial Sequence
  Description of Artificial Sequence: Synthetic oligonucleotide
ugaucguaggggacucugg

SEQ ID NO: 2061772 - RNA, 19 nt, Artificial Sequence
  Description of Artificial Sequence: Synthetic oligonucleotide
gaggcagaaauaccccggg

SEQ ID NO: 2061773 - RNA, 19 nt, Artificial Sequence
  Description of Artificial Sequence: Synthetic oligonucleotide
gaacgccuucaccaaacgg

SEQ ID NO: 2061774 - RNA, 19 nt, Artificial Sequence
  Description of Artificial Sequence: Synthetic oligonucleotide
ucugagugcaaugccagca

SEQ ID NO: 2061775 - RNA, 19 nt, Artificial Sequence
  Description of Artificial Sequence: Synthetic oligonucleotide
aaacacaagcacagugagg

SEQ ID NO: 2061776 - RNA, 19 nt, Artificial Sequence
  Description of Artificial Sequence: Synthetic oligonucleotide
uuaaaauagggugcaugcu

SEQ ID NO: 2061777 - RNA, 19 nt, Artificial Sequence
  Description of Artificial Sequence: Synthetic oligonucleotide
aaauagggugcaugcugug

SEQ ID NO: 2061778 - RNA, 19 nt, Artificial Sequence
  Description of Artificial Sequence: Synthetic oligonucleotide
uuuggaagcuguuggacuu

SEQ ID NO: 2061779 - RNA, 19 nt, Artificial Sequence
  Description of Artificial Sequence: Synthetic oligonucleotide
uaggaucaauaaugaagag

SEQ ID NO: 2061780 - RNA, 19 nt, Artificial Sequence
  Description of Artificial Sequence: Synthetic oligonucleotide
ugggaggucauugacacuc

SEQ ID NO: 2061781 - RNA, 19 nt, Artificial Sequence
  Description of Artificial Sequence: Synthetic oligonucleotide
acaccauuaggaucaauaa

SEQ ID NO: 2061782 - RNA, 19 nt, Artificial Sequence
  Description of Artificial Sequence: Synthetic oligonucleotide
uaacccucugaagacauga

SEQ ID NO: 2061783 - RNA, 19 nt, Artificial Sequence
  Description of Artificial Sequence: Synthetic oligonucleotide
aauccaaaggguagaagaa

SEQ ID NO: 2061784 - RNA, 19 nt, Artificial Sequence
  Description of Artificial Sequence: Synthetic oligonucleotide
cacaugcugagcaaccgag

SEQ ID NO: 2061785 - RNA, 19 nt, Artificial Sequence
  Description of Artificial Sequence: Synthetic oligonucleotide
acuggugcuaaaggcaaac

SEQ ID NO: 2061786 - RNA, 19 nt, Artificial Sequence
  Description of Artificial Sequence: Synthetic oligonucleotide
agaggaccuacugauggac

SEQ ID NO: 2061787 - RNA, 19 nt, Artificial Sequence
  Description of Artificial Sequence: Synthetic oligonucleotide
ggcaugagaagauuugggc

SEQ ID NO: 2061788 - RNA, 19 nt, Artificial Sequence
  Description of Artificial Sequence: Synthetic oligonucleotide
aaacggaggguuucuucca

SEQ ID NO: 2061789 - RNA, 19 nt, Artificial Sequence
  Description of Artificial Sequence: Synthetic oligonucleotide
agaaugcuaacccucugaa

SEQ ID NO: 2061790 - RNA, 19 nt, Artificial Sequence
  Description of Artificial Sequence: Synthetic oligonucleotide
uccaugggucucuacaaac

SEQ ID NO: 2061791 - RNA, 19 nt, Artificial Sequence
  Description of Artificial Sequence: Synthetic oligonucleotide
aaacaccagccaugagagg

SEQ ID NO: 2061792 - RNA, 19 nt, Artificial Sequence
  Description of Artificial Sequence: Synthetic oligonucleotide
aggucguugaaaggaauuc

SEQ ID NO: 2061793 - RNA, 19 nt, Artificial Sequence
  Description of Artificial Sequence: Synthetic oligonucleotide
gauggcuaaagugggaauc

SEQ ID NO: 2061794 - RNA, 19 nt, Artificial Sequence
  Description of Artificial Sequence: Synthetic oligonucleotide
ugcuugguuaaauccgaca

SEQ ID NO: 2061795 - RNA, 19 nt, Artificial Sequence
  Description of Artificial Sequence: Synthetic oligonucleotide
aagcagcuacccaacaaag

SEQ ID NO: 2061796 - RNA, 19 nt, Artificial Sequence
  Description of Artificial Sequence: Synthetic oligonucleotide
caugggucucuacaaacug

SEQ ID NO: 2061797 - RNA, 19 nt, Artificial Sequence
  Description of Artificial Sequence: Synthetic oligonucleotide
gucguugaaaggaauucag

SEQ ID NO: 2061798 - RNA, 19 nt, Artificial Sequence
  Description of Artificial Sequence: Synthetic oligonucleotide
gucgucaagaagucccuag

SEQ ID NO: 2061799 - RNA, 19 nt, Artificial Sequence
  Description of Artificial Sequence: Synthetic oligonucleotide
agguucuucuagaagcaac

SEQ ID NO: 2061800 - RNA, 19 nt, Artificial Sequence
  Description of Artificial Sequence: Synthetic oligonucleotide
uggugcuaaaggcaaacuu

SEQ ID NO: 2061801 - RNA, 19 nt, Artificial Sequence
  Description of Artificial Sequence: Synthetic oligonucleotide
agcagcuacccaacaaagc

SEQ ID NO: 2061802 - RNA, 19 nt, Artificial Sequence
  Description of Artificial Sequence: Synthetic oligonucleotide
aauagggugcaugcugugu

SEQ ID NO: 2061803 - RNA, 19 nt, Artificial Sequence
  Description of Artificial Sequence: Synthetic oligonucleotide
gacaagagcgugauguuca

SEQ ID NO: 2061804 - RNA, 19 nt, Artificial Sequence
  Description of Artificial Sequence: Synthetic oligonucleotide
gcaaacaccagccaugaga

SEQ ID NO: 2061805 - RNA, 19 nt, Artificial Sequence
  Description of Artificial Sequence: Synthetic oligonucleotide
uuugggcaaacaccagcca

SEQ ID NO: 2061806 - RNA, 19 nt, Artificial Sequence
  Description of Artificial Sequence: Synthetic oligonucleotide
aaccgaggaccagagcaac

SEQ ID NO: 2061807 - RNA, 19 nt, Artificial Sequence
  Description of Artificial Sequence: Synthetic oligonucleotide
aggauuugccaucuauagu

SEQ ID NO: 2061808 - RNA, 19 nt, Artificial Sequence
  Description of Artificial Sequence: Synthetic oligonucleotide
gacacacaaaugugaaauc

SEQ ID NO: 2061809 - RNA, 19 nt, Artificial Sequence
  Description of Artificial Sequence: Synthetic oligonucleotide
uggaacgccuucaccaaac

SEQ ID NO: 2061810 - RNA, 19 nt, Artificial Sequence
  Description of Artificial Sequence: Synthetic oligonucleotide
aucaugaaauucauuggcu

SEQ ID NO: 2061811 - RNA, 19 nt, Artificial Sequence
  Description of Artificial Sequence: Synthetic oligonucleotide
gacaccauuaggaucaaua

SEQ ID NO: 2061812 - RNA, 19 nt, Artificial Sequence
  Description of Artificial Sequence: Synthetic oligonucleotide
aagucccuaguaaggacag

SEQ ID NO: 2061813 - RNA, 19 nt, Artificial Sequence
  Description of Artificial Sequence: Synthetic oligonucleotide
ggucucuacaaacuggaac

SEQ ID NO: 2061814 - RNA, 19 nt, Artificial Sequence
  Description of Artificial Sequence: Synthetic oligonucleotide
caucuauaguaaucuucag

SEQ ID NO: 2061815 - RNA, 19 nt, Artificial Sequence
  Description of Artificial Sequence: Synthetic oligonucleotide
acagcagggguguggaaug

SEQ ID NO: 2061816 - RNA, 19 nt, Artificial Sequence
  Description of Artificial Sequence: Synthetic oligonucleotide
agcuauggaagcagcuacc

SEQ ID NO: 2061817 - RNA, 19 nt, Artificial Sequence
  Description of Artificial Sequence: Synthetic oligonucleotide
aggaccuacugauggaccu

SEQ ID NO: 2061818 - RNA, 19 nt, Artificial Sequence
  Description of Artificial Sequence: Synthetic oligonucleotide
gucaagcagguucuucuag

SEQ ID NO: 2061819 - RNA, 19 nt, Artificial Sequence
  Description of Artificial Sequence: Synthetic oligonucleotide
ucucuacaaacuggaacgc

SEQ ID NO: 2061820 - RNA, 19 nt, Artificial Sequence
  Description of Artificial Sequence: Synthetic oligonucleotide
gacacucaggugcuugaug

SEQ ID NO: 2061821 - RNA, 19 nt, Artificial Sequence
  Description of Artificial Sequence: Synthetic oligonucleotide
ugaacucuccauugacaac

SEQ ID NO: 2061822 - RNA, 19 nt, Artificial Sequence
  Description of Artificial Sequence: Synthetic oligonucleotide
gcaaccgaggaccagagca

SEQ ID NO: 2061823 - RNA, 19 nt, Artificial Sequence
  Description of Artificial Sequence: Synthetic oligonucleotide
aaauccgacaagagcguga

SEQ ID NO: 2061824 - RNA, 19 nt, Artificial Sequence
  Description of Artificial Sequence: Synthetic oligonucleotide
aauccgacaagagcgugau

SEQ ID NO: 2061825 - RNA, 19 nt, Artificial Sequence
  Description of Artificial Sequence: Synthetic oligonucleotide
acugcggcccacugggagg

SEQ ID NO: 2061826 - RNA, 19 nt, Artificial Sequence
  Description of Artificial Sequence: Synthetic oligonucleotide
aaaguucagagcaggcuaa

SEQ ID NO: 2061827 - RNA, 19 nt, Artificial Sequence
  Description of Artificial Sequence: Synthetic oligonucleotide
guaggacacacaaauguga

SEQ ID NO: 2061828 - RNA, 19 nt, Artificial Sequence
  Description of Artificial Sequence: Synthetic oligonucleotide
gugcuaaugugcuacugca

SEQ ID NO: 2061829 - RNA, 19 nt, Artificial Sequence
  Description of Artificial Sequence: Synthetic oligonucleotide
uguggcuguuuucuggcau

SEQ ID NO: 2061830 - RNA, 19 nt, Artificial Sequence
  Description of Artificial Sequence: Synthetic oligonucleotide
aagcauucugugggagucg

SEQ ID NO: 2061831 - RNA, 19 nt, Artificial Sequence
  Description of Artificial Sequence: Synthetic oligonucleotide
agucucuggauauuugcuu

SEQ ID NO: 2061832 - RNA, 19 nt, Artificial Sequence
  Description of Artificial Sequence: Synthetic oligonucleotide
aggcagaccacaguauguc

SEQ ID NO: 2061833 - RNA, 19 nt, Artificial Sequence
  Description of Artificial Sequence: Synthetic oligonucleotide
gagucgguuagucgucaag

SEQ ID NO: 2061834 - RNA, 19 nt, Artificial Sequence
  Description of Artificial Sequence: Synthetic oligonucleotide
uucuggcaugagaagauuu

SEQ ID NO: 2061835 - RNA, 19 nt, Artificial Sequence
  Description of Artificial Sequence: Synthetic oligonucleotide
uaaugugcuacugcauagu

SEQ ID NO: 2061836 - RNA, 19 nt, Artificial Sequence
  Description of Artificial Sequence: Synthetic oligonucleotide
cuguaggacacacaaaugu

SEQ ID NO: 2061837 - RNA, 19 nt, Artificial Sequence
  Description of Artificial Sequence: Synthetic oligonucleotide
agaagaaugcuaacccucu

SEQ ID NO: 2061838 - RNA, 19 nt, Artificial Sequence
  Description of Artificial Sequence: Synthetic oligonucleotide
agucgguuagucgucaaga

SEQ ID NO: 2061839 - RNA, 19 nt, Artificial Sequence
  Description of Artificial Sequence: Synthetic oligonucleotide
uaaauccgacaagagcgug

SEQ ID NO: 2061840 - RNA, 19 nt, Artificial Sequence
  Description of Artificial Sequence: Synthetic oligonucleotide
gcaagauggcuaaaguggg

SEQ ID NO: 2061841 - RNA, 19 nt, Artificial Sequence
  Description of Artificial Sequence: Synthetic oligonucleotide
caaaguucagagcaggcua

SEQ ID NO: 2061842 - RNA, 19 nt, Artificial Sequence
  Description of Artificial Sequence: Synthetic oligonucleotide
agcaacgauuucuguagga

SEQ ID NO: 2061843 - RNA, 19 nt, Artificial Sequence
  Description of Artificial Sequence: Synthetic oligonucleotide
acaguaugucugucaagca

SEQ ID NO: 2061844 - RNA, 19 nt, Artificial Sequence
  Description of Artificial Sequence: Synthetic oligonucleotide
aguucagagcaggcuaagg

SEQ ID NO: 2061845 - RNA, 19 nt, Artificial Sequence
  Description of Artificial Sequence: Synthetic oligonucleotide
caacgauuucuguaggaca

SEQ ID NO: 2061846 - RNA, 19 nt, Artificial Sequence
  Description of Artificial Sequence: Synthetic oligonucleotide
uugaucguaggggacucug

SEQ ID NO: 2061847 - RNA, 19 nt, Artificial Sequence
  Description of Artificial Sequence: Synthetic oligonucleotide
ccaucuauaguaaucuuca

SEQ ID NO: 2061848 - RNA, 19 nt, Artificial Sequence
  Description of Artificial Sequence: Synthetic oligonucleotide
cauugacaacagcugugcc

SEQ ID NO: 2061849 - RNA, 19 nt, Artificial Sequence
  Description of Artificial Sequence: Synthetic oligonucleotide
uaagaacugcugaggcaga

SEQ ID NO: 2061850 - RNA, 19 nt, Artificial Sequence
  Description of Artificial Sequence: Synthetic oligonucleotide
gcaugagaagauuugggca

SEQ ID NO: 2061851 - RNA, 19 nt, Artificial Sequence
  Description of Artificial Sequence: Synthetic oligonucleotide
gcuaaagugggaauccacc

SEQ ID NO: 2061852 - RNA, 19 nt, Artificial Sequence
  Description of Artificial Sequence: Synthetic oligonucleotide
uguuggacuuggcuugauc

SEQ ID NO: 2061853 - RNA, 19 nt, Artificial Sequence
  Description of Artificial Sequence: Synthetic oligonucleotide
cucacaugcugagcaaccg

SEQ ID NO: 2061854 - RNA, 19 nt, Artificial Sequence
  Description of Artificial Sequence: Synthetic oligonucleotide
aaguucagagcaggcuaag

SEQ ID NO: 2061855 - RNA, 19 nt, Artificial Sequence
  Description of Artificial Sequence: Synthetic oligonucleotide
agcauucugugggagucgg

SEQ ID NO: 2061856 - RNA, 19 nt, Artificial Sequence
  Description of Artificial Sequence: Synthetic oligonucleotide
aucguaggggacucuggug

SEQ ID NO: 2061857 - RNA, 19 nt, Artificial Sequence
  Description of Artificial Sequence: Synthetic oligonucleotide
agcaaccgaggaccagagc

SEQ ID NO: 2061858 - RNA, 19 nt, Artificial Sequence
  Description of Artificial Sequence: Synthetic oligonucleotide
ugcuaaugugcuacugcau

SEQ ID NO: 2061859 - RNA, 19 nt, Artificial Sequence
  Description of Artificial Sequence: Synthetic oligonucleotide
ucaggucguugaaaggaau

SEQ ID NO: 2061860 - RNA, 19 nt, Artificial Sequence
  Description of Artificial Sequence: Synthetic oligonucleotide
ucuggauauuugcuugguu

SEQ ID NO: 2061861 - RNA, 19 nt, Artificial Sequence
  Description of Artificial Sequence: Synthetic oligonucleotide
cucuacaaacuggaacgcc

SEQ ID NO: 2061862 - RNA, 19 nt, Artificial Sequence
  Description of Artificial Sequence: Synthetic oligonucleotide
gcuugguuaaauccgacaa

SEQ ID NO: 2061863 - RNA, 19 nt, Artificial Sequence
  Description of Artificial Sequence: Synthetic oligonucleotide
caugagaggaccuacugau

SEQ ID NO: 2061864 - RNA, 19 nt, Artificial Sequence
  Description of Artificial Sequence: Synthetic oligonucleotide
aacucuccauugacaacag

SEQ ID NO: 2061865 - RNA, 19 nt, Artificial Sequence
  Description of Artificial Sequence: Synthetic oligonucleotide
cugagugcaaugccagcac

SEQ ID NO: 2061866 - RNA, 19 nt, Artificial Sequence
  Description of Artificial Sequence: Synthetic oligonucleotide
agcuacccaacaaagccug

SEQ ID NO: 2061867 - RNA, 19 nt, Artificial Sequence
  Description of Artificial Sequence: Synthetic oligonucleotide
uccaccgaaacugcaacua

SEQ ID NO: 2061868 - RNA, 19 nt, Artificial Sequence
  Description of Artificial Sequence: Synthetic oligonucleotide
acuccguagucucuggaua

SEQ ID NO: 2061869 - RNA, 19 nt, Artificial Sequence
  Description of Artificial Sequence: Synthetic oligonucleotide
gccuaagaacugcugaggc

SEQ ID NO: 2061870 - RNA, 19 nt, Artificial Sequence
  Description of Artificial Sequence: Synthetic oligonucleotide
ugcuaacccucugaagaca

SEQ ID NO: 2061871 - RNA, 19 nt, Artificial Sequence
  Description of Artificial Sequence: Synthetic oligonucleotide
uagggugcaugcuguguga

SEQ ID NO: 2061872 - RNA, 19 nt, Artificial Sequence
  Description of Artificial Sequence: Synthetic oligonucleotide
cauuaggaucaauaaugaa

SEQ ID NO: 2061873 - RNA, 19 nt, Artificial Sequence
  Description of Artificial Sequence: Synthetic oligonucleotide
guguauugauccaggcaag

SEQ ID NO: 2061874 - RNA, 19 nt, Artificial Sequence
  Description of Artificial Sequence: Synthetic oligonucleotide
ugucaagcagguucuucua

SEQ ID NO: 2061875 - RNA, 19 nt, Artificial Sequence
  Description of Artificial Sequence: Synthetic oligonucleotide
cccuuaaagucuucaagac

SEQ ID NO: 2061876 - RNA, 19 nt, Artificial Sequence
  Description of Artificial Sequence: Synthetic oligonucleotide
guggcuguuuucuggcaug

SEQ ID NO: 2061877 - RNA, 19 nt, Artificial Sequence
  Description of Artificial Sequence: Synthetic oligonucleotide
caacaggccuaagaacugc

SEQ ID NO: 2061878 - RNA, 19 nt, Artificial Sequence
  Description of Artificial Sequence: Synthetic oligonucleotide
agauggcuaaagugggaau

SEQ ID NO: 2061879 - RNA, 19 nt, Artificial Sequence
  Description of Artificial Sequence: Synthetic oligonucleotide
acucaggugcuugaugaca

SEQ ID NO: 2061880 - RNA, 19 nt, Artificial Sequence
  Description of Artificial Sequence: Synthetic oligonucleotide
gaggaccuacugauggacc

SEQ ID NO: 2061881 - RNA, 19 nt, Artificial Sequence
  Description of Artificial Sequence: Synthetic oligonucleotide
gaauccaccgaaacugcaa

SEQ ID NO: 2061882 - RNA, 19 nt, Artificial Sequence
  Description of Artificial Sequence: Synthetic oligonucleotide
auccaccgaaacugcaacu

SEQ ID NO: 2061883 - RNA, 19 nt, Artificial Sequence
  Description of Artificial Sequence: Synthetic oligonucleotide
ggcaaacuuuccuugggca

SEQ ID NO: 2061884 - RNA, 19 nt, Artificial Sequence
  Description of Artificial Sequence: Synthetic oligonucleotide
cuacccaacaaagccugug

SEQ ID NO: 2061885 - RNA, 19 nt, Artificial Sequence
  Description of Artificial Sequence: Synthetic oligonucleotide
gugggagucgguuagucgu

SEQ ID NO: 2061886 - RNA, 19 nt, Artificial Sequence
  Description of Artificial Sequence: Synthetic oligonucleotide
uccacacugcggcccacug

SEQ ID NO: 2061887 - RNA, 19 nt, Artificial Sequence
  Description of Artificial Sequence: Synthetic oligonucleotide
ucaccaaacggaggguuuc

SEQ ID NO: 2061888 - RNA, 19 nt, Artificial Sequence
  Description of Artificial Sequence: Synthetic oligonucleotide
cuaaaggcaaacuuuccuu

SEQ ID NO: 2061889 - RNA, 19 nt, Artificial Sequence
  Description of Artificial Sequence: Synthetic oligonucleotide
gauuugccaucuauaguaa

SEQ ID NO: 2061890 - RNA, 19 nt, Artificial Sequence
  Description of Artificial Sequence: Synthetic oligonucleotide
gguucuucuagaagcaaca

SEQ ID NO: 2061891 - RNA, 19 nt, Artificial Sequence
  Description of Artificial Sequence: Synthetic oligonucleotide
acgccuucaccaaacggag

SEQ ID NO: 2061892 - RNA, 19 nt, Artificial Sequence
  Description of Artificial Sequence: Synthetic oligonucleotide
gcauaguaaccaaaguuca

SEQ ID NO: 2061893 - RNA, 19 nt, Artificial Sequence
  Description of Artificial Sequence: Synthetic oligonucleotide
ccuuaaaauagggugcaug

SEQ ID NO: 2061894 - RNA, 19 nt, Artificial Sequence
  Description of Artificial Sequence: Synthetic oligonucleotide
gaucguaggggacucuggu

SEQ ID NO: 2061895 - RNA, 19 nt, Artificial Sequence
  Description of Artificial Sequence: Synthetic oligonucleotide
cagaacuccguagucucug

SEQ ID NO: 2061896 - RNA, 19 nt, Artificial Sequence
  Description of Artificial Sequence: Synthetic oligonucleotide
auucugugggagucgguua

SEQ ID NO: 2061897 - RNA, 19 nt, Artificial Sequence
  Description of Artificial Sequence: Synthetic oligonucleotide
ggcagaaauaccccgggaa

SEQ ID NO: 2061898 - RNA, 19 nt, Artificial Sequence
  Description of Artificial Sequence: Synthetic oligonucleotide
agucccuaguaaggacagc

SEQ ID NO: 2061899 - RNA, 19 nt, Artificial Sequence
  Description of Artificial Sequence: Synthetic oligonucleotide
cugcauaguaaccaaaguu

SEQ ID NO: 2061900 - RNA, 19 nt, Artificial Sequence
  Description of Artificial Sequence: Synthetic oligonucleotide
uggugcuaaugugcuacug

SEQ ID NO: 2061901 - RNA, 19 nt, Artificial Sequence
  Description of Artificial Sequence: Synthetic oligonucleotide
ggucauugacacucaggug

SEQ ID NO: 2061902 - RNA, 19 nt, Artificial Sequence
  Description of Artificial Sequence: Synthetic oligonucleotide
agggugcaugcugugugac

SEQ ID NO: 2061903 - RNA, 19 nt, Artificial Sequence
  Description of Artificial Sequence: Synthetic oligonucleotide
uaccccgggaaauggcacu

SEQ ID NO: 2061904 - RNA, 19 nt, Artificial Sequence
  Description of Artificial Sequence: Synthetic oligonucleotide
uggcuugaucguaggggac

SEQ ID NO: 2061905 - RNA, 19 nt, Artificial Sequence
  Description of Artificial Sequence: Synthetic oligonucleotide
gcuggugcuaaugugcuac

SEQ ID NO: 2061906 - RNA, 19 nt, Artificial Sequence
  Description of Artificial Sequence: Synthetic oligonucleotide
ugggagucgguuagucguc

SEQ ID NO: 2061907 - RNA, 19 nt, Artificial Sequence
  Description of Artificial Sequence: Synthetic oligonucleotide
cuuccaacagaacuccgua

SEQ ID NO: 2061908 - RNA, 19 nt, Artificial Sequence
  Description of Artificial Sequence: Synthetic oligonucleotide
gagcaaccgaggaccagag

SEQ ID NO: 2061909 - RNA, 19 nt, Artificial Sequence
  Description of Artificial Sequence: Synthetic oligonucleotide
acaacagcugugcccuuaa

SEQ ID NO: 2061910 - RNA, 19 nt, Artificial Sequence
  Description of Artificial Sequence: Synthetic oligonucleotide
ggccuaagaacugcugagg

SEQ ID NO: 2061911 - RNA, 19 nt, Artificial Sequence
  Description of Artificial Sequence: Synthetic oligonucleotide
ccccuuaaagucuucaaga

SEQ ID NO: 2061912 - RNA, 19 nt, Artificial Sequence
  Description of Artificial Sequence: Synthetic oligonucleotide
agauuugggcaaacaccag

SEQ ID NO: 2061913 - RNA, 19 nt, Artificial Sequence
  Description of Artificial Sequence: Synthetic oligonucleotide
guggaaugaggaacuggug

SEQ ID NO: 2061914 - RNA, 19 nt, Artificial Sequence
  Description of Artificial Sequence: Synthetic oligonucleotide
caugaaauucauuggcuuu

SEQ ID NO: 2061915 - RNA, 19 nt, Artificial Sequence
  Description of Artificial Sequence: Synthetic oligonucleotide
gccaucuauaguaaucuuc

SEQ ID NO: 2061916 - RNA, 19 nt, Artificial Sequence
  Description of Artificial Sequence: Synthetic oligonucleotide
gcuaaaggcaaacuuuccu

SEQ ID NO: 2061917 - RNA, 19 nt, Artificial Sequence
  Description of Artificial Sequence: Synthetic oligonucleotide
gaccaagcauucuguggga

SEQ ID NO: 2061918 - RNA, 19 nt, Artificial Sequence
  Description of Artificial Sequence: Synthetic oligonucleotide
acaagagcgugauguucau

SEQ ID NO: 2061919 - RNA, 19 nt, Artificial Sequence
  Description of Artificial Sequence: Synthetic oligonucleotide
caccauucuuccuuggugu

SEQ ID NO: 2061920 - RNA, 19 nt, Artificial Sequence
  Description of Artificial Sequence: Synthetic oligonucleotide
gccaugagaggaccuacug

SEQ ID NO: 2061921 - RNA, 19 nt, Artificial Sequence
  Description of Artificial Sequence: Synthetic oligonucleotide
cacagugaggauuugccau

SEQ ID NO: 2061922 - RNA, 19 nt, Artificial Sequence
  Description of Artificial Sequence: Synthetic oligonucleotide
accgaaacugcaacuacuu

SEQ ID NO: 2061923 - RNA, 19 nt, Artificial Sequence
  Description of Artificial Sequence: Synthetic oligonucleotide
acggaggguuucuuccaca

SEQ ID NO: 2061924 - RNA, 19 nt, Artificial Sequence
  Description of Artificial Sequence: Synthetic oligonucleotide
gugggaauccaccgaaacu

SEQ ID NO: 2061925 - RNA, 19 nt, Artificial Sequence
  Description of Artificial Sequence: Synthetic oligonucleotide
augagaggaccuacugaug

SEQ ID NO: 2061926 - RNA, 19 nt, Artificial Sequence
  Description of Artificial Sequence: Synthetic oligonucleotide
uaggggacucuggugucca

SEQ ID NO: 2061927 - RNA, 19 nt, Artificial Sequence
  Description of Artificial Sequence: Synthetic oligonucleotide
ggucguugaaaggaauuca

SEQ ID NO: 2061928 - RNA, 19 nt, Artificial Sequence
  Description of Artificial Sequence: Synthetic oligonucleotide
guaggggacucuggugucc

SEQ ID NO: 2061929 - RNA, 19 nt, Artificial Sequence
  Description of Artificial Sequence: Synthetic oligonucleotide
cgugauguucauguggccc

SEQ ID NO: 2061930 - RNA, 19 nt, Artificial Sequence
  Description of Artificial Sequence: Synthetic oligonucleotide
augugcuacugcauaguaa

SEQ ID NO: 2061931 - RNA, 19 nt, Artificial Sequence
  Description of Artificial Sequence: Synthetic oligonucleotide
gugcuacugcauaguaacc

SEQ ID NO: 2061932 - RNA, 19 nt, Artificial Sequence
  Description of Artificial Sequence: Synthetic oligonucleotide
cuagaagcaacaggccuaa

SEQ ID NO: 2061933 - RNA, 19 nt, Artificial Sequence
  Description of Artificial Sequence: Synthetic oligonucleotide
gugcaaugccagcaccuuc

SEQ ID NO: 2061934 - RNA, 19 nt, Artificial Sequence
  Description of Artificial Sequence: Synthetic oligonucleotide
ggaagcagcuacccaacaa

SEQ ID NO: 2061935 - RNA, 19 nt, Artificial Sequence
  Description of Artificial Sequence: Synthetic oligonucleotide
caaccgaggaccagagcaa

SEQ ID NO: 2061936 - RNA, 19 nt, Artificial Sequence
  Description of Artificial Sequence: Synthetic oligonucleotide
cuccauugacaacagcugu

SEQ ID NO: 2061937 - RNA, 19 nt, Artificial Sequence
  Description of Artificial Sequence: Synthetic oligonucleotide
acgauuucuguaggacaca

SEQ ID NO: 2061938 - RNA, 19 nt, Artificial Sequence
  Description of Artificial Sequence: Synthetic oligonucleotide
ggacuuggcuugaucguag

SEQ ID NO: 2061939 - RNA, 19 nt, Artificial Sequence
  Description of Artificial Sequence: Synthetic oligonucleotide
agugcaaugccagcaccuu

SEQ ID NO: 2061940 - RNA, 19 nt, Artificial Sequence
  Description of Artificial Sequence: Synthetic oligonucleotide
accuuccaacagaacuccg

SEQ ID NO: 2061941 - RNA, 19 nt, Artificial Sequence
  Description of Artificial Sequence: Synthetic oligonucleotide
gcuaaggagaagaaugcua

SEQ ID NO: 2061942 - RNA, 19 nt, Artificial Sequence
  Description of Artificial Sequence: Synthetic oligonucleotide
gcugugcccuuaaaauagg

SEQ ID NO: 2061943 - RNA, 19 nt, Artificial Sequence
  Description of Artificial Sequence: Synthetic oligonucleotide
gugcaugcugugugacagc

SEQ ID NO: 2061944 - RNA, 19 nt, Artificial Sequence
  Description of Artificial Sequence: Synthetic oligonucleotide
aagugggaauccaccgaaa

SEQ ID NO: 2061945 - RNA, 19 nt, Artificial Sequence
  Description of Artificial Sequence: Synthetic oligonucleotide
ccaacagaacuccguaguc

SEQ ID NO: 2061946 - RNA, 19 nt, Artificial Sequence
  Description of Artificial Sequence: Synthetic oligonucleotide
cguugaaaggaauucagcu

SEQ ID NO: 2061947 - RNA, 19 nt, Artificial Sequence
  Description of Artificial Sequence: Synthetic oligonucleotide
aacuggugcuaaaggcaaa

SEQ ID NO: 2061948 - RNA, 19 nt, Artificial Sequence
  Description of Artificial Sequence: Synthetic oligonucleotide
ucugugggagucgguuagu

SEQ ID NO: 2061949 - RNA, 19 nt, Artificial Sequence
  Description of Artificial Sequence: Synthetic oligonucleotide
gggaauccaccgaaacugc

SEQ ID NO: 2061950 - RNA, 19 nt, Artificial Sequence
  Description of Artificial Sequence: Synthetic oligonucleotide
ggggaccaagcauucugug

SEQ ID NO: 2061951 - RNA, 19 nt, Artificial Sequence
  Description of Artificial Sequence: Synthetic oligonucleotide
ccaaacggaggguuucuuc

SEQ ID NO: 2061952 - RNA, 19 nt, Artificial Sequence
  Description of Artificial Sequence: Synthetic oligonucleotide
gacagcagggguguggaau

SEQ ID NO: 2061953 - RNA, 19 nt, Artificial Sequence
  Description of Artificial Sequence: Synthetic oligonucleotide
ggcuaaagugggaauccac

SEQ ID NO: 2061954 - RNA, 19 nt, Artificial Sequence
  Description of Artificial Sequence: Synthetic oligonucleotide
ggugcuaaaggcaaacuuu

SEQ ID NO: 2061955 - RNA, 19 nt, Artificial Sequence
  Description of Artificial Sequence: Synthetic oligonucleotide
caccagccaugagaggacc

SEQ ID NO: 2061956 - RNA, 19 nt, Artificial Sequence
  Description of Artificial Sequence: Synthetic oligonucleotide
gagugcaaugccagcaccu

SEQ ID NO: 2061957 - RNA, 19 nt, Artificial Sequence
  Description of Artificial Sequence: Synthetic oligonucleotide
caagagcgugauguucaug

SEQ ID NO: 2061958 - RNA, 19 nt, Artificial Sequence
  Description of Artificial Sequence: Synthetic oligonucleotide
gcaacaggccuaagaacug

SEQ ID NO: 2061959 - RNA, 19 nt, Artificial Sequence
  Description of Artificial Sequence: Synthetic oligonucleotide
gccagcaccuuccaacaga

SEQ ID NO: 2061960 - RNA, 19 nt, Artificial Sequence
  Description of Artificial Sequence: Synthetic oligonucleotide
gaggcagaccacaguaugu

SEQ ID NO: 2061961 - RNA, 19 nt, Artificial Sequence
  Description of Artificial Sequence: Synthetic oligonucleotide
caacagaacuccguagucu

SEQ ID NO: 2061962 - RNA, 19 nt, Artificial Sequence
  Description of Artificial Sequence: Synthetic oligonucleotide
cagcuacccaacaaagccu

SEQ ID NO: 2061963 - RNA, 19 nt, Artificial Sequence
  Description of Artificial Sequence: Synthetic oligonucleotide
agccaugagaggaccuacu

SEQ ID NO: 2061964 - RNA, 19 nt, Artificial Sequence
  Description of Artificial Sequence: Synthetic oligonucleotide
cugagcaaccgaggaccag

SEQ ID NO: 2061965 - RNA, 19 nt, Artificial Sequence
  Description of Artificial Sequence: Synthetic oligonucleotide
cauuggcuuugucacugaa

SEQ ID NO: 2061966 - RNA, 19 nt, Artificial Sequence
  Description of Artificial Sequence: Synthetic oligonucleotide
ccaccgaaacugcaacuac

SEQ ID NO: 2061967 - RNA, 19 nt, Artificial Sequence
  Description of Artificial Sequence: Synthetic oligonucleotide
ggacucugguguccaguug

SEQ ID NO: 2061968 - RNA, 19 nt, Artificial Sequence
  Description of Artificial Sequence: Synthetic oligonucleotide
ggacagcuauggaagcagc

SEQ ID NO: 2061969 - RNA, 19 nt, Artificial Sequence
  Description of Artificial Sequence: Synthetic oligonucleotide
cuccaugggucucuacaaa

SEQ ID NO: 2061970 - RNA, 19 nt, Artificial Sequence
  Description of Artificial Sequence: Synthetic oligonucleotide
agugaggauuugccaucua

SEQ ID NO: 2061971 - RNA, 19 nt, Artificial Sequence
  Description of Artificial Sequence: Synthetic oligonucleotide
guauugauccaggcaagau

SEQ ID NO: 2061972 - RNA, 19 nt, Artificial Sequence
  Description of Artificial Sequence: Synthetic oligonucleotide
auccgacaagagcgugaug

SEQ ID NO: 2061973 - RNA, 19 nt, Artificial Sequence
  Description of Artificial Sequence: Synthetic oligonucleotide
uccguagucucuggauauu

SEQ ID NO: 2061974 - RNA, 19 nt, Artificial Sequence
  Description of Artificial Sequence: Synthetic oligonucleotide
guaugucugucaagcaggu

SEQ ID NO: 2061975 - RNA, 19 nt, Artificial Sequence
  Description of Artificial Sequence: Synthetic oligonucleotide
ccaugagaggaccuacuga

SEQ ID NO: 2061976 - RNA, 19 nt, Artificial Sequence
  Description of Artificial Sequence: Synthetic oligonucleotide
uaguaaucuucaggucguu

SEQ ID NO: 2061977 - RNA, 19 nt, Artificial Sequence
  Description of Artificial Sequence: Synthetic oligonucleotide
cuacaaacuggaacgccuu

SEQ ID NO: 2061978 - RNA, 19 nt, Artificial Sequence
  Description of Artificial Sequence: Synthetic oligonucleotide
agaggccucugagugcaau

SEQ ID NO: 2061979 - RNA, 19 nt, Artificial Sequence
  Description of Artificial Sequence: Synthetic oligonucleotide
ccuacugauggaccuucuc

SEQ ID NO: 2061980 - RNA, 19 nt, Artificial Sequence
  Description of Artificial Sequence: Synthetic oligonucleotide
cuguggcuguuuucuggca

SEQ ID NO: 2061981 - RNA, 19 nt, Artificial Sequence
  Description of Artificial Sequence: Synthetic oligonucleotide
gcccuuaaaauagggugca

SEQ ID NO: 2061982 - RNA, 19 nt, Artificial Sequence
  Description of Artificial Sequence: Synthetic oligonucleotide
ggauauuugcuugguuaaa

SEQ ID NO: 2061983 - RNA, 19 nt, Artificial Sequence
  Description of Artificial Sequence: Synthetic oligonucleotide
ggcaaacaccagccaugag

SEQ ID NO: 2061984 - RNA, 19 nt, Artificial Sequence
  Description of Artificial Sequence: Synthetic oligonucleotide
cagaaauaccccgggaaau

SEQ ID NO: 2061985 - RNA, 19 nt, Artificial Sequence
  Description of Artificial Sequence: Synthetic oligonucleotide
gcgugauguucauguggcc

SEQ ID NO: 2061986 - RNA, 19 nt, Artificial Sequence
  Description of Artificial Sequence: Synthetic oligonucleotide
cuggaacgccuucaccaaa

SEQ ID NO: 2061987 - RNA, 19 nt, Artificial Sequence
  Description of Artificial Sequence: Synthetic oligonucleotide
caccaaguauuuccccuua

SEQ ID NO: 2061988 - RNA, 19 nt, Artificial Sequence
  Description of Artificial Sequence: Synthetic oligonucleotide
agucgucaagaagucccua

SEQ ID NO: 2061989 - RNA, 19 nt, Artificial Sequence
  Description of Artificial Sequence: Synthetic oligonucleotide
caggucguugaaaggaauu

SEQ ID NO: 2061990 - RNA, 19 nt, Artificial Sequence
  Description of Artificial Sequence: Synthetic oligonucleotide
ugacaccauuaggaucaau

SEQ ID NO: 2061991 - RNA, 19 nt, Artificial Sequence
  Description of Artificial Sequence: Synthetic oligonucleotide
caguuggcagggcagacuu

SEQ ID NO: 2061992 - RNA, 19 nt, Artificial Sequence
  Description of Artificial Sequence: Synthetic oligonucleotide
accaaacggaggguuucuu

SEQ ID NO: 2061993 - RNA, 19 nt, Artificial Sequence
  Description of Artificial Sequence: Synthetic oligonucleotide
gggugcaugcugugugaca

SEQ ID NO: 2061994 - RNA, 19 nt, Artificial Sequence
  Description of Artificial Sequence: Synthetic oligonucleotide
uccaggcaagauggcuaaa

SEQ ID NO: 2061995 - RNA, 19 nt, Artificial Sequence
  Description of Artificial Sequence: Synthetic oligonucleotide
cauucuuccuugguguauu

SEQ ID NO: 2061996 - RNA, 19 nt, Artificial Sequence
  Description of Artificial Sequence: Synthetic oligonucleotide
ccuuccaacagaacuccgu

SEQ ID NO: 2061997 - RNA, 19 nt, Artificial Sequence
  Description of Artificial Sequence: Synthetic oligonucleotide
cccgggaaauggcacucac

SEQ ID NO: 2061998 - RNA, 19 nt, Artificial Sequence
  Description of Artificial Sequence: Synthetic oligonucleotide
ccaugggucucuacaaacu

SEQ ID NO: 2061999 - RNA, 19 nt, Artificial Sequence
  Description of Artificial Sequence: Synthetic oligonucleotide
augacaccauuaggaucaa

SEQ ID NO: 2062000 - RNA, 19 nt, Artificial Sequence
  Description of Artificial Sequence: Synthetic oligonucleotide
cuggugcuaaugugcuacu

SEQ ID NO: 2062001 - RNA, 19 nt, Artificial Sequence
  Description of Artificial Sequence: Synthetic oligonucleotide
gcacucacaugcugagcaa

SEQ ID NO: 2062002 - RNA, 19 nt, Artificial Sequence
  Description of Artificial Sequence: Synthetic oligonucleotide
cgacaagagcgugauguuc

SEQ ID NO: 2062003 - RNA, 19 nt, Artificial Sequence
  Description of Artificial Sequence: Synthetic oligonucleotide
cuggugcuaaaggcaaacu

SEQ ID NO: 2062004 - RNA, 19 nt, Artificial Sequence
  Description of Artificial Sequence: Synthetic oligonucleotide
ggagucgguuagucgucaa

SEQ ID NO: 2062005 - RNA, 19 nt, Artificial Sequence
  Description of Artificial Sequence: Synthetic oligonucleotide
cccuaguaaggacagcuau

SEQ ID NO: 2062006 - RNA, 19 nt, Artificial Sequence
  Description of Artificial Sequence: Synthetic oligonucleotide
gggagucgguuagucguca

SEQ ID NO: 2062007 - RNA, 19 nt, Artificial Sequence
  Description of Artificial Sequence: Synthetic oligonucleotide
ccgggaaauggcacucaca

SEQ ID NO: 2062008 - RNA, 19 nt, Artificial Sequence
  Description of Artificial Sequence: Synthetic oligonucleotide
gcuguuggacuuggcuuga

SEQ ID NO: 2062009 - RNA, 19 nt, Artificial Sequence
  Description of Artificial Sequence: Synthetic oligonucleotide
gcaccaaguauuuccccuu

SEQ ID NO: 2062010 - RNA, 19 nt, Artificial Sequence
  Description of Artificial Sequence: Synthetic oligonucleotide
ccaagcauucugugggagu

SEQ ID NO: 2062011 - RNA, 19 nt, Artificial Sequence
  Description of Artificial Sequence: Synthetic oligonucleotide
cagcagggguguggaauga

SEQ ID NO: 2062012 - RNA, 19 nt, Artificial Sequence
  Description of Artificial Sequence: Synthetic oligonucleotide
cgucaagaagucccuagua

SEQ ID NO: 2062013 - RNA, 19 nt, Artificial Sequence
  Description of Artificial Sequence: Synthetic oligonucleotide
cuugaucguaggggacucu

SEQ ID NO: 2062014 - RNA, 19 nt, Artificial Sequence
  Description of Artificial Sequence: Synthetic oligonucleotide
gggucucuacaaacuggaa

SEQ ID NO: 2062015 - RNA, 19 nt, Artificial Sequence
  Description of Artificial Sequence: Synthetic oligonucleotide
caccaaacggaggguuucu

SEQ ID NO: 2062016 - RNA, 19 nt, Artificial Sequence
  Description of Artificial Sequence: Synthetic oligonucleotide
ccgaggaccagagcaaccu

SEQ ID NO: 2062017 - RNA, 19 nt, Artificial Sequence
  Description of Artificial Sequence: Synthetic oligonucleotide
cugcggcccacugggaggu

SEQ ID NO: 2062018 - RNA, 19 nt, Artificial Sequence
  Description of Artificial Sequence: Synthetic oligonucleotide
ccagccaugagaggaccua

SEQ ID NO: 2062019 - RNA, 19 nt, Artificial Sequence
  Description of Artificial Sequence: Synthetic oligonucleotide
ggggacucugguguccagu

SEQ ID NO: 2062020 - RNA, 19 nt, Artificial Sequence
  Description of Artificial Sequence: Synthetic oligonucleotide
ggaccuacugauggaccuu

SEQ ID NO: 2062021 - RNA, 19 nt, Artificial Sequence
  Description of Artificial Sequence: Synthetic oligonucleotide
cauugacacucaggugcuu

SEQ ID NO: 2062022 - RNA, 19 nt, Artificial Sequence
  Description of Artificial Sequence: Synthetic oligonucleotide
ccaguuggcagggcagacu

SEQ ID NO: 2062023 - RNA, 19 nt, Artificial Sequence
  Description of Artificial Sequence: Synthetic oligonucleotide
ccgacaagagcgugauguu

SEQ ID NO: 2062024 - RNA, 19 nt, Artificial Sequence
  Description of Artificial Sequence: Synthetic oligonucleotide
cuguuggacuuggcuugau

SEQ ID NO: 2062025 - RNA, 19 nt, Artificial Sequence
  Description of Artificial Sequence: Synthetic oligonucleotide
gcauucugugggagucggu

SEQ ID NO: 2062026 - RNA, 19 nt, Artificial Sequence
  Description of Artificial Sequence: Synthetic oligonucleotide
cccuuaaaauagggugcau

SEQ ID NO: 2062027 - RNA, 19 nt, Artificial Sequence
  Description of Artificial Sequence: Synthetic oligonucleotide
cgaggaccagagcaaccuu

SEQ ID NO: 2062028 - RNA, 19 nt, Artificial Sequence
  Description of Artificial Sequence: Synthetic oligonucleotide
ucuguuuagaaucugagug

SEQ ID NO: 2062029 - RNA, 19 nt, Artificial Sequence
  Description of Artificial Sequence: Synthetic oligonucleotide
aagacaacuguccaugacc

SEQ ID NO: 2062030 - RNA, 19 nt, Artificial Sequence
  Description of Artificial Sequence: Synthetic oligonucleotide
cuaagaauggguuaggucc

SEQ ID NO: 2062031 - RNA, 19 nt, Artificial Sequence
  Description of Artificial Sequence: Synthetic oligonucleotide
aacaacuaaccauuaaggg

SEQ ID NO: 2062032 - RNA, 19 nt, Artificial Sequence
  Description of Artificial Sequence: Synthetic oligonucleotide
aggacagucacuuucacuc

SEQ ID NO: 2062033 - RNA, 19 nt, Artificial Sequence
  Description of Artificial Sequence: Synthetic oligonucleotide
uaacacuugcuucagagag

SEQ ID NO: 2062034 - RNA, 19 nt, Artificial Sequence
  Description of Artificial Sequence: Synthetic oligonucleotide
ucuagauucuccaagggca

SEQ ID NO: 2062035 - RNA, 19 nt, Artificial Sequence
  Description of Artificial Sequence: Synthetic oligonucleotide
aguuugauuauaaaacugc

SEQ ID NO: 2062036 - RNA, 19 nt, Artificial Sequence
  Description of Artificial Sequence: Synthetic oligonucleotide
agaauguacaccuucaacu

SEQ ID NO: 2062037 - RNA, 19 nt, Artificial Sequence
  Description of Artificial Sequence: Synthetic oligonucleotide
aaaaccuucaaucccgacu

SEQ ID NO: 2062038 - RNA, 19 nt, Artificial Sequence
  Description of Artificial Sequence: Synthetic oligonucleotide
guaaguuugauuauaaaac

SEQ ID NO: 2062039 - RNA, 19 nt, Artificial Sequence
  Description of Artificial Sequence: Synthetic oligonucleotide
caacuaaccauuaagggug

SEQ ID NO: 2062040 - RNA, 19 nt, Artificial Sequence
  Description of Artificial Sequence: Synthetic oligonucleotide
uccuaucuccccuauaugg

SEQ ID NO: 2062041 - RNA, 19 nt, Artificial Sequence
  Description of Artificial Sequence: Synthetic oligonucleotide
ucuaacauuucgaugguac

SEQ ID NO: 2062042 - RNA, 19 nt, Artificial Sequence
  Description of Artificial Sequence: Synthetic oligonucleotide
uauuuugccucauuacagg

SEQ ID NO: 2062043 - RNA, 19 nt, Artificial Sequence
  Description of Artificial Sequence: Synthetic oligonucleotide
agucgcauuccuuagacag

SEQ ID NO: 2062044 - RNA, 19 nt, Artificial Sequence
  Description of Artificial Sequence: Synthetic oligonucleotide
uuauaaaacugcuuggguc

SEQ ID NO: 2062045 - RNA, 19 nt, Artificial Sequence
  Description of Artificial Sequence: Synthetic oligonucleotide
acaacuaaccauuaagggu

SEQ ID NO: 2062046 - RNA, 19 nt, Artificial Sequence
  Description of Artificial Sequence: Synthetic oligonucleotide
aacucuggcuucuggaaac

SEQ ID NO: 2062047 - RNA, 19 nt, Artificial Sequence
  Description of Artificial Sequence: Synthetic oligonucleotide
auuucgaugguacugaaaa

SEQ ID NO: 2062048 - RNA, 19 nt, Artificial Sequence
  Description of Artificial Sequence: Synthetic oligonucleotide
aacaugaggaaagaaagga

SEQ ID NO: 2062049 - RNA, 19 nt, Artificial Sequence
  Description of Artificial Sequence: Synthetic oligonucleotide
agaucuagauucuccaagg

SEQ ID NO: 2062050 - RNA, 19 nt, Artificial Sequence
  Description of Artificial Sequence: Synthetic oligonucleotide
cugaaaaccuucaaucccg

SEQ ID NO: 2062051 - RNA, 19 nt, Artificial Sequence
  Description of Artificial Sequence: Synthetic oligonucleotide
acugcugagacagagucgc

SEQ ID NO: 2062052 - RNA, 19 nt, Artificial Sequence
  Description of Artificial Sequence: Synthetic oligonucleotide
accauuaaggguguugucc

SEQ ID NO: 2062053 - RNA, 19 nt, Artificial Sequence
  Description of Artificial Sequence: Synthetic oligonucleotide
aagacaauauuuugccuca

SEQ ID NO: 2062054 - RNA, 19 nt, Artificial Sequence
  Description of Artificial Sequence: Synthetic oligonucleotide
aaagaaaggaggugcgaug

SEQ ID NO: 2062055 - RNA, 19 nt, Artificial Sequence
  Description of Artificial Sequence: Synthetic oligonucleotide
guugauaagacaacugucc

SEQ ID NO: 2062056 - RNA, 19 nt, Artificial Sequence
  Description of Artificial Sequence: Synthetic oligonucleotide
uucgaugguacugaaaacc

SEQ ID NO: 2062057 - RNA, 19 nt, Artificial Sequence
  Description of Artificial Sequence: Synthetic oligonucleotide
caagacaauauuuugccuc

SEQ ID NO: 2062058 - RNA, 19 nt, Artificial Sequence
  Description of Artificial Sequence: Synthetic oligonucleotide
cuguuuagaaucugagugg

SEQ ID NO: 2062059 - RNA, 19 nt, Artificial Sequence
  Description of Artificial Sequence: Synthetic oligonucleotide
aaggauagccauaccaaac

SEQ ID NO: 2062060 - RNA, 19 nt, Artificial Sequence
  Description of Artificial Sequence: Synthetic oligonucleotide
guuuccguaaguuugauua

SEQ ID NO: 2062061 - RNA, 19 nt, Artificial Sequence
  Description of Artificial Sequence: Synthetic oligonucleotide
agagucgcauuccuuagac

SEQ ID NO: 2062062 - RNA, 19 nt, Artificial Sequence
  Description of Artificial Sequence: Synthetic oligonucleotide
aggauuuuccacaaacccc

SEQ ID NO: 2062063 - RNA, 19 nt, Artificial Sequence
  Description of Artificial Sequence: Synthetic oligonucleotide
aaguuugauuauaaaacug

SEQ ID NO: 2062064 - RNA, 19 nt, Artificial Sequence
  Description of Artificial Sequence: Synthetic oligonucleotide
aaaacugcuugggucugcc

SEQ ID NO: 2062065 - RNA, 19 nt, Artificial Sequence
  Description of Artificial Sequence: Synthetic oligonucleotide
aaaggauagccauaccaaa

SEQ ID NO: 2062066 - RNA, 19 nt, Artificial Sequence
  Description of Artificial Sequence: Synthetic oligonucleotide
uguggguacauguucuugc

SEQ ID NO: 2062067 - RNA, 19 nt, Artificial Sequence
  Description of Artificial Sequence: Synthetic oligonucleotide
ucuggaaacucacccacug

SEQ ID NO: 2062068 - RNA, 19 nt, Artificial Sequence
  Description of Artificial Sequence: Synthetic oligonucleotide
gaauguacaccuucaacuc

SEQ ID NO: 2062069 - RNA, 19 nt, Artificial Sequence
  Description of Artificial Sequence: Synthetic oligonucleotide
agguugauaagacaacugu

SEQ ID NO: 2062070 - RNA, 19 nt, Artificial Sequence
  Description of Artificial Sequence: Synthetic oligonucleotide
gaucuagauucuccaaggg

SEQ ID NO: 2062071 - RNA, 19 nt, Artificial Sequence
  Description of Artificial Sequence: Synthetic oligonucleotide
augacugcuccacucggcc

SEQ ID NO: 2062072 - RNA, 19 nt, Artificial Sequence
  Description of Artificial Sequence: Synthetic oligonucleotide
caauauuuugccucauuac

SEQ ID NO: 2062073 - RNA, 19 nt, Artificial Sequence
  Description of Artificial Sequence: Synthetic oligonucleotide
auagccauaccaaacauga

SEQ ID NO: 2062074 - RNA, 19 nt, Artificial Sequence
  Description of Artificial Sequence: Synthetic oligonucleotide
ucacccacugcugagacag

SEQ ID NO: 2062075 - RNA, 19 nt, Artificial Sequence
  Description of Artificial Sequence: Synthetic oligonucleotide
uccucuuaggcucaaguuc

SEQ ID NO: 2062076 - RNA, 19 nt, Artificial Sequence
  Description of Artificial Sequence: Synthetic oligonucleotide
auggguuagguccaaagga

SEQ ID NO: 2062077 - RNA, 19 nt, Artificial Sequence
  Description of Artificial Sequence: Synthetic oligonucleotide
aaguucagguugauaagac

SEQ ID NO: 2062078 - RNA, 19 nt, Artificial Sequence
  Description of Artificial Sequence: Synthetic oligonucleotide
accucuaccagaagaaccc

SEQ ID NO: 2062079 - RNA, 19 nt, Artificial Sequence
  Description of Artificial Sequence: Synthetic oligonucleotide
uaucuccccuauaugggcg

SEQ ID NO: 2062080 - RNA, 19 nt, Artificial Sequence
  Description of Artificial Sequence: Synthetic oligonucleotide
agucacuuucacucugacc

SEQ ID NO: 2062081 - RNA, 19 nt, Artificial Sequence
  Description of Artificial Sequence: Synthetic oligonucleotide
agugacucuucauauucag

SEQ ID NO: 2062082 - RNA, 19 nt, Artificial Sequence
  Description of Artificial Sequence: Synthetic oligonucleotide
aaaaggauagccauaccaa

SEQ ID NO: 2062083 - RNA, 19 nt, Artificial Sequence
  Description of Artificial Sequence: Synthetic oligonucleotide
auauuuugccucauuacag

SEQ ID NO: 2062084 - RNA, 19 nt, Artificial Sequence
  Description of Artificial Sequence: Synthetic oligonucleotide
auacacaggaacagggacc

SEQ ID NO: 2062085 - RNA, 19 nt, Artificial Sequence
  Description of Artificial Sequence: Synthetic oligonucleotide
uaagaauggguuaggucca

SEQ ID NO: 2062086 - RNA, 19 nt, Artificial Sequence
  Description of Artificial Sequence: Synthetic oligonucleotide
aacauuucgaugguacuga

SEQ ID NO: 2062087 - RNA, 19 nt, Artificial Sequence
  Description of Artificial Sequence: Synthetic oligonucleotide
gcaacaacuaaccauuaag

SEQ ID NO: 2062088 - RNA, 19 nt, Artificial Sequence
  Description of Artificial Sequence: Synthetic oligonucleotide
cuuggaaccaguauucuga

SEQ ID NO: 2062089 - RNA, 19 nt, Artificial Sequence
  Description of Artificial Sequence: Synthetic oligonucleotide
ucagacaccugagaugggg

SEQ ID NO: 2062090 - RNA, 19 nt, Artificial Sequence
  Description of Artificial Sequence: Synthetic oligonucleotide
uuaggcugcccuuuccagg

SEQ ID NO: 2062091 - RNA, 19 nt, Artificial Sequence
  Description of Artificial Sequence: Synthetic oligonucleotide
ugaggauacacaggaacag

SEQ ID NO: 2062092 - RNA, 19 nt, Artificial Sequence
  Description of Artificial Sequence: Synthetic oligonucleotide
uaacauuucgaugguacug

SEQ ID NO: 2062093 - RNA, 19 nt, Artificial Sequence
  Description of Artificial Sequence: Synthetic oligonucleotide
uucgugucugggaugacug

SEQ ID NO: 2062094 - RNA, 19 nt, Artificial Sequence
  Description of Artificial Sequence: Synthetic oligonucleotide
aguagugggcaucaguaca

SEQ ID NO: 2062095 - RNA, 19 nt, Artificial Sequence
  Description of Artificial Sequence: Synthetic oligonucleotide
ucgaugguacugaaaaccu

SEQ ID NO: 2062096 - RNA, 19 nt, Artificial Sequence
  Description of Artificial Sequence: Synthetic oligonucleotide
uggguuagguccaaaggac

SEQ ID NO: 2062097 - RNA, 19 nt, Artificial Sequence
  Description of Artificial Sequence: Synthetic oligonucleotide
uuggguaucuuuacuuucu

SEQ ID NO: 2062098 - RNA, 19 nt, Artificial Sequence
  Description of Artificial Sequence: Synthetic oligonucleotide
ggcaagacaauauuuugcc

SEQ ID NO: 2062099 - RNA, 19 nt, Artificial Sequence
  Description of Artificial Sequence: Synthetic oligonucleotide
ugcgaugggaacuggaccu

SEQ ID NO: 2062100 - RNA, 19 nt, Artificial Sequence
  Description of Artificial Sequence: Synthetic oligonucleotide
aguucagcagacccaguuc

SEQ ID NO: 2062101 - RNA, 19 nt, Artificial Sequence
  Description of Artificial Sequence: Synthetic oligonucleotide
agacagaucuagauucucc

SEQ ID NO: 2062102 - RNA, 19 nt, Artificial Sequence
  Description of Artificial Sequence: Synthetic oligonucleotide
caagggcaaauccaguucc

SEQ ID NO: 2062103 - RNA, 19 nt, Artificial Sequence
  Description of Artificial Sequence: Synthetic oligonucleotide
acauguucuugccacuuag

SEQ ID NO: 2062104 - RNA, 19 nt, Artificial Sequence
  Description of Artificial Sequence: Synthetic oligonucleotide
uauaugggcguccucuaac

SEQ ID NO: 2062105 - RNA, 19 nt, Artificial Sequence
  Description of Artificial Sequence: Synthetic oligonucleotide
acuucuguuaggcugcccu

SEQ ID NO: 2062106 - RNA, 19 nt, Artificial Sequence
  Description of Artificial Sequence: Synthetic oligonucleotide
gaugguacugaaaaccuuc

SEQ ID NO: 2062107 - RNA, 19 nt, Artificial Sequence
  Description of Artificial Sequence: Synthetic oligonucleotide
uuugccucauuacaggauu

SEQ ID NO: 2062108 - RNA, 19 nt, Artificial Sequence
  Description of Artificial Sequence: Synthetic oligonucleotide
ucuaggcucuggauggucc

SEQ ID NO: 2062109 - RNA, 19 nt, Artificial Sequence
  Description of Artificial Sequence: Synthetic oligonucleotide
acuuagugacucuucauau

SEQ ID NO: 2062110 - RNA, 19 nt, Artificial Sequence
  Description of Artificial Sequence: Synthetic oligonucleotide
uaaccauuaaggguguugu

SEQ ID NO: 2062111 - RNA, 19 nt, Artificial Sequence
  Description of Artificial Sequence: Synthetic oligonucleotide
aaacucacccacugcugag

SEQ ID NO: 2062112 - RNA, 19 nt, Artificial Sequence
  Description of Artificial Sequence: Synthetic oligonucleotide
aggaggucccaucucugcc

SEQ ID NO: 2062113 - RNA, 19 nt, Artificial Sequence
  Description of Artificial Sequence: Synthetic oligonucleotide
uccauuaacacuggccuca

SEQ ID NO: 2062114 - RNA, 19 nt, Artificial Sequence
  Description of Artificial Sequence: Synthetic oligonucleotide
uagaaucugagugggagga

SEQ ID NO: 2062115 - RNA, 19 nt, Artificial Sequence
  Description of Artificial Sequence: Synthetic oligonucleotide
uucagguugauaagacaac

SEQ ID NO: 2062116 - RNA, 19 nt, Artificial Sequence
  Description of Artificial Sequence: Synthetic oligonucleotide
uguacaccuucaacucugg

SEQ ID NO: 2062117 - RNA, 19 nt, Artificial Sequence
  Description of Artificial Sequence: Synthetic oligonucleotide
cuaucuccccuauaugggc

SEQ ID NO: 2062118 - RNA, 19 nt, Artificial Sequence
  Description of Artificial Sequence: Synthetic oligonucleotide
accaguauucugaggauac

SEQ ID NO: 2062119 - RNA, 19 nt, Artificial Sequence
  Description of Artificial Sequence: Synthetic oligonucleotide
aaggacagucacuuucacu

SEQ ID NO: 2062120 - RNA, 19 nt, Artificial Sequence
  Description of Artificial Sequence: Synthetic oligonucleotide
uuaacacuggccucagggu

SEQ ID NO: 2062121 - RNA, 19 nt, Artificial Sequence
  Description of Artificial Sequence: Synthetic oligonucleotide
ucagguugauaagacaacu

SEQ ID NO: 2062122 - RNA, 19 nt, Artificial Sequence
  Description of Artificial Sequence: Synthetic oligonucleotide
auuuugccucauuacagga

SEQ ID NO: 2062123 - RNA, 19 nt, Artificial Sequence
  Description of Artificial Sequence: Synthetic oligonucleotide
uguuaggcugcccuuucca

SEQ ID NO: 2062124 - RNA, 19 nt, Artificial Sequence
  Description of Artificial Sequence: Synthetic oligonucleotide
ugucuuucgugucugggau

SEQ ID NO: 2062125 - RNA, 19 nt, Artificial Sequence
  Description of Artificial Sequence: Synthetic oligonucleotide
cuuaggcucaaguucagca

SEQ ID NO: 2062126 - RNA, 19 nt, Artificial Sequence
  Description of Artificial Sequence: Synthetic oligonucleotide
ggaacuggaccuaagaaug

SEQ ID NO: 2062127 - RNA, 19 nt, Artificial Sequence
  Description of Artificial Sequence: Synthetic oligonucleotide
aaguucagcagacccaguu

SEQ ID NO: 2062128 - RNA, 19 nt, Artificial Sequence
  Description of Artificial Sequence: Synthetic oligonucleotide
ucggccuucaugcuugcug

SEQ ID NO: 2062129 - RNA, 19 nt, Artificial Sequence
  Description of Artificial Sequence: Synthetic oligonucleotide
aagaaccccagucacuuuu

SEQ ID NO: 2062130 - RNA, 19 nt, Artificial Sequence
  Description of Artificial Sequence: Synthetic oligonucleotide
uccguaaguuugauuauaa

SEQ ID NO: 2062131 - RNA, 19 nt, Artificial Sequence
  Description of Artificial Sequence: Synthetic oligonucleotide
agagaaugcaggagguccc

SEQ ID NO: 2062132 - RNA, 19 nt, Artificial Sequence
  Description of Artificial Sequence: Synthetic oligonucleotide
uccuuagacagaucuagau

SEQ ID NO: 2062133 - RNA, 19 nt, Artificial Sequence
  Description of Artificial Sequence: Synthetic oligonucleotide
uuggaaccaguauucugag

SEQ ID NO: 2062134 - RNA, 19 nt, Artificial Sequence
  Description of Artificial Sequence: Synthetic oligonucleotide
gggugcauagaguaguggg

SEQ ID NO: 2062135 - RNA, 19 nt, Artificial Sequence
  Description of Artificial Sequence: Synthetic oligonucleotide
gaaacucacccacugcuga

SEQ ID NO: 2062136 - RNA, 19 nt, Artificial Sequence
  Description of Artificial Sequence: Synthetic oligonucleotide
ugccacuuaccacaucagc

SEQ ID NO: 2062137 - RNA, 19 nt, Artificial Sequence
  Description of Artificial Sequence: Synthetic oligonucleotide
accccagucacuuuuguau

SEQ ID NO: 2062138 - RNA, 19 nt, Artificial Sequence
  Description of Artificial Sequence: Synthetic oligonucleotide
ucuuucgugucugggauga

SEQ ID NO: 2062139 - RNA, 19 nt, Artificial Sequence
  Description of Artificial Sequence: Synthetic oligonucleotide
ugaaaaggauagccauacc

SEQ ID NO: 2062140 - RNA, 19 nt, Artificial Sequence
  Description of Artificial Sequence: Synthetic oligonucleotide
ucagagggcaagacaauau

SEQ ID NO: 2062141 - RNA, 19 nt, Artificial Sequence
  Description of Artificial Sequence: Synthetic oligonucleotide
ucugucuuucgugucuggg

SEQ ID NO: 2062142 - RNA, 19 nt, Artificial Sequence
  Description of Artificial Sequence: Synthetic oligonucleotide
uagaguagugggcaucagu

SEQ ID NO: 2062143 - RNA, 19 nt, Artificial Sequence
  Description of Artificial Sequence: Synthetic oligonucleotide
aguucagguugauaagaca

SEQ ID NO: 2062144 - RNA, 19 nt, Artificial Sequence
  Description of Artificial Sequence: Synthetic oligonucleotide
ucccucuacuccaggagag

SEQ ID NO: 2062145 - RNA, 19 nt, Artificial Sequence
  Description of Artificial Sequence: Synthetic oligonucleotide
aagggcaaauccaguuccc

SEQ ID NO: 2062146 - RNA, 19 nt, Artificial Sequence
  Description of Artificial Sequence: Synthetic oligonucleotide
uacacaggaacagggaccu

SEQ ID NO: 2062147 - RNA, 19 nt, Artificial Sequence
  Description of Artificial Sequence: Synthetic oligonucleotide
cuuggguaucuuuacuuuc

SEQ ID NO: 2062148 - RNA, 19 nt, Artificial Sequence
  Description of Artificial Sequence: Synthetic oligonucleotide
uucccucuacuccaggaga

SEQ ID NO: 2062149 - RNA, 19 nt, Artificial Sequence
  Description of Artificial Sequence: Synthetic oligonucleotide
ucuacuccaggagagccug

SEQ ID NO: 2062150 - RNA, 19 nt, Artificial Sequence
  Description of Artificial Sequence: Synthetic oligonucleotide
ugggcguccucuaacauuu

SEQ ID NO: 2062151 - RNA, 19 nt, Artificial Sequence
  Description of Artificial Sequence: Synthetic oligonucleotide
uuucgaugguacugaaaac

SEQ ID NO: 2062152 - RNA, 19 nt, Artificial Sequence
  Description of Artificial Sequence: Synthetic oligonucleotide
cauauucagcaugaagaag

SEQ ID NO: 2062153 - RNA, 19 nt, Artificial Sequence
  Description of Artificial Sequence: Synthetic oligonucleotide
aagaagcugcccagcauuc

SEQ ID NO: 2062154 - RNA, 19 nt, Artificial Sequence
  Description of Artificial Sequence: Synthetic oligonucleotide
acagagucgcauuccuuag

SEQ ID NO: 2062155 - RNA, 19 nt, Artificial Sequence
  Description of Artificial Sequence: Synthetic oligonucleotide
ucagggugcauagaguagu

SEQ ID NO: 2062156 - RNA, 19 nt, Artificial Sequence
  Description of Artificial Sequence: Synthetic oligonucleotide
gaacuggaccuaagaaugg

SEQ ID NO: 2062157 - RNA, 19 nt, Artificial Sequence
  Description of Artificial Sequence: Synthetic oligonucleotide
ugauagccaccucuaccag

SEQ ID NO: 2062158 - RNA, 19 nt, Artificial Sequence
  Description of Artificial Sequence: Synthetic oligonucleotide
guccaaaggacgguugugg

SEQ ID NO: 2062159 - RNA, 19 nt, Artificial Sequence
  Description of Artificial Sequence: Synthetic oligonucleotide
cagagagagaauguacacc

SEQ ID NO: 2062160 - RNA, 19 nt, Artificial Sequence
  Description of Artificial Sequence: Synthetic oligonucleotide
gccucucacauguugauag

SEQ ID NO: 2062161 - RNA, 19 nt, Artificial Sequence
  Description of Artificial Sequence: Synthetic oligonucleotide
caucaguacaaggacaguc

SEQ ID NO: 2062162 - RNA, 19 nt, Artificial Sequence
  Description of Artificial Sequence: Synthetic oligonucleotide
aaauccaguuccccuuuau

SEQ ID NO: 2062163 - RNA, 19 nt, Artificial Sequence
  Description of Artificial Sequence: Synthetic oligonucleotide
guucagguugauaagacaa

SEQ ID NO: 2062164 - RNA, 19 nt, Artificial Sequence
  Description of Artificial Sequence: Synthetic oligonucleotide
uguggcaucuguccauuaa

SEQ ID NO: 2062165 - RNA, 19 nt, Artificial Sequence
  Description of Artificial Sequence: Synthetic oligonucleotide
cagguugauaagacaacug

SEQ ID NO: 2062166 - RNA, 19 nt, Artificial Sequence
  Description of Artificial Sequence: Synthetic oligonucleotide
gguaucuuuacuuucuucu

SEQ ID NO: 2062167 - RNA, 19 nt, Artificial Sequence
  Description of Artificial Sequence: Synthetic oligonucleotide
ucuuggguaucuuuacuuu

SEQ ID NO: 2062168 - RNA, 19 nt, Artificial Sequence
  Description of Artificial Sequence: Synthetic oligonucleotide
auaugggcguccucuaaca

SEQ ID NO: 2062169 - RNA, 19 nt, Artificial Sequence
  Description of Artificial Sequence: Synthetic oligonucleotide
accagaggugaagagaaug

SEQ ID NO: 2062170 - RNA, 19 nt, Artificial Sequence
  Description of Artificial Sequence: Synthetic oligonucleotide
uggaaccaguauucugagg

SEQ ID NO: 2062171 - RNA, 19 nt, Artificial Sequence
  Description of Artificial Sequence: Synthetic oligonucleotide
cuaaccauuaaggguguug

SEQ ID NO: 2062172 - RNA, 19 nt, Artificial Sequence
  Description of Artificial Sequence: Synthetic oligonucleotide
ucuguccauuaacacuggc

SEQ ID NO: 2062173 - RNA, 19 nt, Artificial Sequence
  Description of Artificial Sequence: Synthetic oligonucleotide
uuaucaucagagggcaaga

SEQ ID NO: 2062174 - RNA, 19 nt, Artificial Sequence
  Description of Artificial Sequence: Synthetic oligonucleotide
ccucauuacaggauuuucc

SEQ ID NO: 2062175 - RNA, 19 nt, Artificial Sequence
  Description of Artificial Sequence: Synthetic oligonucleotide
ucacuuucacucugaccag

SEQ ID NO: 2062176 - RNA, 19 nt, Artificial Sequence
  Description of Artificial Sequence: Synthetic oligonucleotide
acuuuuguauuuccuguuu

SEQ ID NO: 2062177 - RNA, 19 nt, Artificial Sequence
  Description of Artificial Sequence: Synthetic oligonucleotide
cucucacauguugauagcc

SEQ ID NO: 2062178 - RNA, 19 nt, Artificial Sequence
  Description of Artificial Sequence: Synthetic oligonucleotide
ucaaucccgacuucuguua

SEQ ID NO: 2062179 - RNA, 19 nt, Artificial Sequence
  Description of Artificial Sequence: Synthetic oligonucleotide
aguauucugaggauacaca

SEQ ID NO: 2062180 - RNA, 19 nt, Artificial Sequence
  Description of Artificial Sequence: Synthetic oligonucleotide
ugcugcuaacacuugcuuc

SEQ ID NO: 2062181 - RNA, 19 nt, Artificial Sequence
  Description of Artificial Sequence: Synthetic oligonucleotide
aaucugagugggaggauga

SEQ ID NO: 2062182 - RNA, 19 nt, Artificial Sequence
  Description of Artificial Sequence: Synthetic oligonucleotide
caguauucugaggauacac

SEQ ID NO: 2062183 - RNA, 19 nt, Artificial Sequence
  Description of Artificial Sequence: Synthetic oligonucleotide
uguccaugaccuucagaca

SEQ ID NO: 2062184 - RNA, 19 nt, Artificial Sequence
  Description of Artificial Sequence: Synthetic oligonucleotide
aucaguacaaggacaguca

SEQ ID NO: 2062185 - RNA, 19 nt, Artificial Sequence
  Description of Artificial Sequence: Synthetic oligonucleotide
cuugggucugccacuuacc

SEQ ID NO: 2062186 - RNA, 19 nt, Artificial Sequence
  Description of Artificial Sequence: Synthetic oligonucleotide
gaguagugggcaucaguac

SEQ ID NO: 2062187 - RNA, 19 nt, Artificial Sequence
  Description of Artificial Sequence: Synthetic oligonucleotide
uucaaucccgacuucuguu

SEQ ID NO: 2062188 - RNA, 19 nt, Artificial Sequence
  Description of Artificial Sequence: Synthetic oligonucleotide
gcucaaguucagcagaccc

SEQ ID NO: 2062189 - RNA, 19 nt, Artificial Sequence
  Description of Artificial Sequence: Synthetic oligonucleotide
uggaccuaagaauggguua

SEQ ID NO: 2062190 - RNA, 19 nt, Artificial Sequence
  Description of Artificial Sequence: Synthetic oligonucleotide
cauuaaggguguugucccc

SEQ ID NO: 2062191 - RNA, 19 nt, Artificial Sequence
  Description of Artificial Sequence: Synthetic oligonucleotide
agacaacuguccaugaccu

SEQ ID NO: 2062192 - RNA, 19 nt, Artificial Sequence
  Description of Artificial Sequence: Synthetic oligonucleotide
gguuagguccaaaggacgg

SEQ ID NO: 2062193 - RNA, 19 nt, Artificial Sequence
  Description of Artificial Sequence: Synthetic oligonucleotide
ccuaucuccccuauauggg

SEQ ID NO: 2062194 - RNA, 19 nt, Artificial Sequence
  Description of Artificial Sequence: Synthetic oligonucleotide
uuuccguaaguuugauuau

SEQ ID NO: 2062195 - RNA, 19 nt, Artificial Sequence
  Description of Artificial Sequence: Synthetic oligonucleotide
uagguccaaaggacgguug

SEQ ID NO: 2062196 - RNA, 19 nt, Artificial Sequence
  Description of Artificial Sequence: Synthetic oligonucleotide
ccauuaaggguguuguccc

SEQ ID NO: 2062197 - RNA, 19 nt, Artificial Sequence
  Description of Artificial Sequence: Synthetic oligonucleotide
cacuuaccacaucagcagc

SEQ ID NO: 2062198 - RNA, 19 nt, Artificial Sequence
  Description of Artificial Sequence: Synthetic oligonucleotide
uggguacauguucuugcca

SEQ ID NO: 2062199 - RNA, 19 nt, Artificial Sequence
  Description of Artificial Sequence: Synthetic oligonucleotide
cuuaccacaucagcagcag

SEQ ID NO: 2062200 - RNA, 19 nt, Artificial Sequence
  Description of Artificial Sequence: Synthetic oligonucleotide
uaugucugucuuucguguc

SEQ ID NO: 2062201 - RNA, 19 nt, Artificial Sequence
  Description of Artificial Sequence: Synthetic oligonucleotide
ggcaucaguacaaggacag

SEQ ID NO: 2062202 - RNA, 19 nt, Artificial Sequence
  Description of Artificial Sequence: Synthetic oligonucleotide
agaguagugggcaucagua

SEQ ID NO: 2062203 - RNA, 19 nt, Artificial Sequence
  Description of Artificial Sequence: Synthetic oligonucleotide
ccccuaaugaccaucuccc

SEQ ID NO: 2062204 - RNA, 19 nt, Artificial Sequence
  Description of Artificial Sequence: Synthetic oligonucleotide
gaacagggaccuuggguac

SEQ ID NO: 2062205 - RNA, 19 nt, Artificial Sequence
  Description of Artificial Sequence: Synthetic oligonucleotide
auguacaccuucaacucug

SEQ ID NO: 2062206 - RNA, 19 nt, Artificial Sequence
  Description of Artificial Sequence: Synthetic oligonucleotide
cacugcugagacagagucg

SEQ ID NO: 2062207 - RNA, 19 nt, Artificial Sequence
  Description of Artificial Sequence: Synthetic oligonucleotide
guggcaucuguccauuaac

SEQ ID NO: 2062208 - RNA, 19 nt, Artificial Sequence
  Description of Artificial Sequence: Synthetic oligonucleotide
ggaccuaagaauggguuag

SEQ ID NO: 2062209 - RNA, 19 nt, Artificial Sequence
  Description of Artificial Sequence: Synthetic oligonucleotide
ugggaugacugcuccacuc

SEQ ID NO: 2062210 - RNA, 19 nt, Artificial Sequence
  Description of Artificial Sequence: Synthetic oligonucleotide
uuucgugucugggaugacu

SEQ ID NO: 2062211 - RNA, 19 nt, Artificial Sequence
  Description of Artificial Sequence: Synthetic oligonucleotide
cucaaguucagcagaccca

SEQ ID NO: 2062212 - RNA, 19 nt, Artificial Sequence
  Description of Artificial Sequence: Synthetic oligonucleotide
aaaggaggugcgaugggaa

SEQ ID NO: 2062213 - RNA, 19 nt, Artificial Sequence
  Description of Artificial Sequence: Synthetic oligonucleotide
ggguacauguucuugccac

SEQ ID NO: 2062214 - RNA, 19 nt, Artificial Sequence
  Description of Artificial Sequence: Synthetic oligonucleotide
gugcgaugggaacuggacc

SEQ ID NO: 2062215 - RNA, 19 nt, Artificial Sequence
  Description of Artificial Sequence: Synthetic oligonucleotide
acagaucuagauucuccaa

SEQ ID NO: 2062216 - RNA, 19 nt, Artificial Sequence
  Description of Artificial Sequence: Synthetic oligonucleotide
ugguacugaaaaccuucaa

SEQ ID NO: 2062217 - RNA, 19 nt, Artificial Sequence
  Description of Artificial Sequence: Synthetic oligonucleotide
gugggcaucaguacaagga

SEQ ID NO: 2062218 - RNA, 19 nt, Artificial Sequence
  Description of Artificial Sequence: Synthetic oligonucleotide
gaaugcaggaggucccauc

SEQ ID NO: 2062219 - RNA, 19 nt, Artificial Sequence
  Description of Artificial Sequence: Synthetic oligonucleotide
ggaugguccucuuaggcuc

SEQ ID NO: 2062220 - RNA, 19 nt, Artificial Sequence
  Description of Artificial Sequence: Synthetic oligonucleotide
gggaugacugcuccacucg

SEQ ID NO: 2062221 - RNA, 19 nt, Artificial Sequence
  Description of Artificial Sequence: Synthetic oligonucleotide
gacgguuguggguacaugu

SEQ ID NO: 2062222 - RNA, 19 nt, Artificial Sequence
  Description of Artificial Sequence: Synthetic oligonucleotide
cauguugauagccaccucu

SEQ ID NO: 2062223 - RNA, 19 nt, Artificial Sequence
  Description of Artificial Sequence: Synthetic oligonucleotide
ucgcauuccuuagacagau

SEQ ID NO: 2062224 - RNA, 19 nt, Artificial Sequence
  Description of Artificial Sequence: Synthetic oligonucleotide
gaccuaagaauggguuagg

SEQ ID NO: 2062225 - RNA, 19 nt, Artificial Sequence
  Description of Artificial Sequence: Synthetic oligonucleotide
agcagacccaguucucucu

SEQ ID NO: 2062226 - RNA, 19 nt, Artificial Sequence
  Description of Artificial Sequence: Synthetic oligonucleotide
gggucugccacuuaccaca

SEQ ID NO: 2062227 - RNA, 19 nt, Artificial Sequence
  Description of Artificial Sequence: Synthetic oligonucleotide
caaucccgacuucuguuag

SEQ ID NO: 2062228 - RNA, 19 nt, Artificial Sequence
  Description of Artificial Sequence: Synthetic oligonucleotide
uuguggguacauguucuug

SEQ ID NO: 2062229 - RNA, 19 nt, Artificial Sequence
  Description of Artificial Sequence: Synthetic oligonucleotide
uuaccacaucagcagcagu

SEQ ID NO: 2062230 - RNA, 19 nt, Artificial Sequence
  Description of Artificial Sequence: Synthetic oligonucleotide
aaccaguauucugaggaua

SEQ ID NO: 2062231 - RNA, 19 nt, Artificial Sequence
  Description of Artificial Sequence: Synthetic oligonucleotide
gaugacugcuccacucggc

SEQ ID NO: 2062232 - RNA, 19 nt, Artificial Sequence
  Description of Artificial Sequence: Synthetic oligonucleotide
agguccaaaggacgguugu

SEQ ID NO: 2062233 - RNA, 19 nt, Artificial Sequence
  Description of Artificial Sequence: Synthetic oligonucleotide
auaaaacugcuugggucug

SEQ ID NO: 2062234 - RNA, 19 nt, Artificial Sequence
  Description of Artificial Sequence: Synthetic oligonucleotide
cguaaguuugauuauaaaa

SEQ ID NO: 2062235 - RNA, 19 nt, Artificial Sequence
  Description of Artificial Sequence: Synthetic oligonucleotide
caggaggucccaucucugc

SEQ ID NO: 2062236 - RNA, 19 nt, Artificial Sequence
  Description of Artificial Sequence: Synthetic oligonucleotide
aacucacccacugcugaga

SEQ ID NO: 2062237 - RNA, 19 nt, Artificial Sequence
  Description of Artificial Sequence: Synthetic oligonucleotide
uacauguucuugccacuua

SEQ ID NO: 2062238 - RNA, 19 nt, Artificial Sequence
  Description of Artificial Sequence: Synthetic oligonucleotide
auagccaccucuaccagaa

SEQ ID NO: 2062239 - RNA, 19 nt, Artificial Sequence
  Description of Artificial Sequence: Synthetic oligonucleotide
aacuaaccauuaagggugu

SEQ ID NO: 2062240 - RNA, 19 nt, Artificial Sequence
  Description of Artificial Sequence: Synthetic oligonucleotide
ggaugacugcuccacucgg

SEQ ID NO: 2062241 - RNA, 19 nt, Artificial Sequence
  Description of Artificial Sequence: Synthetic oligonucleotide
cacucugaccaggaggggc

SEQ ID NO: 2062242 - RNA, 19 nt, Artificial Sequence
  Description of Artificial Sequence: Synthetic oligonucleotide
ggugcauagaguagugggc

SEQ ID NO: 2062243 - RNA, 19 nt, Artificial Sequence
  Description of Artificial Sequence: Synthetic oligonucleotide
gauucuccaagggcaaauc

SEQ ID NO: 2062244 - RNA, 19 nt, Artificial Sequence
  Description of Artificial Sequence: Synthetic oligonucleotide
uaaaacugcuugggucugc

SEQ ID NO: 2062245 - RNA, 19 nt, Artificial Sequence
  Description of Artificial Sequence: Synthetic oligonucleotide
uaugggcguccucuaacau

SEQ ID NO: 2062246 - RNA, 19 nt, Artificial Sequence
  Description of Artificial Sequence: Synthetic oligonucleotide
aaacugcuugggucugcca

SEQ ID NO: 2062247 - RNA, 19 nt, Artificial Sequence
  Description of Artificial Sequence: Synthetic oligonucleotide
gguugauaagacaacuguc

SEQ ID NO: 2062248 - RNA, 19 nt, Artificial Sequence
  Description of Artificial Sequence: Synthetic oligonucleotide
cacuuagugacucuucaua

SEQ ID NO: 2062249 - RNA, 19 nt, Artificial Sequence
  Description of Artificial Sequence: Synthetic oligonucleotide
uugcugcuaacacuugcuu

SEQ ID NO: 2062250 - RNA, 19 nt, Artificial Sequence
  Description of Artificial Sequence: Synthetic oligonucleotide
uuccguaaguuugauuaua

SEQ ID NO: 2062251 - RNA, 19 nt, Artificial Sequence
  Description of Artificial Sequence: Synthetic oligonucleotide
ggcaucuguccauuaacac

SEQ ID NO: 2062252 - RNA, 19 nt, Artificial Sequence
  Description of Artificial Sequence: Synthetic oligonucleotide
gugcauagaguagugggca

SEQ ID NO: 2062253 - RNA, 19 nt, Artificial Sequence
  Description of Artificial Sequence: Synthetic oligonucleotide
aggcucaaguucagcagac

SEQ ID NO: 2062254 - RNA, 19 nt, Artificial Sequence
  Description of Artificial Sequence: Synthetic oligonucleotide
ugcauagaguagugggcau

SEQ ID NO: 2062255 - RNA, 19 nt, Artificial Sequence
  Description of Artificial Sequence: Synthetic oligonucleotide
cauagaguagugggcauca

SEQ ID NO: 2062256 - RNA, 19 nt, Artificial Sequence
  Description of Artificial Sequence: Synthetic oligonucleotide
gugacucuucauauucagc

SEQ ID NO: 2062257 - RNA, 19 nt, Artificial Sequence
  Description of Artificial Sequence: Synthetic oligonucleotide
ggcguccucuaacauuucg

SEQ ID NO: 2062258 - RNA, 19 nt, Artificial Sequence
  Description of Artificial Sequence: Synthetic oligonucleotide
ggguuagguccaaaggacg

SEQ ID NO: 2062259 - RNA, 19 nt, Artificial Sequence
  Description of Artificial Sequence: Synthetic oligonucleotide
ugggucugccacuuaccac

SEQ ID NO: 2062260 - RNA, 19 nt, Artificial Sequence
  Description of Artificial Sequence: Synthetic oligonucleotide
uuagguccaaaggacgguu

SEQ ID NO: 2062261 - RNA, 19 nt, Artificial Sequence
  Description of Artificial Sequence: Synthetic oligonucleotide
ccuaagaauggguuagguc

SEQ ID NO: 2062262 - RNA, 19 nt, Artificial Sequence
  Description of Artificial Sequence: Synthetic oligonucleotide
agucacuuuuguauuuccu

SEQ ID NO: 2062263 - RNA, 19 nt, Artificial Sequence
  Description of Artificial Sequence: Synthetic oligonucleotide
uguuuccguaaguuugauu

SEQ ID NO: 2062264 - RNA, 19 nt, Artificial Sequence
  Description of Artificial Sequence: Synthetic oligonucleotide
cuagauucuccaagggcaa

SEQ ID NO: 2062265 - RNA, 19 nt, Artificial Sequence
  Description of Artificial Sequence: Synthetic oligonucleotide
ucgugucugggaugacugc

SEQ ID NO: 2062266 - RNA, 19 nt, Artificial Sequence
  Description of Artificial Sequence: Synthetic oligonucleotide
cccgacuucuguuaggcug

SEQ ID NO: 2062267 - RNA, 19 nt, Artificial Sequence
  Description of Artificial Sequence: Synthetic oligonucleotide
uccaggacuccucgccucu

SEQ ID NO: 2062268 - RNA, 19 nt, Artificial Sequence
  Description of Artificial Sequence: Synthetic oligonucleotide
ggaggggcuucuuggaacc

SEQ ID NO: 2062269 - RNA, 19 nt, Artificial Sequence
  Description of Artificial Sequence: Synthetic oligonucleotide
cuucaugcuugcugcuaac

SEQ ID NO: 2062270 - RNA, 19 nt, Artificial Sequence
  Description of Artificial Sequence: Synthetic oligonucleotide
ugccacuuagugacucuuc

SEQ ID NO: 2062271 - RNA, 19 nt, Artificial Sequence
  Description of Artificial Sequence: Synthetic oligonucleotide
accacaucagcagcagucu

SEQ ID NO: 2062272 - RNA, 19 nt, Artificial Sequence
  Description of Artificial Sequence: Synthetic oligonucleotide
gcauuccuuagacagaucu

SEQ ID NO: 2062273 - RNA, 19 nt, Artificial Sequence
  Description of Artificial Sequence: Synthetic oligonucleotide
augcaggaggucccaucuc

SEQ ID NO: 2062274 - RNA, 19 nt, Artificial Sequence
  Description of Artificial Sequence: Synthetic oligonucleotide
aggcuaugucugucuuucg

SEQ ID NO: 2062275 - RNA, 19 nt, Artificial Sequence
  Description of Artificial Sequence: Synthetic oligonucleotide
cucuuaggcucaaguucag

SEQ ID NO: 2062276 - RNA, 19 nt, Artificial Sequence
  Description of Artificial Sequence: Synthetic oligonucleotide
accuaagaauggguuaggu

SEQ ID NO: 2062277 - RNA, 19 nt, Artificial Sequence
  Description of Artificial Sequence: Synthetic oligonucleotide
gggauaaccagaggugaag

SEQ ID NO: 2062278 - RNA, 19 nt, Artificial Sequence
  Description of Artificial Sequence: Synthetic oligonucleotide
ggaggaugagcuuucccuc

SEQ ID NO: 2062279 - RNA, 19 nt, Artificial Sequence
  Description of Artificial Sequence: Synthetic oligonucleotide
aacagggaccuuggguaca

SEQ ID NO: 2062280 - RNA, 19 nt, Artificial Sequence
  Description of Artificial Sequence: Synthetic oligonucleotide
cuaugucugucuuucgugu

SEQ ID NO: 2062281 - RNA, 19 nt, Artificial Sequence
  Description of Artificial Sequence: Synthetic oligonucleotide
uagugggcaucaguacaag

SEQ ID NO: 2062282 - RNA, 19 nt, Artificial Sequence
  Description of Artificial Sequence: Synthetic oligonucleotide
caaggacagucacuuucac

SEQ ID NO: 2062283 - RNA, 19 nt, Artificial Sequence
  Description of Artificial Sequence: Synthetic oligonucleotide
ucccugaucuccuccuauc

SEQ ID NO: 2062284 - RNA, 19 nt, Artificial Sequence
  Description of Artificial Sequence: Synthetic oligonucleotide
cuaacauuucgaugguacu

SEQ ID NO: 2062285 - RNA, 19 nt, Artificial Sequence
  Description of Artificial Sequence: Synthetic oligonucleotide
agauucuccaagggcaaau

SEQ ID NO: 2062286 - RNA, 19 nt, Artificial Sequence
  Description of Artificial Sequence: Synthetic oligonucleotide
agagggcaagacaauauuu

SEQ ID NO: 2062287 - RNA, 19 nt, Artificial Sequence
  Description of Artificial Sequence: Synthetic oligonucleotide
ugacugcuccacucggccu

SEQ ID NO: 2062288 - RNA, 19 nt, Artificial Sequence
  Description of Artificial Sequence: Synthetic oligonucleotide
cuccuaucuccccuauaug

SEQ ID NO: 2062289 - RNA, 19 nt, Artificial Sequence
  Description of Artificial Sequence: Synthetic oligonucleotide
caaaggacgguugugggua

SEQ ID NO: 2062290 - RNA, 19 nt, Artificial Sequence
  Description of Artificial Sequence: Synthetic oligonucleotide
acauuucgaugguacugaa

SEQ ID NO: 2062291 - RNA, 19 nt, Artificial Sequence
  Description of Artificial Sequence: Synthetic oligonucleotide
cucgccucucacauguuga

SEQ ID NO: 2062292 - RNA, 19 nt, Artificial Sequence
  Description of Artificial Sequence: Synthetic oligonucleotide
aucuccccuauaugggcgu

SEQ ID NO: 2062293 - RNA, 19 nt, Artificial Sequence
  Description of Artificial Sequence: Synthetic oligonucleotide
augggcguccucuaacauu

SEQ ID NO: 2062294 - RNA, 19 nt, Artificial Sequence
  Description of Artificial Sequence: Synthetic oligonucleotide
cagggugcauagaguagug

SEQ ID NO: 2062295 - RNA, 19 nt, Artificial Sequence
  Description of Artificial Sequence: Synthetic oligonucleotide
guacaccuucaacucuggc

SEQ ID NO: 2062296 - RNA, 19 nt, Artificial Sequence
  Description of Artificial Sequence: Synthetic oligonucleotide
uccccaucccugaucuccu

SEQ ID NO: 2062297 - RNA, 19 nt, Artificial Sequence
  Description of Artificial Sequence: Synthetic oligonucleotide
gucuuucgugucugggaug

SEQ ID NO: 2062298 - RNA, 19 nt, Artificial Sequence
  Description of Artificial Sequence: Synthetic oligonucleotide
uugccucauuacaggauuu

SEQ ID NO: 2062299 - RNA, 19 nt, Artificial Sequence
  Description of Artificial Sequence: Synthetic oligonucleotide
cuugcugcuaacacuugcu

SEQ ID NO: 2062300 - RNA, 19 nt, Artificial Sequence
  Description of Artificial Sequence: Synthetic oligonucleotide
agccaaaggcuaugucugu

SEQ ID NO: 2062301 - RNA, 19 nt, Artificial Sequence
  Description of Artificial Sequence: Synthetic oligonucleotide
ccucuuaggcucaaguuca

SEQ ID NO: 2062302 - RNA, 19 nt, Artificial Sequence
  Description of Artificial Sequence: Synthetic oligonucleotide
ccgacuucuguuaggcugc

SEQ ID NO: 2062303 - RNA, 19 nt, Artificial Sequence
  Description of Artificial Sequence: Synthetic oligonucleotide
gagucgcauuccuuagaca

SEQ ID NO: 2062304 - RNA, 19 nt, Artificial Sequence
  Description of Artificial Sequence: Synthetic oligonucleotide
ucacucugaccaggagggg

SEQ ID NO: 2062305 - RNA, 19 nt, Artificial Sequence
  Description of Artificial Sequence: Synthetic oligonucleotide
agacucaaguucagguuga

SEQ ID NO: 2062306 - RNA, 19 nt, Artificial Sequence
  Description of Artificial Sequence: Synthetic oligonucleotide
gaugagcuuucccucuacu

SEQ ID NO: 2062307 - RNA, 19 nt, Artificial Sequence
  Description of Artificial Sequence: Synthetic oligonucleotide
gagccugaagccaaaggcu

SEQ ID NO: 2062308 - RNA, 19 nt, Artificial Sequence
  Description of Artificial Sequence: Synthetic oligonucleotide
auagaguagugggcaucag

SEQ ID NO: 2062309 - RNA, 19 nt, Artificial Sequence
  Description of Artificial Sequence: Synthetic oligonucleotide
aucugagugggaggaugag

SEQ ID NO: 2062310 - RNA, 19 nt, Artificial Sequence
  Description of Artificial Sequence: Synthetic oligonucleotide
cauuccuuagacagaucua

SEQ ID NO: 2062311 - RNA, 19 nt, Artificial Sequence
  Description of Artificial Sequence: Synthetic oligonucleotide
gcaucuguccauuaacacu

SEQ ID NO: 2062312 - RNA, 19 nt, Artificial Sequence
  Description of Artificial Sequence: Synthetic oligonucleotide
gacuccucgccucucacau

SEQ ID NO: 2062313 - RNA, 19 nt, Artificial Sequence
  Description of Artificial Sequence: Synthetic oligonucleotide
ucgccucucacauguugau

SEQ ID NO: 2062314 - RNA, 19 nt, Artificial Sequence
  Description of Artificial Sequence: Synthetic oligonucleotide
cauuucgaugguacugaaa

SEQ ID NO: 2062315 - RNA, 19 nt, Artificial Sequence
  Description of Artificial Sequence: Synthetic oligonucleotide
aagaauggguuagguccaa

SEQ ID NO: 2062316 - RNA, 19 nt, Artificial Sequence
  Description of Artificial Sequence: Synthetic oligonucleotide
cagaggugaagagaaugca

SEQ ID NO: 2062317 - RNA, 19 nt, Artificial Sequence
  Description of Artificial Sequence: Synthetic oligonucleotide
agcagcagucuuggguauc

SEQ ID NO: 2062318 - RNA, 19 nt, Artificial Sequence
  Description of Artificial Sequence: Synthetic oligonucleotide
ggauaaccagaggugaaga

SEQ ID NO: 2062319 - RNA, 19 nt, Artificial Sequence
  Description of Artificial Sequence: Synthetic oligonucleotide
gucuuggguaucuuuacuu

SEQ ID NO: 2062320 - RNA, 19 nt, Artificial Sequence
  Description of Artificial Sequence: Synthetic oligonucleotide
gccacuuagugacucuuca

SEQ ID NO: 2062321 - RNA, 19 nt, Artificial Sequence
  Description of Artificial Sequence: Synthetic oligonucleotide
caucagcagcagucuuggg

SEQ ID NO: 2062322 - RNA, 19 nt, Artificial Sequence
  Description of Artificial Sequence: Synthetic oligonucleotide
ggguaucuuuacuuucuuc

SEQ ID NO: 2062323 - RNA, 19 nt, Artificial Sequence
  Description of Artificial Sequence: Synthetic oligonucleotide
gagaaugcaggagguccca

SEQ ID NO: 2062324 - RNA, 19 nt, Artificial Sequence
  Description of Artificial Sequence: Synthetic oligonucleotide
uagauucuccaagggcaaa

SEQ ID NO: 2062325 - RNA, 19 nt, Artificial Sequence
  Description of Artificial Sequence: Synthetic oligonucleotide
ccuucaaucccgacuucug

SEQ ID NO: 2062326 - RNA, 19 nt, Artificial Sequence
  Description of Artificial Sequence: Synthetic oligonucleotide
uccccuauaugggcguccu

SEQ ID NO: 2062327 - RNA, 19 nt, Artificial Sequence
  Description of Artificial Sequence: Synthetic oligonucleotide
gaaccaguauucugaggau

SEQ ID NO: 2062328 - RNA, 19 nt, Artificial Sequence
  Description of Artificial Sequence: Synthetic oligonucleotide
ccuaaugaccaucucccca

SEQ ID NO: 2062329 - RNA, 19 nt, Artificial Sequence
  Description of Artificial Sequence: Synthetic oligonucleotide
caacucuggcuucuggaaa

SEQ ID NO: 2062330 - RNA, 19 nt, Artificial Sequence
  Description of Artificial Sequence: Synthetic oligonucleotide
guuuagaaucugaguggga

SEQ ID NO: 2062331 - RNA, 19 nt, Artificial Sequence
  Description of Artificial Sequence: Synthetic oligonucleotide
auguugauagccaccucua

SEQ ID NO: 2062332 - RNA, 19 nt, Artificial Sequence
  Description of Artificial Sequence: Synthetic oligonucleotide
uucuaggcucuggaugguc

SEQ ID NO: 2062333 - RNA, 19 nt, Artificial Sequence
  Description of Artificial Sequence: Synthetic oligonucleotide
aggaugagcuuucccucua

SEQ ID NO: 2062334 - RNA, 19 nt, Artificial Sequence
  Description of Artificial Sequence: Synthetic oligonucleotide
ccuuuaucaucagagggca

SEQ ID NO: 2062335 - RNA, 19 nt, Artificial Sequence
  Description of Artificial Sequence: Synthetic oligonucleotide
ugccucauuacaggauuuu

SEQ ID NO: 2062336 - RNA, 19 nt, Artificial Sequence
  Description of Artificial Sequence: Synthetic oligonucleotide
accuucaacucuggcuucu

SEQ ID NO: 2062337 - RNA, 19 nt, Artificial Sequence
  Description of Artificial Sequence: Synthetic oligonucleotide
agccugaagccaaaggcua

SEQ ID NO: 2062338 - RNA, 19 nt, Artificial Sequence
  Description of Artificial Sequence: Synthetic oligonucleotide
cuauaugggcguccucuaa

SEQ ID NO: 2062339 - RNA, 19 nt, Artificial Sequence
  Description of Artificial Sequence: Synthetic oligonucleotide
ucccgacuucuguuaggcu

SEQ ID NO: 2062340 - RNA, 19 nt, Artificial Sequence
  Description of Artificial Sequence: Synthetic oligonucleotide
gaggugcgaugggaacugg

SEQ ID NO: 2062341 - RNA, 19 nt, Artificial Sequence
  Description of Artificial Sequence: Synthetic oligonucleotide
ccucuacuccaggagagcc

SEQ ID NO: 2062342 - RNA, 19 nt, Artificial Sequence
  Description of Artificial Sequence: Synthetic oligonucleotide
acuccucgccucucacaug

SEQ ID NO: 2062343 - RNA, 19 nt, Artificial Sequence
  Description of Artificial Sequence: Synthetic oligonucleotide
caugaccuucagacaccug

SEQ ID NO: 2062344 - RNA, 19 nt, Artificial Sequence
  Description of Artificial Sequence: Synthetic oligonucleotide
cuuagugacucuucauauu

SEQ ID NO: 2062345 - RNA, 19 nt, Artificial Sequence
  Description of Artificial Sequence: Synthetic oligonucleotide
ggaaagaaaggaggugcga

SEQ ID NO: 2062346 - RNA, 19 nt, Artificial Sequence
  Description of Artificial Sequence: Synthetic oligonucleotide
ccaguuccccuuuaucauc

SEQ ID NO: 2062347 - RNA, 19 nt, Artificial Sequence
  Description of Artificial Sequence: Synthetic oligonucleotide
gucgcauuccuuagacaga

SEQ ID NO: 2062348 - RNA, 19 nt, Artificial Sequence
  Description of Artificial Sequence: Synthetic oligonucleotide
cccuuuccaggacuccucg

SEQ ID NO: 2062349 - RNA, 19 nt, Artificial Sequence
  Description of Artificial Sequence: Synthetic oligonucleotide
cagagucgcauuccuuaga

SEQ ID NO: 2062350 - RNA, 19 nt, Artificial Sequence
  Description of Artificial Sequence: Synthetic oligonucleotide
uccuccuaucuccccuaua

SEQ ID NO: 2062351 - RNA, 19 nt, Artificial Sequence
  Description of Artificial Sequence: Synthetic oligonucleotide
ccucucacauguugauagc

SEQ ID NO: 2062352 - RNA, 19 nt, Artificial Sequence
  Description of Artificial Sequence: Synthetic oligonucleotide
cuccccuauaugggcgucc

SEQ ID NO: 2062353 - RNA, 19 nt, Artificial Sequence
  Description of Artificial Sequence: Synthetic oligonucleotide
aaccagaggugaagagaau

SEQ ID NO: 2062354 - RNA, 19 nt, Artificial Sequence
  Description of Artificial Sequence: Synthetic oligonucleotide
cuggaccuaagaauggguu

SEQ ID NO: 2062355 - RNA, 19 nt, Artificial Sequence
  Description of Artificial Sequence: Synthetic oligonucleotide
cauguucuugccacuuagu

SEQ ID NO: 2062356 - RNA, 19 nt, Artificial Sequence
  Description of Artificial Sequence: Synthetic oligonucleotide
ccuguuuccguaaguuuga

SEQ ID NO: 2062357 - RNA, 19 nt, Artificial Sequence
  Description of Artificial Sequence: Synthetic oligonucleotide
agaaucugagugggaggau

SEQ ID NO: 2062358 - RNA, 19 nt, Artificial Sequence
  Description of Artificial Sequence: Synthetic oligonucleotide
ggaugagcuuucccucuac

SEQ ID NO: 2062359 - RNA, 19 nt, Artificial Sequence
  Description of Artificial Sequence: Synthetic oligonucleotide
cccuaaugaccaucucccc

SEQ ID NO: 2062360 - RNA, 19 nt, Artificial Sequence
  Description of Artificial Sequence: Synthetic oligonucleotide
gguccucuuaggcucaagu

SEQ ID NO: 2062361 - RNA, 19 nt, Artificial Sequence
  Description of Artificial Sequence: Synthetic oligonucleotide
ggcuaugucugucuuucgu

SEQ ID NO: 2062362 - RNA, 19 nt, Artificial Sequence
  Description of Artificial Sequence: Synthetic oligonucleotide
gcuucagagagagaaugua

SEQ ID NO: 2062363 - RNA, 19 nt, Artificial Sequence
  Description of Artificial Sequence: Synthetic oligonucleotide
guccucuuaggcucaaguu

SEQ ID NO: 2062364 - RNA, 19 nt, Artificial Sequence
  Description of Artificial Sequence: Synthetic oligonucleotide
gguuguggguacauguucu

SEQ ID NO: 2062365 - RNA, 19 nt, Artificial Sequence
  Description of Artificial Sequence: Synthetic oligonucleotide
acuggccucagggugcaua

SEQ ID NO: 2062366 - RNA, 19 nt, Artificial Sequence
  Description of Artificial Sequence: Synthetic oligonucleotide
ugguccucuuaggcucaag

SEQ ID NO: 2062367 - RNA, 19 nt, Artificial Sequence
  Description of Artificial Sequence: Synthetic oligonucleotide
acgguuguggguacauguu

SEQ ID NO: 2062368 - RNA, 19 nt, Artificial Sequence
  Description of Artificial Sequence: Synthetic oligonucleotide
gagugggaggaugagcuuu

SEQ ID NO: 2062369 - RNA, 19 nt, Artificial Sequence
  Description of Artificial Sequence: Synthetic oligonucleotide
gcauagaguagugggcauc

SEQ ID NO: 2062370 - RNA, 19 nt, Artificial Sequence
  Description of Artificial Sequence: Synthetic oligonucleotide
gggcaucaguacaaggaca

SEQ ID NO: 2062371 - RNA, 19 nt, Artificial Sequence
  Description of Artificial Sequence: Synthetic oligonucleotide
ccagucacuuuuguauuuc

SEQ ID NO: 2062372 - RNA, 19 nt, Artificial Sequence
  Description of Artificial Sequence: Synthetic oligonucleotide
cuaggcucuggaugguccu

SEQ ID NO: 2062373 - RNA, 19 nt, Artificial Sequence
  Description of Artificial Sequence: Synthetic oligonucleotide
gugggaggaugagcuuucc

SEQ ID NO: 2062374 - RNA, 19 nt, Artificial Sequence
  Description of Artificial Sequence: Synthetic oligonucleotide
gccucauuacaggauuuuc

SEQ ID NO: 2062375 - RNA, 19 nt, Artificial Sequence
  Description of Artificial Sequence: Synthetic oligonucleotide
ggcucaaguucagcagacc

SEQ ID NO: 2062376 - RNA, 19 nt, Artificial Sequence
  Description of Artificial Sequence: Synthetic oligonucleotide
cugcccuuuccaggacucc

SEQ ID NO: 2062377 - RNA, 19 nt, Artificial Sequence
  Description of Artificial Sequence: Synthetic oligonucleotide
ccugaaaaggauagccaua

SEQ ID NO: 2062378 - RNA, 19 nt, Artificial Sequence
  Description of Artificial Sequence: Synthetic oligonucleotide
aggugcgaugggaacugga

SEQ ID NO: 2062379 - RNA, 19 nt, Artificial Sequence
  Description of Artificial Sequence: Synthetic oligonucleotide
ucuccccuauaugggcguc

SEQ ID NO: 2062380 - RNA, 19 nt, Artificial Sequence
  Description of Artificial Sequence: Synthetic oligonucleotide
ggcaaauccaguuccccuu

SEQ ID NO: 2062381 - RNA, 19 nt, Artificial Sequence
  Description of Artificial Sequence: Synthetic oligonucleotide
ccucgccucucacauguug

SEQ ID NO: 2062382 - RNA, 19 nt, Artificial Sequence
  Description of Artificial Sequence: Synthetic oligonucleotide
cagagggcaagacaauauu

SEQ ID NO: 2062383 - RNA, 19 nt, Artificial Sequence
  Description of Artificial Sequence: Synthetic oligonucleotide
gcguccucuaacauuucga

SEQ ID NO: 2062384 - RNA, 19 nt, Artificial Sequence
  Description of Artificial Sequence: Synthetic oligonucleotide
gggcaaauccaguuccccu

SEQ ID NO: 2062385 - RNA, 19 nt, Artificial Sequence
  Description of Artificial Sequence: Synthetic oligonucleotide
caaauccaguuccccuuua

SEQ ID NO: 2062386 - RNA, 19 nt, Artificial Sequence
  Description of Artificial Sequence: Synthetic oligonucleotide
acuaaccauuaaggguguu

SEQ ID NO: 2062387 - RNA, 19 nt, Artificial Sequence
  Description of Artificial Sequence: Synthetic oligonucleotide
cuuucgugucugggaugac

SEQ ID NO: 2062388 - RNA, 19 nt, Artificial Sequence
  Description of Artificial Sequence: Synthetic oligonucleotide
ggacuccucgccucucaca

SEQ ID NO: 2062389 - RNA, 19 nt, Artificial Sequence
  Description of Artificial Sequence: Synthetic oligonucleotide
ccuucaugcuugcugcuaa

SEQ ID NO: 2062390 - RNA, 19 nt, Artificial Sequence
  Description of Artificial Sequence: Synthetic oligonucleotide
cucuaacauuucgauggua

SEQ ID NO: 2062391 - RNA, 19 nt, Artificial Sequence
  Description of Artificial Sequence: Synthetic oligonucleotide
gccaaaggcuaugucuguc

SEQ ID NO: 2062392 - RNA, 19 nt, Artificial Sequence
  Description of Artificial Sequence: Synthetic oligonucleotide
gaagaaccccagucacuuu

SEQ ID NO: 2062393 - RNA, 19 nt, Artificial Sequence
  Description of Artificial Sequence: Synthetic oligonucleotide
ggacagucacuuucacucu

SEQ ID NO: 2062394 - RNA, 19 nt, Artificial Sequence
  Description of Artificial Sequence: Synthetic oligonucleotide
cgguuguggguacauguuc

SEQ ID NO: 2062395 - RNA, 19 nt, Artificial Sequence
  Description of Artificial Sequence: Synthetic oligonucleotide
ccauuaacacuggccucag

SEQ ID NO: 2062396 - RNA, 19 nt, Artificial Sequence
  Description of Artificial Sequence: Synthetic oligonucleotide
ccuccuaucuccccuauau

SEQ ID NO: 2062397 - RNA, 19 nt, Artificial Sequence
  Description of Artificial Sequence: Synthetic oligonucleotide
ccguaaguuugauuauaaa

SEQ ID NO: 2062398 - RNA, 19 nt, Artificial Sequence
  Description of Artificial Sequence: Synthetic oligonucleotide
ggacgguuguggguacaug

SEQ ID NO: 2062399 - RNA, 19 nt, Artificial Sequence
  Description of Artificial Sequence: Synthetic oligonucleotide
ggggauaaccagaggugaa

SEQ ID NO: 2062400 - RNA, 19 nt, Artificial Sequence
  Description of Artificial Sequence: Synthetic oligonucleotide
cugcugagacagagucgca

SEQ ID NO: 2062401 - RNA, 19 nt, Artificial Sequence
  Description of Artificial Sequence: Synthetic oligonucleotide
uccucgccucucacauguu

SEQ ID NO: 2062402 - RNA, 19 nt, Artificial Sequence
  Description of Artificial Sequence: Synthetic oligonucleotide
caucccugaucuccuccua

SEQ ID NO: 2062403 - RNA, 19 nt, Artificial Sequence
  Description of Artificial Sequence: Synthetic oligonucleotide
ccuauaugggcguccucua

SEQ ID NO: 2062404 - RNA, 19 nt, Artificial Sequence
  Description of Artificial Sequence: Synthetic oligonucleotide
cccuauaugggcguccucu

SEQ ID NO: 2062405 - RNA, 19 nt, Artificial Sequence
  Description of Artificial Sequence: Synthetic oligonucleotide
guacaaggacagucacuuu

SEQ ID NO: 2062406 - RNA, 19 nt, Artificial Sequence
  Description of Artificial Sequence: Synthetic oligonucleotide
ccaaaggacgguugugggu

SEQ ID NO: 2062407 - RNA, 19 nt, Artificial Sequence
  Description of Artificial Sequence: Synthetic oligonucleotide
gggaccuuggguacauccu

SEQ ID NO: 2062408 - RNA, 19 nt, Artificial Sequence
  Description of Artificial Sequence: Synthetic oligonucleotide
ccaguauucugaggauaca

SEQ ID NO: 2062409 - RNA, 19 nt, Artificial Sequence
  Description of Artificial Sequence: Synthetic oligonucleotide
gcccuuuccaggacuccuc

SEQ ID NO: 2062410 - RNA, 19 nt, Artificial Sequence
  Description of Artificial Sequence: Synthetic oligonucleotide
cguccucuaacauuucgau

SEQ ID NO: 2062411 - RNA, 19 nt, Artificial Sequence
  Description of Artificial Sequence: Synthetic oligonucleotide
cagggaccuuggguacauc

SEQ ID NO: 2062412 - RNA, 19 nt, Artificial Sequence
  Description of Artificial Sequence: Synthetic oligonucleotide
ccucuaacauuucgauggu

SEQ ID NO: 2062413 - RNA, 19 nt, Artificial Sequence
  Description of Artificial Sequence: Synthetic oligonucleotide
cuguuuccguaaguuugau

SEQ ID NO: 2062414 - RNA, 19 nt, Artificial Sequence
  Description of Artificial Sequence: Synthetic oligonucleotide
ccacuuagugacucuucau

SEQ ID NO: 2062415 - RNA, 19 nt, Artificial Sequence
  Description of Artificial Sequence: Synthetic oligonucleotide
gcaucaguacaaggacagu

SEQ ID NO: 2062416 - RNA, 19 nt, Artificial Sequence
  Description of Artificial Sequence: Synthetic oligonucleotide
cgacuucuguuaggcugcc

SEQ ID NO: 2062417 - RNA, 19 nt, Artificial Sequence
  Description of Artificial Sequence: Synthetic oligonucleotide
ccaugaccuucagacaccu

SEQ ID NO: 2062418 - RNA, 19 nt, Artificial Sequence
  Description of Artificial Sequence: Synthetic oligonucleotide
gcgaugggaacuggaccua

SEQ ID NO: 2062419 - RNA, 19 nt, Artificial Sequence
  Description of Artificial Sequence: Synthetic oligonucleotide
ccaucucugccuguggcau

SEQ ID NO: 2062420 - RNA, 19 nt, Artificial Sequence
  Description of Artificial Sequence: Synthetic oligonucleotide
gccugaagccaaaggcuau

SEQ ID NO: 2062421 - RNA, 19 nt, Artificial Sequence
  Description of Artificial Sequence: Synthetic oligonucleotide
ccccuauaugggcguccuc

SEQ ID NO: 2062422 - RNA, 19 nt, Artificial Sequence
  Description of Artificial Sequence: Synthetic oligonucleotide
cgaugguacugaaaaccuu

SEQ ID NO: 2062423 - RNA, 19 nt, Artificial Sequence
  Description of Artificial Sequence: Synthetic oligonucleotide
ggucugccacuuaccacau

SEQ ID NO: 2062424 - RNA, 19 nt, Artificial Sequence
  Description of Artificial Sequence: Synthetic oligonucleotide
gggcguccucuaacauuuc

SEQ ID NO: 2062425 - RNA, 19 nt, Artificial Sequence
  Description of Artificial Sequence: Synthetic oligonucleotide
cucggccuucaugcuugcu

SEQ ID NO: 2062426 - RNA, 19 nt, Artificial Sequence
  Description of Artificial Sequence: Synthetic oligonucleotide
ccacucggccuucaugcuu

SEQ ID NO: 2062427 - RNA, 19 nt, Artificial Sequence
  Description of Artificial Sequence: Synthetic oligonucleotide
uguacuuugggccauaugg

SEQ ID NO: 2062428 - RNA, 19 nt, Artificial Sequence
  Description of Artificial Sequence: Synthetic oligonucleotide
acuagauucauucucaggc

SEQ ID NO: 2062429 - RNA, 19 nt, Artificial Sequence
  Description of Artificial Sequence: Synthetic oligonucleotide
aauaaguuaggggagauuc

SEQ ID NO: 2062430 - RNA, 19 nt, Artificial Sequence
  Description of Artificial Sequence: Synthetic oligonucleotide
caaagugacaauaaguuag

SEQ ID NO: 2062431 - RNA, 19 nt, Artificial Sequence
  Description of Artificial Sequence: Synthetic oligonucleotide
agaggcuaguccuaaagcc

SEQ ID NO: 2062432 - RNA, 19 nt, Artificial Sequence
  Description of Artificial Sequence: Synthetic oligonucleotide
aagaggcuaguccuaaagc

SEQ ID NO: 2062433 - RNA, 19 nt, Artificial Sequence
  Description of Artificial Sequence: Synthetic oligonucleotide
guaacaagaggauaggaag

SEQ ID NO: 2062434 - RNA, 19 nt, Artificial Sequence
  Description of Artificial Sequence: Synthetic oligonucleotide
ugucauaggagacuggcag

SEQ ID NO: 2062435 - RNA, 19 nt, Artificial Sequence
  Description of Artificial Sequence: Synthetic oligonucleotide
guugaaaaggcagaggucg

SEQ ID NO: 2062436 - RNA, 19 nt, Artificial Sequence
  Description of Artificial Sequence: Synthetic oligonucleotide
agugacaauaaguuagggg

SEQ ID NO: 2062437 - RNA, 19 nt, Artificial Sequence
  Description of Artificial Sequence: Synthetic oligonucleotide
augggacuccuuuagagcc

SEQ ID NO: 2062438 - RNA, 19 nt, Artificial Sequence
  Description of Artificial Sequence: Synthetic oligonucleotide
gugacaauaaguuagggga

SEQ ID NO: 2062439 - RNA, 19 nt, Artificial Sequence
  Description of Artificial Sequence: Synthetic oligonucleotide
aaaggcagaggucgaaugg

SEQ ID NO: 2062440 - RNA, 19 nt, Artificial Sequence
  Description of Artificial Sequence: Synthetic oligonucleotide
uauuccacaacagagucag

SEQ ID NO: 2062441 - RNA, 19 nt, Artificial Sequence
  Description of Artificial Sequence: Synthetic oligonucleotide
ugcagauucucauaaucgg

SEQ ID NO: 2062442 - RNA, 19 nt, Artificial Sequence
  Description of Artificial Sequence: Synthetic oligonucleotide
uuuauuccacaacagaguc

SEQ ID NO: 2062443 - RNA, 19 nt, Artificial Sequence
  Description of Artificial Sequence: Synthetic oligonucleotide
gaaggaaguaacaagagga

SEQ ID NO: 2062444 - RNA, 19 nt, Artificial Sequence
  Description of Artificial Sequence: Synthetic oligonucleotide
gaugguuugaugaggaugc

SEQ ID NO: 2062445 - RNA, 19 nt, Artificial Sequence
  Description of Artificial Sequence: Synthetic oligonucleotide
aggaacuagauucauucuc

SEQ ID NO: 2062446 - RNA, 19 nt, Artificial Sequence
  Description of Artificial Sequence: Synthetic oligonucleotide
aacuagauucauucucagg

SEQ ID NO: 2062447 - RNA, 19 nt, Artificial Sequence
  Description of Artificial Sequence: Synthetic oligonucleotide
uuaggggagauucucagac

SEQ ID NO: 2062448 - RNA, 19 nt, Artificial Sequence
  Description of Artificial Sequence: Synthetic oligonucleotide
uuugagaugguuugaugag

SEQ ID NO: 2062449 - RNA, 19 nt, Artificial Sequence
  Description of Artificial Sequence: Synthetic oligonucleotide
ucaguuaaguuccugcaga

SEQ ID NO: 2062450 - RNA, 19 nt, Artificial Sequence
  Description of Artificial Sequence: Synthetic oligonucleotide
auaauccucacccgacucc

SEQ ID NO: 2062451 - RNA, 19 nt, Artificial Sequence
  Description of Artificial Sequence: Synthetic oligonucleotide
accgaguugagcucagugc

SEQ ID NO: 2062452 - RNA, 19 nt, Artificial Sequence
  Description of Artificial Sequence: Synthetic oligonucleotide
aaagugacaauaaguuagg

SEQ ID NO: 2062453 - RNA, 19 nt, Artificial Sequence
  Description of Artificial Sequence: Synthetic oligonucleotide
aaaaggcagaggucgaaug

SEQ ID NO: 2062454 - RNA, 19 nt, Artificial Sequence
  Description of Artificial Sequence: Synthetic oligonucleotide
cagauucucauaaucgggg

SEQ ID NO: 2062455 - RNA, 19 nt, Artificial Sequence
  Description of Artificial Sequence: Synthetic oligonucleotide
acuuuccucgcucucaggg

SEQ ID NO: 2062456 - RNA, 19 nt, Artificial Sequence
  Description of Artificial Sequence: Synthetic oligonucleotide
aucagaaggugcugaauac

SEQ ID NO: 2062457 - RNA, 19 nt, Artificial Sequence
  Description of Artificial Sequence: Synthetic oligonucleotide
ugcuagaccgaguugagcu

SEQ ID NO: 2062458 - RNA, 19 nt, Artificial Sequence
  Description of Artificial Sequence: Synthetic oligonucleotide
guuugagaugguuugauga

SEQ ID NO: 2062459 - RNA, 19 nt, Artificial Sequence
  Description of Artificial Sequence: Synthetic oligonucleotide
uaacaagaggauaggaagu

SEQ ID NO: 2062460 - RNA, 19 nt, Artificial Sequence
  Description of Artificial Sequence: Synthetic oligonucleotide
gaagaggcuaguccuaaag

SEQ ID NO: 2062461 - RNA, 19 nt, Artificial Sequence
  Description of Artificial Sequence: Synthetic oligonucleotide
uggccuuuauuccacaaca

SEQ ID NO: 2062462 - RNA, 19 nt, Artificial Sequence
  Description of Artificial Sequence: Synthetic oligonucleotide
aucuuccacaaccugggac

SEQ ID NO: 2062463 - RNA, 19 nt, Artificial Sequence
  Description of Artificial Sequence: Synthetic oligonucleotide
ggaaguaacaagaggauag

SEQ ID NO: 2062464 - RNA, 19 nt, Artificial Sequence
  Description of Artificial Sequence: Synthetic oligonucleotide
caagaggauaggaaguggc

SEQ ID NO: 2062465 - RNA, 19 nt, Artificial Sequence
  Description of Artificial Sequence: Synthetic oligonucleotide
ucacauaauccucacccga

SEQ ID NO: 2062466 - RNA, 19 nt, Artificial Sequence
  Description of Artificial Sequence: Synthetic oligonucleotide
uugagcucagugcuggaag

SEQ ID NO: 2062467 - RNA, 19 nt, Artificial Sequence
  Description of Artificial Sequence: Synthetic oligonucleotide
gaugaggaugcuccguggg

SEQ ID NO: 2062468 - RNA, 19 nt, Artificial Sequence
  Description of Artificial Sequence: Synthetic oligonucleotide
uggggauacagacuggacu

SEQ ID NO: 2062469 - RNA, 19 nt, Artificial Sequence
  Description of Artificial Sequence: Synthetic oligonucleotide
gagauucucagacuguuga

SEQ ID NO: 2062470 - RNA, 19 nt, Artificial Sequence
  Description of Artificial Sequence: Synthetic oligonucleotide
cacaaggcagccaggagcg

SEQ ID NO: 2062471 - RNA, 19 nt, Artificial Sequence
  Description of Artificial Sequence: Synthetic oligonucleotide
aguuaggggagauucucag

SEQ ID NO: 2062472 - RNA, 19 nt, Artificial Sequence
  Description of Artificial Sequence: Synthetic oligonucleotide
acauucacguacucccggc

SEQ ID NO: 2062473 - RNA, 19 nt, Artificial Sequence
  Description of Artificial Sequence: Synthetic oligonucleotide
ugcuggaagaggcuagucc

SEQ ID NO: 2062474 - RNA, 19 nt, Artificial Sequence
  Description of Artificial Sequence: Synthetic oligonucleotide
uccaguggcaagcagcugu

SEQ ID NO: 2062475 - RNA, 19 nt, Artificial Sequence
  Description of Artificial Sequence: Synthetic oligonucleotide
uacuuugggccauauggcc

SEQ ID NO: 2062476 - RNA, 19 nt, Artificial Sequence
  Description of Artificial Sequence: Synthetic oligonucleotide
cucucaguuaaguuccugc

SEQ ID NO: 2062477 - RNA, 19 nt, Artificial Sequence
  Description of Artificial Sequence: Synthetic oligonucleotide
aaggcgcugucucggagac

SEQ ID NO: 2062478 - RNA, 19 nt, Artificial Sequence
  Description of Artificial Sequence: Synthetic oligonucleotide
ucucaguuaaguuccugca

SEQ ID NO: 2062479 - RNA, 19 nt, Artificial Sequence
  Description of Artificial Sequence: Synthetic oligonucleotide
acuccaaagugacaauaag

SEQ ID NO: 2062480 - RNA, 19 nt, Artificial Sequence
  Description of Artificial Sequence: Synthetic oligonucleotide
aggaaguggcaguuguucg

SEQ ID NO: 2062481 - RNA, 19 nt, Artificial Sequence
  Description of Artificial Sequence: Synthetic oligonucleotide
uucucagacuguugaaaag

SEQ ID NO: 2062482 - RNA, 19 nt, Artificial Sequence
  Description of Artificial Sequence: Synthetic oligonucleotide
uuaaguuccugcagauucu

SEQ ID NO: 2062483 - RNA, 19 nt, Artificial Sequence
  Description of Artificial Sequence: Synthetic oligonucleotide
gaagcacugucauaggaga

SEQ ID NO: 2062484 - RNA, 19 nt, Artificial Sequence
  Description of Artificial Sequence: Synthetic oligonucleotide
aagugacaauaaguuaggg

SEQ ID NO: 2062485 - RNA, 19 nt, Artificial Sequence
  Description of Artificial Sequence: Synthetic oligonucleotide
gaacuagauucauucucag

SEQ ID NO: 2062486 - RNA, 19 nt, Artificial Sequence
  Description of Artificial Sequence: Synthetic oligonucleotide
aaacucucuguggaagcac

SEQ ID NO: 2062487 - RNA, 19 nt, Artificial Sequence
  Description of Artificial Sequence: Synthetic oligonucleotide
caaaacucucuguggaagc

SEQ ID NO: 2062488 - RNA, 19 nt, Artificial Sequence
  Description of Artificial Sequence: Synthetic oligonucleotide
acagacuggacuccaaagu

SEQ ID NO: 2062489 - RNA, 19 nt, Artificial Sequence
  Description of Artificial Sequence: Synthetic oligonucleotide
uguuugagaugguuugaug

SEQ ID NO: 2062490 - RNA, 19 nt, Artificial Sequence
  Description of Artificial Sequence: Synthetic oligonucleotide
agaugguuugaugaggaug

SEQ ID NO: 2062491 - RNA, 19 nt, Artificial Sequence
  Description of Artificial Sequence: Synthetic oligonucleotide
agcuguguccuccuuuggg

SEQ ID NO: 2062492 - RNA, 19 nt, Artificial Sequence
  Description of Artificial Sequence: Synthetic oligonucleotide
ggccauauggccuuuauuc

SEQ ID NO: 2062493 - RNA, 19 nt, Artificial Sequence
  Description of Artificial Sequence: Synthetic oligonucleotide
ugaugaggaugcuccgugg

SEQ ID NO: 2062494 - RNA, 19 nt, Artificial Sequence
  Description of Artificial Sequence: Synthetic oligonucleotide
aaaacucucuguggaagca

SEQ ID NO: 2062495 - RNA, 19 nt, Artificial Sequence
  Description of Artificial Sequence: Synthetic oligonucleotide
gaaguggcaguuguucggg

SEQ ID NO: 2062496 - RNA, 19 nt, Artificial Sequence
  Description of Artificial Sequence: Synthetic oligonucleotide
guccuaaagccugagcugg

SEQ ID NO: 2062497 - RNA, 19 nt, Artificial Sequence
  Description of Artificial Sequence: Synthetic oligonucleotide
uucacguacucccggcugc

SEQ ID NO: 2062498 - RNA, 19 nt, Artificial Sequence
  Description of Artificial Sequence: Synthetic oligonucleotide
cucaguuaaguuccugcag

SEQ ID NO: 2062499 - RNA, 19 nt, Artificial Sequence
  Description of Artificial Sequence: Synthetic oligonucleotide
auaggagacuggcagcuca

SEQ ID NO: 2062500 - RNA, 19 nt, Artificial Sequence
  Description of Artificial Sequence: Synthetic oligonucleotide
aguaacaagaggauaggaa

SEQ ID NO: 2062501 - RNA, 19 nt, Artificial Sequence
  Description of Artificial Sequence: Synthetic oligonucleotide
ggaagccuguuugagaugg

SEQ ID NO: 2062502 - RNA, 19 nt, Artificial Sequence
  Description of Artificial Sequence: Synthetic oligonucleotide
ucacccgacuccauggaga

SEQ ID NO: 2062503 - RNA, 19 nt, Artificial Sequence
  Description of Artificial Sequence: Synthetic oligonucleotide
ucauaggagacuggcagcu

SEQ ID NO: 2062504 - RNA, 19 nt, Artificial Sequence
  Description of Artificial Sequence: Synthetic oligonucleotide
cacauaauccucacccgac

SEQ ID NO: 2062505 - RNA, 19 nt, Artificial Sequence
  Description of Artificial Sequence: Synthetic oligonucleotide
guaccugccccuuucuugc

SEQ ID NO: 2062506 - RNA, 19 nt, Artificial Sequence
  Description of Artificial Sequence: Synthetic oligonucleotide
aaccugggacuucauggug

SEQ ID NO: 2062507 - RNA, 19 nt, Artificial Sequence
  Description of Artificial Sequence: Synthetic oligonucleotide
agaugcuucugcacuuucc

SEQ ID NO: 2062508 - RNA, 19 nt, Artificial Sequence
  Description of Artificial Sequence: Synthetic oligonucleotide
uugaaaaggcagaggucga

SEQ ID NO: 2062509 - RNA, 19 nt, Artificial Sequence
  Description of Artificial Sequence: Synthetic oligonucleotide
aggugcugaauacugggga

SEQ ID NO: 2062510 - RNA, 19 nt, Artificial Sequence
  Description of Artificial Sequence: Synthetic oligonucleotide
acguucacauaauccucac

SEQ ID NO: 2062511 - RNA, 19 nt, Artificial Sequence
  Description of Artificial Sequence: Synthetic oligonucleotide
aaguggcaguuguucgggg

SEQ ID NO: 2062512 - RNA, 19 nt, Artificial Sequence
  Description of Artificial Sequence: Synthetic oligonucleotide
gguccaaaacucucugugg

SEQ ID NO: 2062513 - RNA, 19 nt, Artificial Sequence
  Description of Artificial Sequence: Synthetic oligonucleotide
aaggaaguaacaagaggau

SEQ ID NO: 2062514 - RNA, 19 nt, Artificial Sequence
  Description of Artificial Sequence: Synthetic oligonucleotide
aggagcgugaccaggacag

SEQ ID NO: 2062515 - RNA, 19 nt, Artificial Sequence
  Description of Artificial Sequence: Synthetic oligonucleotide
gauaggaaguggcaguugu

SEQ ID NO: 2062516 - RNA, 19 nt, Artificial Sequence
  Description of Artificial Sequence: Synthetic oligonucleotide
cugggacacauucacguac

SEQ ID NO: 2062517 - RNA, 19 nt, Artificial Sequence
  Description of Artificial Sequence: Synthetic oligonucleotide
cacauucacguacucccgg

SEQ ID NO: 2062518 - RNA, 19 nt, Artificial Sequence
  Description of Artificial Sequence: Synthetic oligonucleotide
uccuaaagccugagcuggg

SEQ ID NO: 2062519 - RNA, 19 nt, Artificial Sequence
  Description of Artificial Sequence: Synthetic oligonucleotide
cuaaagccugagcuggggc

SEQ ID NO: 2062520 - RNA, 19 nt, Artificial Sequence
  Description of Artificial Sequence: Synthetic oligonucleotide
acauaauccucacccgacu

SEQ ID NO: 2062521 - RNA, 19 nt, Artificial Sequence
  Description of Artificial Sequence: Synthetic oligonucleotide
gaccgaguugagcucagug

SEQ ID NO: 2062522 - RNA, 19 nt, Artificial Sequence
  Description of Artificial Sequence: Synthetic oligonucleotide
aagaggauaggaaguggca

SEQ ID NO: 2062523 - RNA, 19 nt, Artificial Sequence
  Description of Artificial Sequence: Synthetic oligonucleotide
ugggacacauucacguacu

SEQ ID NO: 2062524 - RNA, 19 nt, Artificial Sequence
  Description of Artificial Sequence: Synthetic oligonucleotide
ucagaaggugcugaauacu

SEQ ID NO: 2062525 - RNA, 19 nt, Artificial Sequence
  Description of Artificial Sequence: Synthetic oligonucleotide
ugcuccguggguccaaaac

SEQ ID NO: 2062526 - RNA, 19 nt, Artificial Sequence
  Description of Artificial Sequence: Synthetic oligonucleotide
auucacguacucccggcug

SEQ ID NO: 2062527 - RNA, 19 nt, Artificial Sequence
  Description of Artificial Sequence: Synthetic oligonucleotide
aggacagacggcugcagca

SEQ ID NO: 2062528 - RNA, 19 nt, Artificial Sequence
  Description of Artificial Sequence: Synthetic oligonucleotide
cucacggcagcgcacacac

SEQ ID NO: 2062529 - RNA, 19 nt, Artificial Sequence
  Description of Artificial Sequence: Synthetic oligonucleotide
cuuuauuccacaacagagu

SEQ ID NO: 2062530 - RNA, 19 nt, Artificial Sequence
  Description of Artificial Sequence: Synthetic oligonucleotide
uaggaaguggcaguuguuc

SEQ ID NO: 2062531 - RNA, 19 nt, Artificial Sequence
  Description of Artificial Sequence: Synthetic oligonucleotide
gucauaggagacuggcagc

SEQ ID NO: 2062532 - RNA, 19 nt, Artificial Sequence
  Description of Artificial Sequence: Synthetic oligonucleotide
uuugaugaggaugcuccgu

SEQ ID NO: 2062533 - RNA, 19 nt, Artificial Sequence
  Description of Artificial Sequence: Synthetic oligonucleotide
cagcgcacacacaaggcag

SEQ ID NO: 2062534 - RNA, 19 nt, Artificial Sequence
  Description of Artificial Sequence: Synthetic oligonucleotide
ugcuuccaucugcagagca

SEQ ID NO: 2062535 - RNA, 19 nt, Artificial Sequence
  Description of Artificial Sequence: Synthetic oligonucleotide
cuugcuagaccgaguugag

SEQ ID NO: 2062536 - RNA, 19 nt, Artificial Sequence
  Description of Artificial Sequence: Synthetic oligonucleotide
guacuuugggccauauggc

SEQ ID NO: 2062537 - RNA, 19 nt, Artificial Sequence
  Description of Artificial Sequence: Synthetic oligonucleotide
cauaauccucacccgacuc

SEQ ID NO: 2062538 - RNA, 19 nt, Artificial Sequence
  Description of Artificial Sequence: Synthetic oligonucleotide
ucugcacuuuccucgcucu

SEQ ID NO: 2062539 - RNA, 19 nt, Artificial Sequence
  Description of Artificial Sequence: Synthetic oligonucleotide
uccagagaugcuucugcac

SEQ ID NO: 2062540 - RNA, 19 nt, Artificial Sequence
  Description of Artificial Sequence: Synthetic oligonucleotide
gauucucagacuguugaaa

SEQ ID NO: 2062541 - RNA, 19 nt, Artificial Sequence
  Description of Artificial Sequence: Synthetic oligonucleotide
uccacaaccugggacuuca

SEQ ID NO: 2062542 - RNA, 19 nt, Artificial Sequence
  Description of Artificial Sequence: Synthetic oligonucleotide
ugcugaauacuggggauac

SEQ ID NO: 2062543 - RNA, 19 nt, Artificial Sequence
  Description of Artificial Sequence: Synthetic oligonucleotide
ggguccaaaacucucugug

SEQ ID NO: 2062544 - RNA, 19 nt, Artificial Sequence
  Description of Artificial Sequence: Synthetic oligonucleotide
gacagacggcugcagcagg

SEQ ID NO: 2062545 - RNA, 19 nt, Artificial Sequence
  Description of Artificial Sequence: Synthetic oligonucleotide
uucaucagaaggugcugaa

SEQ ID NO: 2062546 - RNA, 19 nt, Artificial Sequence
  Description of Artificial Sequence: Synthetic oligonucleotide
cucagggacguucacauaa

SEQ ID NO: 2062547 - RNA, 19 nt, Artificial Sequence
  Description of Artificial Sequence: Synthetic oligonucleotide
gaggaugcuccgugggucc

SEQ ID NO: 2062548 - RNA, 19 nt, Artificial Sequence
  Description of Artificial Sequence: Synthetic oligonucleotide
gcagauucucauaaucggg

SEQ ID NO: 2062549 - RNA, 19 nt, Artificial Sequence
  Description of Artificial Sequence: Synthetic oligonucleotide
cagaguggcagcaggggug

SEQ ID NO: 2062550 - RNA, 19 nt, Artificial Sequence
  Description of Artificial Sequence: Synthetic oligonucleotide
uuguacuuugggccauaug

SEQ ID NO: 2062551 - RNA, 19 nt, Artificial Sequence
  Description of Artificial Sequence: Synthetic oligonucleotide
cagagugucugcuuccauc

SEQ ID NO: 2062552 - RNA, 19 nt, Artificial Sequence
  Description of Artificial Sequence: Synthetic oligonucleotide
cuaguccuaaagccugagc

SEQ ID NO: 2062553 - RNA, 19 nt, Artificial Sequence
  Description of Artificial Sequence: Synthetic oligonucleotide
gacuggacuccaaagugac

SEQ ID NO: 2062554 - RNA, 19 nt, Artificial Sequence
  Description of Artificial Sequence: Synthetic oligonucleotide
gacguucacauaauccuca

SEQ ID NO: 2062555 - RNA, 19 nt, Artificial Sequence
  Description of Artificial Sequence: Synthetic oligonucleotide
ggggauacagacuggacuc

SEQ ID NO: 2062556 - RNA, 19 nt, Artificial Sequence
  Description of Artificial Sequence: Synthetic oligonucleotide
agagucagacaggaacuag

SEQ ID NO: 2062557 - RNA, 19 nt, Artificial Sequence
  Description of Artificial Sequence: Synthetic oligonucleotide
aacucucuguggaagcacu

SEQ ID NO: 2062558 - RNA, 19 nt, Artificial Sequence
  Description of Artificial Sequence: Synthetic oligonucleotide
gacuucaugguguccagcu

SEQ ID NO: 2062559 - RNA, 19 nt, Artificial Sequence
  Description of Artificial Sequence: Synthetic oligonucleotide
ucaggguggaaggaaguaa

SEQ ID NO: 2062560 - RNA, 19 nt, Artificial Sequence
  Description of Artificial Sequence: Synthetic oligonucleotide
auacagacuggacuccaaa

SEQ ID NO: 2062561 - RNA, 19 nt, Artificial Sequence
  Description of Artificial Sequence: Synthetic oligonucleotide
ucggagaccaggguugcug

SEQ ID NO: 2062562 - RNA, 19 nt, Artificial Sequence
  Description of Artificial Sequence: Synthetic oligonucleotide
cuccguggguccaaaacuc

SEQ ID NO: 2062563 - RNA, 19 nt, Artificial Sequence
  Description of Artificial Sequence: Synthetic oligonucleotide
ggagacuggcagcucacgg

SEQ ID NO: 2062564 - RNA, 19 nt, Artificial Sequence
  Description of Artificial Sequence: Synthetic oligonucleotide
ugugcccagcuguaccugc

SEQ ID NO: 2062565 - RNA, 19 nt, Artificial Sequence
  Description of Artificial Sequence: Synthetic oligonucleotide
agcacugucauaggagacu

SEQ ID NO: 2062566 - RNA, 19 nt, Artificial Sequence
  Description of Artificial Sequence: Synthetic oligonucleotide
auccagagaugcuucugca

SEQ ID NO: 2062567 - RNA, 19 nt, Artificial Sequence
  Description of Artificial Sequence: Synthetic oligonucleotide
ucuaggcagaguggcagca

SEQ ID NO: 2062568 - RNA, 19 nt, Artificial Sequence
  Description of Artificial Sequence: Synthetic oligonucleotide
cugugccccagcuaccagc

SEQ ID NO: 2062569 - RNA, 19 nt, Artificial Sequence
  Description of Artificial Sequence: Synthetic oligonucleotide
cugagugggccccagccug

SEQ ID NO: 2062570 - RNA, 19 nt, Artificial Sequence
  Description of Artificial Sequence: Synthetic oligonucleotide
uggggagucucgggaaugg

SEQ ID NO: 2062571 - RNA, 19 nt, Artificial Sequence
  Description of Artificial Sequence: Synthetic oligonucleotide
gccuguuugagaugguuug

SEQ ID NO: 2062572 - RNA, 19 nt, Artificial Sequence
  Description of Artificial Sequence: Synthetic oligonucleotide
ggaacuagauucauucuca

SEQ ID NO: 2062573 - RNA, 19 nt, Artificial Sequence
  Description of Artificial Sequence: Synthetic oligonucleotide
ugaggaugcuccguggguc

SEQ ID NO: 2062574 - RNA, 19 nt, Artificial Sequence
  Description of Artificial Sequence: Synthetic oligonucleotide
ugggacuccuuuagagcca

SEQ ID NO: 2062575 - RNA, 19 nt, Artificial Sequence
  Description of Artificial Sequence: Synthetic oligonucleotide
ccacuuccuugcuagaccg

SEQ ID NO: 2062576 - RNA, 19 nt, Artificial Sequence
  Description of Artificial Sequence: Synthetic oligonucleotide
gaaggcgcugucucggaga

SEQ ID NO: 2062577 - RNA, 19 nt, Artificial Sequence
  Description of Artificial Sequence: Synthetic oligonucleotide
uccguggguccaaaacucu

SEQ ID NO: 2062578 - RNA, 19 nt, Artificial Sequence
  Description of Artificial Sequence: Synthetic oligonucleotide
uccuugcuagaccgaguug

SEQ ID NO: 2062579 - RNA, 19 nt, Artificial Sequence
  Description of Artificial Sequence: Synthetic oligonucleotide
acacauucacguacucccg

SEQ ID NO: 2062580 - RNA, 19 nt, Artificial Sequence
  Description of Artificial Sequence: Synthetic oligonucleotide
ugaaaaggcagaggucgaa

SEQ ID NO: 2062581 - RNA, 19 nt, Artificial Sequence
  Description of Artificial Sequence: Synthetic oligonucleotide
auaaguuaggggagauucu

SEQ ID NO: 2062582 - RNA, 19 nt, Artificial Sequence
  Description of Artificial Sequence: Synthetic oligonucleotide
gacuccuuuagagccacuc

SEQ ID NO: 2062583 - RNA, 19 nt, Artificial Sequence
  Description of Artificial Sequence: Synthetic oligonucleotide
acugagugggccccagccu

SEQ ID NO: 2062584 - RNA, 19 nt, Artificial Sequence
  Description of Artificial Sequence: Synthetic oligonucleotide
gaggauaggaaguggcagu

SEQ ID NO: 2062585 - RNA, 19 nt, Artificial Sequence
  Description of Artificial Sequence: Synthetic oligonucleotide
ucagggacguucacauaau

SEQ ID NO: 2062586 - RNA, 19 nt, Artificial Sequence
  Description of Artificial Sequence: Synthetic oligonucleotide
caggcuucaucagaaggug

SEQ ID NO: 2062587 - RNA, 19 nt, Artificial Sequence
  Description of Artificial Sequence: Synthetic oligonucleotide
agacuguugaaaaggcaga

SEQ ID NO: 2062588 - RNA, 19 nt, Artificial Sequence
  Description of Artificial Sequence: Synthetic oligonucleotide
cucuaggcagaguggcagc

SEQ ID NO: 2062589 - RNA, 19 nt, Artificial Sequence
  Description of Artificial Sequence: Synthetic oligonucleotide
gacuccaaagugacaauaa

SEQ ID NO: 2062590 - RNA, 19 nt, Artificial Sequence
  Description of Artificial Sequence: Synthetic oligonucleotide
cagaggucgaaugggacuc

SEQ ID NO: 2062591 - RNA, 19 nt, Artificial Sequence
  Description of Artificial Sequence: Synthetic oligonucleotide
cagugcuggaagaggcuag

SEQ ID NO: 2062592 - RNA, 19 nt, Artificial Sequence
  Description of Artificial Sequence: Synthetic oligonucleotide
agaggucgaaugggacucc

SEQ ID NO: 2062593 - RNA, 19 nt, Artificial Sequence
  Description of Artificial Sequence: Synthetic oligonucleotide
guuaggggagauucucaga

SEQ ID NO: 2062594 - RNA, 19 nt, Artificial Sequence
  Description of Artificial Sequence: Synthetic oligonucleotide
uagaccgaguugagcucag

SEQ ID NO: 2062595 - RNA, 19 nt, Artificial Sequence
  Description of Artificial Sequence: Synthetic oligonucleotide
cuaccagcagcacgauccc

SEQ ID NO: 2062596 - RNA, 19 nt, Artificial Sequence
  Description of Artificial Sequence: Synthetic oligonucleotide
uggguccaaaacucucugu

SEQ ID NO: 2062597 - RNA, 19 nt, Artificial Sequence
  Description of Artificial Sequence: Synthetic oligonucleotide
acaauaaguuaggggagau

SEQ ID NO: 2062598 - RNA, 19 nt, Artificial Sequence
  Description of Artificial Sequence: Synthetic oligonucleotide
agcuaccagcagcacgauc

SEQ ID NO: 2062599 - RNA, 19 nt, Artificial Sequence
  Description of Artificial Sequence: Synthetic oligonucleotide
acuuugggccauauggccu

SEQ ID NO: 2062600 - RNA, 19 nt, Artificial Sequence
  Description of Artificial Sequence: Synthetic oligonucleotide
gggacguucacauaauccu

SEQ ID NO: 2062601 - RNA, 19 nt, Artificial Sequence
  Description of Artificial Sequence: Synthetic oligonucleotide
acgggagcagaggagacca

SEQ ID NO: 2062602 - RNA, 19 nt, Artificial Sequence
  Description of Artificial Sequence: Synthetic oligonucleotide
ugucugcuuccaucugcag

SEQ ID NO: 2062603 - RNA, 19 nt, Artificial Sequence
  Description of Artificial Sequence: Synthetic oligonucleotide
ucagugcuggaagaggcua

SEQ ID NO: 2062604 - RNA, 19 nt, Artificial Sequence
  Description of Artificial Sequence: Synthetic oligonucleotide
aggaaguaacaagaggaua

SEQ ID NO: 2062605 - RNA, 19 nt, Artificial Sequence
  Description of Artificial Sequence: Synthetic oligonucleotide
gagcgugaccaggacaggc

SEQ ID NO: 2062606 - RNA, 19 nt, Artificial Sequence
  Description of Artificial Sequence: Synthetic oligonucleotide
ccugcagauucucauaauc

SEQ ID NO: 2062607 - RNA, 19 nt, Artificial Sequence
  Description of Artificial Sequence: Synthetic oligonucleotide
gaggagaccaaggggcgug

SEQ ID NO: 2062608 - RNA, 19 nt, Artificial Sequence
  Description of Artificial Sequence: Synthetic oligonucleotide
cuagauucauucucaggcu

SEQ ID NO: 2062609 - RNA, 19 nt, Artificial Sequence
  Description of Artificial Sequence: Synthetic oligonucleotide
aggcuaguccuaaagccug

SEQ ID NO: 2062610 - RNA, 19 nt, Artificial Sequence
  Description of Artificial Sequence: Synthetic oligonucleotide
uugcuagaccgaguugagc

SEQ ID NO: 2062611 - RNA, 19 nt, Artificial Sequence
  Description of Artificial Sequence: Synthetic oligonucleotide
ucgcucucagggacguuca

SEQ ID NO: 2062612 - RNA, 19 nt, Artificial Sequence
  Description of Artificial Sequence: Synthetic oligonucleotide
cuggcccaggcccugcugc

SEQ ID NO: 2062613 - RNA, 19 nt, Artificial Sequence
  Description of Artificial Sequence: Synthetic oligonucleotide
uggaagaggcuaguccuaa

SEQ ID NO: 2062614 - RNA, 19 nt, Artificial Sequence
  Description of Artificial Sequence: Synthetic oligonucleotide
ccaaaacucucuguggaag

SEQ ID NO: 2062615 - RNA, 19 nt, Artificial Sequence
  Description of Artificial Sequence: Synthetic oligonucleotide
cucagccccggucaccggc

SEQ ID NO: 2062616 - RNA, 19 nt, Artificial Sequence
  Description of Artificial Sequence: Synthetic oligonucleotide
cuucaucagaaggugcuga

SEQ ID NO: 2062617 - RNA, 19 nt, Artificial Sequence
  Description of Artificial Sequence: Synthetic oligonucleotide
ucagagugucugcuuccau

SEQ ID NO: 2062618 - RNA, 19 nt, Artificial Sequence
  Description of Artificial Sequence: Synthetic oligonucleotide
cacggcagcgcacacacaa

SEQ ID NO: 2062619 - RNA, 19 nt, Artificial Sequence
  Description of Artificial Sequence: Synthetic oligonucleotide
cuuuccucgcucucaggga

SEQ ID NO: 2062620 - RNA, 19 nt, Artificial Sequence
  Description of Artificial Sequence: Synthetic oligonucleotide
cucgcucucagggacguuc

SEQ ID NO: 2062621 - RNA, 19 nt, Artificial Sequence
  Description of Artificial Sequence: Synthetic oligonucleotide
gagugucugcuuccaucug

SEQ ID NO: 2062622 - RNA, 19 nt, Artificial Sequence
  Description of Artificial Sequence: Synthetic oligonucleotide
uggggcucagagugucugc

SEQ ID NO: 2062623 - RNA, 19 nt, Artificial Sequence
  Description of Artificial Sequence: Synthetic oligonucleotide
uguguccuccuuugggguu

SEQ ID NO: 2062624 - RNA, 19 nt, Artificial Sequence
  Description of Artificial Sequence: Synthetic oligonucleotide
gaauggggaggcaggucug

SEQ ID NO: 2062625 - RNA, 19 nt, Artificial Sequence
  Description of Artificial Sequence: Synthetic oligonucleotide
gggagucucgggaaugggg

SEQ ID NO: 2062626 - RNA, 19 nt, Artificial Sequence
  Description of Artificial Sequence: Synthetic oligonucleotide
ugggccauauggccuuuau

SEQ ID NO: 2062627 - RNA, 19 nt, Artificial Sequence
  Description of Artificial Sequence: Synthetic oligonucleotide
agcaggcucucaguuaagu

SEQ ID NO: 2062628 - RNA, 19 nt, Artificial Sequence
  Description of Artificial Sequence: Synthetic oligonucleotide
uggacuccaaagugacaau

SEQ ID NO: 2062629 - RNA, 19 nt, Artificial Sequence
  Description of Artificial Sequence: Synthetic oligonucleotide
cugucauaggagacuggca

SEQ ID NO: 2062630 - RNA, 19 nt, Artificial Sequence
  Description of Artificial Sequence: Synthetic oligonucleotide
cuagaccgaguugagcuca

SEQ ID NO: 2062631 - RNA, 19 nt, Artificial Sequence
  Description of Artificial Sequence: Synthetic oligonucleotide
ucagccccggucaccggcu

SEQ ID NO: 2062632 - RNA, 19 nt, Artificial Sequence
  Description of Artificial Sequence: Synthetic oligonucleotide
agaguggcagcaggggugu

SEQ ID NO: 2062633 - RNA, 19 nt, Artificial Sequence
  Description of Artificial Sequence: Synthetic oligonucleotide
gcuggaagaggcuaguccu

SEQ ID NO: 2062634 - RNA, 19 nt, Artificial Sequence
  Description of Artificial Sequence: Synthetic oligonucleotide
ucccggcugccauccagag

SEQ ID NO: 2062635 - RNA, 19 nt, Artificial Sequence
  Description of Artificial Sequence: Synthetic oligonucleotide
agugcuggaagaggcuagu

SEQ ID NO: 2062636 - RNA, 19 nt, Artificial Sequence
  Description of Artificial Sequence: Synthetic oligonucleotide
ucacguacucccggcugcc

SEQ ID NO: 2062637 - RNA, 19 nt, Artificial Sequence
  Description of Artificial Sequence: Synthetic oligonucleotide
ugggauccaguggcaagca

SEQ ID NO: 2062638 - RNA, 19 nt, Artificial Sequence
  Description of Artificial Sequence: Synthetic oligonucleotide
cccacuuccuugcuagacc

SEQ ID NO: 2062639 - RNA, 19 nt, Artificial Sequence
  Description of Artificial Sequence: Synthetic oligonucleotide
gugugggacugagugggcc

SEQ ID NO: 2062640 - RNA, 19 nt, Artificial Sequence
  Description of Artificial Sequence: Synthetic oligonucleotide
agccccggucaccggcugc

SEQ ID NO: 2062641 - RNA, 19 nt, Artificial Sequence
  Description of Artificial Sequence: Synthetic oligonucleotide
ggcucagagugucugcuuc

SEQ ID NO: 2062642 - RNA, 19 nt, Artificial Sequence
  Description of Artificial Sequence: Synthetic oligonucleotide
ggagucucgggaaugggga

SEQ ID NO: 2062643 - RNA, 19 nt, Artificial Sequence
  Description of Artificial Sequence: Synthetic oligonucleotide
ccauauggccuuuauucca

SEQ ID NO: 2062644 - RNA, 19 nt, Artificial Sequence
  Description of Artificial Sequence: Synthetic oligonucleotide
ggccuuuauuccacaacag

SEQ ID NO: 2062645 - RNA, 19 nt, Artificial Sequence
  Description of Artificial Sequence: Synthetic oligonucleotide
guacucccggcugccaucc

SEQ ID NO: 2062646 - RNA, 19 nt, Artificial Sequence
  Description of Artificial Sequence: Synthetic oligonucleotide
gucgaaugggacuccuuua

SEQ ID NO: 2062647 - RNA, 19 nt, Artificial Sequence
  Description of Artificial Sequence: Synthetic oligonucleotide
cccagcuaccagcagcacg

SEQ ID NO: 2062648 - RNA, 19 nt, Artificial Sequence
  Description of Artificial Sequence: Synthetic oligonucleotide
ugcagagcaccuggcccag

SEQ ID NO: 2062649 - RNA, 19 nt, Artificial Sequence
  Description of Artificial Sequence: Synthetic oligonucleotide
cacgggagcagaggagacc

SEQ ID NO: 2062650 - RNA, 19 nt, Artificial Sequence
  Description of Artificial Sequence: Synthetic oligonucleotide
agcgugaccaggacaggca

SEQ ID NO: 2062651 - RNA, 19 nt, Artificial Sequence
  Description of Artificial Sequence: Synthetic oligonucleotide
gccccuuucuugcuccccg

SEQ ID NO: 2062652 - RNA, 19 nt, Artificial Sequence
  Description of Artificial Sequence: Synthetic oligonucleotide
accaaggggcgugugggga

SEQ ID NO: 2062653 - RNA, 19 nt, Artificial Sequence
  Description of Artificial Sequence: Synthetic oligonucleotide
ccuugcuagaccgaguuga

SEQ ID NO: 2062654 - RNA, 19 nt, Artificial Sequence
  Description of Artificial Sequence: Synthetic oligonucleotide
gcaagcagcuguguccucc

SEQ ID NO: 2062655 - RNA, 19 nt, Artificial Sequence
  Description of Artificial Sequence: Synthetic oligonucleotide
gcagcacgaucccugugcc

SEQ ID NO: 2062656 - RNA, 19 nt, Artificial Sequence
  Description of Artificial Sequence: Synthetic oligonucleotide
ugccucaggguggaaggaa

SEQ ID NO: 2062657 - RNA, 19 nt, Artificial Sequence
  Description of Artificial Sequence: Synthetic oligonucleotide
agacaggaacuagauucau

SEQ ID NO: 2062658 - RNA, 19 nt, Artificial Sequence
  Description of Artificial Sequence: Synthetic oligonucleotide
acguacucccggcugccau

SEQ ID NO: 2062659 - RNA, 19 nt, Artificial Sequence
  Description of Artificial Sequence: Synthetic oligonucleotide
gcgugaccaggacaggcag

SEQ ID NO: 2062660 - RNA, 19 nt, Artificial Sequence
  Description of Artificial Sequence: Synthetic oligonucleotide
cagcacgaucccugugccc

SEQ ID NO: 2062661 - RNA, 19 nt, Artificial Sequence
  Description of Artificial Sequence: Synthetic oligonucleotide
ggggaagccuguuugagau

SEQ ID NO: 2062662 - RNA, 19 nt, Artificial Sequence
  Description of Artificial Sequence: Synthetic oligonucleotide
ggacguucacauaauccuc

SEQ ID NO: 2062663 - RNA, 19 nt, Artificial Sequence
  Description of Artificial Sequence: Synthetic oligonucleotide
acgaucccugugcccagcu

SEQ ID NO: 2062664 - RNA, 19 nt, Artificial Sequence
  Description of Artificial Sequence: Synthetic oligonucleotide
caaccugggacuucauggu

SEQ ID NO: 2062665 - RNA, 19 nt, Artificial Sequence
  Description of Artificial Sequence: Synthetic oligonucleotide
ucucagggacguucacaua

SEQ ID NO: 2062666 - RNA, 19 nt, Artificial Sequence
  Description of Artificial Sequence: Synthetic oligonucleotide
ggcagcaggggugugggac

SEQ ID NO: 2062667 - RNA, 19 nt, Artificial Sequence
  Description of Artificial Sequence: Synthetic oligonucleotide
ccuaaagccugagcugggg

SEQ ID NO: 2062668 - RNA, 19 nt, Artificial Sequence
  Description of Artificial Sequence: Synthetic oligonucleotide
gcuagaccgaguugagcuc

SEQ ID NO: 2062669 - RNA, 19 nt, Artificial Sequence
  Description of Artificial Sequence: Synthetic oligonucleotide
caggaacuagauucauucu

SEQ ID NO: 2062670 - RNA, 19 nt, Artificial Sequence
  Description of Artificial Sequence: Synthetic oligonucleotide
cacccgacuccauggagaa

SEQ ID NO: 2062671 - RNA, 19 nt, Artificial Sequence
  Description of Artificial Sequence: Synthetic oligonucleotide
guguggggagucucgggaa

SEQ ID NO: 2062672 - RNA, 19 nt, Artificial Sequence
  Description of Artificial Sequence: Synthetic oligonucleotide
auaggaaguggcaguuguu

SEQ ID NO: 2062673 - RNA, 19 nt, Artificial Sequence
  Description of Artificial Sequence: Synthetic oligonucleotide
acuggacuccaaagugaca

SEQ ID NO: 2062674 - RNA, 19 nt, Artificial Sequence
  Description of Artificial Sequence: Synthetic oligonucleotide
gcuaguccuaaagccugag

SEQ ID NO: 2062675 - RNA, 19 nt, Artificial Sequence
  Description of Artificial Sequence: Synthetic oligonucleotide
gagaugguuugaugaggau

SEQ ID NO: 2062676 - RNA, 19 nt, Artificial Sequence
  Description of Artificial Sequence: Synthetic oligonucleotide
cuggaagaggcuaguccua

SEQ ID NO: 2062677 - RNA, 19 nt, Artificial Sequence
  Description of Artificial Sequence: Synthetic oligonucleotide
ggguggaaggaaguaacaa

SEQ ID NO: 2062678 - RNA, 19 nt, Artificial Sequence
  Description of Artificial Sequence: Synthetic oligonucleotide
cugggacuucauggugucc

SEQ ID NO: 2062679 - RNA, 19 nt, Artificial Sequence
  Description of Artificial Sequence: Synthetic oligonucleotide
ggucaccggcugcagcucc

SEQ ID NO: 2062680 - RNA, 19 nt, Artificial Sequence
  Description of Artificial Sequence: Synthetic oligonucleotide
ucacggcagcgcacacaca

SEQ ID NO: 2062681 - RNA, 19 nt, Artificial Sequence
  Description of Artificial Sequence: Synthetic oligonucleotide
gcuccguggguccaaaacu

SEQ ID NO: 2062682 - RNA, 19 nt, Artificial Sequence
  Description of Artificial Sequence: Synthetic oligonucleotide
cagcaggcucucaguuaag

SEQ ID NO: 2062683 - RNA, 19 nt, Artificial Sequence
  Description of Artificial Sequence: Synthetic oligonucleotide
guguccuccuuugggguuc

SEQ ID NO: 2062684 - RNA, 19 nt, Artificial Sequence
  Description of Artificial Sequence: Synthetic oligonucleotide
ggcacgggagcagaggaga

SEQ ID NO: 2062685 - RNA, 19 nt, Artificial Sequence
  Description of Artificial Sequence: Synthetic oligonucleotide
ccaguggcaagcagcugug

SEQ ID NO: 2062686 - RNA, 19 nt, Artificial Sequence
  Description of Artificial Sequence: Synthetic oligonucleotide
cguucacauaauccucacc

SEQ ID NO: 2062687 - RNA, 19 nt, Artificial Sequence
  Description of Artificial Sequence: Synthetic oligonucleotide
cugccccuuucuugcuccc

SEQ ID NO: 2062688 - RNA, 19 nt, Artificial Sequence
  Description of Artificial Sequence: Synthetic oligonucleotide
gcagaggucgaaugggacu

SEQ ID NO: 2062689 - RNA, 19 nt, Artificial Sequence
  Description of Artificial Sequence: Synthetic oligonucleotide
ccaaggggcguguggggag

SEQ ID NO: 2062690 - RNA, 19 nt, Artificial Sequence
  Description of Artificial Sequence: Synthetic oligonucleotide
caccggcugcagcuccugg

SEQ ID NO: 2062691 - RNA, 19 nt, Artificial Sequence
  Description of Artificial Sequence: Synthetic oligonucleotide
gugcugaauacuggggaua

SEQ ID NO: 2062692 - RNA, 19 nt, Artificial Sequence
  Description of Artificial Sequence: Synthetic oligonucleotide
cuccauggagaaggcgcug

SEQ ID NO: 2062693 - RNA, 19 nt, Artificial Sequence
  Description of Artificial Sequence: Synthetic oligonucleotide
ccagagaugcuucugcacu

SEQ ID NO: 2062694 - RNA, 19 nt, Artificial Sequence
  Description of Artificial Sequence: Synthetic oligonucleotide
cauucacguacucccggcu

SEQ ID NO: 2062695 - RNA, 19 nt, Artificial Sequence
  Description of Artificial Sequence: Synthetic oligonucleotide
gcguguggggagucucggg

SEQ ID NO: 2062696 - RNA, 19 nt, Artificial Sequence
  Description of Artificial Sequence: Synthetic oligonucleotide
ggucgaaugggacuccuuu

SEQ ID NO: 2062697 - RNA, 19 nt, Artificial Sequence
  Description of Artificial Sequence: Synthetic oligonucleotide
cugugcccagcuguaccug

SEQ ID NO: 2062698 - RNA, 19 nt, Artificial Sequence
  Description of Artificial Sequence: Synthetic oligonucleotide
agcaccuggcccaggcccu

SEQ ID NO: 2062699 - RNA, 19 nt, Artificial Sequence
  Description of Artificial Sequence: Synthetic oligonucleotide
aggcgcugucucggagacc

SEQ ID NO: 2062700 - RNA, 19 nt, Artificial Sequence
  Description of Artificial Sequence: Synthetic oligonucleotide
ggggagucucgggaauggg

SEQ ID NO: 2062701 - RNA, 19 nt, Artificial Sequence
  Description of Artificial Sequence: Synthetic oligonucleotide
gggacuccuuuagagccac

SEQ ID NO: 2062702 - RNA, 19 nt, Artificial Sequence
  Description of Artificial Sequence: Synthetic oligonucleotide
cagagucagacaggaacua

SEQ ID NO: 2062703 - RNA, 19 nt, Artificial Sequence
  Description of Artificial Sequence: Synthetic oligonucleotide
ccgaguugagcucagugcu

SEQ ID NO: 2062704 - RNA, 19 nt, Artificial Sequence
  Description of Artificial Sequence: Synthetic oligonucleotide
gaugcuccguggguccaaa

SEQ ID NO: 2062705 - RNA, 19 nt, Artificial Sequence
  Description of Artificial Sequence: Synthetic oligonucleotide
cuuccuugcuagaccgagu

SEQ ID NO: 2062706 - RNA, 19 nt, Artificial Sequence
  Description of Artificial Sequence: Synthetic oligonucleotide
ggagcgugaccaggacagg

SEQ ID NO: 2062707 - RNA, 19 nt, Artificial Sequence
  Description of Artificial Sequence: Synthetic oligonucleotide
uacucccggcugccaucca

SEQ ID NO: 2062708 - RNA, 19 nt, Artificial Sequence
  Description of Artificial Sequence: Synthetic oligonucleotide
ccguggguccaaaacucuc

SEQ ID NO: 2062709 - RNA, 19 nt, Artificial Sequence
  Description of Artificial Sequence: Synthetic oligonucleotide
ggaagaggcuaguccuaaa

SEQ ID NO: 2062710 - RNA, 19 nt, Artificial Sequence
  Description of Artificial Sequence: Synthetic oligonucleotide
cauggagaaggcgcugucu

SEQ ID NO: 2062711 - RNA, 19 nt, Artificial Sequence
  Description of Artificial Sequence: Synthetic oligonucleotide
gcucucaguuaaguuccug

SEQ ID NO: 2062712 - RNA, 19 nt, Artificial Sequence
  Description of Artificial Sequence: Synthetic oligonucleotide
cgaguugagcucagugcug

SEQ ID NO: 2062713 - RNA, 19 nt, Artificial Sequence
  Description of Artificial Sequence: Synthetic oligonucleotide
gugcuggaagaggcuaguc

SEQ ID NO: 2062714 - RNA, 19 nt, Artificial Sequence
  Description of Artificial Sequence: Synthetic oligonucleotide
cagagaugcuucugcacuu

SEQ ID NO: 2062715 - RNA, 19 nt, Artificial Sequence
  Description of Artificial Sequence: Synthetic oligonucleotide
gcucucagggacguucaca

SEQ ID NO: 2062716 - RNA, 19 nt, Artificial Sequence
  Description of Artificial Sequence: Synthetic oligonucleotide
ggacugagugggccccagc

SEQ ID NO: 2062717 - RNA, 19 nt, Artificial Sequence
  Description of Artificial Sequence: Synthetic oligonucleotide
gggcguguggggagucucg

SEQ ID NO: 2062718 - RNA, 19 nt, Artificial Sequence
  Description of Artificial Sequence: Synthetic oligonucleotide
agaccgaguugagcucagu

SEQ ID NO: 2062719 - RNA, 19 nt, Artificial Sequence
  Description of Artificial Sequence: Synthetic oligonucleotide
gcagaguggcagcaggggu

SEQ ID NO: 2062720 - RNA, 19 nt, Artificial Sequence
  Description of Artificial Sequence: Synthetic oligonucleotide
augcuccguggguccaaaa

SEQ ID NO: 2062721 - RNA, 19 nt, Artificial Sequence
  Description of Artificial Sequence: Synthetic oligonucleotide
acaaggcagccaggagcgu

SEQ ID NO: 2062722 - RNA, 19 nt, Artificial Sequence
  Description of Artificial Sequence: Synthetic oligonucleotide
auuccacaacagagucaga

SEQ ID NO: 2062723 - RNA, 19 nt, Artificial Sequence
  Description of Artificial Sequence: Synthetic oligonucleotide
gcgcacacacaaggcagcc

SEQ ID NO: 2062724 - RNA, 19 nt, Artificial Sequence
  Description of Artificial Sequence: Synthetic oligonucleotide
aggcuaguuccaggacaga

SEQ ID NO: 2062725 - RNA, 19 nt, Artificial Sequence
  Description of Artificial Sequence: Synthetic oligonucleotide
gggcacgggagcagaggag

SEQ ID NO: 2062726 - RNA, 19 nt, Artificial Sequence
  Description of Artificial Sequence: Synthetic oligonucleotide
ccccuuucuugcuccccgc

SEQ ID NO: 2062727 - RNA, 19 nt, Artificial Sequence
  Description of Artificial Sequence: Synthetic oligonucleotide
ccccacuuccuugcuagac

SEQ ID NO: 2062728 - RNA, 19 nt, Artificial Sequence
  Description of Artificial Sequence: Synthetic oligonucleotide
cguguggggagucucggga

SEQ ID NO: 2062729 - RNA, 19 nt, Artificial Sequence
  Description of Artificial Sequence: Synthetic oligonucleotide
aucccugugcccagcugua

SEQ ID NO: 2062730 - RNA, 19 nt, Artificial Sequence
  Description of Artificial Sequence: Synthetic oligonucleotide
cucccuccacucccuccuc

SEQ ID NO: 2062731 - RNA, 19 nt, Artificial Sequence
  Description of Artificial Sequence: Synthetic oligonucleotide
cugcacugcagccccucua

SEQ ID NO: 2062732 - RNA, 19 nt, Artificial Sequence
  Description of Artificial Sequence: Synthetic oligonucleotide
caauaaguuaggggagauu

SEQ ID NO: 2062733 - RNA, 19 nt, Artificial Sequence
  Description of Artificial Sequence: Synthetic oligonucleotide
ggcuaguccuaaagccuga

SEQ ID NO: 2062734 - RNA, 19 nt, Artificial Sequence
  Description of Artificial Sequence: Synthetic oligonucleotide
cugccucaggguggaagga

SEQ ID NO: 2062735 - RNA, 19 nt, Artificial Sequence
  Description of Artificial Sequence: Synthetic oligonucleotide
gaagccuguuugagauggu

SEQ ID NO: 2062736 - RNA, 19 nt, Artificial Sequence
  Description of Artificial Sequence: Synthetic oligonucleotide
gggagauucucagacuguu

SEQ ID NO: 2062737 - RNA, 19 nt, Artificial Sequence
  Description of Artificial Sequence: Synthetic oligonucleotide
gcugaauacuggggauaca

SEQ ID NO: 2062738 - RNA, 19 nt, Artificial Sequence
  Description of Artificial Sequence: Synthetic oligonucleotide
aggggcguguggggagucu

SEQ ID NO: 2062739 - RNA, 19 nt, Artificial Sequence
  Description of Artificial Sequence: Synthetic oligonucleotide
aggucgaaugggacuccuu

SEQ ID NO: 2062740 - RNA, 19 nt, Artificial Sequence
  Description of Artificial Sequence: Synthetic oligonucleotide
cauggggcucagagugucu

SEQ ID NO: 2062741 - RNA, 19 nt, Artificial Sequence
  Description of Artificial Sequence: Synthetic oligonucleotide
ccugugccccagcuaccag

SEQ ID NO: 2062742 - RNA, 19 nt, Artificial Sequence
  Description of Artificial Sequence: Synthetic oligonucleotide
cguacucccggcugccauc

SEQ ID NO: 2062743 - RNA, 19 nt, Artificial Sequence
  Description of Artificial Sequence: Synthetic oligonucleotide
cgacuccauggagaaggcg

SEQ ID NO: 2062744 - RNA, 19 nt, Artificial Sequence
  Description of Artificial Sequence: Synthetic oligonucleotide
gcacgggagcagaggagac

SEQ ID NO: 2062745 - RNA, 19 nt, Artificial Sequence
  Description of Artificial Sequence: Synthetic oligonucleotide
cccggucaccggcugcagc

SEQ ID NO: 2062746 - RNA, 19 nt, Artificial Sequence
  Description of Artificial Sequence: Synthetic oligonucleotide
ccugggacacauucacgua

SEQ ID NO: 2062747 - RNA, 19 nt, Artificial Sequence
  Description of Artificial Sequence: Synthetic oligonucleotide
ccugugcccagcuguaccu

SEQ ID NO: 2062748 - RNA, 19 nt, Artificial Sequence
  Description of Artificial Sequence: Synthetic oligonucleotide
cguggguccaaaacucucu

SEQ ID NO: 2062749 - RNA, 19 nt, Artificial Sequence
  Description of Artificial Sequence: Synthetic oligonucleotide
ggggcguguggggagucuc

SEQ ID NO: 2062750 - RNA, 19 nt, Artificial Sequence
  Description of Artificial Sequence: Synthetic oligonucleotide
ggggcucagagugucugcu

SEQ ID NO: 2062751 - RNA, 19 nt, Artificial Sequence
  Description of Artificial Sequence: Synthetic oligonucleotide
cacguacucccggcugcca

SEQ ID NO: 2062752 - RNA, 19 nt, Artificial Sequence
  Description of Artificial Sequence: Synthetic oligonucleotide
ggggagauucucagacugu

SEQ ID NO: 2062753 - RNA, 19 nt, Artificial Sequence
  Description of Artificial Sequence: Synthetic oligonucleotide
cuguaccugccccuuucuu

SEQ ID NO: 2062754 - RNA, 19 nt, Artificial Sequence
  Description of Artificial Sequence: Synthetic oligonucleotide
ccuuucuugcuccccgccu

SEQ ID NO: 2062755 - RNA, 19 nt, Artificial Sequence
  Description of Artificial Sequence: Synthetic oligonucleotide
gggccauauggccuuuauu

SEQ ID NO: 2062756 - RNA, 19 nt, Artificial Sequence
  Description of Artificial Sequence: Synthetic oligonucleotide
ccucaggguggaaggaagu

SEQ ID NO: 2062757 - RNA, 19 nt, Artificial Sequence
  Description of Artificial Sequence: Synthetic oligonucleotide
caggggugugggacugagu

SEQ ID NO: 2062758 - RNA, 19 nt, Artificial Sequence
  Description of Artificial Sequence: Synthetic oligonucleotide
cgaucccugugcccagcug

SEQ ID NO: 2062759 - RNA, 19 nt, Artificial Sequence
  Description of Artificial Sequence: Synthetic oligonucleotide
gccugggauccaguggcaa

SEQ ID NO: 2062760 - RNA, 19 nt, Artificial Sequence
  Description of Artificial Sequence: Synthetic oligonucleotide
gccccauggggcucagagu

SEQ ID NO: 2062761 - RNA, 19 nt, Artificial Sequence
  Description of Artificial Sequence: Synthetic oligonucleotide
ggaugcuccguggguccaa

SEQ ID NO: 2062762 - RNA, 19 nt, Artificial Sequence
  Description of Artificial Sequence: Synthetic oligonucleotide
caguggcaagcagcugugu

SEQ ID NO: 2062763 - RNA, 19 nt, Artificial Sequence
  Description of Artificial Sequence: Synthetic oligonucleotide
cccauggggcucagagugu

SEQ ID NO: 2062764 - RNA, 19 nt, Artificial Sequence
  Description of Artificial Sequence: Synthetic oligonucleotide
ccccagcuaccagcagcac

SEQ ID NO: 2062765 - RNA, 19 nt, Artificial Sequence
  Description of Artificial Sequence: Synthetic oligonucleotide
cccagccccauggggcuca

SEQ ID NO: 2062766 - RNA, 19 nt, Artificial Sequence
  Description of Artificial Sequence: Synthetic oligonucleotide
ccacaaccugggacuucau

SEQ ID NO: 2062767 - RNA, 19 nt, Artificial Sequence
  Description of Artificial Sequence: Synthetic oligonucleotide
ccucgcucucagggacguu

SEQ ID NO: 2062768 - RNA, 19 nt, Artificial Sequence
  Description of Artificial Sequence: Synthetic oligonucleotide
uacuugaucugccagaacg

SEQ ID NO: 2062769 - RNA, 19 nt, Artificial Sequence
  Description of Artificial Sequence: Synthetic oligonucleotide
agggccauuaagcagaugc

SEQ ID NO: 2062770 - RNA, 19 nt, Artificial Sequence
  Description of Artificial Sequence: Synthetic oligonucleotide
agugcaauagagcugcucc

SEQ ID NO: 2062771 - RNA, 19 nt, Artificial Sequence
  Description of Artificial Sequence: Synthetic oligonucleotide
auaagguccccacagauuc

SEQ ID NO: 2062772 - RNA, 19 nt, Artificial Sequence
  Description of Artificial Sequence: Synthetic oligonucleotide
aaggagaaaaggcauuccg

SEQ ID NO: 2062773 - RNA, 19 nt, Artificial Sequence
  Description of Artificial Sequence: Synthetic oligonucleotide
guaaaugacaucaucaagc

SEQ ID NO: 2062774 - RNA, 19 nt, Artificial Sequence
  Description of Artificial Sequence: Synthetic oligonucleotide
aaugagucgagguccaaag

SEQ ID NO: 2062775 - RNA, 19 nt, Artificial Sequence
  Description of Artificial Sequence: Synthetic oligonucleotide
uuugucaagggccauuaag

SEQ ID NO: 2062776 - RNA, 19 nt, Artificial Sequence
  Description of Artificial Sequence: Synthetic oligonucleotide
ugucuuagcagucucacac

SEQ ID NO: 2062777 - RNA, 19 nt, Artificial Sequence
  Description of Artificial Sequence: Synthetic oligonucleotide
uugucaagggccauuaagc

SEQ ID NO: 2062778 - RNA, 19 nt, Artificial Sequence
  Description of Artificial Sequence: Synthetic oligonucleotide
ucaagggccauuaagcaga

SEQ ID NO: 2062779 - RNA, 19 nt, Artificial Sequence
  Description of Artificial Sequence: Synthetic oligonucleotide
agcagaugcagucagccac

SEQ ID NO: 2062780 - RNA, 19 nt, Artificial Sequence
  Description of Artificial Sequence: Synthetic oligonucleotide
ugagucgagguccaaaggc

SEQ ID NO: 2062781 - RNA, 19 nt, Artificial Sequence
  Description of Artificial Sequence: Synthetic oligonucleotide
uuagcagucucacaccuug

SEQ ID NO: 2062782 - RNA, 19 nt, Artificial Sequence
  Description of Artificial Sequence: Synthetic oligonucleotide
ucaucaagcugaaugaguc

SEQ ID NO: 2062783 - RNA, 19 nt, Artificial Sequence
  Description of Artificial Sequence: Synthetic oligonucleotide
uccagaagcuaaaaccagg

SEQ ID NO: 2062784 - RNA, 19 nt, Artificial Sequence
  Description of Artificial Sequence: Synthetic oligonucleotide
ucugaggugagcuucuacc

SEQ ID NO: 2062785 - RNA, 19 nt, Artificial Sequence
  Description of Artificial Sequence: Synthetic oligonucleotide
cuugggaugugguagagug

SEQ ID NO: 2062786 - RNA, 19 nt, Artificial Sequence
  Description of Artificial Sequence: Synthetic oligonucleotide
gagaaaaggcauuccgugg

SEQ ID NO: 2062787 - RNA, 19 nt, Artificial Sequence
  Description of Artificial Sequence: Synthetic oligonucleotide
auuaagcagaugcagucag

SEQ ID NO: 2062788 - RNA, 19 nt, Artificial Sequence
  Description of Artificial Sequence: Synthetic oligonucleotide
aagcccaguggcuauacag

SEQ ID NO: 2062789 - RNA, 19 nt, Artificial Sequence
  Description of Artificial Sequence: Synthetic oligonucleotide
guggacacgggauagaggc

SEQ ID NO: 2062790 - RNA, 19 nt, Artificial Sequence
  Description of Artificial Sequence: Synthetic oligonucleotide
gaagcuaugguaaaugaca

SEQ ID NO: 2062791 - RNA, 19 nt, Artificial Sequence
  Description of Artificial Sequence: Synthetic oligonucleotide
agugauucgagcaauguug

SEQ ID NO: 2062792 - RNA, 19 nt, Artificial Sequence
  Description of Artificial Sequence: Synthetic oligonucleotide
ucuaccaugccagugauuc

SEQ ID NO: 2062793 - RNA, 19 nt, Artificial Sequence
  Description of Artificial Sequence: Synthetic oligonucleotide
gauucgagcaauguuguug

SEQ ID NO: 2062794 - RNA, 19 nt, Artificial Sequence
  Description of Artificial Sequence: Synthetic oligonucleotide
uuggcgaucugccauacgu

SEQ ID NO: 2062795 - RNA, 19 nt, Artificial Sequence
  Description of Artificial Sequence: Synthetic oligonucleotide
cuuaugggccucuucauac

SEQ ID NO: 2062796 - RNA, 19 nt, Artificial Sequence
  Description of Artificial Sequence: Synthetic oligonucleotide
cuucauacggggcuuuucg

SEQ ID NO: 2062797 - RNA, 19 nt, Artificial Sequence
  Description of Artificial Sequence: Synthetic oligonucleotide
agguccaaaggccuggcac

SEQ ID NO: 2062798 - RNA, 19 nt, Artificial Sequence
  Description of Artificial Sequence: Synthetic oligonucleotide
aauaacucucggauggcag

SEQ ID NO: 2062799 - RNA, 19 nt, Artificial Sequence
  Description of Artificial Sequence: Synthetic oligonucleotide
agacccaacuuucugaggu

SEQ ID NO: 2062800 - RNA, 19 nt, Artificial Sequence
  Description of Artificial Sequence: Synthetic oligonucleotide
ucaguguccauacuugauc

SEQ ID NO: 2062801 - RNA, 19 nt, Artificial Sequence
  Description of Artificial Sequence: Synthetic oligonucleotide
cuuguguaaggcuuccagc

SEQ ID NO: 2062802 - RNA, 19 nt, Artificial Sequence
  Description of Artificial Sequence: Synthetic oligonucleotide
ugcagagagccuuaugggc

SEQ ID NO: 2062803 - RNA, 19 nt, Artificial Sequence
  Description of Artificial Sequence: Synthetic oligonucleotide
auucgagcaauguuguugu

SEQ ID NO: 2062804 - RNA, 19 nt, Artificial Sequence
  Description of Artificial Sequence: Synthetic oligonucleotide
cauacguggacguccacag

SEQ ID NO: 2062805 - RNA, 19 nt, Artificial Sequence
  Description of Artificial Sequence: Synthetic oligonucleotide
ugucaagggccauuaagca

SEQ ID NO: 2062806 - RNA, 19 nt, Artificial Sequence
  Description of Artificial Sequence: Synthetic oligonucleotide
aaaguuucccaguucuuua

SEQ ID NO: 2062807 - RNA, 19 nt, Artificial Sequence
  Description of Artificial Sequence: Synthetic oligonucleotide
gaugcuucaugcugccagg

SEQ ID NO: 2062808 - RNA, 19 nt, Artificial Sequence
  Description of Artificial Sequence: Synthetic oligonucleotide
ugagucaguguccauacuu

SEQ ID NO: 2062809 - RNA, 19 nt, Artificial Sequence
  Description of Artificial Sequence: Synthetic oligonucleotide
ucuuaggccccuucuugcg

SEQ ID NO: 2062810 - RNA, 19 nt, Artificial Sequence
  Description of Artificial Sequence: Synthetic oligonucleotide
uuaugggccucuucauacg

SEQ ID NO: 2062811 - RNA, 19 nt, Artificial Sequence
  Description of Artificial Sequence: Synthetic oligonucleotide
acuugaucugccagaacgc

SEQ ID NO: 2062812 - RNA, 19 nt, Artificial Sequence
  Description of Artificial Sequence: Synthetic oligonucleotide
uguccauacuugaucugcc

SEQ ID NO: 2062813 - RNA, 19 nt, Artificial Sequence
  Description of Artificial Sequence: Synthetic oligonucleotide
ccuucuugcgcuuugcugg

SEQ ID NO: 2062814 - RNA, 19 nt, Artificial Sequence
  Description of Artificial Sequence: Synthetic oligonucleotide
ggagaaaaggcauuccgug

SEQ ID NO: 2062815 - RNA, 19 nt, Artificial Sequence
  Description of Artificial Sequence: Synthetic oligonucleotide
cacugaacagcacugcuug

SEQ ID NO: 2062816 - RNA, 19 nt, Artificial Sequence
  Description of Artificial Sequence: Synthetic oligonucleotide
cuaaaaccagguccagacg

SEQ ID NO: 2062817 - RNA, 19 nt, Artificial Sequence
  Description of Artificial Sequence: Synthetic oligonucleotide
ucaagcugaaugagucgag

SEQ ID NO: 2062818 - RNA, 19 nt, Artificial Sequence
  Description of Artificial Sequence: Synthetic oligonucleotide
agccgaauaacucucggau

SEQ ID NO: 2062819 - RNA, 19 nt, Artificial Sequence
  Description of Artificial Sequence: Synthetic oligonucleotide
caucaagcugaaugagucg

SEQ ID NO: 2062820 - RNA, 19 nt, Artificial Sequence
  Description of Artificial Sequence: Synthetic oligonucleotide
uagagugccagccguaguc

SEQ ID NO: 2062821 - RNA, 19 nt, Artificial Sequence
  Description of Artificial Sequence: Synthetic oligonucleotide
ccagacgcagcucagagcg

SEQ ID NO: 2062822 - RNA, 19 nt, Artificial Sequence
  Description of Artificial Sequence: Synthetic oligonucleotide
uuaagcagaugcagucagc

SEQ ID NO: 2062823 - RNA, 19 nt, Artificial Sequence
  Description of Artificial Sequence: Synthetic oligonucleotide
acgagagccgaauaacucu

SEQ ID NO: 2062824 - RNA, 19 nt, Artificial Sequence
  Description of Artificial Sequence: Synthetic oligonucleotide
agagccgaauaacucucgg

SEQ ID NO: 2062825 - RNA, 19 nt, Artificial Sequence
  Description of Artificial Sequence: Synthetic oligonucleotide
gucaagggccauuaagcag

SEQ ID NO: 2062826 - RNA, 19 nt, Artificial Sequence
  Description of Artificial Sequence: Synthetic oligonucleotide
agggugcgaugcuucaugc

SEQ ID NO: 2062827 - RNA, 19 nt, Artificial Sequence
  Description of Artificial Sequence: Synthetic oligonucleotide
aguggcuauacagcugagc

SEQ ID NO: 2062828 - RNA, 19 nt, Artificial Sequence
  Description of Artificial Sequence: Synthetic oligonucleotide
ccgaauaacucucggaugg

SEQ ID NO: 2062829 - RNA, 19 nt, Artificial Sequence
  Description of Artificial Sequence: Synthetic oligonucleotide
gugcagagagccuuauggg

SEQ ID NO: 2062830 - RNA, 19 nt, Artificial Sequence
  Description of Artificial Sequence: Synthetic oligonucleotide
ugaaggagaaaaggcauuc

SEQ ID NO: 2062831 - RNA, 19 nt, Artificial Sequence
  Description of Artificial Sequence: Synthetic oligonucleotide
ucuugucuuagcagucuca

SEQ ID NO: 2062832 - RNA, 19 nt, Artificial Sequence
  Description of Artificial Sequence: Synthetic oligonucleotide
acucuuaggccccuucuug

SEQ ID NO: 2062833 - RNA, 19 nt, Artificial Sequence
  Description of Artificial Sequence: Synthetic oligonucleotide
uggacguccacaggcacgg

SEQ ID NO: 2062834 - RNA, 19 nt, Artificial Sequence
  Description of Artificial Sequence: Synthetic oligonucleotide
augagucgagguccaaagg

SEQ ID NO: 2062835 - RNA, 19 nt, Artificial Sequence
  Description of Artificial Sequence: Synthetic oligonucleotide
agcuaugguaaaugacauc

SEQ ID NO: 2062836 - RNA, 19 nt, Artificial Sequence
  Description of Artificial Sequence: Synthetic oligonucleotide
uugaucugccagaacgcca

SEQ ID NO: 2062837 - RNA, 19 nt, Artificial Sequence
  Description of Artificial Sequence: Synthetic oligonucleotide
uacccuagacccaacuuuc

SEQ ID NO: 2062838 - RNA, 19 nt, Artificial Sequence
  Description of Artificial Sequence: Synthetic oligonucleotide
aaguacuuguguaaggcuu

SEQ ID NO: 2062839 - RNA, 19 nt, Artificial Sequence
  Description of Artificial Sequence: Synthetic oligonucleotide
ucgagcaauguuguuguug

SEQ ID NO: 2062840 - RNA, 19 nt, Artificial Sequence
  Description of Artificial Sequence: Synthetic oligonucleotide
aucaagcugaaugagucga

SEQ ID NO: 2062841 - RNA, 19 nt, Artificial Sequence
  Description of Artificial Sequence: Synthetic oligonucleotide
acauacauaacgggcccgg

SEQ ID NO: 2062842 - RNA, 19 nt, Artificial Sequence
  Description of Artificial Sequence: Synthetic oligonucleotide
caauagagcugcuccucgg

SEQ ID NO: 2062843 - RNA, 19 nt, Artificial Sequence
  Description of Artificial Sequence: Synthetic oligonucleotide
ucauacggggcuuuucgaa

SEQ ID NO: 2062844 - RNA, 19 nt, Artificial Sequence
  Description of Artificial Sequence: Synthetic oligonucleotide
ugggguuugucaagggcca

SEQ ID NO: 2062845 - RNA, 19 nt, Artificial Sequence
  Description of Artificial Sequence: Synthetic oligonucleotide
acagccguucuaccaugcc

SEQ ID NO: 2062846 - RNA, 19 nt, Artificial Sequence
  Description of Artificial Sequence: Synthetic oligonucleotide
cucuuaggccccuucuugc

SEQ ID NO: 2062847 - RNA, 19 nt, Artificial Sequence
  Description of Artificial Sequence: Synthetic oligonucleotide
aauguuguuguuggaggaa

SEQ ID NO: 2062848 - RNA, 19 nt, Artificial Sequence
  Description of Artificial Sequence: Synthetic oligonucleotide
uaccaugccagugauucga

SEQ ID NO: 2062849 - RNA, 19 nt, Artificial Sequence
  Description of Artificial Sequence: Synthetic oligonucleotide
uguguaaggcuuccagcuc

SEQ ID NO: 2062850 - RNA, 19 nt, Artificial Sequence
  Description of Artificial Sequence: Synthetic oligonucleotide
gagucgagguccaaaggcc

SEQ ID NO: 2062851 - RNA, 19 nt, Artificial Sequence
  Description of Artificial Sequence: Synthetic oligonucleotide
agaacgccacuccagugug

SEQ ID NO: 2062852 - RNA, 19 nt, Artificial Sequence
  Description of Artificial Sequence: Synthetic oligonucleotide
ggugcgaugcuucaugcug

SEQ ID NO: 2062853 - RNA, 19 nt, Artificial Sequence
  Description of Artificial Sequence: Synthetic oligonucleotide
ucaaggcuggggaagcuau

SEQ ID NO: 2062854 - RNA, 19 nt, Artificial Sequence
  Description of Artificial Sequence: Synthetic oligonucleotide
uccaccggaaagaacuguc

SEQ ID NO: 2062855 - RNA, 19 nt, Artificial Sequence
  Description of Artificial Sequence: Synthetic oligonucleotide
aagcuaugguaaaugacau

SEQ ID NO: 2062856 - RNA, 19 nt, Artificial Sequence
  Description of Artificial Sequence: Synthetic oligonucleotide
cuugucuuagcagucucac

SEQ ID NO: 2062857 - RNA, 19 nt, Artificial Sequence
  Description of Artificial Sequence: Synthetic oligonucleotide
agcugaaaguacuugugua

SEQ ID NO: 2062858 - RNA, 19 nt, Artificial Sequence
  Description of Artificial Sequence: Synthetic oligonucleotide
ucgguacacagugcaauag

SEQ ID NO: 2062859 - RNA, 19 nt, Artificial Sequence
  Description of Artificial Sequence: Synthetic oligonucleotide
caagcugaaugagucgagg

SEQ ID NO: 2062860 - RNA, 19 nt, Artificial Sequence
  Description of Artificial Sequence: Synthetic oligonucleotide
agcuucuaccucuggacca

SEQ ID NO: 2062861 - RNA, 19 nt, Artificial Sequence
  Description of Artificial Sequence: Synthetic oligonucleotide
ggcgaucugccauacgugg

SEQ ID NO: 2062862 - RNA, 19 nt, Artificial Sequence
  Description of Artificial Sequence: Synthetic oligonucleotide
aaaccagguccagacgcag

SEQ ID NO: 2062863 - RNA, 19 nt, Artificial Sequence
  Description of Artificial Sequence: Synthetic oligonucleotide
uucauacggggcuuuucga

SEQ ID NO: 2062864 - RNA, 19 nt, Artificial Sequence
  Description of Artificial Sequence: Synthetic oligonucleotide
uugguuggcgcagaucagc

SEQ ID NO: 2062865 - RNA, 19 nt, Artificial Sequence
  Description of Artificial Sequence: Synthetic oligonucleotide
agucucacaccuuggaauu

SEQ ID NO: 2062866 - RNA, 19 nt, Artificial Sequence
  Description of Artificial Sequence: Synthetic oligonucleotide
agcacugaacagcacugcu

SEQ ID NO: 2062867 - RNA, 19 nt, Artificial Sequence
  Description of Artificial Sequence: Synthetic oligonucleotide
gccguagucaugcuuggcg

SEQ ID NO: 2062868 - RNA, 19 nt, Artificial Sequence
  Description of Artificial Sequence: Synthetic oligonucleotide
ugguuggcgcagaucagca

SEQ ID NO: 2062869 - RNA, 19 nt, Artificial Sequence
  Description of Artificial Sequence: Synthetic oligonucleotide
guacacagugcaauagagc

SEQ ID NO: 2062870 - RNA, 19 nt, Artificial Sequence
  Description of Artificial Sequence: Synthetic oligonucleotide
ggcacauacauaacgggcc

SEQ ID NO: 2062871 - RNA, 19 nt, Artificial Sequence
  Description of Artificial Sequence: Synthetic oligonucleotide
uagcagucucacaccuugg

SEQ ID NO: 2062872 - RNA, 19 nt, Artificial Sequence
  Description of Artificial Sequence: Synthetic oligonucleotide
cuauacagcugagccaggc

SEQ ID NO: 2062873 - RNA, 19 nt, Artificial Sequence
  Description of Artificial Sequence: Synthetic oligonucleotide
ucacaccuuggaauuucug

SEQ ID NO: 2062874 - RNA, 19 nt, Artificial Sequence
  Description of Artificial Sequence: Synthetic oligonucleotide
gucuuagcagucucacacc

SEQ ID NO: 2062875 - RNA, 19 nt, Artificial Sequence
  Description of Artificial Sequence: Synthetic oligonucleotide
auacggggcuuuucgaagu

SEQ ID NO: 2062876 - RNA, 19 nt, Artificial Sequence
  Description of Artificial Sequence: Synthetic oligonucleotide
ggcgcuggcacauacauaa

SEQ ID NO: 2062877 - RNA, 19 nt, Artificial Sequence
  Description of Artificial Sequence: Synthetic oligonucleotide
uggcgaucugccauacgug

SEQ ID NO: 2062878 - RNA, 19 nt, Artificial Sequence
  Description of Artificial Sequence: Synthetic oligonucleotide
aacgccacuccagugugca

SEQ ID NO: 2062879 - RNA, 19 nt, Artificial Sequence
  Description of Artificial Sequence: Synthetic oligonucleotide
uuaggccccuucuugcgcu

SEQ ID NO: 2062880 - RNA, 19 nt, Artificial Sequence
  Description of Artificial Sequence: Synthetic oligonucleotide
caauguuguuguuggagga

SEQ ID NO: 2062881 - RNA, 19 nt, Artificial Sequence
  Description of Artificial Sequence: Synthetic oligonucleotide
agccguucuaccaugccag

SEQ ID NO: 2062882 - RNA, 19 nt, Artificial Sequence
  Description of Artificial Sequence: Synthetic oligonucleotide
uuuggcgcuggcacauaca

SEQ ID NO: 2062883 - RNA, 19 nt, Artificial Sequence
  Description of Artificial Sequence: Synthetic oligonucleotide
aguguccauacuugaucug

SEQ ID NO: 2062884 - RNA, 19 nt, Artificial Sequence
  Description of Artificial Sequence: Synthetic oligonucleotide
agggccucaaggcugggga

SEQ ID NO: 2062885 - RNA, 19 nt, Artificial Sequence
  Description of Artificial Sequence: Synthetic oligonucleotide
aguccacagaagcccagug

SEQ ID NO: 2062886 - RNA, 19 nt, Artificial Sequence
  Description of Artificial Sequence: Synthetic oligonucleotide
agcagucucacaccuugga

SEQ ID NO: 2062887 - RNA, 19 nt, Artificial Sequence
  Description of Artificial Sequence: Synthetic oligonucleotide
uugucuuagcagucucaca

SEQ ID NO: 2062888 - RNA, 19 nt, Artificial Sequence
  Description of Artificial Sequence: Synthetic oligonucleotide
aacuuucugaggugagcuu

SEQ ID NO: 2062889 - RNA, 19 nt, Artificial Sequence
  Description of Artificial Sequence: Synthetic oligonucleotide
uucugaggugagcuucuac

SEQ ID NO: 2062890 - RNA, 19 nt, Artificial Sequence
  Description of Artificial Sequence: Synthetic oligonucleotide
uucgaaguugcugcagcca

SEQ ID NO: 2062891 - RNA, 19 nt, Artificial Sequence
  Description of Artificial Sequence: Synthetic oligonucleotide
cuuaggccccuucuugcgc

SEQ ID NO: 2062892 - RNA, 19 nt, Artificial Sequence
  Description of Artificial Sequence: Synthetic oligonucleotide
gacgagagccgaauaacuc

SEQ ID NO: 2062893 - RNA, 19 nt, Artificial Sequence
  Description of Artificial Sequence: Synthetic oligonucleotide
gaauaacucucggauggca

SEQ ID NO: 2062894 - RNA, 19 nt, Artificial Sequence
  Description of Artificial Sequence: Synthetic oligonucleotide
uaccuagccuucuggacuc

SEQ ID NO: 2062895 - RNA, 19 nt, Artificial Sequence
  Description of Artificial Sequence: Synthetic oligonucleotide
uccucggucugagucagug

SEQ ID NO: 2062896 - RNA, 19 nt, Artificial Sequence
  Description of Artificial Sequence: Synthetic oligonucleotide
aggagaaaaggcauuccgu

SEQ ID NO: 2062897 - RNA, 19 nt, Artificial Sequence
  Description of Artificial Sequence: Synthetic oligonucleotide
auacguggacguccacagg

SEQ ID NO: 2062898 - RNA, 19 nt, Artificial Sequence
  Description of Artificial Sequence: Synthetic oligonucleotide
gagagccgaauaacucucg

SEQ ID NO: 2062899 - RNA, 19 nt, Artificial Sequence
  Description of Artificial Sequence: Synthetic oligonucleotide
uuugcucccuccaccggaa

SEQ ID NO: 2062900 - RNA, 19 nt, Artificial Sequence
  Description of Artificial Sequence: Synthetic oligonucleotide
ugcaauagagcugcuccuc

SEQ ID NO: 2062901 - RNA, 19 nt, Artificial Sequence
  Description of Artificial Sequence: Synthetic oligonucleotide
gacccaacuuucugaggug

SEQ ID NO: 2062902 - RNA, 19 nt, Artificial Sequence
  Description of Artificial Sequence: Synthetic oligonucleotide
aagcuaaaaccagguccag

SEQ ID NO: 2062903 - RNA, 19 nt, Artificial Sequence
  Description of Artificial Sequence: Synthetic oligonucleotide
cagacgagagccgaauaac

SEQ ID NO: 2062904 - RNA, 19 nt, Artificial Sequence
  Description of Artificial Sequence: Synthetic oligonucleotide
uuggaauuucugagccacu

SEQ ID NO: 2062905 - RNA, 19 nt, Artificial Sequence
  Description of Artificial Sequence: Synthetic oligonucleotide
uggacacgggauagaggcc

SEQ ID NO: 2062906 - RNA, 19 nt, Artificial Sequence
  Description of Artificial Sequence: Synthetic oligonucleotide
ggcuuugcucccuccaccg

SEQ ID NO: 2062907 - RNA, 19 nt, Artificial Sequence
  Description of Artificial Sequence: Synthetic oligonucleotide
uagucaugcuuggcgaucu

SEQ ID NO: 2062908 - RNA, 19 nt, Artificial Sequence
  Description of Artificial Sequence: Synthetic oligonucleotide
uuggugcccaccccuggca

SEQ ID NO: 2062909 - RNA, 19 nt, Artificial Sequence
  Description of Artificial Sequence: Synthetic oligonucleotide
gagccgaauaacucucgga

SEQ ID NO: 2062910 - RNA, 19 nt, Artificial Sequence
  Description of Artificial Sequence: Synthetic oligonucleotide
auacauaacgggcccggua

SEQ ID NO: 2062911 - RNA, 19 nt, Artificial Sequence
  Description of Artificial Sequence: Synthetic oligonucleotide
ucucacaccuuggaauuuc

SEQ ID NO: 2062912 - RNA, 19 nt, Artificial Sequence
  Description of Artificial Sequence: Synthetic oligonucleotide
cugccauacguggacgucc

SEQ ID NO: 2062913 - RNA, 19 nt, Artificial Sequence
  Description of Artificial Sequence: Synthetic oligonucleotide
cagaagcuaaaaccagguc

SEQ ID NO: 2062914 - RNA, 19 nt, Artificial Sequence
  Description of Artificial Sequence: Synthetic oligonucleotide
cauaacgggcccgguaccc

SEQ ID NO: 2062915 - RNA, 19 nt, Artificial Sequence
  Description of Artificial Sequence: Synthetic oligonucleotide
cacauacauaacgggcccg

SEQ ID NO: 2062916 - RNA, 19 nt, Artificial Sequence
  Description of Artificial Sequence: Synthetic oligonucleotide
cuuggugcccaccccuggc

SEQ ID NO: 2062917 - RNA, 19 nt, Artificial Sequence
  Description of Artificial Sequence: Synthetic oligonucleotide
ccagccguagucaugcuug

SEQ ID NO: 2062918 - RNA, 19 nt, Artificial Sequence
  Description of Artificial Sequence: Synthetic oligonucleotide
gugccagccguagucaugc

SEQ ID NO: 2062919 - RNA, 19 nt, Artificial Sequence
  Description of Artificial Sequence: Synthetic oligonucleotide
agacgagagccgaauaacu

SEQ ID NO: 2062920 - RNA, 19 nt, Artificial Sequence
  Description of Artificial Sequence: Synthetic oligonucleotide
aucugccauacguggacgu

SEQ ID NO: 2062921 - RNA, 19 nt, Artificial Sequence
  Description of Artificial Sequence: Synthetic oligonucleotide
cuuuggcgcuggcacauac

SEQ ID NO: 2062922 - RNA, 19 nt, Artificial Sequence
  Description of Artificial Sequence: Synthetic oligonucleotide
aagugggaguccacagaag

SEQ ID NO: 2062923 - RNA, 19 nt, Artificial Sequence
  Description of Artificial Sequence: Synthetic oligonucleotide
cugcuccucggucugaguc

SEQ ID NO: 2062924 - RNA, 19 nt, Artificial Sequence
  Description of Artificial Sequence: Synthetic oligonucleotide
gcagagagccuuaugggcc

SEQ ID NO: 2062925 - RNA, 19 nt, Artificial Sequence
  Description of Artificial Sequence: Synthetic oligonucleotide
agagcguggacacgggaua

SEQ ID NO: 2062926 - RNA, 19 nt, Artificial Sequence
  Description of Artificial Sequence: Synthetic oligonucleotide
gcucuugucuccucgguac

SEQ ID NO: 2062927 - RNA, 19 nt, Artificial Sequence
  Description of Artificial Sequence: Synthetic oligonucleotide
gcacauacauaacgggccc

SEQ ID NO: 2062928 - RNA, 19 nt, Artificial Sequence
  Description of Artificial Sequence: Synthetic oligonucleotide
guuggcgcagaucagcacu

SEQ ID NO: 2062929 - RNA, 19 nt, Artificial Sequence
  Description of Artificial Sequence: Synthetic oligonucleotide
ggaagcuaugguaaaugac

SEQ ID NO: 2062930 - RNA, 19 nt, Artificial Sequence
  Description of Artificial Sequence: Synthetic oligonucleotide
ggccauuaagcagaugcag

SEQ ID NO: 2062931 - RNA, 19 nt, Artificial Sequence
  Description of Artificial Sequence: Synthetic oligonucleotide
uccccacagauuccggaaa

SEQ ID NO: 2062932 - RNA, 19 nt, Artificial Sequence
  Description of Artificial Sequence: Synthetic oligonucleotide
agacgcagcucagagcgug

SEQ ID NO: 2062933 - RNA, 19 nt, Artificial Sequence
  Description of Artificial Sequence: Synthetic oligonucleotide
acagcacugcuugagccca

SEQ ID NO: 2062934 - RNA, 19 nt, Artificial Sequence
  Description of Artificial Sequence: Synthetic oligonucleotide
uggacucuuaggccccuuc

SEQ ID NO: 2062935 - RNA, 19 nt, Artificial Sequence
  Description of Artificial Sequence: Synthetic oligonucleotide
cacagccguucuaccaugc

SEQ ID NO: 2062936 - RNA, 19 nt, Artificial Sequence
  Description of Artificial Sequence: Synthetic oligonucleotide
cucagagcguggacacggg

SEQ ID NO: 2062937 - RNA, 19 nt, Artificial Sequence
  Description of Artificial Sequence: Synthetic oligonucleotide
aguuucccaguucuuuauu

SEQ ID NO: 2062938 - RNA, 19 nt, Artificial Sequence
  Description of Artificial Sequence: Synthetic oligonucleotide
ggacacgggauagaggccc

SEQ ID NO: 2062939 - RNA, 19 nt, Artificial Sequence
  Description of Artificial Sequence: Synthetic oligonucleotide
guggacguccacaggcacg

SEQ ID NO: 2062940 - RNA, 19 nt, Artificial Sequence
  Description of Artificial Sequence: Synthetic oligonucleotide
gggaagcuaugguaaauga

SEQ ID NO: 2062941 - RNA, 19 nt, Artificial Sequence
  Description of Artificial Sequence: Synthetic oligonucleotide
cuuugcucccuccaccgga

SEQ ID NO: 2062942 - RNA, 19 nt, Artificial Sequence
  Description of Artificial Sequence: Synthetic oligonucleotide
cuuagcuugggauguggua

SEQ ID NO: 2062943 - RNA, 19 nt, Artificial Sequence
  Description of Artificial Sequence: Synthetic oligonucleotide
cauuccguggggucuuguc

SEQ ID NO: 2062944 - RNA, 19 nt, Artificial Sequence
  Description of Artificial Sequence: Synthetic oligonucleotide
acggccugggguuugucaa

SEQ ID NO: 2062945 - RNA, 19 nt, Artificial Sequence
  Description of Artificial Sequence: Synthetic oligonucleotide
gagcguggacacgggauag

SEQ ID NO: 2062946 - RNA, 19 nt, Artificial Sequence
  Description of Artificial Sequence: Synthetic oligonucleotide
guacuuguguaaggcuucc

SEQ ID NO: 2062947 - RNA, 19 nt, Artificial Sequence
  Description of Artificial Sequence: Synthetic oligonucleotide
gaaugagucgagguccaaa

SEQ ID NO: 2062948 - RNA, 19 nt, Artificial Sequence
  Description of Artificial Sequence: Synthetic oligonucleotide
cugaaugagucgaggucca

SEQ ID NO: 2062949 - RNA, 19 nt, Artificial Sequence
  Description of Artificial Sequence: Synthetic oligonucleotide
agcuaaaaccagguccaga

SEQ ID NO: 2062950 - RNA, 19 nt, Artificial Sequence
  Description of Artificial Sequence: Synthetic oligonucleotide
cagccguagucaugcuugg

SEQ ID NO: 2062951 - RNA, 19 nt, Artificial Sequence
  Description of Artificial Sequence: Synthetic oligonucleotide
gccgaauaacucucggaug

SEQ ID NO: 2062952 - RNA, 19 nt, Artificial Sequence
  Description of Artificial Sequence: Synthetic oligonucleotide
uggcucuugucuccucggu

SEQ ID NO: 2062953 - RNA, 19 nt, Artificial Sequence
  Description of Artificial Sequence: Synthetic oligonucleotide
ucaugcugccaggcagacg

SEQ ID NO: 2062954 - RNA, 19 nt, Artificial Sequence
  Description of Artificial Sequence: Synthetic oligonucleotide
ggcucgggcccuuagcuug

SEQ ID NO: 2062955 - RNA, 19 nt, Artificial Sequence
  Description of Artificial Sequence: Synthetic oligonucleotide
acccaacuuucugagguga

SEQ ID NO: 2062956 - RNA, 19 nt, Artificial Sequence
  Description of Artificial Sequence: Synthetic oligonucleotide
caccggaaagaacugucca

SEQ ID NO: 2062957 - RNA, 19 nt, Artificial Sequence
  Description of Artificial Sequence: Synthetic oligonucleotide
cuuggcgaucugccauacg

SEQ ID NO: 2062958 - RNA, 19 nt, Artificial Sequence
  Description of Artificial Sequence: Synthetic oligonucleotide
agucgagguccaaaggccu

SEQ ID NO: 2062959 - RNA, 19 nt, Artificial Sequence
  Description of Artificial Sequence: Synthetic oligonucleotide
agccguagucaugcuuggc

SEQ ID NO: 2062960 - RNA, 19 nt, Artificial Sequence
  Description of Artificial Sequence: Synthetic oligonucleotide
gguagagugccagccguag

SEQ ID NO: 2062961 - RNA, 19 nt, Artificial Sequence
  Description of Artificial Sequence: Synthetic oligonucleotide
cagcccgccuuucucuucc

SEQ ID NO: 2062962 - RNA, 19 nt, Artificial Sequence
  Description of Artificial Sequence: Synthetic oligonucleotide
guacccuagacccaacuuu

SEQ ID NO: 2062963 - RNA, 19 nt, Artificial Sequence
  Description of Artificial Sequence: Synthetic oligonucleotide
agccagcccgccuuucucu

SEQ ID NO: 2062964 - RNA, 19 nt, Artificial Sequence
  Description of Artificial Sequence: Synthetic oligonucleotide
ugcuuggcgaucugccaua

SEQ ID NO: 2062965 - RNA, 19 nt, Artificial Sequence
  Description of Artificial Sequence: Synthetic oligonucleotide
ucugccauacguggacguc

SEQ ID NO: 2062966 - RNA, 19 nt, Artificial Sequence
  Description of Artificial Sequence: Synthetic oligonucleotide
gagccugguuugguuggcg

SEQ ID NO: 2062967 - RNA, 19 nt, Artificial Sequence
  Description of Artificial Sequence: Synthetic oligonucleotide
cgaugcuucaugcugccag

SEQ ID NO: 2062968 - RNA, 19 nt, Artificial Sequence
  Description of Artificial Sequence: Synthetic oligonucleotide
ugauucgagcaauguuguu

SEQ ID NO: 2062969 - RNA, 19 nt, Artificial Sequence
  Description of Artificial Sequence: Synthetic oligonucleotide
uucuugcgcuuugcuggcg

SEQ ID NO: 2062970 - RNA, 19 nt, Artificial Sequence
  Description of Artificial Sequence: Synthetic oligonucleotide
ccuaccuagccuucuggac

SEQ ID NO: 2062971 - RNA, 19 nt, Artificial Sequence
  Description of Artificial Sequence: Synthetic oligonucleotide
uggggaagcuaugguaaau

SEQ ID NO: 2062972 - RNA, 19 nt, Artificial Sequence
  Description of Artificial Sequence: Synthetic oligonucleotide
ccuagacccaacuuucuga

SEQ ID NO: 2062973 - RNA, 19 nt, Artificial Sequence
  Description of Artificial Sequence: Synthetic oligonucleotide
guagucaugcuuggcgauc

SEQ ID NO: 2062974 - RNA, 19 nt, Artificial Sequence
  Description of Artificial Sequence: Synthetic oligonucleotide
cagucucacaccuuggaau

SEQ ID NO: 2062975 - RNA, 19 nt, Artificial Sequence
  Description of Artificial Sequence: Synthetic oligonucleotide
ggugagcuucuaccucugg

SEQ ID NO: 2062976 - RNA, 19 nt, Artificial Sequence
  Description of Artificial Sequence: Synthetic oligonucleotide
caacuuucugaggugagcu

SEQ ID NO: 2062977 - RNA, 19 nt, Artificial Sequence
  Description of Artificial Sequence: Synthetic oligonucleotide
uacggggcuuuucgaaguu

SEQ ID NO: 2062978 - RNA, 19 nt, Artificial Sequence
  Description of Artificial Sequence: Synthetic oligonucleotide
gcagacgagagccgaauaa

SEQ ID NO: 2062979 - RNA, 19 nt, Artificial Sequence
  Description of Artificial Sequence: Synthetic oligonucleotide
cgcagaucagcacugaaca

SEQ ID NO: 2062980 - RNA, 19 nt, Artificial Sequence
  Description of Artificial Sequence: Synthetic oligonucleotide
uucuaccaugccagugauu

SEQ ID NO: 2062981 - RNA, 19 nt, Artificial Sequence
  Description of Artificial Sequence: Synthetic oligonucleotide
gucugagucaguguccaua

SEQ ID NO: 2062982 - RNA, 19 nt, Artificial Sequence
  Description of Artificial Sequence: Synthetic oligonucleotide
cagaacgccacuccagugu

SEQ ID NO: 2062983 - RNA, 19 nt, Artificial Sequence
  Description of Artificial Sequence: Synthetic oligonucleotide
auaacgggcccgguacccu

SEQ ID NO: 2062984 - RNA, 19 nt, Artificial Sequence
  Description of Artificial Sequence: Synthetic oligonucleotide
gcugccaggcagacgagag

SEQ ID NO: 2062985 - RNA, 19 nt, Artificial Sequence
  Description of Artificial Sequence: Synthetic oligonucleotide
ugcgcuuugcuggcggcuc

SEQ ID NO: 2062986 - RNA, 19 nt, Artificial Sequence
  Description of Artificial Sequence: Synthetic oligonucleotide
gucgagguccaaaggccug

SEQ ID NO: 2062987 - RNA, 19 nt, Artificial Sequence
  Description of Artificial Sequence: Synthetic oligonucleotide
agggugggccugccgaccu

SEQ ID NO: 2062988 - RNA, 19 nt, Artificial Sequence
  Description of Artificial Sequence: Synthetic oligonucleotide
cucgguacacagugcaaua

SEQ ID NO: 2062989 - RNA, 19 nt, Artificial Sequence
  Description of Artificial Sequence: Synthetic oligonucleotide
gguccuaccuagccuucug

SEQ ID NO: 2062990 - RNA, 19 nt, Artificial Sequence
  Description of Artificial Sequence: Synthetic oligonucleotide
gaccagcuagggccucaag

SEQ ID NO: 2062991 - RNA, 19 nt, Artificial Sequence
  Description of Artificial Sequence: Synthetic oligonucleotide
ugggccugccgaccuggcu

SEQ ID NO: 2062992 - RNA, 19 nt, Artificial Sequence
  Description of Artificial Sequence: Synthetic oligonucleotide
cagugcaauagagcugcuc

SEQ ID NO: 2062993 - RNA, 19 nt, Artificial Sequence
  Description of Artificial Sequence: Synthetic oligonucleotide
ugaaugagucgagguccaa

SEQ ID NO: 2062994 - RNA, 19 nt, Artificial Sequence
  Description of Artificial Sequence: Synthetic oligonucleotide
uaacgggcccgguacccua

SEQ ID NO: 2062995 - RNA, 19 nt, Artificial Sequence
  Description of Artificial Sequence: Synthetic oligonucleotide
cagcugaaaguacuugugu

SEQ ID NO: 2062996 - RNA, 19 nt, Artificial Sequence
  Description of Artificial Sequence: Synthetic oligonucleotide
gaacgccacuccagugugc

SEQ ID NO: 2062997 - RNA, 19 nt, Artificial Sequence
  Description of Artificial Sequence: Synthetic oligonucleotide
gcuuugcucccuccaccgg

SEQ ID NO: 2062998 - RNA, 19 nt, Artificial Sequence
  Description of Artificial Sequence: Synthetic oligonucleotide
ccgagccugguuugguugg

SEQ ID NO: 2062999 - RNA, 19 nt, Artificial Sequence
  Description of Artificial Sequence: Synthetic oligonucleotide
gggcccgguacccuagacc

SEQ ID NO: 2063000 - RNA, 19 nt, Artificial Sequence
  Description of Artificial Sequence: Synthetic oligonucleotide
agccaccuuggugcccacc

SEQ ID NO: 2063001 - RNA, 19 nt, Artificial Sequence
  Description of Artificial Sequence: Synthetic oligonucleotide
cucuugucuccucgguaca

SEQ ID NO: 2063002 - RNA, 19 nt, Artificial Sequence
  Description of Artificial Sequence: Synthetic oligonucleotide
cugccagaacgccacucca

SEQ ID NO: 2063003 - RNA, 19 nt, Artificial Sequence
  Description of Artificial Sequence: Synthetic oligonucleotide
acggggcuuuucgaaguug

SEQ ID NO: 2063004 - RNA, 19 nt, Artificial Sequence
  Description of Artificial Sequence: Synthetic oligonucleotide
cccaacuuucugaggugag

SEQ ID NO: 2063005 - RNA, 19 nt, Artificial Sequence
  Description of Artificial Sequence: Synthetic oligonucleotide
cggggcuuuucgaaguugc

SEQ ID NO: 2063006 - RNA, 19 nt, Artificial Sequence
  Description of Artificial Sequence: Synthetic oligonucleotide
ggugggccugccgaccugg

SEQ ID NO: 2063007 - RNA, 19 nt, Artificial Sequence
  Description of Artificial Sequence: Synthetic oligonucleotide
gguccccacagauuccgga

SEQ ID NO: 2063008 - RNA, 19 nt, Artificial Sequence
  Description of Artificial Sequence: Synthetic oligonucleotide
uucgagcaauguuguuguu

SEQ ID NO: 2063009 - RNA, 19 nt, Artificial Sequence
  Description of Artificial Sequence: Synthetic oligonucleotide
cccuagacccaacuuucug

SEQ ID NO: 2063010 - RNA, 19 nt, Artificial Sequence
  Description of Artificial Sequence: Synthetic oligonucleotide
cgagagccgaauaacucuc

SEQ ID NO: 2063011 - RNA, 19 nt, Artificial Sequence
  Description of Artificial Sequence: Synthetic oligonucleotide
aagggccauuaagcagaug

SEQ ID NO: 2063012 - RNA, 19 nt, Artificial Sequence
  Description of Artificial Sequence: Synthetic oligonucleotide
ucgggcccuuagcuuggga

SEQ ID NO: 2063013 - RNA, 19 nt, Artificial Sequence
  Description of Artificial Sequence: Synthetic oligonucleotide
gcagucucacaccuuggaa

SEQ ID NO: 2063014 - RNA, 19 nt, Artificial Sequence
  Description of Artificial Sequence: Synthetic oligonucleotide
cuggcggcucccgagccug

SEQ ID NO: 2063015 - RNA, 19 nt, Artificial Sequence
  Description of Artificial Sequence: Synthetic oligonucleotide
ggccucaaggcuggggaag

SEQ ID NO: 2063016 - RNA, 19 nt, Artificial Sequence
  Description of Artificial Sequence: Synthetic oligonucleotide
cguucuaccaugccaguga

SEQ ID NO: 2063017 - RNA, 19 nt, Artificial Sequence
  Description of Artificial Sequence: Synthetic oligonucleotide
gcgcagaucagcacugaac

SEQ ID NO: 2063018 - RNA, 19 nt, Artificial Sequence
  Description of Artificial Sequence: Synthetic oligonucleotide
acguggacguccacaggca

SEQ ID NO: 2063019 - RNA, 19 nt, Artificial Sequence
  Description of Artificial Sequence: Synthetic oligonucleotide
acgccacuccagugugcag

SEQ ID NO: 2063020 - RNA, 19 nt, Artificial Sequence
  Description of Artificial Sequence: Synthetic oligonucleotide
ccagaacgccacuccagug

SEQ ID NO: 2063021 - RNA, 19 nt, Artificial Sequence
  Description of Artificial Sequence: Synthetic oligonucleotide
ccagaagcuaaaaccaggu

SEQ ID NO: 2063022 - RNA, 19 nt, Artificial Sequence
  Description of Artificial Sequence: Synthetic oligonucleotide
gguuugucaagggccauua

SEQ ID NO: 2063023 - RNA, 19 nt, Artificial Sequence
  Description of Artificial Sequence: Synthetic oligonucleotide
cccgagccugguuugguug

SEQ ID NO: 2063024 - RNA, 19 nt, Artificial Sequence
  Description of Artificial Sequence: Synthetic oligonucleotide
gcacagccguucuaccaug

SEQ ID NO: 2063025 - RNA, 19 nt, Artificial Sequence
  Description of Artificial Sequence: Synthetic oligonucleotide
acacgggauagaggcccag

SEQ ID NO: 2063026 - RNA, 19 nt, Artificial Sequence
  Description of Artificial Sequence: Synthetic oligonucleotide
cagagagccuuaugggccu

SEQ ID NO: 2063027 - RNA, 19 nt, Artificial Sequence
  Description of Artificial Sequence: Synthetic oligonucleotide
acccuagacccaacuuucu

SEQ ID NO: 2063028 - RNA, 19 nt, Artificial Sequence
  Description of Artificial Sequence: Synthetic oligonucleotide
cuuugcuggcggcucccga

SEQ ID NO: 2063029 - RNA, 19 nt, Artificial Sequence
  Description of Artificial Sequence: Synthetic oligonucleotide
gcuccucggucugagucag

SEQ ID NO: 2063030 - RNA, 19 nt, Artificial Sequence
  Description of Artificial Sequence: Synthetic oligonucleotide
agguccccacagauuccgg

SEQ ID NO: 2063031 - RNA, 19 nt, Artificial Sequence
  Description of Artificial Sequence: Synthetic oligonucleotide
cagagcguggacacgggau

SEQ ID NO: 2063032 - RNA, 19 nt, Artificial Sequence
  Description of Artificial Sequence: Synthetic oligonucleotide
cccaguggcuauacagcug

SEQ ID NO: 2063033 - RNA, 19 nt, Artificial Sequence
  Description of Artificial Sequence: Synthetic oligonucleotide
cagugauucgagcaauguu

SEQ ID NO: 2063034 - RNA, 19 nt, Artificial Sequence
  Description of Artificial Sequence: Synthetic oligonucleotide
guagagugccagccguagu

SEQ ID NO: 2063035 - RNA, 19 nt, Artificial Sequence
  Description of Artificial Sequence: Synthetic oligonucleotide
ccggaaagaacuguccaga

SEQ ID NO: 2063036 - RNA, 19 nt, Artificial Sequence
  Description of Artificial Sequence: Synthetic oligonucleotide
gggccauuaagcagaugca

SEQ ID NO: 2063037 - RNA, 19 nt, Artificial Sequence
  Description of Artificial Sequence: Synthetic oligonucleotide
cagagugcagagagccuua

SEQ ID NO: 2063038 - RNA, 19 nt, Artificial Sequence
  Description of Artificial Sequence: Synthetic oligonucleotide
gcuauacagcugagccagg

SEQ ID NO: 2063039 - RNA, 19 nt, Artificial Sequence
  Description of Artificial Sequence: Synthetic oligonucleotide
caccccuggcagagugcag

SEQ ID NO: 2063040 - RNA, 19 nt, Artificial Sequence
  Description of Artificial Sequence: Synthetic oligonucleotide
gaguccacagaagcccagu

SEQ ID NO: 2063041 - RNA, 19 nt, Artificial Sequence
  Description of Artificial Sequence: Synthetic oligonucleotide
ggacucuuaggccccuucu

SEQ ID NO: 2063042 - RNA, 19 nt, Artificial Sequence
  Description of Artificial Sequence: Synthetic oligonucleotide
cgaauaacucucggauggc

SEQ ID NO: 2063043 - RNA, 19 nt, Artificial Sequence
  Description of Artificial Sequence: Synthetic oligonucleotide
ggcacagccguucuaccau

SEQ ID NO: 2063044 - RNA, 19 nt, Artificial Sequence
  Description of Artificial Sequence: Synthetic oligonucleotide
ugccgaccuggcucuuguc

SEQ ID NO: 2063045 - RNA, 19 nt, Artificial Sequence
  Description of Artificial Sequence: Synthetic oligonucleotide
cgaccuggcucuugucucc

SEQ ID NO: 2063046 - RNA, 19 nt, Artificial Sequence
  Description of Artificial Sequence: Synthetic oligonucleotide
gguacccuagacccaacuu

SEQ ID NO: 2063047 - RNA, 19 nt, Artificial Sequence
  Description of Artificial Sequence: Synthetic oligonucleotide
guccccuggguccuaccua

SEQ ID NO: 2063048 - RNA, 19 nt, Artificial Sequence
  Description of Artificial Sequence: Synthetic oligonucleotide
gaucugccagaacgccacu

SEQ ID NO: 2063049 - RNA, 19 nt, Artificial Sequence
  Description of Artificial Sequence: Synthetic oligonucleotide
ccauacguggacguccaca

SEQ ID NO: 2063050 - RNA, 19 nt, Artificial Sequence
  Description of Artificial Sequence: Synthetic oligonucleotide
gccagaacgccacuccagu

SEQ ID NO: 2063051 - RNA, 19 nt, Artificial Sequence
  Description of Artificial Sequence: Synthetic oligonucleotide
cuagggccucaaggcuggg

SEQ ID NO: 2063052 - RNA, 19 nt, Artificial Sequence
  Description of Artificial Sequence: Synthetic oligonucleotide
caccuuggugcccaccccu

SEQ ID NO: 2063053 - RNA, 19 nt, Artificial Sequence
  Description of Artificial Sequence: Synthetic oligonucleotide
cguggggucuugucuuagc

SEQ ID NO: 2063054 - RNA, 19 nt, Artificial Sequence
  Description of Artificial Sequence: Synthetic oligonucleotide
cucgggcccuuagcuuggg

SEQ ID NO: 2063055 - RNA, 19 nt, Artificial Sequence
  Description of Artificial Sequence: Synthetic oligonucleotide
ccaccuuggugcccacccc

SEQ ID NO: 2063056 - RNA, 19 nt, Artificial Sequence
  Description of Artificial Sequence: Synthetic oligonucleotide
ggggcucgggcccuuagcu

SEQ ID NO: 2063057 - RNA, 19 nt, Artificial Sequence
  Description of Artificial Sequence: Synthetic oligonucleotide
ccuuaugggccucuucaua

SEQ ID NO: 2063058 - RNA, 19 nt, Artificial Sequence
  Description of Artificial Sequence: Synthetic oligonucleotide
gcucgggcccuuagcuugg

SEQ ID NO: 2063059 - RNA, 19 nt, Artificial Sequence
  Description of Artificial Sequence: Synthetic oligonucleotide
ggcgcagaucagcacugaa

SEQ ID NO: 2063060 - RNA, 19 nt, Artificial Sequence
  Description of Artificial Sequence: Synthetic oligonucleotide
acgggcccgguacccuaga

SEQ ID NO: 2063061 - RNA, 19 nt, Artificial Sequence
  Description of Artificial Sequence: Synthetic oligonucleotide
ccguucuaccaugccagug

SEQ ID NO: 2063062 - RNA, 19 nt, Artificial Sequence
  Description of Artificial Sequence: Synthetic oligonucleotide
agcccgccuuucucuucca

SEQ ID NO: 2063063 - RNA, 19 nt, Artificial Sequence
  Description of Artificial Sequence: Synthetic oligonucleotide
ggccccuucuugcgcuuug

SEQ ID NO: 2063064 - RNA, 19 nt, Artificial Sequence
  Description of Artificial Sequence: Synthetic oligonucleotide
cguggacguccacaggcac

SEQ ID NO: 2063065 - RNA, 19 nt, Artificial Sequence
  Description of Artificial Sequence: Synthetic oligonucleotide
cauacauaacgggcccggu

SEQ ID NO: 2063066 - RNA, 19 nt, Artificial Sequence
  Description of Artificial Sequence: Synthetic oligonucleotide
gcuuggcgaucugccauac

SEQ ID NO: 2063067 - RNA, 19 nt, Artificial Sequence
  Description of Artificial Sequence: Synthetic oligonucleotide
accuagccuucuggacucu

SEQ ID NO: 2063068 - RNA, 19 nt, Artificial Sequence
  Description of Artificial Sequence: Synthetic oligonucleotide
cugagucaguguccauacu

SEQ ID NO: 2063069 - RNA, 19 nt, Artificial Sequence
  Description of Artificial Sequence: Synthetic oligonucleotide
ggcccuuagcuugggaugu

SEQ ID NO: 2063070 - RNA, 19 nt, Artificial Sequence
  Description of Artificial Sequence: Synthetic oligonucleotide
caagggccauuaagcagau

SEQ ID NO: 2063071 - RNA, 19 nt, Artificial Sequence
  Description of Artificial Sequence: Synthetic oligonucleotide
cugccgaccuggcucuugu

SEQ ID NO: 2063072 - RNA, 19 nt, Artificial Sequence
  Description of Artificial Sequence: Synthetic oligonucleotide
cuccaccggaaagaacugu

SEQ ID NO: 2063073 - RNA, 19 nt, Artificial Sequence
  Description of Artificial Sequence: Synthetic oligonucleotide
agggccgggcugggagguc

SEQ ID NO: 2063074 - RNA, 19 nt, Artificial Sequence
  Description of Artificial Sequence: Synthetic oligonucleotide
gccccuucuugcgcuuugc

SEQ ID NO: 2063075 - RNA, 19 nt, Artificial Sequence
  Description of Artificial Sequence: Synthetic oligonucleotide
gccuuaugggccucuucau

SEQ ID NO: 2063076 - RNA, 19 nt, Artificial Sequence
  Description of Artificial Sequence: Synthetic oligonucleotide
cagaagcccaguggcuaua

SEQ ID NO: 2063077 - RNA, 19 nt, Artificial Sequence
  Description of Artificial Sequence: Synthetic oligonucleotide
ccagugauucgagcaaugu

SEQ ID NO: 2063078 - RNA, 19 nt, Artificial Sequence
  Description of Artificial Sequence: Synthetic oligonucleotide
gccauacguggacguccac

SEQ ID NO: 2063079 - RNA, 19 nt, Artificial Sequence
  Description of Artificial Sequence: Synthetic oligonucleotide
gggugggccugccgaccug

SEQ ID NO: 2063080 - RNA, 19 nt, Artificial Sequence
  Description of Artificial Sequence: Synthetic oligonucleotide
cggccugggguuugucaag

SEQ ID NO: 2063081 - RNA, 19 nt, Artificial Sequence
  Description of Artificial Sequence: Synthetic oligonucleotide
ccagcccgccuuucucuuc

SEQ ID NO: 2063082 - RNA, 19 nt, Artificial Sequence
  Description of Artificial Sequence: Synthetic oligonucleotide
ggccugccgaccuggcucu

SEQ ID NO: 2063083 - RNA, 19 nt, Artificial Sequence
  Description of Artificial Sequence: Synthetic oligonucleotide
cagacgcagcucagagcgu

SEQ ID NO: 2063084 - RNA, 19 nt, Artificial Sequence
  Description of Artificial Sequence: Synthetic oligonucleotide
gcccuuagcuugggaugug

SEQ ID NO: 2063085 - RNA, 19 nt, Artificial Sequence
  Description of Artificial Sequence: Synthetic oligonucleotide
ggcuuuggcgcuggcacau

SEQ ID NO: 2063086 - RNA, 19 nt, Artificial Sequence
  Description of Artificial Sequence: Synthetic oligonucleotide
gcuugggaugugguagagu

SEQ ID NO: 2063087 - RNA, 19 nt, Artificial Sequence
  Description of Artificial Sequence: Synthetic oligonucleotide
gcgcuggcacauacauaac

SEQ ID NO: 2063088 - RNA, 19 nt, Artificial Sequence
  Description of Artificial Sequence: Synthetic oligonucleotide
ccugccgaccuggcucuug

SEQ ID NO: 2063089 - RNA, 19 nt, Artificial Sequence
  Description of Artificial Sequence: Synthetic oligonucleotide
ggacguccacaggcacggc

SEQ ID NO: 2063090 - RNA, 19 nt, Artificial Sequence
  Description of Artificial Sequence: Synthetic oligonucleotide
gccagccguagucaugcuu

SEQ ID NO: 2063091 - RNA, 19 nt, Artificial Sequence
  Description of Artificial Sequence: Synthetic oligonucleotide
ggccgggcugggaggucag

SEQ ID NO: 2063092 - RNA, 19 nt, Artificial Sequence
  Description of Artificial Sequence: Synthetic oligonucleotide
cguagucaugcuuggcgau

SEQ ID NO: 2063093 - RNA, 19 nt, Artificial Sequence
  Description of Artificial Sequence: Synthetic oligonucleotide
cugggaggucagggugcga

SEQ ID NO: 2063094 - RNA, 19 nt, Artificial Sequence
  Description of Artificial Sequence: Synthetic oligonucleotide
ccucggucugagucagugu

SEQ ID NO: 2063095 - RNA, 19 nt, Artificial Sequence
  Description of Artificial Sequence: Synthetic oligonucleotide
gggcucgggcccuuagcuu

SEQ ID NO: 2063096 - RNA, 19 nt, Artificial Sequence
  Description of Artificial Sequence: Synthetic oligonucleotide
cgggcccgguacccuagac

SEQ ID NO: 2063097 - RNA, 19 nt, Artificial Sequence
  Description of Artificial Sequence: Synthetic oligonucleotide
ggcugacauccagcugaaa

SEQ ID NO: 2063098 - RNA, 19 nt, Artificial Sequence
  Description of Artificial Sequence: Synthetic oligonucleotide
cuccucggucugagucagu

SEQ ID NO: 2063099 - RNA, 19 nt, Artificial Sequence
  Description of Artificial Sequence: Synthetic oligonucleotide
gccagcccgccuuucucuu

SEQ ID NO: 2063100 - RNA, 19 nt, Artificial Sequence
  Description of Artificial Sequence: Synthetic oligonucleotide
ccccuucuugcgcuuugcu

SEQ ID NO: 2063101 - RNA, 19 nt, Artificial Sequence
  Description of Artificial Sequence: Synthetic oligonucleotide
gggguuugucaagggccau

SEQ ID NO: 2063102 - RNA, 19 nt, Artificial Sequence
  Description of Artificial Sequence: Synthetic oligonucleotide
gcuuuggcgcuggcacaua

SEQ ID NO: 2063103 - RNA, 19 nt, Artificial Sequence
  Description of Artificial Sequence: Synthetic oligonucleotide
cgguacccuagacccaacu

SEQ ID NO: 2063104 - RNA, 19 nt, Artificial Sequence
  Description of Artificial Sequence: Synthetic oligonucleotide
caggcacggccugggguuu

SEQ ID NO: 2063105 - RNA, 19 nt, Artificial Sequence
  Description of Artificial Sequence: Synthetic oligonucleotide
ggcggcucccgagccuggu

SEQ ID NO: 2063106 - RNA, 19 nt, Artificial Sequence
  Description of Artificial Sequence: Synthetic oligonucleotide
gcggcucccgagccugguu

SEQ ID NO: 2063107 - RNA, 19 nt, Artificial Sequence
  Description of Artificial Sequence: Synthetic oligonucleotide
uuagccucuaaguagaugc

SEQ ID NO: 2063108 - RNA, 19 nt, Artificial Sequence
  Description of Artificial Sequence: Synthetic oligonucleotide
  modified_base (10)..(10): a, c, u, g, unknown or other
ucuaaggggnguaaaagga

SEQ ID NO: 2063109 - RNA, 19 nt, Artificial Sequence
  Description of Artificial Sequence: Synthetic oligonucleotide
aauggcacaagcucacuac

SEQ ID NO: 2063110 - RNA, 19 nt, Artificial Sequence
  Description of Artificial Sequence: Synthetic oligonucleotide
aucaaaggcaucuagccgg

SEQ ID NO: 2063111 - RNA, 19 nt, Artificial Sequence
  Description of Artificial Sequence: Synthetic oligonucleotide
aaucaaaggcaucuagccg

SEQ ID NO: 2063112 - RNA, 19 nt, Artificial Sequence
  Description of Artificial Sequence: Synthetic oligonucleotide
aagaaguaggaacgggagc

SEQ ID NO: 2063113 - RNA, 19 nt, Artificial Sequence
  Description of Artificial Sequence: Synthetic oligonucleotide
agaaguaggaacgggagcc

SEQ ID NO: 2063114 - RNA, 19 nt, Artificial Sequence
  Description of Artificial Sequence: Synthetic oligonucleotide
uacaguaggagcagcaagg

SEQ ID NO: 2063115 - RNA, 19 nt, Artificial Sequence
  Description of Artificial Sequence: Synthetic oligonucleotide
aguaggagcagcaaggagc

SEQ ID NO: 2063116 - RNA, 19 nt, Artificial Sequence
  Description of Artificial Sequence: Synthetic oligonucleotide
acacaguacauucaccagc

SEQ ID NO: 2063117 - RNA, 19 nt, Artificial Sequence
  Description of Artificial Sequence: Synthetic oligonucleotide
aaggcaucuagccggcucc

SEQ ID NO: 2063118 - RNA, 19 nt, Artificial Sequence
  Description of Artificial Sequence: Synthetic oligonucleotide
uugaggauucgacuggugg

SEQ ID NO: 2063119 - RNA, 19 nt, Artificial Sequence
  Description of Artificial Sequence: Synthetic oligonucleotide
cauaccagcugccagagcc

SEQ ID NO: 2063120 - RNA, 19 nt, Artificial Sequence
  Description of Artificial Sequence: Synthetic oligonucleotide
uuuauugagugguaggcac

SEQ ID NO: 2063121 - RNA, 19 nt, Artificial Sequence
  Description of Artificial Sequence: Synthetic oligonucleotide
ucugugguguggaauagag

SEQ ID NO: 2063122 - RNA, 19 nt, Artificial Sequence
  Description of Artificial Sequence: Synthetic oligonucleotide
uaucuuaggggaauggcac

SEQ ID NO: 2063123 - RNA, 19 nt, Artificial Sequence
  Description of Artificial Sequence: Synthetic oligonucleotide
uguuuauugagugguaggc

SEQ ID NO: 2063124 - RNA, 19 nt, Artificial Sequence
  Description of Artificial Sequence: Synthetic oligonucleotide
aaagaaguaggaacgggag

SEQ ID NO: 2063125 - RNA, 19 nt, Artificial Sequence
  Description of Artificial Sequence: Synthetic oligonucleotide
aaaggcaucuagccggcuc

SEQ ID NO: 2063126 - RNA, 19 nt, Artificial Sequence
  Description of Artificial Sequence: Synthetic oligonucleotide
uggggaguaaggaggagcg

SEQ ID NO: 2063127 - RNA, 19 nt, Artificial Sequence
  Description of Artificial Sequence: Synthetic oligonucleotide
acaagcucacuacaguagg

SEQ ID NO: 2063128 - RNA, 19 nt, Artificial Sequence
  Description of Artificial Sequence: Synthetic oligonucleotide
uguacccugaagaagccca

SEQ ID NO: 2063129 - RNA, 19 nt, Artificial Sequence
  Description of Artificial Sequence: Synthetic oligonucleotide
gaggccaaacaccagguag

SEQ ID NO: 2063130 - RNA, 19 nt, Artificial Sequence
  Description of Artificial Sequence: Synthetic oligonucleotide
ucgacugguggucaggucc

SEQ ID NO: 2063131 - RNA, 19 nt, Artificial Sequence
  Description of Artificial Sequence: Synthetic oligonucleotide
aauucccacacgaagagga

SEQ ID NO: 2063132 - RNA, 19 nt, Artificial Sequence
  Description of Artificial Sequence: Synthetic oligonucleotide
aggggaauggcacaagcuc

SEQ ID NO: 2063133 - RNA, 19 nt, Artificial Sequence
  Description of Artificial Sequence: Synthetic oligonucleotide
agcgagagggcacagauga

SEQ ID NO: 2063134 - RNA, 19 nt, Artificial Sequence
  Description of Artificial Sequence: Synthetic oligonucleotide
  modified_base (8)..(8): a, c, u, g, unknown or other
uaaggggnguaaaaggaga

SEQ ID NO: 2063135 - RNA, 19 nt, Artificial Sequence
  Description of Artificial Sequence: Synthetic oligonucleotide
uugagugguaggcacagga

SEQ ID NO: 2063136 - RNA, 19 nt, Artificial Sequence
  Description of Artificial Sequence: Synthetic oligonucleotide
agcucacuacaguaggagc

SEQ ID NO: 2063137 - RNA, 19 nt, Artificial Sequence
  Description of Artificial Sequence: Synthetic oligonucleotide
  modified_base (9)..(9): a, c, u, g, unknown or other
cuaaggggnguaaaaggag

SEQ ID NO: 2063138 - RNA, 19 nt, Artificial Sequence
  Description of Artificial Sequence: Synthetic oligonucleotide
agaagcagccacgaguccc

SEQ ID NO: 2063139 - RNA, 19 nt, Artificial Sequence
  Description of Artificial Sequence: Synthetic oligonucleotide
gacucuguuuauugagugg

SEQ ID NO: 2063140 - RNA, 19 nt, Artificial Sequence
  Description of Artificial Sequence: Synthetic oligonucleotide
acagaugacgaagagggag

SEQ ID NO: 2063141 - RNA, 19 nt, Artificial Sequence
  Description of Artificial Sequence: Synthetic oligonucleotide
ucagauacguuguaccagu

SEQ ID NO: 2063142 - RNA, 19 nt, Artificial Sequence
  Description of Artificial Sequence: Synthetic oligonucleotide
cuaaguagaugcuagugga

SEQ ID NO: 2063143 - RNA, 19 nt, Artificial Sequence
  Description of Artificial Sequence: Synthetic oligonucleotide
uuaggggaauggcacaagc

SEQ ID NO: 2063144 - RNA, 19 nt, Artificial Sequence
  Description of Artificial Sequence: Synthetic oligonucleotide
uggucagauacguuguacc

SEQ ID NO: 2063145 - RNA, 19 nt, Artificial Sequence
  Description of Artificial Sequence: Synthetic oligonucleotide
auggcaccauaccagcugc

SEQ ID NO: 2063146 - RNA, 19 nt, Artificial Sequence
  Description of Artificial Sequence: Synthetic oligonucleotide
uucccuaggucauucacca

SEQ ID NO: 2063147 - RNA, 19 nt, Artificial Sequence
  Description of Artificial Sequence: Synthetic oligonucleotide
uguggaauagaggcugugg

SEQ ID NO: 2063148 - RNA, 19 nt, Artificial Sequence
  Description of Artificial Sequence: Synthetic oligonucleotide
ggucaaagaaguaggaacg

SEQ ID NO: 2063149 - RNA, 19 nt, Artificial Sequence
  Description of Artificial Sequence: Synthetic oligonucleotide
ugccuggucagauacguug

SEQ ID NO: 2063150 - RNA, 19 nt, Artificial Sequence
  Description of Artificial Sequence: Synthetic oligonucleotide
gacacgcaccagcagaagg

SEQ ID NO: 2063151 - RNA, 19 nt, Artificial Sequence
  Description of Artificial Sequence: Synthetic oligonucleotide
aguguggaagcagaggcgg

SEQ ID NO: 2063152 - RNA, 19 nt, Artificial Sequence
  Description of Artificial Sequence: Synthetic oligonucleotide
gauggcaccauaccagcug

SEQ ID NO: 2063153 - RNA, 19 nt, Artificial Sequence
  Description of Artificial Sequence: Synthetic oligonucleotide
ggaauagaggcuguggugg

SEQ ID NO: 2063154 - RNA, 19 nt, Artificial Sequence
  Description of Artificial Sequence: Synthetic oligonucleotide
gcuggcauagagcagaacc

SEQ ID NO: 2063155 - RNA, 19 nt, Artificial Sequence
  Description of Artificial Sequence: Synthetic oligonucleotide
agacucuguuuauugagug

SEQ ID NO: 2063156 - RNA, 19 nt, Artificial Sequence
  Description of Artificial Sequence: Synthetic oligonucleotide
aguggaaggggcucgccgg

SEQ ID NO: 2063157 - RNA, 19 nt, Artificial Sequence
  Description of Artificial Sequence: Synthetic oligonucleotide
acacgaagaggaugaggcc

SEQ ID NO: 2063158 - RNA, 19 nt, Artificial Sequence
  Description of Artificial Sequence: Synthetic oligonucleotide
ugagugguaggcacaggag

SEQ ID NO: 2063159 - RNA, 19 nt, Artificial Sequence
  Description of Artificial Sequence: Synthetic oligonucleotide
ucccacacgaagaggauga

SEQ ID NO: 2063160 - RNA, 19 nt, Artificial Sequence
  Description of Artificial Sequence: Synthetic oligonucleotide
uggaauagaggcuguggug

SEQ ID NO: 2063161 - RNA, 19 nt, Artificial Sequence
  Description of Artificial Sequence: Synthetic oligonucleotide
uuauugagugguaggcaca

SEQ ID NO: 2063162 - RNA, 19 nt, Artificial Sequence
  Description of Artificial Sequence: Synthetic oligonucleotide
uaguggaaggggcucgccg

SEQ ID NO: 2063163 - RNA, 19 nt, Artificial Sequence
  Description of Artificial Sequence: Synthetic oligonucleotide
caugccagggcacuguagc

SEQ ID NO: 2063164 - RNA, 19 nt, Artificial Sequence
  Description of Artificial Sequence: Synthetic oligonucleotide
guuguaacaggcccggcug

SEQ ID NO: 2063165 - RNA, 19 nt, Artificial Sequence
  Description of Artificial Sequence: Synthetic oligonucleotide
uauugagugguaggcacag

SEQ ID NO: 2063166 - RNA, 19 nt, Artificial Sequence
  Description of Artificial Sequence: Synthetic oligonucleotide
ugaggauucgacugguggu

SEQ ID NO: 2063167 - RNA, 19 nt, Artificial Sequence
  Description of Artificial Sequence: Synthetic oligonucleotide
guaggcacaggagagguag

SEQ ID NO: 2063168 - RNA, 19 nt, Artificial Sequence
  Description of Artificial Sequence: Synthetic oligonucleotide
cacaagcucacuacaguag

SEQ ID NO: 2063169 - RNA, 19 nt, Artificial Sequence
  Description of Artificial Sequence: Synthetic oligonucleotide
guaaaaggagaucaugucu

SEQ ID NO: 2063170 - RNA, 19 nt, Artificial Sequence
  Description of Artificial Sequence: Synthetic oligonucleotide
uguucccuaggucauucac

SEQ ID NO: 2063171 - RNA, 19 nt, Artificial Sequence
  Description of Artificial Sequence: Synthetic oligonucleotide
cuacaguaggagcagcaag

SEQ ID NO: 2063172 - RNA, 19 nt, Artificial Sequence
  Description of Artificial Sequence: Synthetic oligonucleotide
uggcacaagcucacuacag

SEQ ID NO: 2063173 - RNA, 19 nt, Artificial Sequence
  Description of Artificial Sequence: Synthetic oligonucleotide
gucaaagaaguaggaacgg

SEQ ID NO: 2063174 - RNA, 19 nt, Artificial Sequence
  Description of Artificial Sequence: Synthetic oligonucleotide
  modified_base (13)..(13): a, c, u, g, unknown or other
ugcucuaaggggnguaaaa

SEQ ID NO: 2063175 - RNA, 19 nt, Artificial Sequence
  Description of Artificial Sequence: Synthetic oligonucleotide
caugcuggugcucucacuc

SEQ ID NO: 2063176 - RNA, 19 nt, Artificial Sequence
  Description of Artificial Sequence: Synthetic oligonucleotide
acgagacagaggcaggcag

SEQ ID NO: 2063177 - RNA, 19 nt, Artificial Sequence
  Description of Artificial Sequence: Synthetic oligonucleotide
ugcccauugaggauucgac

SEQ ID NO: 2063178 - RNA, 19 nt, Artificial Sequence
  Description of Artificial Sequence: Synthetic oligonucleotide
agaggcggcaggucaugcc

SEQ ID NO: 2063179 - RNA, 19 nt, Artificial Sequence
  Description of Artificial Sequence: Synthetic oligonucleotide
uaggggaauggcacaagcu

SEQ ID NO: 2063180 - RNA, 19 nt, Artificial Sequence
  Description of Artificial Sequence: Synthetic oligonucleotide
cagcaauucccacacgaag

SEQ ID NO: 2063181 - RNA, 19 nt, Artificial Sequence
  Description of Artificial Sequence: Synthetic oligonucleotide
augccagggcacuguagcc

SEQ ID NO: 2063182 - RNA, 19 nt, Artificial Sequence
  Description of Artificial Sequence: Synthetic oligonucleotide
  modified_base (2)..(2): a, c, u, g, unknown or other
gnguaaaaggagaucaugu

SEQ ID NO: 2063183 - RNA, 19 nt, Artificial Sequence
  Description of Artificial Sequence: Synthetic oligonucleotide
gagguagcuggcuccagug

SEQ ID NO: 2063184 - RNA, 19 nt, Artificial Sequence
  Description of Artificial Sequence: Synthetic oligonucleotide
cucuaaguagaugcuagug

SEQ ID NO: 2063185 - RNA, 19 nt, Artificial Sequence
  Description of Artificial Sequence: Synthetic oligonucleotide
cacacaguacauucaccag

SEQ ID NO: 2063186 - RNA, 19 nt, Artificial Sequence
  Description of Artificial Sequence: Synthetic oligonucleotide
uccccuuagccucuaagua

SEQ ID NO: 2063187 - RNA, 19 nt, Artificial Sequence
  Description of Artificial Sequence: Synthetic oligonucleotide
gaggagagaagcagccacg

SEQ ID NO: 2063188 - RNA, 19 nt, Artificial Sequence
  Description of Artificial Sequence: Synthetic oligonucleotide
caaggagcuggccagagga

SEQ ID NO: 2063189 - RNA, 19 nt, Artificial Sequence
  Description of Artificial Sequence: Synthetic oligonucleotide
caucuagccggcuccgagg

SEQ ID NO: 2063190 - RNA, 19 nt, Artificial Sequence
  Description of Artificial Sequence: Synthetic oligonucleotide
ccaguguggaagcagaggc

SEQ ID NO: 2063191 - RNA, 19 nt, Artificial Sequence
  Description of Artificial Sequence: Synthetic oligonucleotide
  modified_base (7)..(7): a, c, u, g, unknown or other
aaggggnguaaaaggagau

SEQ ID NO: 2063192 - RNA, 19 nt, Artificial Sequence
  Description of Artificial Sequence: Synthetic oligonucleotide
caguguggaagcagaggcg

SEQ ID NO: 2063193 - RNA, 19 nt, Artificial Sequence
  Description of Artificial Sequence: Synthetic oligonucleotide
aaaccugcccauugaggau

SEQ ID NO: 2063194 - RNA, 19 nt, Artificial Sequence
  Description of Artificial Sequence: Synthetic oligonucleotide
gucagauacguuguaccag

SEQ ID NO: 2063195 - RNA, 19 nt, Artificial Sequence
  Description of Artificial Sequence: Synthetic oligonucleotide
  modified_base (18)..(18): a, c, u, g, unknown or other
cuaggugcucuaaggggng

SEQ ID NO: 2063196 - RNA, 19 nt, Artificial Sequence
  Description of Artificial Sequence: Synthetic oligonucleotide
agcccggucaaagaaguag

SEQ ID NO: 2063197 - RNA, 19 nt, Artificial Sequence
  Description of Artificial Sequence: Synthetic oligonucleotide
cugugguguggaauagagg

SEQ ID NO: 2063198 - RNA, 19 nt, Artificial Sequence
  Description of Artificial Sequence: Synthetic oligonucleotide
gauucgacugguggucagg

SEQ ID NO: 2063199 - RNA, 19 nt, Artificial Sequence
  Description of Artificial Sequence: Synthetic oligonucleotide
aauagaggcugugguggug

SEQ ID NO: 2063200 - RNA, 19 nt, Artificial Sequence
  Description of Artificial Sequence: Synthetic oligonucleotide
cacgcugguccccuuagcc

SEQ ID NO: 2063201 - RNA, 19 nt, Artificial Sequence
  Description of Artificial Sequence: Synthetic oligonucleotide
uccggcuaugcucccagga

SEQ ID NO: 2063202 - RNA, 19 nt, Artificial Sequence
  Description of Artificial Sequence: Synthetic oligonucleotide
auggcacaagcucacuaca

SEQ ID NO: 2063203 - RNA, 19 nt, Artificial Sequence
  Description of Artificial Sequence: Synthetic oligonucleotide
cugccggacaugcuggugc

SEQ ID NO: 2063204 - RNA, 19 nt, Artificial Sequence
  Description of Artificial Sequence: Synthetic oligonucleotide
  modified_base (3)..(3): a, c, u, g, unknown or other
ggnguaaaaggagaucaug

SEQ ID NO: 2063205 - RNA, 19 nt, Artificial Sequence
  Description of Artificial Sequence: Synthetic oligonucleotide
ugacagggcacagacucug

SEQ ID NO: 2063206 - RNA, 19 nt, Artificial Sequence
  Description of Artificial Sequence: Synthetic oligonucleotide
agaugacgaagagggaguc

SEQ ID NO: 2063207 - RNA, 19 nt, Artificial Sequence
  Description of Artificial Sequence: Synthetic oligonucleotide
cucacagugcccagcccgg

SEQ ID NO: 2063208 - RNA, 19 nt, Artificial Sequence
  Description of Artificial Sequence: Synthetic oligonucleotide
agcccuuguucccuagguc

SEQ ID NO: 2063209 - RNA, 19 nt, Artificial Sequence
  Description of Artificial Sequence: Synthetic oligonucleotide
  modified_base (5)..(5): a, c, u, g, unknown or other
ggggnguaaaaggagauca

SEQ ID NO: 2063210 - RNA, 19 nt, Artificial Sequence
  Description of Artificial Sequence: Synthetic oligonucleotide
gcacacaguacauucacca

SEQ ID NO: 2063211 - RNA, 19 nt, Artificial Sequence
  Description of Artificial Sequence: Synthetic oligonucleotide
cucacuacaguaggagcag

SEQ ID NO: 2063212 - RNA, 19 nt, Artificial Sequence
  Description of Artificial Sequence: Synthetic oligonucleotide
uggugggcagcaauuccca

SEQ ID NO: 2063213 - RNA, 19 nt, Artificial Sequence
  Description of Artificial Sequence: Synthetic oligonucleotide
gccuaggugcucuaagggg

SEQ ID NO: 2063214 - RNA, 19 nt, Artificial Sequence
  Description of Artificial Sequence: Synthetic oligonucleotide
cccauugaggauucgacug

SEQ ID NO: 2063215 - RNA, 19 nt, Artificial Sequence
  Description of Artificial Sequence: Synthetic oligonucleotide
auaccagcugccagagccc

SEQ ID NO: 2063216 - RNA, 19 nt, Artificial Sequence
  Description of Artificial Sequence: Synthetic oligonucleotide
  modified_base (6)..(6): a, c, u, g, unknown or other
aggggnguaaaaggagauc

SEQ ID NO: 2063217 - RNA, 19 nt, Artificial Sequence
  Description of Artificial Sequence: Synthetic oligonucleotide
agugguccucgucuggcug

SEQ ID NO: 2063218 - RNA, 19 nt, Artificial Sequence
  Description of Artificial Sequence: Synthetic oligonucleotide
aucuagccggcuccgagga

SEQ ID NO: 2063219 - RNA, 19 nt, Artificial Sequence
  Description of Artificial Sequence: Synthetic oligonucleotide
gagucgcucaccaggacac

SEQ ID NO: 2063220 - RNA, 19 nt, Artificial Sequence
  Description of Artificial Sequence: Synthetic oligonucleotide
uagccucuaaguagaugcu

SEQ ID NO: 2063221 - RNA, 19 nt, Artificial Sequence
  Description of Artificial Sequence: Synthetic oligonucleotide
ggccuaggugcucuaaggg

SEQ ID NO: 2063222 - RNA, 19 nt, Artificial Sequence
  Description of Artificial Sequence: Synthetic oligonucleotide
gguagcuggcuccagugug

SEQ ID NO: 2063223 - RNA, 19 nt, Artificial Sequence
  Description of Artificial Sequence: Synthetic oligonucleotide
agagguagcuggcuccagu

SEQ ID NO: 2063224 - RNA, 19 nt, Artificial Sequence
  Description of Artificial Sequence: Synthetic oligonucleotide
ugguaggcacaggagaggu

SEQ ID NO: 2063225 - RNA, 19 nt, Artificial Sequence
  Description of Artificial Sequence: Synthetic oligonucleotide
ucgccgggcgacgagacag

SEQ ID NO: 2063226 - RNA, 19 nt, Artificial Sequence
  Description of Artificial Sequence: Synthetic oligonucleotide
gugguccucgucuggcugg

SEQ ID NO: 2063227 - RNA, 19 nt, Artificial Sequence
  Description of Artificial Sequence: Synthetic oligonucleotide
ugucugugguguggaauag

SEQ ID NO: 2063228 - RNA, 19 nt, Artificial Sequence
  Description of Artificial Sequence: Synthetic oligonucleotide
caggcugccggacaugcug

SEQ ID NO: 2063229 - RNA, 19 nt, Artificial Sequence
  Description of Artificial Sequence: Synthetic oligonucleotide
gaggauucgacuggugguc

SEQ ID NO: 2063230 - RNA, 19 nt, Artificial Sequence
  Description of Artificial Sequence: Synthetic oligonucleotide
acacgcugguccccuuagc

SEQ ID NO: 2063231 - RNA, 19 nt, Artificial Sequence
  Description of Artificial Sequence: Synthetic oligonucleotide
agaucaugucuguggugug

SEQ ID NO: 2063232 - RNA, 19 nt, Artificial Sequence
  Description of Artificial Sequence: Synthetic oligonucleotide
uccgaggagccaaggccag

SEQ ID NO: 2063233 - RNA, 19 nt, Artificial Sequence
  Description of Artificial Sequence: Synthetic oligonucleotide
aggagugguccucgucugg

SEQ ID NO: 2063234 - RNA, 19 nt, Artificial Sequence
  Description of Artificial Sequence: Synthetic oligonucleotide
ugucccuaucuuaggggaa

SEQ ID NO: 2063235 - RNA, 19 nt, Artificial Sequence
  Description of Artificial Sequence: Synthetic oligonucleotide
ccuugucccuaucuuaggg

SEQ ID NO: 2063236 - RNA, 19 nt, Artificial Sequence
  Description of Artificial Sequence: Synthetic oligonucleotide
guggugggcagcaauuccc

SEQ ID NO: 2063237 - RNA, 19 nt, Artificial Sequence
  Description of Artificial Sequence: Synthetic oligonucleotide
ggcgacgagacagaggcag

SEQ ID NO: 2063238 - RNA, 19 nt, Artificial Sequence
  Description of Artificial Sequence: Synthetic oligonucleotide
accauaccagcugccagag

SEQ ID NO: 2063239 - RNA, 19 nt, Artificial Sequence
  Description of Artificial Sequence: Synthetic oligonucleotide
ggcagcaauucccacacga

SEQ ID NO: 2063240 - RNA, 19 nt, Artificial Sequence
  Description of Artificial Sequence: Synthetic oligonucleotide
cuuagccucuaaguagaug

SEQ ID NO: 2063241 - RNA, 19 nt, Artificial Sequence
  Description of Artificial Sequence: Synthetic oligonucleotide
gggccuaggugcucuaagg

SEQ ID NO: 2063242 - RNA, 19 nt, Artificial Sequence
  Description of Artificial Sequence: Synthetic oligonucleotide
ucgcucaccaggacacgca

SEQ ID NO: 2063243 - RNA, 19 nt, Artificial Sequence
  Description of Artificial Sequence: Synthetic oligonucleotide
cgguguacccugaagaagc

SEQ ID NO: 2063244 - RNA, 19 nt, Artificial Sequence
  Description of Artificial Sequence: Synthetic oligonucleotide
cgggcgacgagacagaggc

SEQ ID NO: 2063245 - RNA, 19 nt, Artificial Sequence
  Description of Artificial Sequence: Synthetic oligonucleotide
gagaagcagccacgagucc

SEQ ID NO: 2063246 - RNA, 19 nt, Artificial Sequence
  Description of Artificial Sequence: Synthetic oligonucleotide
aaccugcccauugaggauu

SEQ ID NO: 2063247 - RNA, 19 nt, Artificial Sequence
  Description of Artificial Sequence: Synthetic oligonucleotide
guggaauagaggcuguggu

SEQ ID NO: 2063248 - RNA, 19 nt, Artificial Sequence
  Description of Artificial Sequence: Synthetic oligonucleotide
agagggagucgcucaccag

SEQ ID NO: 2063249 - RNA, 19 nt, Artificial Sequence
  Description of Artificial Sequence: Synthetic oligonucleotide
gggaguaaggaggagcgug

SEQ ID NO: 2063250 - RNA, 19 nt, Artificial Sequence
  Description of Artificial Sequence: Synthetic oligonucleotide
gugguaggcacaggagagg

SEQ ID NO: 2063251 - RNA, 19 nt, Artificial Sequence
  Description of Artificial Sequence: Synthetic oligonucleotide
cuccaguguggaagcagag

SEQ ID NO: 2063252 - RNA, 19 nt, Artificial Sequence
  Description of Artificial Sequence: Synthetic oligonucleotide
ugccagggcacuguagcca

SEQ ID NO: 2063253 - RNA, 19 nt, Artificial Sequence
  Description of Artificial Sequence: Synthetic oligonucleotide
gaagagggagucgcucacc

SEQ ID NO: 2063254 - RNA, 19 nt, Artificial Sequence
  Description of Artificial Sequence: Synthetic oligonucleotide
cuccgaggagccaaggcca

SEQ ID NO: 2063255 - RNA, 19 nt, Artificial Sequence
  Description of Artificial Sequence: Synthetic oligonucleotide
cacuacaguaggagcagca

SEQ ID NO: 2063256 - RNA, 19 nt, Artificial Sequence
  Description of Artificial Sequence: Synthetic oligonucleotide
cauccugggcaagaagcag

SEQ ID NO: 2063257 - RNA, 19 nt, Artificial Sequence
  Description of Artificial Sequence: Synthetic oligonucleotide
caggacacgcaccagcaga

SEQ ID NO: 2063258 - RNA, 19 nt, Artificial Sequence
  Description of Artificial Sequence: Synthetic oligonucleotide
acacgcaccagcagaagga

SEQ ID NO: 2063259 - RNA, 19 nt, Artificial Sequence
  Description of Artificial Sequence: Synthetic oligonucleotide
ccccuuagccucuaaguag

SEQ ID NO: 2063260 - RNA, 19 nt, Artificial Sequence
  Description of Artificial Sequence: Synthetic oligonucleotide
aggagcguggggccuaggu

SEQ ID NO: 2063261 - RNA, 19 nt, Artificial Sequence
  Description of Artificial Sequence: Synthetic oligonucleotide
caccauaccagcugccaga

SEQ ID NO: 2063262 - RNA, 19 nt, Artificial Sequence
  Description of Artificial Sequence: Synthetic oligonucleotide
acgcugguccccuuagccu

SEQ ID NO: 2063263 - RNA, 19 nt, Artificial Sequence
  Description of Artificial Sequence: Synthetic oligonucleotide
cccgauggcaccauaccag

SEQ ID NO: 2063264 - RNA, 19 nt, Artificial Sequence
  Description of Artificial Sequence: Synthetic oligonucleotide
cacgaguccccuggcaucc

SEQ ID NO: 2063265 - RNA, 19 nt, Artificial Sequence
  Description of Artificial Sequence: Synthetic oligonucleotide
gacgaagagggagucgcuc

SEQ ID NO: 2063266 - RNA, 19 nt, Artificial Sequence
  Description of Artificial Sequence: Synthetic oligonucleotide
aggagagaagcagccacga

SEQ ID NO: 2063267 - RNA, 19 nt, Artificial Sequence
  Description of Artificial Sequence: Synthetic oligonucleotide
auucgacugguggucaggu

SEQ ID NO: 2063268 - RNA, 19 nt, Artificial Sequence
  Description of Artificial Sequence: Synthetic oligonucleotide
uuguucccuaggucauuca

SEQ ID NO: 2063269 - RNA, 19 nt, Artificial Sequence
  Description of Artificial Sequence: Synthetic oligonucleotide
agguagcuggcuccagugu

SEQ ID NO: 2063270 - RNA, 19 nt, Artificial Sequence
  Description of Artificial Sequence: Synthetic oligonucleotide
ucuagccggcuccgaggag

SEQ ID NO: 2063271 - RNA, 19 nt, Artificial Sequence
  Description of Artificial Sequence: Synthetic oligonucleotide
gaugcuaguggaaggggcu

SEQ ID NO: 2063272 - RNA, 19 nt, Artificial Sequence
  Description of Artificial Sequence: Synthetic oligonucleotide
uggcucacgcccgauggca

SEQ ID NO: 2063273 - RNA, 19 nt, Artificial Sequence
  Description of Artificial Sequence: Synthetic oligonucleotide
ccuaucuuaggggaauggc

SEQ ID NO: 2063274 - RNA, 19 nt, Artificial Sequence
  Description of Artificial Sequence: Synthetic oligonucleotide
caggagagguagcuggcuc

SEQ ID NO: 2063275 - RNA, 19 nt, Artificial Sequence
  Description of Artificial Sequence: Synthetic oligonucleotide
  modified_base (19)..(19): a, c, u, g, unknown or other
ccuaggugcucuaaggggn

SEQ ID NO: 2063276 - RNA, 19 nt, Artificial Sequence
  Description of Artificial Sequence: Synthetic oligonucleotide
gcccuuguucccuagguca

SEQ ID NO: 2063277 - RNA, 19 nt, Artificial Sequence
  Description of Artificial Sequence: Synthetic oligonucleotide
gcucacuacaguaggagca

SEQ ID NO: 2063278 - RNA, 19 nt, Artificial Sequence
  Description of Artificial Sequence: Synthetic oligonucleotide
ccuggcucacgcccgaugg

SEQ ID NO: 2063279 - RNA, 19 nt, Artificial Sequence
  Description of Artificial Sequence: Synthetic oligonucleotide
ucccuaggucauucaccag

SEQ ID NO: 2063280 - RNA, 19 nt, Artificial Sequence
  Description of Artificial Sequence: Synthetic oligonucleotide
augaggccaaacaccaggu

SEQ ID NO: 2063281 - RNA, 19 nt, Artificial Sequence
  Description of Artificial Sequence: Synthetic oligonucleotide
uggcgggacagcacugcac

SEQ ID NO: 2063282 - RNA, 19 nt, Artificial Sequence
  Description of Artificial Sequence: Synthetic oligonucleotide
ggccuugucccuaucuuag

SEQ ID NO: 2063283 - RNA, 19 nt, Artificial Sequence
  Description of Artificial Sequence: Synthetic oligonucleotide
cacacgcugguccccuuag

SEQ ID NO: 2063284 - RNA, 19 nt, Artificial Sequence
  Description of Artificial Sequence: Synthetic oligonucleotide
acaugcuggugcucucacu

SEQ ID NO: 2063285 - RNA, 19 nt, Artificial Sequence
  Description of Artificial Sequence: Synthetic oligonucleotide
guaggaacgggagccaaaa

SEQ ID NO: 2063286 - RNA, 19 nt, Artificial Sequence
  Description of Artificial Sequence: Synthetic oligonucleotide
ugugcccggcgcuggcggg

SEQ ID NO: 2063287 - RNA, 19 nt, Artificial Sequence
  Description of Artificial Sequence: Synthetic oligonucleotide
ggagaagagcagaggagug

SEQ ID NO: 2063288 - RNA, 19 nt, Artificial Sequence
  Description of Artificial Sequence: Synthetic oligonucleotide
caccaggucugccugguca

SEQ ID NO: 2063289 - RNA, 19 nt, Artificial Sequence
  Description of Artificial Sequence: Synthetic oligonucleotide
cagauacguuguaccaguc

SEQ ID NO: 2063290 - RNA, 19 nt, Artificial Sequence
  Description of Artificial Sequence: Synthetic oligonucleotide
gaauagaggcugugguggu

SEQ ID NO: 2063291 - RNA, 19 nt, Artificial Sequence
  Description of Artificial Sequence: Synthetic oligonucleotide
ggagaucaugucuguggug

SEQ ID NO: 2063292 - RNA, 19 nt, Artificial Sequence
  Description of Artificial Sequence: Synthetic oligonucleotide
ggagucgcucaccaggaca

SEQ ID NO: 2063293 - RNA, 19 nt, Artificial Sequence
  Description of Artificial Sequence: Synthetic oligonucleotide
gguccccuuagccucuaag

SEQ ID NO: 2063294 - RNA, 19 nt, Artificial Sequence
  Description of Artificial Sequence: Synthetic oligonucleotide
gcaucuagccggcuccgag

SEQ ID NO: 2063295 - RNA, 19 nt, Artificial Sequence
  Description of Artificial Sequence: Synthetic oligonucleotide
ugccggacaugcuggugcu

SEQ ID NO: 2063296 - RNA, 19 nt, Artificial Sequence
  Description of Artificial Sequence: Synthetic oligonucleotide
aacaggcccggcuggcaua

SEQ ID NO: 2063297 - RNA, 19 nt, Artificial Sequence
  Description of Artificial Sequence: Synthetic oligonucleotide
cauccucacagugcccagc

SEQ ID NO: 2063298 - RNA, 19 nt, Artificial Sequence
  Description of Artificial Sequence: Synthetic oligonucleotide
guggaagcagaggcggcag

SEQ ID NO: 2063299 - RNA, 19 nt, Artificial Sequence
  Description of Artificial Sequence: Synthetic oligonucleotide
gcaccauaccagcugccag

SEQ ID NO: 2063300 - RNA, 19 nt, Artificial Sequence
  Description of Artificial Sequence: Synthetic oligonucleotide
cugugcccggcgcuggcgg

SEQ ID NO: 2063301 - RNA, 19 nt, Artificial Sequence
  Description of Artificial Sequence: Synthetic oligonucleotide
agguuguaacaggcccggc

SEQ ID NO: 2063302 - RNA, 19 nt, Artificial Sequence
  Description of Artificial Sequence: Synthetic oligonucleotide
gucgcucaccaggacacgc

SEQ ID NO: 2063303 - RNA, 19 nt, Artificial Sequence
  Description of Artificial Sequence: Synthetic oligonucleotide
ggccgguguacccugaaga

SEQ ID NO: 2063304 - RNA, 19 nt, Artificial Sequence
  Description of Artificial Sequence: Synthetic oligonucleotide
guccccuuagccucuaagu

SEQ ID NO: 2063305 - RNA, 19 nt, Artificial Sequence
  Description of Artificial Sequence: Synthetic oligonucleotide
cagaugacgaagagggagu

SEQ ID NO: 2063306 - RNA, 19 nt, Artificial Sequence
  Description of Artificial Sequence: Synthetic oligonucleotide
acgcccgauggcaccauac

SEQ ID NO: 2063307 - RNA, 19 nt, Artificial Sequence
  Description of Artificial Sequence: Synthetic oligonucleotide
acaggagagguagcuggcu

SEQ ID NO: 2063308 - RNA, 19 nt, Artificial Sequence
  Description of Artificial Sequence: Synthetic oligonucleotide
ggaaggggcucgccgggcg

SEQ ID NO: 2063309 - RNA, 19 nt, Artificial Sequence
  Description of Artificial Sequence: Synthetic oligonucleotide
ucgucuggcuggcccgccc

SEQ ID NO: 2063310 - RNA, 19 nt, Artificial Sequence
  Description of Artificial Sequence: Synthetic oligonucleotide
gaagcagaggcggcagguc

SEQ ID NO: 2063311 - RNA, 19 nt, Artificial Sequence
  Description of Artificial Sequence: Synthetic oligonucleotide
uucgacugguggucagguc

SEQ ID NO: 2063312 - RNA, 19 nt, Artificial Sequence
  Description of Artificial Sequence: Synthetic oligonucleotide
cacgcaccagcagaaggac

SEQ ID NO: 2063313 - RNA, 19 nt, Artificial Sequence
  Description of Artificial Sequence: Synthetic oligonucleotide
aggauucgacuggugguca

SEQ ID NO: 2063314 - RNA, 19 nt, Artificial Sequence
  Description of Artificial Sequence: Synthetic oligonucleotide
ggugcucucacuccggcua

SEQ ID NO: 2063315 - RNA, 19 nt, Artificial Sequence
  Description of Artificial Sequence: Synthetic oligonucleotide
aguguggugggcagcaauu

SEQ ID NO: 2063316 - RNA, 19 nt, Artificial Sequence
  Description of Artificial Sequence: Synthetic oligonucleotide
cagacucuguuuauugagu

SEQ ID NO: 2063317 - RNA, 19 nt, Artificial Sequence
  Description of Artificial Sequence: Synthetic oligonucleotide
ccgauggcaccauaccagc

SEQ ID NO: 2063318 - RNA, 19 nt, Artificial Sequence
  Description of Artificial Sequence: Synthetic oligonucleotide
gacgagacagaggcaggca

SEQ ID NO: 2063319 - RNA, 19 nt, Artificial Sequence
  Description of Artificial Sequence: Synthetic oligonucleotide
acaggcccggcuggcauag

SEQ ID NO: 2063320 - RNA, 19 nt, Artificial Sequence
  Description of Artificial Sequence: Synthetic oligonucleotide
cuggcucacgcccgauggc

SEQ ID NO: 2063321 - RNA, 19 nt, Artificial Sequence
  Description of Artificial Sequence: Synthetic oligonucleotide
gccuugucccuaucuuagg

SEQ ID NO: 2063322 - RNA, 19 nt, Artificial Sequence
  Description of Artificial Sequence: Synthetic oligonucleotide
caagcgagagggcacagau

SEQ ID NO: 2063323 - RNA, 19 nt, Artificial Sequence
  Description of Artificial Sequence: Synthetic oligonucleotide
gcacaagcucacuacagua

SEQ ID NO: 2063324 - RNA, 19 nt, Artificial Sequence
  Description of Artificial Sequence: Synthetic oligonucleotide
ggagccaaggccagagcug

SEQ ID NO: 2063325 - RNA, 19 nt, Artificial Sequence
  Description of Artificial Sequence: Synthetic oligonucleotide
ggggccuaggugcucuaag

SEQ ID NO: 2063326 - RNA, 19 nt, Artificial Sequence
  Description of Artificial Sequence: Synthetic oligonucleotide
acgaagaggaugaggccaa

SEQ ID NO: 2063327 - RNA, 19 nt, Artificial Sequence
  Description of Artificial Sequence: Synthetic oligonucleotide
aggcaucuagccggcuccg

SEQ ID NO: 2063328 - RNA, 19 nt, Artificial Sequence
  Description of Artificial Sequence: Synthetic oligonucleotide
agggagucgcucaccagga

SEQ ID NO: 2063329 - RNA, 19 nt, Artificial Sequence
  Description of Artificial Sequence: Synthetic oligonucleotide
gggcacagaugacgaagag

SEQ ID NO: 2063330 - RNA, 19 nt, Artificial Sequence
  Description of Artificial Sequence: Synthetic oligonucleotide
agccacgaguccccuggca

SEQ ID NO: 2063331 - RNA, 19 nt, Artificial Sequence
  Description of Artificial Sequence: Synthetic oligonucleotide
ggagugguccucgucuggc

SEQ ID NO: 2063332 - RNA, 19 nt, Artificial Sequence
  Description of Artificial Sequence: Synthetic oligonucleotide
gagagguagcuggcuccag

SEQ ID NO: 2063333 - RNA, 19 nt, Artificial Sequence
  Description of Artificial Sequence: Synthetic oligonucleotide
aguaggaacgggagccaaa

SEQ ID NO: 2063334 - RNA, 19 nt, Artificial Sequence
  Description of Artificial Sequence: Synthetic oligonucleotide
agcuggccagaggagagaa

SEQ ID NO: 2063335 - RNA, 19 nt, Artificial Sequence
  Description of Artificial Sequence: Synthetic oligonucleotide
gcccggcuggcauagagca

SEQ ID NO: 2063336 - RNA, 19 nt, Artificial Sequence
  Description of Artificial Sequence: Synthetic oligonucleotide
  modified_base (17)..(17): a, c, u, g, unknown or other
uaggugcucuaaggggngu

SEQ ID NO: 2063337 - RNA, 19 nt, Artificial Sequence
  Description of Artificial Sequence: Synthetic oligonucleotide
gaaggggcucgccgggcga

SEQ ID NO: 2063338 - RNA, 19 nt, Artificial Sequence
  Description of Artificial Sequence: Synthetic oligonucleotide
guguggugggcagcaauuc

SEQ ID NO: 2063339 - RNA, 19 nt, Artificial Sequence
  Description of Artificial Sequence: Synthetic oligonucleotide
ugguccucgucuggcuggc

SEQ ID NO: 2063340 - RNA, 19 nt, Artificial Sequence
  Description of Artificial Sequence: Synthetic oligonucleotide
ccggcuaugcucccaggag

SEQ ID NO: 2063341 - RNA, 19 nt, Artificial Sequence
  Description of Artificial Sequence: Synthetic oligonucleotide
cuccggcuaugcucccagg

SEQ ID NO: 2063342 - RNA, 19 nt, Artificial Sequence
  Description of Artificial Sequence: Synthetic oligonucleotide
  modified_base (16)..(16): a, c, u, g, unknown or other
aggugcucuaaggggngua

SEQ ID NO: 2063343 - RNA, 19 nt, Artificial Sequence
  Description of Artificial Sequence: Synthetic oligonucleotide
ggcggcaggucaugccagg

SEQ ID NO: 2063344 - RNA, 19 nt, Artificial Sequence
  Description of Artificial Sequence: Synthetic oligonucleotide
cccagcccggucaaagaag

SEQ ID NO: 2063345 - RNA, 19 nt, Artificial Sequence
  Description of Artificial Sequence: Synthetic oligonucleotide
agcaagcgagagggcacag

SEQ ID NO: 2063346 - RNA, 19 nt, Artificial Sequence
  Description of Artificial Sequence: Synthetic oligonucleotide
cccuaucuuaggggaaugg

SEQ ID NO: 2063347 - RNA, 19 nt, Artificial Sequence
  Description of Artificial Sequence: Synthetic oligonucleotide
cacagugcccagcccgguc

SEQ ID NO: 2063348 - RNA, 19 nt, Artificial Sequence
  Description of Artificial Sequence: Synthetic oligonucleotide
ccagccuggcucacgcccg

SEQ ID NO: 2063349 - RNA, 19 nt, Artificial Sequence
  Description of Artificial Sequence: Synthetic oligonucleotide
ucacuccggcuaugcuccc

SEQ ID NO: 2063350 - RNA, 19 nt, Artificial Sequence
  Description of Artificial Sequence: Synthetic oligonucleotide
cagaggcggcaggucaugc

SEQ ID NO: 2063351 - RNA, 19 nt, Artificial Sequence
  Description of Artificial Sequence: Synthetic oligonucleotide
aggucugccuggucagaua

SEQ ID NO: 2063352 - RNA, 19 nt, Artificial Sequence
  Description of Artificial Sequence: Synthetic oligonucleotide
ugcucucacuccggcuaug

SEQ ID NO: 2063353 - RNA, 19 nt, Artificial Sequence
  Description of Artificial Sequence: Synthetic oligonucleotide
gcccgauggcaccauacca

SEQ ID NO: 2063354 - RNA, 19 nt, Artificial Sequence
  Description of Artificial Sequence: Synthetic oligonucleotide
cugcccauugaggauucga

SEQ ID NO: 2063355 - RNA, 19 nt, Artificial Sequence
  Description of Artificial Sequence: Synthetic oligonucleotide
  modified_base (14)..(14): a, c, u, g, unknown or other
gugcucuaaggggnguaaa

SEQ ID NO: 2063356 - RNA, 19 nt, Artificial Sequence
  Description of Artificial Sequence: Synthetic oligonucleotide
cggcuaugcucccaggagc

SEQ ID NO: 2063357 - RNA, 19 nt, Artificial Sequence
  Description of Artificial Sequence: Synthetic oligonucleotide
ggaugaggccaaacaccag

SEQ ID NO: 2063358 - RNA, 19 nt, Artificial Sequence
  Description of Artificial Sequence: Synthetic oligonucleotide
ccuauggcagcugccuggc

SEQ ID NO: 2063359 - RNA, 19 nt, Artificial Sequence
  Description of Artificial Sequence: Synthetic oligonucleotide
cuggcacacgcuggucccc

SEQ ID NO: 2063360 - RNA, 19 nt, Artificial Sequence
  Description of Artificial Sequence: Synthetic oligonucleotide
gccgguguacccugaagaa

SEQ ID NO: 2063361 - RNA, 19 nt, Artificial Sequence
  Description of Artificial Sequence: Synthetic oligonucleotide
aggcggcaggucaugccag

SEQ ID NO: 2063362 - RNA, 19 nt, Artificial Sequence
  Description of Artificial Sequence: Synthetic oligonucleotide
ccgguguacccugaagaag

SEQ ID NO: 2063363 - RNA, 19 nt, Artificial Sequence
  Description of Artificial Sequence: Synthetic oligonucleotide
gcucacgcccgauggcacc

SEQ ID NO: 2063364 - RNA, 19 nt, Artificial Sequence
  Description of Artificial Sequence: Synthetic oligonucleotide
caccugggagaagagcaga

SEQ ID NO: 2063365 - RNA, 19 nt, Artificial Sequence
  Description of Artificial Sequence: Synthetic oligonucleotide
cauugaggauucgacuggu

SEQ ID NO: 2063366 - RNA, 19 nt, Artificial Sequence
  Description of Artificial Sequence: Synthetic oligonucleotide
gcacuguagccaucuggca

SEQ ID NO: 2063367 - RNA, 19 nt, Artificial Sequence
  Description of Artificial Sequence: Synthetic oligonucleotide
gcucucacuccggcuaugc

SEQ ID NO: 2063368 - RNA, 19 nt, Artificial Sequence
  Description of Artificial Sequence: Synthetic oligonucleotide
uguagccaucuggcagccu

SEQ ID NO: 2063369 - RNA, 19 nt, Artificial Sequence
  Description of Artificial Sequence: Synthetic oligonucleotide
gcuaguggaaggggcucgc

SEQ ID NO: 2063370 - RNA, 19 nt, Artificial Sequence
  Description of Artificial Sequence: Synthetic oligonucleotide
gggccgguguacccugaag

SEQ ID NO: 2063371 - RNA, 19 nt, Artificial Sequence
  Description of Artificial Sequence: Synthetic oligonucleotide
cagccacgaguccccuggc

SEQ ID NO: 2063372 - RNA, 19 nt, Artificial Sequence
  Description of Artificial Sequence: Synthetic oligonucleotide
gcgacgagacagaggcagg

SEQ ID NO: 2063373 - RNA, 19 nt, Artificial Sequence
  Description of Artificial Sequence: Synthetic oligonucleotide
cuggcgggacagcacugca

SEQ ID NO: 2063374 - RNA, 19 nt, Artificial Sequence
  Description of Artificial Sequence: Synthetic oligonucleotide
gcccauugaggauucgacu

SEQ ID NO: 2063375 - RNA, 19 nt, Artificial Sequence
  Description of Artificial Sequence: Synthetic oligonucleotide
cagcaagcgagagggcaca

SEQ ID NO: 2063376 - RNA, 19 nt, Artificial Sequence
  Description of Artificial Sequence: Synthetic oligonucleotide
gcagcaauucccacacgaa

SEQ ID NO: 2063377 - RNA, 19 nt, Artificial Sequence
  Description of Artificial Sequence: Synthetic oligonucleotide
cucacgcccgauggcacca

SEQ ID NO: 2063378 - RNA, 19 nt, Artificial Sequence
  Description of Artificial Sequence: Synthetic oligonucleotide
uggggccuaggugcucuaa

SEQ ID NO: 2063379 - RNA, 19 nt, Artificial Sequence
  Description of Artificial Sequence: Synthetic oligonucleotide
ccacgaguccccuggcauc

SEQ ID NO: 2063380 - RNA, 19 nt, Artificial Sequence
  Description of Artificial Sequence: Synthetic oligonucleotide
gggcagcaauucccacacg

SEQ ID NO: 2063381 - RNA, 19 nt, Artificial Sequence
  Description of Artificial Sequence: Synthetic oligonucleotide
  modified_base (15)..(15): a, c, u, g, unknown or other
ggugcucuaaggggnguaa

SEQ ID NO: 2063382 - RNA, 19 nt, Artificial Sequence
  Description of Artificial Sequence: Synthetic oligonucleotide
gcggcaggucaugccaggg

SEQ ID NO: 2063383 - RNA, 19 nt, Artificial Sequence
  Description of Artificial Sequence: Synthetic oligonucleotide
gaggagcguggggccuagg

SEQ ID NO: 2063384 - RNA, 19 nt, Artificial Sequence
  Description of Artificial Sequence: Synthetic oligonucleotide
ccgggcgacgagacagagg

SEQ ID NO: 2063385 - RNA, 19 nt, Artificial Sequence
  Description of Artificial Sequence: Synthetic oligonucleotide
ccggcuggcauagagcaga

SEQ ID NO: 2063386 - RNA, 19 nt, Artificial Sequence
  Description of Artificial Sequence: Synthetic oligonucleotide
cucgucuggcuggcccgcc

SEQ ID NO: 2063387 - RNA, 19 nt, Artificial Sequence
  Description of Artificial Sequence: Synthetic oligonucleotide
cuggcauccugggcaagaa

SEQ ID NO: 2063388 - RNA, 19 nt, Artificial Sequence
  Description of Artificial Sequence: Synthetic oligonucleotide
ggcccggcuggcauagagc

SEQ ID NO: 2063389 - RNA, 19 nt, Artificial Sequence
  Description of Artificial Sequence: Synthetic oligonucleotide
cuauggcagcugccuggca

SEQ ID NO: 2063390 - RNA, 19 nt, Artificial Sequence
  Description of Artificial Sequence: Synthetic oligonucleotide
ggaagcagaggcggcaggu

SEQ ID NO: 2063391 - RNA, 19 nt, Artificial Sequence
  Description of Artificial Sequence: Synthetic oligonucleotide
cgcccgauggcaccauacc

SEQ ID NO: 2063392 - RNA, 19 nt, Artificial Sequence
  Description of Artificial Sequence: Synthetic oligonucleotide
uccuggcaccugggagaag

SEQ ID NO: 2063393 - RNA, 19 nt, Artificial Sequence
  Description of Artificial Sequence: Synthetic oligonucleotide
aggccagagcugccagguu

SEQ ID NO: 2063394 - RNA, 19 nt, Artificial Sequence
  Description of Artificial Sequence: Synthetic oligonucleotide
gccuggcucacgcccgaug

SEQ ID NO: 2063395 - RNA, 19 nt, Artificial Sequence
  Description of Artificial Sequence: Synthetic oligonucleotide
  modified_base (4)..(4): a, c, u, g, unknown or other
gggnguaaaaggagaucau

SEQ ID NO: 2063396 - RNA, 19 nt, Artificial Sequence
  Description of Artificial Sequence: Synthetic oligonucleotide
uggcccgccccagccuggc

SEQ ID NO: 2063397 - RNA, 19 nt, Artificial Sequence
  Description of Artificial Sequence: Synthetic oligonucleotide
caguguggugggcagcaau

SEQ ID NO: 2063398 - RNA, 19 nt, Artificial Sequence
  Description of Artificial Sequence: Synthetic oligonucleotide
gcgggacagcacugcacac

SEQ ID NO: 2063399 - RNA, 19 nt, Artificial Sequence
  Description of Artificial Sequence: Synthetic oligonucleotide
ccauaccagcugccagagc

SEQ ID NO: 2063400 - RNA, 19 nt, Artificial Sequence
  Description of Artificial Sequence: Synthetic oligonucleotide
gcugccggacaugcuggug

SEQ ID NO: 2063401 - RNA, 19 nt, Artificial Sequence
  Description of Artificial Sequence: Synthetic oligonucleotide
ggcucacgcccgauggcac

SEQ ID NO: 2063402 - RNA, 19 nt, Artificial Sequence
  Description of Artificial Sequence: Synthetic oligonucleotide
cagguagcccuuguucccu

SEQ ID NO: 2063403 - RNA, 19 nt, Artificial Sequence
  Description of Artificial Sequence: Synthetic oligonucleotide
cgcucaccaggacacgcac

SEQ ID NO: 2063404 - RNA, 19 nt, Artificial Sequence
  Description of Artificial Sequence: Synthetic oligonucleotide
cggcaggucaugccagggc

SEQ ID NO: 2063405 - RNA, 19 nt, Artificial Sequence
  Description of Artificial Sequence: Synthetic oligonucleotide
ggaggagcguggggccuag

SEQ ID NO: 2063406 - RNA, 19 nt, Artificial Sequence
  Description of Artificial Sequence: Synthetic oligonucleotide
gccacgaguccccuggcau

SEQ ID NO: 2063407 - RNA, 19 nt, Artificial Sequence
  Description of Artificial Sequence: Synthetic oligonucleotide
ccucuaaguagaugcuagu

SEQ ID NO: 2063408 - RNA, 19 nt, Artificial Sequence
  Description of Artificial Sequence: Synthetic oligonucleotide
ccggucaaagaaguaggaa

SEQ ID NO: 2063409 - RNA, 19 nt, Artificial Sequence
  Description of Artificial Sequence: Synthetic oligonucleotide
gcaagcgagagggcacaga

SEQ ID NO: 2063410 - RNA, 19 nt, Artificial Sequence
  Description of Artificial Sequence: Synthetic oligonucleotide
ucacgcccgauggcaccau

SEQ ID NO: 2063411 - RNA, 19 nt, Artificial Sequence
  Description of Artificial Sequence: Synthetic oligonucleotide
cucgccgggcgacgagaca

SEQ ID NO: 2063412 - RNA, 19 nt, Artificial Sequence
  Description of Artificial Sequence: Synthetic oligonucleotide
gugcucucacuccggcuau

SEQ ID NO: 2063413 - RNA, 19 nt, Artificial Sequence
  Description of Artificial Sequence: Synthetic oligonucleotide
gcccgccccagccuggcuc

SEQ ID NO: 2063414 - RNA, 19 nt, Artificial Sequence
  Description of Artificial Sequence: Synthetic oligonucleotide
ccggcuccgaggagccaag

SEQ ID NO: 2063415 - RNA, 19 nt, Artificial Sequence
  Description of Artificial Sequence: Synthetic oligonucleotide
cacuccggcuaugcuccca

SEQ ID NO: 2063416 - RNA, 19 nt, Artificial Sequence
  Description of Artificial Sequence: Synthetic oligonucleotide
cagcccggucaaagaagua

SEQ ID NO: 2063417 - RNA, 19 nt, Artificial Sequence
  Description of Artificial Sequence: Synthetic oligonucleotide
ggcacagacucuguuuauu

SEQ ID NO: 2063418 - RNA, 19 nt, Artificial Sequence
  Description of Artificial Sequence: Synthetic oligonucleotide
gguaggcacaggagaggua

SEQ ID NO: 2063419 - RNA, 19 nt, Artificial Sequence
  Description of Artificial Sequence: Synthetic oligonucleotide
gcgagagggcacagaugac

SEQ ID NO: 2063420 - RNA, 19 nt, Artificial Sequence
  Description of Artificial Sequence: Synthetic oligonucleotide
gggcucgccgggcgacgag

SEQ ID NO: 2063421 - RNA, 19 nt, Artificial Sequence
  Description of Artificial Sequence: Synthetic oligonucleotide
ccuggucagauacguugua

SEQ ID NO: 2063422 - RNA, 19 nt, Artificial Sequence
  Description of Artificial Sequence: Synthetic oligonucleotide
ggcaucuagccggcuccga

SEQ ID NO: 2063423 - RNA, 19 nt, Artificial Sequence
  Description of Artificial Sequence: Synthetic oligonucleotide
gcucgccgggcgacgagac

SEQ ID NO: 2063424 - RNA, 19 nt, Artificial Sequence
  Description of Artificial Sequence: Synthetic oligonucleotide
ggcucgccgggcgacgaga

SEQ ID NO: 2063425 - RNA, 19 nt, Artificial Sequence
  Description of Artificial Sequence: Synthetic oligonucleotide
cccggcgcuggcgggacag

SEQ ID NO: 2063426 - RNA, 19 nt, Artificial Sequence
  Description of Artificial Sequence: Synthetic oligonucleotide
gccggcuccgaggagccaa

SEQ ID NO: 2063427 - RNA, 19 nt, Artificial Sequence
  Description of Artificial Sequence: Synthetic oligonucleotide
gcacacgcugguccccuua

SEQ ID NO: 2063428 - RNA, 19 nt, Artificial Sequence
  Description of Artificial Sequence: Synthetic oligonucleotide
gugcccggcgcuggcggga

SEQ ID NO: 2063429 - RNA, 19 nt, Artificial Sequence
  Description of Artificial Sequence: Synthetic oligonucleotide
gguccucgucuggcuggcc

SEQ ID NO: 2063430 - RNA, 19 nt, Artificial Sequence
  Description of Artificial Sequence: Synthetic oligonucleotide
guggggccuaggugcucua

SEQ ID NO: 2063431 - RNA, 19 nt, Artificial Sequence
  Description of Artificial Sequence: Synthetic oligonucleotide
caaaggcaucuagccggcu

SEQ ID NO: 2063432 - RNA, 19 nt, Artificial Sequence
  Description of Artificial Sequence: Synthetic oligonucleotide
cugccuggucagauacguu

SEQ ID NO: 2063433 - RNA, 19 nt, Artificial Sequence
  Description of Artificial Sequence: Synthetic oligonucleotide
ccggacaugcuggugcucu

SEQ ID NO: 2063434 - RNA, 19 nt, Artificial Sequence
  Description of Artificial Sequence: Synthetic oligonucleotide
cacgcccgauggcaccaua

SEQ ID NO: 2063435 - RNA, 19 nt, Artificial Sequence
  Description of Artificial Sequence: Synthetic oligonucleotide
ggggccgguguacccugaa

SEQ ID NO: 2063436 - RNA, 19 nt, Artificial Sequence
  Description of Artificial Sequence: Synthetic oligonucleotide
cccuuguucccuaggucau

SEQ ID NO: 2063437 - RNA, 19 nt, Artificial Sequence
  Description of Artificial Sequence: Synthetic oligonucleotide
agccggcuccgaggagcca

SEQ ID NO: 2063438 - RNA, 19 nt, Artificial Sequence
  Description of Artificial Sequence: Synthetic oligonucleotide
ggggaguaaggaggagcgu

SEQ ID NO: 2063439 - RNA, 19 nt, Artificial Sequence
  Description of Artificial Sequence: Synthetic oligonucleotide
ggggcucgccgggcgacga

SEQ ID NO: 2063440 - RNA, 19 nt, Artificial Sequence
  Description of Artificial Sequence: Synthetic oligonucleotide
cgauggcaccauaccagcu

SEQ ID NO: 2063441 - RNA, 19 nt, Artificial Sequence
  Description of Artificial Sequence: Synthetic oligonucleotide
gcaguguggugggcagcaa

SEQ ID NO: 2063442 - RNA, 19 nt, Artificial Sequence
  Description of Artificial Sequence: Synthetic oligonucleotide
ccgaggagccaaggccaga

SEQ ID NO: 2063443 - RNA, 19 nt, Artificial Sequence
  Description of Artificial Sequence: Synthetic oligonucleotide
cgccccagccuggcucacg

SEQ ID NO: 2063444 - RNA, 19 nt, Artificial Sequence
  Description of Artificial Sequence: Synthetic oligonucleotide
gcguggggccuaggugcuc

SEQ ID NO: 2063445 - RNA, 19 nt, Artificial Sequence
  Description of Artificial Sequence: Synthetic oligonucleotide
cggcuggcauagagcagaa

SEQ ID NO: 2063446 - RNA, 19 nt, Artificial Sequence
  Description of Artificial Sequence: Synthetic oligonucleotide
caggcccggcuggcauaga

SEQ ID NO: 2063447 - RNA, 19 nt, Artificial Sequence
  Description of Artificial Sequence: Synthetic oligonucleotide
cguggggccuaggugcucu

SEQ ID NO: 2063448 - RNA, 19 nt, Artificial Sequence
  Description of Artificial Sequence: Synthetic oligonucleotide
cgccgggcgacgagacaga

SEQ ID NO: 2063449 - RNA, 19 nt, Artificial Sequence
  Description of Artificial Sequence: Synthetic oligonucleotide
ggcacacgcugguccccuu

SEQ ID NO: 2063450 - RNA, 19 nt, Artificial Sequence
  Description of Artificial Sequence: Synthetic oligonucleotide
ccuuguucccuaggucauu

SEQ ID NO: 2063451 - RNA, 19 nt, Artificial Sequence
  Description of Artificial Sequence: Synthetic oligonucleotide
ggcccgccccagccuggcu

SEQ ID NO: 2063452 - RNA, 19 nt, Artificial Sequence
  Description of Artificial Sequence: Synthetic oligonucleotide
aaagaaauaacuuuuggcc

SEQ ID NO: 2063453 - RNA, 19 nt, Artificial Sequence
  Description of Artificial Sequence: Synthetic oligonucleotide
uuuaguaagacacagaucu

SEQ ID NO: 2063454 - RNA, 19 nt, Artificial Sequence
  Description of Artificial Sequence: Synthetic oligonucleotide
aguacugauaguuaaaacc

SEQ ID NO: 2063455 - RNA, 19 nt, Artificial Sequence
  Description of Artificial Sequence: Synthetic oligonucleotide
uucauuaugcuuauuaugg

SEQ ID NO: 2063456 - RNA, 19 nt, Artificial Sequence
  Description of Artificial Sequence: Synthetic oligonucleotide
aauuguuucucacuggaac

SEQ ID NO: 2063457 - RNA, 19 nt, Artificial Sequence
  Description of Artificial Sequence: Synthetic oligonucleotide
ugaacaaugaacuaugugu

SEQ ID NO: 2063458 - RNA, 19 nt, Artificial Sequence
  Description of Artificial Sequence: Synthetic oligonucleotide
uaauuauucaacaaguacu

SEQ ID NO: 2063459 - RNA, 19 nt, Artificial Sequence
  Description of Artificial Sequence: Synthetic oligonucleotide
aacaccuacaauaagcugc

SEQ ID NO: 2063460 - RNA, 19 nt, Artificial Sequence
  Description of Artificial Sequence: Synthetic oligonucleotide
ugccaauuaauuaaaaucc

SEQ ID NO: 2063461 - RNA, 19 nt, Artificial Sequence
  Description of Artificial Sequence: Synthetic oligonucleotide
aaauaauuguuucucacug

SEQ ID NO: 2063462 - RNA, 19 nt, Artificial Sequence
  Description of Artificial Sequence: Synthetic oligonucleotide
aacauuaacucuugauugc

SEQ ID NO: 2063463 - RNA, 19 nt, Artificial Sequence
  Description of Artificial Sequence: Synthetic oligonucleotide
aaaguacugacuuuaaugu

SEQ ID NO: 2063464 - RNA, 19 nt, Artificial Sequence
  Description of Artificial Sequence: Synthetic oligonucleotide
aucucuauaaaacaagggg

SEQ ID NO: 2063465 - RNA, 19 nt, Artificial Sequence
  Description of Artificial Sequence: Synthetic oligonucleotide
ugaaagauaacauuaacuc

SEQ ID NO: 2063466 - RNA, 19 nt, Artificial Sequence
  Description of Artificial Sequence: Synthetic oligonucleotide
auaaucauaguaaugagac

SEQ ID NO: 2063467 - RNA, 19 nt, Artificial Sequence
  Description of Artificial Sequence: Synthetic oligonucleotide
guagcaagaaaauagcugg

SEQ ID NO: 2063468 - RNA, 19 nt, Artificial Sequence
  Description of Artificial Sequence: Synthetic oligonucleotide
uauaaaguaucaaauauau

SEQ ID NO: 2063469 - RNA, 19 nt, Artificial Sequence
  Description of Artificial Sequence: Synthetic oligonucleotide
aagaguuucaaucuuaaau

SEQ ID NO: 2063470 - RNA, 19 nt, Artificial Sequence
  Description of Artificial Sequence: Synthetic oligonucleotide
aaacaagggguuuuauugc

SEQ ID NO: 2063471 - RNA, 19 nt, Artificial Sequence
  Description of Artificial Sequence: Synthetic oligonucleotide
ugcaaguacaccaaggaag

SEQ ID NO: 2063472 - RNA, 19 nt, Artificial Sequence
  Description of Artificial Sequence: Synthetic oligonucleotide
uaguguagcaagaaaauag

SEQ ID NO: 2063473 - RNA, 19 nt, Artificial Sequence
  Description of Artificial Sequence: Synthetic oligonucleotide
uuaauguugaaagauaaca

SEQ ID NO: 2063474 - RNA, 19 nt, Artificial Sequence
  Description of Artificial Sequence: Synthetic oligonucleotide
aauaacuuuuggccuaugg

SEQ ID NO: 2063475 - RNA, 19 nt, Artificial Sequence
  Description of Artificial Sequence: Synthetic oligonucleotide
ucuguugaaacacugauau

SEQ ID NO: 2063476 - RNA, 19 nt, Artificial Sequence
  Description of Artificial Sequence: Synthetic oligonucleotide
uaacauuaacucuugauug

SEQ ID NO: 2063477 - RNA, 19 nt, Artificial Sequence
  Description of Artificial Sequence: Synthetic oligonucleotide
aauaauuguuucucacugg

SEQ ID NO: 2063478 - RNA, 19 nt, Artificial Sequence
  Description of Artificial Sequence: Synthetic oligonucleotide
cuaugcacaacaaacaaag

SEQ ID NO: 2063479 - RNA, 19 nt, Artificial Sequence
  Description of Artificial Sequence: Synthetic oligonucleotide
aacaagggguuuuauugcc

SEQ ID NO: 2063480 - RNA, 19 nt, Artificial Sequence
  Description of Artificial Sequence: Synthetic oligonucleotide
gaaauugggauaaucauag

SEQ ID NO: 2063481 - RNA, 19 nt, Artificial Sequence
  Description of Artificial Sequence: Synthetic oligonucleotide
aaguaucaaauauaugcag

SEQ ID NO: 2063482 - RNA, 19 nt, Artificial Sequence
  Description of Artificial Sequence: Synthetic oligonucleotide
ucaaauauaugcaguagug

SEQ ID NO: 2063483 - RNA, 19 nt, Artificial Sequence
  Description of Artificial Sequence: Synthetic oligonucleotide
uugaaagauaacauuaacu

SEQ ID NO: 2063484 - RNA, 19 nt, Artificial Sequence
  Description of Artificial Sequence: Synthetic oligonucleotide
uucagauuaaucaagcuau

SEQ ID NO: 2063485 - RNA, 19 nt, Artificial Sequence
  Description of Artificial Sequence: Synthetic oligonucleotide
aagaaauaacuuuuggccu

SEQ ID NO: 2063486 - RNA, 19 nt, Artificial Sequence
  Description of Artificial Sequence: Synthetic oligonucleotide
uauuuucagauuaaucaag

SEQ ID NO: 2063487 - RNA, 19 nt, Artificial Sequence
  Description of Artificial Sequence: Synthetic oligonucleotide
aaauaauuauucaacaagu

SEQ ID NO: 2063488 - RNA, 19 nt, Artificial Sequence
  Description of Artificial Sequence: Synthetic oligonucleotide
aagaagugcaaguacacca

SEQ ID NO: 2063489 - RNA, 19 nt, Artificial Sequence
  Description of Artificial Sequence: Synthetic oligonucleotide
uacauuugacagaacaggg

SEQ ID NO: 2063490 - RNA, 19 nt, Artificial Sequence
  Description of Artificial Sequence: Synthetic oligonucleotide
ucucuauaaaacaaggggu

SEQ ID NO: 2063491 - RNA, 19 nt, Artificial Sequence
  Description of Artificial Sequence: Synthetic oligonucleotide
uuugauguaaauaauuguu

SEQ ID NO: 2063492 - RNA, 19 nt, Artificial Sequence
  Description of Artificial Sequence: Synthetic oligonucleotide
aaaucucuauaaaacaagg

SEQ ID NO: 2063493 - RNA, 19 nt, Artificial Sequence
  Description of Artificial Sequence: Synthetic oligonucleotide
auuacaagaguuucaaucu

SEQ ID NO: 2063494 - RNA, 19 nt, Artificial Sequence
  Description of Artificial Sequence: Synthetic oligonucleotide
gaguuucaaucuuaaaugg

SEQ ID NO: 2063495 - RNA, 19 nt, Artificial Sequence
  Description of Artificial Sequence: Synthetic oligonucleotide
ugcaagguagccaagaagu

SEQ ID NO: 2063496 - RNA, 19 nt, Artificial Sequence
  Description of Artificial Sequence: Synthetic oligonucleotide
aauuauucaacaaguacug

SEQ ID NO: 2063497 - RNA, 19 nt, Artificial Sequence
  Description of Artificial Sequence: Synthetic oligonucleotide
cuugauugcaggaugagac

SEQ ID NO: 2063498 - RNA, 19 nt, Artificial Sequence
  Description of Artificial Sequence: Synthetic oligonucleotide
gaauggacgaacugcaagg

SEQ ID NO: 2063499 - RNA, 19 nt, Artificial Sequence
  Description of Artificial Sequence: Synthetic oligonucleotide
aaguacaccaaggaagggc

SEQ ID NO: 2063500 - RNA, 19 nt, Artificial Sequence
  Description of Artificial Sequence: Synthetic oligonucleotide
uuuaugacugauuuacuca

SEQ ID NO: 2063501 - RNA, 19 nt, Artificial Sequence
  Description of Artificial Sequence: Synthetic oligonucleotide
aguuaaaaccucccaagac

SEQ ID NO: 2063502 - RNA, 19 nt, Artificial Sequence
  Description of Artificial Sequence: Synthetic oligonucleotide
uauuaugggacccaucaca

SEQ ID NO: 2063503 - RNA, 19 nt, Artificial Sequence
  Description of Artificial Sequence: Synthetic oligonucleotide
uugccaauuaauuaaaauc

SEQ ID NO: 2063504 - RNA, 19 nt, Artificial Sequence
  Description of Artificial Sequence: Synthetic oligonucleotide
ucuucgggaagaauggacg

SEQ ID NO: 2063505 - RNA, 19 nt, Artificial Sequence
  Description of Artificial Sequence: Synthetic oligonucleotide
uaugcaguaguguagcaag

SEQ ID NO: 2063506 - RNA, 19 nt, Artificial Sequence
  Description of Artificial Sequence: Synthetic oligonucleotide
gaguggaccaacauuaucg

SEQ ID NO: 2063507 - RNA, 19 nt, Artificial Sequence
  Description of Artificial Sequence: Synthetic oligonucleotide
ugucaauucauuaugcuua

SEQ ID NO: 2063508 - RNA, 19 nt, Artificial Sequence
  Description of Artificial Sequence: Synthetic oligonucleotide
aauacauuugacagaacag

SEQ ID NO: 2063509 - RNA, 19 nt, Artificial Sequence
  Description of Artificial Sequence: Synthetic oligonucleotide
auuaacucuugauugcagg

SEQ ID NO: 2063510 - RNA, 19 nt, Artificial Sequence
  Description of Artificial Sequence: Synthetic oligonucleotide
aggagaguuccacaaaggc

SEQ ID NO: 2063511 - RNA, 19 nt, Artificial Sequence
  Description of Artificial Sequence: Synthetic oligonucleotide
ucaaacuuuaaauugccaa

SEQ ID NO: 2063512 - RNA, 19 nt, Artificial Sequence
  Description of Artificial Sequence: Synthetic oligonucleotide
uaugggacccaucacaggc

SEQ ID NO: 2063513 - RNA, 19 nt, Artificial Sequence
  Description of Artificial Sequence: Synthetic oligonucleotide
aauucauuaugcuuauuau

SEQ ID NO: 2063514 - RNA, 19 nt, Artificial Sequence
  Description of Artificial Sequence: Synthetic oligonucleotide
aagaaauugggauaaucau

SEQ ID NO: 2063515 - RNA, 19 nt, Artificial Sequence
  Description of Artificial Sequence: Synthetic oligonucleotide
uaugcaaagaaauaacuuu

SEQ ID NO: 2063516 - RNA, 19 nt, Artificial Sequence
  Description of Artificial Sequence: Synthetic oligonucleotide
ucaauguuuaucucguuca

SEQ ID NO: 2063517 - RNA, 19 nt, Artificial Sequence
  Description of Artificial Sequence: Synthetic oligonucleotide
uuuugauguaaauaauugu

SEQ ID NO: 2063518 - RNA, 19 nt, Artificial Sequence
  Description of Artificial Sequence: Synthetic oligonucleotide
uggacgaacugcaagguag

SEQ ID NO: 2063519 - RNA, 19 nt, Artificial Sequence
  Description of Artificial Sequence: Synthetic oligonucleotide
auaacauuaacucuugauu

SEQ ID NO: 2063520 - RNA, 19 nt, Artificial Sequence
  Description of Artificial Sequence: Synthetic oligonucleotide
auuuucagauuaaucaagc

SEQ ID NO: 2063521 - RNA, 19 nt, Artificial Sequence
  Description of Artificial Sequence: Synthetic oligonucleotide
aaagauaacauuaacucuu

SEQ ID NO: 2063522 - RNA, 19 nt, Artificial Sequence
  Description of Artificial Sequence: Synthetic oligonucleotide
auucaacaaguacugauag

SEQ ID NO: 2063523 - RNA, 19 nt, Artificial Sequence
  Description of Artificial Sequence: Synthetic oligonucleotide
gauuuacucaagaaauugg

SEQ ID NO: 2063524 - RNA, 19 nt, Artificial Sequence
  Description of Artificial Sequence: Synthetic oligonucleotide
ugauaugcaaagaaauaac

SEQ ID NO: 2063525 - RNA, 19 nt, Artificial Sequence
  Description of Artificial Sequence: Synthetic oligonucleotide
uguuauacuucuuucuucu

SEQ ID NO: 2063526 - RNA, 19 nt, Artificial Sequence
  Description of Artificial Sequence: Synthetic oligonucleotide
aaagaaauucuugauggca

SEQ ID NO: 2063527 - RNA, 19 nt, Artificial Sequence
  Description of Artificial Sequence: Synthetic oligonucleotide
uuucagauuaaucaagcua

SEQ ID NO: 2063528 - RNA, 19 nt, Artificial Sequence
  Description of Artificial Sequence: Synthetic oligonucleotide
aacaaguacugauaguuaa

SEQ ID NO: 2063529 - RNA, 19 nt, Artificial Sequence
  Description of Artificial Sequence: Synthetic oligonucleotide
uuuuaugacugauuuacuc

SEQ ID NO: 2063530 - RNA, 19 nt, Artificial Sequence
  Description of Artificial Sequence: Synthetic oligonucleotide
aaucucuauaaaacaaggg

SEQ ID NO: 2063531 - RNA, 19 nt, Artificial Sequence
  Description of Artificial Sequence: Synthetic oligonucleotide
auuaugcuuauuaugggac

SEQ ID NO: 2063532 - RNA, 19 nt, Artificial Sequence
  Description of Artificial Sequence: Synthetic oligonucleotide
uggucaaacuuuaaauugc

SEQ ID NO: 2063533 - RNA, 19 nt, Artificial Sequence
  Description of Artificial Sequence: Synthetic oligonucleotide
aguguagcaagaaaauagc

SEQ ID NO: 2063534 - RNA, 19 nt, Artificial Sequence
  Description of Artificial Sequence: Synthetic oligonucleotide
ugauuuacucaagaaauug

SEQ ID NO: 2063535 - RNA, 19 nt, Artificial Sequence
  Description of Artificial Sequence: Synthetic oligonucleotide
auuuacucaagaaauuggg

SEQ ID NO: 2063536 - RNA, 19 nt, Artificial Sequence
  Description of Artificial Sequence: Synthetic oligonucleotide
uaauguugaaagauaacau

SEQ ID NO: 2063537 - RNA, 19 nt, Artificial Sequence
  Description of Artificial Sequence: Synthetic oligonucleotide
agauuaaucaagcuauccu

SEQ ID NO: 2063538 - RNA, 19 nt, Artificial Sequence
  Description of Artificial Sequence: Synthetic oligonucleotide
aacuguuauacuucuuucu

SEQ ID NO: 2063539 - RNA, 19 nt, Artificial Sequence
  Description of Artificial Sequence: Synthetic oligonucleotide
ugauguaaauaauuguuuc

SEQ ID NO: 2063540 - RNA, 19 nt, Artificial Sequence
  Description of Artificial Sequence: Synthetic oligonucleotide
uuuaaugcaaauucagaua

SEQ ID NO: 2063541 - RNA, 19 nt, Artificial Sequence
  Description of Artificial Sequence: Synthetic oligonucleotide
uuuacucaagaaauuggga

SEQ ID NO: 2063542 - RNA, 19 nt, Artificial Sequence
  Description of Artificial Sequence: Synthetic oligonucleotide
aguggaccaacauuaucgc

SEQ ID NO: 2063543 - RNA, 19 nt, Artificial Sequence
  Description of Artificial Sequence: Synthetic oligonucleotide
agcugcuuuaguaagacac

SEQ ID NO: 2063544 - RNA, 19 nt, Artificial Sequence
  Description of Artificial Sequence: Synthetic oligonucleotide
uuacucaagaaauugggau

SEQ ID NO: 2063545 - RNA, 19 nt, Artificial Sequence
  Description of Artificial Sequence: Synthetic oligonucleotide
acaaaggaacauuacaaga

SEQ ID NO: 2063546 - RNA, 19 nt, Artificial Sequence
  Description of Artificial Sequence: Synthetic oligonucleotide
aaacaaaggaacauuacaa

SEQ ID NO: 2063547 - RNA, 19 nt, Artificial Sequence
  Description of Artificial Sequence: Synthetic oligonucleotide
uaacuuuuggccuaugguc

SEQ ID NO: 2063548 - RNA, 19 nt, Artificial Sequence
  Description of Artificial Sequence: Synthetic oligonucleotide
aaacuauuucaaaugaaca

SEQ ID NO: 2063549 - RNA, 19 nt, Artificial Sequence
  Description of Artificial Sequence: Synthetic oligonucleotide
uggaccaacauuaucgccu

SEQ ID NO: 2063550 - RNA, 19 nt, Artificial Sequence
  Description of Artificial Sequence: Synthetic oligonucleotide
auaauuguuucucacugga

SEQ ID NO: 2063551 - RNA, 19 nt, Artificial Sequence
  Description of Artificial Sequence: Synthetic oligonucleotide
aacauuaucgccugucaau

SEQ ID NO: 2063552 - RNA, 19 nt, Artificial Sequence
  Description of Artificial Sequence: Synthetic oligonucleotide
ugcaaagaaauaacuuuug

SEQ ID NO: 2063553 - RNA, 19 nt, Artificial Sequence
  Description of Artificial Sequence: Synthetic oligonucleotide
uugaacaaugaacuaugug

SEQ ID NO: 2063554 - RNA, 19 nt, Artificial Sequence
  Description of Artificial Sequence: Synthetic oligonucleotide
ugauuucuauauaaaggac

SEQ ID NO: 2063555 - RNA, 19 nt, Artificial Sequence
  Description of Artificial Sequence: Synthetic oligonucleotide
caggaaacgucuuggagcg

SEQ ID NO: 2063556 - RNA, 19 nt, Artificial Sequence
  Description of Artificial Sequence: Synthetic oligonucleotide
cuuauuaugggacccauca

SEQ ID NO: 2063557 - RNA, 19 nt, Artificial Sequence
  Description of Artificial Sequence: Synthetic oligonucleotide
aaugcaaauucagauauuu

SEQ ID NO: 2063558 - RNA, 19 nt, Artificial Sequence
  Description of Artificial Sequence: Synthetic oligonucleotide
uucugaaacugugaggcgg

SEQ ID NO: 2063559 - RNA, 19 nt, Artificial Sequence
  Description of Artificial Sequence: Synthetic oligonucleotide
auaacuuuuggccuauggu

SEQ ID NO: 2063560 - RNA, 19 nt, Artificial Sequence
  Description of Artificial Sequence: Synthetic oligonucleotide
ucaacaaguacugauaguu

SEQ ID NO: 2063561 - RNA, 19 nt, Artificial Sequence
  Description of Artificial Sequence: Synthetic oligonucleotide
uguugaaagauaacauuaa

SEQ ID NO: 2063562 - RNA, 19 nt, Artificial Sequence
  Description of Artificial Sequence: Synthetic oligonucleotide
ucugaaacugugaggcggg

SEQ ID NO: 2063563 - RNA, 19 nt, Artificial Sequence
  Description of Artificial Sequence: Synthetic oligonucleotide
aguuucaaucuuaaauggc

SEQ ID NO: 2063564 - RNA, 19 nt, Artificial Sequence
  Description of Artificial Sequence: Synthetic oligonucleotide
uauucaacaaguacugaua

SEQ ID NO: 2063565 - RNA, 19 nt, Artificial Sequence
  Description of Artificial Sequence: Synthetic oligonucleotide
agaauggacgaacugcaag

SEQ ID NO: 2063566 - RNA, 19 nt, Artificial Sequence
  Description of Artificial Sequence: Synthetic oligonucleotide
acuaugugucauuuuaaug

SEQ ID NO: 2063567 - RNA, 19 nt, Artificial Sequence
  Description of Artificial Sequence: Synthetic oligonucleotide
ugauaguuaaaaccuccca

SEQ ID NO: 2063568 - RNA, 19 nt, Artificial Sequence
  Description of Artificial Sequence: Synthetic oligonucleotide
gauaguuaaaaccucccaa

SEQ ID NO: 2063569 - RNA, 19 nt, Artificial Sequence
  Description of Artificial Sequence: Synthetic oligonucleotide
gacuuuucuaugcacaaca

SEQ ID NO: 2063570 - RNA, 19 nt, Artificial Sequence
  Description of Artificial Sequence: Synthetic oligonucleotide
ucuguuguuucuucuucgg

SEQ ID NO: 2063571 - RNA, 19 nt, Artificial Sequence
  Description of Artificial Sequence: Synthetic oligonucleotide
cuggcagaaauaauuauuc

SEQ ID NO: 2063572 - RNA, 19 nt, Artificial Sequence
  Description of Artificial Sequence: Synthetic oligonucleotide
caagaaauugggauaauca

SEQ ID NO: 2063573 - RNA, 19 nt, Artificial Sequence
  Description of Artificial Sequence: Synthetic oligonucleotide
uugauguaaauaauuguuu

SEQ ID NO: 2063574 - RNA, 19 nt, Artificial Sequence
  Description of Artificial Sequence: Synthetic oligonucleotide
uuaacucuugauugcagga

SEQ ID NO: 2063575 - RNA, 19 nt, Artificial Sequence
  Description of Artificial Sequence: Synthetic oligonucleotide
uuaaaaccucccaagacuu

SEQ ID NO: 2063576 - RNA, 19 nt, Artificial Sequence
  Description of Artificial Sequence: Synthetic oligonucleotide
uuaugacugauuuacucaa

SEQ ID NO: 2063577 - RNA, 19 nt, Artificial Sequence
  Description of Artificial Sequence: Synthetic oligonucleotide
acaggagaguuccacaaag

SEQ ID NO: 2063578 - RNA, 19 nt, Artificial Sequence
  Description of Artificial Sequence: Synthetic oligonucleotide
auuaaucaagcuauccuuc

SEQ ID NO: 2063579 - RNA, 19 nt, Artificial Sequence
  Description of Artificial Sequence: Synthetic oligonucleotide
gagaguuccacaaaggcca

SEQ ID NO: 2063580 - RNA, 19 nt, Artificial Sequence
  Description of Artificial Sequence: Synthetic oligonucleotide
uuaugcuuauuaugggacc

SEQ ID NO: 2063581 - RNA, 19 nt, Artificial Sequence
  Description of Artificial Sequence: Synthetic oligonucleotide
auuguuucucacuggaaca

SEQ ID NO: 2063582 - RNA, 19 nt, Artificial Sequence
  Description of Artificial Sequence: Synthetic oligonucleotide
ucguucaccacuuugggau

SEQ ID NO: 2063583 - RNA, 19 nt, Artificial Sequence
  Description of Artificial Sequence: Synthetic oligonucleotide
aaacaggagaguuccacaa

SEQ ID NO: 2063584 - RNA, 19 nt, Artificial Sequence
  Description of Artificial Sequence: Synthetic oligonucleotide
aggauggcaaacuauuuca

SEQ ID NO: 2063585 - RNA, 19 nt, Artificial Sequence
  Description of Artificial Sequence: Synthetic oligonucleotide
agugcaaguacaccaagga

SEQ ID NO: 2063586 - RNA, 19 nt, Artificial Sequence
  Description of Artificial Sequence: Synthetic oligonucleotide
ucuaugcacaacaaacaaa

SEQ ID NO: 2063587 - RNA, 19 nt, Artificial Sequence
  Description of Artificial Sequence: Synthetic oligonucleotide
uuuucagauuaaucaagcu

SEQ ID NO: 2063588 - RNA, 19 nt, Artificial Sequence
  Description of Artificial Sequence: Synthetic oligonucleotide
uuaaucaagcuauccuucu

SEQ ID NO: 2063589 - RNA, 19 nt, Artificial Sequence
  Description of Artificial Sequence: Synthetic oligonucleotide
uacaauaagcugcuuuagu

SEQ ID NO: 2063590 - RNA, 19 nt, Artificial Sequence
  Description of Artificial Sequence: Synthetic oligonucleotide
gaacaaugaacuauguguc

SEQ ID NO: 2063591 - RNA, 19 nt, Artificial Sequence
  Description of Artificial Sequence: Synthetic oligonucleotide
uaugcuuauuaugggaccc

SEQ ID NO: 2063592 - RNA, 19 nt, Artificial Sequence
  Description of Artificial Sequence: Synthetic oligonucleotide
aacuuuuggccuaugguca

SEQ ID NO: 2063593 - RNA, 19 nt, Artificial Sequence
  Description of Artificial Sequence: Synthetic oligonucleotide
cugauaguuaaaaccuccc

SEQ ID NO: 2063594 - RNA, 19 nt, Artificial Sequence
  Description of Artificial Sequence: Synthetic oligonucleotide
caaacaaaggaacauuaca

SEQ ID NO: 2063595 - RNA, 19 nt, Artificial Sequence
  Description of Artificial Sequence: Synthetic oligonucleotide
uauugccucaaagaaauuc

SEQ ID NO: 2063596 - RNA, 19 nt, Artificial Sequence
  Description of Artificial Sequence: Synthetic oligonucleotide
ucuucaguaugaguggacc

SEQ ID NO: 2063597 - RNA, 19 nt, Artificial Sequence
  Description of Artificial Sequence: Synthetic oligonucleotide
agccaagaagugcaaguac

SEQ ID NO: 2063598 - RNA, 19 nt, Artificial Sequence
  Description of Artificial Sequence: Synthetic oligonucleotide
guuucaaucuuaaauggca

SEQ ID NO: 2063599 - RNA, 19 nt, Artificial Sequence
  Description of Artificial Sequence: Synthetic oligonucleotide
uaugacugauuuacucaag

SEQ ID NO: 2063600 - RNA, 19 nt, Artificial Sequence
  Description of Artificial Sequence: Synthetic oligonucleotide
auugggauaaucauaguaa

SEQ ID NO: 2063601 - RNA, 19 nt, Artificial Sequence
  Description of Artificial Sequence: Synthetic oligonucleotide
aagcccgugaugcucucgg

SEQ ID NO: 2063602 - RNA, 19 nt, Artificial Sequence
  Description of Artificial Sequence: Synthetic oligonucleotide
uuaaauggcaacuguuaua

SEQ ID NO: 2063603 - RNA, 19 nt, Artificial Sequence
  Description of Artificial Sequence: Synthetic oligonucleotide
aaacuuuaaauugccaauu

SEQ ID NO: 2063604 - RNA, 19 nt, Artificial Sequence
  Description of Artificial Sequence: Synthetic oligonucleotide
agaaccauccugccgcccg

SEQ ID NO: 2063605 - RNA, 19 nt, Artificial Sequence
  Description of Artificial Sequence: Synthetic oligonucleotide
aagugcaaguacaccaagg

SEQ ID NO: 2063606 - RNA, 19 nt, Artificial Sequence
  Description of Artificial Sequence: Synthetic oligonucleotide
gauguaaauaauuguuucu

SEQ ID NO: 2063607 - RNA, 19 nt, Artificial Sequence
  Description of Artificial Sequence: Synthetic oligonucleotide
aguaucaaauauaugcagu

SEQ ID NO: 2063608 - RNA, 19 nt, Artificial Sequence
  Description of Artificial Sequence: Synthetic oligonucleotide
augacugauuuacucaaga

SEQ ID NO: 2063609 - RNA, 19 nt, Artificial Sequence
  Description of Artificial Sequence: Synthetic oligonucleotide
agaaauaacuuuuggccua

SEQ ID NO: 2063610 - RNA, 19 nt, Artificial Sequence
  Description of Artificial Sequence: Synthetic oligonucleotide
uuugacagaacaggggaga

SEQ ID NO: 2063611 - RNA, 19 nt, Artificial Sequence
  Description of Artificial Sequence: Synthetic oligonucleotide
cauuugacagaacagggga

SEQ ID NO: 2063612 - RNA, 19 nt, Artificial Sequence
  Description of Artificial Sequence: Synthetic oligonucleotide
uacucaagaaauugggaua

SEQ ID NO: 2063613 - RNA, 19 nt, Artificial Sequence
  Description of Artificial Sequence: Synthetic oligonucleotide
uugauugcaggaugagacc

SEQ ID NO: 2063614 - RNA, 19 nt, Artificial Sequence
  Description of Artificial Sequence: Synthetic oligonucleotide
uaaaacaagggguuuuauu

SEQ ID NO: 2063615 - RNA, 19 nt, Artificial Sequence
  Description of Artificial Sequence: Synthetic oligonucleotide
aagauaacauuaacucuug

SEQ ID NO: 2063616 - RNA, 19 nt, Artificial Sequence
  Description of Artificial Sequence: Synthetic oligonucleotide
uucuucgggaagaauggac

SEQ ID NO: 2063617 - RNA, 19 nt, Artificial Sequence
  Description of Artificial Sequence: Synthetic oligonucleotide
aacgucuuggagcgccaac

SEQ ID NO: 2063618 - RNA, 19 nt, Artificial Sequence
  Description of Artificial Sequence: Synthetic oligonucleotide
acuguuauacuucuuucuu

SEQ ID NO: 2063619 - RNA, 19 nt, Artificial Sequence
  Description of Artificial Sequence: Synthetic oligonucleotide
auuaugggacccaucacag

SEQ ID NO: 2063620 - RNA, 19 nt, Artificial Sequence
  Description of Artificial Sequence: Synthetic oligonucleotide
agacacagaucuucaaugu

SEQ ID NO: 2063621 - RNA, 19 nt, Artificial Sequence
  Description of Artificial Sequence: Synthetic oligonucleotide
uuuaucucguucaccacuu

SEQ ID NO: 2063622 - RNA, 19 nt, Artificial Sequence
  Description of Artificial Sequence: Synthetic oligonucleotide
ucccaagacuuuucuaugc

SEQ ID NO: 2063623 - RNA, 19 nt, Artificial Sequence
  Description of Artificial Sequence: Synthetic oligonucleotide
gaaacugugaggcgggcga

SEQ ID NO: 2063624 - RNA, 19 nt, Artificial Sequence
  Description of Artificial Sequence: Synthetic oligonucleotide
cacaaaggccagaggaugg

SEQ ID NO: 2063625 - RNA, 19 nt, Artificial Sequence
  Description of Artificial Sequence: Synthetic oligonucleotide
gaggauggcaaacuauuuc

SEQ ID NO: 2063626 - RNA, 19 nt, Artificial Sequence
  Description of Artificial Sequence: Synthetic oligonucleotide
uuauuaugggacccaucac

SEQ ID NO: 2063627 - RNA, 19 nt, Artificial Sequence
  Description of Artificial Sequence: Synthetic oligonucleotide
uagcaagaaaauagcuggc

SEQ ID NO: 2063628 - RNA, 19 nt, Artificial Sequence
  Description of Artificial Sequence: Synthetic oligonucleotide
uaguaagacacagaucuuc

SEQ ID NO: 2063629 - RNA, 19 nt, Artificial Sequence
  Description of Artificial Sequence: Synthetic oligonucleotide
gaagugcaaguacaccaag

SEQ ID NO: 2063630 - RNA, 19 nt, Artificial Sequence
  Description of Artificial Sequence: Synthetic oligonucleotide
gauuaaucaagcuauccuu

SEQ ID NO: 2063631 - RNA, 19 nt, Artificial Sequence
  Description of Artificial Sequence: Synthetic oligonucleotide
ucaagaaauugggauaauc

SEQ ID NO: 2063632 - RNA, 19 nt, Artificial Sequence
  Description of Artificial Sequence: Synthetic oligonucleotide
gcaggaaacgucuuggagc

SEQ ID NO: 2063633 - RNA, 19 nt, Artificial Sequence
  Description of Artificial Sequence: Synthetic oligonucleotide
ugauugcaggaugagaccu

SEQ ID NO: 2063634 - RNA, 19 nt, Artificial Sequence
  Description of Artificial Sequence: Synthetic oligonucleotide
auucugaaacugugaggcg

SEQ ID NO: 2063635 - RNA, 19 nt, Artificial Sequence
  Description of Artificial Sequence: Synthetic oligonucleotide
cagauuaaucaagcuaucc

SEQ ID NO: 2063636 - RNA, 19 nt, Artificial Sequence
  Description of Artificial Sequence: Synthetic oligonucleotide
uuaugggacccaucacagg

SEQ ID NO: 2063637 - RNA, 19 nt, Artificial Sequence
  Description of Artificial Sequence: Synthetic oligonucleotide
cauuaacucuugauugcag

SEQ ID NO: 2063638 - RNA, 19 nt, Artificial Sequence
  Description of Artificial Sequence: Synthetic oligonucleotide
uggccuauggucaaacuuu

SEQ ID NO: 2063639 - RNA, 19 nt, Artificial Sequence
  Description of Artificial Sequence: Synthetic oligonucleotide
cuuuaguaagacacagauc

SEQ ID NO: 2063640 - RNA, 19 nt, Artificial Sequence
  Description of Artificial Sequence: Synthetic oligonucleotide
uggcagaaauaauuauuca

SEQ ID NO: 2063641 - RNA, 19 nt, Artificial Sequence
  Description of Artificial Sequence: Synthetic oligonucleotide
aaguacugacuuuaauguu

SEQ ID NO: 2063642 - RNA, 19 nt, Artificial Sequence
  Description of Artificial Sequence: Synthetic oligonucleotide
auugccucaaagaaauucu

SEQ ID NO: 2063643 - RNA, 19 nt, Artificial Sequence
  Description of Artificial Sequence: Synthetic oligonucleotide
ugacugauuuacucaagaa

SEQ ID NO: 2063644 - RNA, 19 nt, Artificial Sequence
  Description of Artificial Sequence: Synthetic oligonucleotide
uuuguauuuucagauuaau

SEQ ID NO: 2063645 - RNA, 19 nt, Artificial Sequence
  Description of Artificial Sequence: Synthetic oligonucleotide
aaauugccaauuaauuaaa

SEQ ID NO: 2063646 - RNA, 19 nt, Artificial Sequence
  Description of Artificial Sequence: Synthetic oligonucleotide
caagguagccaagaagugc

SEQ ID NO: 2063647 - RNA, 19 nt, Artificial Sequence
  Description of Artificial Sequence: Synthetic oligonucleotide
aaauugggauaaucauagu

SEQ ID NO: 2063648 - RNA, 19 nt, Artificial Sequence
  Description of Artificial Sequence: Synthetic oligonucleotide
auggcaacuguuauacuuc

SEQ ID NO: 2063649 - RNA, 19 nt, Artificial Sequence
  Description of Artificial Sequence: Synthetic oligonucleotide
gaugagaccugaccacuug

SEQ ID NO: 2063650 - RNA, 19 nt, Artificial Sequence
  Description of Artificial Sequence: Synthetic oligonucleotide
aauggacgaacugcaaggu

SEQ ID NO: 2063651 - RNA, 19 nt, Artificial Sequence
  Description of Artificial Sequence: Synthetic oligonucleotide
cuguuauacuucuuucuuc

SEQ ID NO: 2063652 - RNA, 19 nt, Artificial Sequence
  Description of Artificial Sequence: Synthetic oligonucleotide
auagcuggcagaaauaauu

SEQ ID NO: 2063653 - RNA, 19 nt, Artificial Sequence
  Description of Artificial Sequence: Synthetic oligonucleotide
uucaacaaguacugauagu

SEQ ID NO: 2063654 - RNA, 19 nt, Artificial Sequence
  Description of Artificial Sequence: Synthetic oligonucleotide
ucagauuaaucaagcuauc

SEQ ID NO: 2063655 - RNA, 19 nt, Artificial Sequence
  Description of Artificial Sequence: Synthetic oligonucleotide
cugauaugcaaagaaauaa

SEQ ID NO: 2063656 - RNA, 19 nt, Artificial Sequence
  Description of Artificial Sequence: Synthetic oligonucleotide
acaaaggccagaggauggc

SEQ ID NO: 2063657 - RNA, 19 nt, Artificial Sequence
  Description of Artificial Sequence: Synthetic oligonucleotide
ugaaacugugaggcgggcg

SEQ ID NO: 2063658 - RNA, 19 nt, Artificial Sequence
  Description of Artificial Sequence: Synthetic oligonucleotide
uauaaaacaagggguuuua

SEQ ID NO: 2063659 - RNA, 19 nt, Artificial Sequence
  Description of Artificial Sequence: Synthetic oligonucleotide
caggagaguuccacaaagg

SEQ ID NO: 2063660 - RNA, 19 nt, Artificial Sequence
  Description of Artificial Sequence: Synthetic oligonucleotide
caguaguguagcaagaaaa

SEQ ID NO: 2063661 - RNA, 19 nt, Artificial Sequence
  Description of Artificial Sequence: Synthetic oligonucleotide
gcaaguacaccaaggaagg

SEQ ID NO: 2063662 - RNA, 19 nt, Artificial Sequence
  Description of Artificial Sequence: Synthetic oligonucleotide
accaacauuaucgccuguc

SEQ ID NO: 2063663 - RNA, 19 nt, Artificial Sequence
  Description of Artificial Sequence: Synthetic oligonucleotide
auaaaguaucaaauauaug

SEQ ID NO: 2063664 - RNA, 19 nt, Artificial Sequence
  Description of Artificial Sequence: Synthetic oligonucleotide
ucuugauugcaggaugaga

SEQ ID NO: 2063665 - RNA, 19 nt, Artificial Sequence
  Description of Artificial Sequence: Synthetic oligonucleotide
aguaugaguggaccaacau

SEQ ID NO: 2063666 - RNA, 19 nt, Artificial Sequence
  Description of Artificial Sequence: Synthetic oligonucleotide
gauggcaaacuauuucaaa

SEQ ID NO: 2063667 - RNA, 19 nt, Artificial Sequence
  Description of Artificial Sequence: Synthetic oligonucleotide
guacugauaguuaaaaccu

SEQ ID NO: 2063668 - RNA, 19 nt, Artificial Sequence
  Description of Artificial Sequence: Synthetic oligonucleotide
ugaguggaccaacauuauc

SEQ ID NO: 2063669 - RNA, 19 nt, Artificial Sequence
  Description of Artificial Sequence: Synthetic oligonucleotide
acucaagaaauugggauaa

SEQ ID NO: 2063670 - RNA, 19 nt, Artificial Sequence
  Description of Artificial Sequence: Synthetic oligonucleotide
ugggacccaucacaggcag

SEQ ID NO: 2063671 - RNA, 19 nt, Artificial Sequence
  Description of Artificial Sequence: Synthetic oligonucleotide
uagcuggcagaaauaauua

SEQ ID NO: 2063672 - RNA, 19 nt, Artificial Sequence
  Description of Artificial Sequence: Synthetic oligonucleotide
agaaauugggauaaucaua

SEQ ID NO: 2063673 - RNA, 19 nt, Artificial Sequence
  Description of Artificial Sequence: Synthetic oligonucleotide
uucaguaugaguggaccaa

SEQ ID NO: 2063674 - RNA, 19 nt, Artificial Sequence
  Description of Artificial Sequence: Synthetic oligonucleotide
aaccucccaagacuuuucu

SEQ ID NO: 2063675 - RNA, 19 nt, Artificial Sequence
  Description of Artificial Sequence: Synthetic oligonucleotide
caagaagugcaaguacacc

SEQ ID NO: 2063676 - RNA, 19 nt, Artificial Sequence
  Description of Artificial Sequence: Synthetic oligonucleotide
acauuaacucuugauugca

SEQ ID NO: 2063677 - RNA, 19 nt, Artificial Sequence
  Description of Artificial Sequence: Synthetic oligonucleotide
ggcagaaauaauuauucaa

SEQ ID NO: 2063678 - RNA, 19 nt, Artificial Sequence
  Description of Artificial Sequence: Synthetic oligonucleotide
accuacaauaagcugcuuu

SEQ ID NO: 2063679 - RNA, 19 nt, Artificial Sequence
  Description of Artificial Sequence: Synthetic oligonucleotide
aguaggcggagccauucug

SEQ ID NO: 2063680 - RNA, 19 nt, Artificial Sequence
  Description of Artificial Sequence: Synthetic oligonucleotide
caauguuuaucucguucac

SEQ ID NO: 2063681 - RNA, 19 nt, Artificial Sequence
  Description of Artificial Sequence: Synthetic oligonucleotide
aaaccucccaagacuuuuc

SEQ ID NO: 2063682 - RNA, 19 nt, Artificial Sequence
  Description of Artificial Sequence: Synthetic oligonucleotide
aguaagacacagaucuuca

SEQ ID NO: 2063683 - RNA, 19 nt, Artificial Sequence
  Description of Artificial Sequence: Synthetic oligonucleotide
cugcaagguagccaagaag

SEQ ID NO: 2063684 - RNA, 19 nt, Artificial Sequence
  Description of Artificial Sequence: Synthetic oligonucleotide
ugugaggcgggcgaagccc

SEQ ID NO: 2063685 - RNA, 19 nt, Artificial Sequence
  Description of Artificial Sequence: Synthetic oligonucleotide
acaaugaacuaugugucau

SEQ ID NO: 2063686 - RNA, 19 nt, Artificial Sequence
  Description of Artificial Sequence: Synthetic oligonucleotide
uguuuaucucguucaccac

SEQ ID NO: 2063687 - RNA, 19 nt, Artificial Sequence
  Description of Artificial Sequence: Synthetic oligonucleotide
gaccugaccacuugauuuc

SEQ ID NO: 2063688 - RNA, 19 nt, Artificial Sequence
  Description of Artificial Sequence: Synthetic oligonucleotide
gacuuuaauguugaaagau

SEQ ID NO: 2063689 - RNA, 19 nt, Artificial Sequence
  Description of Artificial Sequence: Synthetic oligonucleotide
aauugccaauuaauuaaaa

SEQ ID NO: 2063690 - RNA, 19 nt, Artificial Sequence
  Description of Artificial Sequence: Synthetic oligonucleotide
ucgccugucaauucauuau

SEQ ID NO: 2063691 - RNA, 19 nt, Artificial Sequence
  Description of Artificial Sequence: Synthetic oligonucleotide
gccaacaccuacaauaagc

SEQ ID NO: 2063692 - RNA, 19 nt, Artificial Sequence
  Description of Artificial Sequence: Synthetic oligonucleotide
agauaacauuaacucuuga

SEQ ID NO: 2063693 - RNA, 19 nt, Artificial Sequence
  Description of Artificial Sequence: Synthetic oligonucleotide
uccaaaguacugacuuuaa

SEQ ID NO: 2063694 - RNA, 19 nt, Artificial Sequence
  Description of Artificial Sequence: Synthetic oligonucleotide
caggaugagaccugaccac

SEQ ID NO: 2063695 - RNA, 19 nt, Artificial Sequence
  Description of Artificial Sequence: Synthetic oligonucleotide
caacaccuacaauaagcug

SEQ ID NO: 2063696 - RNA, 19 nt, Artificial Sequence
  Description of Artificial Sequence: Synthetic oligonucleotide
acuuuaauguugaaagaua

SEQ ID NO: 2063697 - RNA, 19 nt, Artificial Sequence
  Description of Artificial Sequence: Synthetic oligonucleotide
uggcaacuguuauacuucu

SEQ ID NO: 2063698 - RNA, 19 nt, Artificial Sequence
  Description of Artificial Sequence: Synthetic oligonucleotide
uuaguaagacacagaucuu

SEQ ID NO: 2063699 - RNA, 19 nt, Artificial Sequence
  Description of Artificial Sequence: Synthetic oligonucleotide
guuuaucucguucaccacu

SEQ ID NO: 2063700 - RNA, 19 nt, Artificial Sequence
  Description of Artificial Sequence: Synthetic oligonucleotide
cucccaagacuuuucuaug

SEQ ID NO: 2063701 - RNA, 19 nt, Artificial Sequence
  Description of Artificial Sequence: Synthetic oligonucleotide
uuaucgccugucaauucau

SEQ ID NO: 2063702 - RNA, 19 nt, Artificial Sequence
  Description of Artificial Sequence: Synthetic oligonucleotide
ucaguaugaguggaccaac

SEQ ID NO: 2063703 - RNA, 19 nt, Artificial Sequence
  Description of Artificial Sequence: Synthetic oligonucleotide
aauagcuggcagaaauaau

SEQ ID NO: 2063704 - RNA, 19 nt, Artificial Sequence
  Description of Artificial Sequence: Synthetic oligonucleotide
uaacucuugauugcaggau

SEQ ID NO: 2063705 - RNA, 19 nt, Artificial Sequence
  Description of Artificial Sequence: Synthetic oligonucleotide
ggucaaacuuuaaauugcc

SEQ ID NO: 2063706 - RNA, 19 nt, Artificial Sequence
  Description of Artificial Sequence: Synthetic oligonucleotide
uuuggccuauggucaaacu

SEQ ID NO: 2063707 - RNA, 19 nt, Artificial Sequence
  Description of Artificial Sequence: Synthetic oligonucleotide
cacgaugcgggccacgcug

SEQ ID NO: 2063708 - RNA, 19 nt, Artificial Sequence
  Description of Artificial Sequence: Synthetic oligonucleotide
cuuuucuaugcacaacaaa

SEQ ID NO: 2063709 - RNA, 19 nt, Artificial Sequence
  Description of Artificial Sequence: Synthetic oligonucleotide
acugcaagguagccaagaa

SEQ ID NO: 2063710 - RNA, 19 nt, Artificial Sequence
  Description of Artificial Sequence: Synthetic oligonucleotide
guggaccaacauuaucgcc

SEQ ID NO: 2063711 - RNA, 19 nt, Artificial Sequence
  Description of Artificial Sequence: Synthetic oligonucleotide
cuucaguaugaguggacca

SEQ ID NO: 2063712 - RNA, 19 nt, Artificial Sequence
  Description of Artificial Sequence: Synthetic oligonucleotide
cauuaucgccugucaauuc

SEQ ID NO: 2063713 - RNA, 19 nt, Artificial Sequence
  Description of Artificial Sequence: Synthetic oligonucleotide
gcaggaugagaccugacca

SEQ ID NO: 2063714 - RNA, 19 nt, Artificial Sequence
  Description of Artificial Sequence: Synthetic oligonucleotide
acauuaucgccugucaauu

SEQ ID NO: 2063715 - RNA, 19 nt, Artificial Sequence
  Description of Artificial Sequence: Synthetic oligonucleotide
gcuuuaguaagacacagau

SEQ ID NO: 2063716 - RNA, 19 nt, Artificial Sequence
  Description of Artificial Sequence: Synthetic oligonucleotide
uaggcgggcagcugcaccu

SEQ ID NO: 2063717 - RNA, 19 nt, Artificial Sequence
  Description of Artificial Sequence: Synthetic oligonucleotide
gauugcaggaugagaccug

SEQ ID NO: 2063718 - RNA, 19 nt, Artificial Sequence
  Description of Artificial Sequence: Synthetic oligonucleotide
ggcaggaaacgucuuggag

SEQ ID NO: 2063719 - RNA, 19 nt, Artificial Sequence
  Description of Artificial Sequence: Synthetic oligonucleotide
accacuugauuucuauaua

SEQ ID NO: 2063720 - RNA, 19 nt, Artificial Sequence
  Description of Artificial Sequence: Synthetic oligonucleotide
aucgccugucaauucauua

SEQ ID NO: 2063721 - RNA, 19 nt, Artificial Sequence
  Description of Artificial Sequence: Synthetic oligonucleotide
acauuacaagaguuucaau

SEQ ID NO: 2063722 - RNA, 19 nt, Artificial Sequence
  Description of Artificial Sequence: Synthetic oligonucleotide
cuugagguaggcgggcagc

SEQ ID NO: 2063723 - RNA, 19 nt, Artificial Sequence
  Description of Artificial Sequence: Synthetic oligonucleotide
acaccuacaauaagcugcu

SEQ ID NO: 2063724 - RNA, 19 nt, Artificial Sequence
  Description of Artificial Sequence: Synthetic oligonucleotide
uaaaaccucccaagacuuu

SEQ ID NO: 2063725 - RNA, 19 nt, Artificial Sequence
  Description of Artificial Sequence: Synthetic oligonucleotide
aaaggccagaggauggcaa

SEQ ID NO: 2063726 - RNA, 19 nt, Artificial Sequence
  Description of Artificial Sequence: Synthetic oligonucleotide
ggaaacgucuuggagcgcc

SEQ ID NO: 2063727 - RNA, 19 nt, Artificial Sequence
  Description of Artificial Sequence: Synthetic oligonucleotide
auugcaggaugagaccuga

SEQ ID NO: 2063728 - RNA, 19 nt, Artificial Sequence
  Description of Artificial Sequence: Synthetic oligonucleotide
gaacuaugugucauuuuaa

SEQ ID NO: 2063729 - RNA, 19 nt, Artificial Sequence
  Description of Artificial Sequence: Synthetic oligonucleotide
aggaacauuacaagaguuu

SEQ ID NO: 2063730 - RNA, 19 nt, Artificial Sequence
  Description of Artificial Sequence: Synthetic oligonucleotide
cuucgggaagaauggacga

SEQ ID NO: 2063731 - RNA, 19 nt, Artificial Sequence
  Description of Artificial Sequence: Synthetic oligonucleotide
aaauaacuuuuggccuaug

SEQ ID NO: 2063732 - RNA, 19 nt, Artificial Sequence
  Description of Artificial Sequence: Synthetic oligonucleotide
acuuuuggccuauggucaa

SEQ ID NO: 2063733 - RNA, 19 nt, Artificial Sequence
  Description of Artificial Sequence: Synthetic oligonucleotide
agaagugcaaguacaccaa

SEQ ID NO: 2063734 - RNA, 19 nt, Artificial Sequence
  Description of Artificial Sequence: Synthetic oligonucleotide
gaaauucuugauggcaaua

SEQ ID NO: 2063735 - RNA, 19 nt, Artificial Sequence
  Description of Artificial Sequence: Synthetic oligonucleotide
caaguacaccaaggaaggg

SEQ ID NO: 2063736 - RNA, 19 nt, Artificial Sequence
  Description of Artificial Sequence: Synthetic oligonucleotide
gggaagaauggacgaacug

SEQ ID NO: 2063737 - RNA, 19 nt, Artificial Sequence
  Description of Artificial Sequence: Synthetic oligonucleotide
acucuugauugcaggauga

SEQ ID NO: 2063738 - RNA, 19 nt, Artificial Sequence
  Description of Artificial Sequence: Synthetic oligonucleotide
gcacaacaaacaaaggaac

SEQ ID NO: 2063739 - RNA, 19 nt, Artificial Sequence
  Description of Artificial Sequence: Synthetic oligonucleotide
auaaaacaagggguuuuau

SEQ ID NO: 2063740 - RNA, 19 nt, Artificial Sequence
  Description of Artificial Sequence: Synthetic oligonucleotide
cacagaucuucaauguuua

SEQ ID NO: 2063741 - RNA, 19 nt, Artificial Sequence
  Description of Artificial Sequence: Synthetic oligonucleotide
ggaccaacauuaucgccug

SEQ ID NO: 2063742 - RNA, 19 nt, Artificial Sequence
  Description of Artificial Sequence: Synthetic oligonucleotide
guaagacacagaucuucaa

SEQ ID NO: 2063743 - RNA, 19 nt, Artificial Sequence
  Description of Artificial Sequence: Synthetic oligonucleotide
gacgaacugcaagguagcc

SEQ ID NO: 2063744 - RNA, 19 nt, Artificial Sequence
  Description of Artificial Sequence: Synthetic oligonucleotide
aagcuauccuucuguuguu

SEQ ID NO: 2063745 - RNA, 19 nt, Artificial Sequence
  Description of Artificial Sequence: Synthetic oligonucleotide
uuggagcgccaacaccuac

SEQ ID NO: 2063746 - RNA, 19 nt, Artificial Sequence
  Description of Artificial Sequence: Synthetic oligonucleotide
acgucuuggagcgccaaca

SEQ ID NO: 2063747 - RNA, 19 nt, Artificial Sequence
  Description of Artificial Sequence: Synthetic oligonucleotide
guaguguagcaagaaaaua

SEQ ID NO: 2063748 - RNA, 19 nt, Artificial Sequence
  Description of Artificial Sequence: Synthetic oligonucleotide
uaggcggagccauucugaa

SEQ ID NO: 2063749 - RNA, 19 nt, Artificial Sequence
  Description of Artificial Sequence: Synthetic oligonucleotide
gaccgggagcugcuugagg

SEQ ID NO: 2063750 - RNA, 19 nt, Artificial Sequence
  Description of Artificial Sequence: Synthetic oligonucleotide
aagaauggacgaacugcaa

SEQ ID NO: 2063751 - RNA, 19 nt, Artificial Sequence
  Description of Artificial Sequence: Synthetic oligonucleotide
gugcaaguacaccaaggaa

SEQ ID NO: 2063752 - RNA, 19 nt, Artificial Sequence
  Description of Artificial Sequence: Synthetic oligonucleotide
cucuugauugcaggaugag

SEQ ID NO: 2063753 - RNA, 19 nt, Artificial Sequence
  Description of Artificial Sequence: Synthetic oligonucleotide
cacucuguugaaacacuga

SEQ ID NO: 2063754 - RNA, 19 nt, Artificial Sequence
  Description of Artificial Sequence: Synthetic oligonucleotide
ccaauuaauuaaaauccaa

SEQ ID NO: 2063755 - RNA, 19 nt, Artificial Sequence
  Description of Artificial Sequence: Synthetic oligonucleotide
gucaaacuuuaaauugcca

SEQ ID NO: 2063756 - RNA, 19 nt, Artificial Sequence
  Description of Artificial Sequence: Synthetic oligonucleotide
uucgggaagaauggacgaa

SEQ ID NO: 2063757 - RNA, 19 nt, Artificial Sequence
  Description of Artificial Sequence: Synthetic oligonucleotide
caacaaguacugauaguua

SEQ ID NO: 2063758 - RNA, 19 nt, Artificial Sequence
  Description of Artificial Sequence: Synthetic oligonucleotide
ccaagacuuuucuaugcac

SEQ ID NO: 2063759 - RNA, 19 nt, Artificial Sequence
  Description of Artificial Sequence: Synthetic oligonucleotide
ugcuuauuaugggacccau

SEQ ID NO: 2063760 - RNA, 19 nt, Artificial Sequence
  Description of Artificial Sequence: Synthetic oligonucleotide
gccaauuaauuaaaaucca

SEQ ID NO: 2063761 - RNA, 19 nt, Artificial Sequence
  Description of Artificial Sequence: Synthetic oligonucleotide
caacauuaucgccugucaa

SEQ ID NO: 2063762 - RNA, 19 nt, Artificial Sequence
  Description of Artificial Sequence: Synthetic oligonucleotide
acuuuucuaugcacaacaa

SEQ ID NO: 2063763 - RNA, 19 nt, Artificial Sequence
  Description of Artificial Sequence: Synthetic oligonucleotide
gcuguccagaaccauccug

SEQ ID NO: 2063764 - RNA, 19 nt, Artificial Sequence
  Description of Artificial Sequence: Synthetic oligonucleotide
cucuguugaaacacugaua

SEQ ID NO: 2063765 - RNA, 19 nt, Artificial Sequence
  Description of Artificial Sequence: Synthetic oligonucleotide
guaggcgggcagcugcacc

SEQ ID NO: 2063766 - RNA, 19 nt, Artificial Sequence
  Description of Artificial Sequence: Synthetic oligonucleotide
caguaugaguggaccaaca

SEQ ID NO: 2063767 - RNA, 19 nt, Artificial Sequence
  Description of Artificial Sequence: Synthetic oligonucleotide
cucguucaccacuuuggga

SEQ ID NO: 2063768 - RNA, 19 nt, Artificial Sequence
  Description of Artificial Sequence: Synthetic oligonucleotide
aggcaggaaacgucuugga

SEQ ID NO: 2063769 - RNA, 19 nt, Artificial Sequence
  Description of Artificial Sequence: Synthetic oligonucleotide
guaugaguggaccaacauu

SEQ ID NO: 2063770 - RNA, 19 nt, Artificial Sequence
  Description of Artificial Sequence: Synthetic oligonucleotide
uaucgccugucaauucauu

SEQ ID NO: 2063771 - RNA, 19 nt, Artificial Sequence
  Description of Artificial Sequence: Synthetic oligonucleotide
acaagggguuuuauugccu

SEQ ID NO: 2063772 - RNA, 19 nt, Artificial Sequence
  Description of Artificial Sequence: Synthetic oligonucleotide
auggacgaacugcaaggua

SEQ ID NO: 2063773 - RNA, 19 nt, Artificial Sequence
  Description of Artificial Sequence: Synthetic oligonucleotide
augcuuauuaugggaccca

SEQ ID NO: 2063774 - RNA, 19 nt, Artificial Sequence
  Description of Artificial Sequence: Synthetic oligonucleotide
agcccgugaugcucucggg

SEQ ID NO: 2063775 - RNA, 19 nt, Artificial Sequence
  Description of Artificial Sequence: Synthetic oligonucleotide
uuaucucguucaccacuuu

SEQ ID NO: 2063776 - RNA, 19 nt, Artificial Sequence
  Description of Artificial Sequence: Synthetic oligonucleotide
guaggcggagccauucuga

SEQ ID NO: 2063777 - RNA, 19 nt, Artificial Sequence
  Description of Artificial Sequence: Synthetic oligonucleotide
ccacuugauuucuauauaa

SEQ ID NO: 2063778 - RNA, 19 nt, Artificial Sequence
  Description of Artificial Sequence: Synthetic oligonucleotide
ucacgaugcgggccacgcu

SEQ ID NO: 2063779 - RNA, 19 nt, Artificial Sequence
  Description of Artificial Sequence: Synthetic oligonucleotide
uugcaggaugagaccugac

SEQ ID NO: 2063780 - RNA, 19 nt, Artificial Sequence
  Description of Artificial Sequence: Synthetic oligonucleotide
agggguuuuauugccucaa

SEQ ID NO: 2063781 - RNA, 19 nt, Artificial Sequence
  Description of Artificial Sequence: Synthetic oligonucleotide
agaggauggcaaacuauuu

SEQ ID NO: 2063782 - RNA, 19 nt, Artificial Sequence
  Description of Artificial Sequence: Synthetic oligonucleotide
aggaaacgucuuggagcgc

SEQ ID NO: 2063783 - RNA, 19 nt, Artificial Sequence
  Description of Artificial Sequence: Synthetic oligonucleotide
guguagcaagaaaauagcu

SEQ ID NO: 2063784 - RNA, 19 nt, Artificial Sequence
  Description of Artificial Sequence: Synthetic oligonucleotide
gcccgugaugcucucgggg

SEQ ID NO: 2063785 - RNA, 19 nt, Artificial Sequence
  Description of Artificial Sequence: Synthetic oligonucleotide
cugauuuacucaagaaauu

SEQ ID NO: 2063786 - RNA, 19 nt, Artificial Sequence
  Description of Artificial Sequence: Synthetic oligonucleotide
gaacugcaagguagccaag

SEQ ID NO: 2063787 - RNA, 19 nt, Artificial Sequence
  Description of Artificial Sequence: Synthetic oligonucleotide
ggacccaucacaggcagga

SEQ ID NO: 2063788 - RNA, 19 nt, Artificial Sequence
  Description of Artificial Sequence: Synthetic oligonucleotide
caccuucacgaugcgggcc

SEQ ID NO: 2063789 - RNA, 19 nt, Artificial Sequence
  Description of Artificial Sequence: Synthetic oligonucleotide
ggacgaacugcaagguagc

SEQ ID NO: 2063790 - RNA, 19 nt, Artificial Sequence
  Description of Artificial Sequence: Synthetic oligonucleotide
gcaagguagccaagaagug

SEQ ID NO: 2063791 - RNA, 19 nt, Artificial Sequence
  Description of Artificial Sequence: Synthetic oligonucleotide
acaccaaggaagggcagua

SEQ ID NO: 2063792 - RNA, 19 nt, Artificial Sequence
  Description of Artificial Sequence: Synthetic oligonucleotide
augcaguaguguagcaaga

SEQ ID NO: 2063793 - RNA, 19 nt, Artificial Sequence
  Description of Artificial Sequence: Synthetic oligonucleotide
ucggggaccgggagcugcu

SEQ ID NO: 2063794 - RNA, 19 nt, Artificial Sequence
  Description of Artificial Sequence: Synthetic oligonucleotide
augugucauuuuaaugcaa

SEQ ID NO: 2063795 - RNA, 19 nt, Artificial Sequence
  Description of Artificial Sequence: Synthetic oligonucleotide
caccaaggaagggcaguag

SEQ ID NO: 2063796 - RNA, 19 nt, Artificial Sequence
  Description of Artificial Sequence: Synthetic oligonucleotide
ccaacaccuacaauaagcu

SEQ ID NO: 2063797 - RNA, 19 nt, Artificial Sequence
  Description of Artificial Sequence: Synthetic oligonucleotide
cgaacugcaagguagccaa

SEQ ID NO: 2063798 - RNA, 19 nt, Artificial Sequence
  Description of Artificial Sequence: Synthetic oligonucleotide
accugaccacuugauuucu

SEQ ID NO: 2063799 - RNA, 19 nt, Artificial Sequence
  Description of Artificial Sequence: Synthetic oligonucleotide
gcugcuuuaguaagacaca

SEQ ID NO: 2063800 - RNA, 19 nt, Artificial Sequence
  Description of Artificial Sequence: Synthetic oligonucleotide
ucaccacuuugggauuuuc

SEQ ID NO: 2063801 - RNA, 19 nt, Artificial Sequence
  Description of Artificial Sequence: Synthetic oligonucleotide
cuucacgaugcgggccacg

SEQ ID NO: 2063802 - RNA, 19 nt, Artificial Sequence
  Description of Artificial Sequence: Synthetic oligonucleotide
ccaacauuaucgccuguca

SEQ ID NO: 2063803 - RNA, 19 nt, Artificial Sequence
  Description of Artificial Sequence: Synthetic oligonucleotide
cuucuucgggaagaaugga

SEQ ID NO: 2063804 - RNA, 19 nt, Artificial Sequence
  Description of Artificial Sequence: Synthetic oligonucleotide
gagaccugaccacuugauu

SEQ ID NO: 2063805 - RNA, 19 nt, Artificial Sequence
  Description of Artificial Sequence: Synthetic oligonucleotide
agcuauccuucuguuguuu

SEQ ID NO: 2063806 - RNA, 19 nt, Artificial Sequence
  Description of Artificial Sequence: Synthetic oligonucleotide
aggcggagccauucugaaa

SEQ ID NO: 2063807 - RNA, 19 nt, Artificial Sequence
  Description of Artificial Sequence: Synthetic oligonucleotide
ugaggcgggcgaagcccgu

SEQ ID NO: 2063808 - RNA, 19 nt, Artificial Sequence
  Description of Artificial Sequence: Synthetic oligonucleotide
ggagcgccaacaccuacaa

SEQ ID NO: 2063809 - RNA, 19 nt, Artificial Sequence
  Description of Artificial Sequence: Synthetic oligonucleotide
acagaacaggggagaauuu

SEQ ID NO: 2063810 - RNA, 19 nt, Artificial Sequence
  Description of Artificial Sequence: Synthetic oligonucleotide
cgccugucaauucauuaug

SEQ ID NO: 2063811 - RNA, 19 nt, Artificial Sequence
  Description of Artificial Sequence: Synthetic oligonucleotide
aggcgggcgaagcccguga

SEQ ID NO: 2063812 - RNA, 19 nt, Artificial Sequence
  Description of Artificial Sequence: Synthetic oligonucleotide
caccacuuugggauuuucu

SEQ ID NO: 2063813 - RNA, 19 nt, Artificial Sequence
  Description of Artificial Sequence: Synthetic oligonucleotide
ggauggcaaacuauuucaa

SEQ ID NO: 2063814 - RNA, 19 nt, Artificial Sequence
  Description of Artificial Sequence: Synthetic oligonucleotide
cuuggagcgccaacaccua

SEQ ID NO: 2063815 - RNA, 19 nt, Artificial Sequence
  Description of Artificial Sequence: Synthetic oligonucleotide
cagaaccauccugccgccc

SEQ ID NO: 2063816 - RNA, 19 nt, Artificial Sequence
  Description of Artificial Sequence: Synthetic oligonucleotide
gaguuccacaaaggccaga

SEQ ID NO: 2063817 - RNA, 19 nt, Artificial Sequence
  Description of Artificial Sequence: Synthetic oligonucleotide
gggaccgggagcugcuuga

SEQ ID NO: 2063818 - RNA, 19 nt, Artificial Sequence
  Description of Artificial Sequence: Synthetic oligonucleotide
gcucucggggaccgggagc

SEQ ID NO: 2063819 - RNA, 19 nt, Artificial Sequence
  Description of Artificial Sequence: Synthetic oligonucleotide
gaggcgggcgaagcccgug

SEQ ID NO: 2063820 - RNA, 19 nt, Artificial Sequence
  Description of Artificial Sequence: Synthetic oligonucleotide
ggcgaagcccgugaugcuc

SEQ ID NO: 2063821 - RNA, 19 nt, Artificial Sequence
  Description of Artificial Sequence: Synthetic oligonucleotide
cccgugaugcucucgggga

SEQ ID NO: 2063822 - RNA, 19 nt, Artificial Sequence
  Description of Artificial Sequence: Synthetic oligonucleotide
ggggaccgggagcugcuug

SEQ ID NO: 2063823 - RNA, 19 nt, Artificial Sequence
  Description of Artificial Sequence: Synthetic oligonucleotide
ccucaaagaaauucuugau

SEQ ID NO: 2063824 - RNA, 19 nt, Artificial Sequence
  Description of Artificial Sequence: Synthetic oligonucleotide
agguaggcgggcagcugca

SEQ ID NO: 2063825 - RNA, 19 nt, Artificial Sequence
  Description of Artificial Sequence: Synthetic oligonucleotide
gcgccaacaccuacaauaa

SEQ ID NO: 2063826 - RNA, 19 nt, Artificial Sequence
  Description of Artificial Sequence: Synthetic oligonucleotide
ggaccgggagcugcuugag

SEQ ID NO: 2063827 - RNA, 19 nt, Artificial Sequence
  Description of Artificial Sequence: Synthetic oligonucleotide
gaccaacauuaucgccugu

SEQ ID NO: 2063828 - RNA, 19 nt, Artificial Sequence
  Description of Artificial Sequence: Synthetic oligonucleotide
ggccuauggucaaacuuua

SEQ ID NO: 2063829 - RNA, 19 nt, Artificial Sequence
  Description of Artificial Sequence: Synthetic oligonucleotide
gcgggcgaagcccgugaug

SEQ ID NO: 2063830 - RNA, 19 nt, Artificial Sequence
  Description of Artificial Sequence: Synthetic oligonucleotide
cugccgcccgcguccgcug

SEQ ID NO: 2063831 - RNA, 19 nt, Artificial Sequence
  Description of Artificial Sequence: Synthetic oligonucleotide
cgccaacaccuacaauaag

SEQ ID NO: 2063832 - RNA, 19 nt, Artificial Sequence
  Description of Artificial Sequence: Synthetic oligonucleotide
gccacgcuguccagaacca

SEQ ID NO: 2063833 - RNA, 19 nt, Artificial Sequence
  Description of Artificial Sequence: Synthetic oligonucleotide
gguaggcgggcagcugcac

SEQ ID NO: 2063834 - RNA, 19 nt, Artificial Sequence
  Description of Artificial Sequence: Synthetic oligonucleotide
cucaagaaauugggauaau

SEQ ID NO: 2063835 - RNA, 19 nt, Artificial Sequence
  Description of Artificial Sequence: Synthetic oligonucleotide
gagcgccaacaccuacaau

SEQ ID NO: 2063836 - RNA, 19 nt, Artificial Sequence
  Description of Artificial Sequence: Synthetic oligonucleotide
gcggagccauucugaaacu

SEQ ID NO: 2063837 - RNA, 19 nt, Artificial Sequence
  Description of Artificial Sequence: Synthetic oligonucleotide
ccugaccacuugauuucua

SEQ ID NO: 2063838 - RNA, 19 nt, Artificial Sequence
  Description of Artificial Sequence: Synthetic oligonucleotide
ggaugagaccugaccacuu

SEQ ID NO: 2063839 - RNA, 19 nt, Artificial Sequence
  Description of Artificial Sequence: Synthetic oligonucleotide
cgggaagaauggacgaacu

SEQ ID NO: 2063840 - RNA, 19 nt, Artificial Sequence
  Description of Artificial Sequence: Synthetic oligonucleotide
gggcaguaggcggagccau

SEQ ID NO: 2063841 - RNA, 19 nt, Artificial Sequence
  Description of Artificial Sequence: Synthetic oligonucleotide
gggcgaagcccgugaugcu

SEQ ID NO: 2063842 - RNA, 19 nt, Artificial Sequence
  Description of Artificial Sequence: Synthetic oligonucleotide
ggcgggcgaagcccgugau

SEQ ID NO: 2063843 - RNA, 19 nt, Artificial Sequence
  Description of Artificial Sequence: Synthetic oligonucleotide
cguucaccacuuugggauu

SEQ ID NO: 2063844 - RNA, 19 nt, Artificial Sequence
  Description of Artificial Sequence: Synthetic oligonucleotide
ggcaguaggcggagccauu

SEQ ID NO: 2063845 - RNA, 19 nt, Artificial Sequence
  Description of Artificial Sequence: Synthetic oligonucleotide
ccacgcuguccagaaccau

SEQ ID NO: 2063846 - RNA, 19 nt, Artificial Sequence
  Description of Artificial Sequence: Synthetic oligonucleotide
cggggaccgggagcugcuu

SEQ ID NO: 2063847 - RNA, 19 nt, Artificial Sequence
  Description of Artificial Sequence: Synthetic oligonucleotide
cuuauguugauuaacgugg

SEQ ID NO: 2063848 - RNA, 19 nt, Artificial Sequence
  Description of Artificial Sequence: Synthetic oligonucleotide
uuugcuguccauaauggcg

SEQ ID NO: 2063849 - RNA, 19 nt, Artificial Sequence
  Description of Artificial Sequence: Synthetic oligonucleotide
ugauuagucuuucaauugg

SEQ ID NO: 2063850 - RNA, 19 nt, Artificial Sequence
  Description of Artificial Sequence: Synthetic oligonucleotide
acugauguggugcagaauc

SEQ ID NO: 2063851 - RNA, 19 nt, Artificial Sequence
  Description of Artificial Sequence: Synthetic oligonucleotide
aaagcauguuugcagugcc

SEQ ID NO: 2063852 - RNA, 19 nt, Artificial Sequence
  Description of Artificial Sequence: Synthetic oligonucleotide
uauuugcuguccauaaugg

SEQ ID NO: 2063853 - RNA, 19 nt, Artificial Sequence
  Description of Artificial Sequence: Synthetic oligonucleotide
acauuaauagccugggagg

SEQ ID NO: 2063854 - RNA, 19 nt, Artificial Sequence
  Description of Artificial Sequence: Synthetic oligonucleotide
cuucauguggucaaaggcg

SEQ ID NO: 2063855 - RNA, 19 nt, Artificial Sequence
  Description of Artificial Sequence: Synthetic oligonucleotide
aaaagugcccucuccacag

SEQ ID NO: 2063856 - RNA, 19 nt, Artificial Sequence
  Description of Artificial Sequence: Synthetic oligonucleotide
uccaacagcaaacugauua

SEQ ID NO: 2063857 - RNA, 19 nt, Artificial Sequence
  Description of Artificial Sequence: Synthetic oligonucleotide
uguugauuaacguggaacu

SEQ ID NO: 2063858 - RNA, 19 nt, Artificial Sequence
  Description of Artificial Sequence: Synthetic oligonucleotide
cacauuaauagccugggag

SEQ ID NO: 2063859 - RNA, 19 nt, Artificial Sequence
  Description of Artificial Sequence: Synthetic oligonucleotide
aguggacuagugcacagcc

SEQ ID NO: 2063860 - RNA, 19 nt, Artificial Sequence
  Description of Artificial Sequence: Synthetic oligonucleotide
auuaacguggaacugacau

SEQ ID NO: 2063861 - RNA, 19 nt, Artificial Sequence
  Description of Artificial Sequence: Synthetic oligonucleotide
gaagaggggaaucuuggcg

SEQ ID NO: 2063862 - RNA, 19 nt, Artificial Sequence
  Description of Artificial Sequence: Synthetic oligonucleotide
uuuucuagacuguucuggg

SEQ ID NO: 2063863 - RNA, 19 nt, Artificial Sequence
  Description of Artificial Sequence: Synthetic oligonucleotide
uucuuuucuagacuguucu

SEQ ID NO: 2063864 - RNA, 19 nt, Artificial Sequence
  Description of Artificial Sequence: Synthetic oligonucleotide
gaaggugggacacaaacac

SEQ ID NO: 2063865 - RNA, 19 nt, Artificial Sequence
  Description of Artificial Sequence: Synthetic oligonucleotide
uguugggaagucuucaaag

SEQ ID NO: 2063866 - RNA, 19 nt, Artificial Sequence
  Description of Artificial Sequence: Synthetic oligonucleotide
ucguguaucaggagguugg

SEQ ID NO: 2063867 - RNA, 19 nt, Artificial Sequence
  Description of Artificial Sequence: Synthetic oligonucleotide
gaguagaccacuuuccagc

SEQ ID NO: 2063868 - RNA, 19 nt, Artificial Sequence
  Description of Artificial Sequence: Synthetic oligonucleotide
uucuagacuguucuggggc

SEQ ID NO: 2063869 - RNA, 19 nt, Artificial Sequence
  Description of Artificial Sequence: Synthetic oligonucleotide
uuucccagagacuccagcg

SEQ ID NO: 2063870 - RNA, 19 nt, Artificial Sequence
  Description of Artificial Sequence: Synthetic oligonucleotide
uuaauagccugggaggugg

SEQ ID NO: 2063871 - RNA, 19 nt, Artificial Sequence
  Description of Artificial Sequence: Synthetic oligonucleotide
auguugauuaacguggaac

SEQ ID NO: 2063872 - RNA, 19 nt, Artificial Sequence
  Description of Artificial Sequence: Synthetic oligonucleotide
acauuucggaucuucauug

SEQ ID NO: 2063873 - RNA, 19 nt, Artificial Sequence
  Description of Artificial Sequence: Synthetic oligonucleotide
aaacugauuagucuuucaa

SEQ ID NO: 2063874 - RNA, 19 nt, Artificial Sequence
  Description of Artificial Sequence: Synthetic oligonucleotide
ucuucuaagucacauguuu

SEQ ID NO: 2063875 - RNA, 19 nt, Artificial Sequence
  Description of Artificial Sequence: Synthetic oligonucleotide
cuuuucuagacuguucugg

SEQ ID NO: 2063876 - RNA, 19 nt, Artificial Sequence
  Description of Artificial Sequence: Synthetic oligonucleotide
gaacuuggcauucauccgc

SEQ ID NO: 2063877 - RNA, 19 nt, Artificial Sequence
  Description of Artificial Sequence: Synthetic oligonucleotide
agaggaguggacuagugca

SEQ ID NO: 2063878 - RNA, 19 nt, Artificial Sequence
  Description of Artificial Sequence: Synthetic oligonucleotide
cauccccacauuaauagcc

SEQ ID NO: 2063879 - RNA, 19 nt, Artificial Sequence
  Description of Artificial Sequence: Synthetic oligonucleotide
aacugauuagucuuucaau

SEQ ID NO: 2063880 - RNA, 19 nt, Artificial Sequence
  Description of Artificial Sequence: Synthetic oligonucleotide
uagaccacuuuccagccag

SEQ ID NO: 2063881 - RNA, 19 nt, Artificial Sequence
  Description of Artificial Sequence: Synthetic oligonucleotide
uucucauuaaagucagggc

SEQ ID NO: 2063882 - RNA, 19 nt, Artificial Sequence
  Description of Artificial Sequence: Synthetic oligonucleotide
gauauugcugcagccaggg

SEQ ID NO: 2063883 - RNA, 19 nt, Artificial Sequence
  Description of Artificial Sequence: Synthetic oligonucleotide
aggagguuggcaucuuucc

SEQ ID NO: 2063884 - RNA, 19 nt, Artificial Sequence
  Description of Artificial Sequence: Synthetic oligonucleotide
uuuccaacagcaaacugau

SEQ ID NO: 2063885 - RNA, 19 nt, Artificial Sequence
  Description of Artificial Sequence: Synthetic oligonucleotide
uggacuagugcacagccga

SEQ ID NO: 2063886 - RNA, 19 nt, Artificial Sequence
  Description of Artificial Sequence: Synthetic oligonucleotide
acugauuagucuuucaauu

SEQ ID NO: 2063887 - RNA, 19 nt, Artificial Sequence
  Description of Artificial Sequence: Synthetic oligonucleotide
uuucggaucuucauuggga

SEQ ID NO: 2063888 - RNA, 19 nt, Artificial Sequence
  Description of Artificial Sequence: Synthetic oligonucleotide
aggguuuucccagagacuc

SEQ ID NO: 2063889 - RNA, 19 nt, Artificial Sequence
  Description of Artificial Sequence: Synthetic oligonucleotide
cugaaauucuucuaaguca

SEQ ID NO: 2063890 - RNA, 19 nt, Artificial Sequence
  Description of Artificial Sequence: Synthetic oligonucleotide
agcaagauauucagcaagc

SEQ ID NO: 2063891 - RNA, 19 nt, Artificial Sequence
  Description of Artificial Sequence: Synthetic oligonucleotide
auuucggaucuucauuggg

SEQ ID NO: 2063892 - RNA, 19 nt, Artificial Sequence
  Description of Artificial Sequence: Synthetic oligonucleotide
cucauuaaagucagggcug

SEQ ID NO: 2063893 - RNA, 19 nt, Artificial Sequence
  Description of Artificial Sequence: Synthetic oligonucleotide
ucauugggauggcagaccc

SEQ ID NO: 2063894 - RNA, 19 nt, Artificial Sequence
  Description of Artificial Sequence: Synthetic oligonucleotide
ugggacacaaacacagcag

SEQ ID NO: 2063895 - RNA, 19 nt, Artificial Sequence
  Description of Artificial Sequence: Synthetic oligonucleotide
aaggcauuuggcaggaauc

SEQ ID NO: 2063896 - RNA, 19 nt, Artificial Sequence
  Description of Artificial Sequence: Synthetic oligonucleotide
cugaagaggggaaucuugg

SEQ ID NO: 2063897 - RNA, 19 nt, Artificial Sequence
  Description of Artificial Sequence: Synthetic oligonucleotide
uuucuagacuguucugggg

SEQ ID NO: 2063898 - RNA, 19 nt, Artificial Sequence
  Description of Artificial Sequence: Synthetic oligonucleotide
acuagagccucacagggca

SEQ ID NO: 2063899 - RNA, 19 nt, Artificial Sequence
  Description of Artificial Sequence: Synthetic oligonucleotide
aaauucuucuaagucacau

SEQ ID NO: 2063900 - RNA, 19 nt, Artificial Sequence
  Description of Artificial Sequence: Synthetic oligonucleotide
ugauuaacguggaacugac

SEQ ID NO: 2063901 - RNA, 19 nt, Artificial Sequence
  Description of Artificial Sequence: Synthetic oligonucleotide
auugggauggcagaccccg

SEQ ID NO: 2063902 - RNA, 19 nt, Artificial Sequence
  Description of Artificial Sequence: Synthetic oligonucleotide
ucaucugcgaacagggccu

SEQ ID NO: 2063903 - RNA, 19 nt, Artificial Sequence
  Description of Artificial Sequence: Synthetic oligonucleotide
uugauuaacguggaacuga

SEQ ID NO: 2063904 - RNA, 19 nt, Artificial Sequence
  Description of Artificial Sequence: Synthetic oligonucleotide
cugugugucuuuuccaccg

SEQ ID NO: 2063905 - RNA, 19 nt, Artificial Sequence
  Description of Artificial Sequence: Synthetic oligonucleotide
aauggcggcacagcugccc

SEQ ID NO: 2063906 - RNA, 19 nt, Artificial Sequence
  Description of Artificial Sequence: Synthetic oligonucleotide
cuggacuagagccucacag

SEQ ID NO: 2063907 - RNA, 19 nt, Artificial Sequence
  Description of Artificial Sequence: Synthetic oligonucleotide
guugugauauugcugcagc

SEQ ID NO: 2063908 - RNA, 19 nt, Artificial Sequence
  Description of Artificial Sequence: Synthetic oligonucleotide
auuucaggauacuggcuuc

SEQ ID NO: 2063909 - RNA, 19 nt, Artificial Sequence
  Description of Artificial Sequence: Synthetic oligonucleotide
uuauguugauuaacgugga

SEQ ID NO: 2063910 - RNA, 19 nt, Artificial Sequence
  Description of Artificial Sequence: Synthetic oligonucleotide
auguuugcagugccguacc

SEQ ID NO: 2063911 - RNA, 19 nt, Artificial Sequence
  Description of Artificial Sequence: Synthetic oligonucleotide
ugauauugcugcagccagg

SEQ ID NO: 2063912 - RNA, 19 nt, Artificial Sequence
  Description of Artificial Sequence: Synthetic oligonucleotide
gucaucugcgaacagggcc

SEQ ID NO: 2063913 - RNA, 19 nt, Artificial Sequence
  Description of Artificial Sequence: Synthetic oligonucleotide
acuagugcacagccgaaag

SEQ ID NO: 2063914 - RNA, 19 nt, Artificial Sequence
  Description of Artificial Sequence: Synthetic oligonucleotide
ucuucauugggauggcaga

SEQ ID NO: 2063915 - RNA, 19 nt, Artificial Sequence
  Description of Artificial Sequence: Synthetic oligonucleotide
ugugauauugcugcagcca

SEQ ID NO: 2063916 - RNA, 19 nt, Artificial Sequence
  Description of Artificial Sequence: Synthetic oligonucleotide
uuacucugugggcugugcg

SEQ ID NO: 2063917 - RNA, 19 nt, Artificial Sequence
  Description of Artificial Sequence: Synthetic oligonucleotide
gugauauugcugcagccag

SEQ ID NO: 2063918 - RNA, 19 nt, Artificial Sequence
  Description of Artificial Sequence: Synthetic oligonucleotide
aaucuuggcguaccgcuga

SEQ ID NO: 2063919 - RNA, 19 nt, Artificial Sequence
  Description of Artificial Sequence: Synthetic oligonucleotide
acguggaacugacauuucg

SEQ ID NO: 2063920 - RNA, 19 nt, Artificial Sequence
  Description of Artificial Sequence: Synthetic oligonucleotide
accuucauguggucaaagg

SEQ ID NO: 2063921 - RNA, 19 nt, Artificial Sequence
  Description of Artificial Sequence: Synthetic oligonucleotide
auuagucuuucaauugggg

SEQ ID NO: 2063922 - RNA, 19 nt, Artificial Sequence
  Description of Artificial Sequence: Synthetic oligonucleotide
ugacugaagugguucagca

SEQ ID NO: 2063923 - RNA, 19 nt, Artificial Sequence
  Description of Artificial Sequence: Synthetic oligonucleotide
uagugcacagccgaaagca

SEQ ID NO: 2063924 - RNA, 19 nt, Artificial Sequence
  Description of Artificial Sequence: Synthetic oligonucleotide
auagccugggagguggugc

SEQ ID NO: 2063925 - RNA, 19 nt, Artificial Sequence
  Description of Artificial Sequence: Synthetic oligonucleotide
guuuccaacagcaaacuga

SEQ ID NO: 2063926 - RNA, 19 nt, Artificial Sequence
  Description of Artificial Sequence: Synthetic oligonucleotide
augucaucugcgaacaggg

SEQ ID NO: 2063927 - RNA, 19 nt, Artificial Sequence
  Description of Artificial Sequence: Synthetic oligonucleotide
uguuuccaacagcaaacug

SEQ ID NO: 2063928 - RNA, 19 nt, Artificial Sequence
  Description of Artificial Sequence: Synthetic oligonucleotide
gaaucauacugauguggug

SEQ ID NO: 2063929 - RNA, 19 nt, Artificial Sequence
  Description of Artificial Sequence: Synthetic oligonucleotide
gcuuauguugauuaacgug

SEQ ID NO: 2063930 - RNA, 19 nt, Artificial Sequence
  Description of Artificial Sequence: Synthetic oligonucleotide
caggacucugucuauuugc

SEQ ID NO: 2063931 - RNA, 19 nt, Artificial Sequence
  Description of Artificial Sequence: Synthetic oligonucleotide
aggauacuggcuucuuuuc

SEQ ID NO: 2063932 - RNA, 19 nt, Artificial Sequence
  Description of Artificial Sequence: Synthetic oligonucleotide
ucagggcuuauguugauua

SEQ ID NO: 2063933 - RNA, 19 nt, Artificial Sequence
  Description of Artificial Sequence: Synthetic oligonucleotide
uaacguggaacugacauuu

SEQ ID NO: 2063934 - RNA, 19 nt, Artificial Sequence
  Description of Artificial Sequence: Synthetic oligonucleotide
ggacuagagccucacaggg

SEQ ID NO: 2063935 - RNA, 19 nt, Artificial Sequence
  Description of Artificial Sequence: Synthetic oligonucleotide
acugacauuucggaucuuc

SEQ ID NO: 2063936 - RNA, 19 nt, Artificial Sequence
  Description of Artificial Sequence: Synthetic oligonucleotide
auauucagcaagcccgugu

SEQ ID NO: 2063937 - RNA, 19 nt, Artificial Sequence
  Description of Artificial Sequence: Synthetic oligonucleotide
cagugagggaaucagcuug

SEQ ID NO: 2063938 - RNA, 19 nt, Artificial Sequence
  Description of Artificial Sequence: Synthetic oligonucleotide
ggaacugacauuucggauc

SEQ ID NO: 2063939 - RNA, 19 nt, Artificial Sequence
  Description of Artificial Sequence: Synthetic oligonucleotide
cucuccacaguccagcaac

SEQ ID NO: 2063940 - RNA, 19 nt, Artificial Sequence
  Description of Artificial Sequence: Synthetic oligonucleotide
agggcuuauguugauuaac

SEQ ID NO: 2063941 - RNA, 19 nt, Artificial Sequence
  Description of Artificial Sequence: Synthetic oligonucleotide
ugaagaggggaaucuuggc

SEQ ID NO: 2063942 - RNA, 19 nt, Artificial Sequence
  Description of Artificial Sequence: Synthetic oligonucleotide
uuccccaucuggacuagag

SEQ ID NO: 2063943 - RNA, 19 nt, Artificial Sequence
  Description of Artificial Sequence: Synthetic oligonucleotide
cauuucggaucuucauugg

SEQ ID NO: 2063944 - RNA, 19 nt, Artificial Sequence
  Description of Artificial Sequence: Synthetic oligonucleotide
ucuaagucacauguuucca

SEQ ID NO: 2063945 - RNA, 19 nt, Artificial Sequence
  Description of Artificial Sequence: Synthetic oligonucleotide
aggugggacacaaacacag

SEQ ID NO: 2063946 - RNA, 19 nt, Artificial Sequence
  Description of Artificial Sequence: Synthetic oligonucleotide
cauaauggcggcacagcug

SEQ ID NO: 2063947 - RNA, 19 nt, Artificial Sequence
  Description of Artificial Sequence: Synthetic oligonucleotide
cuuggcguaccgcugacug

SEQ ID NO: 2063948 - RNA, 19 nt, Artificial Sequence
  Description of Artificial Sequence: Synthetic oligonucleotide
ucaaaggcgaugccaacuu

SEQ ID NO: 2063949 - RNA, 19 nt, Artificial Sequence
  Description of Artificial Sequence: Synthetic oligonucleotide
uggaaggguuuucccagag

SEQ ID NO: 2063950 - RNA, 19 nt, Artificial Sequence
  Description of Artificial Sequence: Synthetic oligonucleotide
ggcuucguguaucaggagg

SEQ ID NO: 2063951 - RNA, 19 nt, Artificial Sequence
  Description of Artificial Sequence: Synthetic oligonucleotide
ucauuaaagucagggcuga

SEQ ID NO: 2063952 - RNA, 19 nt, Artificial Sequence
  Description of Artificial Sequence: Synthetic oligonucleotide
uucggaucuucauugggau

SEQ ID NO: 2063953 - RNA, 19 nt, Artificial Sequence
  Description of Artificial Sequence: Synthetic oligonucleotide
ugggagguggugcugugug

SEQ ID NO: 2063954 - RNA, 19 nt, Artificial Sequence
  Description of Artificial Sequence: Synthetic oligonucleotide
ucuagacuguucuggggcu

SEQ ID NO: 2063955 - RNA, 19 nt, Artificial Sequence
  Description of Artificial Sequence: Synthetic oligonucleotide
aucauacugauguggugca

SEQ ID NO: 2063956 - RNA, 19 nt, Artificial Sequence
  Description of Artificial Sequence: Synthetic oligonucleotide
cuuuccagccagaggagug

SEQ ID NO: 2063957 - RNA, 19 nt, Artificial Sequence
  Description of Artificial Sequence: Synthetic oligonucleotide
ucugcgugaaggugggaca

SEQ ID NO: 2063958 - RNA, 19 nt, Artificial Sequence
  Description of Artificial Sequence: Synthetic oligonucleotide
uggucugcgugaagguggg

SEQ ID NO: 2063959 - RNA, 19 nt, Artificial Sequence
  Description of Artificial Sequence: Synthetic oligonucleotide
cauucauccgcauccccac

SEQ ID NO: 2063960 - RNA, 19 nt, Artificial Sequence
  Description of Artificial Sequence: Synthetic oligonucleotide
guggucugcgugaaggugg

SEQ ID NO: 2063961 - RNA, 19 nt, Artificial Sequence
  Description of Artificial Sequence: Synthetic oligonucleotide
aaaggcuggaaggguuuuc

SEQ ID NO: 2063962 - RNA, 19 nt, Artificial Sequence
  Description of Artificial Sequence: Synthetic oligonucleotide
uauguugauuaacguggaa

SEQ ID NO: 2063963 - RNA, 19 nt, Artificial Sequence
  Description of Artificial Sequence: Synthetic oligonucleotide
ucuccuugcgcucuaccau

SEQ ID NO: 2063964 - RNA, 19 nt, Artificial Sequence
  Description of Artificial Sequence: Synthetic oligonucleotide
cuagugcacagccgaaagc

SEQ ID NO: 2063965 - RNA, 19 nt, Artificial Sequence
  Description of Artificial Sequence: Synthetic oligonucleotide
uuaacguggaacugacauu

SEQ ID NO: 2063966 - RNA, 19 nt, Artificial Sequence
  Description of Artificial Sequence: Synthetic oligonucleotide
guugauuaacguggaacug

SEQ ID NO: 2063967 - RNA, 19 nt, Artificial Sequence
  Description of Artificial Sequence: Synthetic oligonucleotide
gggcuuauguugauuaacg

SEQ ID NO: 2063968 - RNA, 19 nt, Artificial Sequence
  Description of Artificial Sequence: Synthetic oligonucleotide
caaagcagaccuucaugug

SEQ ID NO: 2063969 - RNA, 19 nt, Artificial Sequence
  Description of Artificial Sequence: Synthetic oligonucleotide
uucgguguccuccgggcug

SEQ ID NO: 2063970 - RNA, 19 nt, Artificial Sequence
  Description of Artificial Sequence: Synthetic oligonucleotide
cauguuugcagugccguac

SEQ ID NO: 2063971 - RNA, 19 nt, Artificial Sequence
  Description of Artificial Sequence: Synthetic oligonucleotide
cagaggaguggacuagugc

SEQ ID NO: 2063972 - RNA, 19 nt, Artificial Sequence
  Description of Artificial Sequence: Synthetic oligonucleotide
ugugugucuuuuccaccgc

SEQ ID NO: 2063973 - RNA, 19 nt, Artificial Sequence
  Description of Artificial Sequence: Synthetic oligonucleotide
ccuucauguggucaaaggc

SEQ ID NO: 2063974 - RNA, 19 nt, Artificial Sequence
  Description of Artificial Sequence: Synthetic oligonucleotide
uccagaguggcuucgugua

SEQ ID NO: 2063975 - RNA, 19 nt, Artificial Sequence
  Description of Artificial Sequence: Synthetic oligonucleotide
aagcagaccuucauguggu

SEQ ID NO: 2063976 - RNA, 19 nt, Artificial Sequence
  Description of Artificial Sequence: Synthetic oligonucleotide
gcgaacagggccuucagug

SEQ ID NO: 2063977 - RNA, 19 nt, Artificial Sequence
  Description of Artificial Sequence: Synthetic oligonucleotide
acaggacucugucuauuug

SEQ ID NO: 2063978 - RNA, 19 nt, Artificial Sequence
  Description of Artificial Sequence: Synthetic oligonucleotide
agugagggaaucagcuugg

SEQ ID NO: 2063979 - RNA, 19 nt, Artificial Sequence
  Description of Artificial Sequence: Synthetic oligonucleotide
ugugcggcuccuccgugag

SEQ ID NO: 2063980 - RNA, 19 nt, Artificial Sequence
  Description of Artificial Sequence: Synthetic oligonucleotide
guggaacugacauuucgga

SEQ ID NO: 2063981 - RNA, 19 nt, Artificial Sequence
  Description of Artificial Sequence: Synthetic oligonucleotide
uccauaauggcggcacagc

SEQ ID NO: 2063982 - RNA, 19 nt, Artificial Sequence
  Description of Artificial Sequence: Synthetic oligonucleotide
aggggaaucuuggcguacc

SEQ ID NO: 2063983 - RNA, 19 nt, Artificial Sequence
  Description of Artificial Sequence: Synthetic oligonucleotide
uucguguaucaggagguug

SEQ ID NO: 2063984 - RNA, 19 nt, Artificial Sequence
  Description of Artificial Sequence: Synthetic oligonucleotide
aagcauguuugcagugccg

SEQ ID NO: 2063985 - RNA, 19 nt, Artificial Sequence
  Description of Artificial Sequence: Synthetic oligonucleotide
uguggucaaaggcgaugcc

SEQ ID NO: 2063986 - RNA, 19 nt, Artificial Sequence
  Description of Artificial Sequence: Synthetic oligonucleotide
uccgcauccccacauuaau

SEQ ID NO: 2063987 - RNA, 19 nt, Artificial Sequence
  Description of Artificial Sequence: Synthetic oligonucleotide
cuucuuacucugugggcug

SEQ ID NO: 2063988 - RNA, 19 nt, Artificial Sequence
  Description of Artificial Sequence: Synthetic oligonucleotide
ucagcaagcccguguggug

SEQ ID NO: 2063989 - RNA, 19 nt, Artificial Sequence
  Description of Artificial Sequence: Synthetic oligonucleotide
gucuauuugcuguccauaa

SEQ ID NO: 2063990 - RNA, 19 nt, Artificial Sequence
  Description of Artificial Sequence: Synthetic oligonucleotide
auuaauagccugggaggug

SEQ ID NO: 2063991 - RNA, 19 nt, Artificial Sequence
  Description of Artificial Sequence: Synthetic oligonucleotide
ugggcugugcggcuccucc

SEQ ID NO: 2063992 - RNA, 19 nt, Artificial Sequence
  Description of Artificial Sequence: Synthetic oligonucleotide
uucauccgcauccccacau

SEQ ID NO: 2063993 - RNA, 19 nt, Artificial Sequence
  Description of Artificial Sequence: Synthetic oligonucleotide
ucggaucuucauugggaug

SEQ ID NO: 2063994 - RNA, 19 nt, Artificial Sequence
  Description of Artificial Sequence: Synthetic oligonucleotide
auacugauguggugcagaa

SEQ ID NO: 2063995 - RNA, 19 nt, Artificial Sequence
  Description of Artificial Sequence: Synthetic oligonucleotide
aaggcgaugccaacuuucu

SEQ ID NO: 2063996 - RNA, 19 nt, Artificial Sequence
  Description of Artificial Sequence: Synthetic oligonucleotide
ucugcgaacagggccuuca

SEQ ID NO: 2063997 - RNA, 19 nt, Artificial Sequence
  Description of Artificial Sequence: Synthetic oligonucleotide
uguuugcagugccguacca

SEQ ID NO: 2063998 - RNA, 19 nt, Artificial Sequence
  Description of Artificial Sequence: Synthetic oligonucleotide
ugucuauuugcuguccaua

SEQ ID NO: 2063999 - RNA, 19 nt, Artificial Sequence
  Description of Artificial Sequence: Synthetic oligonucleotide
uguccauaauggcggcaca

SEQ ID NO: 2064000 - RNA, 19 nt, Artificial Sequence
  Description of Artificial Sequence: Synthetic oligonucleotide
ugugucuuuuccaccgcuu

SEQ ID NO: 2064001 - RNA, 19 nt, Artificial Sequence
  Description of Artificial Sequence: Synthetic oligonucleotide
acuguugggaagucuucaa

SEQ ID NO: 2064002 - RNA, 19 nt, Artificial Sequence
  Description of Artificial Sequence: Synthetic oligonucleotide
agcgcaugcucucucugca

SEQ ID NO: 2064003 - RNA, 19 nt, Artificial Sequence
  Description of Artificial Sequence: Synthetic oligonucleotide
ucaggauacuggcuucuuu

SEQ ID NO: 2064004 - RNA, 19 nt, Artificial Sequence
  Description of Artificial Sequence: Synthetic oligonucleotide
guuugcagugccguaccag

SEQ ID NO: 2064005 - RNA, 19 nt, Artificial Sequence
  Description of Artificial Sequence: Synthetic oligonucleotide
aggcauuuggcaggaauca

SEQ ID NO: 2064006 - RNA, 19 nt, Artificial Sequence
  Description of Artificial Sequence: Synthetic oligonucleotide
auguuuccaacagcaaacu

SEQ ID NO: 2064007 - RNA, 19 nt, Artificial Sequence
  Description of Artificial Sequence: Synthetic oligonucleotide
caggagguuggcaucuuuc

SEQ ID NO: 2064008 - RNA, 19 nt, Artificial Sequence
  Description of Artificial Sequence: Synthetic oligonucleotide
agacuuuucagggcuuaug

SEQ ID NO: 2064009 - RNA, 19 nt, Artificial Sequence
  Description of Artificial Sequence: Synthetic oligonucleotide
ucuggacuagagccucaca

SEQ ID NO: 2064010 - RNA, 19 nt, Artificial Sequence
  Description of Artificial Sequence: Synthetic oligonucleotide
agguuggcaucuuucccca

SEQ ID NO: 2064011 - RNA, 19 nt, Artificial Sequence
  Description of Artificial Sequence: Synthetic oligonucleotide
ugccaacuuucucauuaaa

SEQ ID NO: 2064012 - RNA, 19 nt, Artificial Sequence
  Description of Artificial Sequence: Synthetic oligonucleotide
guaucaggagguuggcauc

SEQ ID NO: 2064013 - RNA, 19 nt, Artificial Sequence
  Description of Artificial Sequence: Synthetic oligonucleotide
aucuggacuagagccucac

SEQ ID NO: 2064014 - RNA, 19 nt, Artificial Sequence
  Description of Artificial Sequence: Synthetic oligonucleotide
ugcgaacagggccuucagu

SEQ ID NO: 2064015 - RNA, 19 nt, Artificial Sequence
  Description of Artificial Sequence: Synthetic oligonucleotide
cucacagggcaugguaucc

SEQ ID NO: 2064016 - RNA, 19 nt, Artificial Sequence
  Description of Artificial Sequence: Synthetic oligonucleotide
aucagcuugggcacuguug

SEQ ID NO: 2064017 - RNA, 19 nt, Artificial Sequence
  Description of Artificial Sequence: Synthetic oligonucleotide
caaacugauuagucuuuca

SEQ ID NO: 2064018 - RNA, 19 nt, Artificial Sequence
  Description of Artificial Sequence: Synthetic oligonucleotide
aaggugggacacaaacaca

SEQ ID NO: 2064019 - RNA, 19 nt, Artificial Sequence
  Description of Artificial Sequence: Synthetic oligonucleotide
agaccccguaccaaggaag

SEQ ID NO: 2064020 - RNA, 19 nt, Artificial Sequence
  Description of Artificial Sequence: Synthetic oligonucleotide
gacuagagccucacagggc

SEQ ID NO: 2064021 - RNA, 19 nt, Artificial Sequence
  Description of Artificial Sequence: Synthetic oligonucleotide
gacauuucggaucuucauu

SEQ ID NO: 2064022 - RNA, 19 nt, Artificial Sequence
  Description of Artificial Sequence: Synthetic oligonucleotide
aacguggaacugacauuuc

SEQ ID NO: 2064023 - RNA, 19 nt, Artificial Sequence
  Description of Artificial Sequence: Synthetic oligonucleotide
agggcugcucgcaccagcc

SEQ ID NO: 2064024 - RNA, 19 nt, Artificial Sequence
  Description of Artificial Sequence: Synthetic oligonucleotide
agauauucagcaagcccgu

SEQ ID NO: 2064025 - RNA, 19 nt, Artificial Sequence
  Description of Artificial Sequence: Synthetic oligonucleotide
ggagguuggcaucuuuccc

SEQ ID NO: 2064026 - RNA, 19 nt, Artificial Sequence
  Description of Artificial Sequence: Synthetic oligonucleotide
gaaggcauuuggcaggaau

SEQ ID NO: 2064027 - RNA, 19 nt, Artificial Sequence
  Description of Artificial Sequence: Synthetic oligonucleotide
agagccucacagggcaugg

SEQ ID NO: 2064028 - RNA, 19 nt, Artificial Sequence
  Description of Artificial Sequence: Synthetic oligonucleotide
guccauaauggcggcacag

SEQ ID NO: 2064029 - RNA, 19 nt, Artificial Sequence
  Description of Artificial Sequence: Synthetic oligonucleotide
caccgcuuccucuuccaag

SEQ ID NO: 2064030 - RNA, 19 nt, Artificial Sequence
  Description of Artificial Sequence: Synthetic oligonucleotide
cugaagugguucagcauga

SEQ ID NO: 2064031 - RNA, 19 nt, Artificial Sequence
  Description of Artificial Sequence: Synthetic oligonucleotide
uaccgcugacugaaguggu

SEQ ID NO: 2064032 - RNA, 19 nt, Artificial Sequence
  Description of Artificial Sequence: Synthetic oligonucleotide
ugccccuuucugaaggcau

SEQ ID NO: 2064033 - RNA, 19 nt, Artificial Sequence
  Description of Artificial Sequence: Synthetic oligonucleotide
gaggaguggacuagugcac

SEQ ID NO: 2064034 - RNA, 19 nt, Artificial Sequence
  Description of Artificial Sequence: Synthetic oligonucleotide
aggcgaugccaacuuucuc

SEQ ID NO: 2064035 - RNA, 19 nt, Artificial Sequence
  Description of Artificial Sequence: Synthetic oligonucleotide
cguggaacugacauuucgg

SEQ ID NO: 2064036 - RNA, 19 nt, Artificial Sequence
  Description of Artificial Sequence: Synthetic oligonucleotide
cuugggcacuguugggaag

SEQ ID NO: 2064037 - RNA, 19 nt, Artificial Sequence
  Description of Artificial Sequence: Synthetic oligonucleotide
uggcguaccgcugacugaa

SEQ ID NO: 2064038 - RNA, 19 nt, Artificial Sequence
  Description of Artificial Sequence: Synthetic oligonucleotide
cauugggauggcagacccc

SEQ ID NO: 2064039 - RNA, 19 nt, Artificial Sequence
  Description of Artificial Sequence: Synthetic oligonucleotide
guaggggccaccaccagca

SEQ ID NO: 2064040 - RNA, 19 nt, Artificial Sequence
  Description of Artificial Sequence: Synthetic oligonucleotide
cuccuugcgcucuaccauc

SEQ ID NO: 2064041 - RNA, 19 nt, Artificial Sequence
  Description of Artificial Sequence: Synthetic oligonucleotide
gauauucagcaagcccgug

SEQ ID NO: 2064042 - RNA, 19 nt, Artificial Sequence
  Description of Artificial Sequence: Synthetic oligonucleotide
uugcgcucuaccaucucuu

SEQ ID NO: 2064043 - RNA, 19 nt, Artificial Sequence
  Description of Artificial Sequence: Synthetic oligonucleotide
ugguugugauauugcugca

SEQ ID NO: 2064044 - RNA, 19 nt, Artificial Sequence
  Description of Artificial Sequence: Synthetic oligonucleotide
gguugugauauugcugcag

SEQ ID NO: 2064045 - RNA, 19 nt, Artificial Sequence
  Description of Artificial Sequence: Synthetic oligonucleotide
cauacugauguggugcaga

SEQ ID NO: 2064046 - RNA, 19 nt, Artificial Sequence
  Description of Artificial Sequence: Synthetic oligonucleotide
agagacuccagcgcaugcu

SEQ ID NO: 2064047 - RNA, 19 nt, Artificial Sequence
  Description of Artificial Sequence: Synthetic oligonucleotide
cgcauccccacauuaauag

SEQ ID NO: 2064048 - RNA, 19 nt, Artificial Sequence
  Description of Artificial Sequence: Synthetic oligonucleotide
cuuacucugugggcugugc

SEQ ID NO: 2064049 - RNA, 19 nt, Artificial Sequence
  Description of Artificial Sequence: Synthetic oligonucleotide
cagcgcaugcucucucugc

SEQ ID NO: 2064050 - RNA, 19 nt, Artificial Sequence
  Description of Artificial Sequence: Synthetic oligonucleotide
gucugcgugaaggugggac

SEQ ID NO: 2064051 - RNA, 19 nt, Artificial Sequence
  Description of Artificial Sequence: Synthetic oligonucleotide
agcagaccuucaugugguc

SEQ ID NO: 2064052 - RNA, 19 nt, Artificial Sequence
  Description of Artificial Sequence: Synthetic oligonucleotide
aagcccgugugguggucug

SEQ ID NO: 2064053 - RNA, 19 nt, Artificial Sequence
  Description of Artificial Sequence: Synthetic oligonucleotide
uuggcguaccgcugacuga

SEQ ID NO: 2064054 - RNA, 19 nt, Artificial Sequence
  Description of Artificial Sequence: Synthetic oligonucleotide
guggacuagugcacagccg

SEQ ID NO: 2064055 - RNA, 19 nt, Artificial Sequence
  Description of Artificial Sequence: Synthetic oligonucleotide
gaaauucuucuaagucaca

SEQ ID NO: 2064056 - RNA, 19 nt, Artificial Sequence
  Description of Artificial Sequence: Synthetic oligonucleotide
cagagacuccagcgcaugc

SEQ ID NO: 2064057 - RNA, 19 nt, Artificial Sequence
  Description of Artificial Sequence: Synthetic oligonucleotide
cccgaguagaccacuuucc

SEQ ID NO: 2064058 - RNA, 19 nt, Artificial Sequence
  Description of Artificial Sequence: Synthetic oligonucleotide
uccagcgcaugcucucucu

SEQ ID NO: 2064059 - RNA, 19 nt, Artificial Sequence
  Description of Artificial Sequence: Synthetic oligonucleotide
augccaacuuucucauuaa

SEQ ID NO: 2064060 - RNA, 19 nt, Artificial Sequence
  Description of Artificial Sequence: Synthetic oligonucleotide
uaauagccugggagguggu

SEQ ID NO: 2064061 - RNA, 19 nt, Artificial Sequence
  Description of Artificial Sequence: Synthetic oligonucleotide
gcaagauauucagcaagcc

SEQ ID NO: 2064062 - RNA, 19 nt, Artificial Sequence
  Description of Artificial Sequence: Synthetic oligonucleotide
acuuuccagccagaggagu

SEQ ID NO: 2064063 - RNA, 19 nt, Artificial Sequence
  Description of Artificial Sequence: Synthetic oligonucleotide
gugagguugcacaggacuc

SEQ ID NO: 2064064 - RNA, 19 nt, Artificial Sequence
  Description of Artificial Sequence: Synthetic oligonucleotide
gguucgguguccuccgggc

SEQ ID NO: 2064065 - RNA, 19 nt, Artificial Sequence
  Description of Artificial Sequence: Synthetic oligonucleotide
cucugucuauuugcugucc

SEQ ID NO: 2064066 - RNA, 19 nt, Artificial Sequence
  Description of Artificial Sequence: Synthetic oligonucleotide
ggaguggacuagugcacag

SEQ ID NO: 2064067 - RNA, 19 nt, Artificial Sequence
  Description of Artificial Sequence: Synthetic oligonucleotide
gguugcacaggacucuguc

SEQ ID NO: 2064068 - RNA, 19 nt, Artificial Sequence
  Description of Artificial Sequence: Synthetic oligonucleotide
auucauccgcauccccaca

SEQ ID NO: 2064069 - RNA, 19 nt, Artificial Sequence
  Description of Artificial Sequence: Synthetic oligonucleotide
gcugugugucuuuuccacc

SEQ ID NO: 2064070 - RNA, 19 nt, Artificial Sequence
  Description of Artificial Sequence: Synthetic oligonucleotide
gguaggggccaccaccagc

SEQ ID NO: 2064071 - RNA, 19 nt, Artificial Sequence
  Description of Artificial Sequence: Synthetic oligonucleotide
aggaguggacuagugcaca

SEQ ID NO: 2064072 - RNA, 19 nt, Artificial Sequence
  Description of Artificial Sequence: Synthetic oligonucleotide
ggaagacaauuucaggaua

SEQ ID NO: 2064073 - RNA, 19 nt, Artificial Sequence
  Description of Artificial Sequence: Synthetic oligonucleotide
auccccacauuaauagccu

SEQ ID NO: 2064074 - RNA, 19 nt, Artificial Sequence
  Description of Artificial Sequence: Synthetic oligonucleotide
agugccguaccaggcaggu

SEQ ID NO: 2064075 - RNA, 19 nt, Artificial Sequence
  Description of Artificial Sequence: Synthetic oligonucleotide
gauuaacguggaacugaca

SEQ ID NO: 2064076 - RNA, 19 nt, Artificial Sequence
  Description of Artificial Sequence: Synthetic oligonucleotide
ucuuacucugugggcugug

SEQ ID NO: 2064077 - RNA, 19 nt, Artificial Sequence
  Description of Artificial Sequence: Synthetic oligonucleotide
uucuuacucugugggcugu

SEQ ID NO: 2064078 - RNA, 19 nt, Artificial Sequence
  Description of Artificial Sequence: Synthetic oligonucleotide
agaggggaaucuuggcgua

SEQ ID NO: 2064079 - RNA, 19 nt, Artificial Sequence
  Description of Artificial Sequence: Synthetic oligonucleotide
cauuaauagccugggaggu

SEQ ID NO: 2064080 - RNA, 19 nt, Artificial Sequence
  Description of Artificial Sequence: Synthetic oligonucleotide
ggacacaaacacagcagug

SEQ ID NO: 2064081 - RNA, 19 nt, Artificial Sequence
  Description of Artificial Sequence: Synthetic oligonucleotide
uaauggcggcacagcugcc

SEQ ID NO: 2064082 - RNA, 19 nt, Artificial Sequence
  Description of Artificial Sequence: Synthetic oligonucleotide
ggggaaucuuggcguaccg

SEQ ID NO: 2064083 - RNA, 19 nt, Artificial Sequence
  Description of Artificial Sequence: Synthetic oligonucleotide
ggauggcagaccccguacc

SEQ ID NO: 2064084 - RNA, 19 nt, Artificial Sequence
  Description of Artificial Sequence: Synthetic oligonucleotide
ucccgccucuccuugcgcu

SEQ ID NO: 2064085 - RNA, 19 nt, Artificial Sequence
  Description of Artificial Sequence: Synthetic oligonucleotide
cagaguggcuucguguauc

SEQ ID NO: 2064086 - RNA, 19 nt, Artificial Sequence
  Description of Artificial Sequence: Synthetic oligonucleotide
gaccccguaccaaggaaga

SEQ ID NO: 2064087 - RNA, 19 nt, Artificial Sequence
  Description of Artificial Sequence: Synthetic oligonucleotide
cugcgugaaggugggacac

SEQ ID NO: 2064088 - RNA, 19 nt, Artificial Sequence
  Description of Artificial Sequence: Synthetic oligonucleotide
cagaaucuccuggcacugg

SEQ ID NO: 2064089 - RNA, 19 nt, Artificial Sequence
  Description of Artificial Sequence: Synthetic oligonucleotide
accccguaccaaggaagac

SEQ ID NO: 2064090 - RNA, 19 nt, Artificial Sequence
  Description of Artificial Sequence: Synthetic oligonucleotide
ggacucugucuauuugcug

SEQ ID NO: 2064091 - RNA, 19 nt, Artificial Sequence
  Description of Artificial Sequence: Synthetic oligonucleotide
agcaaaggcuggaaggguu

SEQ ID NO: 2064092 - RNA, 19 nt, Artificial Sequence
  Description of Artificial Sequence: Synthetic oligonucleotide
gacuagugcacagccgaaa

SEQ ID NO: 2064093 - RNA, 19 nt, Artificial Sequence
  Description of Artificial Sequence: Synthetic oligonucleotide
uuccagccagaggagugga

SEQ ID NO: 2064094 - RNA, 19 nt, Artificial Sequence
  Description of Artificial Sequence: Synthetic oligonucleotide
gguuuucccagagacucca

SEQ ID NO: 2064095 - RNA, 19 nt, Artificial Sequence
  Description of Artificial Sequence: Synthetic oligonucleotide
gggacacaaacacagcagu

SEQ ID NO: 2064096 - RNA, 19 nt, Artificial Sequence
  Description of Artificial Sequence: Synthetic oligonucleotide
agcaagcccgugugguggu

SEQ ID NO: 2064097 - RNA, 19 nt, Artificial Sequence
  Description of Artificial Sequence: Synthetic oligonucleotide
guagaccacuuuccagcca

SEQ ID NO: 2064098 - RNA, 19 nt, Artificial Sequence
  Description of Artificial Sequence: Synthetic oligonucleotide
uucagggcuuauguugauu

SEQ ID NO: 2064099 - RNA, 19 nt, Artificial Sequence
  Description of Artificial Sequence: Synthetic oligonucleotide
cugcgaacagggccuucag

SEQ ID NO: 2064100 - RNA, 19 nt, Artificial Sequence
  Description of Artificial Sequence: Synthetic oligonucleotide
ugaagugguucagcaugau

SEQ ID NO: 2064101 - RNA, 19 nt, Artificial Sequence
  Description of Artificial Sequence: Synthetic oligonucleotide
cgaguagaccacuuuccag

SEQ ID NO: 2064102 - RNA, 19 nt, Artificial Sequence
  Description of Artificial Sequence: Synthetic oligonucleotide
ccaggcaggucugaaauuc

SEQ ID NO: 2064103 - RNA, 19 nt, Artificial Sequence
  Description of Artificial Sequence: Synthetic oligonucleotide
cuagacuguucuggggcuc

SEQ ID NO: 2064104 - RNA, 19 nt, Artificial Sequence
  Description of Artificial Sequence: Synthetic oligonucleotide
gugcccucuccacagucca

SEQ ID NO: 2064105 - RNA, 19 nt, Artificial Sequence
  Description of Artificial Sequence: Synthetic oligonucleotide
ggguucgguguccuccggg

SEQ ID NO: 2064106 - RNA, 19 nt, Artificial Sequence
  Description of Artificial Sequence: Synthetic oligonucleotide
ggcauucauccgcaucccc

SEQ ID NO: 2064107 - RNA, 19 nt, Artificial Sequence
  Description of Artificial Sequence: Synthetic oligonucleotide
caguccagcaacacagacu

SEQ ID NO: 2064108 - RNA, 19 nt, Artificial Sequence
  Description of Artificial Sequence: Synthetic oligonucleotide
gucaaaggcgaugccaacu

SEQ ID NO: 2064109 - RNA, 19 nt, Artificial Sequence
  Description of Artificial Sequence: Synthetic oligonucleotide
ugcgugaaggugggacaca

SEQ ID NO: 2064110 - RNA, 19 nt, Artificial Sequence
  Description of Artificial Sequence: Synthetic oligonucleotide
ucuuggcguaccgcugacu

SEQ ID NO: 2064111 - RNA, 19 nt, Artificial Sequence
  Description of Artificial Sequence: Synthetic oligonucleotide
caggucugaaauucuucua

SEQ ID NO: 2064112 - RNA, 19 nt, Artificial Sequence
  Description of Artificial Sequence: Synthetic oligonucleotide
gaggggaaucuuggcguac

SEQ ID NO: 2064113 - RNA, 19 nt, Artificial Sequence
  Description of Artificial Sequence: Synthetic oligonucleotide
gaguggcuucguguaucag

SEQ ID NO: 2064114 - RNA, 19 nt, Artificial Sequence
  Description of Artificial Sequence: Synthetic oligonucleotide
cugauguggugcagaaucu

SEQ ID NO: 2064115 - RNA, 19 nt, Artificial Sequence
  Description of Artificial Sequence: Synthetic oligonucleotide
guaccaaggaagacaauuu

SEQ ID NO: 2064116 - RNA, 19 nt, Artificial Sequence
  Description of Artificial Sequence: Synthetic oligonucleotide
uacugauguggugcagaau

SEQ ID NO: 2064117 - RNA, 19 nt, Artificial Sequence
  Description of Artificial Sequence: Synthetic oligonucleotide
gggauggcagaccccguac

SEQ ID NO: 2064118 - RNA, 19 nt, Artificial Sequence
  Description of Artificial Sequence: Synthetic oligonucleotide
cuuuccccaucuggacuag

SEQ ID NO: 2064119 - RNA, 19 nt, Artificial Sequence
  Description of Artificial Sequence: Synthetic oligonucleotide
gcauucauccgcaucccca

SEQ ID NO: 2064120 - RNA, 19 nt, Artificial Sequence
  Description of Artificial Sequence: Synthetic oligonucleotide
ggcuuauguugauuaacgu

SEQ ID NO: 2064121 - RNA, 19 nt, Artificial Sequence
  Description of Artificial Sequence: Synthetic oligonucleotide
gcccaaaagugcccucucc

SEQ ID NO: 2064122 - RNA, 19 nt, Artificial Sequence
  Description of Artificial Sequence: Synthetic oligonucleotide
cugaaggcauuuggcagga

SEQ ID NO: 2064123 - RNA, 19 nt, Artificial Sequence
  Description of Artificial Sequence: Synthetic oligonucleotide
gggaaucuuggcguaccgc

SEQ ID NO: 2064124 - RNA, 19 nt, Artificial Sequence
  Description of Artificial Sequence: Synthetic oligonucleotide
ucgguguccuccgggcugu

SEQ ID NO: 2064125 - RNA, 19 nt, Artificial Sequence
  Description of Artificial Sequence: Synthetic oligonucleotide
ggcagaccccguaccaagg

SEQ ID NO: 2064126 - RNA, 19 nt, Artificial Sequence
  Description of Artificial Sequence: Synthetic oligonucleotide
agcccgugugguggucugc

SEQ ID NO: 2064127 - RNA, 19 nt, Artificial Sequence
  Description of Artificial Sequence: Synthetic oligonucleotide
ggagguggugcuguguguc

SEQ ID NO: 2064128 - RNA, 19 nt, Artificial Sequence
  Description of Artificial Sequence: Synthetic oligonucleotide
uuuccccaucuggacuaga

SEQ ID NO: 2064129 - RNA, 19 nt, Artificial Sequence
  Description of Artificial Sequence: Synthetic oligonucleotide
acuuggcauucauccgcau

SEQ ID NO: 2064130 - RNA, 19 nt, Artificial Sequence
  Description of Artificial Sequence: Synthetic oligonucleotide
gcacugguugugauauugc

SEQ ID NO: 2064131 - RNA, 19 nt, Artificial Sequence
  Description of Artificial Sequence: Synthetic oligonucleotide
auggcagaccccguaccaa

SEQ ID NO: 2064132 - RNA, 19 nt, Artificial Sequence
  Description of Artificial Sequence: Synthetic oligonucleotide
ggcaggucugaaauucuuc

SEQ ID NO: 2064133 - RNA, 19 nt, Artificial Sequence
  Description of Artificial Sequence: Synthetic oligonucleotide
cagggcuuauguugauuaa

SEQ ID NO: 2064134 - RNA, 19 nt, Artificial Sequence
  Description of Artificial Sequence: Synthetic oligonucleotide
cauccgcauccccacauua

SEQ ID NO: 2064135 - RNA, 19 nt, Artificial Sequence
  Description of Artificial Sequence: Synthetic oligonucleotide
agggcccgcuucugcuggg

SEQ ID NO: 2064136 - RNA, 19 nt, Artificial Sequence
  Description of Artificial Sequence: Synthetic oligonucleotide
agcuggguaggggccacca

SEQ ID NO: 2064137 - RNA, 19 nt, Artificial Sequence
  Description of Artificial Sequence: Synthetic oligonucleotide
uccgggcugucucgcugcu

SEQ ID NO: 2064138 - RNA, 19 nt, Artificial Sequence
  Description of Artificial Sequence: Synthetic oligonucleotide
cccguaccaaggaagacaa

SEQ ID NO: 2064139 - RNA, 19 nt, Artificial Sequence
  Description of Artificial Sequence: Synthetic oligonucleotide
auccgcauccccacauuaa

SEQ ID NO: 2064140 - RNA, 19 nt, Artificial Sequence
  Description of Artificial Sequence: Synthetic oligonucleotide
ccccgaguagaccacuuuc

SEQ ID NO: 2064141 - RNA, 19 nt, Artificial Sequence
  Description of Artificial Sequence: Synthetic oligonucleotide
gggcugugcggcuccuccg

SEQ ID NO: 2064142 - RNA, 19 nt, Artificial Sequence
  Description of Artificial Sequence: Synthetic oligonucleotide
caacagcaaacugauuagu

SEQ ID NO: 2064143 - RNA, 19 nt, Artificial Sequence
  Description of Artificial Sequence: Synthetic oligonucleotide
agaccuucauguggucaaa

SEQ ID NO: 2064144 - RNA, 19 nt, Artificial Sequence
  Description of Artificial Sequence: Synthetic oligonucleotide
gcauuuggcaggaaucaua

SEQ ID NO: 2064145 - RNA, 19 nt, Artificial Sequence
  Description of Artificial Sequence: Synthetic oligonucleotide
cagccagaggaguggacua

SEQ ID NO: 2064146 - RNA, 19 nt, Artificial Sequence
  Description of Artificial Sequence: Synthetic oligonucleotide
cgcaugcucucucugcagc

SEQ ID NO: 2064147 - RNA, 19 nt, Artificial Sequence
  Description of Artificial Sequence: Synthetic oligonucleotide
ugcugggguucgguguccu

SEQ ID NO: 2064148 - RNA, 19 nt, Artificial Sequence
  Description of Artificial Sequence: Synthetic oligonucleotide
cuccagcgcaugcucucuc

SEQ ID NO: 2064149 - RNA, 19 nt, Artificial Sequence
  Description of Artificial Sequence: Synthetic oligonucleotide
cagaccccguaccaaggaa

SEQ ID NO: 2064150 - RNA, 19 nt, Artificial Sequence
  Description of Artificial Sequence: Synthetic oligonucleotide
aggcaggucugaaauucuu

SEQ ID NO: 2064151 - RNA, 19 nt, Artificial Sequence
  Description of Artificial Sequence: Synthetic oligonucleotide
cugucuauuugcuguccau

SEQ ID NO: 2064152 - RNA, 19 nt, Artificial Sequence
  Description of Artificial Sequence: Synthetic oligonucleotide
cugucucgcugcugggcca

SEQ ID NO: 2064153 - RNA, 19 nt, Artificial Sequence
  Description of Artificial Sequence: Synthetic oligonucleotide
gcgcaugcucucucugcag

SEQ ID NO: 2064154 - RNA, 19 nt, Artificial Sequence
  Description of Artificial Sequence: Synthetic oligonucleotide
ccgaguagaccacuuucca

SEQ ID NO: 2064155 - RNA, 19 nt, Artificial Sequence
  Description of Artificial Sequence: Synthetic oligonucleotide
ugggcacuguugggaaguc

SEQ ID NO: 2064156 - RNA, 19 nt, Artificial Sequence
  Description of Artificial Sequence: Synthetic oligonucleotide
gcccgugugguggucugcg

SEQ ID NO: 2064157 - RNA, 19 nt, Artificial Sequence
  Description of Artificial Sequence: Synthetic oligonucleotide
ccgugugguggucugcgug

SEQ ID NO: 2064158 - RNA, 19 nt, Artificial Sequence
  Description of Artificial Sequence: Synthetic oligonucleotide
ccuucuuacucugugggcu

SEQ ID NO: 2064159 - RNA, 19 nt, Artificial Sequence
  Description of Artificial Sequence: Synthetic oligonucleotide
agguugcacaggacucugu

SEQ ID NO: 2064160 - RNA, 19 nt, Artificial Sequence
  Description of Artificial Sequence: Synthetic oligonucleotide
guucgguguccuccgggcu

SEQ ID NO: 2064161 - RNA, 19 nt, Artificial Sequence
  Description of Artificial Sequence: Synthetic oligonucleotide
ccgaaagcauguuugcagu

SEQ ID NO: 2064162 - RNA, 19 nt, Artificial Sequence
  Description of Artificial Sequence: Synthetic oligonucleotide
gggguucgguguccuccgg

SEQ ID NO: 2064163 - RNA, 19 nt, Artificial Sequence
  Description of Artificial Sequence: Synthetic oligonucleotide
cugcugggguucggugucc

SEQ ID NO: 2064164 - RNA, 19 nt, Artificial Sequence
  Description of Artificial Sequence: Synthetic oligonucleotide
cauuaaagucagggcugaa

SEQ ID NO: 2064165 - RNA, 19 nt, Artificial Sequence
  Description of Artificial Sequence: Synthetic oligonucleotide
ccauaauggcggcacagcu

SEQ ID NO: 2064166 - RNA, 19 nt, Artificial Sequence
  Description of Artificial Sequence: Synthetic oligonucleotide
agaccacuuuccagccaga

SEQ ID NO: 2064167 - RNA, 19 nt, Artificial Sequence
  Description of Artificial Sequence: Synthetic oligonucleotide
cucgcaccagccgcagcuc

SEQ ID NO: 2064168 - RNA, 19 nt, Artificial Sequence
  Description of Artificial Sequence: Synthetic oligonucleotide
ccagcgcaugcucucucug

SEQ ID NO: 2064169 - RNA, 19 nt, Artificial Sequence
  Description of Artificial Sequence: Synthetic oligonucleotide
ccccguaccaaggaagaca

SEQ ID NO: 2064170 - RNA, 19 nt, Artificial Sequence
  Description of Artificial Sequence: Synthetic oligonucleotide
cugcucgcaccagccgcag

SEQ ID NO: 2064171 - RNA, 19 nt, Artificial Sequence
  Description of Artificial Sequence: Synthetic oligonucleotide
ccgcugacugaagugguuc

SEQ ID NO: 2064172 - RNA, 19 nt, Artificial Sequence
  Description of Artificial Sequence: Synthetic oligonucleotide
ccuccagaguggcuucgug

SEQ ID NO: 2064173 - RNA, 19 nt, Artificial Sequence
  Description of Artificial Sequence: Synthetic oligonucleotide
gaaucagcuugggcacugu

SEQ ID NO: 2064174 - RNA, 19 nt, Artificial Sequence
  Description of Artificial Sequence: Synthetic oligonucleotide
accgcugacugaagugguu

SEQ ID NO: 2064175 - RNA, 19 nt, Artificial Sequence
  Description of Artificial Sequence: Synthetic oligonucleotide
ccucugccccuuucugaag

SEQ ID NO: 2064176 - RNA, 19 nt, Artificial Sequence
  Description of Artificial Sequence: Synthetic oligonucleotide
cugcccaaaagugcccucu

SEQ ID NO: 2064177 - RNA, 19 nt, Artificial Sequence
  Description of Artificial Sequence: Synthetic oligonucleotide
gcauguuugcagugccgua

SEQ ID NO: 2064178 - RNA, 19 nt, Artificial Sequence
  Description of Artificial Sequence: Synthetic oligonucleotide
cgugugguggucugcguga

SEQ ID NO: 2064179 - RNA, 19 nt, Artificial Sequence
  Description of Artificial Sequence: Synthetic oligonucleotide
cacagccgaaagcauguuu

SEQ ID NO: 2064180 - RNA, 19 nt, Artificial Sequence
  Description of Artificial Sequence: Synthetic oligonucleotide
gcuggguaggggccaccac

SEQ ID NO: 2064181 - RNA, 19 nt, Artificial Sequence
  Description of Artificial Sequence: Synthetic oligonucleotide
aucaggagguuggcaucuu

SEQ ID NO: 2064182 - RNA, 19 nt, Artificial Sequence
  Description of Artificial Sequence: Synthetic oligonucleotide
ccaggagggcugcucgcac

SEQ ID NO: 2064183 - RNA, 19 nt, Artificial Sequence
  Description of Artificial Sequence: Synthetic oligonucleotide
gcgugaaggugggacacaa

SEQ ID NO: 2064184 - RNA, 19 nt, Artificial Sequence
  Description of Artificial Sequence: Synthetic oligonucleotide
gcugcucgcaccagccgca

SEQ ID NO: 2064185 - RNA, 19 nt, Artificial Sequence
  Description of Artificial Sequence: Synthetic oligonucleotide
acacagcagugagguugca

SEQ ID NO: 2064186 - RNA, 19 nt, Artificial Sequence
  Description of Artificial Sequence: Synthetic oligonucleotide
cuagagccucacagggcau

SEQ ID NO: 2064187 - RNA, 19 nt, Artificial Sequence
  Description of Artificial Sequence: Synthetic oligonucleotide
ggacuagugcacagccgaa

SEQ ID NO: 2064188 - RNA, 19 nt, Artificial Sequence
  Description of Artificial Sequence: Synthetic oligonucleotide
gcguaccgcugacugaagu

SEQ ID NO: 2064189 - RNA, 19 nt, Artificial Sequence
  Description of Artificial Sequence: Synthetic oligonucleotide
ggcguaccgcugacugaag

SEQ ID NO: 2064190 - RNA, 19 nt, Artificial Sequence
  Description of Artificial Sequence: Synthetic oligonucleotide
gggcugaagaggggaaucu

SEQ ID NO: 2064191 - RNA, 19 nt, Artificial Sequence
  Description of Artificial Sequence: Synthetic oligonucleotide
gccaggagggcugcucgca

SEQ ID NO: 2064192 - RNA, 19 nt, Artificial Sequence
  Description of Artificial Sequence: Synthetic oligonucleotide
ggccuucagugagggaauc

SEQ ID NO: 2064193 - RNA, 19 nt, Artificial Sequence
  Description of Artificial Sequence: Synthetic oligonucleotide
caagcccgugugguggucu

SEQ ID NO: 2064194 - RNA, 19 nt, Artificial Sequence
  Description of Artificial Sequence: Synthetic oligonucleotide
ccagccagaggaguggacu

SEQ ID NO: 2064195 - RNA, 19 nt, Artificial Sequence
  Description of Artificial Sequence: Synthetic oligonucleotide
ccgcauccccacauuaaua

SEQ ID NO: 2064196 - RNA, 19 nt, Artificial Sequence
  Description of Artificial Sequence: Synthetic oligonucleotide
cuucguguaucaggagguu

SEQ ID NO: 2064197 - RNA, 19 nt, Artificial Sequence
  Description of Artificial Sequence: Synthetic oligonucleotide
gugccguaccaggcagguc

SEQ ID NO: 2064198 - RNA, 19 nt, Artificial Sequence
  Description of Artificial Sequence: Synthetic oligonucleotide
caaaggcuggaaggguuuu

SEQ ID NO: 2064199 - RNA, 19 nt, Artificial Sequence
  Description of Artificial Sequence: Synthetic oligonucleotide
cagacuuuucagggcuuau

SEQ ID NO: 2064200 - RNA, 19 nt, Artificial Sequence
  Description of Artificial Sequence: Synthetic oligonucleotide
gcaaaggcuggaaggguuu

SEQ ID NO: 2064201 - RNA, 19 nt, Artificial Sequence
  Description of Artificial Sequence: Synthetic oligonucleotide
gccagaggaguggacuagu

SEQ ID NO: 2064202 - RNA, 19 nt, Artificial Sequence
  Description of Artificial Sequence: Synthetic oligonucleotide
gcucucucugcagcaagau

SEQ ID NO: 2064203 - RNA, 19 nt, Artificial Sequence
  Description of Artificial Sequence: Synthetic oligonucleotide
gcaagcccguguggugguc

SEQ ID NO: 2064204 - RNA, 19 nt, Artificial Sequence
  Description of Artificial Sequence: Synthetic oligonucleotide
gcacaggacucugucuauu

SEQ ID NO: 2064205 - RNA, 19 nt, Artificial Sequence
  Description of Artificial Sequence: Synthetic oligonucleotide
ggucugcgugaagguggga

SEQ ID NO: 2064206 - RNA, 19 nt, Artificial Sequence
  Description of Artificial Sequence: Synthetic oligonucleotide
ccagaguggcuucguguau

SEQ ID NO: 2064207 - RNA, 19 nt, Artificial Sequence
  Description of Artificial Sequence: Synthetic oligonucleotide
caucugcgaacagggccuu

SEQ ID NO: 2064208 - RNA, 19 nt, Artificial Sequence
  Description of Artificial Sequence: Synthetic oligonucleotide
ccgggcugucucgcugcug

SEQ ID NO: 2064209 - RNA, 19 nt, Artificial Sequence
  Description of Artificial Sequence: Synthetic oligonucleotide
ccguaccaggcaggucuga

SEQ ID NO: 2064210 - RNA, 19 nt, Artificial Sequence
  Description of Artificial Sequence: Synthetic oligonucleotide
cccgugugguggucugcgu

SEQ ID NO: 2064211 - RNA, 19 nt, Artificial Sequence
  Description of Artificial Sequence: Synthetic oligonucleotide
gcacagccgaaagcauguu

SEQ ID NO: 2064212 - RNA, 19 nt, Artificial Sequence
  Description of Artificial Sequence: Synthetic oligonucleotide
ccguaccaaggaagacaau

SEQ ID NO: 2064213 - RNA, 19 nt, Artificial Sequence
  Description of Artificial Sequence: Synthetic oligonucleotide
auaguuaauaauuuaaagg

SEQ ID NO: 2064214 - RNA, 19 nt, Artificial Sequence
  Description of Artificial Sequence: Synthetic oligonucleotide
aaucguaaucccuugaguc

SEQ ID NO: 2064215 - RNA, 19 nt, Artificial Sequence
  Description of Artificial Sequence: Synthetic oligonucleotide
agauguagguccuaagccc

SEQ ID NO: 2064216 - RNA, 19 nt, Artificial Sequence
  Description of Artificial Sequence: Synthetic oligonucleotide
aaucacagguuccggauac

SEQ ID NO: 2064217 - RNA, 19 nt, Artificial Sequence
  Description of Artificial Sequence: Synthetic oligonucleotide
uaacccaaagaucucacag

SEQ ID NO: 2064218 - RNA, 19 nt, Artificial Sequence
  Description of Artificial Sequence: Synthetic oligonucleotide
aucguaaucccuugagucc

SEQ ID NO: 2064219 - RNA, 19 nt, Artificial Sequence
  Description of Artificial Sequence: Synthetic oligonucleotide
aucaagacugucuuggcuc

SEQ ID NO: 2064220 - RNA, 19 nt, Artificial Sequence
  Description of Artificial Sequence: Synthetic oligonucleotide
uuccggauacaauaaauag

SEQ ID NO: 2064221 - RNA, 19 nt, Artificial Sequence
  Description of Artificial Sequence: Synthetic oligonucleotide
acugucuuggcucggagac

SEQ ID NO: 2064222 - RNA, 19 nt, Artificial Sequence
  Description of Artificial Sequence: Synthetic oligonucleotide
augagagcuagacagagug

SEQ ID NO: 2064223 - RNA, 19 nt, Artificial Sequence
  Description of Artificial Sequence: Synthetic oligonucleotide
gagaccgaggcacagagag

SEQ ID NO: 2064224 - RNA, 19 nt, Artificial Sequence
  Description of Artificial Sequence: Synthetic oligonucleotide
aauaaauaguuaauaauuu

SEQ ID NO: 2064225 - RNA, 19 nt, Artificial Sequence
  Description of Artificial Sequence: Synthetic oligonucleotide
uccaucaagacugucuugg

SEQ ID NO: 2064226 - RNA, 19 nt, Artificial Sequence
  Description of Artificial Sequence: Synthetic oligonucleotide
uaauccaucaagacugucu

SEQ ID NO: 2064227 - RNA, 19 nt, Artificial Sequence
  Description of Artificial Sequence: Synthetic oligonucleotide
auucccagguacuuagggc

SEQ ID NO: 2064228 - RNA, 19 nt, Artificial Sequence
  Description of Artificial Sequence: Synthetic oligonucleotide
aaaucguaaucccuugagu

SEQ ID NO: 2064229 - RNA, 19 nt, Artificial Sequence
  Description of Artificial Sequence: Synthetic oligonucleotide
auaaauaguuaauaauuua

SEQ ID NO: 2064230 - RNA, 19 nt, Artificial Sequence
  Description of Artificial Sequence: Synthetic oligonucleotide
gagagcuagacagaguggg

SEQ ID NO: 2064231 - RNA, 19 nt, Artificial Sequence
  Description of Artificial Sequence: Synthetic oligonucleotide
gagccuacgcacuagcagg

SEQ ID NO: 2064232 - RNA, 19 nt, Artificial Sequence
  Description of Artificial Sequence: Synthetic oligonucleotide
ucugacagugaugagagcu

SEQ ID NO: 2064233 - RNA, 19 nt, Artificial Sequence
  Description of Artificial Sequence: Synthetic oligonucleotide
uccggauacaauaaauagu

SEQ ID NO: 2064234 - RNA, 19 nt, Artificial Sequence
  Description of Artificial Sequence: Synthetic oligonucleotide
aacgagguagguuaagaau

SEQ ID NO: 2064235 - RNA, 19 nt, Artificial Sequence
  Description of Artificial Sequence: Synthetic oligonucleotide
aauccaucaagacugucuu

SEQ ID NO: 2064236 - RNA, 19 nt, Artificial Sequence
  Description of Artificial Sequence: Synthetic oligonucleotide
acagugaugagagcuagac

SEQ ID NO: 2064237 - RNA, 19 nt, Artificial Sequence
  Description of Artificial Sequence: Synthetic oligonucleotide
guuaggugcacauucccag

SEQ ID NO: 2064238 - RNA, 19 nt, Artificial Sequence
  Description of Artificial Sequence: Synthetic oligonucleotide
ugagccuacgcacuagcag

SEQ ID NO: 2064239 - RNA, 19 nt, Artificial Sequence
  Description of Artificial Sequence: Synthetic oligonucleotide
ucaagacugucuuggcucg

SEQ ID NO: 2064240 - RNA, 19 nt, Artificial Sequence
  Description of Artificial Sequence: Synthetic oligonucleotide
ggaaugguugguuaggugc

SEQ ID NO: 2064241 - RNA, 19 nt, Artificial Sequence
  Description of Artificial Sequence: Synthetic oligonucleotide
cauacagcacucucggucc

SEQ ID NO: 2064242 - RNA, 19 nt, Artificial Sequence
  Description of Artificial Sequence: Synthetic oligonucleotide
cagauguagguccuaagcc

SEQ ID NO: 2064243 - RNA, 19 nt, Artificial Sequence
  Description of Artificial Sequence: Synthetic oligonucleotide
agccccauaauccaucaag

SEQ ID NO: 2064244 - RNA, 19 nt, Artificial Sequence
  Description of Artificial Sequence: Synthetic oligonucleotide
gaccgaggcacagagaggg

SEQ ID NO: 2064245 - RNA, 19 nt, Artificial Sequence
  Description of Artificial Sequence: Synthetic oligonucleotide
ugggagagcugaaucacag

SEQ ID NO: 2064246 - RNA, 19 nt, Artificial Sequence
  Description of Artificial Sequence: Synthetic oligonucleotide
guugguuaggugcacauuc

SEQ ID NO: 2064247 - RNA, 19 nt, Artificial Sequence
  Description of Artificial Sequence: Synthetic oligonucleotide
agugcugcaccccucaaug

SEQ ID NO: 2064248 - RNA, 19 nt, Artificial Sequence
  Description of Artificial Sequence: Synthetic oligonucleotide
gacaccagauccuagccac

SEQ ID NO: 2064249 - RNA, 19 nt, Artificial Sequence
  Description of Artificial Sequence: Synthetic oligonucleotide
aaacgagguagguuaagaa

SEQ ID NO: 2064250 - RNA, 19 nt, Artificial Sequence
  Description of Artificial Sequence: Synthetic oligonucleotide
aaucccuugaguccccaca

SEQ ID NO: 2064251 - RNA, 19 nt, Artificial Sequence
  Description of Artificial Sequence: Synthetic oligonucleotide
agugcacacaccgugcggc

SEQ ID NO: 2064252 - RNA, 19 nt, Artificial Sequence
  Description of Artificial Sequence: Synthetic oligonucleotide
aaaacgagguagguuaaga

SEQ ID NO: 2064253 - RNA, 19 nt, Artificial Sequence
  Description of Artificial Sequence: Synthetic oligonucleotide
uccaccccuucccaaaacg

SEQ ID NO: 2064254 - RNA, 19 nt, Artificial Sequence
  Description of Artificial Sequence: Synthetic oligonucleotide
uggguaaugaggaaugguu

SEQ ID NO: 2064255 - RNA, 19 nt, Artificial Sequence
  Description of Artificial Sequence: Synthetic oligonucleotide
ugaugagagcuagacagag

SEQ ID NO: 2064256 - RNA, 19 nt, Artificial Sequence
  Description of Artificial Sequence: Synthetic oligonucleotide
uuaggugcacauucccagg

SEQ ID NO: 2064257 - RNA, 19 nt, Artificial Sequence
  Description of Artificial Sequence: Synthetic oligonucleotide
acugcuuaacccaaagauc

SEQ ID NO: 2064258 - RNA, 19 nt, Artificial Sequence
  Description of Artificial Sequence: Synthetic oligonucleotide
aguccccacugcuuaaccc

SEQ ID NO: 2064259 - RNA, 19 nt, Artificial Sequence
  Description of Artificial Sequence: Synthetic oligonucleotide
agaucucacagcaccauac

SEQ ID NO: 2064260 - RNA, 19 nt, Artificial Sequence
  Description of Artificial Sequence: Synthetic oligonucleotide
acagguuccggauacaaua

SEQ ID NO: 2064261 - RNA, 19 nt, Artificial Sequence
  Description of Artificial Sequence: Synthetic oligonucleotide
gguagguuaagaauggagc

SEQ ID NO: 2064262 - RNA, 19 nt, Artificial Sequence
  Description of Artificial Sequence: Synthetic oligonucleotide
augaggaaugguugguuag

SEQ ID NO: 2064263 - RNA, 19 nt, Artificial Sequence
  Description of Artificial Sequence: Synthetic oligonucleotide
auccuagccacaucguguc

SEQ ID NO: 2064264 - RNA, 19 nt, Artificial Sequence
  Description of Artificial Sequence: Synthetic oligonucleotide
ugucgcaacccagugacag

SEQ ID NO: 2064265 - RNA, 19 nt, Artificial Sequence
  Description of Artificial Sequence: Synthetic oligonucleotide
acgagguagguuaagaaug

SEQ ID NO: 2064266 - RNA, 19 nt, Artificial Sequence
  Description of Artificial Sequence: Synthetic oligonucleotide
gauguagguccuaagcccc

SEQ ID NO: 2064267 - RNA, 19 nt, Artificial Sequence
  Description of Artificial Sequence: Synthetic oligonucleotide
cacauucccagguacuuag

SEQ ID NO: 2064268 - RNA, 19 nt, Artificial Sequence
  Description of Artificial Sequence: Synthetic oligonucleotide
cucacaagcgcacgggucc

SEQ ID NO: 2064269 - RNA, 19 nt, Artificial Sequence
  Description of Artificial Sequence: Synthetic oligonucleotide
aacccagugacaggcgcgc

SEQ ID NO: 2064270 - RNA, 19 nt, Artificial Sequence
  Description of Artificial Sequence: Synthetic oligonucleotide
uugguuaggugcacauucc

SEQ ID NO: 2064271 - RNA, 19 nt, Artificial Sequence
  Description of Artificial Sequence: Synthetic oligonucleotide
caccauacagcacucucgg

SEQ ID NO: 2064272 - RNA, 19 nt, Artificial Sequence
  Description of Artificial Sequence: Synthetic oligonucleotide
aacagaggcagggcacugc

SEQ ID NO: 2064273 - RNA, 19 nt, Artificial Sequence
  Description of Artificial Sequence: Synthetic oligonucleotide
gacagaguggggaugggag

SEQ ID NO: 2064274 - RNA, 19 nt, Artificial Sequence
  Description of Artificial Sequence: Synthetic oligonucleotide
ugaaucacagguuccggau

SEQ ID NO: 2064275 - RNA, 19 nt, Artificial Sequence
  Description of Artificial Sequence: Synthetic oligonucleotide
gagacuagggaaccuuccc

SEQ ID NO: 2064276 - RNA, 19 nt, Artificial Sequence
  Description of Artificial Sequence: Synthetic oligonucleotide
aagagugcucggcagugca

SEQ ID NO: 2064277 - RNA, 19 nt, Artificial Sequence
  Description of Artificial Sequence: Synthetic oligonucleotide
gguacuuagggccagaugu

SEQ ID NO: 2064278 - RNA, 19 nt, Artificial Sequence
  Description of Artificial Sequence: Synthetic oligonucleotide
cuuaacccaaagaucucac

SEQ ID NO: 2064279 - RNA, 19 nt, Artificial Sequence
  Description of Artificial Sequence: Synthetic oligonucleotide
uuaacccaaagaucucaca

SEQ ID NO: 2064280 - RNA, 19 nt, Artificial Sequence
  Description of Artificial Sequence: Synthetic oligonucleotide
uccuaagccccauaaucca

SEQ ID NO: 2064281 - RNA, 19 nt, Artificial Sequence
  Description of Artificial Sequence: Synthetic oligonucleotide
ugguuaggugcacauuccc

SEQ ID NO: 2064282 - RNA, 19 nt, Artificial Sequence
  Description of Artificial Sequence: Synthetic oligonucleotide
aguuaauaauuuaaaggaa

SEQ ID NO: 2064283 - RNA, 19 nt, Artificial Sequence
  Description of Artificial Sequence: Synthetic oligonucleotide
agccacaucgugucgcaac

SEQ ID NO: 2064284 - RNA, 19 nt, Artificial Sequence
  Description of Artificial Sequence: Synthetic oligonucleotide
ucguaaucccuugaguccc

SEQ ID NO: 2064285 - RNA, 19 nt, Artificial Sequence
  Description of Artificial Sequence: Synthetic oligonucleotide
agauccuagccacaucgug

SEQ ID NO: 2064286 - RNA, 19 nt, Artificial Sequence
  Description of Artificial Sequence: Synthetic oligonucleotide
ugcugcaccccucaaugca

SEQ ID NO: 2064287 - RNA, 19 nt, Artificial Sequence
  Description of Artificial Sequence: Synthetic oligonucleotide
aagugacacaaaucguaau

SEQ ID NO: 2064288 - RNA, 19 nt, Artificial Sequence
  Description of Artificial Sequence: Synthetic oligonucleotide
ccagauccuagccacaucg

SEQ ID NO: 2064289 - RNA, 19 nt, Artificial Sequence
  Description of Artificial Sequence: Synthetic oligonucleotide
cugcuuaacccaaagaucu

SEQ ID NO: 2064290 - RNA, 19 nt, Artificial Sequence
  Description of Artificial Sequence: Synthetic oligonucleotide
agcuagggcagcccagcgc

SEQ ID NO: 2064291 - RNA, 19 nt, Artificial Sequence
  Description of Artificial Sequence: Synthetic oligonucleotide
caaugcaccagucuuggca

SEQ ID NO: 2064292 - RNA, 19 nt, Artificial Sequence
  Description of Artificial Sequence: Synthetic oligonucleotide
guccuaagccccauaaucc

SEQ ID NO: 2064293 - RNA, 19 nt, Artificial Sequence
  Description of Artificial Sequence: Synthetic oligonucleotide
ugacagugaugagagcuag

SEQ ID NO: 2064294 - RNA, 19 nt, Artificial Sequence
  Description of Artificial Sequence: Synthetic oligonucleotide
guagguuaagaauggagcu

SEQ ID NO: 2064295 - RNA, 19 nt, Artificial Sequence
  Description of Artificial Sequence: Synthetic oligonucleotide
acaaaucguaaucccuuga

SEQ ID NO: 2064296 - RNA, 19 nt, Artificial Sequence
  Description of Artificial Sequence: Synthetic oligonucleotide
uacagcaagcucuccgcgc

SEQ ID NO: 2064297 - RNA, 19 nt, Artificial Sequence
  Description of Artificial Sequence: Synthetic oligonucleotide
gacggcggaagagugcucg

SEQ ID NO: 2064298 - RNA, 19 nt, Artificial Sequence
  Description of Artificial Sequence: Synthetic oligonucleotide
agguagguuaagaauggag

SEQ ID NO: 2064299 - RNA, 19 nt, Artificial Sequence
  Description of Artificial Sequence: Synthetic oligonucleotide
gcuagggcagcccagcgcg

SEQ ID NO: 2064300 - RNA, 19 nt, Artificial Sequence
  Description of Artificial Sequence: Synthetic oligonucleotide
aagcgcacggguccgagaa

SEQ ID NO: 2064301 - RNA, 19 nt, Artificial Sequence
  Description of Artificial Sequence: Synthetic oligonucleotide
cacaaaucguaaucccuug

SEQ ID NO: 2064302 - RNA, 19 nt, Artificial Sequence
  Description of Artificial Sequence: Synthetic oligonucleotide
gguccuaagccccauaauc

SEQ ID NO: 2064303 - RNA, 19 nt, Artificial Sequence
  Description of Artificial Sequence: Synthetic oligonucleotide
ugcccuauccaggacacca

SEQ ID NO: 2064304 - RNA, 19 nt, Artificial Sequence
  Description of Artificial Sequence: Synthetic oligonucleotide
uagguccuaagccccauaa

SEQ ID NO: 2064305 - RNA, 19 nt, Artificial Sequence
  Description of Artificial Sequence: Synthetic oligonucleotide
cuagcaggcgaccuggguc

SEQ ID NO: 2064306 - RNA, 19 nt, Artificial Sequence
  Description of Artificial Sequence: Synthetic oligonucleotide
ugcgcagcgaccaccgcgc

SEQ ID NO: 2064307 - RNA, 19 nt, Artificial Sequence
  Description of Artificial Sequence: Synthetic oligonucleotide
uagggaaccuuccccaguc

SEQ ID NO: 2064308 - RNA, 19 nt, Artificial Sequence
  Description of Artificial Sequence: Synthetic oligonucleotide
aaagaucucacagcaccau

SEQ ID NO: 2064309 - RNA, 19 nt, Artificial Sequence
  Description of Artificial Sequence: Synthetic oligonucleotide
ggucugacagugaugagag

SEQ ID NO: 2064310 - RNA, 19 nt, Artificial Sequence
  Description of Artificial Sequence: Synthetic oligonucleotide
uaggugcacauucccaggu

SEQ ID NO: 2064311 - RNA, 19 nt, Artificial Sequence
  Description of Artificial Sequence: Synthetic oligonucleotide
cuauccaggacaccagauc

SEQ ID NO: 2064312 - RNA, 19 nt, Artificial Sequence
  Description of Artificial Sequence: Synthetic oligonucleotide
guacagcaagcucuccgcg

SEQ ID NO: 2064313 - RNA, 19 nt, Artificial Sequence
  Description of Artificial Sequence: Synthetic oligonucleotide
acagcaagcucuccgcgca

SEQ ID NO: 2064314 - RNA, 19 nt, Artificial Sequence
  Description of Artificial Sequence: Synthetic oligonucleotide
acaccgugcggccuccucg

SEQ ID NO: 2064315 - RNA, 19 nt, Artificial Sequence
  Description of Artificial Sequence: Synthetic oligonucleotide
cuaagccccauaauccauc

SEQ ID NO: 2064316 - RNA, 19 nt, Artificial Sequence
  Description of Artificial Sequence: Synthetic oligonucleotide
cucuccgcgcaccacaggc

SEQ ID NO: 2064317 - RNA, 19 nt, Artificial Sequence
  Description of Artificial Sequence: Synthetic oligonucleotide
cuuggcucggagaccuugg

SEQ ID NO: 2064318 - RNA, 19 nt, Artificial Sequence
  Description of Artificial Sequence: Synthetic oligonucleotide
ucgcaacccagugacaggc

SEQ ID NO: 2064319 - RNA, 19 nt, Artificial Sequence
  Description of Artificial Sequence: Synthetic oligonucleotide
gguacagcaagcucuccgc

SEQ ID NO: 2064320 - RNA, 19 nt, Artificial Sequence
  Description of Artificial Sequence: Synthetic oligonucleotide
ugacaggcgcgcaggggcg

SEQ ID NO: 2064321 - RNA, 19 nt, Artificial Sequence
  Description of Artificial Sequence: Synthetic oligonucleotide
cacggguccgagaagucgc

SEQ ID NO: 2064322 - RNA, 19 nt, Artificial Sequence
  Description of Artificial Sequence: Synthetic oligonucleotide
ugccccuggcucacaagcg

SEQ ID NO: 2064323 - RNA, 19 nt, Artificial Sequence
  Description of Artificial Sequence: Synthetic oligonucleotide
aggaaugguugguuaggug

SEQ ID NO: 2064324 - RNA, 19 nt, Artificial Sequence
  Description of Artificial Sequence: Synthetic oligonucleotide
caacccagugacaggcgcg

SEQ ID NO: 2064325 - RNA, 19 nt, Artificial Sequence
  Description of Artificial Sequence: Synthetic oligonucleotide
uccccguuuucucucuccc

SEQ ID NO: 2064326 - RNA, 19 nt, Artificial Sequence
  Description of Artificial Sequence: Synthetic oligonucleotide
gaaugguugguuaggugca

SEQ ID NO: 2064327 - RNA, 19 nt, Artificial Sequence
  Description of Artificial Sequence: Synthetic oligonucleotide
caccccuucccaaaacgag

SEQ ID NO: 2064328 - RNA, 19 nt, Artificial Sequence
  Description of Artificial Sequence: Synthetic oligonucleotide
uccaagccuggguaaugag

SEQ ID NO: 2064329 - RNA, 19 nt, Artificial Sequence
  Description of Artificial Sequence: Synthetic oligonucleotide
agggacagcgcagcuaggg

SEQ ID NO: 2064330 - RNA, 19 nt, Artificial Sequence
  Description of Artificial Sequence: Synthetic oligonucleotide
ggcgcguagcaacagaggc

SEQ ID NO: 2064331 - RNA, 19 nt, Artificial Sequence
  Description of Artificial Sequence: Synthetic oligonucleotide
uggagacuagggaaccuuc

SEQ ID NO: 2064332 - RNA, 19 nt, Artificial Sequence
  Description of Artificial Sequence: Synthetic oligonucleotide
auaauccaucaagacuguc

SEQ ID NO: 2064333 - RNA, 19 nt, Artificial Sequence
  Description of Artificial Sequence: Synthetic oligonucleotide
cuacgcacuagcaggcgac

SEQ ID NO: 2064334 - RNA, 19 nt, Artificial Sequence
  Description of Artificial Sequence: Synthetic oligonucleotide
agugcucggcagugcacac

SEQ ID NO: 2064335 - RNA, 19 nt, Artificial Sequence
  Description of Artificial Sequence: Synthetic oligonucleotide
aucgugucgcaacccagug

SEQ ID NO: 2064336 - RNA, 19 nt, Artificial Sequence
  Description of Artificial Sequence: Synthetic oligonucleotide
uccuagccacaucgugucg

SEQ ID NO: 2064337 - RNA, 19 nt, Artificial Sequence
  Description of Artificial Sequence: Synthetic oligonucleotide
caaagaucucacagcacca

SEQ ID NO: 2064338 - RNA, 19 nt, Artificial Sequence
  Description of Artificial Sequence: Synthetic oligonucleotide
uggugggucugacagugau

SEQ ID NO: 2064339 - RNA, 19 nt, Artificial Sequence
  Description of Artificial Sequence: Synthetic oligonucleotide
cucggcguccgacaggcag

SEQ ID NO: 2064340 - RNA, 19 nt, Artificial Sequence
  Description of Artificial Sequence: Synthetic oligonucleotide
cuggcucacaagcgcacgg

SEQ ID NO: 2064341 - RNA, 19 nt, Artificial Sequence
  Description of Artificial Sequence: Synthetic oligonucleotide
accccuucccaaaacgagg

SEQ ID NO: 2064342 - RNA, 19 nt, Artificial Sequence
  Description of Artificial Sequence: Synthetic oligonucleotide
agccuacgcacuagcaggc

SEQ ID NO: 2064343 - RNA, 19 nt, Artificial Sequence
  Description of Artificial Sequence: Synthetic oligonucleotide
gagcuagacagagugggga

SEQ ID NO: 2064344 - RNA, 19 nt, Artificial Sequence
  Description of Artificial Sequence: Synthetic oligonucleotide
ucuuggcucggagaccuug

SEQ ID NO: 2064345 - RNA, 19 nt, Artificial Sequence
  Description of Artificial Sequence: Synthetic oligonucleotide
ucgugucgcaacccaguga

SEQ ID NO: 2064346 - RNA, 19 nt, Artificial Sequence
  Description of Artificial Sequence: Synthetic oligonucleotide
gacaggcagugguacagca

SEQ ID NO: 2064347 - RNA, 19 nt, Artificial Sequence
  Description of Artificial Sequence: Synthetic oligonucleotide
agguacuuagggccagaug

SEQ ID NO: 2064348 - RNA, 19 nt, Artificial Sequence
  Description of Artificial Sequence: Synthetic oligonucleotide
gucgcaacccagugacagg

SEQ ID NO: 2064349 - RNA, 19 nt, Artificial Sequence
  Description of Artificial Sequence: Synthetic oligonucleotide
agagcuagacagagugggg

SEQ ID NO: 2064350 - RNA, 19 nt, Artificial Sequence
  Description of Artificial Sequence: Synthetic oligonucleotide
guuuucucucucccauccc

SEQ ID NO: 2064351 - RNA, 19 nt, Artificial Sequence
  Description of Artificial Sequence: Synthetic oligonucleotide
cugaaucacagguuccgga

SEQ ID NO: 2064352 - RNA, 19 nt, Artificial Sequence
  Description of Artificial Sequence: Synthetic oligonucleotide
agcuagacagaguggggau

SEQ ID NO: 2064353 - RNA, 19 nt, Artificial Sequence
  Description of Artificial Sequence: Synthetic oligonucleotide
accagauccuagccacauc

SEQ ID NO: 2064354 - RNA, 19 nt, Artificial Sequence
  Description of Artificial Sequence: Synthetic oligonucleotide
uggcucacaagcgcacggg

SEQ ID NO: 2064355 - RNA, 19 nt, Artificial Sequence
  Description of Artificial Sequence: Synthetic oligonucleotide
acacaaaucguaaucccuu

SEQ ID NO: 2064356 - RNA, 19 nt, Artificial Sequence
  Description of Artificial Sequence: Synthetic oligonucleotide
ucacaagcgcacggguccg

SEQ ID NO: 2064357 - RNA, 19 nt, Artificial Sequence
  Description of Artificial Sequence: Synthetic oligonucleotide
ccauacagcacucucgguc

SEQ ID NO: 2064358 - RNA, 19 nt, Artificial Sequence
  Description of Artificial Sequence: Synthetic oligonucleotide
aaggccguccaagccuggg

SEQ ID NO: 2064359 - RNA, 19 nt, Artificial Sequence
  Description of Artificial Sequence: Synthetic oligonucleotide
agacugucuuggcucggag

SEQ ID NO: 2064360 - RNA, 19 nt, Artificial Sequence
  Description of Artificial Sequence: Synthetic oligonucleotide
cagugguacagcaagcucu

SEQ ID NO: 2064361 - RNA, 19 nt, Artificial Sequence
  Description of Artificial Sequence: Synthetic oligonucleotide
ggugcacauucccagguac

SEQ ID NO: 2064362 - RNA, 19 nt, Artificial Sequence
  Description of Artificial Sequence: Synthetic oligonucleotide
aagacugucuuggcucgga

SEQ ID NO: 2064363 - RNA, 19 nt, Artificial Sequence
  Description of Artificial Sequence: Synthetic oligonucleotide
gaugggaggggcaccuccc

SEQ ID NO: 2064364 - RNA, 19 nt, Artificial Sequence
  Description of Artificial Sequence: Synthetic oligonucleotide
cgagaagucgcccucggcg

SEQ ID NO: 2064365 - RNA, 19 nt, Artificial Sequence
  Description of Artificial Sequence: Synthetic oligonucleotide
caaaacgagguagguuaag

SEQ ID NO: 2064366 - RNA, 19 nt, Artificial Sequence
  Description of Artificial Sequence: Synthetic oligonucleotide
ucacagguuccggauacaa

SEQ ID NO: 2064367 - RNA, 19 nt, Artificial Sequence
  Description of Artificial Sequence: Synthetic oligonucleotide
aucccuugaguccccacaa

SEQ ID NO: 2064368 - RNA, 19 nt, Artificial Sequence
  Description of Artificial Sequence: Synthetic oligonucleotide
acuagcaggcgaccugggu

SEQ ID NO: 2064369 - RNA, 19 nt, Artificial Sequence
  Description of Artificial Sequence: Synthetic oligonucleotide
guuccggauacaauaaaua

SEQ ID NO: 2064370 - RNA, 19 nt, Artificial Sequence
  Description of Artificial Sequence: Synthetic oligonucleotide
uggguccggggccucugcg

SEQ ID NO: 2064371 - RNA, 19 nt, Artificial Sequence
  Description of Artificial Sequence: Synthetic oligonucleotide
ucuccgcgcaccacaggca

SEQ ID NO: 2064372 - RNA, 19 nt, Artificial Sequence
  Description of Artificial Sequence: Synthetic oligonucleotide
cccaaaacgagguagguua

SEQ ID NO: 2064373 - RNA, 19 nt, Artificial Sequence
  Description of Artificial Sequence: Synthetic oligonucleotide
gauccuagccacaucgugu

SEQ ID NO: 2064374 - RNA, 19 nt, Artificial Sequence
  Description of Artificial Sequence: Synthetic oligonucleotide
gcaccauacagcacucucg

SEQ ID NO: 2064375 - RNA, 19 nt, Artificial Sequence
  Description of Artificial Sequence: Synthetic oligonucleotide
cgagguagguuaagaaugg

SEQ ID NO: 2064376 - RNA, 19 nt, Artificial Sequence
  Description of Artificial Sequence: Synthetic oligonucleotide
aguccccacaaggccgucc

SEQ ID NO: 2064377 - RNA, 19 nt, Artificial Sequence
  Description of Artificial Sequence: Synthetic oligonucleotide
ucggcguccgacaggcagu

SEQ ID NO: 2064378 - RNA, 19 nt, Artificial Sequence
  Description of Artificial Sequence: Synthetic oligonucleotide
gaagagugcucggcagugc

SEQ ID NO: 2064379 - RNA, 19 nt, Artificial Sequence
  Description of Artificial Sequence: Synthetic oligonucleotide
gcagugcacacaccgugcg

SEQ ID NO: 2064380 - RNA, 19 nt, Artificial Sequence
  Description of Artificial Sequence: Synthetic oligonucleotide
cccuugaguccccacaagg

SEQ ID NO: 2064381 - RNA, 19 nt, Artificial Sequence
  Description of Artificial Sequence: Synthetic oligonucleotide
cugcaccccucaaugcacc

SEQ ID NO: 2064382 - RNA, 19 nt, Artificial Sequence
  Description of Artificial Sequence: Synthetic oligonucleotide
uccgacaggcagugguaca

SEQ ID NO: 2064383 - RNA, 19 nt, Artificial Sequence
  Description of Artificial Sequence: Synthetic oligonucleotide
ucggcagugcacacaccgu

SEQ ID NO: 2064384 - RNA, 19 nt, Artificial Sequence
  Description of Artificial Sequence: Synthetic oligonucleotide
cuccgcgcaccacaggcag

SEQ ID NO: 2064385 - RNA, 19 nt, Artificial Sequence
  Description of Artificial Sequence: Synthetic oligonucleotide
uuggcucggagaccuuggu

SEQ ID NO: 2064386 - RNA, 19 nt, Artificial Sequence
  Description of Artificial Sequence: Synthetic oligonucleotide
acgacggcggaagagugcu

SEQ ID NO: 2064387 - RNA, 19 nt, Artificial Sequence
  Description of Artificial Sequence: Synthetic oligonucleotide
cacgacggcggaagagugc

SEQ ID NO: 2064388 - RNA, 19 nt, Artificial Sequence
  Description of Artificial Sequence: Synthetic oligonucleotide
gguugcccuauccaggaca

SEQ ID NO: 2064389 - RNA, 19 nt, Artificial Sequence
  Description of Artificial Sequence: Synthetic oligonucleotide
cuccccguuuucucucucc

SEQ ID NO: 2064390 - RNA, 19 nt, Artificial Sequence
  Description of Artificial Sequence: Synthetic oligonucleotide
caggcagcugagccuacgc

SEQ ID NO: 2064391 - RNA, 19 nt, Artificial Sequence
  Description of Artificial Sequence: Synthetic oligonucleotide
cagugcacacaccgugcgg

SEQ ID NO: 2064392 - RNA, 19 nt, Artificial Sequence
  Description of Artificial Sequence: Synthetic oligonucleotide
uuccaccccuucccaaaac

SEQ ID NO: 2064393 - RNA, 19 nt, Artificial Sequence
  Description of Artificial Sequence: Synthetic oligonucleotide
agguuccggauacaauaaa

SEQ ID NO: 2064394 - RNA, 19 nt, Artificial Sequence
  Description of Artificial Sequence: Synthetic oligonucleotide
caccgugcggccuccucgg

SEQ ID NO: 2064395 - RNA, 19 nt, Artificial Sequence
  Description of Artificial Sequence: Synthetic oligonucleotide
gaaccuuccccagucccca

SEQ ID NO: 2064396 - RNA, 19 nt, Artificial Sequence
  Description of Artificial Sequence: Synthetic oligonucleotide
cgugucgcaacccagugac

SEQ ID NO: 2064397 - RNA, 19 nt, Artificial Sequence
  Description of Artificial Sequence: Synthetic oligonucleotide
uuagggccagauguagguc

SEQ ID NO: 2064398 - RNA, 19 nt, Artificial Sequence
  Description of Artificial Sequence: Synthetic oligonucleotide
gggaaccuuccccaguccc

SEQ ID NO: 2064399 - RNA, 19 nt, Artificial Sequence
  Description of Artificial Sequence: Synthetic oligonucleotide
acaaggccguccaagccug

SEQ ID NO: 2064400 - RNA, 19 nt, Artificial Sequence
  Description of Artificial Sequence: Synthetic oligonucleotide
acaucgugucgcaacccag

SEQ ID NO: 2064401 - RNA, 19 nt, Artificial Sequence
  Description of Artificial Sequence: Synthetic oligonucleotide
auuccaccccuucccaaaa

SEQ ID NO: 2064402 - RNA, 19 nt, Artificial Sequence
  Description of Artificial Sequence: Synthetic oligonucleotide
gagaagucgcccucggcgu

SEQ ID NO: 2064403 - RNA, 19 nt, Artificial Sequence
  Description of Artificial Sequence: Synthetic oligonucleotide
agagugcucggcagugcac

SEQ ID NO: 2064404 - RNA, 19 nt, Artificial Sequence
  Description of Artificial Sequence: Synthetic oligonucleotide
gagugcucggcagugcaca

SEQ ID NO: 2064405 - RNA, 19 nt, Artificial Sequence
  Description of Artificial Sequence: Synthetic oligonucleotide
caguccccacugcuuaacc

SEQ ID NO: 2064406 - RNA, 19 nt, Artificial Sequence
  Description of Artificial Sequence: Synthetic oligonucleotide
auccgcacgacggcggaag

SEQ ID NO: 2064407 - RNA, 19 nt, Artificial Sequence
  Description of Artificial Sequence: Synthetic oligonucleotide
cagaggagauggagacuag

SEQ ID NO: 2064408 - RNA, 19 nt, Artificial Sequence
  Description of Artificial Sequence: Synthetic oligonucleotide
ggaugggaggggcaccucc

SEQ ID NO: 2064409 - RNA, 19 nt, Artificial Sequence
  Description of Artificial Sequence: Synthetic oligonucleotide
ggacagcgcagcuagggca

SEQ ID NO: 2064410 - RNA, 19 nt, Artificial Sequence
  Description of Artificial Sequence: Synthetic oligonucleotide
uacgcacuagcaggcgacc

SEQ ID NO: 2064411 - RNA, 19 nt, Artificial Sequence
  Description of Artificial Sequence: Synthetic oligonucleotide
acggcggaagagugcucgg

SEQ ID NO: 2064412 - RNA, 19 nt, Artificial Sequence
  Description of Artificial Sequence: Synthetic oligonucleotide
ugggucugacagugaugag

SEQ ID NO: 2064413 - RNA, 19 nt, Artificial Sequence
  Description of Artificial Sequence: Synthetic oligonucleotide
ugcaccccucaaugcacca

SEQ ID NO: 2064414 - RNA, 19 nt, Artificial Sequence
  Description of Artificial Sequence: Synthetic oligonucleotide
cacaucgugucgcaaccca

SEQ ID NO: 2064415 - RNA, 19 nt, Artificial Sequence
  Description of Artificial Sequence: Synthetic oligonucleotide
gccacaucgugucgcaacc

SEQ ID NO: 2064416 - RNA, 19 nt, Artificial Sequence
  Description of Artificial Sequence: Synthetic oligonucleotide
gcaacccagugacaggcgc

SEQ ID NO: 2064417 - RNA, 19 nt, Artificial Sequence
  Description of Artificial Sequence: Synthetic oligonucleotide
ucccaaaacgagguagguu

SEQ ID NO: 2064418 - RNA, 19 nt, Artificial Sequence
  Description of Artificial Sequence: Synthetic oligonucleotide
gcgaccaccgcgcccaucc

SEQ ID NO: 2064419 - RNA, 19 nt, Artificial Sequence
  Description of Artificial Sequence: Synthetic oligonucleotide
auggggacccaggcugccc

SEQ ID NO: 2064420 - RNA, 19 nt, Artificial Sequence
  Description of Artificial Sequence: Synthetic oligonucleotide
uccucggccuccggggagg

SEQ ID NO: 2064421 - RNA, 19 nt, Artificial Sequence
  Description of Artificial Sequence: Synthetic oligonucleotide
ccucaaugcaccagucuug

SEQ ID NO: 2064422 - RNA, 19 nt, Artificial Sequence
  Description of Artificial Sequence: Synthetic oligonucleotide
ggagacuagggaaccuucc

SEQ ID NO: 2064423 - RNA, 19 nt, Artificial Sequence
  Description of Artificial Sequence: Synthetic oligonucleotide
agguccuaagccccauaau

SEQ ID NO: 2064424 - RNA, 19 nt, Artificial Sequence
  Description of Artificial Sequence: Synthetic oligonucleotide
cagguuccggauacaauaa

SEQ ID NO: 2064425 - RNA, 19 nt, Artificial Sequence
  Description of Artificial Sequence: Synthetic oligonucleotide
accauacagcacucucggu

SEQ ID NO: 2064426 - RNA, 19 nt, Artificial Sequence
  Description of Artificial Sequence: Synthetic oligonucleotide
gggucugacagugaugaga

SEQ ID NO: 2064427 - RNA, 19 nt, Artificial Sequence
  Description of Artificial Sequence: Synthetic oligonucleotide
aagccccauaauccaucaa

SEQ ID NO: 2064428 - RNA, 19 nt, Artificial Sequence
  Description of Artificial Sequence: Synthetic oligonucleotide
gcacuagcaggcgaccugg

SEQ ID NO: 2064429 - RNA, 19 nt, Artificial Sequence
  Description of Artificial Sequence: Synthetic oligonucleotide
gugcugcaccccucaaugc

SEQ ID NO: 2064430 - RNA, 19 nt, Artificial Sequence
  Description of Artificial Sequence: Synthetic oligonucleotide
gcuuaacccaaagaucuca

SEQ ID NO: 2064431 - RNA, 19 nt, Artificial Sequence
  Description of Artificial Sequence: Synthetic oligonucleotide
ccccauaauccaucaagac

SEQ ID NO: 2064432 - RNA, 19 nt, Artificial Sequence
  Description of Artificial Sequence: Synthetic oligonucleotide
ggaagagugcucggcagug

SEQ ID NO: 2064433 - RNA, 19 nt, Artificial Sequence
  Description of Artificial Sequence: Synthetic oligonucleotide
cagugaugagagcuagaca

SEQ ID NO: 2064434 - RNA, 19 nt, Artificial Sequence
  Description of Artificial Sequence: Synthetic oligonucleotide
agccuggguaaugaggaau

SEQ ID NO: 2064435 - RNA, 19 nt, Artificial Sequence
  Description of Artificial Sequence: Synthetic oligonucleotide
ccggauacaauaaauaguu

SEQ ID NO: 2064436 - RNA, 19 nt, Artificial Sequence
  Description of Artificial Sequence: Synthetic oligonucleotide
acggguccgagaagucgcc

SEQ ID NO: 2064437 - RNA, 19 nt, Artificial Sequence
  Description of Artificial Sequence: Synthetic oligonucleotide
cacuagcaggcgaccuggg

SEQ ID NO: 2064438 - RNA, 19 nt, Artificial Sequence
  Description of Artificial Sequence: Synthetic oligonucleotide
agcucuggugggucugaca

SEQ ID NO: 2064439 - RNA, 19 nt, Artificial Sequence
  Description of Artificial Sequence: Synthetic oligonucleotide
cagcuagggcagcccagcg

SEQ ID NO: 2064440 - RNA, 19 nt, Artificial Sequence
  Description of Artificial Sequence: Synthetic oligonucleotide
cugggagagcugaaucaca

SEQ ID NO: 2064441 - RNA, 19 nt, Artificial Sequence
  Description of Artificial Sequence: Synthetic oligonucleotide
gugaugagagcuagacaga

SEQ ID NO: 2064442 - RNA, 19 nt, Artificial Sequence
  Description of Artificial Sequence: Synthetic oligonucleotide
auggagacuagggaaccuu

SEQ ID NO: 2064443 - RNA, 19 nt, Artificial Sequence
  Description of Artificial Sequence: Synthetic oligonucleotide
caucaagacugucuuggcu

SEQ ID NO: 2064444 - RNA, 19 nt, Artificial Sequence
  Description of Artificial Sequence: Synthetic oligonucleotide
guccgagaagucgcccucg

SEQ ID NO: 2064445 - RNA, 19 nt, Artificial Sequence
  Description of Artificial Sequence: Synthetic oligonucleotide
ugguugcccuauccaggac

SEQ ID NO: 2064446 - RNA, 19 nt, Artificial Sequence
  Description of Artificial Sequence: Synthetic oligonucleotide
ggaaccuuccccagucccc

SEQ ID NO: 2064447 - RNA, 19 nt, Artificial Sequence
  Description of Artificial Sequence: Synthetic oligonucleotide
caagacugucuuggcucgg

SEQ ID NO: 2064448 - RNA, 19 nt, Artificial Sequence
  Description of Artificial Sequence: Synthetic oligonucleotide
uggcucggagaccuugguu

SEQ ID NO: 2064449 - RNA, 19 nt, Artificial Sequence
  Description of Artificial Sequence: Synthetic oligonucleotide
cugagccuacgcacuagca

SEQ ID NO: 2064450 - RNA, 19 nt, Artificial Sequence
  Description of Artificial Sequence: Synthetic oligonucleotide
gguuaggugcacauuccca

SEQ ID NO: 2064451 - RNA, 19 nt, Artificial Sequence
  Description of Artificial Sequence: Synthetic oligonucleotide
ucagcucuggugggucuga

SEQ ID NO: 2064452 - RNA, 19 nt, Artificial Sequence
  Description of Artificial Sequence: Synthetic oligonucleotide
ccaucaagacugucuuggc

SEQ ID NO: 2064453 - RNA, 19 nt, Artificial Sequence
  Description of Artificial Sequence: Synthetic oligonucleotide
gguuaagaauggagcuucc

SEQ ID NO: 2064454 - RNA, 19 nt, Artificial Sequence
  Description of Artificial Sequence: Synthetic oligonucleotide
uguagguccuaagccccau

SEQ ID NO: 2064455 - RNA, 19 nt, Artificial Sequence
  Description of Artificial Sequence: Synthetic oligonucleotide
acagcgcagcuagggcagc

SEQ ID NO: 2064456 - RNA, 19 nt, Artificial Sequence
  Description of Artificial Sequence: Synthetic oligonucleotide
gggacagcgcagcuagggc

SEQ ID NO: 2064457 - RNA, 19 nt, Artificial Sequence
  Description of Artificial Sequence: Synthetic oligonucleotide
gccagauguagguccuaag

SEQ ID NO: 2064458 - RNA, 19 nt, Artificial Sequence
  Description of Artificial Sequence: Synthetic oligonucleotide
uccgcgcaccacaggcagc

SEQ ID NO: 2064459 - RNA, 19 nt, Artificial Sequence
  Description of Artificial Sequence: Synthetic oligonucleotide
cugucuuggcucggagacc

SEQ ID NO: 2064460 - RNA, 19 nt, Artificial Sequence
  Description of Artificial Sequence: Synthetic oligonucleotide
acaagcgcacggguccgag

SEQ ID NO: 2064461 - RNA, 19 nt, Artificial Sequence
  Description of Artificial Sequence: Synthetic oligonucleotide
ccuagccacaucgugucgc

SEQ ID NO: 2064462 - RNA, 19 nt, Artificial Sequence
  Description of Artificial Sequence: Synthetic oligonucleotide
guccccacaaggccgucca

SEQ ID NO: 2064463 - RNA, 19 nt, Artificial Sequence
  Description of Artificial Sequence: Synthetic oligonucleotide
uccgcacgacggcggaaga

SEQ ID NO: 2064464 - RNA, 19 nt, Artificial Sequence
  Description of Artificial Sequence: Synthetic oligonucleotide
agcgcacggguccgagaag

SEQ ID NO: 2064465 - RNA, 19 nt, Artificial Sequence
  Description of Artificial Sequence: Synthetic oligonucleotide
cauaauccaucaagacugu

SEQ ID NO: 2064466 - RNA, 19 nt, Artificial Sequence
  Description of Artificial Sequence: Synthetic oligonucleotide
gacagugaugagagcuaga

SEQ ID NO: 2064467 - RNA, 19 nt, Artificial Sequence
  Description of Artificial Sequence: Synthetic oligonucleotide
gcacggguccgagaagucg

SEQ ID NO: 2064468 - RNA, 19 nt, Artificial Sequence
  Description of Artificial Sequence: Synthetic oligonucleotide
ucgcccucggcguccgaca

SEQ ID NO: 2064469 - RNA, 19 nt, Artificial Sequence
  Description of Artificial Sequence: Synthetic oligonucleotide
cccacugcuuaacccaaag

SEQ ID NO: 2064470 - RNA, 19 nt, Artificial Sequence
  Description of Artificial Sequence: Synthetic oligonucleotide
cgcguagcaacagaggcag

SEQ ID NO: 2064471 - RNA, 19 nt, Artificial Sequence
  Description of Artificial Sequence: Synthetic oligonucleotide
aggggcgcguagcaacaga

SEQ ID NO: 2064472 - RNA, 19 nt, Artificial Sequence
  Description of Artificial Sequence: Synthetic oligonucleotide
cccauaauccaucaagacu

SEQ ID NO: 2064473 - RNA, 19 nt, Artificial Sequence
  Description of Artificial Sequence: Synthetic oligonucleotide
ggggcgcguagcaacagag

SEQ ID NO: 2064474 - RNA, 19 nt, Artificial Sequence
  Description of Artificial Sequence: Synthetic oligonucleotide
gcagugguacagcaagcuc

SEQ ID NO: 2064475 - RNA, 19 nt, Artificial Sequence
  Description of Artificial Sequence: Synthetic oligonucleotide
caccgcgcccauccgcacg

SEQ ID NO: 2064476 - RNA, 19 nt, Artificial Sequence
  Description of Artificial Sequence: Synthetic oligonucleotide
gcuagacagaguggggaug

SEQ ID NO: 2064477 - RNA, 19 nt, Artificial Sequence
  Description of Artificial Sequence: Synthetic oligonucleotide
ucuccccguuuucucucuc

SEQ ID NO: 2064478 - RNA, 19 nt, Artificial Sequence
  Description of Artificial Sequence: Synthetic oligonucleotide
guccgacaggcagugguac

SEQ ID NO: 2064479 - RNA, 19 nt, Artificial Sequence
  Description of Artificial Sequence: Synthetic oligonucleotide
agccucagugagaggagca

SEQ ID NO: 2064480 - RNA, 19 nt, Artificial Sequence
  Description of Artificial Sequence: Synthetic oligonucleotide
cucagcucuggugggucug

SEQ ID NO: 2064481 - RNA, 19 nt, Artificial Sequence
  Description of Artificial Sequence: Synthetic oligonucleotide
ggcggaagagugcucggca

SEQ ID NO: 2064482 - RNA, 19 nt, Artificial Sequence
  Description of Artificial Sequence: Synthetic oligonucleotide
caaggccguccaagccugg

SEQ ID NO: 2064483 - RNA, 19 nt, Artificial Sequence
  Description of Artificial Sequence: Synthetic oligonucleotide
ggcagugcacacaccgugc

SEQ ID NO: 2064484 - RNA, 19 nt, Artificial Sequence
  Description of Artificial Sequence: Synthetic oligonucleotide
agcucuccgcgcaccacag

SEQ ID NO: 2064485 - RNA, 19 nt, Artificial Sequence
  Description of Artificial Sequence: Synthetic oligonucleotide
gauggagacuagggaaccu

SEQ ID NO: 2064486 - RNA, 19 nt, Artificial Sequence
  Description of Artificial Sequence: Synthetic oligonucleotide
caucgugucgcaacccagu

SEQ ID NO: 2064487 - RNA, 19 nt, Artificial Sequence
  Description of Artificial Sequence: Synthetic oligonucleotide
ggggccucugcgcagcgac

SEQ ID NO: 2064488 - RNA, 19 nt, Artificial Sequence
  Description of Artificial Sequence: Synthetic oligonucleotide
gccccauaauccaucaaga

SEQ ID NO: 2064489 - RNA, 19 nt, Artificial Sequence
  Description of Artificial Sequence: Synthetic oligonucleotide
cccaaagaucucacagcac

SEQ ID NO: 2064490 - RNA, 19 nt, Artificial Sequence
  Description of Artificial Sequence: Synthetic oligonucleotide
aucacagguuccggauaca

SEQ ID NO: 2064491 - RNA, 19 nt, Artificial Sequence
  Description of Artificial Sequence: Synthetic oligonucleotide
ccgcucaccaguggaaggg

SEQ ID NO: 2064492 - RNA, 19 nt, Artificial Sequence
  Description of Artificial Sequence: Synthetic oligonucleotide
cccgcucaccaguggaagg

SEQ ID NO: 2064493 - RNA, 19 nt, Artificial Sequence
  Description of Artificial Sequence: Synthetic oligonucleotide
ccgacaggcagugguacag

SEQ ID NO: 2064494 - RNA, 19 nt, Artificial Sequence
  Description of Artificial Sequence: Synthetic oligonucleotide
ggugggucugacagugaug

SEQ ID NO: 2064495 - RNA, 19 nt, Artificial Sequence
  Description of Artificial Sequence: Synthetic oligonucleotide
gguccgagaagucgcccuc

SEQ ID NO: 2064496 - RNA, 19 nt, Artificial Sequence
  Description of Artificial Sequence: Synthetic oligonucleotide
acgcacuagcaggcgaccu

SEQ ID NO: 2064497 - RNA, 19 nt, Artificial Sequence
  Description of Artificial Sequence: Synthetic oligonucleotide
gagaccuugguugcccuau

SEQ ID NO: 2064498 - RNA, 19 nt, Artificial Sequence
  Description of Artificial Sequence: Synthetic oligonucleotide
cccauccgcacgacggcgg

SEQ ID NO: 2064499 - RNA, 19 nt, Artificial Sequence
  Description of Artificial Sequence: Synthetic oligonucleotide
gacaggcgcgcaggggcgc

SEQ ID NO: 2064500 - RNA, 19 nt, Artificial Sequence
  Description of Artificial Sequence: Synthetic oligonucleotide
aggcgaccuggguccgggg

SEQ ID NO: 2064501 - RNA, 19 nt, Artificial Sequence
  Description of Artificial Sequence: Synthetic oligonucleotide
caagcucuccgcgcaccac

SEQ ID NO: 2064502 - RNA, 19 nt, Artificial Sequence
  Description of Artificial Sequence: Synthetic oligonucleotide
acaggcgcgcaggggcgcg

SEQ ID NO: 2064503 - RNA, 19 nt, Artificial Sequence
  Description of Artificial Sequence: Synthetic oligonucleotide
gggcgcguagcaacagagg

SEQ ID NO: 2064504 - RNA, 19 nt, Artificial Sequence
  Description of Artificial Sequence: Synthetic oligonucleotide
gguuccggauacaauaaau

SEQ ID NO: 2064505 - RNA, 19 nt, Artificial Sequence
  Description of Artificial Sequence: Synthetic oligonucleotide
ggugccccuggcucacaag

SEQ ID NO: 2064506 - RNA, 19 nt, Artificial Sequence
  Description of Artificial Sequence: Synthetic oligonucleotide
guaaucccuugagucccca

SEQ ID NO: 2064507 - RNA, 19 nt, Artificial Sequence
  Description of Artificial Sequence: Synthetic oligonucleotide
gcagcgaccaccgcgccca

SEQ ID NO: 2064508 - RNA, 19 nt, Artificial Sequence
  Description of Artificial Sequence: Synthetic oligonucleotide
gugguacagcaagcucucc

SEQ ID NO: 2064509 - RNA, 19 nt, Artificial Sequence
  Description of Artificial Sequence: Synthetic oligonucleotide
cuggguaaugaggaauggu

SEQ ID NO: 2064510 - RNA, 19 nt, Artificial Sequence
  Description of Artificial Sequence: Synthetic oligonucleotide
cagcaagcucuccgcgcac

SEQ ID NO: 2064511 - RNA, 19 nt, Artificial Sequence
  Description of Artificial Sequence: Synthetic oligonucleotide
ggguccggggccucugcgc

SEQ ID NO: 2064512 - RNA, 19 nt, Artificial Sequence
  Description of Artificial Sequence: Synthetic oligonucleotide
gguccggggccucugcgca

SEQ ID NO: 2064513 - RNA, 19 nt, Artificial Sequence
  Description of Artificial Sequence: Synthetic oligonucleotide
cccucggcguccgacaggc

SEQ ID NO: 2064514 - RNA, 19 nt, Artificial Sequence
  Description of Artificial Sequence: Synthetic oligonucleotide
ggauggggacccaggcugc

SEQ ID NO: 2064515 - RNA, 19 nt, Artificial Sequence
  Description of Artificial Sequence: Synthetic oligonucleotide
gugcagccucagugagagg

SEQ ID NO: 2064516 - RNA, 19 nt, Artificial Sequence
  Description of Artificial Sequence: Synthetic oligonucleotide
cacacaccgugcggccucc

SEQ ID NO: 2064517 - RNA, 19 nt, Artificial Sequence
  Description of Artificial Sequence: Synthetic oligonucleotide
guagguccuaagccccaua

SEQ ID NO: 2064518 - RNA, 19 nt, Artificial Sequence
  Description of Artificial Sequence: Synthetic oligonucleotide
cacaccgugcggccuccuc

SEQ ID NO: 2064519 - RNA, 19 nt, Artificial Sequence
  Description of Artificial Sequence: Synthetic oligonucleotide
cagcgcagcuagggcagcc

SEQ ID NO: 2064520 - RNA, 19 nt, Artificial Sequence
  Description of Artificial Sequence: Synthetic oligonucleotide
ccuggcucacaagcgcacg

SEQ ID NO: 2064521 - RNA, 19 nt, Artificial Sequence
  Description of Artificial Sequence: Synthetic oligonucleotide
caagcgcacggguccgaga

SEQ ID NO: 2064522 - RNA, 19 nt, Artificial Sequence
  Description of Artificial Sequence: Synthetic oligonucleotide
gcgugggugccccuggcuc

SEQ ID NO: 2064523 - RNA, 19 nt, Artificial Sequence
  Description of Artificial Sequence: Synthetic oligonucleotide
gcucacaagcgcacggguc

SEQ ID NO: 2064524 - RNA, 19 nt, Artificial Sequence
  Description of Artificial Sequence: Synthetic oligonucleotide
cagauccuagccacaucgu

SEQ ID NO: 2064525 - RNA, 19 nt, Artificial Sequence
  Description of Artificial Sequence: Synthetic oligonucleotide
ccaaaacgagguagguuaa

SEQ ID NO: 2064526 - RNA, 19 nt, Artificial Sequence
  Description of Artificial Sequence: Synthetic oligonucleotide
cguaaucccuugagucccc

SEQ ID NO: 2064527 - RNA, 19 nt, Artificial Sequence
  Description of Artificial Sequence: Synthetic oligonucleotide
gucgcccucggcguccgac

SEQ ID NO: 2064528 - RNA, 19 nt, Artificial Sequence
  Description of Artificial Sequence: Synthetic oligonucleotide
ccaccccuucccaaaacga

SEQ ID NO: 2064529 - RNA, 19 nt, Artificial Sequence
  Description of Artificial Sequence: Synthetic oligonucleotide
gcccauccgcacgacggcg

SEQ ID NO: 2064530 - RNA, 19 nt, Artificial Sequence
  Description of Artificial Sequence: Synthetic oligonucleotide
caggggcgcguagcaacag

SEQ ID NO: 2064531 - RNA, 19 nt, Artificial Sequence
  Description of Artificial Sequence: Synthetic oligonucleotide
gccuacgcacuagcaggcg

SEQ ID NO: 2064532 - RNA, 19 nt, Artificial Sequence
  Description of Artificial Sequence: Synthetic oligonucleotide
cgcaggggcgcguagcaac

SEQ ID NO: 2064533 - RNA, 19 nt, Artificial Sequence
  Description of Artificial Sequence: Synthetic oligonucleotide
gcacgacggcggaagagug

SEQ ID NO: 2064534 - RNA, 19 nt, Artificial Sequence
  Description of Artificial Sequence: Synthetic oligonucleotide
ccuacgcacuagcaggcga

SEQ ID NO: 2064535 - RNA, 19 nt, Artificial Sequence
  Description of Artificial Sequence: Synthetic oligonucleotide
gucccuccgcccucagcuc

SEQ ID NO: 2064536 - RNA, 19 nt, Artificial Sequence
  Description of Artificial Sequence: Synthetic oligonucleotide
gugcacauucccagguacu

SEQ ID NO: 2064537 - RNA, 19 nt, Artificial Sequence
  Description of Artificial Sequence: Synthetic oligonucleotide
gcucuccgcgcaccacagg

SEQ ID NO: 2064538 - RNA, 19 nt, Artificial Sequence
  Description of Artificial Sequence: Synthetic oligonucleotide
gcacacaccgugcggccuc

SEQ ID NO: 2064539 - RNA, 19 nt, Artificial Sequence
  Description of Artificial Sequence: Synthetic oligonucleotide
gcgcaccacaggcagcuga

SEQ ID NO: 2064540 - RNA, 19 nt, Artificial Sequence
  Description of Artificial Sequence: Synthetic oligonucleotide
ggccguccaagccugggua

SEQ ID NO: 2064541 - RNA, 19 nt, Artificial Sequence
  Description of Artificial Sequence: Synthetic oligonucleotide
cagggcgugggugccccug

SEQ ID NO: 2064542 - RNA, 19 nt, Artificial Sequence
  Description of Artificial Sequence: Synthetic oligonucleotide
ccgagaagucgcccucggc

SEQ ID NO: 2064543 - RNA, 19 nt, Artificial Sequence
  Description of Artificial Sequence: Synthetic oligonucleotide
gcgcguagcaacagaggca

SEQ ID NO: 2064544 - RNA, 19 nt, Artificial Sequence
  Description of Artificial Sequence: Synthetic oligonucleotide
ccacaucgugucgcaaccc

SEQ ID NO: 2064545 - RNA, 19 nt, Artificial Sequence
  Description of Artificial Sequence: Synthetic oligonucleotide
cccuggcucacaagcgcac

SEQ ID NO: 2064546 - RNA, 19 nt, Artificial Sequence
  Description of Artificial Sequence: Synthetic oligonucleotide
cgcaacccagugacaggcg

SEQ ID NO: 2064547 - RNA, 19 nt, Artificial Sequence
  Description of Artificial Sequence: Synthetic oligonucleotide
gugcucggcagugcacaca

SEQ ID NO: 2064548 - RNA, 19 nt, Artificial Sequence
  Description of Artificial Sequence: Synthetic oligonucleotide
cccuauccaggacaccaga

SEQ ID NO: 2064549 - RNA, 19 nt, Artificial Sequence
  Description of Artificial Sequence: Synthetic oligonucleotide
cagcucuggugggucugac

SEQ ID NO: 2064550 - RNA, 19 nt, Artificial Sequence
  Description of Artificial Sequence: Synthetic oligonucleotide
agcgcgcagcagggcgugg

SEQ ID NO: 2064551 - RNA, 19 nt, Artificial Sequence
  Description of Artificial Sequence: Synthetic oligonucleotide
gcccucggcguccgacagg

SEQ ID NO: 2064552 - RNA, 19 nt, Artificial Sequence
  Description of Artificial Sequence: Synthetic oligonucleotide
gccguccaagccuggguaa

SEQ ID NO: 2064553 - RNA, 19 nt, Artificial Sequence
  Description of Artificial Sequence: Synthetic oligonucleotide
acccagugacaggcgcgca

SEQ ID NO: 2064554 - RNA, 19 nt, Artificial Sequence
  Description of Artificial Sequence: Synthetic oligonucleotide
gugucgcaacccagugaca

SEQ ID NO: 2064555 - RNA, 19 nt, Artificial Sequence
  Description of Artificial Sequence: Synthetic oligonucleotide
gcagcugagccuacgcacu

SEQ ID NO: 2064556 - RNA, 19 nt, Artificial Sequence
  Description of Artificial Sequence: Synthetic oligonucleotide
cucuccccguuuucucucu

SEQ ID NO: 2064557 - RNA, 19 nt, Artificial Sequence
  Description of Artificial Sequence: Synthetic oligonucleotide
gcgcagcuagggcagccca

SEQ ID NO: 2064558 - RNA, 19 nt, Artificial Sequence
  Description of Artificial Sequence: Synthetic oligonucleotide
cagugcugcaccccucaau

SEQ ID NO: 2064559 - RNA, 19 nt, Artificial Sequence
  Description of Artificial Sequence: Synthetic oligonucleotide
ggagaccuugguugcccua

SEQ ID NO: 2064560 - RNA, 19 nt, Artificial Sequence
  Description of Artificial Sequence: Synthetic oligonucleotide
caccagauccuagccacau

SEQ ID NO: 2064561 - RNA, 19 nt, Artificial Sequence
  Description of Artificial Sequence: Synthetic oligonucleotide
cccagugcugcaccccuca

SEQ ID NO: 2064562 - RNA, 19 nt, Artificial Sequence
  Description of Artificial Sequence: Synthetic oligonucleotide
gcacauucccagguacuua

SEQ ID NO: 2064563 - RNA, 19 nt, Artificial Sequence
  Description of Artificial Sequence: Synthetic oligonucleotide
gcaggggcgcguagcaaca

SEQ ID NO: 2064564 - RNA, 19 nt, Artificial Sequence
  Description of Artificial Sequence: Synthetic oligonucleotide
cgcucaccaguggaagggg

SEQ ID NO: 2064565 - RNA, 19 nt, Artificial Sequence
  Description of Artificial Sequence: Synthetic oligonucleotide
gcguagcaacagaggcagg

SEQ ID NO: 2064566 - RNA, 19 nt, Artificial Sequence
  Description of Artificial Sequence: Synthetic oligonucleotide
ucccagggucuggcuggga

SEQ ID NO: 2064567 - RNA, 19 nt, Artificial Sequence
  Description of Artificial Sequence: Synthetic oligonucleotide
ccuauccaggacaccagau

SEQ ID NO: 2064568 - RNA, 19 nt, Artificial Sequence
  Description of Artificial Sequence: Synthetic oligonucleotide
ggggaggccuuggcuggag

SEQ ID NO: 2064569 - RNA, 19 nt, Artificial Sequence
  Description of Artificial Sequence: Synthetic oligonucleotide
ccuaagccccauaauccau

SEQ ID NO: 2064570 - RNA, 19 nt, Artificial Sequence
  Description of Artificial Sequence: Synthetic oligonucleotide
cccguuuucucucucccau

SEQ ID NO: 2064571 - RNA, 19 nt, Artificial Sequence
  Description of Artificial Sequence: Synthetic oligonucleotide
ggcgcgcaggggcgcguag

SEQ ID NO: 2064572 - RNA, 19 nt, Artificial Sequence
  Description of Artificial Sequence: Synthetic oligonucleotide
gggugcagccucagugaga

SEQ ID NO: 2064573 - RNA, 19 nt, Artificial Sequence
  Description of Artificial Sequence: Synthetic oligonucleotide
cacaagcgcacggguccga

SEQ ID NO: 2064574 - RNA, 19 nt, Artificial Sequence
  Description of Artificial Sequence: Synthetic oligonucleotide
ccgcacgacggcggaagag

SEQ ID NO: 2064575 - RNA, 19 nt, Artificial Sequence
  Description of Artificial Sequence: Synthetic oligonucleotide
ccccguuuucucucuccca

SEQ ID NO: 2064576 - RNA, 19 nt, Artificial Sequence
  Description of Artificial Sequence: Synthetic oligonucleotide
cagguacuuagggccagau

SEQ ID NO: 2064577 - RNA, 19 nt, Artificial Sequence
  Description of Artificial Sequence: Synthetic oligonucleotide
gccucugcgcagcgaccac

SEQ ID NO: 2064578 - RNA, 19 nt, Artificial Sequence
  Description of Artificial Sequence: Synthetic oligonucleotide
gcaggcgaccuggguccgg

SEQ ID NO: 2064579 - RNA, 19 nt, Artificial Sequence
  Description of Artificial Sequence: Synthetic oligonucleotide
cgcccauccgcacgacggc

SEQ ID NO: 2064580 - RNA, 19 nt, Artificial Sequence
  Description of Artificial Sequence: Synthetic oligonucleotide
gggccucugcgcagcgacc

SEQ ID NO: 2064581 - RNA, 19 nt, Artificial Sequence
  Description of Artificial Sequence: Synthetic oligonucleotide
gcgcacggguccgagaagu

SEQ ID NO: 2064582 - RNA, 19 nt, Artificial Sequence
  Description of Artificial Sequence: Synthetic oligonucleotide
ggcguccgacaggcagugg

SEQ ID NO: 2064583 - RNA, 19 nt, Artificial Sequence
  Description of Artificial Sequence: Synthetic oligonucleotide
gguugguuaggugcacauu

SEQ ID NO: 2064584 - RNA, 19 nt, Artificial Sequence
  Description of Artificial Sequence: Synthetic oligonucleotide
acacaccgugcggccuccu

SEQ ID NO: 2064585 - RNA, 19 nt, Artificial Sequence
  Description of Artificial Sequence: Synthetic oligonucleotide
cgcagcgaccaccgcgccc

SEQ ID NO: 2064586 - RNA, 19 nt, Artificial Sequence
  Description of Artificial Sequence: Synthetic oligonucleotide
agucgcccucggcguccga

SEQ ID NO: 2064587 - RNA, 19 nt, Artificial Sequence
  Description of Artificial Sequence: Synthetic oligonucleotide
ccccaguccccacugcuua

SEQ ID NO: 2064588 - RNA, 19 nt, Artificial Sequence
  Description of Artificial Sequence: Synthetic oligonucleotide
cggcggaagagugcucggc

SEQ ID NO: 2064589 - RNA, 19 nt, Artificial Sequence
  Description of Artificial Sequence: Synthetic oligonucleotide
cauccgcacgacggcggaa

SEQ ID NO: 2064590 - RNA, 19 nt, Artificial Sequence
  Description of Artificial Sequence: Synthetic oligonucleotide
ccauccgcacgacggcgga

SEQ ID NO: 2064591 - RNA, 19 nt, Artificial Sequence
  Description of Artificial Sequence: Synthetic oligonucleotide
gcacugccagggacagcgc

SEQ ID NO: 2064592 - RNA, 19 nt, Artificial Sequence
  Description of Artificial Sequence: Synthetic oligonucleotide
gcgcagcgaccaccgcgcc

SEQ ID NO: 2064593 - RNA, 19 nt, Artificial Sequence
  Description of Artificial Sequence: Synthetic oligonucleotide
ggcgugggugccccuggcu

SEQ ID NO: 2064594 - RNA, 19 nt, Artificial Sequence
  Description of Artificial Sequence: Synthetic oligonucleotide
cgcacggguccgagaaguc

SEQ ID NO: 2064595 - RNA, 19 nt, Artificial Sequence
  Description of Artificial Sequence: Synthetic oligonucleotide
cagcaccauacagcacucu

SEQ ID NO: 2064596 - RNA, 19 nt, Artificial Sequence
  Description of Artificial Sequence: Synthetic oligonucleotide
cccaguccccacugcuuaa

SEQ ID NO: 2064597 - RNA, 19 nt, Artificial Sequence
  Description of Artificial Sequence: Synthetic oligonucleotide
cguccgacaggcaguggua

SEQ ID NO: 2064598 - RNA, 19 nt, Artificial Sequence
  Description of Artificial Sequence: Synthetic oligonucleotide
cggguccgagaagucgccc

SEQ ID NO: 2064599 - RNA, 19 nt, Artificial Sequence
  Description of Artificial Sequence: Synthetic oligonucleotide
ccggggccucugcgcagcg

SEQ ID NO: 2064600 - RNA, 19 nt, Artificial Sequence
  Description of Artificial Sequence: Synthetic oligonucleotide
cccuucccaaaacgaggua

SEQ ID NO: 2064601 - RNA, 19 nt, Artificial Sequence
  Description of Artificial Sequence: Synthetic oligonucleotide
cggcguccgacaggcagug

SEQ ID NO: 2064602 - RNA, 19 nt, Artificial Sequence
  Description of Artificial Sequence: Synthetic oligonucleotide
ccagugcugcaccccucaa

SEQ ID NO: 2064603 - RNA, 19 nt, Artificial Sequence
  Description of Artificial Sequence: Synthetic oligonucleotide
cgcacgacggcggaagagu

SEQ ID NO: 2064604 - RNA, 19 nt, Artificial Sequence
  Description of Artificial Sequence: Synthetic oligonucleotide
ccgcgcaccacaggcagcu

SEQ ID NO: 2064605 - RNA, 19 nt, Artificial Sequence
  Description of Artificial Sequence: Synthetic oligonucleotide
cgacggcggaagagugcuc

SEQ ID NO: 2064606 - RNA, 19 nt, Artificial Sequence
  Description of Artificial Sequence: Synthetic oligonucleotide
cggagaccuugguugcccu

SEQ ID NO: 2064607 - RNA, 19 nt, Artificial Sequence
  Description of Artificial Sequence: Synthetic oligonucleotide
caccucccucuccccguuu

SEQ ID NO: 2064608 - RNA, 19 nt, Artificial Sequence
  Description of Artificial Sequence: Synthetic oligonucleotide
ccguccaagccuggguaau

SEQ ID NO: 2064609 - RNA, 19 nt, Artificial Sequence
  Description of Artificial Sequence: Synthetic oligonucleotide
ccucggcguccgacaggca

SEQ ID NO: 2064610 - RNA, 19 nt, Artificial Sequence
  Description of Artificial Sequence: Synthetic oligonucleotide
caggcgcgcaggggcgcgu

SEQ ID NO: 2064611 - RNA, 19 nt, Artificial Sequence
  Description of Artificial Sequence: Synthetic oligonucleotide
ucuuugauggcuaagaugg

SEQ ID NO: 2064612 - RNA, 19 nt, Artificial Sequence
  Description of Artificial Sequence: Synthetic oligonucleotide
ucugggcucaccaauaccg

SEQ ID NO: 2064613 - RNA, 19 nt, Artificial Sequence
  Description of Artificial Sequence: Synthetic oligonucleotide
gacuggaagacuuagcagc

SEQ ID NO: 2064614 - RNA, 19 nt, Artificial Sequence
  Description of Artificial Sequence: Synthetic oligonucleotide
gagaguugcuaguugaggg

SEQ ID NO: 2064615 - RNA, 19 nt, Artificial Sequence
  Description of Artificial Sequence: Synthetic oligonucleotide
gagagugggagcuacggcg

SEQ ID NO: 2064616 - RNA, 19 nt, Artificial Sequence
  Description of Artificial Sequence: Synthetic oligonucleotide
uugauggcuaagaugguag

SEQ ID NO: 2064617 - RNA, 19 nt, Artificial Sequence
  Description of Artificial Sequence: Synthetic oligonucleotide
gaacauugagaguugcuag

SEQ ID NO: 2064618 - RNA, 19 nt, Artificial Sequence
  Description of Artificial Sequence: Synthetic oligonucleotide
acaaaugucucccuucgag

SEQ ID NO: 2064619 - RNA, 19 nt, Artificial Sequence
  Description of Artificial Sequence: Synthetic oligonucleotide
ugauugugcaagaggagag

SEQ ID NO: 2064620 - RNA, 19 nt, Artificial Sequence
  Description of Artificial Sequence: Synthetic oligonucleotide
uccuugaggacaaaugucu

SEQ ID NO: 2064621 - RNA, 19 nt, Artificial Sequence
  Description of Artificial Sequence: Synthetic oligonucleotide
ucagcuuagaccguccacg

SEQ ID NO: 2064622 - RNA, 19 nt, Artificial Sequence
  Description of Artificial Sequence: Synthetic oligonucleotide
acugcggugagagaggccc

SEQ ID NO: 2064623 - RNA, 19 nt, Artificial Sequence
  Description of Artificial Sequence: Synthetic oligonucleotide
agacuuagcagcugcuccc

SEQ ID NO: 2064624 - RNA, 19 nt, Artificial Sequence
  Description of Artificial Sequence: Synthetic oligonucleotide
uuugguacacuccggcuag

SEQ ID NO: 2064625 - RNA, 19 nt, Artificial Sequence
  Description of Artificial Sequence: Synthetic oligonucleotide
ugcccagucagcagaagcg

SEQ ID NO: 2064626 - RNA, 19 nt, Artificial Sequence
  Description of Artificial Sequence: Synthetic oligonucleotide
uaccuuaguagguccaggg

SEQ ID NO: 2064627 - RNA, 19 nt, Artificial Sequence
  Description of Artificial Sequence: Synthetic oligonucleotide
auaccguuaggucuucuuc

SEQ ID NO: 2064628 - RNA, 19 nt, Artificial Sequence
  Description of Artificial Sequence: Synthetic oligonucleotide
aacagauugcaagugggug

SEQ ID NO: 2064629 - RNA, 19 nt, Artificial Sequence
  Description of Artificial Sequence: Synthetic oligonucleotide
cagguuuugguacacuccg

SEQ ID NO: 2064630 - RNA, 19 nt, Artificial Sequence
  Description of Artificial Sequence: Synthetic oligonucleotide
caaaugucucccuucgagg

SEQ ID NO: 2064631 - RNA, 19 nt, Artificial Sequence
  Description of Artificial Sequence: Synthetic oligonucleotide
uggaagacuuagcagcugc

SEQ ID NO: 2064632 - RNA, 19 nt, Artificial Sequence
  Description of Artificial Sequence: Synthetic oligonucleotide
ggaagauugguucucuggg

SEQ ID NO: 2064633 - RNA, 19 nt, Artificial Sequence
  Description of Artificial Sequence: Synthetic oligonucleotide
cuugaggacaaaugucucc

SEQ ID NO: 2064634 - RNA, 19 nt, Artificial Sequence
  Description of Artificial Sequence: Synthetic oligonucleotide
ugcuucggaguccaguuag

SEQ ID NO: 2064635 - RNA, 19 nt, Artificial Sequence
  Description of Artificial Sequence: Synthetic oligonucleotide
aagauugguucucugggaa

SEQ ID NO: 2064636 - RNA, 19 nt, Artificial Sequence
  Description of Artificial Sequence: Synthetic oligonucleotide
acuugauugugcaagagga

SEQ ID NO: 2064637 - RNA, 19 nt, Artificial Sequence
  Description of Artificial Sequence: Synthetic oligonucleotide
augcccagucagcagaagc

SEQ ID NO: 2064638 - RNA, 19 nt, Artificial Sequence
  Description of Artificial Sequence: Synthetic oligonucleotide
uuuugccagguuuugguac

SEQ ID NO: 2064639 - RNA, 19 nt, Artificial Sequence
  Description of Artificial Sequence: Synthetic oligonucleotide
guacacuccggcuagugag

SEQ ID NO: 2064640 - RNA, 19 nt, Artificial Sequence
  Description of Artificial Sequence: Synthetic oligonucleotide
uuuugguacacuccggcua

SEQ ID NO: 2064641 - RNA, 19 nt, Artificial Sequence
  Description of Artificial Sequence: Synthetic oligonucleotide
uugaggacaaaugucuccc

SEQ ID NO: 2064642 - RNA, 19 nt, Artificial Sequence
  Description of Artificial Sequence: Synthetic oligonucleotide
cuuggaagcccuuuccgag

SEQ ID NO: 2064643 - RNA, 19 nt, Artificial Sequence
  Description of Artificial Sequence: Synthetic oligonucleotide
uaccguuaggucuucuucc

SEQ ID NO: 2064644 - RNA, 19 nt, Artificial Sequence
  Description of Artificial Sequence: Synthetic oligonucleotide
gucgaaguggcuucucugg

SEQ ID NO: 2064645 - RNA, 19 nt, Artificial Sequence
  Description of Artificial Sequence: Synthetic oligonucleotide
uugagaguugcuaguugag

SEQ ID NO: 2064646 - RNA, 19 nt, Artificial Sequence
  Description of Artificial Sequence: Synthetic oligonucleotide
agauugguucucugggaac

SEQ ID NO: 2064647 - RNA, 19 nt, Artificial Sequence
  Description of Artificial Sequence: Synthetic oligonucleotide
ucgaaguggcuucucuggg

SEQ ID NO: 2064648 - RNA, 19 nt, Artificial Sequence
  Description of Artificial Sequence: Synthetic oligonucleotide
ugcaagaggagagagugcu

SEQ ID NO: 2064649 - RNA, 19 nt, Artificial Sequence
  Description of Artificial Sequence: Synthetic oligonucleotide
aguccaguuaggcugcuug

SEQ ID NO: 2064650 - RNA, 19 nt, Artificial Sequence
  Description of Artificial Sequence: Synthetic oligonucleotide
ugaaccucacacccuggag

SEQ ID NO: 2064651 - RNA, 19 nt, Artificial Sequence
  Description of Artificial Sequence: Synthetic oligonucleotide
agagcuuggaagcccuuuc

SEQ ID NO: 2064652 - RNA, 19 nt, Artificial Sequence
  Description of Artificial Sequence: Synthetic oligonucleotide
cuugauugugcaagaggag

SEQ ID NO: 2064653 - RNA, 19 nt, Artificial Sequence
  Description of Artificial Sequence: Synthetic oligonucleotide
gacagggcuguccuugagg

SEQ ID NO: 2064654 - RNA, 19 nt, Artificial Sequence
  Description of Artificial Sequence: Synthetic oligonucleotide
agcuuggaagcccuuuccg

SEQ ID NO: 2064655 - RNA, 19 nt, Artificial Sequence
  Description of Artificial Sequence: Synthetic oligonucleotide
uuuaccuuaguagguccag

SEQ ID NO: 2064656 - RNA, 19 nt, Artificial Sequence
  Description of Artificial Sequence: Synthetic oligonucleotide
acuccggcuagugaguggc

SEQ ID NO: 2064657 - RNA, 19 nt, Artificial Sequence
  Description of Artificial Sequence: Synthetic oligonucleotide
uuaucacugcuucggaguc

SEQ ID NO: 2064658 - RNA, 19 nt, Artificial Sequence
  Description of Artificial Sequence: Synthetic oligonucleotide
aauaccguuaggucuucuu

SEQ ID NO: 2064659 - RNA, 19 nt, Artificial Sequence
  Description of Artificial Sequence: Synthetic oligonucleotide
auugugcaagaggagagag

SEQ ID NO: 2064660 - RNA, 19 nt, Artificial Sequence
  Description of Artificial Sequence: Synthetic oligonucleotide
ugucagauggggacagccc

SEQ ID NO: 2064661 - RNA, 19 nt, Artificial Sequence
  Description of Artificial Sequence: Synthetic oligonucleotide
agagagaaucuggaguagg

SEQ ID NO: 2064662 - RNA, 19 nt, Artificial Sequence
  Description of Artificial Sequence: Synthetic oligonucleotide
ucaccaauaccguuagguc

SEQ ID NO: 2064663 - RNA, 19 nt, Artificial Sequence
  Description of Artificial Sequence: Synthetic oligonucleotide
uaguugagggcuguggagc

SEQ ID NO: 2064664 - RNA, 19 nt, Artificial Sequence
  Description of Artificial Sequence: Synthetic oligonucleotide
guagccgggaugaacauug

SEQ ID NO: 2064665 - RNA, 19 nt, Artificial Sequence
  Description of Artificial Sequence: Synthetic oligonucleotide
gucagcagaagcgagucag

SEQ ID NO: 2064666 - RNA, 19 nt, Artificial Sequence
  Description of Artificial Sequence: Synthetic oligonucleotide
cuaguugagggcuguggag

SEQ ID NO: 2064667 - RNA, 19 nt, Artificial Sequence
  Description of Artificial Sequence: Synthetic oligonucleotide
gauugcaagugggugauuc

SEQ ID NO: 2064668 - RNA, 19 nt, Artificial Sequence
  Description of Artificial Sequence: Synthetic oligonucleotide
gguuacugcggugagagag

SEQ ID NO: 2064669 - RNA, 19 nt, Artificial Sequence
  Description of Artificial Sequence: Synthetic oligonucleotide
ggaacaggagcucugugcc

SEQ ID NO: 2064670 - RNA, 19 nt, Artificial Sequence
  Description of Artificial Sequence: Synthetic oligonucleotide
ggacaaaugucucccuucg

SEQ ID NO: 2064671 - RNA, 19 nt, Artificial Sequence
  Description of Artificial Sequence: Synthetic oligonucleotide
gaagcgagucagcuuagac

SEQ ID NO: 2064672 - RNA, 19 nt, Artificial Sequence
  Description of Artificial Sequence: Synthetic oligonucleotide
gaugaacauugagaguugc

SEQ ID NO: 2064673 - RNA, 19 nt, Artificial Sequence
  Description of Artificial Sequence: Synthetic oligonucleotide
uggagagugggagcuacgg

SEQ ID NO: 2064674 - RNA, 19 nt, Artificial Sequence
  Description of Artificial Sequence: Synthetic oligonucleotide
aguggcauucgaguggcgg

SEQ ID NO: 2064675 - RNA, 19 nt, Artificial Sequence
  Description of Artificial Sequence: Synthetic oligonucleotide
uguggagcuaggacuggcc

SEQ ID NO: 2064676 - RNA, 19 nt, Artificial Sequence
  Description of Artificial Sequence: Synthetic oligonucleotide
acagggcuguccuugagga

SEQ ID NO: 2064677 - RNA, 19 nt, Artificial Sequence
  Description of Artificial Sequence: Synthetic oligonucleotide
ucuagcugagcugccaggc

SEQ ID NO: 2064678 - RNA, 19 nt, Artificial Sequence
  Description of Artificial Sequence: Synthetic oligonucleotide
uccaguuaggcugcuuggg

SEQ ID NO: 2064679 - RNA, 19 nt, Artificial Sequence
  Description of Artificial Sequence: Synthetic oligonucleotide
gaagauugguucucuggga

SEQ ID NO: 2064680 - RNA, 19 nt, Artificial Sequence
  Description of Artificial Sequence: Synthetic oligonucleotide
cuguccuugaggacaaaug

SEQ ID NO: 2064681 - RNA, 19 nt, Artificial Sequence
  Description of Artificial Sequence: Synthetic oligonucleotide
uuaccuuaguagguccagg

SEQ ID NO: 2064682 - RNA, 19 nt, Artificial Sequence
  Description of Artificial Sequence: Synthetic oligonucleotide
ugcuaguugagggcugugg

SEQ ID NO: 2064683 - RNA, 19 nt, Artificial Sequence
  Description of Artificial Sequence: Synthetic oligonucleotide
ggaacagauugcaaguggg

SEQ ID NO: 2064684 - RNA, 19 nt, Artificial Sequence
  Description of Artificial Sequence: Synthetic oligonucleotide
ccgggaugaacauugagag

SEQ ID NO: 2064685 - RNA, 19 nt, Artificial Sequence
  Description of Artificial Sequence: Synthetic oligonucleotide
ccucgugacugucagaugg

SEQ ID NO: 2064686 - RNA, 19 nt, Artificial Sequence
  Description of Artificial Sequence: Synthetic oligonucleotide
uuaggcugcuuggggaugg

SEQ ID NO: 2064687 - RNA, 19 nt, Artificial Sequence
  Description of Artificial Sequence: Synthetic oligonucleotide
uuuuccgccgggguggaag

SEQ ID NO: 2064688 - RNA, 19 nt, Artificial Sequence
  Description of Artificial Sequence: Synthetic oligonucleotide
gggugcagggaacagauug

SEQ ID NO: 2064689 - RNA, 19 nt, Artificial Sequence
  Description of Artificial Sequence: Synthetic oligonucleotide
guggcauucgaguggcggg

SEQ ID NO: 2064690 - RNA, 19 nt, Artificial Sequence
  Description of Artificial Sequence: Synthetic oligonucleotide
gggaacagauugcaagugg

SEQ ID NO: 2064691 - RNA, 19 nt, Artificial Sequence
  Description of Artificial Sequence: Synthetic oligonucleotide
accgguagucgacuggaag

SEQ ID NO: 2064692 - RNA, 19 nt, Artificial Sequence
  Description of Artificial Sequence: Synthetic oligonucleotide
uccgagcugagagagaauc

SEQ ID NO: 2064693 - RNA, 19 nt, Artificial Sequence
  Description of Artificial Sequence: Synthetic oligonucleotide
uucggaguccaguuaggcu

SEQ ID NO: 2064694 - RNA, 19 nt, Artificial Sequence
  Description of Artificial Sequence: Synthetic oligonucleotide
aaggucucauccacaauga

SEQ ID NO: 2064695 - RNA, 19 nt, Artificial Sequence
  Description of Artificial Sequence: Synthetic oligonucleotide
acugggaguuggaagauug

SEQ ID NO: 2064696 - RNA, 19 nt, Artificial Sequence
  Description of Artificial Sequence: Synthetic oligonucleotide
uuccucgugacugucagau

SEQ ID NO: 2064697 - RNA, 19 nt, Artificial Sequence
  Description of Artificial Sequence: Synthetic oligonucleotide
ugcuccaagagcucacagu

SEQ ID NO: 2064698 - RNA, 19 nt, Artificial Sequence
  Description of Artificial Sequence: Synthetic oligonucleotide
agcccuccaaaguccaagg

SEQ ID NO: 2064699 - RNA, 19 nt, Artificial Sequence
  Description of Artificial Sequence: Synthetic oligonucleotide
uggcuaagaugguagugcu

SEQ ID NO: 2064700 - RNA, 19 nt, Artificial Sequence
  Description of Artificial Sequence: Synthetic oligonucleotide
guuacugcggugagagagg

SEQ ID NO: 2064701 - RNA, 19 nt, Artificial Sequence
  Description of Artificial Sequence: Synthetic oligonucleotide
cauugagaguugcuaguug

SEQ ID NO: 2064702 - RNA, 19 nt, Artificial Sequence
  Description of Artificial Sequence: Synthetic oligonucleotide
gagcuuggaagcccuuucc

SEQ ID NO: 2064703 - RNA, 19 nt, Artificial Sequence
  Description of Artificial Sequence: Synthetic oligonucleotide
guccaguuaggcugcuugg

SEQ ID NO: 2064704 - RNA, 19 nt, Artificial Sequence
  Description of Artificial Sequence: Synthetic oligonucleotide
uggaagcccuuuccgagcu

SEQ ID NO: 2064705 - RNA, 19 nt, Artificial Sequence
  Description of Artificial Sequence: Synthetic oligonucleotide
ugauggcuaagaugguagu

SEQ ID NO: 2064706 - RNA, 19 nt, Artificial Sequence
  Description of Artificial Sequence: Synthetic oligonucleotide
cuaggacuggccugacagg

SEQ ID NO: 2064707 - RNA, 19 nt, Artificial Sequence
  Description of Artificial Sequence: Synthetic oligonucleotide
uuggaagauugguucucug

SEQ ID NO: 2064708 - RNA, 19 nt, Artificial Sequence
  Description of Artificial Sequence: Synthetic oligonucleotide
agagaggccccgucgaagu

SEQ ID NO: 2064709 - RNA, 19 nt, Artificial Sequence
  Description of Artificial Sequence: Synthetic oligonucleotide
cucgugacugucagauggg

SEQ ID NO: 2064710 - RNA, 19 nt, Artificial Sequence
  Description of Artificial Sequence: Synthetic oligonucleotide
uuaggucuucuuccucgug

SEQ ID NO: 2064711 - RNA, 19 nt, Artificial Sequence
  Description of Artificial Sequence: Synthetic oligonucleotide
uuaguagguccagggacug

SEQ ID NO: 2064712 - RNA, 19 nt, Artificial Sequence
  Description of Artificial Sequence: Synthetic oligonucleotide
gggaacaggagcucugugc

SEQ ID NO: 2064713 - RNA, 19 nt, Artificial Sequence
  Description of Artificial Sequence: Synthetic oligonucleotide
ggugagagaggccccgucg

SEQ ID NO: 2064714 - RNA, 19 nt, Artificial Sequence
  Description of Artificial Sequence: Synthetic oligonucleotide
cuuggggauggugugcucc

SEQ ID NO: 2064715 - RNA, 19 nt, Artificial Sequence
  Description of Artificial Sequence: Synthetic oligonucleotide
ugcauccugccucgagggg

SEQ ID NO: 2064716 - RNA, 19 nt, Artificial Sequence
  Description of Artificial Sequence: Synthetic oligonucleotide
caguuuuccgccggggugg

SEQ ID NO: 2064717 - RNA, 19 nt, Artificial Sequence
  Description of Artificial Sequence: Synthetic oligonucleotide
gaaucuggaguagggguac

SEQ ID NO: 2064718 - RNA, 19 nt, Artificial Sequence
  Description of Artificial Sequence: Synthetic oligonucleotide
aguuaggcugcuuggggau

SEQ ID NO: 2064719 - RNA, 19 nt, Artificial Sequence
  Description of Artificial Sequence: Synthetic oligonucleotide
ucgugacugucagaugggg

SEQ ID NO: 2064720 - RNA, 19 nt, Artificial Sequence
  Description of Artificial Sequence: Synthetic oligonucleotide
cugggaguuggaagauugg

SEQ ID NO: 2064721 - RNA, 19 nt, Artificial Sequence
  Description of Artificial Sequence: Synthetic oligonucleotide
aguagguccagggacugca

SEQ ID NO: 2064722 - RNA, 19 nt, Artificial Sequence
  Description of Artificial Sequence: Synthetic oligonucleotide
uacacuccggcuagugagu

SEQ ID NO: 2064723 - RNA, 19 nt, Artificial Sequence
  Description of Artificial Sequence: Synthetic oligonucleotide
uuacugcggugagagaggc

SEQ ID NO: 2064724 - RNA, 19 nt, Artificial Sequence
  Description of Artificial Sequence: Synthetic oligonucleotide
cugucagauggggacagcc

SEQ ID NO: 2064725 - RNA, 19 nt, Artificial Sequence
  Description of Artificial Sequence: Synthetic oligonucleotide
gagaucucggacagggcug

SEQ ID NO: 2064726 - RNA, 19 nt, Artificial Sequence
  Description of Artificial Sequence: Synthetic oligonucleotide
gagagagaaucuggaguag

SEQ ID NO: 2064727 - RNA, 19 nt, Artificial Sequence
  Description of Artificial Sequence: Synthetic oligonucleotide
accguuaggucuucuuccu

SEQ ID NO: 2064728 - RNA, 19 nt, Artificial Sequence
  Description of Artificial Sequence: Synthetic oligonucleotide
uugggguuacugcggugag

SEQ ID NO: 2064729 - RNA, 19 nt, Artificial Sequence
  Description of Artificial Sequence: Synthetic oligonucleotide
cagcuuagaccguccacgc

SEQ ID NO: 2064730 - RNA, 19 nt, Artificial Sequence
  Description of Artificial Sequence: Synthetic oligonucleotide
ucggacagggcuguccuug

SEQ ID NO: 2064731 - RNA, 19 nt, Artificial Sequence
  Description of Artificial Sequence: Synthetic oligonucleotide
caggcgguuggcuucauca

SEQ ID NO: 2064732 - RNA, 19 nt, Artificial Sequence
  Description of Artificial Sequence: Synthetic oligonucleotide
cuucggaguccaguuaggc

SEQ ID NO: 2064733 - RNA, 19 nt, Artificial Sequence
  Description of Artificial Sequence: Synthetic oligonucleotide
gggguuacugcggugagag

SEQ ID NO: 2064734 - RNA, 19 nt, Artificial Sequence
  Description of Artificial Sequence: Synthetic oligonucleotide
cccaaacugaaccucacac

SEQ ID NO: 2064735 - RNA, 19 nt, Artificial Sequence
  Description of Artificial Sequence: Synthetic oligonucleotide
ucacacccuggagaguggg

SEQ ID NO: 2064736 - RNA, 19 nt, Artificial Sequence
  Description of Artificial Sequence: Synthetic oligonucleotide
aaacugaaccucacacccu

SEQ ID NO: 2064737 - RNA, 19 nt, Artificial Sequence
  Description of Artificial Sequence: Synthetic oligonucleotide
ugaggacaaaugucucccu

SEQ ID NO: 2064738 - RNA, 19 nt, Artificial Sequence
  Description of Artificial Sequence: Synthetic oligonucleotide
ugugcccugcagagcuugg

SEQ ID NO: 2064739 - RNA, 19 nt, Artificial Sequence
  Description of Artificial Sequence: Synthetic oligonucleotide
gcccuuuccgagcugagag

SEQ ID NO: 2064740 - RNA, 19 nt, Artificial Sequence
  Description of Artificial Sequence: Synthetic oligonucleotide
gauugugcaagaggagaga

SEQ ID NO: 2064741 - RNA, 19 nt, Artificial Sequence
  Description of Artificial Sequence: Synthetic oligonucleotide
ugcucgaggggcacuggga

SEQ ID NO: 2064742 - RNA, 19 nt, Artificial Sequence
  Description of Artificial Sequence: Synthetic oligonucleotide
cagaugucacccgaacagc

SEQ ID NO: 2064743 - RNA, 19 nt, Artificial Sequence
  Description of Artificial Sequence: Synthetic oligonucleotide
cguuaggucuucuuccucg

SEQ ID NO: 2064744 - RNA, 19 nt, Artificial Sequence
  Description of Artificial Sequence: Synthetic oligonucleotide
agggaacagauugcaagug

SEQ ID NO: 2064745 - RNA, 19 nt, Artificial Sequence
  Description of Artificial Sequence: Synthetic oligonucleotide
cugaggggcugcauccugc

SEQ ID NO: 2064746 - RNA, 19 nt, Artificial Sequence
  Description of Artificial Sequence: Synthetic oligonucleotide
agccgggaugaacauugag

SEQ ID NO: 2064747 - RNA, 19 nt, Artificial Sequence
  Description of Artificial Sequence: Synthetic oligonucleotide
cuuaguagguccagggacu

SEQ ID NO: 2064748 - RNA, 19 nt, Artificial Sequence
  Description of Artificial Sequence: Synthetic oligonucleotide
ggaaccgguagucgacugg

SEQ ID NO: 2064749 - RNA, 19 nt, Artificial Sequence
  Description of Artificial Sequence: Synthetic oligonucleotide
ggauggugugcuccaagag

SEQ ID NO: 2064750 - RNA, 19 nt, Artificial Sequence
  Description of Artificial Sequence: Synthetic oligonucleotide
auugguucucugggaacag

SEQ ID NO: 2064751 - RNA, 19 nt, Artificial Sequence
  Description of Artificial Sequence: Synthetic oligonucleotide
agucagcuuagaccgucca

SEQ ID NO: 2064752 - RNA, 19 nt, Artificial Sequence
  Description of Artificial Sequence: Synthetic oligonucleotide
agcuacggcggcauugggg

SEQ ID NO: 2064753 - RNA, 19 nt, Artificial Sequence
  Description of Artificial Sequence: Synthetic oligonucleotide
uugcuguuguccgugcgcu

SEQ ID NO: 2064754 - RNA, 19 nt, Artificial Sequence
  Description of Artificial Sequence: Synthetic oligonucleotide
cagggcacacuccucuagc

SEQ ID NO: 2064755 - RNA, 19 nt, Artificial Sequence
  Description of Artificial Sequence: Synthetic oligonucleotide
aucacugcuucggagucca

SEQ ID NO: 2064756 - RNA, 19 nt, Artificial Sequence
  Description of Artificial Sequence: Synthetic oligonucleotide
uaucacugcuucggagucc

SEQ ID NO: 2064757 - RNA, 19 nt, Artificial Sequence
  Description of Artificial Sequence: Synthetic oligonucleotide
ugucacccgaacagcccug

SEQ ID NO: 2064758 - RNA, 19 nt, Artificial Sequence
  Description of Artificial Sequence: Synthetic oligonucleotide
cucaccaauaccguuaggu

SEQ ID NO: 2064759 - RNA, 19 nt, Artificial Sequence
  Description of Artificial Sequence: Synthetic oligonucleotide
gcagaagcgagucagcuua

SEQ ID NO: 2064760 - RNA, 19 nt, Artificial Sequence
  Description of Artificial Sequence: Synthetic oligonucleotide
caccaauaccguuaggucu

SEQ ID NO: 2064761 - RNA, 19 nt, Artificial Sequence
  Description of Artificial Sequence: Synthetic oligonucleotide
gaaccgguagucgacugga

SEQ ID NO: 2064762 - RNA, 19 nt, Artificial Sequence
  Description of Artificial Sequence: Synthetic oligonucleotide
ugcggugagagaggccccg

SEQ ID NO: 2064763 - RNA, 19 nt, Artificial Sequence
  Description of Artificial Sequence: Synthetic oligonucleotide
uggcauucgaguggcgggc

SEQ ID NO: 2064764 - RNA, 19 nt, Artificial Sequence
  Description of Artificial Sequence: Synthetic oligonucleotide
guuguccgugcgcugggcc

SEQ ID NO: 2064765 - RNA, 19 nt, Artificial Sequence
  Description of Artificial Sequence: Synthetic oligonucleotide
gacaaaugucucccuucga

SEQ ID NO: 2064766 - RNA, 19 nt, Artificial Sequence
  Description of Artificial Sequence: Synthetic oligonucleotide
gaggagagagugcugggcu

SEQ ID NO: 2064767 - RNA, 19 nt, Artificial Sequence
  Description of Artificial Sequence: Synthetic oligonucleotide
ugugcuccaagagcucaca

SEQ ID NO: 2064768 - RNA, 19 nt, Artificial Sequence
  Description of Artificial Sequence: Synthetic oligonucleotide
uuuccgccgggguggaaga

SEQ ID NO: 2064769 - RNA, 19 nt, Artificial Sequence
  Description of Artificial Sequence: Synthetic oligonucleotide
caguuaggcugcuugggga

SEQ ID NO: 2064770 - RNA, 19 nt, Artificial Sequence
  Description of Artificial Sequence: Synthetic oligonucleotide
gaguuggaagauugguucu

SEQ ID NO: 2064771 - RNA, 19 nt, Artificial Sequence
  Description of Artificial Sequence: Synthetic oligonucleotide
gucagcuuagaccguccac

SEQ ID NO: 2064772 - RNA, 19 nt, Artificial Sequence
  Description of Artificial Sequence: Synthetic oligonucleotide
ggcuaggcuucccagggcc

SEQ ID NO: 2064773 - RNA, 19 nt, Artificial Sequence
  Description of Artificial Sequence: Synthetic oligonucleotide
accaauaccguuaggucuu

SEQ ID NO: 2064774 - RNA, 19 nt, Artificial Sequence
  Description of Artificial Sequence: Synthetic oligonucleotide
acauugagaguugcuaguu

SEQ ID NO: 2064775 - RNA, 19 nt, Artificial Sequence
  Description of Artificial Sequence: Synthetic oligonucleotide
cugggcccaguuuuccgcc

SEQ ID NO: 2064776 - RNA, 19 nt, Artificial Sequence
  Description of Artificial Sequence: Synthetic oligonucleotide
ugggcccaguuuuccgccg

SEQ ID NO: 2064777 - RNA, 19 nt, Artificial Sequence
  Description of Artificial Sequence: Synthetic oligonucleotide
ucucccuucgagggcuggg

SEQ ID NO: 2064778 - RNA, 19 nt, Artificial Sequence
  Description of Artificial Sequence: Synthetic oligonucleotide
cuggagagugggagcuacg

SEQ ID NO: 2064779 - RNA, 19 nt, Artificial Sequence
  Description of Artificial Sequence: Synthetic oligonucleotide
ccaguuaggcugcuugggg

SEQ ID NO: 2064780 - RNA, 19 nt, Artificial Sequence
  Description of Artificial Sequence: Synthetic oligonucleotide
agguuuugguacacuccgg

SEQ ID NO: 2064781 - RNA, 19 nt, Artificial Sequence
  Description of Artificial Sequence: Synthetic oligonucleotide
ggcucaccaauaccguuag

SEQ ID NO: 2064782 - RNA, 19 nt, Artificial Sequence
  Description of Artificial Sequence: Synthetic oligonucleotide
uagucgacuggaagacuua

SEQ ID NO: 2064783 - RNA, 19 nt, Artificial Sequence
  Description of Artificial Sequence: Synthetic oligonucleotide
cagucagcagaagcgaguc

SEQ ID NO: 2064784 - RNA, 19 nt, Artificial Sequence
  Description of Artificial Sequence: Synthetic oligonucleotide
ggagcuacggcggcauugg

SEQ ID NO: 2064785 - RNA, 19 nt, Artificial Sequence
  Description of Artificial Sequence: Synthetic oligonucleotide
ugguacacuccggcuagug

SEQ ID NO: 2064786 - RNA, 19 nt, Artificial Sequence
  Description of Artificial Sequence: Synthetic oligonucleotide
ggcauugggguuacugcgg

SEQ ID NO: 2064787 - RNA, 19 nt, Artificial Sequence
  Description of Artificial Sequence: Synthetic oligonucleotide
agcagaagcgagucagcuu

SEQ ID NO: 2064788 - RNA, 19 nt, Artificial Sequence
  Description of Artificial Sequence: Synthetic oligonucleotide
aggagaucucggacagggc

SEQ ID NO: 2064789 - RNA, 19 nt, Artificial Sequence
  Description of Artificial Sequence: Synthetic oligonucleotide
cugcucgaggggcacuggg

SEQ ID NO: 2064790 - RNA, 19 nt, Artificial Sequence
  Description of Artificial Sequence: Synthetic oligonucleotide
gugagagaggccccgucga

SEQ ID NO: 2064791 - RNA, 19 nt, Artificial Sequence
  Description of Artificial Sequence: Synthetic oligonucleotide
gcggcauugggguuacugc

SEQ ID NO: 2064792 - RNA, 19 nt, Artificial Sequence
  Description of Artificial Sequence: Synthetic oligonucleotide
agcuuagaccguccacgca

SEQ ID NO: 2064793 - RNA, 19 nt, Artificial Sequence
  Description of Artificial Sequence: Synthetic oligonucleotide
ccuguagccgggaugaaca

SEQ ID NO: 2064794 - RNA, 19 nt, Artificial Sequence
  Description of Artificial Sequence: Synthetic oligonucleotide
gcuaguugagggcugugga

SEQ ID NO: 2064795 - RNA, 19 nt, Artificial Sequence
  Description of Artificial Sequence: Synthetic oligonucleotide
ggggcuucuuuccagaugu

SEQ ID NO: 2064796 - RNA, 19 nt, Artificial Sequence
  Description of Artificial Sequence: Synthetic oligonucleotide
cagauggggacagcccucc

SEQ ID NO: 2064797 - RNA, 19 nt, Artificial Sequence
  Description of Artificial Sequence: Synthetic oligonucleotide
uucugggugcagggaacag

SEQ ID NO: 2064798 - RNA, 19 nt, Artificial Sequence
  Description of Artificial Sequence: Synthetic oligonucleotide
ggagaucucggacagggcu

SEQ ID NO: 2064799 - RNA, 19 nt, Artificial Sequence
  Description of Artificial Sequence: Synthetic oligonucleotide
gcucgaggggcacugggag

SEQ ID NO: 2064800 - RNA, 19 nt, Artificial Sequence
  Description of Artificial Sequence: Synthetic oligonucleotide
ucccuucgagggcugggcu

SEQ ID NO: 2064801 - RNA, 19 nt, Artificial Sequence
  Description of Artificial Sequence: Synthetic oligonucleotide
cagaagcgagucagcuuag

SEQ ID NO: 2064802 - RNA, 19 nt, Artificial Sequence
  Description of Artificial Sequence: Synthetic oligonucleotide
uacugcggugagagaggcc

SEQ ID NO: 2064803 - RNA, 19 nt, Artificial Sequence
  Description of Artificial Sequence: Synthetic oligonucleotide
uccucgugacugucagaug

SEQ ID NO: 2064804 - RNA, 19 nt, Artificial Sequence
  Description of Artificial Sequence: Synthetic oligonucleotide
aaucuggaguagggguacu

SEQ ID NO: 2064805 - RNA, 19 nt, Artificial Sequence
  Description of Artificial Sequence: Synthetic oligonucleotide
cuguuguccgugcgcuggg

SEQ ID NO: 2064806 - RNA, 19 nt, Artificial Sequence
  Description of Artificial Sequence: Synthetic oligonucleotide
guuuugguacacuccggcu

SEQ ID NO: 2064807 - RNA, 19 nt, Artificial Sequence
  Description of Artificial Sequence: Synthetic oligonucleotide
gagucagcuuagaccgucc

SEQ ID NO: 2064808 - RNA, 19 nt, Artificial Sequence
  Description of Artificial Sequence: Synthetic oligonucleotide
cagcccuccaaaguccaag

SEQ ID NO: 2064809 - RNA, 19 nt, Artificial Sequence
  Description of Artificial Sequence: Synthetic oligonucleotide
acugaaccucacacccugg

SEQ ID NO: 2064810 - RNA, 19 nt, Artificial Sequence
  Description of Artificial Sequence: Synthetic oligonucleotide
cacuccggcuagugagugg

SEQ ID NO: 2064811 - RNA, 19 nt, Artificial Sequence
  Description of Artificial Sequence: Synthetic oligonucleotide
agaucucggacagggcugu

SEQ ID NO: 2064812 - RNA, 19 nt, Artificial Sequence
  Description of Artificial Sequence: Synthetic oligonucleotide
agcuuuccugaggggcugc

SEQ ID NO: 2064813 - RNA, 19 nt, Artificial Sequence
  Description of Artificial Sequence: Synthetic oligonucleotide
gucgacuggaagacuuagc

SEQ ID NO: 2064814 - RNA, 19 nt, Artificial Sequence
  Description of Artificial Sequence: Synthetic oligonucleotide
gagcuacggcggcauuggg

SEQ ID NO: 2064815 - RNA, 19 nt, Artificial Sequence
  Description of Artificial Sequence: Synthetic oligonucleotide
cagggaacagauugcaagu

SEQ ID NO: 2064816 - RNA, 19 nt, Artificial Sequence
  Description of Artificial Sequence: Synthetic oligonucleotide
uggggauggcugagggaac

SEQ ID NO: 2064817 - RNA, 19 nt, Artificial Sequence
  Description of Artificial Sequence: Synthetic oligonucleotide
ccucgaggggcacuggucc

SEQ ID NO: 2064818 - RNA, 19 nt, Artificial Sequence
  Description of Artificial Sequence: Synthetic oligonucleotide
gagaggccccgucgaagug

SEQ ID NO: 2064819 - RNA, 19 nt, Artificial Sequence
  Description of Artificial Sequence: Synthetic oligonucleotide
gaacagauugcaagugggu

SEQ ID NO: 2064820 - RNA, 19 nt, Artificial Sequence
  Description of Artificial Sequence: Synthetic oligonucleotide
ugggcucaccaauaccguu

SEQ ID NO: 2064821 - RNA, 19 nt, Artificial Sequence
  Description of Artificial Sequence: Synthetic oligonucleotide
aggucucauccacaaugaa

SEQ ID NO: 2064822 - RNA, 19 nt, Artificial Sequence
  Description of Artificial Sequence: Synthetic oligonucleotide
cugaaccucacacccugga

SEQ ID NO: 2064823 - RNA, 19 nt, Artificial Sequence
  Description of Artificial Sequence: Synthetic oligonucleotide
cauugggguuacugcggug

SEQ ID NO: 2064824 - RNA, 19 nt, Artificial Sequence
  Description of Artificial Sequence: Synthetic oligonucleotide
ucacccgaacagcccuggc

SEQ ID NO: 2064825 - RNA, 19 nt, Artificial Sequence
  Description of Artificial Sequence: Synthetic oligonucleotide
ugcgcugggcccaguuuuc

SEQ ID NO: 2064826 - RNA, 19 nt, Artificial Sequence
  Description of Artificial Sequence: Synthetic oligonucleotide
gucacccgaacagcccugg

SEQ ID NO: 2064827 - RNA, 19 nt, Artificial Sequence
  Description of Artificial Sequence: Synthetic oligonucleotide
gcuuggaagcccuuuccga

SEQ ID NO: 2064828 - RNA, 19 nt, Artificial Sequence
  Description of Artificial Sequence: Synthetic oligonucleotide
cacucucccgguccugcag

SEQ ID NO: 2064829 - RNA, 19 nt, Artificial Sequence
  Description of Artificial Sequence: Synthetic oligonucleotide
guuaggcugcuuggggaug

SEQ ID NO: 2064830 - RNA, 19 nt, Artificial Sequence
  Description of Artificial Sequence: Synthetic oligonucleotide
ggaugaacauugagaguug

SEQ ID NO: 2064831 - RNA, 19 nt, Artificial Sequence
  Description of Artificial Sequence: Synthetic oligonucleotide
gguacacuccggcuaguga

SEQ ID NO: 2064832 - RNA, 19 nt, Artificial Sequence
  Description of Artificial Sequence: Synthetic oligonucleotide
gccgggaugaacauugaga

SEQ ID NO: 2064833 - RNA, 19 nt, Artificial Sequence
  Description of Artificial Sequence: Synthetic oligonucleotide
cggcauugggguuacugcg

SEQ ID NO: 2064834 - RNA, 19 nt, Artificial Sequence
  Description of Artificial Sequence: Synthetic oligonucleotide
gacagcccuccaaagucca

SEQ ID NO: 2064835 - RNA, 19 nt, Artificial Sequence
  Description of Artificial Sequence: Synthetic oligonucleotide
uguuguccgugcgcugggc

SEQ ID NO: 2064836 - RNA, 19 nt, Artificial Sequence
  Description of Artificial Sequence: Synthetic oligonucleotide
cuaggcuucccagggccug

SEQ ID NO: 2064837 - RNA, 19 nt, Artificial Sequence
  Description of Artificial Sequence: Synthetic oligonucleotide
uagccgggaugaacauuga

SEQ ID NO: 2064838 - RNA, 19 nt, Artificial Sequence
  Description of Artificial Sequence: Synthetic oligonucleotide
ggauggcugagggaaccgg

SEQ ID NO: 2064839 - RNA, 19 nt, Artificial Sequence
  Description of Artificial Sequence: Synthetic oligonucleotide
uaguagguccagggacugc

SEQ ID NO: 2064840 - RNA, 19 nt, Artificial Sequence
  Description of Artificial Sequence: Synthetic oligonucleotide
acacuccggcuagugagug

SEQ ID NO: 2064841 - RNA, 19 nt, Artificial Sequence
  Description of Artificial Sequence: Synthetic oligonucleotide
uguagccgggaugaacauu

SEQ ID NO: 2064842 - RNA, 19 nt, Artificial Sequence
  Description of Artificial Sequence: Synthetic oligonucleotide
aggcgguuggcuucaucaa

SEQ ID NO: 2064843 - RNA, 19 nt, Artificial Sequence
  Description of Artificial Sequence: Synthetic oligonucleotide
ucgaggggcacugguccug

SEQ ID NO: 2064844 - RNA, 19 nt, Artificial Sequence
  Description of Artificial Sequence: Synthetic oligonucleotide
gcuagugaguggcauucga

SEQ ID NO: 2064845 - RNA, 19 nt, Artificial Sequence
  Description of Artificial Sequence: Synthetic oligonucleotide
gugcagggaacagauugca

SEQ ID NO: 2064846 - RNA, 19 nt, Artificial Sequence
  Description of Artificial Sequence: Synthetic oligonucleotide
cucccuucgagggcugggc

SEQ ID NO: 2064847 - RNA, 19 nt, Artificial Sequence
  Description of Artificial Sequence: Synthetic oligonucleotide
ccuugaggacaaaugucuc

SEQ ID NO: 2064848 - RNA, 19 nt, Artificial Sequence
  Description of Artificial Sequence: Synthetic oligonucleotide
uacggcggcauugggguua

SEQ ID NO: 2064849 - RNA, 19 nt, Artificial Sequence
  Description of Artificial Sequence: Synthetic oligonucleotide
cuggaagacuuagcagcug

SEQ ID NO: 2064850 - RNA, 19 nt, Artificial Sequence
  Description of Artificial Sequence: Synthetic oligonucleotide
ggugggcuugcuguugucc

SEQ ID NO: 2064851 - RNA, 19 nt, Artificial Sequence
  Description of Artificial Sequence: Synthetic oligonucleotide
cauccugccucgaggggca

SEQ ID NO: 2064852 - RNA, 19 nt, Artificial Sequence
  Description of Artificial Sequence: Synthetic oligonucleotide
agcuaggacuggccugaca

SEQ ID NO: 2064853 - RNA, 19 nt, Artificial Sequence
  Description of Artificial Sequence: Synthetic oligonucleotide
uccggcuagugaguggcau

SEQ ID NO: 2064854 - RNA, 19 nt, Artificial Sequence
  Description of Artificial Sequence: Synthetic oligonucleotide
cauucgaguggcgggccug

SEQ ID NO: 2064855 - RNA, 19 nt, Artificial Sequence
  Description of Artificial Sequence: Synthetic oligonucleotide
agaagcgagucagcuuaga

SEQ ID NO: 2064856 - RNA, 19 nt, Artificial Sequence
  Description of Artificial Sequence: Synthetic oligonucleotide
ugggguuacugcggugaga

SEQ ID NO: 2064857 - RNA, 19 nt, Artificial Sequence
  Description of Artificial Sequence: Synthetic oligonucleotide
cugcuuggggauggugugc

SEQ ID NO: 2064858 - RNA, 19 nt, Artificial Sequence
  Description of Artificial Sequence: Synthetic oligonucleotide
ggagcuaggacuggccuga

SEQ ID NO: 2064859 - RNA, 19 nt, Artificial Sequence
  Description of Artificial Sequence: Synthetic oligonucleotide
ucccgguccugcagggcac

SEQ ID NO: 2064860 - RNA, 19 nt, Artificial Sequence
  Description of Artificial Sequence: Synthetic oligonucleotide
gcagggcacacuccucuag

SEQ ID NO: 2064861 - RNA, 19 nt, Artificial Sequence
  Description of Artificial Sequence: Synthetic oligonucleotide
gggcacacuccucuagcug

SEQ ID NO: 2064862 - RNA, 19 nt, Artificial Sequence
  Description of Artificial Sequence: Synthetic oligonucleotide
gggcaggagaucucggaca

SEQ ID NO: 2064863 - RNA, 19 nt, Artificial Sequence
  Description of Artificial Sequence: Synthetic oligonucleotide
agggaaccgguagucgacu

SEQ ID NO: 2064864 - RNA, 19 nt, Artificial Sequence
  Description of Artificial Sequence: Synthetic oligonucleotide
ggcggcauugggguuacug

SEQ ID NO: 2064865 - RNA, 19 nt, Artificial Sequence
  Description of Artificial Sequence: Synthetic oligonucleotide
ccgguagucgacuggaaga

SEQ ID NO: 2064866 - RNA, 19 nt, Artificial Sequence
  Description of Artificial Sequence: Synthetic oligonucleotide
uucgaguggcgggccuggg

SEQ ID NO: 2064867 - RNA, 19 nt, Artificial Sequence
  Description of Artificial Sequence: Synthetic oligonucleotide
cugcggugagagaggcccc

SEQ ID NO: 2064868 - RNA, 19 nt, Artificial Sequence
  Description of Artificial Sequence: Synthetic oligonucleotide
cugugcccugcagagcuug

SEQ ID NO: 2064869 - RNA, 19 nt, Artificial Sequence
  Description of Artificial Sequence: Synthetic oligonucleotide
uccgccgggguggaagacu

SEQ ID NO: 2064870 - RNA, 19 nt, Artificial Sequence
  Description of Artificial Sequence: Synthetic oligonucleotide
ccaagagcucacagugggc

SEQ ID NO: 2064871 - RNA, 19 nt, Artificial Sequence
  Description of Artificial Sequence: Synthetic oligonucleotide
uugcuaguugagggcugug

SEQ ID NO: 2064872 - RNA, 19 nt, Artificial Sequence
  Description of Artificial Sequence: Synthetic oligonucleotide
uuccgagcugagagagaau

SEQ ID NO: 2064873 - RNA, 19 nt, Artificial Sequence
  Description of Artificial Sequence: Synthetic oligonucleotide
guagucgacuggaagacuu

SEQ ID NO: 2064874 - RNA, 19 nt, Artificial Sequence
  Description of Artificial Sequence: Synthetic oligonucleotide
guuggaagauugguucucu

SEQ ID NO: 2064875 - RNA, 19 nt, Artificial Sequence
  Description of Artificial Sequence: Synthetic oligonucleotide
guggagcuaggacuggccu

SEQ ID NO: 2064876 - RNA, 19 nt, Artificial Sequence
  Description of Artificial Sequence: Synthetic oligonucleotide
ucacugcuucggaguccag

SEQ ID NO: 2064877 - RNA, 19 nt, Artificial Sequence
  Description of Artificial Sequence: Synthetic oligonucleotide
guggcgggccuggggaugg

SEQ ID NO: 2064878 - RNA, 19 nt, Artificial Sequence
  Description of Artificial Sequence: Synthetic oligonucleotide
cccagucagcagaagcgag

SEQ ID NO: 2064879 - RNA, 19 nt, Artificial Sequence
  Description of Artificial Sequence: Synthetic oligonucleotide
ucacagugggcaggagauc

SEQ ID NO: 2064880 - RNA, 19 nt, Artificial Sequence
  Description of Artificial Sequence: Synthetic oligonucleotide
cagggcuguccuugaggac

SEQ ID NO: 2064881 - RNA, 19 nt, Artificial Sequence
  Description of Artificial Sequence: Synthetic oligonucleotide
ugcucccuguagccgggau

SEQ ID NO: 2064882 - RNA, 19 nt, Artificial Sequence
  Description of Artificial Sequence: Synthetic oligonucleotide
gggaaccgguagucgacug

SEQ ID NO: 2064883 - RNA, 19 nt, Artificial Sequence
  Description of Artificial Sequence: Synthetic oligonucleotide
ggcuucugggugcagggaa

SEQ ID NO: 2064884 - RNA, 19 nt, Artificial Sequence
  Description of Artificial Sequence: Synthetic oligonucleotide
gcuucggaguccaguuagg

SEQ ID NO: 2064885 - RNA, 19 nt, Artificial Sequence
  Description of Artificial Sequence: Synthetic oligonucleotide
gggagcuacggcggcauug

SEQ ID NO: 2064886 - RNA, 19 nt, Artificial Sequence
  Description of Artificial Sequence: Synthetic oligonucleotide
acggcggcauugggguuac

SEQ ID NO: 2064887 - RNA, 19 nt, Artificial Sequence
  Description of Artificial Sequence: Synthetic oligonucleotide
agauggggacagcccucca

SEQ ID NO: 2064888 - RNA, 19 nt, Artificial Sequence
  Description of Artificial Sequence: Synthetic oligonucleotide
ggcuagugaguggcauucg

SEQ ID NO: 2064889 - RNA, 19 nt, Artificial Sequence
  Description of Artificial Sequence: Synthetic oligonucleotide
gggauggcugagggaaccg

SEQ ID NO: 2064890 - RNA, 19 nt, Artificial Sequence
  Description of Artificial Sequence: Synthetic oligonucleotide
gagggcuguggagcuagga

SEQ ID NO: 2064891 - RNA, 19 nt, Artificial Sequence
  Description of Artificial Sequence: Synthetic oligonucleotide
cuuugauggcuaagauggu

SEQ ID NO: 2064892 - RNA, 19 nt, Artificial Sequence
  Description of Artificial Sequence: Synthetic oligonucleotide
ugggugcagggaacagauu

SEQ ID NO: 2064893 - RNA, 19 nt, Artificial Sequence
  Description of Artificial Sequence: Synthetic oligonucleotide
gacuuagcagcugcucccu

SEQ ID NO: 2064894 - RNA, 19 nt, Artificial Sequence
  Description of Artificial Sequence: Synthetic oligonucleotide
aaccgguagucgacuggaa

SEQ ID NO: 2064895 - RNA, 19 nt, Artificial Sequence
  Description of Artificial Sequence: Synthetic oligonucleotide
guugcuaguugagggcugu

SEQ ID NO: 2064896 - RNA, 19 nt, Artificial Sequence
  Description of Artificial Sequence: Synthetic oligonucleotide
uucccagggccugcaccug

SEQ ID NO: 2064897 - RNA, 19 nt, Artificial Sequence
  Description of Artificial Sequence: Synthetic oligonucleotide
ggcccaguuuuccgccggg

SEQ ID NO: 2064898 - RNA, 19 nt, Artificial Sequence
  Description of Artificial Sequence: Synthetic oligonucleotide
cuucgagggcugggcuugg

SEQ ID NO: 2064899 - RNA, 19 nt, Artificial Sequence
  Description of Artificial Sequence: Synthetic oligonucleotide
cgucgaaguggcuucucug

SEQ ID NO: 2064900 - RNA, 19 nt, Artificial Sequence
  Description of Artificial Sequence: Synthetic oligonucleotide
auggcugagggaaccggua

SEQ ID NO: 2064901 - RNA, 19 nt, Artificial Sequence
  Description of Artificial Sequence: Synthetic oligonucleotide
aguuuuccgccggggugga

SEQ ID NO: 2064902 - RNA, 19 nt, Artificial Sequence
  Description of Artificial Sequence: Synthetic oligonucleotide
gcucaccaauaccguuagg

SEQ ID NO: 2064903 - RNA, 19 nt, Artificial Sequence
  Description of Artificial Sequence: Synthetic oligonucleotide
gcaagaggagagagugcug

SEQ ID NO: 2064904 - RNA, 19 nt, Artificial Sequence
  Description of Artificial Sequence: Synthetic oligonucleotide
ccuucgagggcugggcuug

SEQ ID NO: 2064905 - RNA, 19 nt, Artificial Sequence
  Description of Artificial Sequence: Synthetic oligonucleotide
cacccgaacagcccuggcu

SEQ ID NO: 2064906 - RNA, 19 nt, Artificial Sequence
  Description of Artificial Sequence: Synthetic oligonucleotide
cugggcucaccaauaccgu

SEQ ID NO: 2064907 - RNA, 19 nt, Artificial Sequence
  Description of Artificial Sequence: Synthetic oligonucleotide
gcccaaacugaaccucaca

SEQ ID NO: 2064908 - RNA, 19 nt, Artificial Sequence
  Description of Artificial Sequence: Synthetic oligonucleotide
gcuucucugggcucaccaa

SEQ ID NO: 2064909 - RNA, 19 nt, Artificial Sequence
  Description of Artificial Sequence: Synthetic oligonucleotide
ggcauucgaguggcgggcc

SEQ ID NO: 2064910 - RNA, 19 nt, Artificial Sequence
  Description of Artificial Sequence: Synthetic oligonucleotide
cuaagaugguagugcuuuu

SEQ ID NO: 2064911 - RNA, 19 nt, Artificial Sequence
  Description of Artificial Sequence: Synthetic oligonucleotide
cagcagaagcgagucagcu

SEQ ID NO: 2064912 - RNA, 19 nt, Artificial Sequence
  Description of Artificial Sequence: Synthetic oligonucleotide
ggcacugguccugcucgag

SEQ ID NO: 2064913 - RNA, 19 nt, Artificial Sequence
  Description of Artificial Sequence: Synthetic oligonucleotide
cgguagucgacuggaagac

SEQ ID NO: 2064914 - RNA, 19 nt, Artificial Sequence
  Description of Artificial Sequence: Synthetic oligonucleotide
gggcuaggcuucccagggc

SEQ ID NO: 2064915 - RNA, 19 nt, Artificial Sequence
  Description of Artificial Sequence: Synthetic oligonucleotide
agcucacagugggcaggag

SEQ ID NO: 2064916 - RNA, 19 nt, Artificial Sequence
  Description of Artificial Sequence: Synthetic oligonucleotide
gugcgcugggcccaguuuu

SEQ ID NO: 2064917 - RNA, 19 nt, Artificial Sequence
  Description of Artificial Sequence: Synthetic oligonucleotide
ggaagcccuuuccgagcug

SEQ ID NO: 2064918 - RNA, 19 nt, Artificial Sequence
  Description of Artificial Sequence: Synthetic oligonucleotide
ggggcccaaacugaaccuc

SEQ ID NO: 2064919 - RNA, 19 nt, Artificial Sequence
  Description of Artificial Sequence: Synthetic oligonucleotide
gggcccaaacugaaccuca

SEQ ID NO: 2064920 - RNA, 19 nt, Artificial Sequence
  Description of Artificial Sequence: Synthetic oligonucleotide
gggcucaccaauaccguua

SEQ ID NO: 2064921 - RNA, 19 nt, Artificial Sequence
  Description of Artificial Sequence: Synthetic oligonucleotide
ugggagcuacggcggcauu

SEQ ID NO: 2064922 - RNA, 19 nt, Artificial Sequence
  Description of Artificial Sequence: Synthetic oligonucleotide
gacuggugggcuugcuguu

SEQ ID NO: 2064923 - RNA, 19 nt, Artificial Sequence
  Description of Artificial Sequence: Synthetic oligonucleotide
cugcuucggaguccaguua

SEQ ID NO: 2064924 - RNA, 19 nt, Artificial Sequence
  Description of Artificial Sequence: Synthetic oligonucleotide
auccugccucgaggggcac

SEQ ID NO: 2064925 - RNA, 19 nt, Artificial Sequence
  Description of Artificial Sequence: Synthetic oligonucleotide
uuccgccgggguggaagac

SEQ ID NO: 2064926 - RNA, 19 nt, Artificial Sequence
  Description of Artificial Sequence: Synthetic oligonucleotide
gcccaguuuuccgccgggg

SEQ ID NO: 2064927 - RNA, 19 nt, Artificial Sequence
  Description of Artificial Sequence: Synthetic oligonucleotide
ggcccaaacugaaccucac

SEQ ID NO: 2064928 - RNA, 19 nt, Artificial Sequence
  Description of Artificial Sequence: Synthetic oligonucleotide
gcauugggguuacugcggu

SEQ ID NO: 2064929 - RNA, 19 nt, Artificial Sequence
  Description of Artificial Sequence: Synthetic oligonucleotide
gccgggguggaagacuuga

SEQ ID NO: 2064930 - RNA, 19 nt, Artificial Sequence
  Description of Artificial Sequence: Synthetic oligonucleotide
gcccagucagcagaagcga

SEQ ID NO: 2064931 - RNA, 19 nt, Artificial Sequence
  Description of Artificial Sequence: Synthetic oligonucleotide
gacagggacuggugggcuu

SEQ ID NO: 2064932 - RNA, 19 nt, Artificial Sequence
  Description of Artificial Sequence: Synthetic oligonucleotide
gcaagugggugauuccuuu

SEQ ID NO: 2064933 - RNA, 19 nt, Artificial Sequence
  Description of Artificial Sequence: Synthetic oligonucleotide
gagcuaggacuggccugac

SEQ ID NO: 2064934 - RNA, 19 nt, Artificial Sequence
  Description of Artificial Sequence: Synthetic oligonucleotide
cugccucgaggggcacugg

SEQ ID NO: 2064935 - RNA, 19 nt, Artificial Sequence
  Description of Artificial Sequence: Synthetic oligonucleotide
cacugcuucggaguccagu

SEQ ID NO: 2064936 - RNA, 19 nt, Artificial Sequence
  Description of Artificial Sequence: Synthetic oligonucleotide
aggggcacugggaguugga

SEQ ID NO: 2064937 - RNA, 19 nt, Artificial Sequence
  Description of Artificial Sequence: Synthetic oligonucleotide
cugggaacaggagcucugu

SEQ ID NO: 2064938 - RNA, 19 nt, Artificial Sequence
  Description of Artificial Sequence: Synthetic oligonucleotide
agauugcaagugggugauu

SEQ ID NO: 2064939 - RNA, 19 nt, Artificial Sequence
  Description of Artificial Sequence: Synthetic oligonucleotide
gcucugugcccugcagagc

SEQ ID NO: 2064940 - RNA, 19 nt, Artificial Sequence
  Description of Artificial Sequence: Synthetic oligonucleotide
ccguuaggucuucuuccuc

SEQ ID NO: 2064941 - RNA, 19 nt, Artificial Sequence
  Description of Artificial Sequence: Synthetic oligonucleotide
cucgaggggcacugguccu

SEQ ID NO: 2064942 - RNA, 19 nt, Artificial Sequence
  Description of Artificial Sequence: Synthetic oligonucleotide
cgagucagcuuagaccguc

SEQ ID NO: 2064943 - RNA, 19 nt, Artificial Sequence
  Description of Artificial Sequence: Synthetic oligonucleotide
cuccggcuagugaguggca

SEQ ID NO: 2064944 - RNA, 19 nt, Artificial Sequence
  Description of Artificial Sequence: Synthetic oligonucleotide
caaggaucuccuccagcuu

SEQ ID NO: 2064945 - RNA, 19 nt, Artificial Sequence
  Description of Artificial Sequence: Synthetic oligonucleotide
ccagucagcagaagcgagu

SEQ ID NO: 2064946 - RNA, 19 nt, Artificial Sequence
  Description of Artificial Sequence: Synthetic oligonucleotide
acagcccuccaaaguccaa

SEQ ID NO: 2064947 - RNA, 19 nt, Artificial Sequence
  Description of Artificial Sequence: Synthetic oligonucleotide
cccuuuccgagcugagaga

SEQ ID NO: 2064948 - RNA, 19 nt, Artificial Sequence
  Description of Artificial Sequence: Synthetic oligonucleotide
cuguagccgggaugaacau

SEQ ID NO: 2064949 - RNA, 19 nt, Artificial Sequence
  Description of Artificial Sequence: Synthetic oligonucleotide
cggcuagugaguggcauuc

SEQ ID NO: 2064950 - RNA, 19 nt, Artificial Sequence
  Description of Artificial Sequence: Synthetic oligonucleotide
ucccuguagccgggaugaa

SEQ ID NO: 2064951 - RNA, 19 nt, Artificial Sequence
  Description of Artificial Sequence: Synthetic oligonucleotide
gaguggcgggccuggggau

SEQ ID NO: 2064952 - RNA, 19 nt, Artificial Sequence
  Description of Artificial Sequence: Synthetic oligonucleotide
gguagucgacuggaagacu

SEQ ID NO: 2064953 - RNA, 19 nt, Artificial Sequence
  Description of Artificial Sequence: Synthetic oligonucleotide
ggguuacugcggugagaga

SEQ ID NO: 2064954 - RNA, 19 nt, Artificial Sequence
  Description of Artificial Sequence: Synthetic oligonucleotide
cgaacagcccuggcugacc

SEQ ID NO: 2064955 - RNA, 19 nt, Artificial Sequence
  Description of Artificial Sequence: Synthetic oligonucleotide
ggggcacugggaguuggaa

SEQ ID NO: 2064956 - RNA, 19 nt, Artificial Sequence
  Description of Artificial Sequence: Synthetic oligonucleotide
gccucgaggggcacugguc

SEQ ID NO: 2064957 - RNA, 19 nt, Artificial Sequence
  Description of Artificial Sequence: Synthetic oligonucleotide
gcgggccuggggauggcug

SEQ ID NO: 2064958 - RNA, 19 nt, Artificial Sequence
  Description of Artificial Sequence: Synthetic oligonucleotide
ccgaacagcccuggcugac

SEQ ID NO: 2064959 - RNA, 19 nt, Artificial Sequence
  Description of Artificial Sequence: Synthetic oligonucleotide
gcgcugggcccaguuuucc

SEQ ID NO: 2064960 - RNA, 19 nt, Artificial Sequence
  Description of Artificial Sequence: Synthetic oligonucleotide
ccaugcccagucagcagaa

SEQ ID NO: 2064961 - RNA, 19 nt, Artificial Sequence
  Description of Artificial Sequence: Synthetic oligonucleotide
ccaauaccguuaggucuuc

SEQ ID NO: 2064962 - RNA, 19 nt, Artificial Sequence
  Description of Artificial Sequence: Synthetic oligonucleotide
guccgugcgcugggcccag

SEQ ID NO: 2064963 - RNA, 19 nt, Artificial Sequence
  Description of Artificial Sequence: Synthetic oligonucleotide
gcccuccaaaguccaaggu

SEQ ID NO: 2064964 - RNA, 19 nt, Artificial Sequence
  Description of Artificial Sequence: Synthetic oligonucleotide
ccgagcugagagagaaucu

SEQ ID NO: 2064965 - RNA, 19 nt, Artificial Sequence
  Description of Artificial Sequence: Synthetic oligonucleotide
cagagcuuggaagcccuuu

SEQ ID NO: 2064966 - RNA, 19 nt, Artificial Sequence
  Description of Artificial Sequence: Synthetic oligonucleotide
gaggggcacugguccugcu

SEQ ID NO: 2064967 - RNA, 19 nt, Artificial Sequence
  Description of Artificial Sequence: Synthetic oligonucleotide
caauaccguuaggucuucu

SEQ ID NO: 2064968 - RNA, 19 nt, Artificial Sequence
  Description of Artificial Sequence: Synthetic oligonucleotide
gggcuucugggugcaggga

SEQ ID NO: 2064969 - RNA, 19 nt, Artificial Sequence
  Description of Artificial Sequence: Synthetic oligonucleotide
gcauucgaguggcgggccu

SEQ ID NO: 2064970 - RNA, 19 nt, Artificial Sequence
  Description of Artificial Sequence: Synthetic oligonucleotide
cccaguuuuccgccggggu

SEQ ID NO: 2064971 - RNA, 19 nt, Artificial Sequence
  Description of Artificial Sequence: Synthetic oligonucleotide
gcuaggcuucccagggccu

SEQ ID NO: 2064972 - RNA, 19 nt, Artificial Sequence
  Description of Artificial Sequence: Synthetic oligonucleotide
uccgugcgcugggcccagu

SEQ ID NO: 2064973 - RNA, 19 nt, Artificial Sequence
  Description of Artificial Sequence: Synthetic oligonucleotide
guuuuccgccgggguggaa

SEQ ID NO: 2064974 - RNA, 19 nt, Artificial Sequence
  Description of Artificial Sequence: Synthetic oligonucleotide
ccgucgaaguggcuucucu

SEQ ID NO: 2064975 - RNA, 19 nt, Artificial Sequence
  Description of Artificial Sequence: Synthetic oligonucleotide
ggccccgucgaaguggcuu

SEQ ID NO: 2064976 - RNA, 19 nt, Artificial Sequence
  Description of Artificial Sequence: Synthetic oligonucleotide
cugcucccuguagccggga

SEQ ID NO: 2064977 - RNA, 19 nt, Artificial Sequence
  Description of Artificial Sequence: Synthetic oligonucleotide
cucggacagggcuguccuu

SEQ ID NO: 2064978 - RNA, 19 nt, Artificial Sequence
  Description of Artificial Sequence: Synthetic oligonucleotide
cuacggcggcauugggguu

SEQ ID NO: 2064979 - RNA, 19 nt, Artificial Sequence
  Description of Artificial Sequence: Synthetic oligonucleotide
cccgucgaaguggcuucuc

SEQ ID NO: 2064980 - RNA, 19 nt, Artificial Sequence
  Description of Artificial Sequence: Synthetic oligonucleotide
ccaaggucucauccacaau

SEQ ID NO: 2064981 - RNA, 19 nt, Artificial Sequence
  Description of Artificial Sequence: Synthetic oligonucleotide
aggccccgucgaaguggcu

SEQ ID NO: 2064982 - RNA, 19 nt, Artificial Sequence
  Description of Artificial Sequence: Synthetic oligonucleotide
ccggcuagugaguggcauu

SEQ ID NO: 2064983 - RNA, 19 nt, Artificial Sequence
  Description of Artificial Sequence: Synthetic oligonucleotide
cccuucgagggcugggcuu

SEQ ID NO: 2064984 - RNA, 19 nt, Artificial Sequence
  Description of Artificial Sequence: Synthetic oligonucleotide
gcgagucagcuuagaccgu

SEQ ID NO: 2064985 - RNA, 19 nt, Artificial Sequence
  Description of Artificial Sequence: Synthetic oligonucleotide
ccgggguggaagacuugau

SEQ ID NO: 2064986 - RNA, 19 nt, Artificial Sequence
  Description of Artificial Sequence: Synthetic oligonucleotide
ccgccgggguggaagacuu

SEQ ID NO: 2064987 - RNA, 19 nt, Artificial Sequence
  Description of Artificial Sequence: Synthetic oligonucleotide
cccgguccugcagggcaca

SEQ ID NO: 2064988 - RNA, 19 nt, Artificial Sequence
  Description of Artificial Sequence: Synthetic oligonucleotide
gcggugagagaggccccgu

SEQ ID NO: 2064989 - RNA, 19 nt, Artificial Sequence
  Description of Artificial Sequence: Synthetic oligonucleotide
ggcgggccuggggauggcu

SEQ ID NO: 2064990 - RNA, 19 nt, Artificial Sequence
  Description of Artificial Sequence: Synthetic oligonucleotide
gcugagcugccaggcgguu

SEQ ID NO: 2064991 - RNA, 19 nt, Artificial Sequence
  Description of Artificial Sequence: Synthetic oligonucleotide
cgugcgcugggcccaguuu

SEQ ID NO: 2064992 - RNA, 19 nt, Artificial Sequence
  Description of Artificial Sequence: Synthetic oligonucleotide
ccccgucgaaguggcuucu

SEQ ID NO: 2064993 - RNA, 19 nt, Artificial Sequence
  Description of Artificial Sequence: Synthetic oligonucleotide
ccgugcgcugggcccaguu

SEQ ID NO: 2064994 - RNA, 19 nt, Artificial Sequence
  Description of Artificial Sequence: Synthetic oligonucleotide
gccaggcgguuggcuucau

SEQ ID NO: 2064995 - RNA, 19 nt, Artificial Sequence
  Description of Artificial Sequence: Synthetic oligonucleotide
ugagggaucagucaaacag

SEQ ID NO: 2064996 - RNA, 19 nt, Artificial Sequence
  Description of Artificial Sequence: Synthetic oligonucleotide
aaugcugccauugucaaac

SEQ ID NO: 2064997 - RNA, 19 nt, Artificial Sequence
  Description of Artificial Sequence: Synthetic oligonucleotide
ucacuuagaauuucaaugg

SEQ ID NO: 2064998 - RNA, 19 nt, Artificial Sequence
  Description of Artificial Sequence: Synthetic oligonucleotide
aucacuuagaauuucaaug

SEQ ID NO: 2064999 - RNA, 19 nt, Artificial Sequence
  Description of Artificial Sequence: Synthetic oligonucleotide
aaagaggucuucucgggcc

SEQ ID NO: 2065000 - RNA, 19 nt, Artificial Sequence
  Description of Artificial Sequence: Synthetic oligonucleotide
gauggaucagccaagaagg

SEQ ID NO: 2065001 - RNA, 19 nt, Artificial Sequence
  Description of Artificial Sequence: Synthetic oligonucleotide
cuuagaauuucaauggugc

SEQ ID NO: 2065002 - RNA, 19 nt, Artificial Sequence
  Description of Artificial Sequence: Synthetic oligonucleotide
ucucaaauuaaacuggcug

SEQ ID NO: 2065003 - RNA, 19 nt, Artificial Sequence
  Description of Artificial Sequence: Synthetic oligonucleotide
aucuuaaggaaguaguugg

SEQ ID NO: 2065004 - RNA, 19 nt, Artificial Sequence
  Description of Artificial Sequence: Synthetic oligonucleotide
uggguaaucauccaaaagu

SEQ ID NO: 2065005 - RNA, 19 nt, Artificial Sequence
  Description of Artificial Sequence: Synthetic oligonucleotide
aauuaaacuggcugaguag

SEQ ID NO: 2065006 - RNA, 19 nt, Artificial Sequence
  Description of Artificial Sequence: Synthetic oligonucleotide
aguuggaugaucuuaagga

SEQ ID NO: 2065007 - RNA, 19 nt, Artificial Sequence
  Description of Artificial Sequence: Synthetic oligonucleotide
uagaguguggcacugaggc

SEQ ID NO: 2065008 - RNA, 19 nt, Artificial Sequence
  Description of Artificial Sequence: Synthetic oligonucleotide
auauuucucaaauuaaacu

SEQ ID NO: 2065009 - RNA, 19 nt, Artificial Sequence
  Description of Artificial Sequence: Synthetic oligonucleotide
aaguaguuggacuuccagg

SEQ ID NO: 2065010 - RNA, 19 nt, Artificial Sequence
  Description of Artificial Sequence: Synthetic oligonucleotide
aaguuggaugaucuuaagg

SEQ ID NO: 2065011 - RNA, 19 nt, Artificial Sequence
  Description of Artificial Sequence: Synthetic oligonucleotide
guaaucauccaaaaguugg

SEQ ID NO: 2065012 - RNA, 19 nt, Artificial Sequence
  Description of Artificial Sequence: Synthetic oligonucleotide
gacgaugucacucuaauga

SEQ ID NO: 2065013 - RNA, 19 nt, Artificial Sequence
  Description of Artificial Sequence: Synthetic oligonucleotide
gaguagguugcucugaggg

SEQ ID NO: 2065014 - RNA, 19 nt, Artificial Sequence
  Description of Artificial Sequence: Synthetic oligonucleotide
ugugaugucaagcacuucu

SEQ ID NO: 2065015 - RNA, 19 nt, Artificial Sequence
  Description of Artificial Sequence: Synthetic oligonucleotide
agauggaucagccaagaag

SEQ ID NO: 2065016 - RNA, 19 nt, Artificial Sequence
  Description of Artificial Sequence: Synthetic oligonucleotide
auugaugauagaguguggc

SEQ ID NO: 2065017 - RNA, 19 nt, Artificial Sequence
  Description of Artificial Sequence: Synthetic oligonucleotide
aaauuaaacuggcugagua

SEQ ID NO: 2065018 - RNA, 19 nt, Artificial Sequence
  Description of Artificial Sequence: Synthetic oligonucleotide
gaccuuuucagcaaguggg

SEQ ID NO: 2065019 - RNA, 19 nt, Artificial Sequence
  Description of Artificial Sequence: Synthetic oligonucleotide
guaaccauugaugauagag

SEQ ID NO: 2065020 - RNA, 19 nt, Artificial Sequence
  Description of Artificial Sequence: Synthetic oligonucleotide
aaaugcagauggaucagcc

SEQ ID NO: 2065021 - RNA, 19 nt, Artificial Sequence
  Description of Artificial Sequence: Synthetic oligonucleotide
gaugucaagcacuucuggg

SEQ ID NO: 2065022 - RNA, 19 nt, Artificial Sequence
  Description of Artificial Sequence: Synthetic oligonucleotide
uaguuggacuuccaggucg

SEQ ID NO: 2065023 - RNA, 19 nt, Artificial Sequence
  Description of Artificial Sequence: Synthetic oligonucleotide
ugucacucuaaugaggacg

SEQ ID NO: 2065024 - RNA, 19 nt, Artificial Sequence
  Description of Artificial Sequence: Synthetic oligonucleotide
auuucggacacccucuagg

SEQ ID NO: 2065025 - RNA, 19 nt, Artificial Sequence
  Description of Artificial Sequence: Synthetic oligonucleotide
uuucucaaauuaaacuggc

SEQ ID NO: 2065026 - RNA, 19 nt, Artificial Sequence
  Description of Artificial Sequence: Synthetic oligonucleotide
acaauaaagcauuuugggu

SEQ ID NO: 2065027 - RNA, 19 nt, Artificial Sequence
  Description of Artificial Sequence: Synthetic oligonucleotide
uuaguggugaugcccaaag

SEQ ID NO: 2065028 - RNA, 19 nt, Artificial Sequence
  Description of Artificial Sequence: Synthetic oligonucleotide
uccaaaaguuggaugaucu

SEQ ID NO: 2065029 - RNA, 19 nt, Artificial Sequence
  Description of Artificial Sequence: Synthetic oligonucleotide
uuuaaagacgaugucacuc

SEQ ID NO: 2065030 - RNA, 19 nt, Artificial Sequence
  Description of Artificial Sequence: Synthetic oligonucleotide
ucuggguuguaaaugcugc

SEQ ID NO: 2065031 - RNA, 19 nt, Artificial Sequence
  Description of Artificial Sequence: Synthetic oligonucleotide
ucaaauuaaacuggcugag

SEQ ID NO: 2065032 - RNA, 19 nt, Artificial Sequence
  Description of Artificial Sequence: Synthetic oligonucleotide
ccuaauuucagugaggucc

SEQ ID NO: 2065033 - RNA, 19 nt, Artificial Sequence
  Description of Artificial Sequence: Synthetic oligonucleotide
uuguaaccauugaugauag

SEQ ID NO: 2065034 - RNA, 19 nt, Artificial Sequence
  Description of Artificial Sequence: Synthetic oligonucleotide
uuagaauuucaauggugcc

SEQ ID NO: 2065035 - RNA, 19 nt, Artificial Sequence
  Description of Artificial Sequence: Synthetic oligonucleotide
ugaugucaagcacuucugg

SEQ ID NO: 2065036 - RNA, 19 nt, Artificial Sequence
  Description of Artificial Sequence: Synthetic oligonucleotide
cuuuauuuccauauuucuc

SEQ ID NO: 2065037 - RNA, 19 nt, Artificial Sequence
  Description of Artificial Sequence: Synthetic oligonucleotide
aagaggucuucucgggccc

SEQ ID NO: 2065038 - RNA, 19 nt, Artificial Sequence
  Description of Artificial Sequence: Synthetic oligonucleotide
uuuuggguaaucauccaaa

SEQ ID NO: 2065039 - RNA, 19 nt, Artificial Sequence
  Description of Artificial Sequence: Synthetic oligonucleotide
gauuuuaguggugaugccc

SEQ ID NO: 2065040 - RNA, 19 nt, Artificial Sequence
  Description of Artificial Sequence: Synthetic oligonucleotide
uccuuggugaacacaaagc

SEQ ID NO: 2065041 - RNA, 19 nt, Artificial Sequence
  Description of Artificial Sequence: Synthetic oligonucleotide
agugaccucacauggggcg

SEQ ID NO: 2065042 - RNA, 19 nt, Artificial Sequence
  Description of Artificial Sequence: Synthetic oligonucleotide
gaugaucuuaaggaaguag

SEQ ID NO: 2065043 - RNA, 19 nt, Artificial Sequence
  Description of Artificial Sequence: Synthetic oligonucleotide
uaaucauccaaaaguugga

SEQ ID NO: 2065044 - RNA, 19 nt, Artificial Sequence
  Description of Artificial Sequence: Synthetic oligonucleotide
uuggguaaucauccaaaag

SEQ ID NO: 2065045 - RNA, 19 nt, Artificial Sequence
  Description of Artificial Sequence: Synthetic oligonucleotide
aaaguuggaugaucuuaag

SEQ ID NO: 2065046 - RNA, 19 nt, Artificial Sequence
  Description of Artificial Sequence: Synthetic oligonucleotide
agaaagaggucuucucggg

SEQ ID NO: 2065047 - RNA, 19 nt, Artificial Sequence
  Description of Artificial Sequence: Synthetic oligonucleotide
gaaguaguuggacuuccag

SEQ ID NO: 2065048 - RNA, 19 nt, Artificial Sequence
  Description of Artificial Sequence: Synthetic oligonucleotide
gaucuuaaggaaguaguug

SEQ ID NO: 2065049 - RNA, 19 nt, Artificial Sequence
  Description of Artificial Sequence: Synthetic oligonucleotide
uccauauuucucaaauuaa

SEQ ID NO: 2065050 - RNA, 19 nt, Artificial Sequence
  Description of Artificial Sequence: Synthetic oligonucleotide
caauaaagcauuuugggua

SEQ ID NO: 2065051 - RNA, 19 nt, Artificial Sequence
  Description of Artificial Sequence: Synthetic oligonucleotide
agcauuuuggguaaucauc

SEQ ID NO: 2065052 - RNA, 19 nt, Artificial Sequence
  Description of Artificial Sequence: Synthetic oligonucleotide
gaugcccaaagccuggaag

SEQ ID NO: 2065053 - RNA, 19 nt, Artificial Sequence
  Description of Artificial Sequence: Synthetic oligonucleotide
agauuuuaguggugaugcc

SEQ ID NO: 2065054 - RNA, 19 nt, Artificial Sequence
  Description of Artificial Sequence: Synthetic oligonucleotide
cucaaauuaaacuggcuga

SEQ ID NO: 2065055 - RNA, 19 nt, Artificial Sequence
  Description of Artificial Sequence: Synthetic oligonucleotide
guaaucagucuccacagac

SEQ ID NO: 2065056 - RNA, 19 nt, Artificial Sequence
  Description of Artificial Sequence: Synthetic oligonucleotide
aacagaccaaaucccauau

SEQ ID NO: 2065057 - RNA, 19 nt, Artificial Sequence
  Description of Artificial Sequence: Synthetic oligonucleotide
agccaagaaggccuugacc

SEQ ID NO: 2065058 - RNA, 19 nt, Artificial Sequence
  Description of Artificial Sequence: Synthetic oligonucleotide
aagacgaugucacucuaau

SEQ ID NO: 2065059 - RNA, 19 nt, Artificial Sequence
  Description of Artificial Sequence: Synthetic oligonucleotide
aaugcagauggaucagcca

SEQ ID NO: 2065060 - RNA, 19 nt, Artificial Sequence
  Description of Artificial Sequence: Synthetic oligonucleotide
aaaaguuggaugaucuuaa

SEQ ID NO: 2065061 - RNA, 19 nt, Artificial Sequence
  Description of Artificial Sequence: Synthetic oligonucleotide
ugagugcaaagucugcucu

SEQ ID NO: 2065062 - RNA, 19 nt, Artificial Sequence
  Description of Artificial Sequence: Synthetic oligonucleotide
guguaaucagucuccacag

SEQ ID NO: 2065063 - RNA, 19 nt, Artificial Sequence
  Description of Artificial Sequence: Synthetic oligonucleotide
ucuuaaggaaguaguugga

SEQ ID NO: 2065064 - RNA, 19 nt, Artificial Sequence
  Description of Artificial Sequence: Synthetic oligonucleotide
caugucccuaauuucagug

SEQ ID NO: 2065065 - RNA, 19 nt, Artificial Sequence
  Description of Artificial Sequence: Synthetic oligonucleotide
ugaggcaacagucggguaa

SEQ ID NO: 2065066 - RNA, 19 nt, Artificial Sequence
  Description of Artificial Sequence: Synthetic oligonucleotide
caccuuauuggccagcagc

SEQ ID NO: 2065067 - RNA, 19 nt, Artificial Sequence
  Description of Artificial Sequence: Synthetic oligonucleotide
gaugucacucuaaugagga

SEQ ID NO: 2065068 - RNA, 19 nt, Artificial Sequence
  Description of Artificial Sequence: Synthetic oligonucleotide
guuguaaaugcugccauug

SEQ ID NO: 2065069 - RNA, 19 nt, Artificial Sequence
  Description of Artificial Sequence: Synthetic oligonucleotide
aaacagaccaaaucccaua

SEQ ID NO: 2065070 - RNA, 19 nt, Artificial Sequence
  Description of Artificial Sequence: Synthetic oligonucleotide
gaugaucagcccaaaggag

SEQ ID NO: 2065071 - RNA, 19 nt, Artificial Sequence
  Description of Artificial Sequence: Synthetic oligonucleotide
gaccaaaucccauauccuc

SEQ ID NO: 2065072 - RNA, 19 nt, Artificial Sequence
  Description of Artificial Sequence: Synthetic oligonucleotide
acgaugucacucuaaugag

SEQ ID NO: 2065073 - RNA, 19 nt, Artificial Sequence
  Description of Artificial Sequence: Synthetic oligonucleotide
uuuaucagcugcacaucac

SEQ ID NO: 2065074 - RNA, 19 nt, Artificial Sequence
  Description of Artificial Sequence: Synthetic oligonucleotide
aaggaaguaguuggacuuc

SEQ ID NO: 2065075 - RNA, 19 nt, Artificial Sequence
  Description of Artificial Sequence: Synthetic oligonucleotide
gaagcgugagugcaaaguc

SEQ ID NO: 2065076 - RNA, 19 nt, Artificial Sequence
  Description of Artificial Sequence: Synthetic oligonucleotide
ugcaaagucugcucuguga

SEQ ID NO: 2065077 - RNA, 19 nt, Artificial Sequence
  Description of Artificial Sequence: Synthetic oligonucleotide
uuuggguaaucauccaaaa

SEQ ID NO: 2065078 - RNA, 19 nt, Artificial Sequence
  Description of Artificial Sequence: Synthetic oligonucleotide
gguguaaucagucuccaca

SEQ ID NO: 2065079 - RNA, 19 nt, Artificial Sequence
  Description of Artificial Sequence: Synthetic oligonucleotide
ugcagauggaucagccaag

SEQ ID NO: 2065080 - RNA, 19 nt, Artificial Sequence
  Description of Artificial Sequence: Synthetic oligonucleotide
aggguuuaaagacgauguc

SEQ ID NO: 2065081 - RNA, 19 nt, Artificial Sequence
  Description of Artificial Sequence: Synthetic oligonucleotide
uuucggacacccucuagga

SEQ ID NO: 2065082 - RNA, 19 nt, Artificial Sequence
  Description of Artificial Sequence: Synthetic oligonucleotide
agcagcaugucccuaauuu

SEQ ID NO: 2065083 - RNA, 19 nt, Artificial Sequence
  Description of Artificial Sequence: Synthetic oligonucleotide
cacgcaggguuuaaagacg

SEQ ID NO: 2065084 - RNA, 19 nt, Artificial Sequence
  Description of Artificial Sequence: Synthetic oligonucleotide
guaaccaaucugcagacaa

SEQ ID NO: 2065085 - RNA, 19 nt, Artificial Sequence
  Description of Artificial Sequence: Synthetic oligonucleotide
gucaaacagaccaaauccc

SEQ ID NO: 2065086 - RNA, 19 nt, Artificial Sequence
  Description of Artificial Sequence: Synthetic oligonucleotide
ugaucagcccaaaggagaa

SEQ ID NO: 2065087 - RNA, 19 nt, Artificial Sequence
  Description of Artificial Sequence: Synthetic oligonucleotide
agcauguucagcagugugg

SEQ ID NO: 2065088 - RNA, 19 nt, Artificial Sequence
  Description of Artificial Sequence: Synthetic oligonucleotide
cacaaagcccacauucccc

SEQ ID NO: 2065089 - RNA, 19 nt, Artificial Sequence
  Description of Artificial Sequence: Synthetic oligonucleotide
acuuagaauuucaauggug

SEQ ID NO: 2065090 - RNA, 19 nt, Artificial Sequence
  Description of Artificial Sequence: Synthetic oligonucleotide
accugcuggaugaucagcc

SEQ ID NO: 2065091 - RNA, 19 nt, Artificial Sequence
  Description of Artificial Sequence: Synthetic oligonucleotide
augcagauggaucagccaa

SEQ ID NO: 2065092 - RNA, 19 nt, Artificial Sequence
  Description of Artificial Sequence: Synthetic oligonucleotide
uguaaucagucuccacaga

SEQ ID NO: 2065093 - RNA, 19 nt, Artificial Sequence
  Description of Artificial Sequence: Synthetic oligonucleotide
uuauuuccauauuucucaa

SEQ ID NO: 2065094 - RNA, 19 nt, Artificial Sequence
  Description of Artificial Sequence: Synthetic oligonucleotide
cuuaaggaaguaguuggac

SEQ ID NO: 2065095 - RNA, 19 nt, Artificial Sequence
  Description of Artificial Sequence: Synthetic oligonucleotide
ugaguagguugcucugagg

SEQ ID NO: 2065096 - RNA, 19 nt, Artificial Sequence
  Description of Artificial Sequence: Synthetic oligonucleotide
cagccgcaaaugcagaugg

SEQ ID NO: 2065097 - RNA, 19 nt, Artificial Sequence
  Description of Artificial Sequence: Synthetic oligonucleotide
ugggaagguguaaucaguc

SEQ ID NO: 2065098 - RNA, 19 nt, Artificial Sequence
  Description of Artificial Sequence: Synthetic oligonucleotide
agggaucagucaaacagac

SEQ ID NO: 2065099 - RNA, 19 nt, Artificial Sequence
  Description of Artificial Sequence: Synthetic oligonucleotide
aaucauccaaaaguuggau

SEQ ID NO: 2065100 - RNA, 19 nt, Artificial Sequence
  Description of Artificial Sequence: Synthetic oligonucleotide
gguuuaaagacgaugucac

SEQ ID NO: 2065101 - RNA, 19 nt, Artificial Sequence
  Description of Artificial Sequence: Synthetic oligonucleotide
ucccauauccucaucugau

SEQ ID NO: 2065102 - RNA, 19 nt, Artificial Sequence
  Description of Artificial Sequence: Synthetic oligonucleotide
ucggguaaccaaucugcag

SEQ ID NO: 2065103 - RNA, 19 nt, Artificial Sequence
  Description of Artificial Sequence: Synthetic oligonucleotide
aauuucaauggugccccug

SEQ ID NO: 2065104 - RNA, 19 nt, Artificial Sequence
  Description of Artificial Sequence: Synthetic oligonucleotide
cugcacaucacuuagaauu

SEQ ID NO: 2065105 - RNA, 19 nt, Artificial Sequence
  Description of Artificial Sequence: Synthetic oligonucleotide
aagggacaugcggaucugc

SEQ ID NO: 2065106 - RNA, 19 nt, Artificial Sequence
  Description of Artificial Sequence: Synthetic oligonucleotide
ugcgucagggauugccacg

SEQ ID NO: 2065107 - RNA, 19 nt, Artificial Sequence
  Description of Artificial Sequence: Synthetic oligonucleotide
aacagucggguaaccaauc

SEQ ID NO: 2065108 - RNA, 19 nt, Artificial Sequence
  Description of Artificial Sequence: Synthetic oligonucleotide
ugcacaucacuuagaauuu

SEQ ID NO: 2065109 - RNA, 19 nt, Artificial Sequence
  Description of Artificial Sequence: Synthetic oligonucleotide
ugucaagcacuucuggguu

SEQ ID NO: 2065110 - RNA, 19 nt, Artificial Sequence
  Description of Artificial Sequence: Synthetic oligonucleotide
cuuguaaccauugaugaua

SEQ ID NO: 2065111 - RNA, 19 nt, Artificial Sequence
  Description of Artificial Sequence: Synthetic oligonucleotide
gucacucuaaugaggacgc

SEQ ID NO: 2065112 - RNA, 19 nt, Artificial Sequence
  Description of Artificial Sequence: Synthetic oligonucleotide
cccacaauaaagcauuuug

SEQ ID NO: 2065113 - RNA, 19 nt, Artificial Sequence
  Description of Artificial Sequence: Synthetic oligonucleotide
agacaaagccaggacccgc

SEQ ID NO: 2065114 - RNA, 19 nt, Artificial Sequence
  Description of Artificial Sequence: Synthetic oligonucleotide
uggaucagccaagaaggcc

SEQ ID NO: 2065115 - RNA, 19 nt, Artificial Sequence
  Description of Artificial Sequence: Synthetic oligonucleotide
gauggcaccagcacgggca

SEQ ID NO: 2065116 - RNA, 19 nt, Artificial Sequence
  Description of Artificial Sequence: Synthetic oligonucleotide
uccuccgacucuuccuugg

SEQ ID NO: 2065117 - RNA, 19 nt, Artificial Sequence
  Description of Artificial Sequence: Synthetic oligonucleotide
uggguuguaaaugcugcca

SEQ ID NO: 2065118 - RNA, 19 nt, Artificial Sequence
  Description of Artificial Sequence: Synthetic oligonucleotide
agcccacauugucugcucc

SEQ ID NO: 2065119 - RNA, 19 nt, Artificial Sequence
  Description of Artificial Sequence: Synthetic oligonucleotide
ugcucccacaauaaagcau

SEQ ID NO: 2065120 - RNA, 19 nt, Artificial Sequence
  Description of Artificial Sequence: Synthetic oligonucleotide
uugaccuuuucagcaagug

SEQ ID NO: 2065121 - RNA, 19 nt, Artificial Sequence
  Description of Artificial Sequence: Synthetic oligonucleotide
uaaccaaucugcagacaaa

SEQ ID NO: 2065122 - RNA, 19 nt, Artificial Sequence
  Description of Artificial Sequence: Synthetic oligonucleotide
aguagguugcucugaggga

SEQ ID NO: 2065123 - RNA, 19 nt, Artificial Sequence
  Description of Artificial Sequence: Synthetic oligonucleotide
ggacaugcggaucugcugc

SEQ ID NO: 2065124 - RNA, 19 nt, Artificial Sequence
  Description of Artificial Sequence: Synthetic oligonucleotide
augaucagcccaaaggaga

SEQ ID NO: 2065125 - RNA, 19 nt, Artificial Sequence
  Description of Artificial Sequence: Synthetic oligonucleotide
augucccuaauuucaguga

SEQ ID NO: 2065126 - RNA, 19 nt, Artificial Sequence
  Description of Artificial Sequence: Synthetic oligonucleotide
gcagccggcaccuuauugg

SEQ ID NO: 2065127 - RNA, 19 nt, Artificial Sequence
  Description of Artificial Sequence: Synthetic oligonucleotide
agcacuucuggguuguaaa

SEQ ID NO: 2065128 - RNA, 19 nt, Artificial Sequence
  Description of Artificial Sequence: Synthetic oligonucleotide
aguuggacuuccaggucgc

SEQ ID NO: 2065129 - RNA, 19 nt, Artificial Sequence
  Description of Artificial Sequence: Synthetic oligonucleotide
cacagugaccucacauggg

SEQ ID NO: 2065130 - RNA, 19 nt, Artificial Sequence
  Description of Artificial Sequence: Synthetic oligonucleotide
ucugagggaucagucaaac

SEQ ID NO: 2065131 - RNA, 19 nt, Artificial Sequence
  Description of Artificial Sequence: Synthetic oligonucleotide
ggaagguguaaucagucuc

SEQ ID NO: 2065132 - RNA, 19 nt, Artificial Sequence
  Description of Artificial Sequence: Synthetic oligonucleotide
agguguaaucagucuccac

SEQ ID NO: 2065133 - RNA, 19 nt, Artificial Sequence
  Description of Artificial Sequence: Synthetic oligonucleotide
agaccaguguucugggcug

SEQ ID NO: 2065134 - RNA, 19 nt, Artificial Sequence
  Description of Artificial Sequence: Synthetic oligonucleotide
uccuacuuugucuccaguu

SEQ ID NO: 2065135 - RNA, 19 nt, Artificial Sequence
  Description of Artificial Sequence: Synthetic oligonucleotide
uaguggugaugcccaaagc

SEQ ID NO: 2065136 - RNA, 19 nt, Artificial Sequence
  Description of Artificial Sequence: Synthetic oligonucleotide
ucuucucgggccccagacc

SEQ ID NO: 2065137 - RNA, 19 nt, Artificial Sequence
  Description of Artificial Sequence: Synthetic oligonucleotide
cauugucaaacaccugcug

SEQ ID NO: 2065138 - RNA, 19 nt, Artificial Sequence
  Description of Artificial Sequence: Synthetic oligonucleotide
ugcuggaugaucagcccaa

SEQ ID NO: 2065139 - RNA, 19 nt, Artificial Sequence
  Description of Artificial Sequence: Synthetic oligonucleotide
cagggauugccacgcaggg

SEQ ID NO: 2065140 - RNA, 19 nt, Artificial Sequence
  Description of Artificial Sequence: Synthetic oligonucleotide
agacgaugucacucuaaug

SEQ ID NO: 2065141 - RNA, 19 nt, Artificial Sequence
  Description of Artificial Sequence: Synthetic oligonucleotide
ugcuuugagcccacauugu

SEQ ID NO: 2065142 - RNA, 19 nt, Artificial Sequence
  Description of Artificial Sequence: Synthetic oligonucleotide
aagcgugagugcaaagucu

SEQ ID NO: 2065143 - RNA, 19 nt, Artificial Sequence
  Description of Artificial Sequence: Synthetic oligonucleotide
acauugucugcucccacaa

SEQ ID NO: 2065144 - RNA, 19 nt, Artificial Sequence
  Description of Artificial Sequence: Synthetic oligonucleotide
aaaugcugccauugucaaa

SEQ ID NO: 2065145 - RNA, 19 nt, Artificial Sequence
  Description of Artificial Sequence: Synthetic oligonucleotide
auggaucagccaagaaggc

SEQ ID NO: 2065146 - RNA, 19 nt, Artificial Sequence
  Description of Artificial Sequence: Synthetic oligonucleotide
uucccucgaagggacaugc

SEQ ID NO: 2065147 - RNA, 19 nt, Artificial Sequence
  Description of Artificial Sequence: Synthetic oligonucleotide
uaaagacgaugucacucua

SEQ ID NO: 2065148 - RNA, 19 nt, Artificial Sequence
  Description of Artificial Sequence: Synthetic oligonucleotide
gauguggggcagcagcuuc

SEQ ID NO: 2065149 - RNA, 19 nt, Artificial Sequence
  Description of Artificial Sequence: Synthetic oligonucleotide
gaguguggcacugaggcaa

SEQ ID NO: 2065150 - RNA, 19 nt, Artificial Sequence
  Description of Artificial Sequence: Synthetic oligonucleotide
acagucggguaaccaaucu

SEQ ID NO: 2065151 - RNA, 19 nt, Artificial Sequence
  Description of Artificial Sequence: Synthetic oligonucleotide
auagaguguggcacugagg

SEQ ID NO: 2065152 - RNA, 19 nt, Artificial Sequence
  Description of Artificial Sequence: Synthetic oligonucleotide
caaaaguuggaugaucuua

SEQ ID NO: 2065153 - RNA, 19 nt, Artificial Sequence
  Description of Artificial Sequence: Synthetic oligonucleotide
gagggaucagucaaacaga

SEQ ID NO: 2065154 - RNA, 19 nt, Artificial Sequence
  Description of Artificial Sequence: Synthetic oligonucleotide
ugcugccauugucaaacac

SEQ ID NO: 2065155 - RNA, 19 nt, Artificial Sequence
  Description of Artificial Sequence: Synthetic oligonucleotide
accuuauuggccagcagca

SEQ ID NO: 2065156 - RNA, 19 nt, Artificial Sequence
  Description of Artificial Sequence: Synthetic oligonucleotide
gcugccauugucaaacacc

SEQ ID NO: 2065157 - RNA, 19 nt, Artificial Sequence
  Description of Artificial Sequence: Synthetic oligonucleotide
aucugauuccuccgacucu

SEQ ID NO: 2065158 - RNA, 19 nt, Artificial Sequence
  Description of Artificial Sequence: Synthetic oligonucleotide
agcgugagugcaaagucug

SEQ ID NO: 2065159 - RNA, 19 nt, Artificial Sequence
  Description of Artificial Sequence: Synthetic oligonucleotide
ugccccuggagauuuuagu

SEQ ID NO: 2065160 - RNA, 19 nt, Artificial Sequence
  Description of Artificial Sequence: Synthetic oligonucleotide
uuggacuuccaggucgccc

SEQ ID NO: 2065161 - RNA, 19 nt, Artificial Sequence
  Description of Artificial Sequence: Synthetic oligonucleotide
aaagacgaugucacucuaa

SEQ ID NO: 2065162 - RNA, 19 nt, Artificial Sequence
  Description of Artificial Sequence: Synthetic oligonucleotide
agugcaaagucugcucugu

SEQ ID NO: 2065163 - RNA, 19 nt, Artificial Sequence
  Description of Artificial Sequence: Synthetic oligonucleotide
ugucugcucccacaauaaa

SEQ ID NO: 2065164 - RNA, 19 nt, Artificial Sequence
  Description of Artificial Sequence: Synthetic oligonucleotide
ggaagaaagaggucuucuc

SEQ ID NO: 2065165 - RNA, 19 nt, Artificial Sequence
  Description of Artificial Sequence: Synthetic oligonucleotide
gugagugcaaagucugcuc

SEQ ID NO: 2065166 - RNA, 19 nt, Artificial Sequence
  Description of Artificial Sequence: Synthetic oligonucleotide
uccgacucuuccuuggcuu

SEQ ID NO: 2065167 - RNA, 19 nt, Artificial Sequence
  Description of Artificial Sequence: Synthetic oligonucleotide
cuucucgggccccagacca

SEQ ID NO: 2065168 - RNA, 19 nt, Artificial Sequence
  Description of Artificial Sequence: Synthetic oligonucleotide
ccacgcaggguuuaaagac

SEQ ID NO: 2065169 - RNA, 19 nt, Artificial Sequence
  Description of Artificial Sequence: Synthetic oligonucleotide
ggagauuuuaguggugaug

SEQ ID NO: 2065170 - RNA, 19 nt, Artificial Sequence
  Description of Artificial Sequence: Synthetic oligonucleotide
cuucccugggcaucacggc

SEQ ID NO: 2065171 - RNA, 19 nt, Artificial Sequence
  Description of Artificial Sequence: Synthetic oligonucleotide
cuggaugaucagcccaaag

SEQ ID NO: 2065172 - RNA, 19 nt, Artificial Sequence
  Description of Artificial Sequence: Synthetic oligonucleotide
uuuuaguggugaugcccaa

SEQ ID NO: 2065173 - RNA, 19 nt, Artificial Sequence
  Description of Artificial Sequence: Synthetic oligonucleotide
aucagucaaacagaccaaa

SEQ ID NO: 2065174 - RNA, 19 nt, Artificial Sequence
  Description of Artificial Sequence: Synthetic oligonucleotide
uucggacacccucuaggaa

SEQ ID NO: 2065175 - RNA, 19 nt, Artificial Sequence
  Description of Artificial Sequence: Synthetic oligonucleotide
cagucggguaaccaaucug

SEQ ID NO: 2065176 - RNA, 19 nt, Artificial Sequence
  Description of Artificial Sequence: Synthetic oligonucleotide
gugaugucaagcacuucug

SEQ ID NO: 2065177 - RNA, 19 nt, Artificial Sequence
  Description of Artificial Sequence: Synthetic oligonucleotide
uugcgcaucaugguguuuu

SEQ ID NO: 2065178 - RNA, 19 nt, Artificial Sequence
  Description of Artificial Sequence: Synthetic oligonucleotide
caguguucugggcuggcac

SEQ ID NO: 2065179 - RNA, 19 nt, Artificial Sequence
  Description of Artificial Sequence: Synthetic oligonucleotide
uggugaacacaaagcccac

SEQ ID NO: 2065180 - RNA, 19 nt, Artificial Sequence
  Description of Artificial Sequence: Synthetic oligonucleotide
ggcgauggcaccagcacgg

SEQ ID NO: 2065181 - RNA, 19 nt, Artificial Sequence
  Description of Artificial Sequence: Synthetic oligonucleotide
cagccggcaccuuauuggc

SEQ ID NO: 2065182 - RNA, 19 nt, Artificial Sequence
  Description of Artificial Sequence: Synthetic oligonucleotide
augauagaguguggcacug

SEQ ID NO: 2065183 - RNA, 19 nt, Artificial Sequence
  Description of Artificial Sequence: Synthetic oligonucleotide
uguaaccauugaugauaga

SEQ ID NO: 2065184 - RNA, 19 nt, Artificial Sequence
  Description of Artificial Sequence: Synthetic oligonucleotide
ucccucgaagggacaugcg

SEQ ID NO: 2065185 - RNA, 19 nt, Artificial Sequence
  Description of Artificial Sequence: Synthetic oligonucleotide
uuuaguggugaugcccaaa

SEQ ID NO: 2065186 - RNA, 19 nt, Artificial Sequence
  Description of Artificial Sequence: Synthetic oligonucleotide
cuggagauuuuagugguga

SEQ ID NO: 2065187 - RNA, 19 nt, Artificial Sequence
  Description of Artificial Sequence: Synthetic oligonucleotide
agaccaaaucccauauccu

SEQ ID NO: 2065188 - RNA, 19 nt, Artificial Sequence
  Description of Artificial Sequence: Synthetic oligonucleotide
gaggcaacagucggguaac

SEQ ID NO: 2065189 - RNA, 19 nt, Artificial Sequence
  Description of Artificial Sequence: Synthetic oligonucleotide
ccgcuuguaaccauugaug

SEQ ID NO: 2065190 - RNA, 19 nt, Artificial Sequence
  Description of Artificial Sequence: Synthetic oligonucleotide
acacccucuaggaagcgug

SEQ ID NO: 2065191 - RNA, 19 nt, Artificial Sequence
  Description of Artificial Sequence: Synthetic oligonucleotide
cuaauuucagugagguccu

SEQ ID NO: 2065192 - RNA, 19 nt, Artificial Sequence
  Description of Artificial Sequence: Synthetic oligonucleotide
aucacggcggugcgucagg

SEQ ID NO: 2065193 - RNA, 19 nt, Artificial Sequence
  Description of Artificial Sequence: Synthetic oligonucleotide
gcauguucagcaguguggc

SEQ ID NO: 2065194 - RNA, 19 nt, Artificial Sequence
  Description of Artificial Sequence: Synthetic oligonucleotide
cauuuuggguaaucaucca

SEQ ID NO: 2065195 - RNA, 19 nt, Artificial Sequence
  Description of Artificial Sequence: Synthetic oligonucleotide
cacauugucugcucccaca

SEQ ID NO: 2065196 - RNA, 19 nt, Artificial Sequence
  Description of Artificial Sequence: Synthetic oligonucleotide
cuuugagcccacauugucu

SEQ ID NO: 2065197 - RNA, 19 nt, Artificial Sequence
  Description of Artificial Sequence: Synthetic oligonucleotide
agaggucuucucgggcccc

SEQ ID NO: 2065198 - RNA, 19 nt, Artificial Sequence
  Description of Artificial Sequence: Synthetic oligonucleotide
aucugcuuugagcccacau

SEQ ID NO: 2065199 - RNA, 19 nt, Artificial Sequence
  Description of Artificial Sequence: Synthetic oligonucleotide
acggcggugcgucagggau

SEQ ID NO: 2065200 - RNA, 19 nt, Artificial Sequence
  Description of Artificial Sequence: Synthetic oligonucleotide
cugcaucugcuuugagccc

SEQ ID NO: 2065201 - RNA, 19 nt, Artificial Sequence
  Description of Artificial Sequence: Synthetic oligonucleotide
ugauagaguguggcacuga

SEQ ID NO: 2065202 - RNA, 19 nt, Artificial Sequence
  Description of Artificial Sequence: Synthetic oligonucleotide
gucgcccugucuucccugg

SEQ ID NO: 2065203 - RNA, 19 nt, Artificial Sequence
  Description of Artificial Sequence: Synthetic oligonucleotide
ggccuugaccuuuucagca

SEQ ID NO: 2065204 - RNA, 19 nt, Artificial Sequence
  Description of Artificial Sequence: Synthetic oligonucleotide
uugagcccacauugucugc

SEQ ID NO: 2065205 - RNA, 19 nt, Artificial Sequence
  Description of Artificial Sequence: Synthetic oligonucleotide
agccuucccucgaagggac

SEQ ID NO: 2065206 - RNA, 19 nt, Artificial Sequence
  Description of Artificial Sequence: Synthetic oligonucleotide
aagcacuucuggguuguaa

SEQ ID NO: 2065207 - RNA, 19 nt, Artificial Sequence
  Description of Artificial Sequence: Synthetic oligonucleotide
aggaagcgugagugcaaag

SEQ ID NO: 2065208 - RNA, 19 nt, Artificial Sequence
  Description of Artificial Sequence: Synthetic oligonucleotide
uaggaagcgugagugcaaa

SEQ ID NO: 2065209 - RNA, 19 nt, Artificial Sequence
  Description of Artificial Sequence: Synthetic oligonucleotide
ggguaaccaaucugcagac

SEQ ID NO: 2065210 - RNA, 19 nt, Artificial Sequence
  Description of Artificial Sequence: Synthetic oligonucleotide
uucucgggccccagaccag

SEQ ID NO: 2065211 - RNA, 19 nt, Artificial Sequence
  Description of Artificial Sequence: Synthetic oligonucleotide
cgaugucacucuaaugagg

SEQ ID NO: 2065212 - RNA, 19 nt, Artificial Sequence
  Description of Artificial Sequence: Synthetic oligonucleotide
ugaugcccaaagccuggaa

SEQ ID NO: 2065213 - RNA, 19 nt, Artificial Sequence
  Description of Artificial Sequence: Synthetic oligonucleotide
cacauggggcgauggcacc

SEQ ID NO: 2065214 - RNA, 19 nt, Artificial Sequence
  Description of Artificial Sequence: Synthetic oligonucleotide
uagguugcucugagggauc

SEQ ID NO: 2065215 - RNA, 19 nt, Artificial Sequence
  Description of Artificial Sequence: Synthetic oligonucleotide
agcagccgcaaaugcagau

SEQ ID NO: 2065216 - RNA, 19 nt, Artificial Sequence
  Description of Artificial Sequence: Synthetic oligonucleotide
cacuggcaacauuucggac

SEQ ID NO: 2065217 - RNA, 19 nt, Artificial Sequence
  Description of Artificial Sequence: Synthetic oligonucleotide
gacaugcggaucugcugca

SEQ ID NO: 2065218 - RNA, 19 nt, Artificial Sequence
  Description of Artificial Sequence: Synthetic oligonucleotide
accucacauggggcgaugg

SEQ ID NO: 2065219 - RNA, 19 nt, Artificial Sequence
  Description of Artificial Sequence: Synthetic oligonucleotide
gcaacagucggguaaccaa

SEQ ID NO: 2065220 - RNA, 19 nt, Artificial Sequence
  Description of Artificial Sequence: Synthetic oligonucleotide
accuuuucagcaaguggga

SEQ ID NO: 2065221 - RNA, 19 nt, Artificial Sequence
  Description of Artificial Sequence: Synthetic oligonucleotide
uuccuccgacucuuccuug

SEQ ID NO: 2065222 - RNA, 19 nt, Artificial Sequence
  Description of Artificial Sequence: Synthetic oligonucleotide
ugcccaaagccuggaagaa

SEQ ID NO: 2065223 - RNA, 19 nt, Artificial Sequence
  Description of Artificial Sequence: Synthetic oligonucleotide
gcuuugagcccacauuguc

SEQ ID NO: 2065224 - RNA, 19 nt, Artificial Sequence
  Description of Artificial Sequence: Synthetic oligonucleotide
gcaaaugcagauggaucag

SEQ ID NO: 2065225 - RNA, 19 nt, Artificial Sequence
  Description of Artificial Sequence: Synthetic oligonucleotide
cuggaagaaagaggucuuc

SEQ ID NO: 2065226 - RNA, 19 nt, Artificial Sequence
  Description of Artificial Sequence: Synthetic oligonucleotide
cuggguuguucuccaggug

SEQ ID NO: 2065227 - RNA, 19 nt, Artificial Sequence
  Description of Artificial Sequence: Synthetic oligonucleotide
gaagggacaugcggaucug

SEQ ID NO: 2065228 - RNA, 19 nt, Artificial Sequence
  Description of Artificial Sequence: Synthetic oligonucleotide
cugcucccacaauaaagca

SEQ ID NO: 2065229 - RNA, 19 nt, Artificial Sequence
  Description of Artificial Sequence: Synthetic oligonucleotide
gggacaugcggaucugcug

SEQ ID NO: 2065230 - RNA, 19 nt, Artificial Sequence
  Description of Artificial Sequence: Synthetic oligonucleotide
uccaggucgcccugucuuc

SEQ ID NO: 2065231 - RNA, 19 nt, Artificial Sequence
  Description of Artificial Sequence: Synthetic oligonucleotide
gacccgcuuguaaccauug

SEQ ID NO: 2065232 - RNA, 19 nt, Artificial Sequence
  Description of Artificial Sequence: Synthetic oligonucleotide
acauuucggacacccucua

SEQ ID NO: 2065233 - RNA, 19 nt, Artificial Sequence
  Description of Artificial Sequence: Synthetic oligonucleotide
ucgcccugucuucccuggg

SEQ ID NO: 2065234 - RNA, 19 nt, Artificial Sequence
  Description of Artificial Sequence: Synthetic oligonucleotide
ggccuugcgcaucauggug

SEQ ID NO: 2065235 - RNA, 19 nt, Artificial Sequence
  Description of Artificial Sequence: Synthetic oligonucleotide
cagccaagaaggccuugac

SEQ ID NO: 2065236 - RNA, 19 nt, Artificial Sequence
  Description of Artificial Sequence: Synthetic oligonucleotide
acgcaggguuuaaagacga

SEQ ID NO: 2065237 - RNA, 19 nt, Artificial Sequence
  Description of Artificial Sequence: Synthetic oligonucleotide
gugcgucagggauugccac

SEQ ID NO: 2065238 - RNA, 19 nt, Artificial Sequence
  Description of Artificial Sequence: Synthetic oligonucleotide
ggaucagccaagaaggccu

SEQ ID NO: 2065239 - RNA, 19 nt, Artificial Sequence
  Description of Artificial Sequence: Synthetic oligonucleotide
ucacucuaaugaggacgcc

SEQ ID NO: 2065240 - RNA, 19 nt, Artificial Sequence
  Description of Artificial Sequence: Synthetic oligonucleotide
aggcaacagucggguaacc

SEQ ID NO: 2065241 - RNA, 19 nt, Artificial Sequence
  Description of Artificial Sequence: Synthetic oligonucleotide
uuucagcaagugggaaggu

SEQ ID NO: 2065242 - RNA, 19 nt, Artificial Sequence
  Description of Artificial Sequence: Synthetic oligonucleotide
ccaggacccgcuuguaacc

SEQ ID NO: 2065243 - RNA, 19 nt, Artificial Sequence
  Description of Artificial Sequence: Synthetic oligonucleotide
cagcacgggcagcagccgg

SEQ ID NO: 2065244 - RNA, 19 nt, Artificial Sequence
  Description of Artificial Sequence: Synthetic oligonucleotide
cacuuagaauuucaauggu

SEQ ID NO: 2065245 - RNA, 19 nt, Artificial Sequence
  Description of Artificial Sequence: Synthetic oligonucleotide
agggacaugcggaucugcu

SEQ ID NO: 2065246 - RNA, 19 nt, Artificial Sequence
  Description of Artificial Sequence: Synthetic oligonucleotide
guagguugcucugagggau

SEQ ID NO: 2065247 - RNA, 19 nt, Artificial Sequence
  Description of Artificial Sequence: Synthetic oligonucleotide
caaacagaccaaaucccau

SEQ ID NO: 2065248 - RNA, 19 nt, Artificial Sequence
  Description of Artificial Sequence: Synthetic oligonucleotide
ucgggccccagaccagugu

SEQ ID NO: 2065249 - RNA, 19 nt, Artificial Sequence
  Description of Artificial Sequence: Synthetic oligonucleotide
cugagggaucagucaaaca

SEQ ID NO: 2065250 - RNA, 19 nt, Artificial Sequence
  Description of Artificial Sequence: Synthetic oligonucleotide
acccucuaggaagcgugag

SEQ ID NO: 2065251 - RNA, 19 nt, Artificial Sequence
  Description of Artificial Sequence: Synthetic oligonucleotide
ccgcaaaugcagauggauc

SEQ ID NO: 2065252 - RNA, 19 nt, Artificial Sequence
  Description of Artificial Sequence: Synthetic oligonucleotide
ucgaagggacaugcggauc

SEQ ID NO: 2065253 - RNA, 19 nt, Artificial Sequence
  Description of Artificial Sequence: Synthetic oligonucleotide
acccgcuuguaaccauuga

SEQ ID NO: 2065254 - RNA, 19 nt, Artificial Sequence
  Description of Artificial Sequence: Synthetic oligonucleotide
acauggggcgauggcacca

SEQ ID NO: 2065255 - RNA, 19 nt, Artificial Sequence
  Description of Artificial Sequence: Synthetic oligonucleotide
cgcuuguaaccauugauga

SEQ ID NO: 2065256 - RNA, 19 nt, Artificial Sequence
  Description of Artificial Sequence: Synthetic oligonucleotide
caucacggcggugcgucag

SEQ ID NO: 2065257 - RNA, 19 nt, Artificial Sequence
  Description of Artificial Sequence: Synthetic oligonucleotide
gccacgcaggguuuaaaga

SEQ ID NO: 2065258 - RNA, 19 nt, Artificial Sequence
  Description of Artificial Sequence: Synthetic oligonucleotide
gccggcaccuuauuggcca

SEQ ID NO: 2065259 - RNA, 19 nt, Artificial Sequence
  Description of Artificial Sequence: Synthetic oligonucleotide
gacaaagccaggacccgcu

SEQ ID NO: 2065260 - RNA, 19 nt, Artificial Sequence
  Description of Artificial Sequence: Synthetic oligonucleotide
agguugcucugagggauca

SEQ ID NO: 2065261 - RNA, 19 nt, Artificial Sequence
  Description of Artificial Sequence: Synthetic oligonucleotide
ucucgggccccagaccagu

SEQ ID NO: 2065262 - RNA, 19 nt, Artificial Sequence
  Description of Artificial Sequence: Synthetic oligonucleotide
gucggguaaccaaucugca

SEQ ID NO: 2065263 - RNA, 19 nt, Artificial Sequence
  Description of Artificial Sequence: Synthetic oligonucleotide
caggucgcccugucuuccc

SEQ ID NO: 2065264 - RNA, 19 nt, Artificial Sequence
  Description of Artificial Sequence: Synthetic oligonucleotide
caacagucggguaaccaau

SEQ ID NO: 2065265 - RNA, 19 nt, Artificial Sequence
  Description of Artificial Sequence: Synthetic oligonucleotide
cggguaaccaaucugcaga

SEQ ID NO: 2065266 - RNA, 19 nt, Artificial Sequence
  Description of Artificial Sequence: Synthetic oligonucleotide
ccucgaagggacaugcgga

SEQ ID NO: 2065267 - RNA, 19 nt, Artificial Sequence
  Description of Artificial Sequence: Synthetic oligonucleotide
uguggggcagcagcuucuc

SEQ ID NO: 2065268 - RNA, 19 nt, Artificial Sequence
  Description of Artificial Sequence: Synthetic oligonucleotide
cuucccucgaagggacaug

SEQ ID NO: 2065269 - RNA, 19 nt, Artificial Sequence
  Description of Artificial Sequence: Synthetic oligonucleotide
caaauuaaacuggcugagu

SEQ ID NO: 2065270 - RNA, 19 nt, Artificial Sequence
  Description of Artificial Sequence: Synthetic oligonucleotide
gugccccuggagauuuuag

SEQ ID NO: 2065271 - RNA, 19 nt, Artificial Sequence
  Description of Artificial Sequence: Synthetic oligonucleotide
ggaagcgugagugcaaagu

SEQ ID NO: 2065272 - RNA, 19 nt, Artificial Sequence
  Description of Artificial Sequence: Synthetic oligonucleotide
gggaucagucaaacagacc

SEQ ID NO: 2065273 - RNA, 19 nt, Artificial Sequence
  Description of Artificial Sequence: Synthetic oligonucleotide
uuuugcccaucagcaccac

SEQ ID NO: 2065274 - RNA, 19 nt, Artificial Sequence
  Description of Artificial Sequence: Synthetic oligonucleotide
aggacccgcuuguaaccau

SEQ ID NO: 2065275 - RNA, 19 nt, Artificial Sequence
  Description of Artificial Sequence: Synthetic oligonucleotide
gcgucagggauugccacgc

SEQ ID NO: 2065276 - RNA, 19 nt, Artificial Sequence
  Description of Artificial Sequence: Synthetic oligonucleotide
ugaccucacauggggcgau

SEQ ID NO: 2065277 - RNA, 19 nt, Artificial Sequence
  Description of Artificial Sequence: Synthetic oligonucleotide
auugccacgcaggguuuaa

SEQ ID NO: 2065278 - RNA, 19 nt, Artificial Sequence
  Description of Artificial Sequence: Synthetic oligonucleotide
cacucuaaugaggacgccu

SEQ ID NO: 2065279 - RNA, 19 nt, Artificial Sequence
  Description of Artificial Sequence: Synthetic oligonucleotide
ggcggugcgucagggauug

SEQ ID NO: 2065280 - RNA, 19 nt, Artificial Sequence
  Description of Artificial Sequence: Synthetic oligonucleotide
ggguaaucauccaaaaguu

SEQ ID NO: 2065281 - RNA, 19 nt, Artificial Sequence
  Description of Artificial Sequence: Synthetic oligonucleotide
ggugcgucagggauugcca

SEQ ID NO: 2065282 - RNA, 19 nt, Artificial Sequence
  Description of Artificial Sequence: Synthetic oligonucleotide
ggcaucacggcggugcguc

SEQ ID NO: 2065283 - RNA, 19 nt, Artificial Sequence
  Description of Artificial Sequence: Synthetic oligonucleotide
gccacaggagcagcagccg

SEQ ID NO: 2065284 - RNA, 19 nt, Artificial Sequence
  Description of Artificial Sequence: Synthetic oligonucleotide
gugaccucacauggggcga

SEQ ID NO: 2065285 - RNA, 19 nt, Artificial Sequence
  Description of Artificial Sequence: Synthetic oligonucleotide
cagcaagugggaaggugua

SEQ ID NO: 2065286 - RNA, 19 nt, Artificial Sequence
  Description of Artificial Sequence: Synthetic oligonucleotide
cacccucuaggaagcguga

SEQ ID NO: 2065287 - RNA, 19 nt, Artificial Sequence
  Description of Artificial Sequence: Synthetic oligonucleotide
gcaccuuauuggccagcag

SEQ ID NO: 2065288 - RNA, 19 nt, Artificial Sequence
  Description of Artificial Sequence: Synthetic oligonucleotide
cucgaagggacaugcggau

SEQ ID NO: 2065289 - RNA, 19 nt, Artificial Sequence
  Description of Artificial Sequence: Synthetic oligonucleotide
ggcaacagucggguaacca

SEQ ID NO: 2065290 - RNA, 19 nt, Artificial Sequence
  Description of Artificial Sequence: Synthetic oligonucleotide
gcagauggaucagccaaga

SEQ ID NO: 2065291 - RNA, 19 nt, Artificial Sequence
  Description of Artificial Sequence: Synthetic oligonucleotide
cagauggaucagccaagaa

SEQ ID NO: 2065292 - RNA, 19 nt, Artificial Sequence
  Description of Artificial Sequence: Synthetic oligonucleotide
cucgggccccagaccagug

SEQ ID NO: 2065293 - RNA, 19 nt, Artificial Sequence
  Description of Artificial Sequence: Synthetic oligonucleotide
gauugccacgcaggguuua

SEQ ID NO: 2065294 - RNA, 19 nt, Artificial Sequence
  Description of Artificial Sequence: Synthetic oligonucleotide
gaccucacauggggcgaug

SEQ ID NO: 2065295 - RNA, 19 nt, Artificial Sequence
  Description of Artificial Sequence: Synthetic oligonucleotide
ccccggauggccuugcgca

SEQ ID NO: 2065296 - RNA, 19 nt, Artificial Sequence
  Description of Artificial Sequence: Synthetic oligonucleotide
ggcaccuuauuggccagca

SEQ ID NO: 2065297 - RNA, 19 nt, Artificial Sequence
  Description of Artificial Sequence: Synthetic oligonucleotide
gguaaccaaucugcagaca

SEQ ID NO: 2065298 - RNA, 19 nt, Artificial Sequence
  Description of Artificial Sequence: Synthetic oligonucleotide
gcuuguaaccauugaugau

SEQ ID NO: 2065299 - RNA, 19 nt, Artificial Sequence
  Description of Artificial Sequence: Synthetic oligonucleotide
ggucgcccugucuucccug

SEQ ID NO: 2065300 - RNA, 19 nt, Artificial Sequence
  Description of Artificial Sequence: Synthetic oligonucleotide
caggacccgcuuguaacca

SEQ ID NO: 2065301 - RNA, 19 nt, Artificial Sequence
  Description of Artificial Sequence: Synthetic oligonucleotide
gacacccucuaggaagcgu

SEQ ID NO: 2065302 - RNA, 19 nt, Artificial Sequence
  Description of Artificial Sequence: Synthetic oligonucleotide
gcacaucacuuagaauuuc

SEQ ID NO: 2065303 - RNA, 19 nt, Artificial Sequence
  Description of Artificial Sequence: Synthetic oligonucleotide
acaugcggaucugcugcau

SEQ ID NO: 2065304 - RNA, 19 nt, Artificial Sequence
  Description of Artificial Sequence: Synthetic oligonucleotide
ccuccgacucuuccuuggc

SEQ ID NO: 2065305 - RNA, 19 nt, Artificial Sequence
  Description of Artificial Sequence: Synthetic oligonucleotide
ugucuucccugggcaucac

SEQ ID NO: 2065306 - RNA, 19 nt, Artificial Sequence
  Description of Artificial Sequence: Synthetic oligonucleotide
ggacacccucuaggaagcg

SEQ ID NO: 2065307 - RNA, 19 nt, Artificial Sequence
  Description of Artificial Sequence: Synthetic oligonucleotide
agccgcaaaugcagaugga

SEQ ID NO: 2065308 - RNA, 19 nt, Artificial Sequence
  Description of Artificial Sequence: Synthetic oligonucleotide
gguugcucugagggaucag

SEQ ID NO: 2065309 - RNA, 19 nt, Artificial Sequence
  Description of Artificial Sequence: Synthetic oligonucleotide
caagaaggccuugaccuuu

SEQ ID NO: 2065310 - RNA, 19 nt, Artificial Sequence
  Description of Artificial Sequence: Synthetic oligonucleotide
gcgugagugcaaagucugc

SEQ ID NO: 2065311 - RNA, 19 nt, Artificial Sequence
  Description of Artificial Sequence: Synthetic oligonucleotide
ggaugaucuuaaggaagua

SEQ ID NO: 2065312 - RNA, 19 nt, Artificial Sequence
  Description of Artificial Sequence: Synthetic oligonucleotide
gcaagugggaagguguaau

SEQ ID NO: 2065313 - RNA, 19 nt, Artificial Sequence
  Description of Artificial Sequence: Synthetic oligonucleotide
gcaugucccuaauuucagu

SEQ ID NO: 2065314 - RNA, 19 nt, Artificial Sequence
  Description of Artificial Sequence: Synthetic oligonucleotide
ccaggucgcccugucuucc

SEQ ID NO: 2065315 - RNA, 19 nt, Artificial Sequence
  Description of Artificial Sequence: Synthetic oligonucleotide
gcgauggcaccagcacggg

SEQ ID NO: 2065316 - RNA, 19 nt, Artificial Sequence
  Description of Artificial Sequence: Synthetic oligonucleotide
cuccgacucuuccuuggcu

SEQ ID NO: 2065317 - RNA, 19 nt, Artificial Sequence
  Description of Artificial Sequence: Synthetic oligonucleotide
cggugcgucagggauugcc

SEQ ID NO: 2065318 - RNA, 19 nt, Artificial Sequence
  Description of Artificial Sequence: Synthetic oligonucleotide
cacggcggugcgucaggga

SEQ ID NO: 2065319 - RNA, 19 nt, Artificial Sequence
  Description of Artificial Sequence: Synthetic oligonucleotide
cacgggcagcagccggcac

SEQ ID NO: 2065320 - RNA, 19 nt, Artificial Sequence
  Description of Artificial Sequence: Synthetic oligonucleotide
cauugucugcucccacaau

SEQ ID NO: 2065321 - RNA, 19 nt, Artificial Sequence
  Description of Artificial Sequence: Synthetic oligonucleotide
gcugcacaucacuuagaau

SEQ ID NO: 2065322 - RNA, 19 nt, Artificial Sequence
  Description of Artificial Sequence: Synthetic oligonucleotide
cccgcuuguaaccauugau

SEQ ID NO: 2065323 - RNA, 19 nt, Artificial Sequence
  Description of Artificial Sequence: Synthetic oligonucleotide
guguggcacugaggcaaca

SEQ ID NO: 2065324 - RNA, 19 nt, Artificial Sequence
  Description of Artificial Sequence: Synthetic oligonucleotide
gcaucugcuuugagcccac

SEQ ID NO: 2065325 - RNA, 19 nt, Artificial Sequence
  Description of Artificial Sequence: Synthetic oligonucleotide
gccccagaccaguguucug

SEQ ID NO: 2065326 - RNA, 19 nt, Artificial Sequence
  Description of Artificial Sequence: Synthetic oligonucleotide
ccaaaaguuggaugaucuu

SEQ ID NO: 2065327 - RNA, 19 nt, Artificial Sequence
  Description of Artificial Sequence: Synthetic oligonucleotide
gcaacauuucggacacccu

SEQ ID NO: 2065328 - RNA, 19 nt, Artificial Sequence
  Description of Artificial Sequence: Synthetic oligonucleotide
ggugccccuggagauuuua

SEQ ID NO: 2065329 - RNA, 19 nt, Artificial Sequence
  Description of Artificial Sequence: Synthetic oligonucleotide
ggccccagaccaguguucu

SEQ ID NO: 2065330 - RNA, 19 nt, Artificial Sequence
  Description of Artificial Sequence: Synthetic oligonucleotide
gcaucacggcggugcguca

SEQ ID NO: 2065331 - RNA, 19 nt, Artificial Sequence
  Description of Artificial Sequence: Synthetic oligonucleotide
gggccccagaccaguguuc

SEQ ID NO: 2065332 - RNA, 19 nt, Artificial Sequence
  Description of Artificial Sequence: Synthetic oligonucleotide
cgugagugcaaagucugcu

SEQ ID NO: 2065333 - RNA, 19 nt, Artificial Sequence
  Description of Artificial Sequence: Synthetic oligonucleotide
ccggauggccuugcgcauc

SEQ ID NO: 2065334 - RNA, 19 nt, Artificial Sequence
  Description of Artificial Sequence: Synthetic oligonucleotide
gccuucgcuggggcugcag

SEQ ID NO: 2065335 - RNA, 19 nt, Artificial Sequence
  Description of Artificial Sequence: Synthetic oligonucleotide
caagcacuucuggguugua

SEQ ID NO: 2065336 - RNA, 19 nt, Artificial Sequence
  Description of Artificial Sequence: Synthetic oligonucleotide
ggauguggggcagcagcuu

SEQ ID NO: 2065337 - RNA, 19 nt, Artificial Sequence
  Description of Artificial Sequence: Synthetic oligonucleotide
ggacccgcuuguaaccauu

SEQ ID NO: 2065338 - RNA, 19 nt, Artificial Sequence
  Description of Artificial Sequence: Synthetic oligonucleotide
ccuugcgcaucaugguguu

SEQ ID NO: 2065339 - RNA, 19 nt, Artificial Sequence
  Description of Artificial Sequence: Synthetic oligonucleotide
ccuuauuggccagcagcau

SEQ ID NO: 2065340 - RNA, 19 nt, Artificial Sequence
  Description of Artificial Sequence: Synthetic oligonucleotide
cuugcgcaucaugguguuu

SEQ ID NO: 2065341 - RNA, 19 nt, Artificial Sequence
  Description of Artificial Sequence: Synthetic oligonucleotide
ccuucccucgaagggacau

SEQ ID NO: 2065342 - RNA, 19 nt, Artificial Sequence
  Description of Artificial Sequence: Synthetic oligonucleotide
gccuucccucgaagggaca

SEQ ID NO: 2065343 - RNA, 19 nt, Artificial Sequence
  Description of Artificial Sequence: Synthetic oligonucleotide
ggccagcagcaugucccua

SEQ ID NO: 2065344 - RNA, 19 nt, Artificial Sequence
  Description of Artificial Sequence: Synthetic oligonucleotide
cgucagggauugccacgca

SEQ ID NO: 2065345 - RNA, 19 nt, Artificial Sequence
  Description of Artificial Sequence: Synthetic oligonucleotide
cccggauggccuugcgcau

SEQ ID NO: 2065346 - RNA, 19 nt, Artificial Sequence
  Description of Artificial Sequence: Synthetic oligonucleotide
gcggugcgucagggauugc

SEQ ID NO: 2065347 - RNA, 19 nt, Artificial Sequence
  Description of Artificial Sequence: Synthetic oligonucleotide
cgcaggguuuaaagacgau

SEQ ID NO: 2065348 - RNA, 19 nt, Artificial Sequence
  Description of Artificial Sequence: Synthetic oligonucleotide
cggcggugcgucagggauu

SEQ ID NO: 2065349 - RNA, 19 nt, Artificial Sequence
  Description of Artificial Sequence: Synthetic oligonucleotide
aaaucuuuugcugaguucc

SEQ ID NO: 2065350 - RNA, 19 nt, Artificial Sequence
  Description of Artificial Sequence: Synthetic oligonucleotide
uuauagagcagauaaacgg

SEQ ID NO: 2065351 - RNA, 19 nt, Artificial Sequence
  Description of Artificial Sequence: Synthetic oligonucleotide
ucugauauuagguugaaag

SEQ ID NO: 2065352 - RNA, 19 nt, Artificial Sequence
  Description of Artificial Sequence: Synthetic oligonucleotide
aaugcaguccauuagauga

SEQ ID NO: 2065353 - RNA, 19 nt, Artificial Sequence
  Description of Artificial Sequence: Synthetic oligonucleotide
aaagauguuucacucauag

SEQ ID NO: 2065354 - RNA, 19 nt, Artificial Sequence
  Description of Artificial Sequence: Synthetic oligonucleotide
aauacuaaaauuccuauua

SEQ ID NO: 2065355 - RNA, 19 nt, Artificial Sequence
  Description of Artificial Sequence: Synthetic oligonucleotide
agauguuucacucauagug

SEQ ID NO: 2065356 - RNA, 19 nt, Artificial Sequence
  Description of Artificial Sequence: Synthetic oligonucleotide
uuuauagagcagauaaacg

SEQ ID NO: 2065357 - RNA, 19 nt, Artificial Sequence
  Description of Artificial Sequence: Synthetic oligonucleotide
uccuauuaagucaugacag

SEQ ID NO: 2065358 - RNA, 19 nt, Artificial Sequence
  Description of Artificial Sequence: Synthetic oligonucleotide
acuuguguuccucaaagcc

SEQ ID NO: 2065359 - RNA, 19 nt, Artificial Sequence
  Description of Artificial Sequence: Synthetic oligonucleotide
ucauugaacaccuucagca

SEQ ID NO: 2065360 - RNA, 19 nt, Artificial Sequence
  Description of Artificial Sequence: Synthetic oligonucleotide
ucuguuuuccggaugaucc

SEQ ID NO: 2065361 - RNA, 19 nt, Artificial Sequence
  Description of Artificial Sequence: Synthetic oligonucleotide
uuucuaguugucuaaauca

SEQ ID NO: 2065362 - RNA, 19 nt, Artificial Sequence
  Description of Artificial Sequence: Synthetic oligonucleotide
uuuuauagagcagauaaac

SEQ ID NO: 2065363 - RNA, 19 nt, Artificial Sequence
  Description of Artificial Sequence: Synthetic oligonucleotide
cuaaaauuccuauuaaguc

SEQ ID NO: 2065364 - RNA, 19 nt, Artificial Sequence
  Description of Artificial Sequence: Synthetic oligonucleotide
aaugaaaugucggaagaag

SEQ ID NO: 2065365 - RNA, 19 nt, Artificial Sequence
  Description of Artificial Sequence: Synthetic oligonucleotide
uucggauugagguaaaucu

SEQ ID NO: 2065366 - RNA, 19 nt, Artificial Sequence
  Description of Artificial Sequence: Synthetic oligonucleotide
uuccuauuaagucaugaca

SEQ ID NO: 2065367 - RNA, 19 nt, Artificial Sequence
  Description of Artificial Sequence: Synthetic oligonucleotide
aauguucagugccugcgac

SEQ ID NO: 2065368 - RNA, 19 nt, Artificial Sequence
  Description of Artificial Sequence: Synthetic oligonucleotide
aacuuguguuccucaaagc

SEQ ID NO: 2065369 - RNA, 19 nt, Artificial Sequence
  Description of Artificial Sequence: Synthetic oligonucleotide
ugggauguuuuauagagca

SEQ ID NO: 2065370 - RNA, 19 nt, Artificial Sequence
  Description of Artificial Sequence: Synthetic oligonucleotide
uacuaaaauuccuauuaag

SEQ ID NO: 2065371 - RNA, 19 nt, Artificial Sequence
  Description of Artificial Sequence: Synthetic oligonucleotide
auuccuauuaagucaugac

SEQ ID NO: 2065372 - RNA, 19 nt, Artificial Sequence
  Description of Artificial Sequence: Synthetic oligonucleotide
guaggaauagcccaaggcc

SEQ ID NO: 2065373 - RNA, 19 nt, Artificial Sequence
  Description of Artificial Sequence: Synthetic oligonucleotide
uuuucugauauuagguuga

SEQ ID NO: 2065374 - RNA, 19 nt, Artificial Sequence
  Description of Artificial Sequence: Synthetic oligonucleotide
uggucuuucggauugaggu

SEQ ID NO: 2065375 - RNA, 19 nt, Artificial Sequence
  Description of Artificial Sequence: Synthetic oligonucleotide
guuucacucauagugaccg

SEQ ID NO: 2065376 - RNA, 19 nt, Artificial Sequence
  Description of Artificial Sequence: Synthetic oligonucleotide
uuuucggcugcauaaagga

SEQ ID NO: 2065377 - RNA, 19 nt, Artificial Sequence
  Description of Artificial Sequence: Synthetic oligonucleotide
ucaaugaaaugucggaaga

SEQ ID NO: 2065378 - RNA, 19 nt, Artificial Sequence
  Description of Artificial Sequence: Synthetic oligonucleotide
uuagguugaaagauguuuc

SEQ ID NO: 2065379 - RNA, 19 nt, Artificial Sequence
  Description of Artificial Sequence: Synthetic oligonucleotide
aacugcacgauccgguccg

SEQ ID NO: 2065380 - RNA, 19 nt, Artificial Sequence
  Description of Artificial Sequence: Synthetic oligonucleotide
ugcauaaaggauguuguag

SEQ ID NO: 2065381 - RNA, 19 nt, Artificial Sequence
  Description of Artificial Sequence: Synthetic oligonucleotide
ugaaagauguuucacucau

SEQ ID NO: 2065382 - RNA, 19 nt, Artificial Sequence
  Description of Artificial Sequence: Synthetic oligonucleotide
gguaaauucuguuuuccgg

SEQ ID NO: 2065383 - RNA, 19 nt, Artificial Sequence
  Description of Artificial Sequence: Synthetic oligonucleotide
uucggcugcauaaaggaug

SEQ ID NO: 2065384 - RNA, 19 nt, Artificial Sequence
  Description of Artificial Sequence: Synthetic oligonucleotide
ugcagagcaauguucagug

SEQ ID NO: 2065385 - RNA, 19 nt, Artificial Sequence
  Description of Artificial Sequence: Synthetic oligonucleotide
uuacccaaaaggcuguaug

SEQ ID NO: 2065386 - RNA, 19 nt, Artificial Sequence
  Description of Artificial Sequence: Synthetic oligonucleotide
ugauauuagguugaaagau

SEQ ID NO: 2065387 - RNA, 19 nt, Artificial Sequence
  Description of Artificial Sequence: Synthetic oligonucleotide
gauauuagguugaaagaug

SEQ ID NO: 2065388 - RNA, 19 nt, Artificial Sequence
  Description of Artificial Sequence: Synthetic oligonucleotide
gaacuugaggaucucucgg

SEQ ID NO: 2065389 - RNA, 19 nt, Artificial Sequence
  Description of Artificial Sequence: Synthetic oligonucleotide
aacacguggugguucagag

SEQ ID NO: 2065390 - RNA, 19 nt, Artificial Sequence
  Description of Artificial Sequence: Synthetic oligonucleotide
gaucccgaagaauggauag

SEQ ID NO: 2065391 - RNA, 19 nt, Artificial Sequence
  Description of Artificial Sequence: Synthetic oligonucleotide
aaaauuccuauuaagucau

SEQ ID NO: 2065392 - RNA, 19 nt, Artificial Sequence
  Description of Artificial Sequence: Synthetic oligonucleotide
uugagguaaaucuuuugcu

SEQ ID NO: 2065393 - RNA, 19 nt, Artificial Sequence
  Description of Artificial Sequence: Synthetic oligonucleotide
uuccggaugaucccgaaga

SEQ ID NO: 2065394 - RNA, 19 nt, Artificial Sequence
  Description of Artificial Sequence: Synthetic oligonucleotide
uugaacaccuucagcaggc

SEQ ID NO: 2065395 - RNA, 19 nt, Artificial Sequence
  Description of Artificial Sequence: Synthetic oligonucleotide
aagucaugacaguccauag

SEQ ID NO: 2065396 - RNA, 19 nt, Artificial Sequence
  Description of Artificial Sequence: Synthetic oligonucleotide
aauggauaggaugucacau

SEQ ID NO: 2065397 - RNA, 19 nt, Artificial Sequence
  Description of Artificial Sequence: Synthetic oligonucleotide
aguucaguggcuuuaccca

SEQ ID NO: 2065398 - RNA, 19 nt, Artificial Sequence
  Description of Artificial Sequence: Synthetic oligonucleotide
guagugggauguuuuauag

SEQ ID NO: 2065399 - RNA, 19 nt, Artificial Sequence
  Description of Artificial Sequence: Synthetic oligonucleotide
aaggcuguauguuucuagu

SEQ ID NO: 2065400 - RNA, 19 nt, Artificial Sequence
  Description of Artificial Sequence: Synthetic oligonucleotide
ugccaaggcagaauguucc

SEQ ID NO: 2065401 - RNA, 19 nt, Artificial Sequence
  Description of Artificial Sequence: Synthetic oligonucleotide
ucuccuuuggucuuucgga

SEQ ID NO: 2065402 - RNA, 19 nt, Artificial Sequence
  Description of Artificial Sequence: Synthetic oligonucleotide
aguugucuaaaucaauuaa

SEQ ID NO: 2065403 - RNA, 19 nt, Artificial Sequence
  Description of Artificial Sequence: Synthetic oligonucleotide
cauggccuaaaauuaguag

SEQ ID NO: 2065404 - RNA, 19 nt, Artificial Sequence
  Description of Artificial Sequence: Synthetic oligonucleotide
guaaauucuguuuuccgga

SEQ ID NO: 2065405 - RNA, 19 nt, Artificial Sequence
  Description of Artificial Sequence: Synthetic oligonucleotide
aacggaagggguggcagcc

SEQ ID NO: 2065406 - RNA, 19 nt, Artificial Sequence
  Description of Artificial Sequence: Synthetic oligonucleotide
agauaaacggaaggggugg

SEQ ID NO: 2065407 - RNA, 19 nt, Artificial Sequence
  Description of Artificial Sequence: Synthetic oligonucleotide
agcagauaaacggaagggg

SEQ ID NO: 2065408 - RNA, 19 nt, Artificial Sequence
  Description of Artificial Sequence: Synthetic oligonucleotide
aaaugucggaagaagucag

SEQ ID NO: 2065409 - RNA, 19 nt, Artificial Sequence
  Description of Artificial Sequence: Synthetic oligonucleotide
uucuaguugucuaaaucaa

SEQ ID NO: 2065410 - RNA, 19 nt, Artificial Sequence
  Description of Artificial Sequence: Synthetic oligonucleotide
aaugucggaagaagucagc

SEQ ID NO: 2065411 - RNA, 19 nt, Artificial Sequence
  Description of Artificial Sequence: Synthetic oligonucleotide
agcucuaccacacuguaaa

SEQ ID NO: 2065412 - RNA, 19 nt, Artificial Sequence
  Description of Artificial Sequence: Synthetic oligonucleotide
gagcagauaaacggaaggg

SEQ ID NO: 2065413 - RNA, 19 nt, Artificial Sequence
  Description of Artificial Sequence: Synthetic oligonucleotide
gauugagguaaaucuuuug

SEQ ID NO: 2065414 - RNA, 19 nt, Artificial Sequence
  Description of Artificial Sequence: Synthetic oligonucleotide
cugaguuccugaauuuucc

SEQ ID NO: 2065415 - RNA, 19 nt, Artificial Sequence
  Description of Artificial Sequence: Synthetic oligonucleotide
ugcgacagagcugugaucu

SEQ ID NO: 2065416 - RNA, 19 nt, Artificial Sequence
  Description of Artificial Sequence: Synthetic oligonucleotide
uugaaagauguuucacuca

SEQ ID NO: 2065417 - RNA, 19 nt, Artificial Sequence
  Description of Artificial Sequence: Synthetic oligonucleotide
guuucuaguugucuaaauc

SEQ ID NO: 2065418 - RNA, 19 nt, Artificial Sequence
  Description of Artificial Sequence: Synthetic oligonucleotide
ugugaucuggacgugguca

SEQ ID NO: 2065419 - RNA, 19 nt, Artificial Sequence
  Description of Artificial Sequence: Synthetic oligonucleotide
uguuuuccggaugaucccg

SEQ ID NO: 2065420 - RNA, 19 nt, Artificial Sequence
  Description of Artificial Sequence: Synthetic oligonucleotide
agaauggauaggaugucac

SEQ ID NO: 2065421 - RNA, 19 nt, Artificial Sequence
  Description of Artificial Sequence: Synthetic oligonucleotide
uccucaucaaugaaauguc

SEQ ID NO: 2065422 - RNA, 19 nt, Artificial Sequence
  Description of Artificial Sequence: Synthetic oligonucleotide
uccggcauggccuaaaauu

SEQ ID NO: 2065423 - RNA, 19 nt, Artificial Sequence
  Description of Artificial Sequence: Synthetic oligonucleotide
cauugaacaccuucagcag

SEQ ID NO: 2065424 - RNA, 19 nt, Artificial Sequence
  Description of Artificial Sequence: Synthetic oligonucleotide
gaaugcaguccauuagaug

SEQ ID NO: 2065425 - RNA, 19 nt, Artificial Sequence
  Description of Artificial Sequence: Synthetic oligonucleotide
cauuagaugacaggcuccg

SEQ ID NO: 2065426 - RNA, 19 nt, Artificial Sequence
  Description of Artificial Sequence: Synthetic oligonucleotide
auauuagguugaaagaugu

SEQ ID NO: 2065427 - RNA, 19 nt, Artificial Sequence
  Description of Artificial Sequence: Synthetic oligonucleotide
ucacucauagugaccggag

SEQ ID NO: 2065428 - RNA, 19 nt, Artificial Sequence
  Description of Artificial Sequence: Synthetic oligonucleotide
ucuaguugucuaaaucaau

SEQ ID NO: 2065429 - RNA, 19 nt, Artificial Sequence
  Description of Artificial Sequence: Synthetic oligonucleotide
gauguuucacucauaguga

SEQ ID NO: 2065430 - RNA, 19 nt, Artificial Sequence
  Description of Artificial Sequence: Synthetic oligonucleotide
aagauguuucacucauagu

SEQ ID NO: 2065431 - RNA, 19 nt, Artificial Sequence
  Description of Artificial Sequence: Synthetic oligonucleotide
uccugaugaaggccgaugu

SEQ ID NO: 2065432 - RNA, 19 nt, Artificial Sequence
  Description of Artificial Sequence: Synthetic oligonucleotide
cagauaaacggaaggggug

SEQ ID NO: 2065433 - RNA, 19 nt, Artificial Sequence
  Description of Artificial Sequence: Synthetic oligonucleotide
cagcaaagacuccagguag

SEQ ID NO: 2065434 - RNA, 19 nt, Artificial Sequence
  Description of Artificial Sequence: Synthetic oligonucleotide
uucccaucuccuuuggucu

SEQ ID NO: 2065435 - RNA, 19 nt, Artificial Sequence
  Description of Artificial Sequence: Synthetic oligonucleotide
agcacacgcucuuugaacu

SEQ ID NO: 2065436 - RNA, 19 nt, Artificial Sequence
  Description of Artificial Sequence: Synthetic oligonucleotide
uguagugggauguuuuaua

SEQ ID NO: 2065437 - RNA, 19 nt, Artificial Sequence
  Description of Artificial Sequence: Synthetic oligonucleotide
cugauauuagguugaaaga

SEQ ID NO: 2065438 - RNA, 19 nt, Artificial Sequence
  Description of Artificial Sequence: Synthetic oligonucleotide
cuauuaagucaugacaguc

SEQ ID NO: 2065439 - RNA, 19 nt, Artificial Sequence
  Description of Artificial Sequence: Synthetic oligonucleotide
uggcuuuacccaaaaggcu

SEQ ID NO: 2065440 - RNA, 19 nt, Artificial Sequence
  Description of Artificial Sequence: Synthetic oligonucleotide
caggucucaguucaguggc

SEQ ID NO: 2065441 - RNA, 19 nt, Artificial Sequence
  Description of Artificial Sequence: Synthetic oligonucleotide
uaaacggaagggguggcag

SEQ ID NO: 2065442 - RNA, 19 nt, Artificial Sequence
  Description of Artificial Sequence: Synthetic oligonucleotide
gguaggaauagcccaaggc

SEQ ID NO: 2065443 - RNA, 19 nt, Artificial Sequence
  Description of Artificial Sequence: Synthetic oligonucleotide
cagagcugugaucuggacg

SEQ ID NO: 2065444 - RNA, 19 nt, Artificial Sequence
  Description of Artificial Sequence: Synthetic oligonucleotide
uguuguagugggauguuuu

SEQ ID NO: 2065445 - RNA, 19 nt, Artificial Sequence
  Description of Artificial Sequence: Synthetic oligonucleotide
uguagcacacgcucuuuga

SEQ ID NO: 2065446 - RNA, 19 nt, Artificial Sequence
  Description of Artificial Sequence: Synthetic oligonucleotide
caguccauuagaugacagg

SEQ ID NO: 2065447 - RNA, 19 nt, Artificial Sequence
  Description of Artificial Sequence: Synthetic oligonucleotide
uuagcaggcauuacaucau

SEQ ID NO: 2065448 - RNA, 19 nt, Artificial Sequence
  Description of Artificial Sequence: Synthetic oligonucleotide
uaaagaaguuucugaacuu

SEQ ID NO: 2065449 - RNA, 19 nt, Artificial Sequence
  Description of Artificial Sequence: Synthetic oligonucleotide
cucauagugaccggagccg

SEQ ID NO: 2065450 - RNA, 19 nt, Artificial Sequence
  Description of Artificial Sequence: Synthetic oligonucleotide
ugaacuuguguuccucaaa

SEQ ID NO: 2065451 - RNA, 19 nt, Artificial Sequence
  Description of Artificial Sequence: Synthetic oligonucleotide
augacaguccauagugggc

SEQ ID NO: 2065452 - RNA, 19 nt, Artificial Sequence
  Description of Artificial Sequence: Synthetic oligonucleotide
acguggucacacuccaugg

SEQ ID NO: 2065453 - RNA, 19 nt, Artificial Sequence
  Description of Artificial Sequence: Synthetic oligonucleotide
gaauggauaggaugucaca

SEQ ID NO: 2065454 - RNA, 19 nt, Artificial Sequence
  Description of Artificial Sequence: Synthetic oligonucleotide
auagugaccggagccgucg

SEQ ID NO: 2065455 - RNA, 19 nt, Artificial Sequence
  Description of Artificial Sequence: Synthetic oligonucleotide
aagcauuaaagaaguuucu

SEQ ID NO: 2065456 - RNA, 19 nt, Artificial Sequence
  Description of Artificial Sequence: Synthetic oligonucleotide
cagccagaaggucauuugg

SEQ ID NO: 2065457 - RNA, 19 nt, Artificial Sequence
  Description of Artificial Sequence: Synthetic oligonucleotide
ucccgaagaauggauagga

SEQ ID NO: 2065458 - RNA, 19 nt, Artificial Sequence
  Description of Artificial Sequence: Synthetic oligonucleotide
gaugugagcaggcgcaaga

SEQ ID NO: 2065459 - RNA, 19 nt, Artificial Sequence
  Description of Artificial Sequence: Synthetic oligonucleotide
uuucacucauagugaccgg

SEQ ID NO: 2065460 - RNA, 19 nt, Artificial Sequence
  Description of Artificial Sequence: Synthetic oligonucleotide
guugucuaaaucaauuaaa

SEQ ID NO: 2065461 - RNA, 19 nt, Artificial Sequence
  Description of Artificial Sequence: Synthetic oligonucleotide
ucaugagugcagaagucuu

SEQ ID NO: 2065462 - RNA, 19 nt, Artificial Sequence
  Description of Artificial Sequence: Synthetic oligonucleotide
ggcuguauguuucuaguug

SEQ ID NO: 2065463 - RNA, 19 nt, Artificial Sequence
  Description of Artificial Sequence: Synthetic oligonucleotide
uggggucuguagcacacgc

SEQ ID NO: 2065464 - RNA, 19 nt, Artificial Sequence
  Description of Artificial Sequence: Synthetic oligonucleotide
gaugaaggccgaugugagc

SEQ ID NO: 2065465 - RNA, 19 nt, Artificial Sequence
  Description of Artificial Sequence: Synthetic oligonucleotide
ucggauugagguaaaucuu

SEQ ID NO: 2065466 - RNA, 19 nt, Artificial Sequence
  Description of Artificial Sequence: Synthetic oligonucleotide
uuugaacuugaggaucucu

SEQ ID NO: 2065467 - RNA, 19 nt, Artificial Sequence
  Description of Artificial Sequence: Synthetic oligonucleotide
uccauagugggcacagguc

SEQ ID NO: 2065468 - RNA, 19 nt, Artificial Sequence
  Description of Artificial Sequence: Synthetic oligonucleotide
uuucggauugagguaaauc

SEQ ID NO: 2065469 - RNA, 19 nt, Artificial Sequence
  Description of Artificial Sequence: Synthetic oligonucleotide
uucacucauagugaccgga

SEQ ID NO: 2065470 - RNA, 19 nt, Artificial Sequence
  Description of Artificial Sequence: Synthetic oligonucleotide
ugaucccgaagaauggaua

SEQ ID NO: 2065471 - RNA, 19 nt, Artificial Sequence
  Description of Artificial Sequence: Synthetic oligonucleotide
cuguuuuccggaugauccc

SEQ ID NO: 2065472 - RNA, 19 nt, Artificial Sequence
  Description of Artificial Sequence: Synthetic oligonucleotide
uggacguggucacacucca

SEQ ID NO: 2065473 - RNA, 19 nt, Artificial Sequence
  Description of Artificial Sequence: Synthetic oligonucleotide
agguaggaauagcccaagg

SEQ ID NO: 2065474 - RNA, 19 nt, Artificial Sequence
  Description of Artificial Sequence: Synthetic oligonucleotide
cuggacguggucacacucc

SEQ ID NO: 2065475 - RNA, 19 nt, Artificial Sequence
  Description of Artificial Sequence: Synthetic oligonucleotide
uugccaaggcagaauguuc

SEQ ID NO: 2065476 - RNA, 19 nt, Artificial Sequence
  Description of Artificial Sequence: Synthetic oligonucleotide
guauguuucuaguugucua

SEQ ID NO: 2065477 - RNA, 19 nt, Artificial Sequence
  Description of Artificial Sequence: Synthetic oligonucleotide
cacuucaugagugcagaag

SEQ ID NO: 2065478 - RNA, 19 nt, Artificial Sequence
  Description of Artificial Sequence: Synthetic oligonucleotide
agcaaagacuccagguagg

SEQ ID NO: 2065479 - RNA, 19 nt, Artificial Sequence
  Description of Artificial Sequence: Synthetic oligonucleotide
ggucauuuggggucuguag

SEQ ID NO: 2065480 - RNA, 19 nt, Artificial Sequence
  Description of Artificial Sequence: Synthetic oligonucleotide
uauuagguugaaagauguu

SEQ ID NO: 2065481 - RNA, 19 nt, Artificial Sequence
  Description of Artificial Sequence: Synthetic oligonucleotide
gagccgucgggccacgucc

SEQ ID NO: 2065482 - RNA, 19 nt, Artificial Sequence
  Description of Artificial Sequence: Synthetic oligonucleotide
ugcacgauccgguccgagc

SEQ ID NO: 2065483 - RNA, 19 nt, Artificial Sequence
  Description of Artificial Sequence: Synthetic oligonucleotide
caagaacugcacgauccgg

SEQ ID NO: 2065484 - RNA, 19 nt, Artificial Sequence
  Description of Artificial Sequence: Synthetic oligonucleotide
cacaggucucaguucagug

SEQ ID NO: 2065485 - RNA, 19 nt, Artificial Sequence
  Description of Artificial Sequence: Synthetic oligonucleotide
uccgccguugggucgggcg

SEQ ID NO: 2065486 - RNA, 19 nt, Artificial Sequence
  Description of Artificial Sequence: Synthetic oligonucleotide
ccgaagaauggauaggaug

SEQ ID NO: 2065487 - RNA, 19 nt, Artificial Sequence
  Description of Artificial Sequence: Synthetic oligonucleotide
aggcgcaagaacugcacga

SEQ ID NO: 2065488 - RNA, 19 nt, Artificial Sequence
  Description of Artificial Sequence: Synthetic oligonucleotide
gauaaacggaagggguggc

SEQ ID NO: 2065489 - RNA, 19 nt, Artificial Sequence
  Description of Artificial Sequence: Synthetic oligonucleotide
aauugccaaggcagaaugu

SEQ ID NO: 2065490 - RNA, 19 nt, Artificial Sequence
  Description of Artificial Sequence: Synthetic oligonucleotide
uccagaguuagcaggcauu

SEQ ID NO: 2065491 - RNA, 19 nt, Artificial Sequence
  Description of Artificial Sequence: Synthetic oligonucleotide
uuucggcugcauaaaggau

SEQ ID NO: 2065492 - RNA, 19 nt, Artificial Sequence
  Description of Artificial Sequence: Synthetic oligonucleotide
ggcuuuacccaaaaggcug

SEQ ID NO: 2065493 - RNA, 19 nt, Artificial Sequence
  Description of Artificial Sequence: Synthetic oligonucleotide
ugaaggccgaugugagcag

SEQ ID NO: 2065494 - RNA, 19 nt, Artificial Sequence
  Description of Artificial Sequence: Synthetic oligonucleotide
gaugaucccgaagaaugga

SEQ ID NO: 2065495 - RNA, 19 nt, Artificial Sequence
  Description of Artificial Sequence: Synthetic oligonucleotide
uuccucugguaaauucugu

SEQ ID NO: 2065496 - RNA, 19 nt, Artificial Sequence
  Description of Artificial Sequence: Synthetic oligonucleotide
cacucauagugaccggagc

SEQ ID NO: 2065497 - RNA, 19 nt, Artificial Sequence
  Description of Artificial Sequence: Synthetic oligonucleotide
ugagugcagaagucuuuga

SEQ ID NO: 2065498 - RNA, 19 nt, Artificial Sequence
  Description of Artificial Sequence: Synthetic oligonucleotide
auagcccaaggcccuguag

SEQ ID NO: 2065499 - RNA, 19 nt, Artificial Sequence
  Description of Artificial Sequence: Synthetic oligonucleotide
uuucugaacuuguguuccu

SEQ ID NO: 2065500 - RNA, 19 nt, Artificial Sequence
  Description of Artificial Sequence: Synthetic oligonucleotide
gcgagcgcagaauacaccc

SEQ ID NO: 2065501 - RNA, 19 nt, Artificial Sequence
  Description of Artificial Sequence: Synthetic oligonucleotide
uccgguccgagcagcacug

SEQ ID NO: 2065502 - RNA, 19 nt, Artificial Sequence
  Description of Artificial Sequence: Synthetic oligonucleotide
auagagcagauaaacggaa

SEQ ID NO: 2065503 - RNA, 19 nt, Artificial Sequence
  Description of Artificial Sequence: Synthetic oligonucleotide
augcaguccauuagaugac

SEQ ID NO: 2065504 - RNA, 19 nt, Artificial Sequence
  Description of Artificial Sequence: Synthetic oligonucleotide
uuaagucaugacaguccau

SEQ ID NO: 2065505 - RNA, 19 nt, Artificial Sequence
  Description of Artificial Sequence: Synthetic oligonucleotide
aucccgaagaauggauagg

SEQ ID NO: 2065506 - RNA, 19 nt, Artificial Sequence
  Description of Artificial Sequence: Synthetic oligonucleotide
cuguauguuucuaguuguc

SEQ ID NO: 2065507 - RNA, 19 nt, Artificial Sequence
  Description of Artificial Sequence: Synthetic oligonucleotide
uuccugaugaaggccgaug

SEQ ID NO: 2065508 - RNA, 19 nt, Artificial Sequence
  Description of Artificial Sequence: Synthetic oligonucleotide
auuagaugacaggcuccgg

SEQ ID NO: 2065509 - RNA, 19 nt, Artificial Sequence
  Description of Artificial Sequence: Synthetic oligonucleotide
caggcgcaagaacugcacg

SEQ ID NO: 2065510 - RNA, 19 nt, Artificial Sequence
  Description of Artificial Sequence: Synthetic oligonucleotide
aauuuuccucugguaaauu

SEQ ID NO: 2065511 - RNA, 19 nt, Artificial Sequence
  Description of Artificial Sequence: Synthetic oligonucleotide
cacguggugguucagagcu

SEQ ID NO: 2065512 - RNA, 19 nt, Artificial Sequence
  Description of Artificial Sequence: Synthetic oligonucleotide
gugaucuggacguggucac

SEQ ID NO: 2065513 - RNA, 19 nt, Artificial Sequence
  Description of Artificial Sequence: Synthetic oligonucleotide
cgcaagaacugcacgaucc

SEQ ID NO: 2065514 - RNA, 19 nt, Artificial Sequence
  Description of Artificial Sequence: Synthetic oligonucleotide
ucauagugaccggagccgu

SEQ ID NO: 2065515 - RNA, 19 nt, Artificial Sequence
  Description of Artificial Sequence: Synthetic oligonucleotide
uagugaccggagccgucgg

SEQ ID NO: 2065516 - RNA, 19 nt, Artificial Sequence
  Description of Artificial Sequence: Synthetic oligonucleotide
agugaccggagccgucggg

SEQ ID NO: 2065517 - RNA, 19 nt, Artificial Sequence
  Description of Artificial Sequence: Synthetic oligonucleotide
gagggagcgggugccacgg

SEQ ID NO: 2065518 - RNA, 19 nt, Artificial Sequence
  Description of Artificial Sequence: Synthetic oligonucleotide
uccggaugaucccgaagaa

SEQ ID NO: 2065519 - RNA, 19 nt, Artificial Sequence
  Description of Artificial Sequence: Synthetic oligonucleotide
ugcaguccauuagaugaca

SEQ ID NO: 2065520 - RNA, 19 nt, Artificial Sequence
  Description of Artificial Sequence: Synthetic oligonucleotide
agcugugaucuggacgugg

SEQ ID NO: 2065521 - RNA, 19 nt, Artificial Sequence
  Description of Artificial Sequence: Synthetic oligonucleotide
gguugaaagauguuucacu

SEQ ID NO: 2065522 - RNA, 19 nt, Artificial Sequence
  Description of Artificial Sequence: Synthetic oligonucleotide
agggaacacguggugguuc

SEQ ID NO: 2065523 - RNA, 19 nt, Artificial Sequence
  Description of Artificial Sequence: Synthetic oligonucleotide
guccgagcagcacugguca

SEQ ID NO: 2065524 - RNA, 19 nt, Artificial Sequence
  Description of Artificial Sequence: Synthetic oligonucleotide
agaaugcaguccauuagau

SEQ ID NO: 2065525 - RNA, 19 nt, Artificial Sequence
  Description of Artificial Sequence: Synthetic oligonucleotide
acgauccgguccgagcagc

SEQ ID NO: 2065526 - RNA, 19 nt, Artificial Sequence
  Description of Artificial Sequence: Synthetic oligonucleotide
caccugcagagcaauguuc

SEQ ID NO: 2065527 - RNA, 19 nt, Artificial Sequence
  Description of Artificial Sequence: Synthetic oligonucleotide
aauagcccaaggcccugua

SEQ ID NO: 2065528 - RNA, 19 nt, Artificial Sequence
  Description of Artificial Sequence: Synthetic oligonucleotide
caucaaugaaaugucggaa

SEQ ID NO: 2065529 - RNA, 19 nt, Artificial Sequence
  Description of Artificial Sequence: Synthetic oligonucleotide
uggugguucagagcugugu

SEQ ID NO: 2065530 - RNA, 19 nt, Artificial Sequence
  Description of Artificial Sequence: Synthetic oligonucleotide
auccgguccgagcagcacu

SEQ ID NO: 2065531 - RNA, 19 nt, Artificial Sequence
  Description of Artificial Sequence: Synthetic oligonucleotide
gcccuguagaagcaguucc

SEQ ID NO: 2065532 - RNA, 19 nt, Artificial Sequence
  Description of Artificial Sequence: Synthetic oligonucleotide
uuuacccaaaaggcuguau

SEQ ID NO: 2065533 - RNA, 19 nt, Artificial Sequence
  Description of Artificial Sequence: Synthetic oligonucleotide
aagcaguucccaucuccuu

SEQ ID NO: 2065534 - RNA, 19 nt, Artificial Sequence
  Description of Artificial Sequence: Synthetic oligonucleotide
aggcuggacaccgagcugu

SEQ ID NO: 2065535 - RNA, 19 nt, Artificial Sequence
  Description of Artificial Sequence: Synthetic oligonucleotide
acaccgagcuguccuucuc

SEQ ID NO: 2065536 - RNA, 19 nt, Artificial Sequence
  Description of Artificial Sequence: Synthetic oligonucleotide
ccauuagaugacaggcucc

SEQ ID NO: 2065537 - RNA, 19 nt, Artificial Sequence
  Description of Artificial Sequence: Synthetic oligonucleotide
guuguagugggauguuuua

SEQ ID NO: 2065538 - RNA, 19 nt, Artificial Sequence
  Description of Artificial Sequence: Synthetic oligonucleotide
acaggcuccggcauggccu

SEQ ID NO: 2065539 - RNA, 19 nt, Artificial Sequence
  Description of Artificial Sequence: Synthetic oligonucleotide
gucuuucggauugagguaa

SEQ ID NO: 2065540 - RNA, 19 nt, Artificial Sequence
  Description of Artificial Sequence: Synthetic oligonucleotide
gggucuguagcacacgcuc

SEQ ID NO: 2065541 - RNA, 19 nt, Artificial Sequence
  Description of Artificial Sequence: Synthetic oligonucleotide
uuuuccggaugaucccgaa

SEQ ID NO: 2065542 - RNA, 19 nt, Artificial Sequence
  Description of Artificial Sequence: Synthetic oligonucleotide
agcgggugccacgggaggc

SEQ ID NO: 2065543 - RNA, 19 nt, Artificial Sequence
  Description of Artificial Sequence: Synthetic oligonucleotide
caguccauagugggcacag

SEQ ID NO: 2065544 - RNA, 19 nt, Artificial Sequence
  Description of Artificial Sequence: Synthetic oligonucleotide
ggaucucucggcucuugcc

SEQ ID NO: 2065545 - RNA, 19 nt, Artificial Sequence
  Description of Artificial Sequence: Synthetic oligonucleotide
auaaacggaagggguggca

SEQ ID NO: 2065546 - RNA, 19 nt, Artificial Sequence
  Description of Artificial Sequence: Synthetic oligonucleotide
uggggcgagcgcagaauac

SEQ ID NO: 2065547 - RNA, 19 nt, Artificial Sequence
  Description of Artificial Sequence: Synthetic oligonucleotide
cauuuggggucuguagcac

SEQ ID NO: 2065548 - RNA, 19 nt, Artificial Sequence
  Description of Artificial Sequence: Synthetic oligonucleotide
uucugauauuagguugaaa

SEQ ID NO: 2065549 - RNA, 19 nt, Artificial Sequence
  Description of Artificial Sequence: Synthetic oligonucleotide
auagugggcacaggucuca

SEQ ID NO: 2065550 - RNA, 19 nt, Artificial Sequence
  Description of Artificial Sequence: Synthetic oligonucleotide
aggcuguauguuucuaguu

SEQ ID NO: 2065551 - RNA, 19 nt, Artificial Sequence
  Description of Artificial Sequence: Synthetic oligonucleotide
aguucccaucuccuuuggu

SEQ ID NO: 2065552 - RNA, 19 nt, Artificial Sequence
  Description of Artificial Sequence: Synthetic oligonucleotide
auucagaaugcaguccauu

SEQ ID NO: 2065553 - RNA, 19 nt, Artificial Sequence
  Description of Artificial Sequence: Synthetic oligonucleotide
cacgggaggcgcugggcgg

SEQ ID NO: 2065554 - RNA, 19 nt, Artificial Sequence
  Description of Artificial Sequence: Synthetic oligonucleotide
agcccaaggcccuguagaa

SEQ ID NO: 2065555 - RNA, 19 nt, Artificial Sequence
  Description of Artificial Sequence: Synthetic oligonucleotide
guccauagugggcacaggu

SEQ ID NO: 2065556 - RNA, 19 nt, Artificial Sequence
  Description of Artificial Sequence: Synthetic oligonucleotide
caaugaaaugucggaagaa

SEQ ID NO: 2065557 - RNA, 19 nt, Artificial Sequence
  Description of Artificial Sequence: Synthetic oligonucleotide
cauagugaccggagccguc

SEQ ID NO: 2065558 - RNA, 19 nt, Artificial Sequence
  Description of Artificial Sequence: Synthetic oligonucleotide
caauguucagugccugcga

SEQ ID NO: 2065559 - RNA, 19 nt, Artificial Sequence
  Description of Artificial Sequence: Synthetic oligonucleotide
auguuuuauagagcagaua

SEQ ID NO: 2065560 - RNA, 19 nt, Artificial Sequence
  Description of Artificial Sequence: Synthetic oligonucleotide
gaacacguggugguucaga

SEQ ID NO: 2065561 - RNA, 19 nt, Artificial Sequence
  Description of Artificial Sequence: Synthetic oligonucleotide
augaucccgaagaauggau

SEQ ID NO: 2065562 - RNA, 19 nt, Artificial Sequence
  Description of Artificial Sequence: Synthetic oligonucleotide
cacgcucuuugaacuugag

SEQ ID NO: 2065563 - RNA, 19 nt, Artificial Sequence
  Description of Artificial Sequence: Synthetic oligonucleotide
gcuguauguuucuaguugu

SEQ ID NO: 2065564 - RNA, 19 nt, Artificial Sequence
  Description of Artificial Sequence: Synthetic oligonucleotide
cagguaggaauagcccaag

SEQ ID NO: 2065565 - RNA, 19 nt, Artificial Sequence
  Description of Artificial Sequence: Synthetic oligonucleotide
cucugguaaauucuguuuu

SEQ ID NO: 2065566 - RNA, 19 nt, Artificial Sequence
  Description of Artificial Sequence: Synthetic oligonucleotide
cgaagaauggauaggaugu

SEQ ID NO: 2065567 - RNA, 19 nt, Artificial Sequence
  Description of Artificial Sequence: Synthetic oligonucleotide
cacgucccgccccagcgag

SEQ ID NO: 2065568 - RNA, 19 nt, Artificial Sequence
  Description of Artificial Sequence: Synthetic oligonucleotide
ugaucuggacguggucaca

SEQ ID NO: 2065569 - RNA, 19 nt, Artificial Sequence
  Description of Artificial Sequence: Synthetic oligonucleotide
agucagcucgguuccugau

SEQ ID NO: 2065570 - RNA, 19 nt, Artificial Sequence
  Description of Artificial Sequence: Synthetic oligonucleotide
ggcuccacuucaugagugc

SEQ ID NO: 2065571 - RNA, 19 nt, Artificial Sequence
  Description of Artificial Sequence: Synthetic oligonucleotide
cgagcuguccuucucuacc

SEQ ID NO: 2065572 - RNA, 19 nt, Artificial Sequence
  Description of Artificial Sequence: Synthetic oligonucleotide
cacgauccgguccgagcag

SEQ ID NO: 2065573 - RNA, 19 nt, Artificial Sequence
  Description of Artificial Sequence: Synthetic oligonucleotide
cacacuccauggccauggg

SEQ ID NO: 2065574 - RNA, 19 nt, Artificial Sequence
  Description of Artificial Sequence: Synthetic oligonucleotide
gcacgauccgguccgagca

SEQ ID NO: 2065575 - RNA, 19 nt, Artificial Sequence
  Description of Artificial Sequence: Synthetic oligonucleotide
guugggucgggcggcgcgg

SEQ ID NO: 2065576 - RNA, 19 nt, Artificial Sequence
  Description of Artificial Sequence: Synthetic oligonucleotide
gggauguuuuauagagcag

SEQ ID NO: 2065577 - RNA, 19 nt, Artificial Sequence
  Description of Artificial Sequence: Synthetic oligonucleotide
uguggggcgagcgcagaau

SEQ ID NO: 2065578 - RNA, 19 nt, Artificial Sequence
  Description of Artificial Sequence: Synthetic oligonucleotide
ggcagccucagggaacacg

SEQ ID NO: 2065579 - RNA, 19 nt, Artificial Sequence
  Description of Artificial Sequence: Synthetic oligonucleotide
caggcauuacaucaucuau

SEQ ID NO: 2065580 - RNA, 19 nt, Artificial Sequence
  Description of Artificial Sequence: Synthetic oligonucleotide
ccuaaaauuaguaguguuu

SEQ ID NO: 2065581 - RNA, 19 nt, Artificial Sequence
  Description of Artificial Sequence: Synthetic oligonucleotide
cagaguuagcaggcauuac

SEQ ID NO: 2065582 - RNA, 19 nt, Artificial Sequence
  Description of Artificial Sequence: Synthetic oligonucleotide
ggccgaugugagcaggcgc

SEQ ID NO: 2065583 - RNA, 19 nt, Artificial Sequence
  Description of Artificial Sequence: Synthetic oligonucleotide
agcgaggagggagcgggug

SEQ ID NO: 2065584 - RNA, 19 nt, Artificial Sequence
  Description of Artificial Sequence: Synthetic oligonucleotide
gugccugcgacagagcugu

SEQ ID NO: 2065585 - RNA, 19 nt, Artificial Sequence
  Description of Artificial Sequence: Synthetic oligonucleotide
ucccaucuccuuuggucuu

SEQ ID NO: 2065586 - RNA, 19 nt, Artificial Sequence
  Description of Artificial Sequence: Synthetic oligonucleotide
accgagcuguccuucucua

SEQ ID NO: 2065587 - RNA, 19 nt, Artificial Sequence
  Description of Artificial Sequence: Synthetic oligonucleotide
guuuuccggaugaucccga

SEQ ID NO: 2065588 - RNA, 19 nt, Artificial Sequence
  Description of Artificial Sequence: Synthetic oligonucleotide
cuggacaccgagcuguccu

SEQ ID NO: 2065589 - RNA, 19 nt, Artificial Sequence
  Description of Artificial Sequence: Synthetic oligonucleotide
agccgucgggccacguccc

SEQ ID NO: 2065590 - RNA, 19 nt, Artificial Sequence
  Description of Artificial Sequence: Synthetic oligonucleotide
agcaggcgcaagaacugca

SEQ ID NO: 2065591 - RNA, 19 nt, Artificial Sequence
  Description of Artificial Sequence: Synthetic oligonucleotide
ggucuuucggauugaggua

SEQ ID NO: 2065592 - RNA, 19 nt, Artificial Sequence
  Description of Artificial Sequence: Synthetic oligonucleotide
gauccgguccgagcagcac

SEQ ID NO: 2065593 - RNA, 19 nt, Artificial Sequence
  Description of Artificial Sequence: Synthetic oligonucleotide
acacgcucuuugaacuuga

SEQ ID NO: 2065594 - RNA, 19 nt, Artificial Sequence
  Description of Artificial Sequence: Synthetic oligonucleotide
gaaggucauuuggggucug

SEQ ID NO: 2065595 - RNA, 19 nt, Artificial Sequence
  Description of Artificial Sequence: Synthetic oligonucleotide
ccacgggaggcgcugggcg

SEQ ID NO: 2065596 - RNA, 19 nt, Artificial Sequence
  Description of Artificial Sequence: Synthetic oligonucleotide
guccauuagaugacaggcu

SEQ ID NO: 2065597 - RNA, 19 nt, Artificial Sequence
  Description of Artificial Sequence: Synthetic oligonucleotide
gcagaauguuccauucaga

SEQ ID NO: 2065598 - RNA, 19 nt, Artificial Sequence
  Description of Artificial Sequence: Synthetic oligonucleotide
gacaccgagcuguccuucu

SEQ ID NO: 2065599 - RNA, 19 nt, Artificial Sequence
  Description of Artificial Sequence: Synthetic oligonucleotide
ggagcgggugccacgggag

SEQ ID NO: 2065600 - RNA, 19 nt, Artificial Sequence
  Description of Artificial Sequence: Synthetic oligonucleotide
agaagucagcucgguuccu

SEQ ID NO: 2065601 - RNA, 19 nt, Artificial Sequence
  Description of Artificial Sequence: Synthetic oligonucleotide
gccgaugugagcaggcgca

SEQ ID NO: 2065602 - RNA, 19 nt, Artificial Sequence
  Description of Artificial Sequence: Synthetic oligonucleotide
agggagcgggugccacggg

SEQ ID NO: 2065603 - RNA, 19 nt, Artificial Sequence
  Description of Artificial Sequence: Synthetic oligonucleotide
uccgagcagcacuggucau

SEQ ID NO: 2065604 - RNA, 19 nt, Artificial Sequence
  Description of Artificial Sequence: Synthetic oligonucleotide
guggggcgagcgcagaaua

SEQ ID NO: 2065605 - RNA, 19 nt, Artificial Sequence
  Description of Artificial Sequence: Synthetic oligonucleotide
caugagugcagaagucuuu

SEQ ID NO: 2065606 - RNA, 19 nt, Artificial Sequence
  Description of Artificial Sequence: Synthetic oligonucleotide
ccggcauggccuaaaauua

SEQ ID NO: 2065607 - RNA, 19 nt, Artificial Sequence
  Description of Artificial Sequence: Synthetic oligonucleotide
gaggcgcugggcggcuccg

SEQ ID NO: 2065608 - RNA, 19 nt, Artificial Sequence
  Description of Artificial Sequence: Synthetic oligonucleotide
gguccgagcagcacugguc

SEQ ID NO: 2065609 - RNA, 19 nt, Artificial Sequence
  Description of Artificial Sequence: Synthetic oligonucleotide
ggcgagcgcagaauacacc

SEQ ID NO: 2065610 - RNA, 19 nt, Artificial Sequence
  Description of Artificial Sequence: Synthetic oligonucleotide
ccuauuaagucaugacagu

SEQ ID NO: 2065611 - RNA, 19 nt, Artificial Sequence
  Description of Artificial Sequence: Synthetic oligonucleotide
gguggcagccucagggaac

SEQ ID NO: 2065612 - RNA, 19 nt, Artificial Sequence
  Description of Artificial Sequence: Synthetic oligonucleotide
cggcauggccuaaaauuag

SEQ ID NO: 2065613 - RNA, 19 nt, Artificial Sequence
  Description of Artificial Sequence: Synthetic oligonucleotide
cagcucuaccacacuguaa

SEQ ID NO: 2065614 - RNA, 19 nt, Artificial Sequence
  Description of Artificial Sequence: Synthetic oligonucleotide
gccuaaaauuaguaguguu

SEQ ID NO: 2065615 - RNA, 19 nt, Artificial Sequence
  Description of Artificial Sequence: Synthetic oligonucleotide
gucuguagcacacgcucuu

SEQ ID NO: 2065616 - RNA, 19 nt, Artificial Sequence
  Description of Artificial Sequence: Synthetic oligonucleotide
ggaauagcccaaggcccug

SEQ ID NO: 2065617 - RNA, 19 nt, Artificial Sequence
  Description of Artificial Sequence: Synthetic oligonucleotide
ugacaggcuccggcauggc

SEQ ID NO: 2065618 - RNA, 19 nt, Artificial Sequence
  Description of Artificial Sequence: Synthetic oligonucleotide
cugcagagcaauguucagu

SEQ ID NO: 2065619 - RNA, 19 nt, Artificial Sequence
  Description of Artificial Sequence: Synthetic oligonucleotide
ggggcgagcgcagaauaca

SEQ ID NO: 2065620 - RNA, 19 nt, Artificial Sequence
  Description of Artificial Sequence: Synthetic oligonucleotide
ggcuccgccguugggucgg

SEQ ID NO: 2065621 - RNA, 19 nt, Artificial Sequence
  Description of Artificial Sequence: Synthetic oligonucleotide
guucagugccugcgacaga

SEQ ID NO: 2065622 - RNA, 19 nt, Artificial Sequence
  Description of Artificial Sequence: Synthetic oligonucleotide
gaauagcccaaggcccugu

SEQ ID NO: 2065623 - RNA, 19 nt, Artificial Sequence
  Description of Artificial Sequence: Synthetic oligonucleotide
ggugccacgggaggcgcug

SEQ ID NO: 2065624 - RNA, 19 nt, Artificial Sequence
  Description of Artificial Sequence: Synthetic oligonucleotide
gggcgagcgcagaauacac

SEQ ID NO: 2065625 - RNA, 19 nt, Artificial Sequence
  Description of Artificial Sequence: Synthetic oligonucleotide
ccuguagaagcaguuccca

SEQ ID NO: 2065626 - RNA, 19 nt, Artificial Sequence
  Description of Artificial Sequence: Synthetic oligonucleotide
cauucagaaugcaguccau

SEQ ID NO: 2065627 - RNA, 19 nt, Artificial Sequence
  Description of Artificial Sequence: Synthetic oligonucleotide
gcauggccuaaaauuagua

SEQ ID NO: 2065628 - RNA, 19 nt, Artificial Sequence
  Description of Artificial Sequence: Synthetic oligonucleotide
cugcacgauccgguccgag

SEQ ID NO: 2065629 - RNA, 19 nt, Artificial Sequence
  Description of Artificial Sequence: Synthetic oligonucleotide
gcuccacuucaugagugca

SEQ ID NO: 2065630 - RNA, 19 nt, Artificial Sequence
  Description of Artificial Sequence: Synthetic oligonucleotide
gcgcaagaacugcacgauc

SEQ ID NO: 2065631 - RNA, 19 nt, Artificial Sequence
  Description of Artificial Sequence: Synthetic oligonucleotide
gggagcgggugccacggga

SEQ ID NO: 2065632 - RNA, 19 nt, Artificial Sequence
  Description of Artificial Sequence: Synthetic oligonucleotide
ccgccguugggucgggcgg

SEQ ID NO: 2065633 - RNA, 19 nt, Artificial Sequence
  Description of Artificial Sequence: Synthetic oligonucleotide
acguggugguucagagcug

SEQ ID NO: 2065634 - RNA, 19 nt, Artificial Sequence
  Description of Artificial Sequence: Synthetic oligonucleotide
gcgggugccacgggaggcg

SEQ ID NO: 2065635 - RNA, 19 nt, Artificial Sequence
  Description of Artificial Sequence: Synthetic oligonucleotide
guggugguucagagcugug

SEQ ID NO: 2065636 - RNA, 19 nt, Artificial Sequence
  Description of Artificial Sequence: Synthetic oligonucleotide
cuuuacccaaaaggcugua

SEQ ID NO: 2065637 - RNA, 19 nt, Artificial Sequence
  Description of Artificial Sequence: Synthetic oligonucleotide
gucgggccacgucccgccc

SEQ ID NO: 2065638 - RNA, 19 nt, Artificial Sequence
  Description of Artificial Sequence: Synthetic oligonucleotide
guguggggcgagcgcagaa

SEQ ID NO: 2065639 - RNA, 19 nt, Artificial Sequence
  Description of Artificial Sequence: Synthetic oligonucleotide
ggcauggccuaaaauuagu

SEQ ID NO: 2065640 - RNA, 19 nt, Artificial Sequence
  Description of Artificial Sequence: Synthetic oligonucleotide
gcucuaccacacuguaaaa

SEQ ID NO: 2065641 - RNA, 19 nt, Artificial Sequence
  Description of Artificial Sequence: Synthetic oligonucleotide
aggcccuguagaagcaguu

SEQ ID NO: 2065642 - RNA, 19 nt, Artificial Sequence
  Description of Artificial Sequence: Synthetic oligonucleotide
ggagccgucgggccacguc

SEQ ID NO: 2065643 - RNA, 19 nt, Artificial Sequence
  Description of Artificial Sequence: Synthetic oligonucleotide
ccgagcuguccuucucuac

SEQ ID NO: 2065644 - RNA, 19 nt, Artificial Sequence
  Description of Artificial Sequence: Synthetic oligonucleotide
gcuuuacccaaaaggcugu

SEQ ID NO: 2065645 - RNA, 19 nt, Artificial Sequence
  Description of Artificial Sequence: Synthetic oligonucleotide
cguugggucgggcggcgcg

SEQ ID NO: 2065646 - RNA, 19 nt, Artificial Sequence
  Description of Artificial Sequence: Synthetic oligonucleotide
ccagaguuagcaggcauua

SEQ ID NO: 2065647 - RNA, 19 nt, Artificial Sequence
  Description of Artificial Sequence: Synthetic oligonucleotide
acugcacgauccgguccga

SEQ ID NO: 2065648 - RNA, 19 nt, Artificial Sequence
  Description of Artificial Sequence: Synthetic oligonucleotide
ugccugcgacagagcugug

SEQ ID NO: 2065649 - RNA, 19 nt, Artificial Sequence
  Description of Artificial Sequence: Synthetic oligonucleotide
ggauugagguaaaucuuuu

SEQ ID NO: 2065650 - RNA, 19 nt, Artificial Sequence
  Description of Artificial Sequence: Synthetic oligonucleotide
cugggcggcuccgccguug

SEQ ID NO: 2065651 - RNA, 19 nt, Artificial Sequence
  Description of Artificial Sequence: Synthetic oligonucleotide
gguccagaguuagcaggca

SEQ ID NO: 2065652 - RNA, 19 nt, Artificial Sequence
  Description of Artificial Sequence: Synthetic oligonucleotide
gccucgcggguguggggcg

SEQ ID NO: 2065653 - RNA, 19 nt, Artificial Sequence
  Description of Artificial Sequence: Synthetic oligonucleotide
gcggguguggggcgagcgc

SEQ ID NO: 2065654 - RNA, 19 nt, Artificial Sequence
  Description of Artificial Sequence: Synthetic oligonucleotide
caggcuccggcauggccua

SEQ ID NO: 2065655 - RNA, 19 nt, Artificial Sequence
  Description of Artificial Sequence: Synthetic oligonucleotide
cccaaaaggcuguauguuu

SEQ ID NO: 2065656 - RNA, 19 nt, Artificial Sequence
  Description of Artificial Sequence: Synthetic oligonucleotide
cucgcggguguggggcgag

SEQ ID NO: 2065657 - RNA, 19 nt, Artificial Sequence
  Description of Artificial Sequence: Synthetic oligonucleotide
gcggcuccgccguuggguc

SEQ ID NO: 2065658 - RNA, 19 nt, Artificial Sequence
  Description of Artificial Sequence: Synthetic oligonucleotide
ccucugguaaauucuguuu

SEQ ID NO: 2065659 - RNA, 19 nt, Artificial Sequence
  Description of Artificial Sequence: Synthetic oligonucleotide
acgucccgccccagcgagg

SEQ ID NO: 2065660 - RNA, 19 nt, Artificial Sequence
  Description of Artificial Sequence: Synthetic oligonucleotide
ggacaccgagcuguccuuc

SEQ ID NO: 2065661 - RNA, 19 nt, Artificial Sequence
  Description of Artificial Sequence: Synthetic oligonucleotide
ggucuguagcacacgcucu

SEQ ID NO: 2065662 - RNA, 19 nt, Artificial Sequence
  Description of Artificial Sequence: Synthetic oligonucleotide
ggguguggggcgagcgcag

SEQ ID NO: 2065663 - RNA, 19 nt, Artificial Sequence
  Description of Artificial Sequence: Synthetic oligonucleotide
ggucacacuccauggccau

SEQ ID NO: 2065664 - RNA, 19 nt, Artificial Sequence
  Description of Artificial Sequence: Synthetic oligonucleotide
gccgucgggccacgucccg

SEQ ID NO: 2065665 - RNA, 19 nt, Artificial Sequence
  Description of Artificial Sequence: Synthetic oligonucleotide
ggccacgucccgccccagc

SEQ ID NO: 2065666 - RNA, 19 nt, Artificial Sequence
  Description of Artificial Sequence: Synthetic oligonucleotide
cuuucggauugagguaaau

SEQ ID NO: 2065667 - RNA, 19 nt, Artificial Sequence
  Description of Artificial Sequence: Synthetic oligonucleotide
ucgcggguguggggcgagc

SEQ ID NO: 2065668 - RNA, 19 nt, Artificial Sequence
  Description of Artificial Sequence: Synthetic oligonucleotide
caccuucagcaggcuggac

SEQ ID NO: 2065669 - RNA, 19 nt, Artificial Sequence
  Description of Artificial Sequence: Synthetic oligonucleotide
gccugcgacagagcuguga

SEQ ID NO: 2065670 - RNA, 19 nt, Artificial Sequence
  Description of Artificial Sequence: Synthetic oligonucleotide
gggucgggcggcgcgggcc

SEQ ID NO: 2065671 - RNA, 19 nt, Artificial Sequence
  Description of Artificial Sequence: Synthetic oligonucleotide
ggcgcaagaacugcacgau

SEQ ID NO: 2065672 - RNA, 19 nt, Artificial Sequence
  Description of Artificial Sequence: Synthetic oligonucleotide
gucccgccccagcgaggag

SEQ ID NO: 2065673 - RNA, 19 nt, Artificial Sequence
  Description of Artificial Sequence: Synthetic oligonucleotide
cggauugagguaaaucuuu

SEQ ID NO: 2065674 - RNA, 19 nt, Artificial Sequence
  Description of Artificial Sequence: Synthetic oligonucleotide
gccucagggaacacguggu

SEQ ID NO: 2065675 - RNA, 19 nt, Artificial Sequence
  Description of Artificial Sequence: Synthetic oligonucleotide
gcuccggcauggccuaaaa

SEQ ID NO: 2065676 - RNA, 19 nt, Artificial Sequence
  Description of Artificial Sequence: Synthetic oligonucleotide
ggauaggaugucacauuuu

SEQ ID NO: 2065677 - RNA, 19 nt, Artificial Sequence
  Description of Artificial Sequence: Synthetic oligonucleotide
cgaugugagcaggcgcaag

SEQ ID NO: 2065678 - RNA, 19 nt, Artificial Sequence
  Description of Artificial Sequence: Synthetic oligonucleotide
cuccggcauggccuaaaau

SEQ ID NO: 2065679 - RNA, 19 nt, Artificial Sequence
  Description of Artificial Sequence: Synthetic oligonucleotide
cagcucgguuccugaugaa

SEQ ID NO: 2065680 - RNA, 19 nt, Artificial Sequence
  Description of Artificial Sequence: Synthetic oligonucleotide
gguguggggcgagcgcaga

SEQ ID NO: 2065681 - RNA, 19 nt, Artificial Sequence
  Description of Artificial Sequence: Synthetic oligonucleotide
ggucucaguucaguggcuu

SEQ ID NO: 2065682 - RNA, 19 nt, Artificial Sequence
  Description of Artificial Sequence: Synthetic oligonucleotide
cccagcgaggagggagcgg

SEQ ID NO: 2065683 - RNA, 19 nt, Artificial Sequence
  Description of Artificial Sequence: Synthetic oligonucleotide
ccccagcgaggagggagcg

SEQ ID NO: 2065684 - RNA, 19 nt, Artificial Sequence
  Description of Artificial Sequence: Synthetic oligonucleotide
gggcggcuccgccguuggg

SEQ ID NO: 2065685 - RNA, 19 nt, Artificial Sequence
  Description of Artificial Sequence: Synthetic oligonucleotide
ggcggcuccgccguugggu

SEQ ID NO: 2065686 - RNA, 19 nt, Artificial Sequence
  Description of Artificial Sequence: Synthetic oligonucleotide
cuccgccguugggucgggc

SEQ ID NO: 2065687 - RNA, 19 nt, Artificial Sequence
  Description of Artificial Sequence: Synthetic oligonucleotide
cgcggguguggggcgagcg

SEQ ID NO: 2065688 - RNA, 19 nt, Artificial Sequence
  Description of Artificial Sequence: Synthetic oligonucleotide
cggcuccgccguugggucg

SEQ ID NO: 2065689 - RNA, 19 nt, Artificial Sequence
  Description of Artificial Sequence: Synthetic oligonucleotide
ccgucgggccacgucccgc

SEQ ID NO: 2065690 - RNA, 19 nt, Artificial Sequence
  Description of Artificial Sequence: Synthetic oligonucleotide
ccgguccgagcagcacugg

SEQ ID NO: 2065691 - RNA, 19 nt, Artificial Sequence
  Description of Artificial Sequence: Synthetic oligonucleotide
ccacgucccgccccagcga

SEQ ID NO: 2065692 - RNA, 19 nt, Artificial Sequence
  Description of Artificial Sequence: Synthetic oligonucleotide
cagcgaggagggagcgggu

SEQ ID NO: 2065693 - RNA, 19 nt, Artificial Sequence
  Description of Artificial Sequence: Synthetic oligonucleotide
cagggaacacguggugguu

SEQ ID NO: 2065694 - RNA, 19 nt, Artificial Sequence
  Description of Artificial Sequence: Synthetic oligonucleotide
ccggaugaucccgaagaau

SEQ ID NO: 2065695 - RNA, 19 nt, Artificial Sequence
  Description of Artificial Sequence: Synthetic oligonucleotide
gcuccgccguugggucggg

SEQ ID NO: 2065696 - RNA, 19 nt, Artificial Sequence
  Description of Artificial Sequence: Synthetic oligonucleotide
cgucccgccccagcgagga

SEQ ID NO: 2065697 - RNA, 19 nt, Artificial Sequence
  Description of Artificial Sequence: Synthetic oligonucleotide
aggcuccggcauggccuaa

SEQ ID NO: 2065698 - RNA, 19 nt, Artificial Sequence
  Description of Artificial Sequence: Synthetic oligonucleotide
ccgaugugagcaggcgcaa

SEQ ID NO: 2065699 - RNA, 19 nt, Artificial Sequence
  Description of Artificial Sequence: Synthetic oligonucleotide
ccguugggucgggcggcgc

SEQ ID NO: 2065700 - RNA, 19 nt, Artificial Sequence
  Description of Artificial Sequence: Synthetic oligonucleotide
gucgggcggcgcgggccuc

SEQ ID NO: 2065701 - RNA, 19 nt, Artificial Sequence
  Description of Artificial Sequence: Synthetic oligonucleotide
cgggccacgucccgcccca

SEQ ID NO: 2065702 - RNA, 19 nt, Artificial Sequence
  Description of Artificial Sequence: Synthetic oligonucleotide
ccucgcggguguggggcga

SEQ ID NO: 2065703 - RNA, 19 nt, Artificial Sequence
  Description of Artificial Sequence: Synthetic oligonucleotide
gcgcgggccucgcgggugu

SEQ ID NO: 2065704 - RNA, 19 nt, Artificial Sequence
  Description of Artificial Sequence: Synthetic oligonucleotide
cgguccgagcagcacuggu

SEQ ID NO: 2065705 - RNA, 19 nt, Artificial Sequence
  Description of Artificial Sequence: Synthetic oligonucleotide
gggugccacgggaggcgcu

SEQ ID NO: 2065706 - RNA, 19 nt, Artificial Sequence
  Description of Artificial Sequence: Synthetic oligonucleotide
gcugggcggcuccgccguu

SEQ ID NO: 2065707 - RNA, 19 nt, Artificial Sequence
  Description of Artificial Sequence: Synthetic oligonucleotide
cgcgggccucgcgggugug

SEQ ID NO: 2065708 - RNA, 19 nt, Artificial Sequence
  Description of Artificial Sequence: Synthetic oligonucleotide
ccgccccagcgaggaggga

SEQ ID NO: 2065709 - RNA, 19 nt, Artificial Sequence
  Description of Artificial Sequence: Synthetic oligonucleotide
cggagccgucgggccacgu

SEQ ID NO: 2065710 - RNA, 19 nt, Artificial Sequence
  Description of Artificial Sequence: Synthetic oligonucleotide
acauucauaaaauagccuc

SEQ ID NO: 2065711 - RNA, 19 nt, Artificial Sequence
  Description of Artificial Sequence: Synthetic oligonucleotide
uauauuagagucuugucag

SEQ ID NO: 2065712 - RNA, 19 nt, Artificial Sequence
  Description of Artificial Sequence: Synthetic oligonucleotide
uuauauuagagucuuguca

SEQ ID NO: 2065713 - RNA, 19 nt, Artificial Sequence
  Description of Artificial Sequence: Synthetic oligonucleotide
aacaauuggagcugccugc

SEQ ID NO: 2065714 - RNA, 19 nt, Artificial Sequence
  Description of Artificial Sequence: Synthetic oligonucleotide
caagggaauacccagaacg

SEQ ID NO: 2065715 - RNA, 19 nt, Artificial Sequence
  Description of Artificial Sequence: Synthetic oligonucleotide
aauagccucccaucaaugc

SEQ ID NO: 2065716 - RNA, 19 nt, Artificial Sequence
  Description of Artificial Sequence: Synthetic oligonucleotide
uaauaaacaaacacggcca

SEQ ID NO: 2065717 - RNA, 19 nt, Artificial Sequence
  Description of Artificial Sequence: Synthetic oligonucleotide
aaaagauuccccaugaugu

SEQ ID NO: 2065718 - RNA, 19 nt, Artificial Sequence
  Description of Artificial Sequence: Synthetic oligonucleotide
ugaagcacccacaagauac

SEQ ID NO: 2065719 - RNA, 19 nt, Artificial Sequence
  Description of Artificial Sequence: Synthetic oligonucleotide
uaaaagauuccccaugaug

SEQ ID NO: 2065720 - RNA, 19 nt, Artificial Sequence
  Description of Artificial Sequence: Synthetic oligonucleotide
cacagcauaauaaacaaac

SEQ ID NO: 2065721 - RNA, 19 nt, Artificial Sequence
  Description of Artificial Sequence: Synthetic oligonucleotide
ucaagcaacaauuggagcu

SEQ ID NO: 2065722 - RNA, 19 nt, Artificial Sequence
  Description of Artificial Sequence: Synthetic oligonucleotide
aacgagcugaauuaaaaga

SEQ ID NO: 2065723 - RNA, 19 nt, Artificial Sequence
  Description of Artificial Sequence: Synthetic oligonucleotide
uucuguagagagcaaaucc

SEQ ID NO: 2065724 - RNA, 19 nt, Artificial Sequence
  Description of Artificial Sequence: Synthetic oligonucleotide
ucugacgcaacuaucagga

SEQ ID NO: 2065725 - RNA, 19 nt, Artificial Sequence
  Description of Artificial Sequence: Synthetic oligonucleotide
uuugagacaaugcugugga

SEQ ID NO: 2065726 - RNA, 19 nt, Artificial Sequence
  Description of Artificial Sequence: Synthetic oligonucleotide
uaaccuauggacaucccag

SEQ ID NO: 2065727 - RNA, 19 nt, Artificial Sequence
  Description of Artificial Sequence: Synthetic oligonucleotide
uaaagauuccaaaggcagg

SEQ ID NO: 2065728 - RNA, 19 nt, Artificial Sequence
  Description of Artificial Sequence: Synthetic oligonucleotide
uucucgaaaauucaggauc

SEQ ID NO: 2065729 - RNA, 19 nt, Artificial Sequence
  Description of Artificial Sequence: Synthetic oligonucleotide
uauuaacuggcuuauauua

SEQ ID NO: 2065730 - RNA, 19 nt, Artificial Sequence
  Description of Artificial Sequence: Synthetic oligonucleotide
auguaugagauaaaccucc

SEQ ID NO: 2065731 - RNA, 19 nt, Artificial Sequence
  Description of Artificial Sequence: Synthetic oligonucleotide
gcaauugcaauccagaacc

SEQ ID NO: 2065732 - RNA, 19 nt, Artificial Sequence
  Description of Artificial Sequence: Synthetic oligonucleotide
auaugcagcaauugcaauc

SEQ ID NO: 2065733 - RNA, 19 nt, Artificial Sequence
  Description of Artificial Sequence: Synthetic oligonucleotide
ugaugaguagccuaaagau

SEQ ID NO: 2065734 - RNA, 19 nt, Artificial Sequence
  Description of Artificial Sequence: Synthetic oligonucleotide
aagcacuccugccagguac

SEQ ID NO: 2065735 - RNA, 19 nt, Artificial Sequence
  Description of Artificial Sequence: Synthetic oligonucleotide
aaccuauggacaucccagc

SEQ ID NO: 2065736 - RNA, 19 nt, Artificial Sequence
  Description of Artificial Sequence: Synthetic oligonucleotide
cauuucucgaaaauucagg

SEQ ID NO: 2065737 - RNA, 19 nt, Artificial Sequence
  Description of Artificial Sequence: Synthetic oligonucleotide
agcaauugcaauccagaac

SEQ ID NO: 2065738 - RNA, 19 nt, Artificial Sequence
  Description of Artificial Sequence: Synthetic oligonucleotide
augaguagccuaaagauuc

SEQ ID NO: 2065739 - RNA, 19 nt, Artificial Sequence
  Description of Artificial Sequence: Synthetic oligonucleotide
agccuaaagauuccaaagg

SEQ ID NO: 2065740 - RNA, 19 nt, Artificial Sequence
  Description of Artificial Sequence: Synthetic oligonucleotide
ugcauaugcagcaauugca

SEQ ID NO: 2065741 - RNA, 19 nt, Artificial Sequence
  Description of Artificial Sequence: Synthetic oligonucleotide
uuagagucuugucaguuug

SEQ ID NO: 2065742 - RNA, 19 nt, Artificial Sequence
  Description of Artificial Sequence: Synthetic oligonucleotide
aagauuccccaugaugugc

SEQ ID NO: 2065743 - RNA, 19 nt, Artificial Sequence
  Description of Artificial Sequence: Synthetic oligonucleotide
aacaaacacggccagcuca

SEQ ID NO: 2065744 - RNA, 19 nt, Artificial Sequence
  Description of Artificial Sequence: Synthetic oligonucleotide
cauucauaaaauagccucc

SEQ ID NO: 2065745 - RNA, 19 nt, Artificial Sequence
  Description of Artificial Sequence: Synthetic oligonucleotide
aaguauguucuucggacug

SEQ ID NO: 2065746 - RNA, 19 nt, Artificial Sequence
  Description of Artificial Sequence: Synthetic oligonucleotide
uagccuaaagauuccaaag

SEQ ID NO: 2065747 - RNA, 19 nt, Artificial Sequence
  Description of Artificial Sequence: Synthetic oligonucleotide
aaagauuccaaaggcagga

SEQ ID NO: 2065748 - RNA, 19 nt, Artificial Sequence
  Description of Artificial Sequence: Synthetic oligonucleotide
uaugcagcaauugcaaucc

SEQ ID NO: 2065749 - RNA, 19 nt, Artificial Sequence
  Description of Artificial Sequence: Synthetic oligonucleotide
cagcauaauaaacaaacac

SEQ ID NO: 2065750 - RNA, 19 nt, Artificial Sequence
  Description of Artificial Sequence: Synthetic oligonucleotide
ucucgaaaauucaggauca

SEQ ID NO: 2065751 - RNA, 19 nt, Artificial Sequence
  Description of Artificial Sequence: Synthetic oligonucleotide
uuaacuggcuuauauuaga

SEQ ID NO: 2065752 - RNA, 19 nt, Artificial Sequence
  Description of Artificial Sequence: Synthetic oligonucleotide
aaugcguagacuccuccug

SEQ ID NO: 2065753 - RNA, 19 nt, Artificial Sequence
  Description of Artificial Sequence: Synthetic oligonucleotide
ugcgaugugagccgcaaag

SEQ ID NO: 2065754 - RNA, 19 nt, Artificial Sequence
  Description of Artificial Sequence: Synthetic oligonucleotide
gaacgagcugaauuaaaag

SEQ ID NO: 2065755 - RNA, 19 nt, Artificial Sequence
  Description of Artificial Sequence: Synthetic oligonucleotide
cauaaaauagccucccauc

SEQ ID NO: 2065756 - RNA, 19 nt, Artificial Sequence
  Description of Artificial Sequence: Synthetic oligonucleotide
aaagauuccccaugaugug

SEQ ID NO: 2065757 - RNA, 19 nt, Artificial Sequence
  Description of Artificial Sequence: Synthetic oligonucleotide
uccggaagcauccacuuug

SEQ ID NO: 2065758 - RNA, 19 nt, Artificial Sequence
  Description of Artificial Sequence: Synthetic oligonucleotide
gaaccugggaucuuugagc

SEQ ID NO: 2065759 - RNA, 19 nt, Artificial Sequence
  Description of Artificial Sequence: Synthetic oligonucleotide
uaacuggcuuauauuagag

SEQ ID NO: 2065760 - RNA, 19 nt, Artificial Sequence
  Description of Artificial Sequence: Synthetic oligonucleotide
auagccucccaucaaugcg

SEQ ID NO: 2065761 - RNA, 19 nt, Artificial Sequence
  Description of Artificial Sequence: Synthetic oligonucleotide
ugauccacugcuucugagg

SEQ ID NO: 2065762 - RNA, 19 nt, Artificial Sequence
  Description of Artificial Sequence: Synthetic oligonucleotide
gaugugcuggacuccagcg

SEQ ID NO: 2065763 - RNA, 19 nt, Artificial Sequence
  Description of Artificial Sequence: Synthetic oligonucleotide
ugacgcaacuaucaggaug

SEQ ID NO: 2065764 - RNA, 19 nt, Artificial Sequence
  Description of Artificial Sequence: Synthetic oligonucleotide
aauacccagaacgagcuga

SEQ ID NO: 2065765 - RNA, 19 nt, Artificial Sequence
  Description of Artificial Sequence: Synthetic oligonucleotide
gacaaagaaccuucuguag

SEQ ID NO: 2065766 - RNA, 19 nt, Artificial Sequence
  Description of Artificial Sequence: Synthetic oligonucleotide
augaugaguagccuaaaga

SEQ ID NO: 2065767 - RNA, 19 nt, Artificial Sequence
  Description of Artificial Sequence: Synthetic oligonucleotide
auugcaauccagaaccugg

SEQ ID NO: 2065768 - RNA, 19 nt, Artificial Sequence
  Description of Artificial Sequence: Synthetic oligonucleotide
acuuuuauuaacuggcuua

SEQ ID NO: 2065769 - RNA, 19 nt, Artificial Sequence
  Description of Artificial Sequence: Synthetic oligonucleotide
ugaugaacagugguggcgg

SEQ ID NO: 2065770 - RNA, 19 nt, Artificial Sequence
  Description of Artificial Sequence: Synthetic oligonucleotide
aaaacaccgcaaauaacag

SEQ ID NO: 2065771 - RNA, 19 nt, Artificial Sequence
  Description of Artificial Sequence: Synthetic oligonucleotide
ugagauaaaccuccaggcu

SEQ ID NO: 2065772 - RNA, 19 nt, Artificial Sequence
  Description of Artificial Sequence: Synthetic oligonucleotide
auggagaugaugaacagug

SEQ ID NO: 2065773 - RNA, 19 nt, Artificial Sequence
  Description of Artificial Sequence: Synthetic oligonucleotide
agcauguaugagauaaacc

SEQ ID NO: 2065774 - RNA, 19 nt, Artificial Sequence
  Description of Artificial Sequence: Synthetic oligonucleotide
cacaagauacuuaagggga

SEQ ID NO: 2065775 - RNA, 19 nt, Artificial Sequence
  Description of Artificial Sequence: Synthetic oligonucleotide
agcugaauuaaaagauucc

SEQ ID NO: 2065776 - RNA, 19 nt, Artificial Sequence
  Description of Artificial Sequence: Synthetic oligonucleotide
uaacagacaagcugcauau

SEQ ID NO: 2065777 - RNA, 19 nt, Artificial Sequence
  Description of Artificial Sequence: Synthetic oligonucleotide
uaaaccuccaggcuucuuc

SEQ ID NO: 2065778 - RNA, 19 nt, Artificial Sequence
  Description of Artificial Sequence: Synthetic oligonucleotide
aaacaaacacggccagcuc

SEQ ID NO: 2065779 - RNA, 19 nt, Artificial Sequence
  Description of Artificial Sequence: Synthetic oligonucleotide
aaacaccgcaaauaacaga

SEQ ID NO: 2065780 - RNA, 19 nt, Artificial Sequence
  Description of Artificial Sequence: Synthetic oligonucleotide
uuggcucucuccaaguaug

SEQ ID NO: 2065781 - RNA, 19 nt, Artificial Sequence
  Description of Artificial Sequence: Synthetic oligonucleotide
aucugacgcaacuaucagg

SEQ ID NO: 2065782 - RNA, 19 nt, Artificial Sequence
  Description of Artificial Sequence: Synthetic oligonucleotide
aaauucaggaucacauuca

SEQ ID NO: 2065783 - RNA, 19 nt, Artificial Sequence
  Description of Artificial Sequence: Synthetic oligonucleotide
uaucugacgcaacuaucag

SEQ ID NO: 2065784 - RNA, 19 nt, Artificial Sequence
  Description of Artificial Sequence: Synthetic oligonucleotide
uccagcguggaccagcaug

SEQ ID NO: 2065785 - RNA, 19 nt, Artificial Sequence
  Description of Artificial Sequence: Synthetic oligonucleotide
cauguaugagauaaaccuc

SEQ ID NO: 2065786 - RNA, 19 nt, Artificial Sequence
  Description of Artificial Sequence: Synthetic oligonucleotide
accauuuccaagggaauac

SEQ ID NO: 2065787 - RNA, 19 nt, Artificial Sequence
  Description of Artificial Sequence: Synthetic oligonucleotide
cuuauauuagagucuuguc

SEQ ID NO: 2065788 - RNA, 19 nt, Artificial Sequence
  Description of Artificial Sequence: Synthetic oligonucleotide
gagcaaaucccauaucuga

SEQ ID NO: 2065789 - RNA, 19 nt, Artificial Sequence
  Description of Artificial Sequence: Synthetic oligonucleotide
caaaggacaccggagaccc

SEQ ID NO: 2065790 - RNA, 19 nt, Artificial Sequence
  Description of Artificial Sequence: Synthetic oligonucleotide
gaccuuucggcuucugggg

SEQ ID NO: 2065791 - RNA, 19 nt, Artificial Sequence
  Description of Artificial Sequence: Synthetic oligonucleotide
uaaaauagccucccaucaa

SEQ ID NO: 2065792 - RNA, 19 nt, Artificial Sequence
  Description of Artificial Sequence: Synthetic oligonucleotide
uccaaguauguucuucgga

SEQ ID NO: 2065793 - RNA, 19 nt, Artificial Sequence
  Description of Artificial Sequence: Synthetic oligonucleotide
gaaccuucuguagagagca

SEQ ID NO: 2065794 - RNA, 19 nt, Artificial Sequence
  Description of Artificial Sequence: Synthetic oligonucleotide
aauugcaauccagaaccug

SEQ ID NO: 2065795 - RNA, 19 nt, Artificial Sequence
  Description of Artificial Sequence: Synthetic oligonucleotide
auuaacuggcuuauauuag

SEQ ID NO: 2065796 - RNA, 19 nt, Artificial Sequence
  Description of Artificial Sequence: Synthetic oligonucleotide
gacgcaacuaucaggauga

SEQ ID NO: 2065797 - RNA, 19 nt, Artificial Sequence
  Description of Artificial Sequence: Synthetic oligonucleotide
ucaaugcguagacuccucc

SEQ ID NO: 2065798 - RNA, 19 nt, Artificial Sequence
  Description of Artificial Sequence: Synthetic oligonucleotide
aaucccauaucugacgcaa

SEQ ID NO: 2065799 - RNA, 19 nt, Artificial Sequence
  Description of Artificial Sequence: Synthetic oligonucleotide
cugcauaugcagcaauugc

SEQ ID NO: 2065800 - RNA, 19 nt, Artificial Sequence
  Description of Artificial Sequence: Synthetic oligonucleotide
agauaaaccuccaggcuuc

SEQ ID NO: 2065801 - RNA, 19 nt, Artificial Sequence
  Description of Artificial Sequence: Synthetic oligonucleotide
ggcacuuuuauuaacuggc

SEQ ID NO: 2065802 - RNA, 19 nt, Artificial Sequence
  Description of Artificial Sequence: Synthetic oligonucleotide
aaccuccaggcuucuuccc

SEQ ID NO: 2065803 - RNA, 19 nt, Artificial Sequence
  Description of Artificial Sequence: Synthetic oligonucleotide
aagauccccguguccagag

SEQ ID NO: 2065804 - RNA, 19 nt, Artificial Sequence
  Description of Artificial Sequence: Synthetic oligonucleotide
ccacaagauacuuaagggg

SEQ ID NO: 2065805 - RNA, 19 nt, Artificial Sequence
  Description of Artificial Sequence: Synthetic oligonucleotide
auaucugacgcaacuauca

SEQ ID NO: 2065806 - RNA, 19 nt, Artificial Sequence
  Description of Artificial Sequence: Synthetic oligonucleotide
ugaguagccuaaagauucc

SEQ ID NO: 2065807 - RNA, 19 nt, Artificial Sequence
  Description of Artificial Sequence: Synthetic oligonucleotide
gcauguaugagauaaaccu

SEQ ID NO: 2065808 - RNA, 19 nt, Artificial Sequence
  Description of Artificial Sequence: Synthetic oligonucleotide
ugaugugcuggacuccagc

SEQ ID NO: 2065809 - RNA, 19 nt, Artificial Sequence
  Description of Artificial Sequence: Synthetic oligonucleotide
gcugaauuaaaagauuccc

SEQ ID NO: 2065810 - RNA, 19 nt, Artificial Sequence
  Description of Artificial Sequence: Synthetic oligonucleotide
uccaagggaauacccagaa

SEQ ID NO: 2065811 - RNA, 19 nt, Artificial Sequence
  Description of Artificial Sequence: Synthetic oligonucleotide
uuaaaagauuccccaugau

SEQ ID NO: 2065812 - RNA, 19 nt, Artificial Sequence
  Description of Artificial Sequence: Synthetic oligonucleotide
caacaauuggagcugccug

SEQ ID NO: 2065813 - RNA, 19 nt, Artificial Sequence
  Description of Artificial Sequence: Synthetic oligonucleotide
ugucagggcgguaagugaa

SEQ ID NO: 2065814 - RNA, 19 nt, Artificial Sequence
  Description of Artificial Sequence: Synthetic oligonucleotide
aaaucccauaucugacgca

SEQ ID NO: 2065815 - RNA, 19 nt, Artificial Sequence
  Description of Artificial Sequence: Synthetic oligonucleotide
auccacuuugagacaaugc

SEQ ID NO: 2065816 - RNA, 19 nt, Artificial Sequence
  Description of Artificial Sequence: Synthetic oligonucleotide
aaauagccucccaucaaug

SEQ ID NO: 2065817 - RNA, 19 nt, Artificial Sequence
  Description of Artificial Sequence: Synthetic oligonucleotide
guaugagauaaaccuccag

SEQ ID NO: 2065818 - RNA, 19 nt, Artificial Sequence
  Description of Artificial Sequence: Synthetic oligonucleotide
aagggaauacccagaacga

SEQ ID NO: 2065819 - RNA, 19 nt, Artificial Sequence
  Description of Artificial Sequence: Synthetic oligonucleotide
cauaucugacgcaacuauc

SEQ ID NO: 2065820 - RNA, 19 nt, Artificial Sequence
  Description of Artificial Sequence: Synthetic oligonucleotide
ucgaaaauucaggaucaca

SEQ ID NO: 2065821 - RNA, 19 nt, Artificial Sequence
  Description of Artificial Sequence: Synthetic oligonucleotide
uccgccugcgaugugagcc

SEQ ID NO: 2065822 - RNA, 19 nt, Artificial Sequence
  Description of Artificial Sequence: Synthetic oligonucleotide
gauccccguguccagagug

SEQ ID NO: 2065823 - RNA, 19 nt, Artificial Sequence
  Description of Artificial Sequence: Synthetic oligonucleotide
aaauccgccugcgauguga

SEQ ID NO: 2065824 - RNA, 19 nt, Artificial Sequence
  Description of Artificial Sequence: Synthetic oligonucleotide
aguauguucuucggacugg

SEQ ID NO: 2065825 - RNA, 19 nt, Artificial Sequence
  Description of Artificial Sequence: Synthetic oligonucleotide
gccuaaagauuccaaaggc

SEQ ID NO: 2065826 - RNA, 19 nt, Artificial Sequence
  Description of Artificial Sequence: Synthetic oligonucleotide
gaugugagccgcaaaggac

SEQ ID NO: 2065827 - RNA, 19 nt, Artificial Sequence
  Description of Artificial Sequence: Synthetic oligonucleotide
ccaaguauguucuucggac

SEQ ID NO: 2065828 - RNA, 19 nt, Artificial Sequence
  Description of Artificial Sequence: Synthetic oligonucleotide
uuuccaagauccccguguc

SEQ ID NO: 2065829 - RNA, 19 nt, Artificial Sequence
  Description of Artificial Sequence: Synthetic oligonucleotide
auggacaucccagcaaauc

SEQ ID NO: 2065830 - RNA, 19 nt, Artificial Sequence
  Description of Artificial Sequence: Synthetic oligonucleotide
uguccagagugauccacug

SEQ ID NO: 2065831 - RNA, 19 nt, Artificial Sequence
  Description of Artificial Sequence: Synthetic oligonucleotide
uccaaaggcaggaaucauu

SEQ ID NO: 2065832 - RNA, 19 nt, Artificial Sequence
  Description of Artificial Sequence: Synthetic oligonucleotide
guaaccuauggacauccca

SEQ ID NO: 2065833 - RNA, 19 nt, Artificial Sequence
  Description of Artificial Sequence: Synthetic oligonucleotide
acgagcugaauuaaaagau

SEQ ID NO: 2065834 - RNA, 19 nt, Artificial Sequence
  Description of Artificial Sequence: Synthetic oligonucleotide
auacuuaaggggaucaaaa

SEQ ID NO: 2065835 - RNA, 19 nt, Artificial Sequence
  Description of Artificial Sequence: Synthetic oligonucleotide
gauacuuaaggggaucaaa

SEQ ID NO: 2065836 - RNA, 19 nt, Artificial Sequence
  Description of Artificial Sequence: Synthetic oligonucleotide
cuuccacacagcauaauaa

SEQ ID NO: 2065837 - RNA, 19 nt, Artificial Sequence
  Description of Artificial Sequence: Synthetic oligonucleotide
gagaccaaggcacagucgu

SEQ ID NO: 2065838 - RNA, 19 nt, Artificial Sequence
  Description of Artificial Sequence: Synthetic oligonucleotide
ccgcaaauaacagacaagc

SEQ ID NO: 2065839 - RNA, 19 nt, Artificial Sequence
  Description of Artificial Sequence: Synthetic oligonucleotide
cuugucagggcgguaagug

SEQ ID NO: 2065840 - RNA, 19 nt, Artificial Sequence
  Description of Artificial Sequence: Synthetic oligonucleotide
cuccaaguauguucuucgg

SEQ ID NO: 2065841 - RNA, 19 nt, Artificial Sequence
  Description of Artificial Sequence: Synthetic oligonucleotide
acacaguguaaccuaugga

SEQ ID NO: 2065842 - RNA, 19 nt, Artificial Sequence
  Description of Artificial Sequence: Synthetic oligonucleotide
auuuccaagggaauaccca

SEQ ID NO: 2065843 - RNA, 19 nt, Artificial Sequence
  Description of Artificial Sequence: Synthetic oligonucleotide
acagucgucccacaccgca

SEQ ID NO: 2065844 - RNA, 19 nt, Artificial Sequence
  Description of Artificial Sequence: Synthetic oligonucleotide
acuccgaggccuuugugga

SEQ ID NO: 2065845 - RNA, 19 nt, Artificial Sequence
  Description of Artificial Sequence: Synthetic oligonucleotide
accggagacccauuugcag

SEQ ID NO: 2065846 - RNA, 19 nt, Artificial Sequence
  Description of Artificial Sequence: Synthetic oligonucleotide
uguaaccuauggacauccc

SEQ ID NO: 2065847 - RNA, 19 nt, Artificial Sequence
  Description of Artificial Sequence: Synthetic oligonucleotide
guguaaccuauggacaucc

SEQ ID NO: 2065848 - RNA, 19 nt, Artificial Sequence
  Description of Artificial Sequence: Synthetic oligonucleotide
guagacuccuccugaagca

SEQ ID NO: 2065849 - RNA, 19 nt, Artificial Sequence
  Description of Artificial Sequence: Synthetic oligonucleotide
acaguguaaccuauggaca

SEQ ID NO: 2065850 - RNA, 19 nt, Artificial Sequence
  Description of Artificial Sequence: Synthetic oligonucleotide
ucagggcgguaagugaagg

SEQ ID NO: 2065851 - RNA, 19 nt, Artificial Sequence
  Description of Artificial Sequence: Synthetic oligonucleotide
uugucagggcgguaaguga

SEQ ID NO: 2065852 - RNA, 19 nt, Artificial Sequence
  Description of Artificial Sequence: Synthetic oligonucleotide
cuguagagagcaaauccca

SEQ ID NO: 2065853 - RNA, 19 nt, Artificial Sequence
  Description of Artificial Sequence: Synthetic oligonucleotide
agagcaaaucccauaucug

SEQ ID NO: 2065854 - RNA, 19 nt, Artificial Sequence
  Description of Artificial Sequence: Synthetic oligonucleotide
aggaaucauuucucgaaaa

SEQ ID NO: 2065855 - RNA, 19 nt, Artificial Sequence
  Description of Artificial Sequence: Synthetic oligonucleotide
agaacgagcugaauuaaaa

SEQ ID NO: 2065856 - RNA, 19 nt, Artificial Sequence
  Description of Artificial Sequence: Synthetic oligonucleotide
gagauaaaccuccaggcuu

SEQ ID NO: 2065857 - RNA, 19 nt, Artificial Sequence
  Description of Artificial Sequence: Synthetic oligonucleotide
uugucaguuugcuggggac

SEQ ID NO: 2065858 - RNA, 19 nt, Artificial Sequence
  Description of Artificial Sequence: Synthetic oligonucleotide
ugugagccgcaaaggacac

SEQ ID NO: 2065859 - RNA, 19 nt, Artificial Sequence
  Description of Artificial Sequence: Synthetic oligonucleotide
caagggaaccugcaagcac

SEQ ID NO: 2065860 - RNA, 19 nt, Artificial Sequence
  Description of Artificial Sequence: Synthetic oligonucleotide
agggacaaagaaccuucug

SEQ ID NO: 2065861 - RNA, 19 nt, Artificial Sequence
  Description of Artificial Sequence: Synthetic oligonucleotide
uuccccaugaugugcugga

SEQ ID NO: 2065862 - RNA, 19 nt, Artificial Sequence
  Description of Artificial Sequence: Synthetic oligonucleotide
agggaauacccagaacgag

SEQ ID NO: 2065863 - RNA, 19 nt, Artificial Sequence
  Description of Artificial Sequence: Synthetic oligonucleotide
ugucaguuugcuggggaca

SEQ ID NO: 2065864 - RNA, 19 nt, Artificial Sequence
  Description of Artificial Sequence: Synthetic oligonucleotide
accuauggacaucccagca

SEQ ID NO: 2065865 - RNA, 19 nt, Artificial Sequence
  Description of Artificial Sequence: Synthetic oligonucleotide
acccagaacgagcugaauu

SEQ ID NO: 2065866 - RNA, 19 nt, Artificial Sequence
  Description of Artificial Sequence: Synthetic oligonucleotide
cccaucaaugcguagacuc

SEQ ID NO: 2065867 - RNA, 19 nt, Artificial Sequence
  Description of Artificial Sequence: Synthetic oligonucleotide
ggcaagggaaccugcaagc

SEQ ID NO: 2065868 - RNA, 19 nt, Artificial Sequence
  Description of Artificial Sequence: Synthetic oligonucleotide
gacaucccagcaaauccgc

SEQ ID NO: 2065869 - RNA, 19 nt, Artificial Sequence
  Description of Artificial Sequence: Synthetic oligonucleotide
cagcugaacacaguguaac

SEQ ID NO: 2065870 - RNA, 19 nt, Artificial Sequence
  Description of Artificial Sequence: Synthetic oligonucleotide
cuauggacaucccagcaaa

SEQ ID NO: 2065871 - RNA, 19 nt, Artificial Sequence
  Description of Artificial Sequence: Synthetic oligonucleotide
uccuccugaagcacccaca

SEQ ID NO: 2065872 - RNA, 19 nt, Artificial Sequence
  Description of Artificial Sequence: Synthetic oligonucleotide
aaggacaccggagacccau

SEQ ID NO: 2065873 - RNA, 19 nt, Artificial Sequence
  Description of Artificial Sequence: Synthetic oligonucleotide
uccgaggccuuuguggacc

SEQ ID NO: 2065874 - RNA, 19 nt, Artificial Sequence
  Description of Artificial Sequence: Synthetic oligonucleotide
uggcuuauauuagagucuu

SEQ ID NO: 2065875 - RNA, 19 nt, Artificial Sequence
  Description of Artificial Sequence: Synthetic oligonucleotide
ucucaauguucagauucac

SEQ ID NO: 2065876 - RNA, 19 nt, Artificial Sequence
  Description of Artificial Sequence: Synthetic oligonucleotide
guacaccagccccacuccg

SEQ ID NO: 2065877 - RNA, 19 nt, Artificial Sequence
  Description of Artificial Sequence: Synthetic oligonucleotide
ucuucggacuggcuccgga

SEQ ID NO: 2065878 - RNA, 19 nt, Artificial Sequence
  Description of Artificial Sequence: Synthetic oligonucleotide
cuucuguagagagcaaauc

SEQ ID NO: 2065879 - RNA, 19 nt, Artificial Sequence
  Description of Artificial Sequence: Synthetic oligonucleotide
ucccucucucucaauguuc

SEQ ID NO: 2065880 - RNA, 19 nt, Artificial Sequence
  Description of Artificial Sequence: Synthetic oligonucleotide
accgcaaauaacagacaag

SEQ ID NO: 2065881 - RNA, 19 nt, Artificial Sequence
  Description of Artificial Sequence: Synthetic oligonucleotide
agggcgguaagugaaggga

SEQ ID NO: 2065882 - RNA, 19 nt, Artificial Sequence
  Description of Artificial Sequence: Synthetic oligonucleotide
gaauacccagaacgagcug

SEQ ID NO: 2065883 - RNA, 19 nt, Artificial Sequence
  Description of Artificial Sequence: Synthetic oligonucleotide
caagauacuuaaggggauc

SEQ ID NO: 2065884 - RNA, 19 nt, Artificial Sequence
  Description of Artificial Sequence: Synthetic oligonucleotide
agcaacaauuggagcugcc

SEQ ID NO: 2065885 - RNA, 19 nt, Artificial Sequence
  Description of Artificial Sequence: Synthetic oligonucleotide
ccacacagcauaauaaaca

SEQ ID NO: 2065886 - RNA, 19 nt, Artificial Sequence
  Description of Artificial Sequence: Synthetic oligonucleotide
gugauccacugcuucugag

SEQ ID NO: 2065887 - RNA, 19 nt, Artificial Sequence
  Description of Artificial Sequence: Synthetic oligonucleotide
augugcuggacuccagcgu

SEQ ID NO: 2065888 - RNA, 19 nt, Artificial Sequence
  Description of Artificial Sequence: Synthetic oligonucleotide
acaucccagcaaauccgcc

SEQ ID NO: 2065889 - RNA, 19 nt, Artificial Sequence
  Description of Artificial Sequence: Synthetic oligonucleotide
gagacccauuugcagggac

SEQ ID NO: 2065890 - RNA, 19 nt, Artificial Sequence
  Description of Artificial Sequence: Synthetic oligonucleotide
uucccucucucucaauguu

SEQ ID NO: 2065891 - RNA, 19 nt, Artificial Sequence
  Description of Artificial Sequence: Synthetic oligonucleotide
cuugucaguuugcugggga

SEQ ID NO: 2065892 - RNA, 19 nt, Artificial Sequence
  Description of Artificial Sequence: Synthetic oligonucleotide
ccaucaaugcguagacucc

SEQ ID NO: 2065893 - RNA, 19 nt, Artificial Sequence
  Description of Artificial Sequence: Synthetic oligonucleotide
gugaagggacuuuccaaga

SEQ ID NO: 2065894 - RNA, 19 nt, Artificial Sequence
  Description of Artificial Sequence: Synthetic oligonucleotide
ccggagacccauuugcagg

SEQ ID NO: 2065895 - RNA, 19 nt, Artificial Sequence
  Description of Artificial Sequence: Synthetic oligonucleotide
ccuaaagauuccaaaggca

SEQ ID NO: 2065896 - RNA, 19 nt, Artificial Sequence
  Description of Artificial Sequence: Synthetic oligonucleotide
caccgcaaauaacagacaa

SEQ ID NO: 2065897 - RNA, 19 nt, Artificial Sequence
  Description of Artificial Sequence: Synthetic oligonucleotide
agccgcaaaggacaccgga

SEQ ID NO: 2065898 - RNA, 19 nt, Artificial Sequence
  Description of Artificial Sequence: Synthetic oligonucleotide
cauguggcacuuuuauuaa

SEQ ID NO: 2065899 - RNA, 19 nt, Artificial Sequence
  Description of Artificial Sequence: Synthetic oligonucleotide
agggacuuuccaagauccc

SEQ ID NO: 2065900 - RNA, 19 nt, Artificial Sequence
  Description of Artificial Sequence: Synthetic oligonucleotide
agucgucccacaccgcagu

SEQ ID NO: 2065901 - RNA, 19 nt, Artificial Sequence
  Description of Artificial Sequence: Synthetic oligonucleotide
gggacaaagaaccuucugu

SEQ ID NO: 2065902 - RNA, 19 nt, Artificial Sequence
  Description of Artificial Sequence: Synthetic oligonucleotide
ucggcuucuggggaagucu

SEQ ID NO: 2065903 - RNA, 19 nt, Artificial Sequence
  Description of Artificial Sequence: Synthetic oligonucleotide
cccauuugcagggacaaag

SEQ ID NO: 2065904 - RNA, 19 nt, Artificial Sequence
  Description of Artificial Sequence: Synthetic oligonucleotide
gggacuuuccaagaucccc

SEQ ID NO: 2065905 - RNA, 19 nt, Artificial Sequence
  Description of Artificial Sequence: Synthetic oligonucleotide
aagauuccaaaggcaggaa

SEQ ID NO: 2065906 - RNA, 19 nt, Artificial Sequence
  Description of Artificial Sequence: Synthetic oligonucleotide
agauuccccaugaugugcu

SEQ ID NO: 2065907 - RNA, 19 nt, Artificial Sequence
  Description of Artificial Sequence: Synthetic oligonucleotide
uugcagggacaaagaaccu

SEQ ID NO: 2065908 - RNA, 19 nt, Artificial Sequence
  Description of Artificial Sequence: Synthetic oligonucleotide
cguagacuccuccugaagc

SEQ ID NO: 2065909 - RNA, 19 nt, Artificial Sequence
  Description of Artificial Sequence: Synthetic oligonucleotide
accuuucggcuucugggga

SEQ ID NO: 2065910 - RNA, 19 nt, Artificial Sequence
  Description of Artificial Sequence: Synthetic oligonucleotide
aucaaugcguagacuccuc

SEQ ID NO: 2065911 - RNA, 19 nt, Artificial Sequence
  Description of Artificial Sequence: Synthetic oligonucleotide
acaagauacuuaaggggau

SEQ ID NO: 2065912 - RNA, 19 nt, Artificial Sequence
  Description of Artificial Sequence: Synthetic oligonucleotide
gauuccccaugaugugcug

SEQ ID NO: 2065913 - RNA, 19 nt, Artificial Sequence
  Description of Artificial Sequence: Synthetic oligonucleotide
ugcguagacuccuccugaa

SEQ ID NO: 2065914 - RNA, 19 nt, Artificial Sequence
  Description of Artificial Sequence: Synthetic oligonucleotide
cacauucauaaaauagccu

SEQ ID NO: 2065915 - RNA, 19 nt, Artificial Sequence
  Description of Artificial Sequence: Synthetic oligonucleotide
gaugaguagccuaaagauu

SEQ ID NO: 2065916 - RNA, 19 nt, Artificial Sequence
  Description of Artificial Sequence: Synthetic oligonucleotide
ucuugucagggcgguaagu

SEQ ID NO: 2065917 - RNA, 19 nt, Artificial Sequence
  Description of Artificial Sequence: Synthetic oligonucleotide
ggcacagucgucccacacc

SEQ ID NO: 2065918 - RNA, 19 nt, Artificial Sequence
  Description of Artificial Sequence: Synthetic oligonucleotide
aguuggcucucuccaagua

SEQ ID NO: 2065919 - RNA, 19 nt, Artificial Sequence
  Description of Artificial Sequence: Synthetic oligonucleotide
aguagccuaaagauuccaa

SEQ ID NO: 2065920 - RNA, 19 nt, Artificial Sequence
  Description of Artificial Sequence: Synthetic oligonucleotide
agcuggcaagggaaccugc

SEQ ID NO: 2065921 - RNA, 19 nt, Artificial Sequence
  Description of Artificial Sequence: Synthetic oligonucleotide
gcuuauauuagagucuugu

SEQ ID NO: 2065922 - RNA, 19 nt, Artificial Sequence
  Description of Artificial Sequence: Synthetic oligonucleotide
gcugcauaugcagcaauug

SEQ ID NO: 2065923 - RNA, 19 nt, Artificial Sequence
  Description of Artificial Sequence: Synthetic oligonucleotide
agcguggaccagcauguau

SEQ ID NO: 2065924 - RNA, 19 nt, Artificial Sequence
  Description of Artificial Sequence: Synthetic oligonucleotide
cucuugucagggcgguaag

SEQ ID NO: 2065925 - RNA, 19 nt, Artificial Sequence
  Description of Artificial Sequence: Synthetic oligonucleotide
cagcaauugcaauccagaa

SEQ ID NO: 2065926 - RNA, 19 nt, Artificial Sequence
  Description of Artificial Sequence: Synthetic oligonucleotide
cuuucggcuucuggggaag

SEQ ID NO: 2065927 - RNA, 19 nt, Artificial Sequence
  Description of Artificial Sequence: Synthetic oligonucleotide
uccagaaccugggaucuuu

SEQ ID NO: 2065928 - RNA, 19 nt, Artificial Sequence
  Description of Artificial Sequence: Synthetic oligonucleotide
ugggaucuuugagcaaugu

SEQ ID NO: 2065929 - RNA, 19 nt, Artificial Sequence
  Description of Artificial Sequence: Synthetic oligonucleotide
gaguagccuaaagauucca

SEQ ID NO: 2065930 - RNA, 19 nt, Artificial Sequence
  Description of Artificial Sequence: Synthetic oligonucleotide
auccgccugcgaugugagc

SEQ ID NO: 2065931 - RNA, 19 nt, Artificial Sequence
  Description of Artificial Sequence: Synthetic oligonucleotide
cagucgucccacaccgcag

SEQ ID NO: 2065932 - RNA, 19 nt, Artificial Sequence
  Description of Artificial Sequence: Synthetic oligonucleotide
gcagcaauugcaauccaga

SEQ ID NO: 2065933 - RNA, 19 nt, Artificial Sequence
  Description of Artificial Sequence: Synthetic oligonucleotide
gacccauuugcagggacaa

SEQ ID NO: 2065934 - RNA, 19 nt, Artificial Sequence
  Description of Artificial Sequence: Synthetic oligonucleotide
agauacuuaaggggaucaa

SEQ ID NO: 2065935 - RNA, 19 nt, Artificial Sequence
  Description of Artificial Sequence: Synthetic oligonucleotide
agaccaaggcacagucguc

SEQ ID NO: 2065936 - RNA, 19 nt, Artificial Sequence
  Description of Artificial Sequence: Synthetic oligonucleotide
aucccauaucugacgcaac

SEQ ID NO: 2065937 - RNA, 19 nt, Artificial Sequence
  Description of Artificial Sequence: Synthetic oligonucleotide
gcguggaccagcauguaug

SEQ ID NO: 2065938 - RNA, 19 nt, Artificial Sequence
  Description of Artificial Sequence: Synthetic oligonucleotide
gcagggacaaagaaccuuc

SEQ ID NO: 2065939 - RNA, 19 nt, Artificial Sequence
  Description of Artificial Sequence: Synthetic oligonucleotide
agacccauuugcagggaca

SEQ ID NO: 2065940 - RNA, 19 nt, Artificial Sequence
  Description of Artificial Sequence: Synthetic oligonucleotide
ggcaggaaucauuucucga

SEQ ID NO: 2065941 - RNA, 19 nt, Artificial Sequence
  Description of Artificial Sequence: Synthetic oligonucleotide
ggagaccaaggcacagucg

SEQ ID NO: 2065942 - RNA, 19 nt, Artificial Sequence
  Description of Artificial Sequence: Synthetic oligonucleotide
ggaaucauuucucgaaaau

SEQ ID NO: 2065943 - RNA, 19 nt, Artificial Sequence
  Description of Artificial Sequence: Synthetic oligonucleotide
gcuuccacacagcauaaua

SEQ ID NO: 2065944 - RNA, 19 nt, Artificial Sequence
  Description of Artificial Sequence: Synthetic oligonucleotide
cagaacgagcugaauuaaa

SEQ ID NO: 2065945 - RNA, 19 nt, Artificial Sequence
  Description of Artificial Sequence: Synthetic oligonucleotide
gcgaugugagccgcaaagg

SEQ ID NO: 2065946 - RNA, 19 nt, Artificial Sequence
  Description of Artificial Sequence: Synthetic oligonucleotide
augaacagugguggcggga

SEQ ID NO: 2065947 - RNA, 19 nt, Artificial Sequence
  Description of Artificial Sequence: Synthetic oligonucleotide
gcauaugcagcaauugcaa

SEQ ID NO: 2065948 - RNA, 19 nt, Artificial Sequence
  Description of Artificial Sequence: Synthetic oligonucleotide
acaccgcaguccgagcuug

SEQ ID NO: 2065949 - RNA, 19 nt, Artificial Sequence
  Description of Artificial Sequence: Synthetic oligonucleotide
cgaaaauucaggaucacau

SEQ ID NO: 2065950 - RNA, 19 nt, Artificial Sequence
  Description of Artificial Sequence: Synthetic oligonucleotide
ucccaucaaugcguagacu

SEQ ID NO: 2065951 - RNA, 19 nt, Artificial Sequence
  Description of Artificial Sequence: Synthetic oligonucleotide
ccauuuccaagggaauacc

SEQ ID NO: 2065952 - RNA, 19 nt, Artificial Sequence
  Description of Artificial Sequence: Synthetic oligonucleotide
uugcuggggacaggaagau

SEQ ID NO: 2065953 - RNA, 19 nt, Artificial Sequence
  Description of Artificial Sequence: Synthetic oligonucleotide
ugccugcuggcccgagcug

SEQ ID NO: 2065954 - RNA, 19 nt, Artificial Sequence
  Description of Artificial Sequence: Synthetic oligonucleotide
gugcuggacuccagcgugg

SEQ ID NO: 2065955 - RNA, 19 nt, Artificial Sequence
  Description of Artificial Sequence: Synthetic oligonucleotide
gggaagucuuucccuuccc

SEQ ID NO: 2065956 - RNA, 19 nt, Artificial Sequence
  Description of Artificial Sequence: Synthetic oligonucleotide
agauccccguguccagagu

SEQ ID NO: 2065957 - RNA, 19 nt, Artificial Sequence
  Description of Artificial Sequence: Synthetic oligonucleotide
uucuucggacuggcuccgg

SEQ ID NO: 2065958 - RNA, 19 nt, Artificial Sequence
  Description of Artificial Sequence: Synthetic oligonucleotide
cacagucgucccacaccgc

SEQ ID NO: 2065959 - RNA, 19 nt, Artificial Sequence
  Description of Artificial Sequence: Synthetic oligonucleotide
gccgcaaaggacaccggag

SEQ ID NO: 2065960 - RNA, 19 nt, Artificial Sequence
  Description of Artificial Sequence: Synthetic oligonucleotide
gcuggcccgagcugcagcc

SEQ ID NO: 2065961 - RNA, 19 nt, Artificial Sequence
  Description of Artificial Sequence: Synthetic oligonucleotide
cccagaacgagcugaauua

SEQ ID NO: 2065962 - RNA, 19 nt, Artificial Sequence
  Description of Artificial Sequence: Synthetic oligonucleotide
uucggcuucuggggaaguc

SEQ ID NO: 2065963 - RNA, 19 nt, Artificial Sequence
  Description of Artificial Sequence: Synthetic oligonucleotide
agcugcauaugcagcaauu

SEQ ID NO: 2065964 - RNA, 19 nt, Artificial Sequence
  Description of Artificial Sequence: Synthetic oligonucleotide
gaagcacccacaagauacu

SEQ ID NO: 2065965 - RNA, 19 nt, Artificial Sequence
  Description of Artificial Sequence: Synthetic oligonucleotide
caccggagacccauuugca

SEQ ID NO: 2065966 - RNA, 19 nt, Artificial Sequence
  Description of Artificial Sequence: Synthetic oligonucleotide
caaugcguagacuccuccu

SEQ ID NO: 2065967 - RNA, 19 nt, Artificial Sequence
  Description of Artificial Sequence: Synthetic oligonucleotide
cuucggacuggcuccggaa

SEQ ID NO: 2065968 - RNA, 19 nt, Artificial Sequence
  Description of Artificial Sequence: Synthetic oligonucleotide
acaccgcaaauaacagaca

SEQ ID NO: 2065969 - RNA, 19 nt, Artificial Sequence
  Description of Artificial Sequence: Synthetic oligonucleotide
auacccagaacgagcugaa

SEQ ID NO: 2065970 - RNA, 19 nt, Artificial Sequence
  Description of Artificial Sequence: Synthetic oligonucleotide
augaugugcuggacuccag

SEQ ID NO: 2065971 - RNA, 19 nt, Artificial Sequence
  Description of Artificial Sequence: Synthetic oligonucleotide
cgucccacaccgcaguccg

SEQ ID NO: 2065972 - RNA, 19 nt, Artificial Sequence
  Description of Artificial Sequence: Synthetic oligonucleotide
caaacacggccagcucagc

SEQ ID NO: 2065973 - RNA, 19 nt, Artificial Sequence
  Description of Artificial Sequence: Synthetic oligonucleotide
ccauuugcagggacaaaga

SEQ ID NO: 2065974 - RNA, 19 nt, Artificial Sequence
  Description of Artificial Sequence: Synthetic oligonucleotide
gcugaacacaguguaaccu

SEQ ID NO: 2065975 - RNA, 19 nt, Artificial Sequence
  Description of Artificial Sequence: Synthetic oligonucleotide
cacuccugccagguacacc

SEQ ID NO: 2065976 - RNA, 19 nt, Artificial Sequence
  Description of Artificial Sequence: Synthetic oligonucleotide
gagccgcaaaggacaccgg

SEQ ID NO: 2065977 - RNA, 19 nt, Artificial Sequence
  Description of Artificial Sequence: Synthetic oligonucleotide
cugaagcacccacaagaua

SEQ ID NO: 2065978 - RNA, 19 nt, Artificial Sequence
  Description of Artificial Sequence: Synthetic oligonucleotide
caucaaugcguagacuccu

SEQ ID NO: 2065979 - RNA, 19 nt, Artificial Sequence
  Description of Artificial Sequence: Synthetic oligonucleotide
uuucggcuucuggggaagu

SEQ ID NO: 2065980 - RNA, 19 nt, Artificial Sequence
  Description of Artificial Sequence: Synthetic oligonucleotide
acuccagcguggaccagca

SEQ ID NO: 2065981 - RNA, 19 nt, Artificial Sequence
  Description of Artificial Sequence: Synthetic oligonucleotide
agcacccacaagauacuua

SEQ ID NO: 2065982 - RNA, 19 nt, Artificial Sequence
  Description of Artificial Sequence: Synthetic oligonucleotide
gcaauccagaaccugggau

SEQ ID NO: 2065983 - RNA, 19 nt, Artificial Sequence
  Description of Artificial Sequence: Synthetic oligonucleotide
caauugcaauccagaaccu

SEQ ID NO: 2065984 - RNA, 19 nt, Artificial Sequence
  Description of Artificial Sequence: Synthetic oligonucleotide
ccaagauccccguguccag

SEQ ID NO: 2065985 - RNA, 19 nt, Artificial Sequence
  Description of Artificial Sequence: Synthetic oligonucleotide
cccucucucucaauguuca

SEQ ID NO: 2065986 - RNA, 19 nt, Artificial Sequence
  Description of Artificial Sequence: Synthetic oligonucleotide
cagcaaauccgccugcgau

SEQ ID NO: 2065987 - RNA, 19 nt, Artificial Sequence
  Description of Artificial Sequence: Synthetic oligonucleotide
uggcccgagcugcagccuu

SEQ ID NO: 2065988 - RNA, 19 nt, Artificial Sequence
  Description of Artificial Sequence: Synthetic oligonucleotide
ccacaucgugagcagcagc

SEQ ID NO: 2065989 - RNA, 19 nt, Artificial Sequence
  Description of Artificial Sequence: Synthetic oligonucleotide
gggcgguaagugaagggac

SEQ ID NO: 2065990 - RNA, 19 nt, Artificial Sequence
  Description of Artificial Sequence: Synthetic oligonucleotide
ccaagggaauacccagaac

SEQ ID NO: 2065991 - RNA, 19 nt, Artificial Sequence
  Description of Artificial Sequence: Synthetic oligonucleotide
uccccguguccagagugau

SEQ ID NO: 2065992 - RNA, 19 nt, Artificial Sequence
  Description of Artificial Sequence: Synthetic oligonucleotide
ccagaaccugggaucuuug

SEQ ID NO: 2065993 - RNA, 19 nt, Artificial Sequence
  Description of Artificial Sequence: Synthetic oligonucleotide
caagauccccguguccaga

SEQ ID NO: 2065994 - RNA, 19 nt, Artificial Sequence
  Description of Artificial Sequence: Synthetic oligonucleotide
ggaagucuuucccuucccu

SEQ ID NO: 2065995 - RNA, 19 nt, Artificial Sequence
  Description of Artificial Sequence: Synthetic oligonucleotide
ggcgggaggcaguuggcuc

SEQ ID NO: 2065996 - RNA, 19 nt, Artificial Sequence
  Description of Artificial Sequence: Synthetic oligonucleotide
aaccuucuguagagagcaa

SEQ ID NO: 2065997 - RNA, 19 nt, Artificial Sequence
  Description of Artificial Sequence: Synthetic oligonucleotide
gauaaaccuccaggcuucu

SEQ ID NO: 2065998 - RNA, 19 nt, Artificial Sequence
  Description of Artificial Sequence: Synthetic oligonucleotide
auccccguguccagaguga

SEQ ID NO: 2065999 - RNA, 19 nt, Artificial Sequence
  Description of Artificial Sequence: Synthetic oligonucleotide
caccgcaguccgagcuugc

SEQ ID NO: 2066000 - RNA, 19 nt, Artificial Sequence
  Description of Artificial Sequence: Synthetic oligonucleotide
gcaagggaaccugcaagca

SEQ ID NO: 2066001 - RNA, 19 nt, Artificial Sequence
  Description of Artificial Sequence: Synthetic oligonucleotide
ccgccugcgaugugagccg

SEQ ID NO: 2066002 - RNA, 19 nt, Artificial Sequence
  Description of Artificial Sequence: Synthetic oligonucleotide
ggaccagcauguaugagau

SEQ ID NO: 2066003 - RNA, 19 nt, Artificial Sequence
  Description of Artificial Sequence: Synthetic oligonucleotide
caaauccgccugcgaugug

SEQ ID NO: 2066004 - RNA, 19 nt, Artificial Sequence
  Description of Artificial Sequence: Synthetic oligonucleotide
uccaggcuucuucccucuu

SEQ ID NO: 2066005 - RNA, 19 nt, Artificial Sequence
  Description of Artificial Sequence: Synthetic oligonucleotide
gugagccgcaaaggacacc

SEQ ID NO: 2066006 - RNA, 19 nt, Artificial Sequence
  Description of Artificial Sequence: Synthetic oligonucleotide
caacuaucaggaugaugau

SEQ ID NO: 2066007 - RNA, 19 nt, Artificial Sequence
  Description of Artificial Sequence: Synthetic oligonucleotide
gucgucccacaccgcaguc

SEQ ID NO: 2066008 - RNA, 19 nt, Artificial Sequence
  Description of Artificial Sequence: Synthetic oligonucleotide
cgaugugagccgcaaagga

SEQ ID NO: 2066009 - RNA, 19 nt, Artificial Sequence
  Description of Artificial Sequence: Synthetic oligonucleotide
uacccagaacgagcugaau

SEQ ID NO: 2066010 - RNA, 19 nt, Artificial Sequence
  Description of Artificial Sequence: Synthetic oligonucleotide
aguuugcuggggacaggaa

SEQ ID NO: 2066011 - RNA, 19 nt, Artificial Sequence
  Description of Artificial Sequence: Synthetic oligonucleotide
ccaugaugugcuggacucc

SEQ ID NO: 2066012 - RNA, 19 nt, Artificial Sequence
  Description of Artificial Sequence: Synthetic oligonucleotide
auaaaccuccaggcuucuu

SEQ ID NO: 2066013 - RNA, 19 nt, Artificial Sequence
  Description of Artificial Sequence: Synthetic oligonucleotide
gccugcuggcccgagcugc

SEQ ID NO: 2066014 - RNA, 19 nt, Artificial Sequence
  Description of Artificial Sequence: Synthetic oligonucleotide
gcaaauccgccugcgaugu

SEQ ID NO: 2066015 - RNA, 19 nt, Artificial Sequence
  Description of Artificial Sequence: Synthetic oligonucleotide
ggcaguuggcucucuccaa

SEQ ID NO: 2066016 - RNA, 19 nt, Artificial Sequence
  Description of Artificial Sequence: Synthetic oligonucleotide
gcuggcaagggaaccugca

SEQ ID NO: 2066017 - RNA, 19 nt, Artificial Sequence
  Description of Artificial Sequence: Synthetic oligonucleotide
ccagcguggaccagcaugu

SEQ ID NO: 2066018 - RNA, 19 nt, Artificial Sequence
  Description of Artificial Sequence: Synthetic oligonucleotide
agacaaugcuguggaccuu

SEQ ID NO: 2066019 - RNA, 19 nt, Artificial Sequence
  Description of Artificial Sequence: Synthetic oligonucleotide
gggaaccugcaagcacucc

SEQ ID NO: 2066020 - RNA, 19 nt, Artificial Sequence
  Description of Artificial Sequence: Synthetic oligonucleotide
gcagcugaacacaguguaa

SEQ ID NO: 2066021 - RNA, 19 nt, Artificial Sequence
  Description of Artificial Sequence: Synthetic oligonucleotide
acccauuugcagggacaaa

SEQ ID NO: 2066022 - RNA, 19 nt, Artificial Sequence
  Description of Artificial Sequence: Synthetic oligonucleotide
cguggaccagcauguauga

SEQ ID NO: 2066023 - RNA, 19 nt, Artificial Sequence
  Description of Artificial Sequence: Synthetic oligonucleotide
ccggaagcauccacuuuga

SEQ ID NO: 2066024 - RNA, 19 nt, Artificial Sequence
  Description of Artificial Sequence: Synthetic oligonucleotide
ccugaagcacccacaagau

SEQ ID NO: 2066025 - RNA, 19 nt, Artificial Sequence
  Description of Artificial Sequence: Synthetic oligonucleotide
gccuuucccucucucucaa

SEQ ID NO: 2066026 - RNA, 19 nt, Artificial Sequence
  Description of Artificial Sequence: Synthetic oligonucleotide
ggcgguaagugaagggacu

SEQ ID NO: 2066027 - RNA, 19 nt, Artificial Sequence
  Description of Artificial Sequence: Synthetic oligonucleotide
cgcaacuaucaggaugaug

SEQ ID NO: 2066028 - RNA, 19 nt, Artificial Sequence
  Description of Artificial Sequence: Synthetic oligonucleotide
ccagaacgagcugaauuaa

SEQ ID NO: 2066029 - RNA, 19 nt, Artificial Sequence
  Description of Artificial Sequence: Synthetic oligonucleotide
ccagcaaauccgccugcga

SEQ ID NO: 2066030 - RNA, 19 nt, Artificial Sequence
  Description of Artificial Sequence: Synthetic oligonucleotide
cugcgaugugagccgcaaa

SEQ ID NO: 2066031 - RNA, 19 nt, Artificial Sequence
  Description of Artificial Sequence: Synthetic oligonucleotide
ccuuucggcuucuggggaa

SEQ ID NO: 2066032 - RNA, 19 nt, Artificial Sequence
  Description of Artificial Sequence: Synthetic oligonucleotide
cucucucaauguucagauu

SEQ ID NO: 2066033 - RNA, 19 nt, Artificial Sequence
  Description of Artificial Sequence: Synthetic oligonucleotide
cgcaaauaacagacaagcu

SEQ ID NO: 2066034 - RNA, 19 nt, Artificial Sequence
  Description of Artificial Sequence: Synthetic oligonucleotide
cuggcuccggaagcaucca

SEQ ID NO: 2066035 - RNA, 19 nt, Artificial Sequence
  Description of Artificial Sequence: Synthetic oligonucleotide
acgcaacuaucaggaugau

SEQ ID NO: 2066036 - RNA, 19 nt, Artificial Sequence
  Description of Artificial Sequence: Synthetic oligonucleotide
ccgcaguccgagcuugcuc

SEQ ID NO: 2066037 - RNA, 19 nt, Artificial Sequence
  Description of Artificial Sequence: Synthetic oligonucleotide
ggcuccggaagcauccacu

SEQ ID NO: 2066038 - RNA, 19 nt, Artificial Sequence
  Description of Artificial Sequence: Synthetic oligonucleotide
ccacuccgaggccuuugug

SEQ ID NO: 2066039 - RNA, 19 nt, Artificial Sequence
  Description of Artificial Sequence: Synthetic oligonucleotide
cugacgcaacuaucaggau

SEQ ID NO: 2066040 - RNA, 19 nt, Artificial Sequence
  Description of Artificial Sequence: Synthetic oligonucleotide
ggagacccauuugcaggga

SEQ ID NO: 2066041 - RNA, 19 nt, Artificial Sequence
  Description of Artificial Sequence: Synthetic oligonucleotide
cccauaucugacgcaacua

SEQ ID NO: 2066042 - RNA, 19 nt, Artificial Sequence
  Description of Artificial Sequence: Synthetic oligonucleotide
cucccuccaccuggggaga

SEQ ID NO: 2066043 - RNA, 19 nt, Artificial Sequence
  Description of Artificial Sequence: Synthetic oligonucleotide
aggacaccggagacccauu

SEQ ID NO: 2066044 - RNA, 19 nt, Artificial Sequence
  Description of Artificial Sequence: Synthetic oligonucleotide
ggacaccggagacccauuu

SEQ ID NO: 2066045 - RNA, 19 nt, Artificial Sequence
  Description of Artificial Sequence: Synthetic oligonucleotide
cacaccgcaguccgagcuu

SEQ ID NO: 2066046 - RNA, 19 nt, Artificial Sequence
  Description of Artificial Sequence: Synthetic oligonucleotide
ccccguguccagagugauc

SEQ ID NO: 2066047 - RNA, 19 nt, Artificial Sequence
  Description of Artificial Sequence: Synthetic oligonucleotide
ccacaccgcaguccgagcu

SEQ ID NO: 2066048 - RNA, 19 nt, Artificial Sequence
  Description of Artificial Sequence: Synthetic oligonucleotide
cuccggaagcauccacuuu

SEQ ID NO: 2066049 - RNA, 19 nt, Artificial Sequence
  Description of Artificial Sequence: Synthetic oligonucleotide
cccuccaccuggggagacc

SEQ ID NO: 2066050 - RNA, 19 nt, Artificial Sequence
  Description of Artificial Sequence: Synthetic oligonucleotide
ccugcgaugugagccgcaa

SEQ ID NO: 2066051 - RNA, 19 nt, Artificial Sequence
  Description of Artificial Sequence: Synthetic oligonucleotide
gcgguaagugaagggacuu

SEQ ID NO: 2066052 - RNA, 19 nt, Artificial Sequence
  Description of Artificial Sequence: Synthetic oligonucleotide
ggcucucuccaaguauguu

SEQ ID NO: 2066053 - RNA, 19 nt, Artificial Sequence
  Description of Artificial Sequence: Synthetic oligonucleotide
ggcuuccacacagcauaau

SEQ ID NO: 2066054 - RNA, 19 nt, Artificial Sequence
  Description of Artificial Sequence: Synthetic oligonucleotide
cgccugcgaugugagccgc

SEQ ID NO: 2066055 - RNA, 19 nt, Artificial Sequence
  Description of Artificial Sequence: Synthetic oligonucleotide
gccugcgaugugagccgca

SEQ ID NO: 2066056 - RNA, 19 nt, Artificial Sequence
  Description of Artificial Sequence: Synthetic oligonucleotide
cuggcccgagcugcagccu

SEQ ID NO: 2066057 - RNA, 19 nt, Artificial Sequence
  Description of Artificial Sequence: Synthetic oligonucleotide
cuccagcguggaccagcau

SEQ ID NO: 2066058 - RNA, 19 nt, Artificial Sequence
  Description of Artificial Sequence: Synthetic oligonucleotide
cccgagcugcagccuucca

SEQ ID NO: 2066059 - RNA, 19 nt, Artificial Sequence
  Description of Artificial Sequence: Synthetic oligonucleotide
cccuguccucucucgucuu

SEQ ID NO: 2066060 - RNA, 19 nt, Artificial Sequence
  Description of Artificial Sequence: Synthetic oligonucleotide
cagcagccauuggccuggu

SEQ ID NO: 2066061 - RNA, 19 nt, Artificial Sequence
  Description of Artificial Sequence: Synthetic oligonucleotide
uguuaaggaaucaacauag

SEQ ID NO: 2066062 - RNA, 19 nt, Artificial Sequence
  Description of Artificial Sequence: Synthetic oligonucleotide
uuugauguaauucacauau

SEQ ID NO: 2066063 - RNA, 19 nt, Artificial Sequence
  Description of Artificial Sequence: Synthetic oligonucleotide
auauugaccucauacagac

SEQ ID NO: 2066064 - RNA, 19 nt, Artificial Sequence
  Description of Artificial Sequence: Synthetic oligonucleotide
uaauauugaccucauacag

SEQ ID NO: 2066065 - RNA, 19 nt, Artificial Sequence
  Description of Artificial Sequence: Synthetic oligonucleotide
aaacuuauaagcuggagaa

SEQ ID NO: 2066066 - RNA, 19 nt, Artificial Sequence
  Description of Artificial Sequence: Synthetic oligonucleotide
ugaugaaguaggaaggugg

SEQ ID NO: 2066067 - RNA, 19 nt, Artificial Sequence
  Description of Artificial Sequence: Synthetic oligonucleotide
ucaacuuucaggaugacuc

SEQ ID NO: 2066068 - RNA, 19 nt, Artificial Sequence
  Description of Artificial Sequence: Synthetic oligonucleotide
aaauaucaauaauggaagg

SEQ ID NO: 2066069 - RNA, 19 nt, Artificial Sequence
  Description of Artificial Sequence: Synthetic oligonucleotide
aaagaagccccacagagca

SEQ ID NO: 2066070 - RNA, 19 nt, Artificial Sequence
  Description of Artificial Sequence: Synthetic oligonucleotide
uacgagaucaacuuucagg

SEQ ID NO: 2066071 - RNA, 19 nt, Artificial Sequence
  Description of Artificial Sequence: Synthetic oligonucleotide
uguauaguacuucauauaa

SEQ ID NO: 2066072 - RNA, 19 nt, Artificial Sequence
  Description of Artificial Sequence: Synthetic oligonucleotide
agagggaauaucaugaacc

SEQ ID NO: 2066073 - RNA, 19 nt, Artificial Sequence
  Description of Artificial Sequence: Synthetic oligonucleotide
uuucauuuggagaggauag

SEQ ID NO: 2066074 - RNA, 19 nt, Artificial Sequence
  Description of Artificial Sequence: Synthetic oligonucleotide
auaucaauaauggaaggac

SEQ ID NO: 2066075 - RNA, 19 nt, Artificial Sequence
  Description of Artificial Sequence: Synthetic oligonucleotide
aauucacauaucuugcucu

SEQ ID NO: 2066076 - RNA, 19 nt, Artificial Sequence
  Description of Artificial Sequence: Synthetic oligonucleotide
aaacauauguuaaggaauc

SEQ ID NO: 2066077 - RNA, 19 nt, Artificial Sequence
  Description of Artificial Sequence: Synthetic oligonucleotide
gacaucaggcaauucaugg

SEQ ID NO: 2066078 - RNA, 19 nt, Artificial Sequence
  Description of Artificial Sequence: Synthetic oligonucleotide
uuaaggaaucaacauagac

SEQ ID NO: 2066079 - RNA, 19 nt, Artificial Sequence
  Description of Artificial Sequence: Synthetic oligonucleotide
aaggaccaucaucauaacc

SEQ ID NO: 2066080 - RNA, 19 nt, Artificial Sequence
  Description of Artificial Sequence: Synthetic oligonucleotide
cuguaauuaauucagugac

SEQ ID NO: 2066081 - RNA, 19 nt, Artificial Sequence
  Description of Artificial Sequence: Synthetic oligonucleotide
agugauaucgacucggaca

SEQ ID NO: 2066082 - RNA, 19 nt, Artificial Sequence
  Description of Artificial Sequence: Synthetic oligonucleotide
ucuugaaacgaucucccag

SEQ ID NO: 2066083 - RNA, 19 nt, Artificial Sequence
  Description of Artificial Sequence: Synthetic oligonucleotide
uaucaauaauggaaggacc

SEQ ID NO: 2066084 - RNA, 19 nt, Artificial Sequence
  Description of Artificial Sequence: Synthetic oligonucleotide
uaucaugaaccacaaagcu

SEQ ID NO: 2066085 - RNA, 19 nt, Artificial Sequence
  Description of Artificial Sequence: Synthetic oligonucleotide
uuuucuauaggacacugua

SEQ ID NO: 2066086 - RNA, 19 nt, Artificial Sequence
  Description of Artificial Sequence: Synthetic oligonucleotide
acuguaauuaauucaguga

SEQ ID NO: 2066087 - RNA, 19 nt, Artificial Sequence
  Description of Artificial Sequence: Synthetic oligonucleotide
uuuaccaucaagacuugga

SEQ ID NO: 2066088 - RNA, 19 nt, Artificial Sequence
  Description of Artificial Sequence: Synthetic oligonucleotide
ucugucuuaaggaagccga

SEQ ID NO: 2066089 - RNA, 19 nt, Artificial Sequence
  Description of Artificial Sequence: Synthetic oligonucleotide
ucaugguuggaauucaaca

SEQ ID NO: 2066090 - RNA, 19 nt, Artificial Sequence
  Description of Artificial Sequence: Synthetic oligonucleotide
uucaacauguucauugacu

SEQ ID NO: 2066091 - RNA, 19 nt, Artificial Sequence
  Description of Artificial Sequence: Synthetic oligonucleotide
uugacuaccuccuuuugcc

SEQ ID NO: 2066092 - RNA, 19 nt, Artificial Sequence
  Description of Artificial Sequence: Synthetic oligonucleotide
acgagaucaacuuucagga

SEQ ID NO: 2066093 - RNA, 19 nt, Artificial Sequence
  Description of Artificial Sequence: Synthetic oligonucleotide
uucuauaggacacuguaau

SEQ ID NO: 2066094 - RNA, 19 nt, Artificial Sequence
  Description of Artificial Sequence: Synthetic oligonucleotide
auagacaacaguuguacga

SEQ ID NO: 2066095 - RNA, 19 nt, Artificial Sequence
  Description of Artificial Sequence: Synthetic oligonucleotide
cauauguuaaggaaucaac

SEQ ID NO: 2066096 - RNA, 19 nt, Artificial Sequence
  Description of Artificial Sequence: Synthetic oligonucleotide
uuucuuguguaccaaguac

SEQ ID NO: 2066097 - RNA, 19 nt, Artificial Sequence
  Description of Artificial Sequence: Synthetic oligonucleotide
ugaagugauaucgacucgg

SEQ ID NO: 2066098 - RNA, 19 nt, Artificial Sequence
  Description of Artificial Sequence: Synthetic oligonucleotide
uucuuguguaccaaguaca

SEQ ID NO: 2066099 - RNA, 19 nt, Artificial Sequence
  Description of Artificial Sequence: Synthetic oligonucleotide
guauagccaaguuugugcg

SEQ ID NO: 2066100 - RNA, 19 nt, Artificial Sequence
  Description of Artificial Sequence: Synthetic oligonucleotide
gugauaucgacucggacag

SEQ ID NO: 2066101 - RNA, 19 nt, Artificial Sequence
  Description of Artificial Sequence: Synthetic oligonucleotide
ucucccgauaguaacagca

SEQ ID NO: 2066102 - RNA, 19 nt, Artificial Sequence
  Description of Artificial Sequence: Synthetic oligonucleotide
uaauguauaguacuucaua

SEQ ID NO: 2066103 - RNA, 19 nt, Artificial Sequence
  Description of Artificial Sequence: Synthetic oligonucleotide
aggacacuguaauuaauuc

SEQ ID NO: 2066104 - RNA, 19 nt, Artificial Sequence
  Description of Artificial Sequence: Synthetic oligonucleotide
cucaguuuacaguagucgc

SEQ ID NO: 2066105 - RNA, 19 nt, Artificial Sequence
  Description of Artificial Sequence: Synthetic oligonucleotide
aagugauaucgacucggac

SEQ ID NO: 2066106 - RNA, 19 nt, Artificial Sequence
  Description of Artificial Sequence: Synthetic oligonucleotide
uggagaaauaacuuccacu

SEQ ID NO: 2066107 - RNA, 19 nt, Artificial Sequence
  Description of Artificial Sequence: Synthetic oligonucleotide
cauuggguucaucagaaag

SEQ ID NO: 2066108 - RNA, 19 nt, Artificial Sequence
  Description of Artificial Sequence: Synthetic oligonucleotide
acaguagucgcuucacacg

SEQ ID NO: 2066109 - RNA, 19 nt, Artificial Sequence
  Description of Artificial Sequence: Synthetic oligonucleotide
acuacauaagagccagagg

SEQ ID NO: 2066110 - RNA, 19 nt, Artificial Sequence
  Description of Artificial Sequence: Synthetic oligonucleotide
uguugaccacuuuaggcag

SEQ ID NO: 2066111 - RNA, 19 nt, Artificial Sequence
  Description of Artificial Sequence: Synthetic oligonucleotide
acucaguuuacaguagucg

SEQ ID NO: 2066112 - RNA, 19 nt, Artificial Sequence
  Description of Artificial Sequence: Synthetic oligonucleotide
uuguacgagaucaacuuuc

SEQ ID NO: 2066113 - RNA, 19 nt, Artificial Sequence
  Description of Artificial Sequence: Synthetic oligonucleotide
uaccaaguacaaaacauau

SEQ ID NO: 2066114 - RNA, 19 nt, Artificial Sequence
  Description of Artificial Sequence: Synthetic oligonucleotide
uccacuacauaagagccag

SEQ ID NO: 2066115 - RNA, 19 nt, Artificial Sequence
  Description of Artificial Sequence: Synthetic oligonucleotide
aauauugaccucauacaga

SEQ ID NO: 2066116 - RNA, 19 nt, Artificial Sequence
  Description of Artificial Sequence: Synthetic oligonucleotide
aggaccaucaucauaacca

SEQ ID NO: 2066117 - RNA, 19 nt, Artificial Sequence
  Description of Artificial Sequence: Synthetic oligonucleotide
uuuaggcagaagcacaaau

SEQ ID NO: 2066118 - RNA, 19 nt, Artificial Sequence
  Description of Artificial Sequence: Synthetic oligonucleotide
cuuaaggaagccgacgugc

SEQ ID NO: 2066119 - RNA, 19 nt, Artificial Sequence
  Description of Artificial Sequence: Synthetic oligonucleotide
augguuggaauucaacaug

SEQ ID NO: 2066120 - RNA, 19 nt, Artificial Sequence
  Description of Artificial Sequence: Synthetic oligonucleotide
uacauaauguauaguacuu

SEQ ID NO: 2066121 - RNA, 19 nt, Artificial Sequence
  Description of Artificial Sequence: Synthetic oligonucleotide
acucgggccgccgagaucc

SEQ ID NO: 2066122 - RNA, 19 nt, Artificial Sequence
  Description of Artificial Sequence: Synthetic oligonucleotide
gagaggauaggguaaucug

SEQ ID NO: 2066123 - RNA, 19 nt, Artificial Sequence
  Description of Artificial Sequence: Synthetic oligonucleotide
uauaggacacuguaauuaa

SEQ ID NO: 2066124 - RNA, 19 nt, Artificial Sequence
  Description of Artificial Sequence: Synthetic oligonucleotide
uacaguagucgcuucacac

SEQ ID NO: 2066125 - RNA, 19 nt, Artificial Sequence
  Description of Artificial Sequence: Synthetic oligonucleotide
ucaggcaauucaugguugg

SEQ ID NO: 2066126 - RNA, 19 nt, Artificial Sequence
  Description of Artificial Sequence: Synthetic oligonucleotide
ugguuggaauucaacaugu

SEQ ID NO: 2066127 - RNA, 19 nt, Artificial Sequence
  Description of Artificial Sequence: Synthetic oligonucleotide
uuaccaucaagacuuggau

SEQ ID NO: 2066128 - RNA, 19 nt, Artificial Sequence
  Description of Artificial Sequence: Synthetic oligonucleotide
ucccgauaguaacagcagg

SEQ ID NO: 2066129 - RNA, 19 nt, Artificial Sequence
  Description of Artificial Sequence: Synthetic oligonucleotide
uugaagugauaucgacucg

SEQ ID NO: 2066130 - RNA, 19 nt, Artificial Sequence
  Description of Artificial Sequence: Synthetic oligonucleotide
uacauaagagccagaggga

SEQ ID NO: 2066131 - RNA, 19 nt, Artificial Sequence
  Description of Artificial Sequence: Synthetic oligonucleotide
gauaggguaaucugaccac

SEQ ID NO: 2066132 - RNA, 19 nt, Artificial Sequence
  Description of Artificial Sequence: Synthetic oligonucleotide
acauaauguauaguacuuc

SEQ ID NO: 2066133 - RNA, 19 nt, Artificial Sequence
  Description of Artificial Sequence: Synthetic oligonucleotide
uuaggcagaagcacaaaua

SEQ ID NO: 2066134 - RNA, 19 nt, Artificial Sequence
  Description of Artificial Sequence: Synthetic oligonucleotide
uguacgagaucaacuuuca

SEQ ID NO: 2066135 - RNA, 19 nt, Artificial Sequence
  Description of Artificial Sequence: Synthetic oligonucleotide
ccugguauagccaaguuug

SEQ ID NO: 2066136 - RNA, 19 nt, Artificial Sequence
  Description of Artificial Sequence: Synthetic oligonucleotide
aggaugacucaguuuacag

SEQ ID NO: 2066137 - RNA, 19 nt, Artificial Sequence
  Description of Artificial Sequence: Synthetic oligonucleotide
caaacuuauaagcuggaga

SEQ ID NO: 2066138 - RNA, 19 nt, Artificial Sequence
  Description of Artificial Sequence: Synthetic oligonucleotide
ugaaccacaaagcucccau

SEQ ID NO: 2066139 - RNA, 19 nt, Artificial Sequence
  Description of Artificial Sequence: Synthetic oligonucleotide
cauagacaacaguuguacg

SEQ ID NO: 2066140 - RNA, 19 nt, Artificial Sequence
  Description of Artificial Sequence: Synthetic oligonucleotide
uccaucucccgucucaugu

SEQ ID NO: 2066141 - RNA, 19 nt, Artificial Sequence
  Description of Artificial Sequence: Synthetic oligonucleotide
aggauaggguaaucugacc

SEQ ID NO: 2066142 - RNA, 19 nt, Artificial Sequence
  Description of Artificial Sequence: Synthetic oligonucleotide
uuucuauaggacacuguaa

SEQ ID NO: 2066143 - RNA, 19 nt, Artificial Sequence
  Description of Artificial Sequence: Synthetic oligonucleotide
ugucuuaaggaagccgacg

SEQ ID NO: 2066144 - RNA, 19 nt, Artificial Sequence
  Description of Artificial Sequence: Synthetic oligonucleotide
caguagucgcuucacacgg

SEQ ID NO: 2066145 - RNA, 19 nt, Artificial Sequence
  Description of Artificial Sequence: Synthetic oligonucleotide
acuuauaagcuggagaaau

SEQ ID NO: 2066146 - RNA, 19 nt, Artificial Sequence
  Description of Artificial Sequence: Synthetic oligonucleotide
ucugauguuuugauguaau

SEQ ID NO: 2066147 - RNA, 19 nt, Artificial Sequence
  Description of Artificial Sequence: Synthetic oligonucleotide
caucauaaccauuggguuc

SEQ ID NO: 2066148 - RNA, 19 nt, Artificial Sequence
  Description of Artificial Sequence: Synthetic oligonucleotide
gaugaaguaggaagguggc

SEQ ID NO: 2066149 - RNA, 19 nt, Artificial Sequence
  Description of Artificial Sequence: Synthetic oligonucleotide
gaacucugagacaucaggc

SEQ ID NO: 2066150 - RNA, 19 nt, Artificial Sequence
  Description of Artificial Sequence: Synthetic oligonucleotide
aaccgcacgucccucgauc

SEQ ID NO: 2066151 - RNA, 19 nt, Artificial Sequence
  Description of Artificial Sequence: Synthetic oligonucleotide
uucaugguuggaauucaac

SEQ ID NO: 2066152 - RNA, 19 nt, Artificial Sequence
  Description of Artificial Sequence: Synthetic oligonucleotide
auguuaaggaaucaacaua

SEQ ID NO: 2066153 - RNA, 19 nt, Artificial Sequence
  Description of Artificial Sequence: Synthetic oligonucleotide
ucaaacuuauaagcuggag

SEQ ID NO: 2066154 - RNA, 19 nt, Artificial Sequence
  Description of Artificial Sequence: Synthetic oligonucleotide
ucggacaggaucaaacuua

SEQ ID NO: 2066155 - RNA, 19 nt, Artificial Sequence
  Description of Artificial Sequence: Synthetic oligonucleotide
uucauuuggagaggauagg

SEQ ID NO: 2066156 - RNA, 19 nt, Artificial Sequence
  Description of Artificial Sequence: Synthetic oligonucleotide
acaguuguacgagaucaac

SEQ ID NO: 2066157 - RNA, 19 nt, Artificial Sequence
  Description of Artificial Sequence: Synthetic oligonucleotide
uuaaggaagccgacgugcu

SEQ ID NO: 2066158 - RNA, 19 nt, Artificial Sequence
  Description of Artificial Sequence: Synthetic oligonucleotide
uggaacaaccgcacguccc

SEQ ID NO: 2066159 - RNA, 19 nt, Artificial Sequence
  Description of Artificial Sequence: Synthetic oligonucleotide
cacuacauaagagccagag

SEQ ID NO: 2066160 - RNA, 19 nt, Artificial Sequence
  Description of Artificial Sequence: Synthetic oligonucleotide
uugaaacgaucucccaggc

SEQ ID NO: 2066161 - RNA, 19 nt, Artificial Sequence
  Description of Artificial Sequence: Synthetic oligonucleotide
uaaucugaccacuucugau

SEQ ID NO: 2066162 - RNA, 19 nt, Artificial Sequence
  Description of Artificial Sequence: Synthetic oligonucleotide
gacuaccuccuuuugccag

SEQ ID NO: 2066163 - RNA, 19 nt, Artificial Sequence
  Description of Artificial Sequence: Synthetic oligonucleotide
ugacucaguuuacaguagu

SEQ ID NO: 2066164 - RNA, 19 nt, Artificial Sequence
  Description of Artificial Sequence: Synthetic oligonucleotide
uaucgacucggacaggauc

SEQ ID NO: 2066165 - RNA, 19 nt, Artificial Sequence
  Description of Artificial Sequence: Synthetic oligonucleotide
aggguaaucugaccacuuc

SEQ ID NO: 2066166 - RNA, 19 nt, Artificial Sequence
  Description of Artificial Sequence: Synthetic oligonucleotide
ucacauaucuugcucucau

SEQ ID NO: 2066167 - RNA, 19 nt, Artificial Sequence
  Description of Artificial Sequence: Synthetic oligonucleotide
ugaaacgaucucccaggcc

SEQ ID NO: 2066168 - RNA, 19 nt, Artificial Sequence
  Description of Artificial Sequence: Synthetic oligonucleotide
agacaaaggaugaaagcug

SEQ ID NO: 2066169 - RNA, 19 nt, Artificial Sequence
  Description of Artificial Sequence: Synthetic oligonucleotide
aagacuucuuuaauauaca

SEQ ID NO: 2066170 - RNA, 19 nt, Artificial Sequence
  Description of Artificial Sequence: Synthetic oligonucleotide
cauugacugcuccaucucc

SEQ ID NO: 2066171 - RNA, 19 nt, Artificial Sequence
  Description of Artificial Sequence: Synthetic oligonucleotide
agacuucuuuaauauacau

SEQ ID NO: 2066172 - RNA, 19 nt, Artificial Sequence
  Description of Artificial Sequence: Synthetic oligonucleotide
agucuugucaugaacucug

SEQ ID NO: 2066173 - RNA, 19 nt, Artificial Sequence
  Description of Artificial Sequence: Synthetic oligonucleotide
uccgucuaccagcacucgg

SEQ ID NO: 2066174 - RNA, 19 nt, Artificial Sequence
  Description of Artificial Sequence: Synthetic oligonucleotide
acuuguguugaccacuuua

SEQ ID NO: 2066175 - RNA, 19 nt, Artificial Sequence
  Description of Artificial Sequence: Synthetic oligonucleotide
acaucaggcaauucauggu

SEQ ID NO: 2066176 - RNA, 19 nt, Artificial Sequence
  Description of Artificial Sequence: Synthetic oligonucleotide
aaauaacuuccacuacaua

SEQ ID NO: 2066177 - RNA, 19 nt, Artificial Sequence
  Description of Artificial Sequence: Synthetic oligonucleotide
uuacaguagucgcuucaca

SEQ ID NO: 2066178 - RNA, 19 nt, Artificial Sequence
  Description of Artificial Sequence: Synthetic oligonucleotide
aguuugugcgauggcagcg

SEQ ID NO: 2066179 - RNA, 19 nt, Artificial Sequence
  Description of Artificial Sequence: Synthetic oligonucleotide
gaccccacuaccucccggg

SEQ ID NO: 2066180 - RNA, 19 nt, Artificial Sequence
  Description of Artificial Sequence: Synthetic oligonucleotide
gauaucgacucggacagga

SEQ ID NO: 2066181 - RNA, 19 nt, Artificial Sequence
  Description of Artificial Sequence: Synthetic oligonucleotide
aguuuacaguagucgcuuc

SEQ ID NO: 2066182 - RNA, 19 nt, Artificial Sequence
  Description of Artificial Sequence: Synthetic oligonucleotide
auguauaguacuucauaua

SEQ ID NO: 2066183 - RNA, 19 nt, Artificial Sequence
  Description of Artificial Sequence: Synthetic oligonucleotide
ggauaggguaaucugacca

SEQ ID NO: 2066184 - RNA, 19 nt, Artificial Sequence
  Description of Artificial Sequence: Synthetic oligonucleotide
gaggauaggguaaucugac

SEQ ID NO: 2066185 - RNA, 19 nt, Artificial Sequence
  Description of Artificial Sequence: Synthetic oligonucleotide
caacaguuguacgagauca

SEQ ID NO: 2066186 - RNA, 19 nt, Artificial Sequence
  Description of Artificial Sequence: Synthetic oligonucleotide
cacgacucccucuugauga

SEQ ID NO: 2066187 - RNA, 19 nt, Artificial Sequence
  Description of Artificial Sequence: Synthetic oligonucleotide
ucgaucuugaaacgaucuc

SEQ ID NO: 2066188 - RNA, 19 nt, Artificial Sequence
  Description of Artificial Sequence: Synthetic oligonucleotide
acucggacaggaucaaacu

SEQ ID NO: 2066189 - RNA, 19 nt, Artificial Sequence
  Description of Artificial Sequence: Synthetic oligonucleotide
cagaggauuuugaagagaa

SEQ ID NO: 2066190 - RNA, 19 nt, Artificial Sequence
  Description of Artificial Sequence: Synthetic oligonucleotide
ucuauaggacacuguaauu

SEQ ID NO: 2066191 - RNA, 19 nt, Artificial Sequence
  Description of Artificial Sequence: Synthetic oligonucleotide
uguucauugacugcuccau

SEQ ID NO: 2066192 - RNA, 19 nt, Artificial Sequence
  Description of Artificial Sequence: Synthetic oligonucleotide
cagaaagucuguccagccc

SEQ ID NO: 2066193 - RNA, 19 nt, Artificial Sequence
  Description of Artificial Sequence: Synthetic oligonucleotide
gggaauaucaugaaccaca

SEQ ID NO: 2066194 - RNA, 19 nt, Artificial Sequence
  Description of Artificial Sequence: Synthetic oligonucleotide
cauuuucuauaggacacug

SEQ ID NO: 2066195 - RNA, 19 nt, Artificial Sequence
  Description of Artificial Sequence: Synthetic oligonucleotide
aagccgacgugcucuucuc

SEQ ID NO: 2066196 - RNA, 19 nt, Artificial Sequence
  Description of Artificial Sequence: Synthetic oligonucleotide
ggaaggaccaucaucauaa

SEQ ID NO: 2066197 - RNA, 19 nt, Artificial Sequence
  Description of Artificial Sequence: Synthetic oligonucleotide
ucauugacugcuccaucuc

SEQ ID NO: 2066198 - RNA, 19 nt, Artificial Sequence
  Description of Artificial Sequence: Synthetic oligonucleotide
ucucccgucucaugucagg

SEQ ID NO: 2066199 - RNA, 19 nt, Artificial Sequence
  Description of Artificial Sequence: Synthetic oligonucleotide
cuauaggacacuguaauua

SEQ ID NO: 2066200 - RNA, 19 nt, Artificial Sequence
  Description of Artificial Sequence: Synthetic oligonucleotide
agccaaguuugugcgaugg

SEQ ID NO: 2066201 - RNA, 19 nt, Artificial Sequence
  Description of Artificial Sequence: Synthetic oligonucleotide
acauauguuaaggaaucaa

SEQ ID NO: 2066202 - RNA, 19 nt, Artificial Sequence
  Description of Artificial Sequence: Synthetic oligonucleotide
aucucccgauaguaacagc

SEQ ID NO: 2066203 - RNA, 19 nt, Artificial Sequence
  Description of Artificial Sequence: Synthetic oligonucleotide
cacacgguuuaccaucaag

SEQ ID NO: 2066204 - RNA, 19 nt, Artificial Sequence
  Description of Artificial Sequence: Synthetic oligonucleotide
auguucauugacugcucca

SEQ ID NO: 2066205 - RNA, 19 nt, Artificial Sequence
  Description of Artificial Sequence: Synthetic oligonucleotide
cucccgauaguaacagcag

SEQ ID NO: 2066206 - RNA, 19 nt, Artificial Sequence
  Description of Artificial Sequence: Synthetic oligonucleotide
uggaaggaccaucaucaua

SEQ ID NO: 2066207 - RNA, 19 nt, Artificial Sequence
  Description of Artificial Sequence: Synthetic oligonucleotide
cagagggaauaucaugaac

SEQ ID NO: 2066208 - RNA, 19 nt, Artificial Sequence
  Description of Artificial Sequence: Synthetic oligonucleotide
gaucacuuguguugaccac

SEQ ID NO: 2066209 - RNA, 19 nt, Artificial Sequence
  Description of Artificial Sequence: Synthetic oligonucleotide
ggacacuguaauuaauuca

SEQ ID NO: 2066210 - RNA, 19 nt, Artificial Sequence
  Description of Artificial Sequence: Synthetic oligonucleotide
uuugugcgauggcagcgca

SEQ ID NO: 2066211 - RNA, 19 nt, Artificial Sequence
  Description of Artificial Sequence: Synthetic oligonucleotide
uuuuacugcugccgcuacu

SEQ ID NO: 2066212 - RNA, 19 nt, Artificial Sequence
  Description of Artificial Sequence: Synthetic oligonucleotide
cacuuuaggcagaagcaca

SEQ ID NO: 2066213 - RNA, 19 nt, Artificial Sequence
  Description of Artificial Sequence: Synthetic oligonucleotide
aucgacucggacaggauca

SEQ ID NO: 2066214 - RNA, 19 nt, Artificial Sequence
  Description of Artificial Sequence: Synthetic oligonucleotide
guuuaccaucaagacuugg

SEQ ID NO: 2066215 - RNA, 19 nt, Artificial Sequence
  Description of Artificial Sequence: Synthetic oligonucleotide
auagccaaguuugugcgau

SEQ ID NO: 2066216 - RNA, 19 nt, Artificial Sequence
  Description of Artificial Sequence: Synthetic oligonucleotide
agccgacgugcucuucucc

SEQ ID NO: 2066217 - RNA, 19 nt, Artificial Sequence
  Description of Artificial Sequence: Synthetic oligonucleotide
auaauggaaggaccaucau

SEQ ID NO: 2066218 - RNA, 19 nt, Artificial Sequence
  Description of Artificial Sequence: Synthetic oligonucleotide
uguuuuacugcugccgcua

SEQ ID NO: 2066219 - RNA, 19 nt, Artificial Sequence
  Description of Artificial Sequence: Synthetic oligonucleotide
agucgcuucacacgguuua

SEQ ID NO: 2066220 - RNA, 19 nt, Artificial Sequence
  Description of Artificial Sequence: Synthetic oligonucleotide
aucaacuuucaggaugacu

SEQ ID NO: 2066221 - RNA, 19 nt, Artificial Sequence
  Description of Artificial Sequence: Synthetic oligonucleotide
caucucccgauaguaacag

SEQ ID NO: 2066222 - RNA, 19 nt, Artificial Sequence
  Description of Artificial Sequence: Synthetic oligonucleotide
ggaucacuuguguugacca

SEQ ID NO: 2066223 - RNA, 19 nt, Artificial Sequence
  Description of Artificial Sequence: Synthetic oligonucleotide
cuggaacaaccgcacgucc

SEQ ID NO: 2066224 - RNA, 19 nt, Artificial Sequence
  Description of Artificial Sequence: Synthetic oligonucleotide
aacgaucucccaggccgac

SEQ ID NO: 2066225 - RNA, 19 nt, Artificial Sequence
  Description of Artificial Sequence: Synthetic oligonucleotide
guacgagaucaacuuucag

SEQ ID NO: 2066226 - RNA, 19 nt, Artificial Sequence
  Description of Artificial Sequence: Synthetic oligonucleotide
gguaaucugaccacuucug

SEQ ID NO: 2066227 - RNA, 19 nt, Artificial Sequence
  Description of Artificial Sequence: Synthetic oligonucleotide
uaaggaagccgacgugcuc

SEQ ID NO: 2066228 - RNA, 19 nt, Artificial Sequence
  Description of Artificial Sequence: Synthetic oligonucleotide
cgucccucgaucuugaaac

SEQ ID NO: 2066229 - RNA, 19 nt, Artificial Sequence
  Description of Artificial Sequence: Synthetic oligonucleotide
gagucaggcccacggcccg

SEQ ID NO: 2066230 - RNA, 19 nt, Artificial Sequence
  Description of Artificial Sequence: Synthetic oligonucleotide
ugucaggaucacuuguguu

SEQ ID NO: 2066231 - RNA, 19 nt, Artificial Sequence
  Description of Artificial Sequence: Synthetic oligonucleotide
gucccucgaucuugaaacg

SEQ ID NO: 2066232 - RNA, 19 nt, Artificial Sequence
  Description of Artificial Sequence: Synthetic oligonucleotide
caacauagacaacaguugu

SEQ ID NO: 2066233 - RNA, 19 nt, Artificial Sequence
  Description of Artificial Sequence: Synthetic oligonucleotide
caugguuggaauucaacau

SEQ ID NO: 2066234 - RNA, 19 nt, Artificial Sequence
  Description of Artificial Sequence: Synthetic oligonucleotide
gaaggaccaucaucauaac

SEQ ID NO: 2066235 - RNA, 19 nt, Artificial Sequence
  Description of Artificial Sequence: Synthetic oligonucleotide
uaggguaaucugaccacuu

SEQ ID NO: 2066236 - RNA, 19 nt, Artificial Sequence
  Description of Artificial Sequence: Synthetic oligonucleotide
uugugcgauggcagcgcag

SEQ ID NO: 2066237 - RNA, 19 nt, Artificial Sequence
  Description of Artificial Sequence: Synthetic oligonucleotide
gaagugauaucgacucgga

SEQ ID NO: 2066238 - RNA, 19 nt, Artificial Sequence
  Description of Artificial Sequence: Synthetic oligonucleotide
cucccucuugaugaaguag

SEQ ID NO: 2066239 - RNA, 19 nt, Artificial Sequence
  Description of Artificial Sequence: Synthetic oligonucleotide
aggccgaccccacuaccuc

SEQ ID NO: 2066240 - RNA, 19 nt, Artificial Sequence
  Description of Artificial Sequence: Synthetic oligonucleotide
aucaggcaauucaugguug

SEQ ID NO: 2066241 - RNA, 19 nt, Artificial Sequence
  Description of Artificial Sequence: Synthetic oligonucleotide
guuugugcgauggcagcgc

SEQ ID NO: 2066242 - RNA, 19 nt, Artificial Sequence
  Description of Artificial Sequence: Synthetic oligonucleotide
ugggcaucucccgauagua

SEQ ID NO: 2066243 - RNA, 19 nt, Artificial Sequence
  Description of Artificial Sequence: Synthetic oligonucleotide
ugccgcuacuggauuugcc

SEQ ID NO: 2066244 - RNA, 19 nt, Artificial Sequence
  Description of Artificial Sequence: Synthetic oligonucleotide
aacaguuguacgagaucaa

SEQ ID NO: 2066245 - RNA, 19 nt, Artificial Sequence
  Description of Artificial Sequence: Synthetic oligonucleotide
guuuuacugcugccgcuac

SEQ ID NO: 2066246 - RNA, 19 nt, Artificial Sequence
  Description of Artificial Sequence: Synthetic oligonucleotide
cgaucuugaaacgaucucc

SEQ ID NO: 2066247 - RNA, 19 nt, Artificial Sequence
  Description of Artificial Sequence: Synthetic oligonucleotide
ccgucuaccagcacucggg

SEQ ID NO: 2066248 - RNA, 19 nt, Artificial Sequence
  Description of Artificial Sequence: Synthetic oligonucleotide
ugacugcuccaucucccgu

SEQ ID NO: 2066249 - RNA, 19 nt, Artificial Sequence
  Description of Artificial Sequence: Synthetic oligonucleotide
gaauaucaugaaccacaaa

SEQ ID NO: 2066250 - RNA, 19 nt, Artificial Sequence
  Description of Artificial Sequence: Synthetic oligonucleotide
cucgaucuugaaacgaucu

SEQ ID NO: 2066251 - RNA, 19 nt, Artificial Sequence
  Description of Artificial Sequence: Synthetic oligonucleotide
uuggagaggauaggguaau

SEQ ID NO: 2066252 - RNA, 19 nt, Artificial Sequence
  Description of Artificial Sequence: Synthetic oligonucleotide
aggcaauucaugguuggaa

SEQ ID NO: 2066253 - RNA, 19 nt, Artificial Sequence
  Description of Artificial Sequence: Synthetic oligonucleotide
ucccucgaucuugaaacga

SEQ ID NO: 2066254 - RNA, 19 nt, Artificial Sequence
  Description of Artificial Sequence: Synthetic oligonucleotide
guuaaggaaucaacauaga

SEQ ID NO: 2066255 - RNA, 19 nt, Artificial Sequence
  Description of Artificial Sequence: Synthetic oligonucleotide
gaaguaggaagguggcccu

SEQ ID NO: 2066256 - RNA, 19 nt, Artificial Sequence
  Description of Artificial Sequence: Synthetic oligonucleotide
cgauaguaacagcaggagg

SEQ ID NO: 2066257 - RNA, 19 nt, Artificial Sequence
  Description of Artificial Sequence: Synthetic oligonucleotide
ugauaucgacucggacagg

SEQ ID NO: 2066258 - RNA, 19 nt, Artificial Sequence
  Description of Artificial Sequence: Synthetic oligonucleotide
aucaaacuuauaagcugga

SEQ ID NO: 2066259 - RNA, 19 nt, Artificial Sequence
  Description of Artificial Sequence: Synthetic oligonucleotide
caucugucuuaaggaagcc

SEQ ID NO: 2066260 - RNA, 19 nt, Artificial Sequence
  Description of Artificial Sequence: Synthetic oligonucleotide
accccuggaacaaccgcac

SEQ ID NO: 2066261 - RNA, 19 nt, Artificial Sequence
  Description of Artificial Sequence: Synthetic oligonucleotide
ugaccacuucugauguuuu

SEQ ID NO: 2066262 - RNA, 19 nt, Artificial Sequence
  Description of Artificial Sequence: Synthetic oligonucleotide
cagagcacccgccaugaca

SEQ ID NO: 2066263 - RNA, 19 nt, Artificial Sequence
  Description of Artificial Sequence: Synthetic oligonucleotide
aaacgaucucccaggccga

SEQ ID NO: 2066264 - RNA, 19 nt, Artificial Sequence
  Description of Artificial Sequence: Synthetic oligonucleotide
gccgacgugcucuucuccg

SEQ ID NO: 2066265 - RNA, 19 nt, Artificial Sequence
  Description of Artificial Sequence: Synthetic oligonucleotide
ccgagauccaguccugagg

SEQ ID NO: 2066266 - RNA, 19 nt, Artificial Sequence
  Description of Artificial Sequence: Synthetic oligonucleotide
accgcacgucccucgaucu

SEQ ID NO: 2066267 - RNA, 19 nt, Artificial Sequence
  Description of Artificial Sequence: Synthetic oligonucleotide
gaagccgacgugcucuucu

SEQ ID NO: 2066268 - RNA, 19 nt, Artificial Sequence
  Description of Artificial Sequence: Synthetic oligonucleotide
augaacucugagacaucag

SEQ ID NO: 2066269 - RNA, 19 nt, Artificial Sequence
  Description of Artificial Sequence: Synthetic oligonucleotide
caguuguacgagaucaacu

SEQ ID NO: 2066270 - RNA, 19 nt, Artificial Sequence
  Description of Artificial Sequence: Synthetic oligonucleotide
acacuguaauuaauucagu

SEQ ID NO: 2066271 - RNA, 19 nt, Artificial Sequence
  Description of Artificial Sequence: Synthetic oligonucleotide
acgucccucgaucuugaaa

SEQ ID NO: 2066272 - RNA, 19 nt, Artificial Sequence
  Description of Artificial Sequence: Synthetic oligonucleotide
cauacagacaaaggaugaa

SEQ ID NO: 2066273 - RNA, 19 nt, Artificial Sequence
  Description of Artificial Sequence: Synthetic oligonucleotide
acuggauuugccagaggau

SEQ ID NO: 2066274 - RNA, 19 nt, Artificial Sequence
  Description of Artificial Sequence: Synthetic oligonucleotide
cuaccuccuuuugccagcc

SEQ ID NO: 2066275 - RNA, 19 nt, Artificial Sequence
  Description of Artificial Sequence: Synthetic oligonucleotide
gccgcuacuggauuugcca

SEQ ID NO: 2066276 - RNA, 19 nt, Artificial Sequence
  Description of Artificial Sequence: Synthetic oligonucleotide
ggaauaucaugaaccacaa

SEQ ID NO: 2066277 - RNA, 19 nt, Artificial Sequence
  Description of Artificial Sequence: Synthetic oligonucleotide
ucccaggccgaccccacua

SEQ ID NO: 2066278 - RNA, 19 nt, Artificial Sequence
  Description of Artificial Sequence: Synthetic oligonucleotide
augaaccacaaagcuccca

SEQ ID NO: 2066279 - RNA, 19 nt, Artificial Sequence
  Description of Artificial Sequence: Synthetic oligonucleotide
uagucgcuucacacgguuu

SEQ ID NO: 2066280 - RNA, 19 nt, Artificial Sequence
  Description of Artificial Sequence: Synthetic oligonucleotide
caucaagacuuggaugcca

SEQ ID NO: 2066281 - RNA, 19 nt, Artificial Sequence
  Description of Artificial Sequence: Synthetic oligonucleotide
ggguaaucugaccacuucu

SEQ ID NO: 2066282 - RNA, 19 nt, Artificial Sequence
  Description of Artificial Sequence: Synthetic oligonucleotide
ggagucaggcccacggccc

SEQ ID NO: 2066283 - RNA, 19 nt, Artificial Sequence
  Description of Artificial Sequence: Synthetic oligonucleotide
guuguacgagaucaacuuu

SEQ ID NO: 2066284 - RNA, 19 nt, Artificial Sequence
  Description of Artificial Sequence: Synthetic oligonucleotide
ucacacgguuuaccaucaa

SEQ ID NO: 2066285 - RNA, 19 nt, Artificial Sequence
  Description of Artificial Sequence: Synthetic oligonucleotide
gaucaacuuucaggaugac

SEQ ID NO: 2066286 - RNA, 19 nt, Artificial Sequence
  Description of Artificial Sequence: Synthetic oligonucleotide
cagcgcaggcuugacuacc

SEQ ID NO: 2066287 - RNA, 19 nt, Artificial Sequence
  Description of Artificial Sequence: Synthetic oligonucleotide
ggcaauucaugguuggaau

SEQ ID NO: 2066288 - RNA, 19 nt, Artificial Sequence
  Description of Artificial Sequence: Synthetic oligonucleotide
gcuugacuaccuccuuuug

SEQ ID NO: 2066289 - RNA, 19 nt, Artificial Sequence
  Description of Artificial Sequence: Synthetic oligonucleotide
ccaaguuugugcgauggca

SEQ ID NO: 2066290 - RNA, 19 nt, Artificial Sequence
  Description of Artificial Sequence: Synthetic oligonucleotide
cuaccagcacucgggccgc

SEQ ID NO: 2066291 - RNA, 19 nt, Artificial Sequence
  Description of Artificial Sequence: Synthetic oligonucleotide
cuaccucccgggcccucgg

SEQ ID NO: 2066292 - RNA, 19 nt, Artificial Sequence
  Description of Artificial Sequence: Synthetic oligonucleotide
ggaacaaccgcacgucccu

SEQ ID NO: 2066293 - RNA, 19 nt, Artificial Sequence
  Description of Artificial Sequence: Synthetic oligonucleotide
cuccuuuugccagccccac

SEQ ID NO: 2066294 - RNA, 19 nt, Artificial Sequence
  Description of Artificial Sequence: Synthetic oligonucleotide
aguagucgcuucacacggu

SEQ ID NO: 2066295 - RNA, 19 nt, Artificial Sequence
  Description of Artificial Sequence: Synthetic oligonucleotide
cccgucucaugucaggauc

SEQ ID NO: 2066296 - RNA, 19 nt, Artificial Sequence
  Description of Artificial Sequence: Synthetic oligonucleotide
ggagaggauaggguaaucu

SEQ ID NO: 2066297 - RNA, 19 nt, Artificial Sequence
  Description of Artificial Sequence: Synthetic oligonucleotide
gccaaguuugugcgauggc

SEQ ID NO: 2066298 - RNA, 19 nt, Artificial Sequence
  Description of Artificial Sequence: Synthetic oligonucleotide
cuccgucuaccagcacucg

SEQ ID NO: 2066299 - RNA, 19 nt, Artificial Sequence
  Description of Artificial Sequence: Synthetic oligonucleotide
gacgugcucuucuccgucu

SEQ ID NO: 2066300 - RNA, 19 nt, Artificial Sequence
  Description of Artificial Sequence: Synthetic oligonucleotide
gugcgauggcagcgcaggc

SEQ ID NO: 2066301 - RNA, 19 nt, Artificial Sequence
  Description of Artificial Sequence: Synthetic oligonucleotide
ucgacucggacaggaucaa

SEQ ID NO: 2066302 - RNA, 19 nt, Artificial Sequence
  Description of Artificial Sequence: Synthetic oligonucleotide
uaccucccgggcccucggc

SEQ ID NO: 2066303 - RNA, 19 nt, Artificial Sequence
  Description of Artificial Sequence: Synthetic oligonucleotide
auaucgacucggacaggau

SEQ ID NO: 2066304 - RNA, 19 nt, Artificial Sequence
  Description of Artificial Sequence: Synthetic oligonucleotide
cugaggagucaggcccacg

SEQ ID NO: 2066305 - RNA, 19 nt, Artificial Sequence
  Description of Artificial Sequence: Synthetic oligonucleotide
agcgcaggcuugacuaccu

SEQ ID NO: 2066306 - RNA, 19 nt, Artificial Sequence
  Description of Artificial Sequence: Synthetic oligonucleotide
cugauguuuugauguaauu

SEQ ID NO: 2066307 - RNA, 19 nt, Artificial Sequence
  Description of Artificial Sequence: Synthetic oligonucleotide
ggccgaccccacuaccucc

SEQ ID NO: 2066308 - RNA, 19 nt, Artificial Sequence
  Description of Artificial Sequence: Synthetic oligonucleotide
gagauccaguccugaggcu

SEQ ID NO: 2066309 - RNA, 19 nt, Artificial Sequence
  Description of Artificial Sequence: Synthetic oligonucleotide
aggaagccgacgugcucuu

SEQ ID NO: 2066310 - RNA, 19 nt, Artificial Sequence
  Description of Artificial Sequence: Synthetic oligonucleotide
cugccgcuacuggauuugc

SEQ ID NO: 2066311 - RNA, 19 nt, Artificial Sequence
  Description of Artificial Sequence: Synthetic oligonucleotide
cucccgucucaugucagga

SEQ ID NO: 2066312 - RNA, 19 nt, Artificial Sequence
  Description of Artificial Sequence: Synthetic oligonucleotide
ccaucaagacuuggaugcc

SEQ ID NO: 2066313 - RNA, 19 nt, Artificial Sequence
  Description of Artificial Sequence: Synthetic oligonucleotide
cucggacaggaucaaacuu

SEQ ID NO: 2066314 - RNA, 19 nt, Artificial Sequence
  Description of Artificial Sequence: Synthetic oligonucleotide
caggcaauucaugguugga

SEQ ID NO: 2066315 - RNA, 19 nt, Artificial Sequence
  Description of Artificial Sequence: Synthetic oligonucleotide
gcaauucaugguuggaauu

SEQ ID NO: 2066316 - RNA, 19 nt, Artificial Sequence
  Description of Artificial Sequence: Synthetic oligonucleotide
caguuuacaguagucgcuu

SEQ ID NO: 2066317 - RNA, 19 nt, Artificial Sequence
  Description of Artificial Sequence: Synthetic oligonucleotide
ccgucucaugucaggauca

SEQ ID NO: 2066318 - RNA, 19 nt, Artificial Sequence
  Description of Artificial Sequence: Synthetic oligonucleotide
gcagcgcaggcuugacuac

SEQ ID NO: 2066319 - RNA, 19 nt, Artificial Sequence
  Description of Artificial Sequence: Synthetic oligonucleotide
caggccgaccccacuaccu

SEQ ID NO: 2066320 - RNA, 19 nt, Artificial Sequence
  Description of Artificial Sequence: Synthetic oligonucleotide
ggaugaaagcuggguuuuc

SEQ ID NO: 2066321 - RNA, 19 nt, Artificial Sequence
  Description of Artificial Sequence: Synthetic oligonucleotide
gcacccgccaugacagcag

SEQ ID NO: 2066322 - RNA, 19 nt, Artificial Sequence
  Description of Artificial Sequence: Synthetic oligonucleotide
gguggcccugaagauuuca

SEQ ID NO: 2066323 - RNA, 19 nt, Artificial Sequence
  Description of Artificial Sequence: Synthetic oligonucleotide
cacucgggccgccgagauc

SEQ ID NO: 2066324 - RNA, 19 nt, Artificial Sequence
  Description of Artificial Sequence: Synthetic oligonucleotide
gggccgccgagauccaguc

SEQ ID NO: 2066325 - RNA, 19 nt, Artificial Sequence
  Description of Artificial Sequence: Synthetic oligonucleotide
cugugggcaucucccgaua

SEQ ID NO: 2066326 - RNA, 19 nt, Artificial Sequence
  Description of Artificial Sequence: Synthetic oligonucleotide
cgcacgucccucgaucuug

SEQ ID NO: 2066327 - RNA, 19 nt, Artificial Sequence
  Description of Artificial Sequence: Synthetic oligonucleotide
ggccgccgagauccagucc

SEQ ID NO: 2066328 - RNA, 19 nt, Artificial Sequence
  Description of Artificial Sequence: Synthetic oligonucleotide
acccgccaugacagcagcu

SEQ ID NO: 2066329 - RNA, 19 nt, Artificial Sequence
  Description of Artificial Sequence: Synthetic oligonucleotide
gcugugggcaucucccgau

SEQ ID NO: 2066330 - RNA, 19 nt, Artificial Sequence
  Description of Artificial Sequence: Synthetic oligonucleotide
cccuggaacaaccgcacgu

SEQ ID NO: 2066331 - RNA, 19 nt, Artificial Sequence
  Description of Artificial Sequence: Synthetic oligonucleotide
ccaggcaccuccgagcugu

SEQ ID NO: 2066332 - RNA, 19 nt, Artificial Sequence
  Description of Artificial Sequence: Synthetic oligonucleotide
ccgaccccacuaccucccg

SEQ ID NO: 2066333 - RNA, 19 nt, Artificial Sequence
  Description of Artificial Sequence: Synthetic oligonucleotide
cgaccccacuaccucccgg

SEQ ID NO: 2066334 - RNA, 19 nt, Artificial Sequence
  Description of Artificial Sequence: Synthetic oligonucleotide
cccucgaucuugaaacgau

SEQ ID NO: 2066335 - RNA, 19 nt, Artificial Sequence
  Description of Artificial Sequence: Synthetic oligonucleotide
cgucucaugucaggaucac

SEQ ID NO: 2066336 - RNA, 19 nt, Artificial Sequence
  Description of Artificial Sequence: Synthetic oligonucleotide
cacgucccucgaucuugaa

SEQ ID NO: 2066337 - RNA, 19 nt, Artificial Sequence
  Description of Artificial Sequence: Synthetic oligonucleotide
gcacgucccucgaucuuga

SEQ ID NO: 2066338 - RNA, 19 nt, Artificial Sequence
  Description of Artificial Sequence: Synthetic oligonucleotide
caccugguauagccaaguu

SEQ ID NO: 2066339 - RNA, 19 nt, Artificial Sequence
  Description of Artificial Sequence: Synthetic oligonucleotide
ccacuacauaagagccaga

SEQ ID NO: 2066340 - RNA, 19 nt, Artificial Sequence
  Description of Artificial Sequence: Synthetic oligonucleotide
cgauggcagcgcaggcuug

SEQ ID NO: 2066341 - RNA, 19 nt, Artificial Sequence
  Description of Artificial Sequence: Synthetic oligonucleotide
ggaagccgacgugcucuuc

SEQ ID NO: 2066342 - RNA, 19 nt, Artificial Sequence
  Description of Artificial Sequence: Synthetic oligonucleotide
cucgggccgccgagaucca

SEQ ID NO: 2066343 - RNA, 19 nt, Artificial Sequence
  Description of Artificial Sequence: Synthetic oligonucleotide
ccaccugguauagccaagu

SEQ ID NO: 2066344 - RNA, 19 nt, Artificial Sequence
  Description of Artificial Sequence: Synthetic oligonucleotide
cccaggcaccuccgagcug

SEQ ID NO: 2066345 - RNA, 19 nt, Artificial Sequence
  Description of Artificial Sequence: Synthetic oligonucleotide
caaccgcacgucccucgau

SEQ ID NO: 2066346 - RNA, 19 nt, Artificial Sequence
  Description of Artificial Sequence: Synthetic oligonucleotide
cagccccacuuuugccugu

SEQ ID NO: 2066347 - RNA, 19 nt, Artificial Sequence
  Description of Artificial Sequence: Synthetic oligonucleotide
ccgccaugacagcagcucu

SEQ ID NO: 2066348 - RNA, 19 nt, Artificial Sequence
  Description of Artificial Sequence: Synthetic oligonucleotide
cucccaggccgaccccacu

SEQ ID NO: 2066349 - RNA, 19 nt, Artificial Sequence
  Description of Artificial Sequence: Synthetic oligonucleotide
gcacucgggccgccgagau

SEQ ID NO: 2066350 - RNA, 19 nt, Artificial Sequence
  Description of Artificial Sequence: Synthetic oligonucleotide
ccgacgugcucuucuccgu

SEQ ID NO: 2066351 - RNA, 19 nt, Artificial Sequence
  Description of Artificial Sequence: Synthetic oligonucleotide
cgagaucaacuuucaggau

SEQ ID NO: 2066352 - RNA, 19 nt, Artificial Sequence
  Description of Artificial Sequence: Synthetic oligonucleotide
cgccgagauccaguccuga

SEQ ID NO: 2066353 - RNA, 19 nt, Artificial Sequence
  Description of Artificial Sequence: Synthetic oligonucleotide
cgggccgccgagauccagu

SEQ ID NO: 2066354 - RNA, 19 nt, Artificial Sequence
  Description of Artificial Sequence: Synthetic oligonucleotide
cgacucggacaggaucaaa

SEQ ID NO: 2066355 - RNA, 19 nt, Artificial Sequence
  Description of Artificial Sequence: Synthetic oligonucleotide
ccgcacgucccucgaucuu

SEQ ID NO: 2066356 - RNA, 19 nt, Artificial Sequence
  Description of Artificial Sequence: Synthetic oligonucleotide
uuucuuugaaccaagaugg

SEQ ID NO: 2066357 - RNA, 19 nt, Artificial Sequence
  Description of Artificial Sequence: Synthetic oligonucleotide
uaugguaucacuacgacag

SEQ ID NO: 2066358 - RNA, 19 nt, Artificial Sequence
  Description of Artificial Sequence: Synthetic oligonucleotide
cuugauuugaggaaaauag

SEQ ID NO: 2066359 - RNA, 19 nt, Artificial Sequence
  Description of Artificial Sequence: Synthetic oligonucleotide
uaauuauccgcucugauga

SEQ ID NO: 2066360 - RNA, 19 nt, Artificial Sequence
  Description of Artificial Sequence: Synthetic oligonucleotide
uuuuaguaggcaaugagcu

SEQ ID NO: 2066361 - RNA, 19 nt, Artificial Sequence
  Description of Artificial Sequence: Synthetic oligonucleotide
uuuugggugauucaggagc

SEQ ID NO: 2066362 - RNA, 19 nt, Artificial Sequence
  Description of Artificial Sequence: Synthetic oligonucleotide
aauagaugaaguaugguug

SEQ ID NO: 2066363 - RNA, 19 nt, Artificial Sequence
  Description of Artificial Sequence: Synthetic oligonucleotide
aaauagaugaaguaugguu

SEQ ID NO: 2066364 - RNA, 19 nt, Artificial Sequence
  Description of Artificial Sequence: Synthetic oligonucleotide
auagaugaaguaugguugc

SEQ ID NO: 2066365 - RNA, 19 nt, Artificial Sequence
  Description of Artificial Sequence: Synthetic oligonucleotide
ugugagaacaucucuaggc

SEQ ID NO: 2066366 - RNA, 19 nt, Artificial Sequence
  Description of Artificial Sequence: Synthetic oligonucleotide
aaagaugccggccaucguc

SEQ ID NO: 2066367 - RNA, 19 nt, Artificial Sequence
  Description of Artificial Sequence: Synthetic oligonucleotide
aauacaggcgcucucccuc

SEQ ID NO: 2066368 - RNA, 19 nt, Artificial Sequence
  Description of Artificial Sequence: Synthetic oligonucleotide
agucuagccauuuggagac

SEQ ID NO: 2066369 - RNA, 19 nt, Artificial Sequence
  Description of Artificial Sequence: Synthetic oligonucleotide
ggugauauugucuaugggg

SEQ ID NO: 2066370 - RNA, 19 nt, Artificial Sequence
  Description of Artificial Sequence: Synthetic oligonucleotide
ucuuuuaguaggcaaugag

SEQ ID NO: 2066371 - RNA, 19 nt, Artificial Sequence
  Description of Artificial Sequence: Synthetic oligonucleotide
cuuuuaguaggcaaugagc

SEQ ID NO: 2066372 - RNA, 19 nt, Artificial Sequence
  Description of Artificial Sequence: Synthetic oligonucleotide
ucugcuaaaacaacacagc

SEQ ID NO: 2066373 - RNA, 19 nt, Artificial Sequence
  Description of Artificial Sequence: Synthetic oligonucleotide
ucuacaggaauccacugug

SEQ ID NO: 2066374 - RNA, 19 nt, Artificial Sequence
  Description of Artificial Sequence: Synthetic oligonucleotide
auuaugguaucacuacgac

SEQ ID NO: 2066375 - RNA, 19 nt, Artificial Sequence
  Description of Artificial Sequence: Synthetic oligonucleotide
cuuugaaccaagauggaac

SEQ ID NO: 2066376 - RNA, 19 nt, Artificial Sequence
  Description of Artificial Sequence: Synthetic oligonucleotide
aacaucucuaggcagguga

SEQ ID NO: 2066377 - RNA, 19 nt, Artificial Sequence
  Description of Artificial Sequence: Synthetic oligonucleotide
aagucuagccauuuggaga

SEQ ID NO: 2066378 - RNA, 19 nt, Artificial Sequence
  Description of Artificial Sequence: Synthetic oligonucleotide
caugggaauaauuauccgc

SEQ ID NO: 2066379 - RNA, 19 nt, Artificial Sequence
  Description of Artificial Sequence: Synthetic oligonucleotide
ugcuguaggaauacaggcg

SEQ ID NO: 2066380 - RNA, 19 nt, Artificial Sequence
  Description of Artificial Sequence: Synthetic oligonucleotide
auaauuauccgcucugaug

SEQ ID NO: 2066381 - RNA, 19 nt, Artificial Sequence
  Description of Artificial Sequence: Synthetic oligonucleotide
gauauugucuauggggugg

SEQ ID NO: 2066382 - RNA, 19 nt, Artificial Sequence
  Description of Artificial Sequence: Synthetic oligonucleotide
ucuaguauggcaggcaucc

SEQ ID NO: 2066383 - RNA, 19 nt, Artificial Sequence
  Description of Artificial Sequence: Synthetic oligonucleotide
accaagauggaaccaggcc

SEQ ID NO: 2066384 - RNA, 19 nt, Artificial Sequence
  Description of Artificial Sequence: Synthetic oligonucleotide
gaugcuguaggaauacagg

SEQ ID NO: 2066385 - RNA, 19 nt, Artificial Sequence
  Description of Artificial Sequence: Synthetic oligonucleotide
gauuugaggaaaauagaug

SEQ ID NO: 2066386 - RNA, 19 nt, Artificial Sequence
  Description of Artificial Sequence: Synthetic oligonucleotide
gaucgugauaggcacaggc

SEQ ID NO: 2066387 - RNA, 19 nt, Artificial Sequence
  Description of Artificial Sequence: Synthetic oligonucleotide
aauaauuauccgcucugau

SEQ ID NO: 2066388 - RNA, 19 nt, Artificial Sequence
  Description of Artificial Sequence: Synthetic oligonucleotide
ucgugauaggcacaggccc

SEQ ID NO: 2066389 - RNA, 19 nt, Artificial Sequence
  Description of Artificial Sequence: Synthetic oligonucleotide
acugggguacaccugacuc

SEQ ID NO: 2066390 - RNA, 19 nt, Artificial Sequence
  Description of Artificial Sequence: Synthetic oligonucleotide
aggaucacuuucuuugaac

SEQ ID NO: 2066391 - RNA, 19 nt, Artificial Sequence
  Description of Artificial Sequence: Synthetic oligonucleotide
ugacaccucuuuuaguagg

SEQ ID NO: 2066392 - RNA, 19 nt, Artificial Sequence
  Description of Artificial Sequence: Synthetic oligonucleotide
cauugcaucauccuuugac

SEQ ID NO: 2066393 - RNA, 19 nt, Artificial Sequence
  Description of Artificial Sequence: Synthetic oligonucleotide
ucguccuuuucccagagga

SEQ ID NO: 2066394 - RNA, 19 nt, Artificial Sequence
  Description of Artificial Sequence: Synthetic oligonucleotide
ugcuaaaacaacacagcgu

SEQ ID NO: 2066395 - RNA, 19 nt, Artificial Sequence
  Description of Artificial Sequence: Synthetic oligonucleotide
uuuccuugcugucagggcu

SEQ ID NO: 2066396 - RNA, 19 nt, Artificial Sequence
  Description of Artificial Sequence: Synthetic oligonucleotide
uccauuaugguaucacuac

SEQ ID NO: 2066397 - RNA, 19 nt, Artificial Sequence
  Description of Artificial Sequence: Synthetic oligonucleotide
ucaccaccaagccagcagg

SEQ ID NO: 2066398 - RNA, 19 nt, Artificial Sequence
  Description of Artificial Sequence: Synthetic oligonucleotide
acagcgucguccuuuuccc

SEQ ID NO: 2066399 - RNA, 19 nt, Artificial Sequence
  Description of Artificial Sequence: Synthetic oligonucleotide
aucugcuaaaacaacacag

SEQ ID NO: 2066400 - RNA, 19 nt, Artificial Sequence
  Description of Artificial Sequence: Synthetic oligonucleotide
gcuaaaacaacacagcguc

SEQ ID NO: 2066401 - RNA, 19 nt, Artificial Sequence
  Description of Artificial Sequence: Synthetic oligonucleotide
guaucacuacgacaguugg

SEQ ID NO: 2066402 - RNA, 19 nt, Artificial Sequence
  Description of Artificial Sequence: Synthetic oligonucleotide
uaaaacaacacagcgucgu

SEQ ID NO: 2066403 - RNA, 19 nt, Artificial Sequence
  Description of Artificial Sequence: Synthetic oligonucleotide
uguggauuucgcucaagcc

SEQ ID NO: 2066404 - RNA, 19 nt, Artificial Sequence
  Description of Artificial Sequence: Synthetic oligonucleotide
aaaauagaugaaguauggu

SEQ ID NO: 2066405 - RNA, 19 nt, Artificial Sequence
  Description of Artificial Sequence: Synthetic oligonucleotide
uguucaccacugaagaaac

SEQ ID NO: 2066406 - RNA, 19 nt, Artificial Sequence
  Description of Artificial Sequence: Synthetic oligonucleotide
uuaugguaucacuacgaca

SEQ ID NO: 2066407 - RNA, 19 nt, Artificial Sequence
  Description of Artificial Sequence: Synthetic oligonucleotide
aaugacugcuucuccauua

SEQ ID NO: 2066408 - RNA, 19 nt, Artificial Sequence
  Description of Artificial Sequence: Synthetic oligonucleotide
aggaaaauagaugaaguau

SEQ ID NO: 2066409 - RNA, 19 nt, Artificial Sequence
  Description of Artificial Sequence: Synthetic oligonucleotide
aaccaagauggaaccaggc

SEQ ID NO: 2066410 - RNA, 19 nt, Artificial Sequence
  Description of Artificial Sequence: Synthetic oligonucleotide
aauuauccgcucugaugag

SEQ ID NO: 2066411 - RNA, 19 nt, Artificial Sequence
  Description of Artificial Sequence: Synthetic oligonucleotide
aggaauacaggcgcucucc

SEQ ID NO: 2066412 - RNA, 19 nt, Artificial Sequence
  Description of Artificial Sequence: Synthetic oligonucleotide
uuucgcucaagccucuaca

SEQ ID NO: 2066413 - RNA, 19 nt, Artificial Sequence
  Description of Artificial Sequence: Synthetic oligonucleotide
uggauuucgcucaagccuc

SEQ ID NO: 2066414 - RNA, 19 nt, Artificial Sequence
  Description of Artificial Sequence: Synthetic oligonucleotide
uucucaaagugcagucggg

SEQ ID NO: 2066415 - RNA, 19 nt, Artificial Sequence
  Description of Artificial Sequence: Synthetic oligonucleotide
gaugaaguaugguugccuc

SEQ ID NO: 2066416 - RNA, 19 nt, Artificial Sequence
  Description of Artificial Sequence: Synthetic oligonucleotide
uaguauggcaggcauccug

SEQ ID NO: 2066417 - RNA, 19 nt, Artificial Sequence
  Description of Artificial Sequence: Synthetic oligonucleotide
ucuuguuguacgaggggca

SEQ ID NO: 2066418 - RNA, 19 nt, Artificial Sequence
  Description of Artificial Sequence: Synthetic oligonucleotide
uucccagcagucaaagaug

SEQ ID NO: 2066419 - RNA, 19 nt, Artificial Sequence
  Description of Artificial Sequence: Synthetic oligonucleotide
acaguugguaguguugaac

SEQ ID NO: 2066420 - RNA, 19 nt, Artificial Sequence
  Description of Artificial Sequence: Synthetic oligonucleotide
uuguucaccacugaagaaa

SEQ ID NO: 2066421 - RNA, 19 nt, Artificial Sequence
  Description of Artificial Sequence: Synthetic oligonucleotide
ggaucacuuucuuugaacc

SEQ ID NO: 2066422 - RNA, 19 nt, Artificial Sequence
  Description of Artificial Sequence: Synthetic oligonucleotide
ugauucaggagcuucuuuu

SEQ ID NO: 2066423 - RNA, 19 nt, Artificial Sequence
  Description of Artificial Sequence: Synthetic oligonucleotide
ucuaugggguggauuagcu

SEQ ID NO: 2066424 - RNA, 19 nt, Artificial Sequence
  Description of Artificial Sequence: Synthetic oligonucleotide
uucgcucaagccucuacag

SEQ ID NO: 2066425 - RNA, 19 nt, Artificial Sequence
  Description of Artificial Sequence: Synthetic oligonucleotide
auuucgcucaagccucuac

SEQ ID NO: 2066426 - RNA, 19 nt, Artificial Sequence
  Description of Artificial Sequence: Synthetic oligonucleotide
uugguaguguugaacugca

SEQ ID NO: 2066427 - RNA, 19 nt, Artificial Sequence
  Description of Artificial Sequence: Synthetic oligonucleotide
gaguuguucaccacugaag

SEQ ID NO: 2066428 - RNA, 19 nt, Artificial Sequence
  Description of Artificial Sequence: Synthetic oligonucleotide
augggaauaauuauccgcu

SEQ ID NO: 2066429 - RNA, 19 nt, Artificial Sequence
  Description of Artificial Sequence: Synthetic oligonucleotide
aucgugauaggcacaggcc

SEQ ID NO: 2066430 - RNA, 19 nt, Artificial Sequence
  Description of Artificial Sequence: Synthetic oligonucleotide
ugacgaucgugauaggcac

SEQ ID NO: 2066431 - RNA, 19 nt, Artificial Sequence
  Description of Artificial Sequence: Synthetic oligonucleotide
uuauccgcucugaugaguc

SEQ ID NO: 2066432 - RNA, 19 nt, Artificial Sequence
  Description of Artificial Sequence: Synthetic oligonucleotide
agcagucaaagaugccggc

SEQ ID NO: 2066433 - RNA, 19 nt, Artificial Sequence
  Description of Artificial Sequence: Synthetic oligonucleotide
cuugaaugacugcuucucc

SEQ ID NO: 2066434 - RNA, 19 nt, Artificial Sequence
  Description of Artificial Sequence: Synthetic oligonucleotide
aguaugguugccucuggcu

SEQ ID NO: 2066435 - RNA, 19 nt, Artificial Sequence
  Description of Artificial Sequence: Synthetic oligonucleotide
caggaauccacugugauga

SEQ ID NO: 2066436 - RNA, 19 nt, Artificial Sequence
  Description of Artificial Sequence: Synthetic oligonucleotide
ucuccauuaugguaucacu

SEQ ID NO: 2066437 - RNA, 19 nt, Artificial Sequence
  Description of Artificial Sequence: Synthetic oligonucleotide
uuuaguaggcaaugagcuc

SEQ ID NO: 2066438 - RNA, 19 nt, Artificial Sequence
  Description of Artificial Sequence: Synthetic oligonucleotide
guugguaguguugaacugc

SEQ ID NO: 2066439 - RNA, 19 nt, Artificial Sequence
  Description of Artificial Sequence: Synthetic oligonucleotide
cauuaugguaucacuacga

SEQ ID NO: 2066440 - RNA, 19 nt, Artificial Sequence
  Description of Artificial Sequence: Synthetic oligonucleotide
ucgcaugggaauaauuauc

SEQ ID NO: 2066441 - RNA, 19 nt, Artificial Sequence
  Description of Artificial Sequence: Synthetic oligonucleotide
uuuuccuugcugucagggc

SEQ ID NO: 2066442 - RNA, 19 nt, Artificial Sequence
  Description of Artificial Sequence: Synthetic oligonucleotide
ucgcucaagccucuacagg

SEQ ID NO: 2066443 - RNA, 19 nt, Artificial Sequence
  Description of Artificial Sequence: Synthetic oligonucleotide
cagcagucaaagaugccgg

SEQ ID NO: 2066444 - RNA, 19 nt, Artificial Sequence
  Description of Artificial Sequence: Synthetic oligonucleotide
gaaacuggauggaagguga

SEQ ID NO: 2066445 - RNA, 19 nt, Artificial Sequence
  Description of Artificial Sequence: Synthetic oligonucleotide
gcuguaggaauacaggcgc

SEQ ID NO: 2066446 - RNA, 19 nt, Artificial Sequence
  Description of Artificial Sequence: Synthetic oligonucleotide
auggaaccaggccccaucg

SEQ ID NO: 2066447 - RNA, 19 nt, Artificial Sequence
  Description of Artificial Sequence: Synthetic oligonucleotide
cucaaagugcagucgggag

SEQ ID NO: 2066448 - RNA, 19 nt, Artificial Sequence
  Description of Artificial Sequence: Synthetic oligonucleotide
gaggaaaauagaugaagua

SEQ ID NO: 2066449 - RNA, 19 nt, Artificial Sequence
  Description of Artificial Sequence: Synthetic oligonucleotide
aggugauauugucuauggg

SEQ ID NO: 2066450 - RNA, 19 nt, Artificial Sequence
  Description of Artificial Sequence: Synthetic oligonucleotide
gaaccaagauggaaccagg

SEQ ID NO: 2066451 - RNA, 19 nt, Artificial Sequence
  Description of Artificial Sequence: Synthetic oligonucleotide
cacagcgucguccuuuucc

SEQ ID NO: 2066452 - RNA, 19 nt, Artificial Sequence
  Description of Artificial Sequence: Synthetic oligonucleotide
acuuucuuugaaccaagau

SEQ ID NO: 2066453 - RNA, 19 nt, Artificial Sequence
  Description of Artificial Sequence: Synthetic oligonucleotide
uuguacgaggggcaguacu

SEQ ID NO: 2066454 - RNA, 19 nt, Artificial Sequence
  Description of Artificial Sequence: Synthetic oligonucleotide
aguugguaguguugaacug

SEQ ID NO: 2066455 - RNA, 19 nt, Artificial Sequence
  Description of Artificial Sequence: Synthetic oligonucleotide
acuacgacaguugguagug

SEQ ID NO: 2066456 - RNA, 19 nt, Artificial Sequence
  Description of Artificial Sequence: Synthetic oligonucleotide
uacaggaauccacugugau

SEQ ID NO: 2066457 - RNA, 19 nt, Artificial Sequence
  Description of Artificial Sequence: Synthetic oligonucleotide
agaccuuuuccuugcuguc

SEQ ID NO: 2066458 - RNA, 19 nt, Artificial Sequence
  Description of Artificial Sequence: Synthetic oligonucleotide
ugaugaugcuguaggaaua

SEQ ID NO: 2066459 - RNA, 19 nt, Artificial Sequence
  Description of Artificial Sequence: Synthetic oligonucleotide
ucuuugaaccaagauggaa

SEQ ID NO: 2066460 - RNA, 19 nt, Artificial Sequence
  Description of Artificial Sequence: Synthetic oligonucleotide
aaaacuggcuggaccacug

SEQ ID NO: 2066461 - RNA, 19 nt, Artificial Sequence
  Description of Artificial Sequence: Synthetic oligonucleotide
acuggauggaaggugauau

SEQ ID NO: 2066462 - RNA, 19 nt, Artificial Sequence
  Description of Artificial Sequence: Synthetic oligonucleotide
ucgggaguuguucaccacu

SEQ ID NO: 2066463 - RNA, 19 nt, Artificial Sequence
  Description of Artificial Sequence: Synthetic oligonucleotide
cuaggcaggugacaggaug

SEQ ID NO: 2066464 - RNA, 19 nt, Artificial Sequence
  Description of Artificial Sequence: Synthetic oligonucleotide
uguucguccgcacauucuu

SEQ ID NO: 2066465 - RNA, 19 nt, Artificial Sequence
  Description of Artificial Sequence: Synthetic oligonucleotide
cauccuguuguggauuucg

SEQ ID NO: 2066466 - RNA, 19 nt, Artificial Sequence
  Description of Artificial Sequence: Synthetic oligonucleotide
uucagcaccgccucucaga

SEQ ID NO: 2066467 - RNA, 19 nt, Artificial Sequence
  Description of Artificial Sequence: Synthetic oligonucleotide
ucggggucccuccacugcg

SEQ ID NO: 2066468 - RNA, 19 nt, Artificial Sequence
  Description of Artificial Sequence: Synthetic oligonucleotide
uuguuucgggaguuguuca

SEQ ID NO: 2066469 - RNA, 19 nt, Artificial Sequence
  Description of Artificial Sequence: Synthetic oligonucleotide
aucacuacgacaguuggua

SEQ ID NO: 2066470 - RNA, 19 nt, Artificial Sequence
  Description of Artificial Sequence: Synthetic oligonucleotide
caagccucuacaggaaucc

SEQ ID NO: 2066471 - RNA, 19 nt, Artificial Sequence
  Description of Artificial Sequence: Synthetic oligonucleotide
ucaagccucuacaggaauc

SEQ ID NO: 2066472 - RNA, 19 nt, Artificial Sequence
  Description of Artificial Sequence: Synthetic oligonucleotide
uguacgaggggcaguacuu

SEQ ID NO: 2066473 - RNA, 19 nt, Artificial Sequence
  Description of Artificial Sequence: Synthetic oligonucleotide
uaucacuacgacaguuggu

SEQ ID NO: 2066474 - RNA, 19 nt, Artificial Sequence
  Description of Artificial Sequence: Synthetic oligonucleotide
ggguggauuagcugcaggg

SEQ ID NO: 2066475 - RNA, 19 nt, Artificial Sequence
  Description of Artificial Sequence: Synthetic oligonucleotide
uucguccgcacauucuuca

SEQ ID NO: 2066476 - RNA, 19 nt, Artificial Sequence
  Description of Artificial Sequence: Synthetic oligonucleotide
aaggaucacuuucuuugaa

SEQ ID NO: 2066477 - RNA, 19 nt, Artificial Sequence
  Description of Artificial Sequence: Synthetic oligonucleotide
ucacuacgacaguugguag

SEQ ID NO: 2066478 - RNA, 19 nt, Artificial Sequence
  Description of Artificial Sequence: Synthetic oligonucleotide
caaagucuagccauuugga

SEQ ID NO: 2066479 - RNA, 19 nt, Artificial Sequence
  Description of Artificial Sequence: Synthetic oligonucleotide
uucuuugaaccaagaugga

SEQ ID NO: 2066480 - RNA, 19 nt, Artificial Sequence
  Description of Artificial Sequence: Synthetic oligonucleotide
uaggcacaggcccuuguga

SEQ ID NO: 2066481 - RNA, 19 nt, Artificial Sequence
  Description of Artificial Sequence: Synthetic oligonucleotide
uucuccauuaugguaucac

SEQ ID NO: 2066482 - RNA, 19 nt, Artificial Sequence
  Description of Artificial Sequence: Synthetic oligonucleotide
uacuuaucggggucccucc

SEQ ID NO: 2066483 - RNA, 19 nt, Artificial Sequence
  Description of Artificial Sequence: Synthetic oligonucleotide
ucucaaagugcagucggga

SEQ ID NO: 2066484 - RNA, 19 nt, Artificial Sequence
  Description of Artificial Sequence: Synthetic oligonucleotide
ugucuugauuugaggaaaa

SEQ ID NO: 2066485 - RNA, 19 nt, Artificial Sequence
  Description of Artificial Sequence: Synthetic oligonucleotide
cugacgaucgugauaggca

SEQ ID NO: 2066486 - RNA, 19 nt, Artificial Sequence
  Description of Artificial Sequence: Synthetic oligonucleotide
agcgucguccuuuucccag

SEQ ID NO: 2066487 - RNA, 19 nt, Artificial Sequence
  Description of Artificial Sequence: Synthetic oligonucleotide
gaauaauuauccgcucuga

SEQ ID NO: 2066488 - RNA, 19 nt, Artificial Sequence
  Description of Artificial Sequence: Synthetic oligonucleotide
guggauuucgcucaagccu

SEQ ID NO: 2066489 - RNA, 19 nt, Artificial Sequence
  Description of Artificial Sequence: Synthetic oligonucleotide
uuggucacagguucuuccu

SEQ ID NO: 2066490 - RNA, 19 nt, Artificial Sequence
  Description of Artificial Sequence: Synthetic oligonucleotide
auuuggagacugccucuuc

SEQ ID NO: 2066491 - RNA, 19 nt, Artificial Sequence
  Description of Artificial Sequence: Synthetic oligonucleotide
gaccucaccaaagucuagc

SEQ ID NO: 2066492 - RNA, 19 nt, Artificial Sequence
  Description of Artificial Sequence: Synthetic oligonucleotide
cuuuguagccagccauugc

SEQ ID NO: 2066493 - RNA, 19 nt, Artificial Sequence
  Description of Artificial Sequence: Synthetic oligonucleotide
uguuucgggaguuguucac

SEQ ID NO: 2066494 - RNA, 19 nt, Artificial Sequence
  Description of Artificial Sequence: Synthetic oligonucleotide
uuaucggggucccuccacu

SEQ ID NO: 2066495 - RNA, 19 nt, Artificial Sequence
  Description of Artificial Sequence: Synthetic oligonucleotide
caucgcaugggaauaauua

SEQ ID NO: 2066496 - RNA, 19 nt, Artificial Sequence
  Description of Artificial Sequence: Synthetic oligonucleotide
auaggcacaggcccuugug

SEQ ID NO: 2066497 - RNA, 19 nt, Artificial Sequence
  Description of Artificial Sequence: Synthetic oligonucleotide
augaaguaugguugccucu

SEQ ID NO: 2066498 - RNA, 19 nt, Artificial Sequence
  Description of Artificial Sequence: Synthetic oligonucleotide
cuccaucuaguauggcagg

SEQ ID NO: 2066499 - RNA, 19 nt, Artificial Sequence
  Description of Artificial Sequence: Synthetic oligonucleotide
aagugcagucgggagagca

SEQ ID NO: 2066500 - RNA, 19 nt, Artificial Sequence
  Description of Artificial Sequence: Synthetic oligonucleotide
ucuagccauuuggagacug

SEQ ID NO: 2066501 - RNA, 19 nt, Artificial Sequence
  Description of Artificial Sequence: Synthetic oligonucleotide
gacaccucuuuuaguaggc

SEQ ID NO: 2066502 - RNA, 19 nt, Artificial Sequence
  Description of Artificial Sequence: Synthetic oligonucleotide
acgaucgugauaggcacag

SEQ ID NO: 2066503 - RNA, 19 nt, Artificial Sequence
  Description of Artificial Sequence: Synthetic oligonucleotide
uccuguuguggauuucgcu

SEQ ID NO: 2066504 - RNA, 19 nt, Artificial Sequence
  Description of Artificial Sequence: Synthetic oligonucleotide
ccagcagucaaagaugccg

SEQ ID NO: 2066505 - RNA, 19 nt, Artificial Sequence
  Description of Artificial Sequence: Synthetic oligonucleotide
aguggugaccucaccaaag

SEQ ID NO: 2066506 - RNA, 19 nt, Artificial Sequence
  Description of Artificial Sequence: Synthetic oligonucleotide
agaugaaguaugguugccu

SEQ ID NO: 2066507 - RNA, 19 nt, Artificial Sequence
  Description of Artificial Sequence: Synthetic oligonucleotide
cuagccauuuggagacugc

SEQ ID NO: 2066508 - RNA, 19 nt, Artificial Sequence
  Description of Artificial Sequence: Synthetic oligonucleotide
agaggaaccuugaaugacu

SEQ ID NO: 2066509 - RNA, 19 nt, Artificial Sequence
  Description of Artificial Sequence: Synthetic oligonucleotide
uccaucuaguauggcaggc

SEQ ID NO: 2066510 - RNA, 19 nt, Artificial Sequence
  Description of Artificial Sequence: Synthetic oligonucleotide
accgcugccacucguagaa

SEQ ID NO: 2066511 - RNA, 19 nt, Artificial Sequence
  Description of Artificial Sequence: Synthetic oligonucleotide
uagaugaaguaugguugcc

SEQ ID NO: 2066512 - RNA, 19 nt, Artificial Sequence
  Description of Artificial Sequence: Synthetic oligonucleotide
acuccggaguguuguuucg

SEQ ID NO: 2066513 - RNA, 19 nt, Artificial Sequence
  Description of Artificial Sequence: Synthetic oligonucleotide
acaucucuaggcaggugac

SEQ ID NO: 2066514 - RNA, 19 nt, Artificial Sequence
  Description of Artificial Sequence: Synthetic oligonucleotide
uccgcucugaugagucugc

SEQ ID NO: 2066515 - RNA, 19 nt, Artificial Sequence
  Description of Artificial Sequence: Synthetic oligonucleotide
augagucugcauccuucuc

SEQ ID NO: 2066516 - RNA, 19 nt, Artificial Sequence
  Description of Artificial Sequence: Synthetic oligonucleotide
ccauuaugguaucacuacg

SEQ ID NO: 2066517 - RNA, 19 nt, Artificial Sequence
  Description of Artificial Sequence: Synthetic oligonucleotide
ugacugcuucuccauuaug

SEQ ID NO: 2066518 - RNA, 19 nt, Artificial Sequence
  Description of Artificial Sequence: Synthetic oligonucleotide
uguuguacgaggggcagua

SEQ ID NO: 2066519 - RNA, 19 nt, Artificial Sequence
  Description of Artificial Sequence: Synthetic oligonucleotide
uguugaacugcagcuugga

SEQ ID NO: 2066520 - RNA, 19 nt, Artificial Sequence
  Description of Artificial Sequence: Synthetic oligonucleotide
ugucugcagcgucauuccc

SEQ ID NO: 2066521 - RNA, 19 nt, Artificial Sequence
  Description of Artificial Sequence: Synthetic oligonucleotide
acuuuguagccagccauug

SEQ ID NO: 2066522 - RNA, 19 nt, Artificial Sequence
  Description of Artificial Sequence: Synthetic oligonucleotide
cuguuguggauuucgcuca

SEQ ID NO: 2066523 - RNA, 19 nt, Artificial Sequence
  Description of Artificial Sequence: Synthetic oligonucleotide
ugggaauaauuauccgcuc

SEQ ID NO: 2066524 - RNA, 19 nt, Artificial Sequence
  Description of Artificial Sequence: Synthetic oligonucleotide
cuaugggguggauuagcug

SEQ ID NO: 2066525 - RNA, 19 nt, Artificial Sequence
  Description of Artificial Sequence: Synthetic oligonucleotide
gcucugaugagucugcauc

SEQ ID NO: 2066526 - RNA, 19 nt, Artificial Sequence
  Description of Artificial Sequence: Synthetic oligonucleotide
agccucuacaggaauccac

SEQ ID NO: 2066527 - RNA, 19 nt, Artificial Sequence
  Description of Artificial Sequence: Synthetic oligonucleotide
guccgcacauucuucagca

SEQ ID NO: 2066528 - RNA, 19 nt, Artificial Sequence
  Description of Artificial Sequence: Synthetic oligonucleotide
accuugaaugacugcuucu

SEQ ID NO: 2066529 - RNA, 19 nt, Artificial Sequence
  Description of Artificial Sequence: Synthetic oligonucleotide
uacaccugacucauccuuu

SEQ ID NO: 2066530 - RNA, 19 nt, Artificial Sequence
  Description of Artificial Sequence: Synthetic oligonucleotide
ggucacagguucuuccucc

SEQ ID NO: 2066531 - RNA, 19 nt, Artificial Sequence
  Description of Artificial Sequence: Synthetic oligonucleotide
gcaugggaauaauuauccg

SEQ ID NO: 2066532 - RNA, 19 nt, Artificial Sequence
  Description of Artificial Sequence: Synthetic oligonucleotide
gguaucacuacgacaguug

SEQ ID NO: 2066533 - RNA, 19 nt, Artificial Sequence
  Description of Artificial Sequence: Synthetic oligonucleotide
uaggaauacaggcgcucuc

SEQ ID NO: 2066534 - RNA, 19 nt, Artificial Sequence
  Description of Artificial Sequence: Synthetic oligonucleotide
aaagugcagucgggagagc

SEQ ID NO: 2066535 - RNA, 19 nt, Artificial Sequence
  Description of Artificial Sequence: Synthetic oligonucleotide
gugauauugucuauggggu

SEQ ID NO: 2066536 - RNA, 19 nt, Artificial Sequence
  Description of Artificial Sequence: Synthetic oligonucleotide
ccuguuguggauuucgcuc

SEQ ID NO: 2066537 - RNA, 19 nt, Artificial Sequence
  Description of Artificial Sequence: Synthetic oligonucleotide
gcccugacgaucgugauag

SEQ ID NO: 2066538 - RNA, 19 nt, Artificial Sequence
  Description of Artificial Sequence: Synthetic oligonucleotide
ugaccucaccaaagucuag

SEQ ID NO: 2066539 - RNA, 19 nt, Artificial Sequence
  Description of Artificial Sequence: Synthetic oligonucleotide
cacucguagaauccaucug

SEQ ID NO: 2066540 - RNA, 19 nt, Artificial Sequence
  Description of Artificial Sequence: Synthetic oligonucleotide
gucccagaccuuuuccuug

SEQ ID NO: 2066541 - RNA, 19 nt, Artificial Sequence
  Description of Artificial Sequence: Synthetic oligonucleotide
caucugcuaaaacaacaca

SEQ ID NO: 2066542 - RNA, 19 nt, Artificial Sequence
  Description of Artificial Sequence: Synthetic oligonucleotide
ugacaggauguucguccgc

SEQ ID NO: 2066543 - RNA, 19 nt, Artificial Sequence
  Description of Artificial Sequence: Synthetic oligonucleotide
auccuguuguggauuucgc

SEQ ID NO: 2066544 - RNA, 19 nt, Artificial Sequence
  Description of Artificial Sequence: Synthetic oligonucleotide
agucgggagagcagcacgg

SEQ ID NO: 2066545 - RNA, 19 nt, Artificial Sequence
  Description of Artificial Sequence: Synthetic oligonucleotide
uacgacaguugguaguguu

SEQ ID NO: 2066546 - RNA, 19 nt, Artificial Sequence
  Description of Artificial Sequence: Synthetic oligonucleotide
cuuggaaggaucacuuucu

SEQ ID NO: 2066547 - RNA, 19 nt, Artificial Sequence
  Description of Artificial Sequence: Synthetic oligonucleotide
cuccauuaugguaucacua

SEQ ID NO: 2066548 - RNA, 19 nt, Artificial Sequence
  Description of Artificial Sequence: Synthetic oligonucleotide
ugucuaugggguggauuag

SEQ ID NO: 2066549 - RNA, 19 nt, Artificial Sequence
  Description of Artificial Sequence: Synthetic oligonucleotide
guuucgggaguuguucacc

SEQ ID NO: 2066550 - RNA, 19 nt, Artificial Sequence
  Description of Artificial Sequence: Synthetic oligonucleotide
gaugagucugcauccuucu

SEQ ID NO: 2066551 - RNA, 19 nt, Artificial Sequence
  Description of Artificial Sequence: Synthetic oligonucleotide
cagaggaaccuugaaugac

SEQ ID NO: 2066552 - RNA, 19 nt, Artificial Sequence
  Description of Artificial Sequence: Synthetic oligonucleotide
uuggaaggaucacuuucuu

SEQ ID NO: 2066553 - RNA, 19 nt, Artificial Sequence
  Description of Artificial Sequence: Synthetic oligonucleotide
uggaaggaucacuuucuuu

SEQ ID NO: 2066554 - RNA, 19 nt, Artificial Sequence
  Description of Artificial Sequence: Synthetic oligonucleotide
cagucaaagaugccggcca

SEQ ID NO: 2066555 - RNA, 19 nt, Artificial Sequence
  Description of Artificial Sequence: Synthetic oligonucleotide
uuccugaguggugaccuca

SEQ ID NO: 2066556 - RNA, 19 nt, Artificial Sequence
  Description of Artificial Sequence: Synthetic oligonucleotide
uagaauccaucugcuaaaa

SEQ ID NO: 2066557 - RNA, 19 nt, Artificial Sequence
  Description of Artificial Sequence: Synthetic oligonucleotide
auuauccgcucugaugagu

SEQ ID NO: 2066558 - RNA, 19 nt, Artificial Sequence
  Description of Artificial Sequence: Synthetic oligonucleotide
gugaugaugcuguaggaau

SEQ ID NO: 2066559 - RNA, 19 nt, Artificial Sequence
  Description of Artificial Sequence: Synthetic oligonucleotide
caguugguaguguugaacu

SEQ ID NO: 2066560 - RNA, 19 nt, Artificial Sequence
  Description of Artificial Sequence: Synthetic oligonucleotide
ugccacuugucuugggcuc

SEQ ID NO: 2066561 - RNA, 19 nt, Artificial Sequence
  Description of Artificial Sequence: Synthetic oligonucleotide
accaggccccaucgcaugg

SEQ ID NO: 2066562 - RNA, 19 nt, Artificial Sequence
  Description of Artificial Sequence: Synthetic oligonucleotide
ucguccgcacauucuucag

SEQ ID NO: 2066563 - RNA, 19 nt, Artificial Sequence
  Description of Artificial Sequence: Synthetic oligonucleotide
aucuaguauggcaggcauc

SEQ ID NO: 2066564 - RNA, 19 nt, Artificial Sequence
  Description of Artificial Sequence: Synthetic oligonucleotide
gggcucuuguuguacgagg

SEQ ID NO: 2066565 - RNA, 19 nt, Artificial Sequence
  Description of Artificial Sequence: Synthetic oligonucleotide
uggaaccaggccccaucgc

SEQ ID NO: 2066566 - RNA, 19 nt, Artificial Sequence
  Description of Artificial Sequence: Synthetic oligonucleotide
agcgucauucccaccugac

SEQ ID NO: 2066567 - RNA, 19 nt, Artificial Sequence
  Description of Artificial Sequence: Synthetic oligonucleotide
gccauuuggagacugccuc

SEQ ID NO: 2066568 - RNA, 19 nt, Artificial Sequence
  Description of Artificial Sequence: Synthetic oligonucleotide
uccuuugacugcugccacu

SEQ ID NO: 2066569 - RNA, 19 nt, Artificial Sequence
  Description of Artificial Sequence: Synthetic oligonucleotide
aggagccagacacuccgga

SEQ ID NO: 2066570 - RNA, 19 nt, Artificial Sequence
  Description of Artificial Sequence: Synthetic oligonucleotide
gucuaugggguggauuagc

SEQ ID NO: 2066571 - RNA, 19 nt, Artificial Sequence
  Description of Artificial Sequence: Synthetic oligonucleotide
ugggguacaccugacucau

SEQ ID NO: 2066572 - RNA, 19 nt, Artificial Sequence
  Description of Artificial Sequence: Synthetic oligonucleotide
aacugcagcuuggaaggau

SEQ ID NO: 2066573 - RNA, 19 nt, Artificial Sequence
  Description of Artificial Sequence: Synthetic oligonucleotide
ugguaucacuacgacaguu

SEQ ID NO: 2066574 - RNA, 19 nt, Artificial Sequence
  Description of Artificial Sequence: Synthetic oligonucleotide
auauugucuauggggugga

SEQ ID NO: 2066575 - RNA, 19 nt, Artificial Sequence
  Description of Artificial Sequence: Synthetic oligonucleotide
auacaggcgcucucccucu

SEQ ID NO: 2066576 - RNA, 19 nt, Artificial Sequence
  Description of Artificial Sequence: Synthetic oligonucleotide
agccaucgguccaggaggc

SEQ ID NO: 2066577 - RNA, 19 nt, Artificial Sequence
  Description of Artificial Sequence: Synthetic oligonucleotide
ggaauacaggcgcucuccc

SEQ ID NO: 2066578 - RNA, 19 nt, Artificial Sequence
  Description of Artificial Sequence: Synthetic oligonucleotide
uggagguucccagcaguca

SEQ ID NO: 2066579 - RNA, 19 nt, Artificial Sequence
  Description of Artificial Sequence: Synthetic oligonucleotide
gguggauuagcugcagggc

SEQ ID NO: 2066580 - RNA, 19 nt, Artificial Sequence
  Description of Artificial Sequence: Synthetic oligonucleotide
ucguagaauccaucugcua

SEQ ID NO: 2066581 - RNA, 19 nt, Artificial Sequence
  Description of Artificial Sequence: Synthetic oligonucleotide
guacuuaucggggucccuc

SEQ ID NO: 2066582 - RNA, 19 nt, Artificial Sequence
  Description of Artificial Sequence: Synthetic oligonucleotide
accucuuuuaguaggcaau

SEQ ID NO: 2066583 - RNA, 19 nt, Artificial Sequence
  Description of Artificial Sequence: Synthetic oligonucleotide
cgaggggcaguacuuaucg

SEQ ID NO: 2066584 - RNA, 19 nt, Artificial Sequence
  Description of Artificial Sequence: Synthetic oligonucleotide
aguguuguuucgggaguug

SEQ ID NO: 2066585 - RNA, 19 nt, Artificial Sequence
  Description of Artificial Sequence: Synthetic oligonucleotide
cuggagguucccagcaguc

SEQ ID NO: 2066586 - RNA, 19 nt, Artificial Sequence
  Description of Artificial Sequence: Synthetic oligonucleotide
acgacaguugguaguguug

SEQ ID NO: 2066587 - RNA, 19 nt, Artificial Sequence
  Description of Artificial Sequence: Synthetic oligonucleotide
acuuaucggggucccucca

SEQ ID NO: 2066588 - RNA, 19 nt, Artificial Sequence
  Description of Artificial Sequence: Synthetic oligonucleotide
augguaucacuacgacagu

SEQ ID NO: 2066589 - RNA, 19 nt, Artificial Sequence
  Description of Artificial Sequence: Synthetic oligonucleotide
ggaaccuugaaugacugcu

SEQ ID NO: 2066590 - RNA, 19 nt, Artificial Sequence
  Description of Artificial Sequence: Synthetic oligonucleotide
cuacaggaauccacuguga

SEQ ID NO: 2066591 - RNA, 19 nt, Artificial Sequence
  Description of Artificial Sequence: Synthetic oligonucleotide
cugggguacaccugacuca

SEQ ID NO: 2066592 - RNA, 19 nt, Artificial Sequence
  Description of Artificial Sequence: Synthetic oligonucleotide
ggagccagacacuccggag

SEQ ID NO: 2066593 - RNA, 19 nt, Artificial Sequence
  Description of Artificial Sequence: Synthetic oligonucleotide
gagggcucuuguuguacga

SEQ ID NO: 2066594 - RNA, 19 nt, Artificial Sequence
  Description of Artificial Sequence: Synthetic oligonucleotide
ugccacucguagaauccau

SEQ ID NO: 2066595 - RNA, 19 nt, Artificial Sequence
  Description of Artificial Sequence: Synthetic oligonucleotide
gagccagacacuccggagu

SEQ ID NO: 2066596 - RNA, 19 nt, Artificial Sequence
  Description of Artificial Sequence: Synthetic oligonucleotide
uucgggaguuguucaccac

SEQ ID NO: 2066597 - RNA, 19 nt, Artificial Sequence
  Description of Artificial Sequence: Synthetic oligonucleotide
cuugucuugggcuccuucu

SEQ ID NO: 2066598 - RNA, 19 nt, Artificial Sequence
  Description of Artificial Sequence: Synthetic oligonucleotide
aggcccuugugagaacauc

SEQ ID NO: 2066599 - RNA, 19 nt, Artificial Sequence
  Description of Artificial Sequence: Synthetic oligonucleotide
aggaggccgcuggugacac

SEQ ID NO: 2066600 - RNA, 19 nt, Artificial Sequence
  Description of Artificial Sequence: Synthetic oligonucleotide
ucuaggcaggugacaggau

SEQ ID NO: 2066601 - RNA, 19 nt, Artificial Sequence
  Description of Artificial Sequence: Synthetic oligonucleotide
ugcgggagcugcugccugc

SEQ ID NO: 2066602 - RNA, 19 nt, Artificial Sequence
  Description of Artificial Sequence: Synthetic oligonucleotide
acaccugacucauccuuuu

SEQ ID NO: 2066603 - RNA, 19 nt, Artificial Sequence
  Description of Artificial Sequence: Synthetic oligonucleotide
aagccucuacaggaaucca

SEQ ID NO: 2066604 - RNA, 19 nt, Artificial Sequence
  Description of Artificial Sequence: Synthetic oligonucleotide
gaauacaggcgcucucccu

SEQ ID NO: 2066605 - RNA, 19 nt, Artificial Sequence
  Description of Artificial Sequence: Synthetic oligonucleotide
ccgcacauucuucagcacc

SEQ ID NO: 2066606 - RNA, 19 nt, Artificial Sequence
  Description of Artificial Sequence: Synthetic oligonucleotide
acgaggggcaguacuuauc

SEQ ID NO: 2066607 - RNA, 19 nt, Artificial Sequence
  Description of Artificial Sequence: Synthetic oligonucleotide
cuccggaguguuguuucgg

SEQ ID NO: 2066608 - RNA, 19 nt, Artificial Sequence
  Description of Artificial Sequence: Synthetic oligonucleotide
ugcccugacgaucgugaua

SEQ ID NO: 2066609 - RNA, 19 nt, Artificial Sequence
  Description of Artificial Sequence: Synthetic oligonucleotide
aaacuggauggaaggugau

SEQ ID NO: 2066610 - RNA, 19 nt, Artificial Sequence
  Description of Artificial Sequence: Synthetic oligonucleotide
ugacaccgcugccacucgu

SEQ ID NO: 2066611 - RNA, 19 nt, Artificial Sequence
  Description of Artificial Sequence: Synthetic oligonucleotide
caggagccagacacuccgg

SEQ ID NO: 2066612 - RNA, 19 nt, Artificial Sequence
  Description of Artificial Sequence: Synthetic oligonucleotide
cuucagcaccgccucucag

SEQ ID NO: 2066613 - RNA, 19 nt, Artificial Sequence
  Description of Artificial Sequence: Synthetic oligonucleotide
caccucuuuuaguaggcaa

SEQ ID NO: 2066614 - RNA, 19 nt, Artificial Sequence
  Description of Artificial Sequence: Synthetic oligonucleotide
uccgcacauucuucagcac

SEQ ID NO: 2066615 - RNA, 19 nt, Artificial Sequence
  Description of Artificial Sequence: Synthetic oligonucleotide
ccugacgaucgugauaggc

SEQ ID NO: 2066616 - RNA, 19 nt, Artificial Sequence
  Description of Artificial Sequence: Synthetic oligonucleotide
caguacuuaucgggguccc

SEQ ID NO: 2066617 - RNA, 19 nt, Artificial Sequence
  Description of Artificial Sequence: Synthetic oligonucleotide
ggugaccucaccaaagucu

SEQ ID NO: 2066618 - RNA, 19 nt, Artificial Sequence
  Description of Artificial Sequence: Synthetic oligonucleotide
guaugguugccucuggcuu

SEQ ID NO: 2066619 - RNA, 19 nt, Artificial Sequence
  Description of Artificial Sequence: Synthetic oligonucleotide
gacaguugguaguguugaa

SEQ ID NO: 2066620 - RNA, 19 nt, Artificial Sequence
  Description of Artificial Sequence: Synthetic oligonucleotide
ggagacugccucuucucca

SEQ ID NO: 2066621 - RNA, 19 nt, Artificial Sequence
  Description of Artificial Sequence: Synthetic oligonucleotide
cguagaauccaucugcuaa

SEQ ID NO: 2066622 - RNA, 19 nt, Artificial Sequence
  Description of Artificial Sequence: Synthetic oligonucleotide
uuguuguacgaggggcagu

SEQ ID NO: 2066623 - RNA, 19 nt, Artificial Sequence
  Description of Artificial Sequence: Synthetic oligonucleotide
ugauaggcacaggcccuug

SEQ ID NO: 2066624 - RNA, 19 nt, Artificial Sequence
  Description of Artificial Sequence: Synthetic oligonucleotide
gcaguacuuaucggggucc

SEQ ID NO: 2066625 - RNA, 19 nt, Artificial Sequence
  Description of Artificial Sequence: Synthetic oligonucleotide
gcugccacucguagaaucc

SEQ ID NO: 2066626 - RNA, 19 nt, Artificial Sequence
  Description of Artificial Sequence: Synthetic oligonucleotide
gcagucaaagaugccggcc

SEQ ID NO: 2066627 - RNA, 19 nt, Artificial Sequence
  Description of Artificial Sequence: Synthetic oligonucleotide
gugaccucaccaaagucua

SEQ ID NO: 2066628 - RNA, 19 nt, Artificial Sequence
  Description of Artificial Sequence: Synthetic oligonucleotide
cggaguguuguuucgggag

SEQ ID NO: 2066629 - RNA, 19 nt, Artificial Sequence
  Description of Artificial Sequence: Synthetic oligonucleotide
gggguggauuagcugcagg

SEQ ID NO: 2066630 - RNA, 19 nt, Artificial Sequence
  Description of Artificial Sequence: Synthetic oligonucleotide
cugacaccgcugccacucg

SEQ ID NO: 2066631 - RNA, 19 nt, Artificial Sequence
  Description of Artificial Sequence: Synthetic oligonucleotide
cucguagaauccaucugcu

SEQ ID NO: 2066632 - RNA, 19 nt, Artificial Sequence
  Description of Artificial Sequence: Synthetic oligonucleotide
agcacggggcugcucgacu

SEQ ID NO: 2066633 - RNA, 19 nt, Artificial Sequence
  Description of Artificial Sequence: Synthetic oligonucleotide
ggaauccacugugaugaug

SEQ ID NO: 2066634 - RNA, 19 nt, Artificial Sequence
  Description of Artificial Sequence: Synthetic oligonucleotide
gucgggagagcagcacggg

SEQ ID NO: 2066635 - RNA, 19 nt, Artificial Sequence
  Description of Artificial Sequence: Synthetic oligonucleotide
ugggguggauuagcugcag

SEQ ID NO: 2066636 - RNA, 19 nt, Artificial Sequence
  Description of Artificial Sequence: Synthetic oligonucleotide
cucuacaggaauccacugu

SEQ ID NO: 2066637 - RNA, 19 nt, Artificial Sequence
  Description of Artificial Sequence: Synthetic oligonucleotide
acugagggcucuuguugua

SEQ ID NO: 2066638 - RNA, 19 nt, Artificial Sequence
  Description of Artificial Sequence: Synthetic oligonucleotide
acaccucuuuuaguaggca

SEQ ID NO: 2066639 - RNA, 19 nt, Artificial Sequence
  Description of Artificial Sequence: Synthetic oligonucleotide
ucauucccaccugacuuuu

SEQ ID NO: 2066640 - RNA, 19 nt, Artificial Sequence
  Description of Artificial Sequence: Synthetic oligonucleotide
ggcaaugagcucuucugua

SEQ ID NO: 2066641 - RNA, 19 nt, Artificial Sequence
  Description of Artificial Sequence: Synthetic oligonucleotide
cacuacgacaguugguagu

SEQ ID NO: 2066642 - RNA, 19 nt, Artificial Sequence
  Description of Artificial Sequence: Synthetic oligonucleotide
gagacugccucuucuccau

SEQ ID NO: 2066643 - RNA, 19 nt, Artificial Sequence
  Description of Artificial Sequence: Synthetic oligonucleotide
ggcuggaccacugggguac

SEQ ID NO: 2066644 - RNA, 19 nt, Artificial Sequence
  Description of Artificial Sequence: Synthetic oligonucleotide
gauaggcacaggcccuugu

SEQ ID NO: 2066645 - RNA, 19 nt, Artificial Sequence
  Description of Artificial Sequence: Synthetic oligonucleotide
guacaccugacucauccuu

SEQ ID NO: 2066646 - RNA, 19 nt, Artificial Sequence
  Description of Artificial Sequence: Synthetic oligonucleotide
gacgaucgugauaggcaca

SEQ ID NO: 2066647 - RNA, 19 nt, Artificial Sequence
  Description of Artificial Sequence: Synthetic oligonucleotide
guaggaauacaggcgcucu

SEQ ID NO: 2066648 - RNA, 19 nt, Artificial Sequence
  Description of Artificial Sequence: Synthetic oligonucleotide
cauucccaccugacuuuuc

SEQ ID NO: 2066649 - RNA, 19 nt, Artificial Sequence
  Description of Artificial Sequence: Synthetic oligonucleotide
ccuugugagaacaucucua

SEQ ID NO: 2066650 - RNA, 19 nt, Artificial Sequence
  Description of Artificial Sequence: Synthetic oligonucleotide
ccucuacaggaauccacug

SEQ ID NO: 2066651 - RNA, 19 nt, Artificial Sequence
  Description of Artificial Sequence: Synthetic oligonucleotide
aggaauccacugugaugau

SEQ ID NO: 2066652 - RNA, 19 nt, Artificial Sequence
  Description of Artificial Sequence: Synthetic oligonucleotide
gaggccgcuggugacaccu

SEQ ID NO: 2066653 - RNA, 19 nt, Artificial Sequence
  Description of Artificial Sequence: Synthetic oligonucleotide
guucguccgcacauucuuc

SEQ ID NO: 2066654 - RNA, 19 nt, Artificial Sequence
  Description of Artificial Sequence: Synthetic oligonucleotide
cuuguucccugacaccgcu

SEQ ID NO: 2066655 - RNA, 19 nt, Artificial Sequence
  Description of Artificial Sequence: Synthetic oligonucleotide
ccugacaccgcugccacuc

SEQ ID NO: 2066656 - RNA, 19 nt, Artificial Sequence
  Description of Artificial Sequence: Synthetic oligonucleotide
gucauucccaccugacuuu

SEQ ID NO: 2066657 - RNA, 19 nt, Artificial Sequence
  Description of Artificial Sequence: Synthetic oligonucleotide
ggaguguuguuucgggagu

SEQ ID NO: 2066658 - RNA, 19 nt, Artificial Sequence
  Description of Artificial Sequence: Synthetic oligonucleotide
ggggucccuccacugcggg

SEQ ID NO: 2066659 - RNA, 19 nt, Artificial Sequence
  Description of Artificial Sequence: Synthetic oligonucleotide
ggcugcucgacugagggcu

SEQ ID NO: 2066660 - RNA, 19 nt, Artificial Sequence
  Description of Artificial Sequence: Synthetic oligonucleotide
ccugcccugacgaucguga

SEQ ID NO: 2066661 - RNA, 19 nt, Artificial Sequence
  Description of Artificial Sequence: Synthetic oligonucleotide
guuguacgaggggcaguac

SEQ ID NO: 2066662 - RNA, 19 nt, Artificial Sequence
  Description of Artificial Sequence: Synthetic oligonucleotide
gguugccucuggcuuguuc

SEQ ID NO: 2066663 - RNA, 19 nt, Artificial Sequence
  Description of Artificial Sequence: Synthetic oligonucleotide
caucgucagcagccuccag

SEQ ID NO: 2066664 - RNA, 19 nt, Artificial Sequence
  Description of Artificial Sequence: Synthetic oligonucleotide
gcacggggcugcucgacug

SEQ ID NO: 2066665 - RNA, 19 nt, Artificial Sequence
  Description of Artificial Sequence: Synthetic oligonucleotide
gcagcgucauucccaccug

SEQ ID NO: 2066666 - RNA, 19 nt, Artificial Sequence
  Description of Artificial Sequence: Synthetic oligonucleotide
cagcuuggaaggaucacuu

SEQ ID NO: 2066667 - RNA, 19 nt, Artificial Sequence
  Description of Artificial Sequence: Synthetic oligonucleotide
cugcgggagcugcugccug

SEQ ID NO: 2066668 - RNA, 19 nt, Artificial Sequence
  Description of Artificial Sequence: Synthetic oligonucleotide
cuguaggaauacaggcgcu

SEQ ID NO: 2066669 - RNA, 19 nt, Artificial Sequence
  Description of Artificial Sequence: Synthetic oligonucleotide
cugccacucguagaaucca

SEQ ID NO: 2066670 - RNA, 19 nt, Artificial Sequence
  Description of Artificial Sequence: Synthetic oligonucleotide
gguucccagcagucaaaga

SEQ ID NO: 2066671 - RNA, 19 nt, Artificial Sequence
  Description of Artificial Sequence: Synthetic oligonucleotide
ccugaguggugaccucacc

SEQ ID NO: 2066672 - RNA, 19 nt, Artificial Sequence
  Description of Artificial Sequence: Synthetic oligonucleotide
gccacuugucuugggcucc

SEQ ID NO: 2066673 - RNA, 19 nt, Artificial Sequence
  Description of Artificial Sequence: Synthetic oligonucleotide
gacaccgcugccacucgua

SEQ ID NO: 2066674 - RNA, 19 nt, Artificial Sequence
  Description of Artificial Sequence: Synthetic oligonucleotide
guacgaggggcaguacuua

SEQ ID NO: 2066675 - RNA, 19 nt, Artificial Sequence
  Description of Artificial Sequence: Synthetic oligonucleotide
cagcgucauucccaccuga

SEQ ID NO: 2066676 - RNA, 19 nt, Artificial Sequence
  Description of Artificial Sequence: Synthetic oligonucleotide
cucaagccucuacaggaau

SEQ ID NO: 2066677 - RNA, 19 nt, Artificial Sequence
  Description of Artificial Sequence: Synthetic oligonucleotide
cucgacugagggcucuugu

SEQ ID NO: 2066678 - RNA, 19 nt, Artificial Sequence
  Description of Artificial Sequence: Synthetic oligonucleotide
caggugacaggauguucgu

SEQ ID NO: 2066679 - RNA, 19 nt, Artificial Sequence
  Description of Artificial Sequence: Synthetic oligonucleotide
ccacucguagaauccaucu

SEQ ID NO: 2066680 - RNA, 19 nt, Artificial Sequence
  Description of Artificial Sequence: Synthetic oligonucleotide
gguacaccugacucauccu

SEQ ID NO: 2066681 - RNA, 19 nt, Artificial Sequence
  Description of Artificial Sequence: Synthetic oligonucleotide
gauuucgcucaagccucua

SEQ ID NO: 2066682 - RNA, 19 nt, Artificial Sequence
  Description of Artificial Sequence: Synthetic oligonucleotide
ggcaggugacaggauguuc

SEQ ID NO: 2066683 - RNA, 19 nt, Artificial Sequence
  Description of Artificial Sequence: Synthetic oligonucleotide
ccucuggagguucccagca

SEQ ID NO: 2066684 - RNA, 19 nt, Artificial Sequence
  Description of Artificial Sequence: Synthetic oligonucleotide
gaguguuguuucgggaguu

SEQ ID NO: 2066685 - RNA, 19 nt, Artificial Sequence
  Description of Artificial Sequence: Synthetic oligonucleotide
gccucuacaggaauccacu

SEQ ID NO: 2066686 - RNA, 19 nt, Artificial Sequence
  Description of Artificial Sequence: Synthetic oligonucleotide
gcccuugugagaacaucuc

SEQ ID NO: 2066687 - RNA, 19 nt, Artificial Sequence
  Description of Artificial Sequence: Synthetic oligonucleotide
ggaaggugauauugucuau

SEQ ID NO: 2066688 - RNA, 19 nt, Artificial Sequence
  Description of Artificial Sequence: Synthetic oligonucleotide
cagcgucguccuuuuccca

SEQ ID NO: 2066689 - RNA, 19 nt, Artificial Sequence
  Description of Artificial Sequence: Synthetic oligonucleotide
caggccccaucgcauggga

SEQ ID NO: 2066690 - RNA, 19 nt, Artificial Sequence
  Description of Artificial Sequence: Synthetic oligonucleotide
cagccauugcaucauccuu

SEQ ID NO: 2066691 - RNA, 19 nt, Artificial Sequence
  Description of Artificial Sequence: Synthetic oligonucleotide
gccacucguagaauccauc

SEQ ID NO: 2066692 - RNA, 19 nt, Artificial Sequence
  Description of Artificial Sequence: Synthetic oligonucleotide
ccaucuaguauggcaggca

SEQ ID NO: 2066693 - RNA, 19 nt, Artificial Sequence
  Description of Artificial Sequence: Synthetic oligonucleotide
cgcugccacucguagaauc

SEQ ID NO: 2066694 - RNA, 19 nt, Artificial Sequence
  Description of Artificial Sequence: Synthetic oligonucleotide
caggaggccgcuggugaca

SEQ ID NO: 2066695 - RNA, 19 nt, Artificial Sequence
  Description of Artificial Sequence: Synthetic oligonucleotide
cacggggcugcucgacuga

SEQ ID NO: 2066696 - RNA, 19 nt, Artificial Sequence
  Description of Artificial Sequence: Synthetic oligonucleotide
guucaccacugaagaaacu

SEQ ID NO: 2066697 - RNA, 19 nt, Artificial Sequence
  Description of Artificial Sequence: Synthetic oligonucleotide
cgacaguugguaguguuga

SEQ ID NO: 2066698 - RNA, 19 nt, Artificial Sequence
  Description of Artificial Sequence: Synthetic oligonucleotide
ucgguccaggaggccgcug

SEQ ID NO: 2066699 - RNA, 19 nt, Artificial Sequence
  Description of Artificial Sequence: Synthetic oligonucleotide
gacacuccggaguguuguu

SEQ ID NO: 2066700 - RNA, 19 nt, Artificial Sequence
  Description of Artificial Sequence: Synthetic oligonucleotide
cuggaccacugggguacac

SEQ ID NO: 2066701 - RNA, 19 nt, Artificial Sequence
  Description of Artificial Sequence: Synthetic oligonucleotide
ugccugcccugacgaucgu

SEQ ID NO: 2066702 - RNA, 19 nt, Artificial Sequence
  Description of Artificial Sequence: Synthetic oligonucleotide
caggcauccuguuguggau

SEQ ID NO: 2066703 - RNA, 19 nt, Artificial Sequence
  Description of Artificial Sequence: Synthetic oligonucleotide
ccacugcgggagcugcugc

SEQ ID NO: 2066704 - RNA, 19 nt, Artificial Sequence
  Description of Artificial Sequence: Synthetic oligonucleotide
gcagucgggagagcagcac

SEQ ID NO: 2066705 - RNA, 19 nt, Artificial Sequence
  Description of Artificial Sequence: Synthetic oligonucleotide
cuggauggaaggugauauu

SEQ ID NO: 2066706 - RNA, 19 nt, Artificial Sequence
  Description of Artificial Sequence: Synthetic oligonucleotide
gcgucguccuuuucccaga

SEQ ID NO: 2066707 - RNA, 19 nt, Artificial Sequence
  Description of Artificial Sequence: Synthetic oligonucleotide
cacugggguacaccugacu

SEQ ID NO: 2066708 - RNA, 19 nt, Artificial Sequence
  Description of Artificial Sequence: Synthetic oligonucleotide
gcucaagccucuacaggaa

SEQ ID NO: 2066709 - RNA, 19 nt, Artificial Sequence
  Description of Artificial Sequence: Synthetic oligonucleotide
ugcucgacugagggcucuu

SEQ ID NO: 2066710 - RNA, 19 nt, Artificial Sequence
  Description of Artificial Sequence: Synthetic oligonucleotide
ccaagccagcaggagccag

SEQ ID NO: 2066711 - RNA, 19 nt, Artificial Sequence
  Description of Artificial Sequence: Synthetic oligonucleotide
cugaugagucugcauccuu

SEQ ID NO: 2066712 - RNA, 19 nt, Artificial Sequence
  Description of Artificial Sequence: Synthetic oligonucleotide
gcgucauucccaccugacu

SEQ ID NO: 2066713 - RNA, 19 nt, Artificial Sequence
  Description of Artificial Sequence: Synthetic oligonucleotide
ccggaguguuguuucggga

SEQ ID NO: 2066714 - RNA, 19 nt, Artificial Sequence
  Description of Artificial Sequence: Synthetic oligonucleotide
ccauuuggagacugccucu

SEQ ID NO: 2066715 - RNA, 19 nt, Artificial Sequence
  Description of Artificial Sequence: Synthetic oligonucleotide
aggccgcuggugacaccuc

SEQ ID NO: 2066716 - RNA, 19 nt, Artificial Sequence
  Description of Artificial Sequence: Synthetic oligonucleotide
gcucgacugagggcucuug

SEQ ID NO: 2066717 - RNA, 19 nt, Artificial Sequence
  Description of Artificial Sequence: Synthetic oligonucleotide
cccuugugagaacaucucu

SEQ ID NO: 2066718 - RNA, 19 nt, Artificial Sequence
  Description of Artificial Sequence: Synthetic oligonucleotide
ggccaucgucagcagccuc

SEQ ID NO: 2066719 - RNA, 19 nt, Artificial Sequence
  Description of Artificial Sequence: Synthetic oligonucleotide
cgucauucccaccugacuu

SEQ ID NO: 2066720 - RNA, 19 nt, Artificial Sequence
  Description of Artificial Sequence: Synthetic oligonucleotide
cuaguauggcaggcauccu

SEQ ID NO: 2066721 - RNA, 19 nt, Artificial Sequence
  Description of Artificial Sequence: Synthetic oligonucleotide
gugauaggcacaggcccuu

SEQ ID NO: 2066722 - RNA, 19 nt, Artificial Sequence
  Description of Artificial Sequence: Synthetic oligonucleotide
cccugacgaucgugauagg

SEQ ID NO: 2066723 - RNA, 19 nt, Artificial Sequence
  Description of Artificial Sequence: Synthetic oligonucleotide
gcgcucucccucuggaggu

SEQ ID NO: 2066724 - RNA, 19 nt, Artificial Sequence
  Description of Artificial Sequence: Synthetic oligonucleotide
cgugauaggcacaggcccu

SEQ ID NO: 2066725 - RNA, 19 nt, Artificial Sequence
  Description of Artificial Sequence: Synthetic oligonucleotide
cuacgacaguugguagugu

SEQ ID NO: 2066726 - RNA, 19 nt, Artificial Sequence
  Description of Artificial Sequence: Synthetic oligonucleotide
cguccuuuucccagaggaa

SEQ ID NO: 2066727 - RNA, 19 nt, Artificial Sequence
  Description of Artificial Sequence: Synthetic oligonucleotide
gccugcccugacgaucgug

SEQ ID NO: 2066728 - RNA, 19 nt, Artificial Sequence
  Description of Artificial Sequence: Synthetic oligonucleotide
cgaucgugauaggcacagg

SEQ ID NO: 2066729 - RNA, 19 nt, Artificial Sequence
  Description of Artificial Sequence: Synthetic oligonucleotide
caguugucccagaccuuuu

SEQ ID NO: 2066730 - RNA, 19 nt, Artificial Sequence
  Description of Artificial Sequence: Synthetic oligonucleotide
cugcccugacgaucgugau

SEQ ID NO: 2066731 - RNA, 19 nt, Artificial Sequence
  Description of Artificial Sequence: Synthetic oligonucleotide
caggcccuugugagaacau

SEQ ID NO: 2066732 - RNA, 19 nt, Artificial Sequence
  Description of Artificial Sequence: Synthetic oligonucleotide
cgucagcagccuccaguug

SEQ ID NO: 2066733 - RNA, 19 nt, Artificial Sequence
  Description of Artificial Sequence: Synthetic oligonucleotide
ccauugcaucauccuuuga

SEQ ID NO: 2066734 - RNA, 19 nt, Artificial Sequence
  Description of Artificial Sequence: Synthetic oligonucleotide
cuccacugcgggagcugcu

SEQ ID NO: 2066735 - RNA, 19 nt, Artificial Sequence
  Description of Artificial Sequence: Synthetic oligonucleotide
ggauuucgcucaagccucu

SEQ ID NO: 2066736 - RNA, 19 nt, Artificial Sequence
  Description of Artificial Sequence: Synthetic oligonucleotide
gucuagccauuuggagacu

SEQ ID NO: 2066737 - RNA, 19 nt, Artificial Sequence
  Description of Artificial Sequence: Synthetic oligonucleotide
ccaguugucccagaccuuu

SEQ ID NO: 2066738 - RNA, 19 nt, Artificial Sequence
  Description of Artificial Sequence: Synthetic oligonucleotide
gccccaucgcaugggaaua

SEQ ID NO: 2066739 - RNA, 19 nt, Artificial Sequence
  Description of Artificial Sequence: Synthetic oligonucleotide
ccaucgcaugggaauaauu

SEQ ID NO: 2066740 - RNA, 19 nt, Artificial Sequence
  Description of Artificial Sequence: Synthetic oligonucleotide
ggauguucguccgcacauu

SEQ ID NO: 2066741 - RNA, 19 nt, Artificial Sequence
  Description of Artificial Sequence: Synthetic oligonucleotide
cugcucgacugagggcucu

SEQ ID NO: 2066742 - RNA, 19 nt, Artificial Sequence
  Description of Artificial Sequence: Synthetic oligonucleotide
ugguugccucuggcuuguu

SEQ ID NO: 2066743 - RNA, 19 nt, Artificial Sequence
  Description of Artificial Sequence: Synthetic oligonucleotide
ccagacacuccggaguguu

SEQ ID NO: 2066744 - RNA, 19 nt, Artificial Sequence
  Description of Artificial Sequence: Synthetic oligonucleotide
ccccaucgcaugggaauaa

SEQ ID NO: 2066745 - RNA, 19 nt, Artificial Sequence
  Description of Artificial Sequence: Synthetic oligonucleotide
ccgcucugaugagucugca

SEQ ID NO: 2066746 - RNA, 19 nt, Artificial Sequence
  Description of Artificial Sequence: Synthetic oligonucleotide
ccgcuggugacaccucuuu

SEQ ID NO: 2066747 - RNA, 19 nt, Artificial Sequence
  Description of Artificial Sequence: Synthetic oligonucleotide
cgcucugaugagucugcau

SEQ ID NO: 2066748 - RNA, 19 nt, Artificial Sequence
  Description of Artificial Sequence: Synthetic oligonucleotide
cccaucgcaugggaauaau

SEQ ID NO: 2066749 - RNA, 19 nt, Artificial Sequence
  Description of Artificial Sequence: Synthetic oligonucleotide
ccacuugucuugggcuccu

SEQ ID NO: 2066750 - RNA, 19 nt, Artificial Sequence
  Description of Artificial Sequence: Synthetic oligonucleotide
cacuugucuugggcuccuu

SEQ ID NO: 2066751 - RNA, 19 nt, Artificial Sequence
  Description of Artificial Sequence: Synthetic oligonucleotide
ccgcugccacucguagaau

SEQ ID NO: 2066752 - RNA, 19 nt, Artificial Sequence
  Description of Artificial Sequence: Synthetic oligonucleotide
aauaauacaacgcaggaaa

SEQ ID NO: 2066753 - RNA, 19 nt, Artificial Sequence
  Description of Artificial Sequence: Synthetic oligonucleotide
aauaggucaauccacaucu

SEQ ID NO: 2066754 - RNA, 19 nt, Artificial Sequence
  Description of Artificial Sequence: Synthetic oligonucleotide
cacaagaugaacuucaugg

SEQ ID NO: 2066755 - RNA, 19 nt, Artificial Sequence
  Description of Artificial Sequence: Synthetic oligonucleotide
aacuucauggucuuguacg

SEQ ID NO: 2066756 - RNA, 19 nt, Artificial Sequence
  Description of Artificial Sequence: Synthetic oligonucleotide
uguuccaaauaauacaacg

SEQ ID NO: 2066757 - RNA, 19 nt, Artificial Sequence
  Description of Artificial Sequence: Synthetic oligonucleotide
ucugcaacgaucuccaagg

SEQ ID NO: 2066758 - RNA, 19 nt, Artificial Sequence
  Description of Artificial Sequence: Synthetic oligonucleotide
aaccuuuggaaauagguca

SEQ ID NO: 2066759 - RNA, 19 nt, Artificial Sequence
  Description of Artificial Sequence: Synthetic oligonucleotide
aauaggguaaaucccaaga

SEQ ID NO: 2066760 - RNA, 19 nt, Artificial Sequence
  Description of Artificial Sequence: Synthetic oligonucleotide
uucauggcagcauaguucg

SEQ ID NO: 2066761 - RNA, 19 nt, Artificial Sequence
  Description of Artificial Sequence: Synthetic oligonucleotide
aaauaggucaauccacauc

SEQ ID NO: 2066762 - RNA, 19 nt, Artificial Sequence
  Description of Artificial Sequence: Synthetic oligonucleotide
gucauuuccagcuugcccg

SEQ ID NO: 2066763 - RNA, 19 nt, Artificial Sequence
  Description of Artificial Sequence: Synthetic oligonucleotide
uccaaauaauacaacgcag

SEQ ID NO: 2066764 - RNA, 19 nt, Artificial Sequence
  Description of Artificial Sequence: Synthetic oligonucleotide
ucugugggagcccacagcg

SEQ ID NO: 2066765 - RNA, 19 nt, Artificial Sequence
  Description of Artificial Sequence: Synthetic oligonucleotide
uuggaaauaggucaaucca

SEQ ID NO: 2066766 - RNA, 19 nt, Artificial Sequence
  Description of Artificial Sequence: Synthetic oligonucleotide
ucuagcuucggauucaugu

SEQ ID NO: 2066767 - RNA, 19 nt, Artificial Sequence
  Description of Artificial Sequence: Synthetic oligonucleotide
uuagaugucacucaaucuu

SEQ ID NO: 2066768 - RNA, 19 nt, Artificial Sequence
  Description of Artificial Sequence: Synthetic oligonucleotide
augucacucaaucuucucc

SEQ ID NO: 2066769 - RNA, 19 nt, Artificial Sequence
  Description of Artificial Sequence: Synthetic oligonucleotide
gacaaagaugcccaggaag

SEQ ID NO: 2066770 - RNA, 19 nt, Artificial Sequence
  Description of Artificial Sequence: Synthetic oligonucleotide
uaaaaggagguccaggccu

SEQ ID NO: 2066771 - RNA, 19 nt, Artificial Sequence
  Description of Artificial Sequence: Synthetic oligonucleotide
agggacuaggccuuguugc

SEQ ID NO: 2066772 - RNA, 19 nt, Artificial Sequence
  Description of Artificial Sequence: Synthetic oligonucleotide
guuaaaaggagguccaggc

SEQ ID NO: 2066773 - RNA, 19 nt, Artificial Sequence
  Description of Artificial Sequence: Synthetic oligonucleotide
ucuuagaugucacucaauc

SEQ ID NO: 2066774 - RNA, 19 nt, Artificial Sequence
  Description of Artificial Sequence: Synthetic oligonucleotide
aaucccaagaacucaguga

SEQ ID NO: 2066775 - RNA, 19 nt, Artificial Sequence
  Description of Artificial Sequence: Synthetic oligonucleotide
uuguguuccaaauaauaca

SEQ ID NO: 2066776 - RNA, 19 nt, Artificial Sequence
  Description of Artificial Sequence: Synthetic oligonucleotide
aguucgggaaggcauagac

SEQ ID NO: 2066777 - RNA, 19 nt, Artificial Sequence
  Description of Artificial Sequence: Synthetic oligonucleotide
caggaaagagguaucaggg

SEQ ID NO: 2066778 - RNA, 19 nt, Artificial Sequence
  Description of Artificial Sequence: Synthetic oligonucleotide
aucccaagaacucagugag

SEQ ID NO: 2066779 - RNA, 19 nt, Artificial Sequence
  Description of Artificial Sequence: Synthetic oligonucleotide
gaugauggcacaccggaag

SEQ ID NO: 2066780 - RNA, 19 nt, Artificial Sequence
  Description of Artificial Sequence: Synthetic oligonucleotide
aggucaaugacugucuccc

SEQ ID NO: 2066781 - RNA, 19 nt, Artificial Sequence
  Description of Artificial Sequence: Synthetic oligonucleotide
aaaucccaagaacucagug

SEQ ID NO: 2066782 - RNA, 19 nt, Artificial Sequence
  Description of Artificial Sequence: Synthetic oligonucleotide
uucgggaaggcauagacaa

SEQ ID NO: 2066783 - RNA, 19 nt, Artificial Sequence
  Description of Artificial Sequence: Synthetic oligonucleotide
uucauggucuuguacgggg

SEQ ID NO: 2066784 - RNA, 19 nt, Artificial Sequence
  Description of Artificial Sequence: Synthetic oligonucleotide
ucacacaaggccaccaucc

SEQ ID NO: 2066785 - RNA, 19 nt, Artificial Sequence
  Description of Artificial Sequence: Synthetic oligonucleotide
uauccugaaaugucacucg

SEQ ID NO: 2066786 - RNA, 19 nt, Artificial Sequence
  Description of Artificial Sequence: Synthetic oligonucleotide
guuggguucaucccgaccc

SEQ ID NO: 2066787 - RNA, 19 nt, Artificial Sequence
  Description of Artificial Sequence: Synthetic oligonucleotide
uccaaguagagucuucagc

SEQ ID NO: 2066788 - RNA, 19 nt, Artificial Sequence
  Description of Artificial Sequence: Synthetic oligonucleotide
aaaaccuucuagcuuuccu

SEQ ID NO: 2066789 - RNA, 19 nt, Artificial Sequence
  Description of Artificial Sequence: Synthetic oligonucleotide
uuaaaaggagguccaggcc

SEQ ID NO: 2066790 - RNA, 19 nt, Artificial Sequence
  Description of Artificial Sequence: Synthetic oligonucleotide
ugucacucaaucuucuccc

SEQ ID NO: 2066791 - RNA, 19 nt, Artificial Sequence
  Description of Artificial Sequence: Synthetic oligonucleotide
ugaagggcggaguugaucu

SEQ ID NO: 2066792 - RNA, 19 nt, Artificial Sequence
  Description of Artificial Sequence: Synthetic oligonucleotide
aagaggaugauggcacacc

SEQ ID NO: 2066793 - RNA, 19 nt, Artificial Sequence
  Description of Artificial Sequence: Synthetic oligonucleotide
ucagcuaaagggcuucacc

SEQ ID NO: 2066794 - RNA, 19 nt, Artificial Sequence
  Description of Artificial Sequence: Synthetic oligonucleotide
uguuaaaaggagguccagg

SEQ ID NO: 2066795 - RNA, 19 nt, Artificial Sequence
  Description of Artificial Sequence: Synthetic oligonucleotide
aaagagguaucagggcgcc

SEQ ID NO: 2066796 - RNA, 19 nt, Artificial Sequence
  Description of Artificial Sequence: Synthetic oligonucleotide
uggggugauguuaaaagga

SEQ ID NO: 2066797 - RNA, 19 nt, Artificial Sequence
  Description of Artificial Sequence: Synthetic oligonucleotide
uaggguaaaucccaagaac

SEQ ID NO: 2066798 - RNA, 19 nt, Artificial Sequence
  Description of Artificial Sequence: Synthetic oligonucleotide
aaccuucuagcuuuccuug

SEQ ID NO: 2066799 - RNA, 19 nt, Artificial Sequence
  Description of Artificial Sequence: Synthetic oligonucleotide
ugucuccccaaucuucucg

SEQ ID NO: 2066800 - RNA, 19 nt, Artificial Sequence
  Description of Artificial Sequence: Synthetic oligonucleotide
cucuccacugguuuggucc

SEQ ID NO: 2066801 - RNA, 19 nt, Artificial Sequence
  Description of Artificial Sequence: Synthetic oligonucleotide
ccaaauaauacaacgcagg

SEQ ID NO: 2066802 - RNA, 19 nt, Artificial Sequence
  Description of Artificial Sequence: Synthetic oligonucleotide
augauggcacaccggaagc

SEQ ID NO: 2066803 - RNA, 19 nt, Artificial Sequence
  Description of Artificial Sequence: Synthetic oligonucleotide
aacucagugagcaugugca

SEQ ID NO: 2066804 - RNA, 19 nt, Artificial Sequence
  Description of Artificial Sequence: Synthetic oligonucleotide
uaggcguuccucuacuggg

SEQ ID NO: 2066805 - RNA, 19 nt, Artificial Sequence
  Description of Artificial Sequence: Synthetic oligonucleotide
ucaaugucuggcugcagag

SEQ ID NO: 2066806 - RNA, 19 nt, Artificial Sequence
  Description of Artificial Sequence: Synthetic oligonucleotide
aaauaauacaacgcaggaa

SEQ ID NO: 2066807 - RNA, 19 nt, Artificial Sequence
  Description of Artificial Sequence: Synthetic oligonucleotide
aaguagagucuucagcuaa

SEQ ID NO: 2066808 - RNA, 19 nt, Artificial Sequence
  Description of Artificial Sequence: Synthetic oligonucleotide
uuauccugaaaugucacuc

SEQ ID NO: 2066809 - RNA, 19 nt, Artificial Sequence
  Description of Artificial Sequence: Synthetic oligonucleotide
agugagcaugugcaagacc

SEQ ID NO: 2066810 - RNA, 19 nt, Artificial Sequence
  Description of Artificial Sequence: Synthetic oligonucleotide
cuucauggcagcauaguuc

SEQ ID NO: 2066811 - RNA, 19 nt, Artificial Sequence
  Description of Artificial Sequence: Synthetic oligonucleotide
uucggauucauguuggguu

SEQ ID NO: 2066812 - RNA, 19 nt, Artificial Sequence
  Description of Artificial Sequence: Synthetic oligonucleotide
cuugguuccucuagcuucg

SEQ ID NO: 2066813 - RNA, 19 nt, Artificial Sequence
  Description of Artificial Sequence: Synthetic oligonucleotide
cugaggucgucuaagauca

SEQ ID NO: 2066814 - RNA, 19 nt, Artificial Sequence
  Description of Artificial Sequence: Synthetic oligonucleotide
ucacucucugcaacgaucu

SEQ ID NO: 2066815 - RNA, 19 nt, Artificial Sequence
  Description of Artificial Sequence: Synthetic oligonucleotide
uguaaagaggccgggauuc

SEQ ID NO: 2066816 - RNA, 19 nt, Artificial Sequence
  Description of Artificial Sequence: Synthetic oligonucleotide
aaggucauuuccagcuugc

SEQ ID NO: 2066817 - RNA, 19 nt, Artificial Sequence
  Description of Artificial Sequence: Synthetic oligonucleotide
aaaggaggagcagccaguc

SEQ ID NO: 2066818 - RNA, 19 nt, Artificial Sequence
  Description of Artificial Sequence: Synthetic oligonucleotide
aaccacaggaaagagguau

SEQ ID NO: 2066819 - RNA, 19 nt, Artificial Sequence
  Description of Artificial Sequence: Synthetic oligonucleotide
aucagggcgccuugguucc

SEQ ID NO: 2066820 - RNA, 19 nt, Artificial Sequence
  Description of Artificial Sequence: Synthetic oligonucleotide
uagcuucggauucauguug

SEQ ID NO: 2066821 - RNA, 19 nt, Artificial Sequence
  Description of Artificial Sequence: Synthetic oligonucleotide
auaggguaaaucccaagaa

SEQ ID NO: 2066822 - RNA, 19 nt, Artificial Sequence
  Description of Artificial Sequence: Synthetic oligonucleotide
uuccuuauccugaaauguc

SEQ ID NO: 2066823 - RNA, 19 nt, Artificial Sequence
  Description of Artificial Sequence: Synthetic oligonucleotide
gaagcgucgccacaagaug

SEQ ID NO: 2066824 - RNA, 19 nt, Artificial Sequence
  Description of Artificial Sequence: Synthetic oligonucleotide
caaauaauacaacgcagga

SEQ ID NO: 2066825 - RNA, 19 nt, Artificial Sequence
  Description of Artificial Sequence: Synthetic oligonucleotide
aggguaaaucccaagaacu

SEQ ID NO: 2066826 - RNA, 19 nt, Artificial Sequence
  Description of Artificial Sequence: Synthetic oligonucleotide
aaagaggccgggauuccac

SEQ ID NO: 2066827 - RNA, 19 nt, Artificial Sequence
  Description of Artificial Sequence: Synthetic oligonucleotide
auagacaaagaugcccagg

SEQ ID NO: 2066828 - RNA, 19 nt, Artificial Sequence
  Description of Artificial Sequence: Synthetic oligonucleotide
agcuaaagggcuucaccag

SEQ ID NO: 2066829 - RNA, 19 nt, Artificial Sequence
  Description of Artificial Sequence: Synthetic oligonucleotide
uaggucaauccacaucugu

SEQ ID NO: 2066830 - RNA, 19 nt, Artificial Sequence
  Description of Artificial Sequence: Synthetic oligonucleotide
gaaccuuuggaaauagguc

SEQ ID NO: 2066831 - RNA, 19 nt, Artificial Sequence
  Description of Artificial Sequence: Synthetic oligonucleotide
cucauguucacucucugca

SEQ ID NO: 2066832 - RNA, 19 nt, Artificial Sequence
  Description of Artificial Sequence: Synthetic oligonucleotide
aggacaugcagggcuaggc

SEQ ID NO: 2066833 - RNA, 19 nt, Artificial Sequence
  Description of Artificial Sequence: Synthetic oligonucleotide
cucuaucuccucaauggug

SEQ ID NO: 2066834 - RNA, 19 nt, Artificial Sequence
  Description of Artificial Sequence: Synthetic oligonucleotide
gaggugaaccacaggaaag

SEQ ID NO: 2066835 - RNA, 19 nt, Artificial Sequence
  Description of Artificial Sequence: Synthetic oligonucleotide
cuaggcguuccucuacugg

SEQ ID NO: 2066836 - RNA, 19 nt, Artificial Sequence
  Description of Artificial Sequence: Synthetic oligonucleotide
ucuccaaguagagucuuca

SEQ ID NO: 2066837 - RNA, 19 nt, Artificial Sequence
  Description of Artificial Sequence: Synthetic oligonucleotide
uggcacaccggaagcgucg

SEQ ID NO: 2066838 - RNA, 19 nt, Artificial Sequence
  Description of Artificial Sequence: Synthetic oligonucleotide
acaguaggucugugggagc

SEQ ID NO: 2066839 - RNA, 19 nt, Artificial Sequence
  Description of Artificial Sequence: Synthetic oligonucleotide
cacaguaggucugugggag

SEQ ID NO: 2066840 - RNA, 19 nt, Artificial Sequence
  Description of Artificial Sequence: Synthetic oligonucleotide
cucugcaacgaucuccaag

SEQ ID NO: 2066841 - RNA, 19 nt, Artificial Sequence
  Description of Artificial Sequence: Synthetic oligonucleotide
cauguucacucucugcaac

SEQ ID NO: 2066842 - RNA, 19 nt, Artificial Sequence
  Description of Artificial Sequence: Synthetic oligonucleotide
acuuccccugcucaauguc

SEQ ID NO: 2066843 - RNA, 19 nt, Artificial Sequence
  Description of Artificial Sequence: Synthetic oligonucleotide
ugauggcacaccggaagcg

SEQ ID NO: 2066844 - RNA, 19 nt, Artificial Sequence
  Description of Artificial Sequence: Synthetic oligonucleotide
uuguacggggaggugaacc

SEQ ID NO: 2066845 - RNA, 19 nt, Artificial Sequence
  Description of Artificial Sequence: Synthetic oligonucleotide
ucgucuaagaucacaucuu

SEQ ID NO: 2066846 - RNA, 19 nt, Artificial Sequence
  Description of Artificial Sequence: Synthetic oligonucleotide
ucguccuuggagaggaggu

SEQ ID NO: 2066847 - RNA, 19 nt, Artificial Sequence
  Description of Artificial Sequence: Synthetic oligonucleotide
ucuuguacggggaggugaa

SEQ ID NO: 2066848 - RNA, 19 nt, Artificial Sequence
  Description of Artificial Sequence: Synthetic oligonucleotide
ucaaugacugucuccccaa

SEQ ID NO: 2066849 - RNA, 19 nt, Artificial Sequence
  Description of Artificial Sequence: Synthetic oligonucleotide
cauagacaaagaugcccag

SEQ ID NO: 2066850 - RNA, 19 nt, Artificial Sequence
  Description of Artificial Sequence: Synthetic oligonucleotide
ggaaaggaggagcagccag

SEQ ID NO: 2066851 - RNA, 19 nt, Artificial Sequence
  Description of Artificial Sequence: Synthetic oligonucleotide
uguuggguucaucccgacc

SEQ ID NO: 2066852 - RNA, 19 nt, Artificial Sequence
  Description of Artificial Sequence: Synthetic oligonucleotide
aaaugucacucggucuguc

SEQ ID NO: 2066853 - RNA, 19 nt, Artificial Sequence
  Description of Artificial Sequence: Synthetic oligonucleotide
ggaggaguugugaagggcg

SEQ ID NO: 2066854 - RNA, 19 nt, Artificial Sequence
  Description of Artificial Sequence: Synthetic oligonucleotide
ugcaacgaucuccaagguc

SEQ ID NO: 2066855 - RNA, 19 nt, Artificial Sequence
  Description of Artificial Sequence: Synthetic oligonucleotide
aacuuccccugcucaaugu

SEQ ID NO: 2066856 - RNA, 19 nt, Artificial Sequence
  Description of Artificial Sequence: Synthetic oligonucleotide
ucggauucauguuggguuc

SEQ ID NO: 2066857 - RNA, 19 nt, Artificial Sequence
  Description of Artificial Sequence: Synthetic oligonucleotide
gucgucuaagaucacaucu

SEQ ID NO: 2066858 - RNA, 19 nt, Artificial Sequence
  Description of Artificial Sequence: Synthetic oligonucleotide
ucauggucuuguacgggga

SEQ ID NO: 2066859 - RNA, 19 nt, Artificial Sequence
  Description of Artificial Sequence: Synthetic oligonucleotide
aggccgggauuccacgugc

SEQ ID NO: 2066860 - RNA, 19 nt, Artificial Sequence
  Description of Artificial Sequence: Synthetic oligonucleotide
uuccccugcucaaugucug

SEQ ID NO: 2066861 - RNA, 19 nt, Artificial Sequence
  Description of Artificial Sequence: Synthetic oligonucleotide
uccagagacacaguagguc

SEQ ID NO: 2066862 - RNA, 19 nt, Artificial Sequence
  Description of Artificial Sequence: Synthetic oligonucleotide
gcaacgaucuccaagguca

SEQ ID NO: 2066863 - RNA, 19 nt, Artificial Sequence
  Description of Artificial Sequence: Synthetic oligonucleotide
ugguuugguccagagacac

SEQ ID NO: 2066864 - RNA, 19 nt, Artificial Sequence
  Description of Artificial Sequence: Synthetic oligonucleotide
ggcauagacaaagaugccc

SEQ ID NO: 2066865 - RNA, 19 nt, Artificial Sequence
  Description of Artificial Sequence: Synthetic oligonucleotide
uuccuuggggugauguuaa

SEQ ID NO: 2066866 - RNA, 19 nt, Artificial Sequence
  Description of Artificial Sequence: Synthetic oligonucleotide
gucaauccacaucuguaac

SEQ ID NO: 2066867 - RNA, 19 nt, Artificial Sequence
  Description of Artificial Sequence: Synthetic oligonucleotide
ucauguucacucucugcaa

SEQ ID NO: 2066868 - RNA, 19 nt, Artificial Sequence
  Description of Artificial Sequence: Synthetic oligonucleotide
gauuccacgugcucaggga

SEQ ID NO: 2066869 - RNA, 19 nt, Artificial Sequence
  Description of Artificial Sequence: Synthetic oligonucleotide
uccugaaaugucacucggu

SEQ ID NO: 2066870 - RNA, 19 nt, Artificial Sequence
  Description of Artificial Sequence: Synthetic oligonucleotide
gaggaguugugaagggcgg

SEQ ID NO: 2066871 - RNA, 19 nt, Artificial Sequence
  Description of Artificial Sequence: Synthetic oligonucleotide
ugaaggacaugcagggcua

SEQ ID NO: 2066872 - RNA, 19 nt, Artificial Sequence
  Description of Artificial Sequence: Synthetic oligonucleotide
uguauuccuuauccugaaa

SEQ ID NO: 2066873 - RNA, 19 nt, Artificial Sequence
  Description of Artificial Sequence: Synthetic oligonucleotide
cuuuggaaauaggucaauc

SEQ ID NO: 2066874 - RNA, 19 nt, Artificial Sequence
  Description of Artificial Sequence: Synthetic oligonucleotide
cucagugagcaugugcaag

SEQ ID NO: 2066875 - RNA, 19 nt, Artificial Sequence
  Description of Artificial Sequence: Synthetic oligonucleotide
cuccccaaucuucucgucc

SEQ ID NO: 2066876 - RNA, 19 nt, Artificial Sequence
  Description of Artificial Sequence: Synthetic oligonucleotide
agcagcuugugaccccuuc

SEQ ID NO: 2066877 - RNA, 19 nt, Artificial Sequence
  Description of Artificial Sequence: Synthetic oligonucleotide
aagcgucgccacaagauga

SEQ ID NO: 2066878 - RNA, 19 nt, Artificial Sequence
  Description of Artificial Sequence: Synthetic oligonucleotide
uugugaccccuucuccaag

SEQ ID NO: 2066879 - RNA, 19 nt, Artificial Sequence
  Description of Artificial Sequence: Synthetic oligonucleotide
ggucauuuccagcuugccc

SEQ ID NO: 2066880 - RNA, 19 nt, Artificial Sequence
  Description of Artificial Sequence: Synthetic oligonucleotide
aaggacaugcagggcuagg

SEQ ID NO: 2066881 - RNA, 19 nt, Artificial Sequence
  Description of Artificial Sequence: Synthetic oligonucleotide
agcuucggauucauguugg

SEQ ID NO: 2066882 - RNA, 19 nt, Artificial Sequence
  Description of Artificial Sequence: Synthetic oligonucleotide
gacuaggccuuguugcuga

SEQ ID NO: 2066883 - RNA, 19 nt, Artificial Sequence
  Description of Artificial Sequence: Synthetic oligonucleotide
acagcgagcuccaaacuug

SEQ ID NO: 2066884 - RNA, 19 nt, Artificial Sequence
  Description of Artificial Sequence: Synthetic oligonucleotide
guauuccuuauccugaaau

SEQ ID NO: 2066885 - RNA, 19 nt, Artificial Sequence
  Description of Artificial Sequence: Synthetic oligonucleotide
acaccggaagcgucgccac

SEQ ID NO: 2066886 - RNA, 19 nt, Artificial Sequence
  Description of Artificial Sequence: Synthetic oligonucleotide
ugugaccccuucuccaagu

SEQ ID NO: 2066887 - RNA, 19 nt, Artificial Sequence
  Description of Artificial Sequence: Synthetic oligonucleotide
aggucauuuccagcuugcc

SEQ ID NO: 2066888 - RNA, 19 nt, Artificial Sequence
  Description of Artificial Sequence: Synthetic oligonucleotide
ugucacucggucuguccug

SEQ ID NO: 2066889 - RNA, 19 nt, Artificial Sequence
  Description of Artificial Sequence: Synthetic oligonucleotide
guagagucuucagcuaaag

SEQ ID NO: 2066890 - RNA, 19 nt, Artificial Sequence
  Description of Artificial Sequence: Synthetic oligonucleotide
caaagaugcccaggaagag

SEQ ID NO: 2066891 - RNA, 19 nt, Artificial Sequence
  Description of Artificial Sequence: Synthetic oligonucleotide
ggacaugcagggcuaggcg

SEQ ID NO: 2066892 - RNA, 19 nt, Artificial Sequence
  Description of Artificial Sequence: Synthetic oligonucleotide
ugucuggcugcagagggcu

SEQ ID NO: 2066893 - RNA, 19 nt, Artificial Sequence
  Description of Artificial Sequence: Synthetic oligonucleotide
aguugugaagggcggaguu

SEQ ID NO: 2066894 - RNA, 19 nt, Artificial Sequence
  Description of Artificial Sequence: Synthetic oligonucleotide
aagggcggaguugaucucu

SEQ ID NO: 2066895 - RNA, 19 nt, Artificial Sequence
  Description of Artificial Sequence: Synthetic oligonucleotide
gcuaaagggcuucaccagc

SEQ ID NO: 2066896 - RNA, 19 nt, Artificial Sequence
  Description of Artificial Sequence: Synthetic oligonucleotide
uggaggaguugugaagggc

SEQ ID NO: 2066897 - RNA, 19 nt, Artificial Sequence
  Description of Artificial Sequence: Synthetic oligonucleotide
auaguucgggaaggcauag

SEQ ID NO: 2066898 - RNA, 19 nt, Artificial Sequence
  Description of Artificial Sequence: Synthetic oligonucleotide
aguaggucugugggagccc

SEQ ID NO: 2066899 - RNA, 19 nt, Artificial Sequence
  Description of Artificial Sequence: Synthetic oligonucleotide
cuccaaguagagucuucag

SEQ ID NO: 2066900 - RNA, 19 nt, Artificial Sequence
  Description of Artificial Sequence: Synthetic oligonucleotide
cuucauggucuuguacggg

SEQ ID NO: 2066901 - RNA, 19 nt, Artificial Sequence
  Description of Artificial Sequence: Synthetic oligonucleotide
ucauggcagcauaguucgg

SEQ ID NO: 2066902 - RNA, 19 nt, Artificial Sequence
  Description of Artificial Sequence: Synthetic oligonucleotide
gucacucaaucuucucccc

SEQ ID NO: 2066903 - RNA, 19 nt, Artificial Sequence
  Description of Artificial Sequence: Synthetic oligonucleotide
caaugucuggcugcagagg

SEQ ID NO: 2066904 - RNA, 19 nt, Artificial Sequence
  Description of Artificial Sequence: Synthetic oligonucleotide
ggggugauguuaaaaggag

SEQ ID NO: 2066905 - RNA, 19 nt, Artificial Sequence
  Description of Artificial Sequence: Synthetic oligonucleotide
cagagacacaguaggucug

SEQ ID NO: 2066906 - RNA, 19 nt, Artificial Sequence
  Description of Artificial Sequence: Synthetic oligonucleotide
aggcauagacaaagaugcc

SEQ ID NO: 2066907 - RNA, 19 nt, Artificial Sequence
  Description of Artificial Sequence: Synthetic oligonucleotide
aggggccuugacccugugc

SEQ ID NO: 2066908 - RNA, 19 nt, Artificial Sequence
  Description of Artificial Sequence: Synthetic oligonucleotide
uaaagaggccgggauucca

SEQ ID NO: 2066909 - RNA, 19 nt, Artificial Sequence
  Description of Artificial Sequence: Synthetic oligonucleotide
uuugguccagagacacagu

SEQ ID NO: 2066910 - RNA, 19 nt, Artificial Sequence
  Description of Artificial Sequence: Synthetic oligonucleotide
gguaaaucccaagaacuca

SEQ ID NO: 2066911 - RNA, 19 nt, Artificial Sequence
  Description of Artificial Sequence: Synthetic oligonucleotide
cuuagaugucacucaaucu

SEQ ID NO: 2066912 - RNA, 19 nt, Artificial Sequence
  Description of Artificial Sequence: Synthetic oligonucleotide
auguuaaaaggagguccag

SEQ ID NO: 2066913 - RNA, 19 nt, Artificial Sequence
  Description of Artificial Sequence: Synthetic oligonucleotide
agaucacaucuuuuguguu

SEQ ID NO: 2066914 - RNA, 19 nt, Artificial Sequence
  Description of Artificial Sequence: Synthetic oligonucleotide
caguaggucugugggagcc

SEQ ID NO: 2066915 - RNA, 19 nt, Artificial Sequence
  Description of Artificial Sequence: Synthetic oligonucleotide
cucuacugggccuaggugu

SEQ ID NO: 2066916 - RNA, 19 nt, Artificial Sequence
  Description of Artificial Sequence: Synthetic oligonucleotide
ccuugguuccucuagcuuc

SEQ ID NO: 2066917 - RNA, 19 nt, Artificial Sequence
  Description of Artificial Sequence: Synthetic oligonucleotide
ggucaauccacaucuguaa

SEQ ID NO: 2066918 - RNA, 19 nt, Artificial Sequence
  Description of Artificial Sequence: Synthetic oligonucleotide
uuggguucaucccgacccu

SEQ ID NO: 2066919 - RNA, 19 nt, Artificial Sequence
  Description of Artificial Sequence: Synthetic oligonucleotide
uacugggccuagguguggg

SEQ ID NO: 2066920 - RNA, 19 nt, Artificial Sequence
  Description of Artificial Sequence: Synthetic oligonucleotide
accacaggaaagagguauc

SEQ ID NO: 2066921 - RNA, 19 nt, Artificial Sequence
  Description of Artificial Sequence: Synthetic oligonucleotide
cuaagaucacaucuuuugu

SEQ ID NO: 2066922 - RNA, 19 nt, Artificial Sequence
  Description of Artificial Sequence: Synthetic oligonucleotide
ccuccucugucacacaagg

SEQ ID NO: 2066923 - RNA, 19 nt, Artificial Sequence
  Description of Artificial Sequence: Synthetic oligonucleotide
guugugaagggcggaguug

SEQ ID NO: 2066924 - RNA, 19 nt, Artificial Sequence
  Description of Artificial Sequence: Synthetic oligonucleotide
uccagcuugcccgccagca

SEQ ID NO: 2066925 - RNA, 19 nt, Artificial Sequence
  Description of Artificial Sequence: Synthetic oligonucleotide
cauguuggguucaucccga

SEQ ID NO: 2066926 - RNA, 19 nt, Artificial Sequence
  Description of Artificial Sequence: Synthetic oligonucleotide
cuagcuuuccuugggguga

SEQ ID NO: 2066927 - RNA, 19 nt, Artificial Sequence
  Description of Artificial Sequence: Synthetic oligonucleotide
cagggacuaggccuuguug

SEQ ID NO: 2066928 - RNA, 19 nt, Artificial Sequence
  Description of Artificial Sequence: Synthetic oligonucleotide
gcauagacaaagaugccca

SEQ ID NO: 2066929 - RNA, 19 nt, Artificial Sequence
  Description of Artificial Sequence: Synthetic oligonucleotide
ugaggcugaggucgucuaa

SEQ ID NO: 2066930 - RNA, 19 nt, Artificial Sequence
  Description of Artificial Sequence: Synthetic oligonucleotide
gagguaucagggcgccuug

SEQ ID NO: 2066931 - RNA, 19 nt, Artificial Sequence
  Description of Artificial Sequence: Synthetic oligonucleotide
cagccuguucuccagguca

SEQ ID NO: 2066932 - RNA, 19 nt, Artificial Sequence
  Description of Artificial Sequence: Synthetic oligonucleotide
agcagccuguucuccaggu

SEQ ID NO: 2066933 - RNA, 19 nt, Artificial Sequence
  Description of Artificial Sequence: Synthetic oligonucleotide
ccuucuagcuuuccuuggg

SEQ ID NO: 2066934 - RNA, 19 nt, Artificial Sequence
  Description of Artificial Sequence: Synthetic oligonucleotide
ggaggugaaccacaggaaa

SEQ ID NO: 2066935 - RNA, 19 nt, Artificial Sequence
  Description of Artificial Sequence: Synthetic oligonucleotide
cauaguucgggaaggcaua

SEQ ID NO: 2066936 - RNA, 19 nt, Artificial Sequence
  Description of Artificial Sequence: Synthetic oligonucleotide
ucuccucaaugguguauuc

SEQ ID NO: 2066937 - RNA, 19 nt, Artificial Sequence
  Description of Artificial Sequence: Synthetic oligonucleotide
uucagcuaaagggcuucac

SEQ ID NO: 2066938 - RNA, 19 nt, Artificial Sequence
  Description of Artificial Sequence: Synthetic oligonucleotide
agagguaucagggcgccuu

SEQ ID NO: 2066939 - RNA, 19 nt, Artificial Sequence
  Description of Artificial Sequence: Synthetic oligonucleotide
cagcuugugaccccuucuc

SEQ ID NO: 2066940 - RNA, 19 nt, Artificial Sequence
  Description of Artificial Sequence: Synthetic oligonucleotide
agcauaguucgggaaggca

SEQ ID NO: 2066941 - RNA, 19 nt, Artificial Sequence
  Description of Artificial Sequence: Synthetic oligonucleotide
ccaaguagagucuucagcu

SEQ ID NO: 2066942 - RNA, 19 nt, Artificial Sequence
  Description of Artificial Sequence: Synthetic oligonucleotide
agagggcuguaaagaggcc

SEQ ID NO: 2066943 - RNA, 19 nt, Artificial Sequence
  Description of Artificial Sequence: Synthetic oligonucleotide
ccuuauccugaaaugucac

SEQ ID NO: 2066944 - RNA, 19 nt, Artificial Sequence
  Description of Artificial Sequence: Synthetic oligonucleotide
ucggucuguccuguggaca

SEQ ID NO: 2066945 - RNA, 19 nt, Artificial Sequence
  Description of Artificial Sequence: Synthetic oligonucleotide
cccacagcgagcuccaaac

SEQ ID NO: 2066946 - RNA, 19 nt, Artificial Sequence
  Description of Artificial Sequence: Synthetic oligonucleotide
uugacccugugcugcuggc

SEQ ID NO: 2066947 - RNA, 19 nt, Artificial Sequence
  Description of Artificial Sequence: Synthetic oligonucleotide
gcgagcuccaaacuuggac

SEQ ID NO: 2066948 - RNA, 19 nt, Artificial Sequence
  Description of Artificial Sequence: Synthetic oligonucleotide
agaggccgggauuccacgu

SEQ ID NO: 2066949 - RNA, 19 nt, Artificial Sequence
  Description of Artificial Sequence: Synthetic oligonucleotide
aggucgucuaagaucacau

SEQ ID NO: 2066950 - RNA, 19 nt, Artificial Sequence
  Description of Artificial Sequence: Synthetic oligonucleotide
ucgggaaggcauagacaaa

SEQ ID NO: 2066951 - RNA, 19 nt, Artificial Sequence
  Description of Artificial Sequence: Synthetic oligonucleotide
ggaguugugaagggcggag

SEQ ID NO: 2066952 - RNA, 19 nt, Artificial Sequence
  Description of Artificial Sequence: Synthetic oligonucleotide
cuuauccugaaaugucacu

SEQ ID NO: 2066953 - RNA, 19 nt, Artificial Sequence
  Description of Artificial Sequence: Synthetic oligonucleotide
aggucaauccacaucugua

SEQ ID NO: 2066954 - RNA, 19 nt, Artificial Sequence
  Description of Artificial Sequence: Synthetic oligonucleotide
aggucuuuccagccucuau

SEQ ID NO: 2066955 - RNA, 19 nt, Artificial Sequence
  Description of Artificial Sequence: Synthetic oligonucleotide
agcgggccguuccucaugu

SEQ ID NO: 2066956 - RNA, 19 nt, Artificial Sequence
  Description of Artificial Sequence: Synthetic oligonucleotide
gauucauguuggguucauc

SEQ ID NO: 2066957 - RNA, 19 nt, Artificial Sequence
  Description of Artificial Sequence: Synthetic oligonucleotide
cugaaaugucacucggucu

SEQ ID NO: 2066958 - RNA, 19 nt, Artificial Sequence
  Description of Artificial Sequence: Synthetic oligonucleotide
cagcuugcccgccagcauc

SEQ ID NO: 2066959 - RNA, 19 nt, Artificial Sequence
  Description of Artificial Sequence: Synthetic oligonucleotide
gacaggggccuugacccug

SEQ ID NO: 2066960 - RNA, 19 nt, Artificial Sequence
  Description of Artificial Sequence: Synthetic oligonucleotide
agguaucagggcgccuugg

SEQ ID NO: 2066961 - RNA, 19 nt, Artificial Sequence
  Description of Artificial Sequence: Synthetic oligonucleotide
caaguagagucuucagcua

SEQ ID NO: 2066962 - RNA, 19 nt, Artificial Sequence
  Description of Artificial Sequence: Synthetic oligonucleotide
aucccgacccuggccagcg

SEQ ID NO: 2066963 - RNA, 19 nt, Artificial Sequence
  Description of Artificial Sequence: Synthetic oligonucleotide
gaagggcggaguugaucuc

SEQ ID NO: 2066964 - RNA, 19 nt, Artificial Sequence
  Description of Artificial Sequence: Synthetic oligonucleotide
gcuucggauucauguuggg

SEQ ID NO: 2066965 - RNA, 19 nt, Artificial Sequence
  Description of Artificial Sequence: Synthetic oligonucleotide
cugguuugguccagagaca

SEQ ID NO: 2066966 - RNA, 19 nt, Artificial Sequence
  Description of Artificial Sequence: Synthetic oligonucleotide
gguucaucccgacccuggc

SEQ ID NO: 2066967 - RNA, 19 nt, Artificial Sequence
  Description of Artificial Sequence: Synthetic oligonucleotide
gaaaggaggagcagccagu

SEQ ID NO: 2066968 - RNA, 19 nt, Artificial Sequence
  Description of Artificial Sequence: Synthetic oligonucleotide
cucuagcuucggauucaug

SEQ ID NO: 2066969 - RNA, 19 nt, Artificial Sequence
  Description of Artificial Sequence: Synthetic oligonucleotide
cagcauaguucgggaaggc

SEQ ID NO: 2066970 - RNA, 19 nt, Artificial Sequence
  Description of Artificial Sequence: Synthetic oligonucleotide
ggucugugggagcccacag

SEQ ID NO: 2066971 - RNA, 19 nt, Artificial Sequence
  Description of Artificial Sequence: Synthetic oligonucleotide
uccacugguuugguccaga

SEQ ID NO: 2066972 - RNA, 19 nt, Artificial Sequence
  Description of Artificial Sequence: Synthetic oligonucleotide
uccacgugcucagggacua

SEQ ID NO: 2066973 - RNA, 19 nt, Artificial Sequence
  Description of Artificial Sequence: Synthetic oligonucleotide
cacaaggccaccauccuuu

SEQ ID NO: 2066974 - RNA, 19 nt, Artificial Sequence
  Description of Artificial Sequence: Synthetic oligonucleotide
ucgccacaagaugaacuuc

SEQ ID NO: 2066975 - RNA, 19 nt, Artificial Sequence
  Description of Artificial Sequence: Synthetic oligonucleotide
ugaggucgucuaagaucac

SEQ ID NO: 2066976 - RNA, 19 nt, Artificial Sequence
  Description of Artificial Sequence: Synthetic oligonucleotide
uuccucuacugggccuagg

SEQ ID NO: 2066977 - RNA, 19 nt, Artificial Sequence
  Description of Artificial Sequence: Synthetic oligonucleotide
gucgccacaagaugaacuu

SEQ ID NO: 2066978 - RNA, 19 nt, Artificial Sequence
  Description of Artificial Sequence: Synthetic oligonucleotide
uaguucgggaaggcauaga

SEQ ID NO: 2066979 - RNA, 19 nt, Artificial Sequence
  Description of Artificial Sequence: Synthetic oligonucleotide
gauggcacaccggaagcgu

SEQ ID NO: 2066980 - RNA, 19 nt, Artificial Sequence
  Description of Artificial Sequence: Synthetic oligonucleotide
ggucgucuaagaucacauc

SEQ ID NO: 2066981 - RNA, 19 nt, Artificial Sequence
  Description of Artificial Sequence: Synthetic oligonucleotide
gugaagggcggaguugauc

SEQ ID NO: 2066982 - RNA, 19 nt, Artificial Sequence
  Description of Artificial Sequence: Synthetic oligonucleotide
ggcggaguugaucucucca

SEQ ID NO: 2066983 - RNA, 19 nt, Artificial Sequence
  Description of Artificial Sequence: Synthetic oligonucleotide
aggaguugugaagggcgga

SEQ ID NO: 2066984 - RNA, 19 nt, Artificial Sequence
  Description of Artificial Sequence: Synthetic oligonucleotide
ccacaagaugaacuucaug

SEQ ID NO: 2066985 - RNA, 19 nt, Artificial Sequence
  Description of Artificial Sequence: Synthetic oligonucleotide
guaggucugugggagccca

SEQ ID NO: 2066986 - RNA, 19 nt, Artificial Sequence
  Description of Artificial Sequence: Synthetic oligonucleotide
gaagcagcuugugaccccu

SEQ ID NO: 2066987 - RNA, 19 nt, Artificial Sequence
  Description of Artificial Sequence: Synthetic oligonucleotide
aagagguaucagggcgccu

SEQ ID NO: 2066988 - RNA, 19 nt, Artificial Sequence
  Description of Artificial Sequence: Synthetic oligonucleotide
cuagcuucggauucauguu

SEQ ID NO: 2066989 - RNA, 19 nt, Artificial Sequence
  Description of Artificial Sequence: Synthetic oligonucleotide
cuacugggccuaggugugg

SEQ ID NO: 2066990 - RNA, 19 nt, Artificial Sequence
  Description of Artificial Sequence: Synthetic oligonucleotide
cuuccccugcucaaugucu

SEQ ID NO: 2066991 - RNA, 19 nt, Artificial Sequence
  Description of Artificial Sequence: Synthetic oligonucleotide
cacaccggaagcgucgcca

SEQ ID NO: 2066992 - RNA, 19 nt, Artificial Sequence
  Description of Artificial Sequence: Synthetic oligonucleotide
aggucugugggagcccaca

SEQ ID NO: 2066993 - RNA, 19 nt, Artificial Sequence
  Description of Artificial Sequence: Synthetic oligonucleotide
uaggucugugggagcccac

SEQ ID NO: 2066994 - RNA, 19 nt, Artificial Sequence
  Description of Artificial Sequence: Synthetic oligonucleotide
agggcggaguugaucucuc

SEQ ID NO: 2066995 - RNA, 19 nt, Artificial Sequence
  Description of Artificial Sequence: Synthetic oligonucleotide
ccagaaccuuuggaaauag

SEQ ID NO: 2066996 - RNA, 19 nt, Artificial Sequence
  Description of Artificial Sequence: Synthetic oligonucleotide
ccagagacacaguaggucu

SEQ ID NO: 2066997 - RNA, 19 nt, Artificial Sequence
  Description of Artificial Sequence: Synthetic oligonucleotide
guacggggaggugaaccac

SEQ ID NO: 2066998 - RNA, 19 nt, Artificial Sequence
  Description of Artificial Sequence: Synthetic oligonucleotide
cauuuccagcuugcccgcc

SEQ ID NO: 2066999 - RNA, 19 nt, Artificial Sequence
  Description of Artificial Sequence: Synthetic oligonucleotide
gucuccccaaucuucucgu

SEQ ID NO: 2067000 - RNA, 19 nt, Artificial Sequence
  Description of Artificial Sequence: Synthetic oligonucleotide
uccuuggggugauguuaaa

SEQ ID NO: 2067001 - RNA, 19 nt, Artificial Sequence
  Description of Artificial Sequence: Synthetic oligonucleotide
agcuugcccgccagcaucu

SEQ ID NO: 2067002 - RNA, 19 nt, Artificial Sequence
  Description of Artificial Sequence: Synthetic oligonucleotide
gcuaggcguuccucuacug

SEQ ID NO: 2067003 - RNA, 19 nt, Artificial Sequence
  Description of Artificial Sequence: Synthetic oligonucleotide
cuuguacggggaggugaac

SEQ ID NO: 2067004 - RNA, 19 nt, Artificial Sequence
  Description of Artificial Sequence: Synthetic oligonucleotide
ucccgacccuggccagcgg

SEQ ID NO: 2067005 - RNA, 19 nt, Artificial Sequence
  Description of Artificial Sequence: Synthetic oligonucleotide
cgugcucagggacuaggcc

SEQ ID NO: 2067006 - RNA, 19 nt, Artificial Sequence
  Description of Artificial Sequence: Synthetic oligonucleotide
ggacuaggccuuguugcug
